United States Patent Application Publication US 2009/0119022 A1 - sequence listing, part 12

SEQ ID NO: 19896 - DNA, 1389 bp, Emericella nidulans
ctttttatactaattcaacttatcctgccacagttgctctccttcctcaacaccagcttcatgatgcctcgcggcggctttcatccagtagaactccgtgtccaagttcttactttatcagctatcggatttagtacagagaagatctcaaaatctttgaatctctctcctcgtacggtccagagcatcgtaaagaaaggcagagatcgtggctaccggccggaagtaagcctgcgcgtgcagcttgaatttgttgaggatagaaagcgatctggccggcctgttgagattactgaagctactcagaatactgttattacttcagtaactgcagatcgagcagggcgcgagaaattatcagaaattcttgcttatgaagctggtatctcccattcttctgttctttgtatccttcattctcatggctttgttattgcaaaaccttcctggaagcctggtctgactgaagctgcttgtcttaggcgtcttgaattctgccttgcccaccaacattggacattagaagactggaaacgcgtgatctttaccgacgagactggtgttattcttggccaccgccgcggagcaatacgagtgtggaggactgtgaaagattcacatacaaggaattgtgtacggaggcgctggaaggcctgctctgacttcatggtatggggttgcttctcatataataagaagggccctttacatatctacaagccggagactgctgccatgcggaagcaggcagatatagagattgaagccatgaatcgtgagctggaacctctatgccgggaggaatgggagttggctacaggtctttctcgtgttcatttacgcccaaatcgcggccgtgttcctaaatggaattggaacgagaagaacggtaagcttatatgtaaaggtaaaggggggattgattggtggagatatcaaacagtttgctcccttatctctataattctctattatagagtagttaagcacgtgctaattacttattttactgcctaggaagtccttaaacctcttcttattccatttgcaaaagaatgcatgattgagcgcctaaatactattgttttagaggatagcgcgcctgcccactgtcactgaatccagcagcatgtctataaagcagaagatgtgcaaaagatccttgactggcctggcaattcaccagatctcaacgcaattgagccgtgctgggcttggatgaagaagcgtacaacatcccgcggtgcgccccgcgataagaagacaggagaagcagaatagaggcaggcttgggcggatctcccacaggagactatacaacactggattgagcgtctaattcgtcatattcagattgttatcgagctagaagggggtaataaatacaag

SEQ ID NO: 19897 - DNA, 1389 bp, Emericella nidulans
cgcacccagaccgtatcacagctgtcgaaatatgatcggaaatctagaacagcagctaattatggtcaactactagaaaagcctgaccaggagcatgatcatgaagaggatgaccaggaggaggaagttgatgaggttgtcttggaggatatgaaaaagctcgaagacaactttccagggatttcagatcgcttccgtttggtgaataggattggtgaaggtattgtctgcaatgcaccttcatttaccatacggcacgcccggaacacctggatcgcctgactaaacttataatctggtttataggcactttctctactgtatacaaggccgaagatctcctatacgaccactaccgaaatgattgggatgtatttcaagatactccgagagatgaatcgacaaattcgccgtcaaaacgtcgtcgagtagaagacgagaacgggaatacgatacccatcaggcgaacgaaaccacgatatgttgcgctgaaaaagatatacgtcacaagcagcccactgcgcatccagaatgaactggaactattacatgatctccggggatgccgatcagtttgccctctgataactgcattccgtcatcacgatcaagtggtcgccgttctgccctttttcccgcatacagactttcgacttcagtaccgaacgttcatggtggctgatatgcgccattactttcgatcgttgttcactgcattacactcggttcataagcacaatatactgcaccgcgatatcaagccaaccaactttttgtacaatccggacttacgggaaggcgttttggtggacttcggtttagcagagcgcgaaggctccgagtatacagggacatgtctctgcacaagcacgagccatatacgtcgcgcgcgttacacccagagttaccactatacccactgtgcctcttccggcctcgctataggctatccgaaaagtgactctcggccgtcaaggcgtgccaatcgtgccgggacgcgagggtttcgtgcacctgaggtcctgttcaagtgcacctcgcaaacaaccaaaatagatatgtggtctgccggcgtgattctactaacattgcttggtcgtcggtttccattcttcaactcagccgacgacgtcgacgcactgatagaaatggcgagcatattcggcacccgccgcatgaaaaatgccgctgccatgcacggccagatatttgaaaccaatattccgaccatcggagaaaaaggttatagctgggaaaagcttgtgaaatggtctagctgtgtagaagagctgacagagagtgagaaacaagctacccgactgttagcaggattgatggaactggatccatccaaacgtctaaatgctaaagaggctatgcagcacgaat

SEQ ID NO: 19898 - DNA, 1389 bp, Emericella nidulans
ctttttatactaattcaacttatcctgccacagttgctctccttcctcaacaccagcttcatgatgcctcgcggcggctttcatccagtagaactccgtgtccaagttcttactttatcagctatcggatttagtacagagaagatctcaaaatctttgaatctctctcctcgtacggtccagagcatcgtaaagaaaggcagagatcgtggctaccggccggaagtaagcctgcgcgtgcagcttgaatttgttgaggatagaaagtgatctggccggcctgttgagattactgaagctacttagaatactgttattacttcagtaactgcagatcaagcagggcgcgagaaattatcagaaattcttgcttatgaagctggtatctcccattcttctgttctttgtatcctttattctcatggctttgttattgcaaaaccttcctggaagcctggtctgactgaagctgcttgtcttaggcgtcttgaattctgccttgcccaccaacattggacattagaagactggaaacgcgtgatctttaccgacgagactggtgttattcttggccaccgccgcggagcaatacgagtgtggaggactgtgaaagattcacatacaaggaattgtgtacggaggcgctggaaggcctgctctgacttcatggtatggggttgcttctcatataataagaagggccctttacatatctacaagccggagactgctgccatgtggaagcaggcagatatagagattgaagccatgaattgtgagctggaacctctatgccgggaggaatgggagttggctacaggtctttctcgtgttcatttacgcccaaatcgcggccgtgttcctaaatggaattggaacgagaagaatggtaagcttatacgtaaaggtaaaggggggattgattggtggagatatcaaacagtttgttcccttatctctataattctctattatagagtagttaagcacgtgctaattacttattctactgcctaggaagtccttaaacctcttcttattccatttgcaaaagaatgcatgattgagcgcccaaatactattgttttagaggatagcgcgcctgcccactgtcaccgaatccagcagcatgtctataaagcagaagacgtgcaaaagatccttgactggcctggcaattcaccggatctcaacgcaattgagccgtgctgggcttggatgaagaagcgtacaacatcccgcggtgcgccccgcgataagaagacaggagaagcagaatggaggcaggcttgggcggatctcccacaggagactatacaacactggattgagcgtctaatttgtcatattcagattgttatcgagctagaagggggtaatgaatacaag

SEQ ID NO: 19899 - DNA, 1390 bp, Emericella nidulans
ataagcatctcaattagcaagccgtgggaacagagtggaatcttcaagatctggattagaacgcgggcgggcctttcggtctgcttcagtagtatatattctgtccgtcttgctcagaatgtctcgtagtctccaatcttccctaaaactacaccacactactctacacaactttacattactacatacttaactcctgctcctattcttcttgctcttcctattttccctcctgcctgctcttgtaacaacacaatggactcctccaaactcttcaccccactcaaggtgggcaacatccagctcgcccaccgcattaccctccccccaatgacacgatttcgcgtcgacgaaggccatattccccaagaccaggtcgccgagtactacgcgcagcgcgccgcggtccccggcaccctgctcatcaccgaagcaacgctcatctcgacacggccgggcgtgtatacgcacgtcccgggcctctggagcaaggagcagatcgcgcagtggcgcaaggtcacggacgccgtgcatgccaagggctccttcatctacaatcaactgtgggcgcttgggcgagtcgctgaccccgaggctacgaagaaagagcacggcgggtctgagggacgggtgattgcgccgtccgctgtgccgcttgatccaagtggggagcctcccaaggagatgagcgaggaggacattgcgggtgtgattcaggatttcgcaacggcggccaaaaacgctatcgaggctgggttcgatggcgttgagatccatggcgcgaacgggtacctcgttgaccagttcatccaaaaggccgcgaacaagcggagtgaccggtggggtggcagcgtagagaaccgtgcgcgcttcccactggaagtgatccgagctgttgtcgatgcgattggcgctgagcgcacagcgattcgatacagcccgtggagcacgtttcagggaatgggggttgatccggacgaagagcagattgcgcagtttgcgtacctcgcaaagaagacggccgaattcaagcttgcgtttgtgcatcttgttgagggacggattgcaggcaataccgagacggatgagaacgggggccggaacctgcatttcttctttgatgcgtacgggcgtgctggcccgattatggtcgccggtgggtatgtcggcgagactgcgcgagaagctgcggatgtccagtacaaggactacgatgtgatgatcgccatcgggaggccatggaccgcgaacccggaccttcccttcaaggttaagaaggggatcccgttgcggccgtatgagagggagcacttctataccgtgcgcagcccgaagggatacattgattacgactttagcgaggagttcaaggctgccactggaactcggc

SEQ ID NO: 19900 - DNA, 1393 bp, Emericella nidulans
tgttcccatacgcggcctgagatgattatcccttggcgtcttcccaaggacaaagtgcaccttcctgactcagcctacgtagttgcacaaccttgtgggggaaaaccgatacaaagcgttcagtttaacgcaaaaaacaagcctctggtcatagtgacagcaataaacggacagttacactgaagcacagtagtggctcatagcagcggttgggagaacccgtggccacctctgtagcgatccatgcacatcgcagcttggtgacatcggtgggatgaaacgaccaagaatgcagcatggagaatccacgagagatgacataggccgccagcaacagaacccagcagcatttcttggaccctgactcagaaatctcataagagccaatcatagagaaaaccggccaacgcaccgctccagctcctcaccacagcgtccgtcgtacggagtcctgccgagtttaggagcaattaccctagtcgatcccatatggcaccgtggtcagagagctacccaagtccctggcggaagccgagaccgatggatttcccgcagcattccttgcacgcattagaacgatggtgcctttgtcgctgtaaaatggcacaattgacaaaaattgagattcgaggccctactgcattcgcggagtggagtccgctccgtgatcttggaactgcttggctaaccaatcctgtccgcacttgaaggaggctgtgcaatactcattacttactaaaagttcattgatatcctgagattcgctagcttgctggtcgttgtctccaatggaagctttgctttgtctggactgctccaactagacgagatggcgtcgccagggtctgttccggcgataactttcgatcgcgtttctgtacgctgctcgtccgtgttgctcccagccgctaatgatgtgtaggaaacacccacagctgaaaatgatataccgagtcagagtcccgatggtacgcgcgagcgctctcacagcaatttgaccgcgatcggtagcgacttcactggacgggatagagcgatgagcggaagcaccatggccaccagcagtgccggcctcgaagtcccaaaaggaaaagagaaactatcttcaagtacagcgccaagcgtgttttcatcggacgagcaagaacgctttgcgccctgatccaggaaccgagacggactttcacgtcgacaacaacccgtttgcatactcaccaggacagctcaacaaactactcaacccaaagtcgcttcctgcatttgttgctttgggtggattgccgggtctggcaaatgggcttcgaaccgacttgagcgccgggctcagcactgaggcagctggcggcgaaaaacatacacaatccaggaatgagctatttgcagaccggatccg

SEQ ID NO: 19901 - DNA, 1394 bp, Emericella nidulans
tggggatcaaggtccccatcgtgcaaggaggtaagctccttaccgtaatcgttcgaaagaccatactaatcccccagggatgatgtgggttggtcgcgccggtgagtgccaactcaatgtcctaatctccgctacctgacgcccaaagaaatgacatcagccgttgcaaatgctggaggtctcgggttcttagtatgctgggtagccagtcccttgacgacgaacatcctctgacgagacggacagacagccctcacccaaccttcgccagacgccctccgagcagaaatccgtcgctgtcgaagcatgactgataaaccggtatcgttaagccactcgaggatatttacctattgcaggctgacccggggtccctagttcggcgtcaacatcaccatgcttcccgccattaacgcccccgactacctggcctatgctaaggctgccgtccaagagggcatcaagatcatcgagaccgccggaaaccctgagcctattctcaagtacctcaagagcaacggttgtatcgtcatccacaaatgcgtatcgcttgggcatgctttgaaggcgcaggcaaagggggtagattgcatttccattgacgggtgagcttctcaatttcagcctgaataggtgagtcgaagctaacagtgcgtatagtattgaatggtacagttctcttccaactggagtgttcggaacagcgactaatatcagaggattattgcagcgctggtcacggaggcgaatgtaggtgcattccagctcgatcgtagattttgcaaactaaacccaactgaccgagtagatgatattacatctatgatcctccttggaaggtgcgctcaagagctgaagatcccattcatcgcatccggtggtttctgcgacggcaagggactggctacggcacttgtccttggagcgcaagggtaagatcgtactcgctaaaggatgatctgtgctaacatgaacaggatcaacatgggcactcgctggatgtgcacagtcgaggccccaattcatcagaatgtcaaagaagcaattgtcaagatggacgagaatggcacaatcctcgttctgcgaaagttccgcaacaccacgcgtttggcccgggtgagacttaacaagcaattcgaaatcaagttcatatgctgacgagtcgatagaacgaggtcacgctggaggtacataaaattgagaacagcaagctagaccctcaatttcaagaagtggcgcatcttatgtctggtgctcggggaagaggagtatacgagacgggtgacatcaacgcgggtgtttggtccgtcggtcttgctgccgggctgattaagtctatcccgacatgcgaagagctcgcccgtaccatcgagcgggaggcggtcgatgctctg

SEQ ID NO: 19902 - DNA, 1396 bp, Emericella nidulans
cgcgatatcgcgacttgtgtggtttcctgacatgggatttcgctaagcctgcaacagttgggttttacacacactctttggccttggtggcggatgccttccactacgtacgtgagcgtcagacaatgtatggcattgctaattagactagctaaatgatcttgttgggttcattgttgcatttgtcgctctcaaggtccgttacctcgttgacgcggtcaattatgcgccaggagtgctaaccatgatactcaggtttcgaactccgagcattcacctaaggagctctcgtttggatggcaacgagctcaaatcctgggcgcattcttcaatggaagtctgttatttgcgctgggtattagtatcttcctgcaatcaattgagcgctttatcacgttgcaccgtatgttagccgaatccggcgtgtcccttggcttacatgcattagatgtcgagaaccccaaacttatgtttattattgggtccattggactggggctgaatatcatttgtgccacattcctacatggtaacttaccttgcctgccaatccggagacacaaacttgaccggctctagaacaccatcatcatcacgacgaccaccgtcacccagattcggaggccgagcctcaagggcaaggtgattttgaacagcaacgtgagcttgaaaataaagccaaggttcgagctcatctatatgttcttgccccggtccattgacatcccgtacagcaccatgatcacaggcacacggagcacgaagaacttcccatctttggcggtcatgatttgggcatgatgggcgttttgcttcacgttgccggcgatgcggccaataacctgggtgtgatggttgctgcactagtcatttggctgacgcgttatgaggcgaggtattatgctgatcctgccacaagcatgggtattgctgcaatgatcttcctttctgcacttcccctcagtaagtcacagccttgtctatcagctgattctaaaactgacagtcctagtccggcaatccggtctcatattactcgagagtgctccaaacaaactcgatcctgcagatgtgaagcatgaccttgaaaaggtaggattcctcaattcatgctgcatggctgtgaccttatgctttgatagattcctggcgtcctatccgtccatgagctgcatatctggcgtctgaaccaacataagactcttgcatcagttcatgtcgctatgctggatcactcgatttccgaattctctgaagtatcacgtacattgcaggagtgtttccatgcctggggggtgcattcagttgccattatgccggaaatcgcaactcccttgtctgctagggccctgacccaaaatcaaagtgacataagtgggatggaggtgtcagagaa

SEQ ID NO: 19903 - DNA, 1396 bp, Emericella nidulans
ccggttcaaagccggagcttgcaactcagtacctgcagttgaccgacttcaacattgagcaggccatgcagctgtactttgaaaacgacggagcggaattaacgcgcgatccggttccatcaaattctgcagcaaacagagcatcgcgttccacaggctacgaagatgcgtcgggggtagtgcacctggactctgatgaagacgaagctcaatctacgccacgaaaccggccatcaaatacatcaacgctcgaagacgatgcagctatggcacgccgtctacaagaggaaatgtacggaggacaaagtgctgccgatgaagtgcgtgcgccgatggcccgtaccactgaaacacttgttggaccagaggtagactttgcggatgatatgcatgagagtatcttagggcaaatccggaatcgtcaacgacgcacaggtgagtataccttcattcatcgtaatagatcctgctgctaataagtttgcgtttaagatcgacctggtattttcaaccagagagatactacgtcaatatgggccggcgaagaggaggaagagtcccaccgcgaaaggctggcggcagcaacaggcggcgcctccgagagatcgagcaaaacaaatctgcttgcagaactgtaccgcccacctttcgaaatcatgtcaagattaccttgggatctcgctcgggaagatggccgtgagcatgagaagtggcttctggtgaatattcaggacccatccatctttgactgccaggttttgaaccgtgatttatggaaggacgccaacgtcaaggagaccatacaagagcatttcatatttctgcagtacaccaaggatgacccccgtgccgcgccatacctacaatattacttccaggctagtgacgtttctgataactaccctcatattgccatcgtcgacccgcggacgggtgaacaaatgaagatttggtcaggccctccggtggtgaaggctgctgattttctgatgcaacttcacgagtttctcgaccgttacagcttgaagcacaatgtccgaaacccagtggcgaaacggaaacgcgaaattaaggagaagagcattgatgctatgacagaggaagagatgttggagctagcattgaaaaacagcctcggggcgaacgctggacagtctcgaaagatggaagaccccgacgacttaacgcggagcgctggagacgtcaaaggcaaaggtagagcggtcgatgacgaggacgctgagatggatgaggcagacgaaagtgcagatgcagacgctgagacatccgcattttggtctattgcaagtgatcgaccacacaccgaacctcctactgaccctgtaacaacgacacgcattcagttccgacatcccaccggaagagtcataagacg

SEQ ID NO: 19904 - DNA, 1396 bp, Emericella nidulans
cccgttgttgttggcctgggtattctctctttaggtgcttcctggacagttgggtacttctacgtgaccgcagcgcgcgaggcgaaaagactacagagcacggctaggtctcccatcttcgagctcgtcggctctctactcacaggcctgccaaccgttcgtgcctttgggcgggagcaggcatatttgacgcgcatgtatgatctcatcgattcgtattgtcaggctctatggcacagaaaactcttcgcctcctggcgggccatctggcttagctcggtgggcgcagtggtatgtccccttctagcgtgctatttaacactggaaccatgcatcgttgacacacaagtaccgagcagttcgtcgcggctgtaacaatgatattcgtcagcgttcgcaccctcgacgcgccactggccggctttgcactcagcttcgccctcgacatgtccagcaacgtcacttggcttctgtctcagtacgcatcactcgaaattaactccaatgccgcagagcgcattgccgagtatacccagcttgatcaggaactacagtctggcgtcgatgtccccgccacctggccgagcaagggcgaagtcgaaatctctagtctcactgtcgcatatgcgccagatctcgctccggtcttacgcaacctcaacttttgcatccgcgctggcgagcgcgtcggggtcgtcgggcgcacaggagcagggaaatcgagctttgcgatgacgctctgcgctgcttggacgttcgtgaggggagcattcatattgatggtattgatattgagcatgtcaaactacaggatctgcgtgagcgtgtgggtttgatttcgcaggatcccatcatgtttgccgggacagtccgagaagtcctggacccattcaagcagtacgacgataccgagctcctcgccgcgttggagagagtaggcctgttctccttatcgccaacgcaacatccaatatcaaacgaagaccacgattcaacttcttctaacgccgccttttcgcccgctttgaccattctccagctgtcgttgtctactccaatagcagctgggggcaaaaatctctcgcaaggccaacgccaactcctctgtctcgcacgcgccttggtctctcgtccgaagatcctgatcatggatgaagcaacagccagtatagacgttgaatcggatcagcgtatccaacgggtgctgagggaggatatttgtggtgccgggtggggttgtacgttgattgttattgcgcatagattgagcacaattgcggacttcgacagggttgtcgtccttgagagaggagaagtcgtcgagatggattccccaagattattgatggggattgaggatggggtattccatgggatggtcgagggcagtggggag

SEQ ID NO: 19905 - DNA, 1396 bp, Emericella nidulans
cggctctggcttttggtgccggtctagctgagtggctgggtatattcatccaaccctattccacaaagagctaatagttggatctcaggttggacggccgtcttcgcatccgaggctacattctttgcctttctggtagactactggacaaaagacgttataccagaagctgctttacgtatgtctttccccgcacctatatgtgtaggtaatctcacaccggtctagtatccatcttcatcgtgatatgtctagcggtattctttctgccaaacacctacttcgcctggcttcattattttgggcccctggtaaaagttattcttttcgttttcttcggtataatctctctggccattagtggggggtgcagggctaactggctcggtcaaggatggcagcacttggacggacctcccagcattcaaaatggcttcgaagtatgcacccgtatataaactccatttcagtggaccggaaacttagttattgcggtttagggctttgctagtgcagctcttcttgccgtctgggccgtcggtgatcatatctatattggcgtattgggtggaggagcacggtcgccgcgctattcatggcacatgcggccaatgcggttccctggcgcgtgactgtcttttatatggtcttgattacctttgtctctgtgattgtgccattatcagaagccagactgctcggtggctctggctcgcagcctctccattcgtgatcgccatcgacaatgccggcatcaaggtggctccggacctggtcaacgcctgcatgatcattcgtatcgtggtcattgcgctagagtgtatcttcttgacttctcgcatgttgcgaacaatggccctacaaaagctcataccatcgttcatcgccgaggtcgataaaagggccgaccccgctgggcgctcatgattactggcgtggttggagttgttttgacctacatcagcctaagcggtaggtagtcgagctcacagcaataaaacggacagtgctaatctagagcagggaagggaaccgagttgctcaactgatttatcgctattactagtgcatccttcttcatcaactttgccatcgtagctcttacctccttccgcttccgcgcagccgtcaaggcacagaaaggggaccttctttacagagagctacagctggaaatcccctctttggccactgactccgatcattgttctcgtgctctccgccctactccttgtcagcctactatacatcagtataaaaccagtggtatacctctttctgctgatatcttttctttctaaggtacatacacaccaattatgcttcacaggatggcaccggtttcacggagtacaatttcttctcaaacatccttggtatcctggtcatactgata

SEQ ID NO: 19906 - DNA, 1397 bp, Emericella nidulans
tccacgacctctccgagacagatctttccaggcacgcattgcgcaggaactgcttgagtatttaactcataataattttgagcttgaaatgaagcattcacttggccaaaatactcttcgatcgccaactcaaaaggatttcaattacatcttccaatggctgtaccatcgaatcgacccgggttaccggttccaaaaggcaatggatgcggaggtcccaccaattctaaaacagctgcgctatccatacgaaaagggtatcacgaaatcgcagatagcggctgttggaggtcagaattggcctacatttttagggatgctccattggttgatggaactagcacaaatgatggatcgattcgccatgggagaatatgatgaagcctgcgcggagatgggagtggacgtctcgggagatcgaatcatcttccggttcctcacaggcgcctaccatgattggctacaagggggagaggaagaggatgacgatgctgctgcgcaaaggttgataccccacattgaacttatggctcaggagtttgagaaaggcaatgagaagtacgttcaggaaatgcaggttttggatgccgaaaacagggcactacgcgatcacattgaggagctggagaagaacgccccggatatggctaagcttgacaagcagttcagaattctcgaggacgacaagaggaaattcgaagactatattcagaacgtgcagggcaagatcgagaagtatgagagtcggattgctttcctggaggacgagatcagaaagacagagtcggagctgcaagccgcagaagaagaacgggcgggacttcaagctagcgtcgatcaacaaggcctaaccattcaagatatcgaccgcatgaacactgaacgtgaccggcttcagaggagtcttgatgatgccgtcagtcgtctggaagagacacatgcgcgtgtgatggccaaagagtccgaagccagcgcgaagctcgaggatttagaggaactcgtcaagacctacaatacgctgggataccagaacagtctcatcccgtcaactgccgtcaatgcgaacggacaagaatatgagctgggcctaaatgtgaacgagcgtagtttctccacatcgcagattggtggcattcctagcaggatctctccagaagcagataggcttctagccgagcctttcactggctatcatccagcacatctgttgaacttggaccttcgaggtattgttcgcagtaatctccaggcactccgcaaggagataaacgagcggagaaagcgtggtattgacgcggatctggaaagacggaacctgttggacaacattaaagaggccatggatgagaaacggagtgaagtcgaggccctggaacataagcgacgcacagcggagg

SEQ ID NO: 19907 - DNA, 1397 bp, Emericella nidulans; identical to SEQ ID NO: 19906

SEQ ID NO: 19908 - DNA, 1399 bp, Emericella nidulans
ccccgacgattactcgcaggcttactgcgattgtatgactgagcatcccaccatttttcacgcagtcgatggcttctctaagcaactcgaaagcaagggatacaagtacctatccgagcgggaattatggacgccgcagctcaaacgcggaggaaagtactatacgactcgcaatggaagctcgttgattgcgttctctgtcggccccgagtataagagtgggaatggcctcgctatcatcgccggccacattgatgccctcacggcgaagctcaagcccgtctcaaaacttcccaataaagctggatacattcagatgggagttgctccttatgccggcggtctgggcaagacatggtgggaccgtgatttgtctatcggcgggaaggttctcgttcgtaacgctagcaccggcaaggttgaatccaagctagtcaagttgaactggccgattgctcgcatcccaacgctagccgaacactttggcgctccttcgcaggggccattcaacaaggaaacacagatggtacctatcattggagtcgacaactctgatcttttccagtctaccactccagcggcagacgagggcatcgaacccggcacctttgcctctacgcagcccccaaaactcatcaaagtgatctccaaggaacttggaatcacaaactacagcagcattctcagctgggagctagaactttatgacagccagcctgcacgtatcggcggtattgacaaggattttatcttcgccggccgcatcgatgacaagctctgctgctacgccgcacaggaagccctcatggctacctccgaccacacctctccctcttccatcaagatggtcggttactttgatgatgaggaaattggtagcttgctccgtcagggtgcccgctccaacttcatgtctagcgtcatcgaacgcattgcacaatcctttgcaacatcatatggacccgatctccttgcccaaaccgttgcaaagagcttccttatctcttctgatgtcatccacgctgtcaatcccaacttcttgaatgtctatctcgagaaccacgcgcctcgtctcaatgtcggcgtctccgtctccgcagactcaaacggccacatgactaccgacagtgtcagctacggcttcatcaagcgcgttgctgaaaagtgcggctctcagctgcaggtctttcaaatccgaaatgactcccgaagcggcggaaccattgggcccatgaccagctcgcggattggaatgagggccattgatgtcggtatcccacagttgagcatgcatagcattcgcgccaccacagggagtcgcgatcctgggctgggtgtcaagctgtttaaggggttctttgattactttgaagaggtggatcgtgagttttctgatttt

SEQ ID NO: 19909 - DNA, 1403 bp, Emericella nidulans
  unsure (1)..(1403): unsure at all n locations
ggccgagcagacctcctcccgcgcaattacctgcacgtcttggcgccgattcatcgctggaaagaggacaagacgacatggtggcagtatttccgacgccccttccatctcttcgcatttcctaacattatcatggtttgtattgtacccgcgagcagtttgcgggacgggttctaatcaagagcaggccggcctaatctacgcatttgccaacacagcaggaatcgtctccttcaataccatctccgaaatcatgaccggtgccccgtataactggtccacggggccgacaggcctcatgttcctagcagcattggttgggtctttcatcgggtacgtaaactcactctgcgcctcactgaatgccatgactaaaccgccttcatcaaagaatggctaccggcgccctcggcgacatcctaaccctgcgccttgcccgcgcgaacggcgggtacaaagagcccgagatgcgtctctggactctgagtctaagtttcgtttacggggctgtcggatacttcatgtacgggtggtctgcgtcagatggcaaatcttgggtcttgatcgcagtcggtctgggcgggatgatcgcgcagcaggtctccgcggcgagtgtggcaaccgcttatgcgatggagtgcttcgagggggtgagttctcctctacgcgcagtatatcccatttgacactgtcgagcctgctgacctgtgtgtgcagatctcgagcgagctggttgtggtgctggcgatttgttcttcgtgtgtgaactttgccatctcgtactctgtccagccgttcattgaggcaaccgactacggacgcacgtttacctgctttggggcgctagttctatgtagtttggcgatggctggtgcaggagtgaaatgggggaagagttggcggagacgatgtgcgagcaggtactggaagtttgtgagcgagggggttgtcatttaggttgagcttagggcagtatgaagcatgaacgggtcgtgtatggggcgagtgtagcggagtacaatccagggagaagcttatntgttttgggtcgtcaatgcgttggtagttttatatcagaatatcattatgaagacaagctttaattcccctagcttgaccatcttgactacgccctgaatacggcctgaattgattgtagacctttagactaaatcttctttggctgcgctaagtggcagagacttcacaggtgtgagtcgagggtatacgcaccatacagaggcacggctggatgacaattaatggagatagaagtcatgatagacagcgggctgacttttcaattgacagaatctgagtgtgcatatagtaggaccaaagaaaccgcctaaatccacttattcagagtattcctcttcgatctggagagcatacaatgtagg

SEQ ID NO: 19910 - DNA, 1406 bp, Emericella nidulans
gcgggcgtgtcctctccatctacgaatgcgtcatctgcctttggcctcggttccggtgcgttcgcctcgttcggggcgcccaaaacacccggaggttcgtcggaggtgaagactcctggagaaaggagggagaatcccactgatcggacggcatcatccgcggagggtatcaagtcgaaggcttctgaaccccatctcaaggagcacgtcctgcgatccacttggattatctggtaccgtcctcctacccccaaatattccgactatgagaagtccaccgcaccgctcgcctcaatccattcggttgagagcttttggtcggtatactcgcacctcaaaaggccttcgctccttcctaccgtttccgactatcatatctttaagaaggggattcggccggtatgggaagacgaggccaataagaagggcggaaaatggattgtcagactgaagaagggagtggcggaccgatattgggaggatcttctcctggccatgattggtgatcagtttgcggaggccagtgacgaaatctgcggcgctgttctcagtgtgcgaagtggtgaagatgttttggccgtttggacccggatcgacggtgggcgaaacatcaagatcaggtgcgttaagcatattctactgcggaccaattttacctattaactaaatacagagagaccattaaacggttgctcgccttccccgcagacaccaacattgtctggaagagccacgatgacagcattgcccaacgctccgctattgatcaggctcgacaagagaaggccgctaacaaccaccatcatcaccacaaccatcataatcaccatcacaaccagaaccctcatcatcagtatggtggagaccgccgaaggccaacggctgatgactccacgggagataagggaaagggaccggcatcttgacatgctttagagagtctgtgttatgatcgtgtatactaagaaaacacaaaatcatggtatgatttgggtacggggcatcggggcgaacattgcgtgtgattatggcttggggttattcactatcattcttggattcttgcgctgtcgctgtttcatttcatctttagggtatccctggtgtctacccgctgatatgttgtctgacaagtaaagcatttgccaaacagctgtgcttcaggtattgtcataaatgaaaacaacgtctgtctaaagattcgttccgtctgaacggcttattaccggcccttatgggttggacactgggattgcgtaatcatatacgctcattttttccaatgtcccgagcttgaaaaatgataccatactttgtgtgattgtagaaaaacgcctcatgcgaaacaatagaggggtgggttagtattgaagacgccgatctgtaaaccgccgatcagtcttgcg

SEQ ID NO: 19911 - DNA, 1406 bp, Emericella nidulans
cgaagctgtgaccacagggtggattgtaatggcgtgttactgacggcggcaaatagtatggctacgagaattgcatatgcctttatcctccttataaactcaattgtctcgtggatcatgctcacgccatgggcgctgaaaaagcttcaacatcttacgctggactatatggagataaagtgcgacgggaaggaatgttacggctgggtcgcggttcatcgaatcaactttggtcttgggttgttccatttggttctggccctgtttttactaggtgtgaggtcgtcgaaggatggtcgtgcggctcttcagaatggtttttggggcccgaagatcgtgctctggctcttgtttgtggtcatgtcgtttttcatcccggaagcgttcttctttgtctacggacactacattgccttcttttgcgctatgcttttcttactcttgggcttgattctgcttgtcgatctcgcgcatacctgggcggagctgtgcttgcagaagattgaagagagtgattcgcggacgtggcgtgggctgctgatcggctcaacgttgggcatgtacattgcgtctatcgtgatgacgatcttgatgtatatcttctttgctaaaagtggatgctccatgaaccaggctgctatttcggtatgtttcatcccttgtttctgcggccaaagcttacgtgacagatcaacttggtggttttcttaatcatctccttcgtctcggtgcagcctgcagtccaggaaaataacccccgcgctggattggcgcaagccgccatggtgactgcttactgcacctatctgacattgtcagccgtctcaatggagcccgacgaccgccaatgcaaccctttaattcgcgctcgcggcactcgaaccgccaccatcgtcctcggtgcaatcgtcaccatggccaccattgcatataccacgactcgggccgccactcaaggctttgccctaggctccaaaggccacaactactcggagctcggtaccgacgacaacgagcatggtcttgtcacgcagcaaccctctgcccgccgtgagatgcgcgccgaggccctccgtgcggccgtcgccagcggcgctctcccagccagcgctctagacgaaagcgatgacgaggacgactacgacgtaaaggacgatgagaaggggtcaacccagtacaactactctcttttccacattatctttttcttggcaaccacctgggtcgctacgcttctgacacagaacctggacccggagtcagttgacgactttgcccccgtgggccggacctactgggcgagttgggtaaagattatcagcgcctgggtgtgctatgctatttacctgtggactttggttgccccgatcctgctcccagatcgatttgatatgtactaggtatca

SEQ ID NO: 19912 - DNA, 1407 bp, Emericella nidulans
tgctactgaagaattcatcgggacctgtcccgagtctaatatcgacgatatcaactcagccattcgcgccgccgcaacggcattcccaaaatggcgcgctctctcgggcagacagcgcggcaggatccttcgccgatggttcgatctgattgtcgagaacaaagaggatattgggaaaatcattaccgcggagaatgggaaagcgaagggcgatgcggagggcgaggcactgttttctgcggggttctttgagtggttctctgaagaggcagcgaggatttatggcgatgtcgttccgcatagtaacccgagcagtcgggtgcaggtcctcaaggagccggttggtgtgtgtggattgattacgccgtggaattttcctatggcgatgggggcgagaaaggttgctgctgctttggcggccgggtgtacagtggtcttgaagtcggatggactgacgccgtactcgtcgaatgttttggcgctgcttgcagagagggcaggtgtgccgggtggtgtgttcaatgtggtgactgcccttgagaatacgccggcgttaggcgtggcgctgtgcgagtcggataatgtgaagaagatttcgtttactgggtcaacacgagtcggcaagttgctgatgaagcagtcaagtcatacgctgaagaagttgagcttggagcttggagggaatgcgccgtttatcgtgttcgatgacgctgacctcgagactgccgtaacaagtgccgttgcttgtaagttcaaggtgactgggcagacttgcgtgtgcgcgaacaggttttatgtacaggagggcatctacgaggccttcagtaagcgcttcgtcgaggaggtgaaaaagtgccaggttggccatggactagatcctggagtgacacacggacccttgaccaacggcatcgcgaagacgcaggaacacattcaagacgctcttaacaagggggctactgtgttacttggtggcagccgcctgccgtcccttggcaagaacttccacgaacttaccatcctcggcgacgtcgacgattccatgaaggttgctagcgaagagacattcgggcccctcgcagcgctgtccaagttcaaggcagaggatgaggttgttcgtcgtgcgaacggcgtcgaggttggtctggcatcgtacttaatcaccagtgacctgggtaaagcgcatcgggtctcagaaaagctggagttcggcatggtagccatcaacaccggggttatttccgactctgctgccccgtatgtcccagttcccgttctcacagtatgaaactaacgcctagcaggtttggtggagtcaagcattctggtatgggccgcgaaggaagcaagtacggcattgacgactatttgaacattaagacaattgtcactggcggcatccacaca

SEQ ID NO: 19913 - DNA, 1409 bp, Emericella nidulans
tggctgctccccaaggctaccctctcctctgcttggagaacccccttctgggtgcgtaaatagatcccttgcatggacaagccgtttttatcccaacctgcctggcacaacaaattactgatgcttcttgtgcttcgctcagatatccaagctgtcgggtatgttgaacaaaggcgctaatttgttggcattgggcccaactaataacggcgatagtgacgactctctcctcgagaagtatggactcaaagccaacgatgctatccttgccgaagagaagcacatgggcctctacgaagaattgctccagcaccgtgatgccaagctgattgctggtggtgccgctcagaacactgctcgtggcgctcaggtaatccgccttcgtttgtgatatctgcatatgacaattgctgattcaattgctcatagtacatccttccggataactcgactctctacattggctgtgtcggtaaggacaagtacgccgacatcctccaggacgcctgcaagaaggctggtgtccacaccgagtaccgcgtcgatgatgctcagcccactggcaagtgcggtgtcattattaccggccacaaccgcagcatgtgcactcaccttgctgcagccaacgaatacaaggtggaccatctcaagcagcctcacatctggtcgcttgtcgagaaggcccagtactactatgttggtggctaccacttgacagtctgtgtccccgcgatccaggccctaggtgaagaggccgctgcgaagaacaaggtatgaaacactgggtccgtatcttacggcttgagactccgctaatcaagcctgactcattaggtctttatgctgtctctctccgctcccttcattccccagttcttcaaggaccagcttgacagtgtcctcccctacaccgactacacattctgcaacgagacagaggctgttgcttacgccgagagccacgaatggggcaccaccgacattgtcgagattgcgaagaagctggctcagctgcccaagaagaacaccaaccgctcccgaattgccgttgtgacccagggcactctgcccaccatcaccgctactgttaccaccagcggtgaagtcgaagtcaaggagttccctgtgcacgaaatttcgaaggacgccattaatgacaccaacggtgctgggtaagttttcaagctggctacgctgaacacatctgacgattcgcgctctagtgatgcttttgccggtggtttcgtcgccggagttgtgcagggcaaatcccttgaagagagcgtcgacctcggccagtggctcgcgaagttgagcatccaagagttgggaccttcgtgagttccctctttgaatatcagaagcacttaggagcactcatgctaataataacacagctaccccttccc

SEQ ID NO: 19914 - DNA, 1409 bp, Emericella nidulans
tggttaaagatacgaagttttacgacatcctcggggtaagtagcgatgctgcattctgtgcacgtttgcagcaaaataattaacggcgactgttgtaggttgacccgtcggcctccgaggcccagctgagaagcgcttacaagaagggtgccctcaagtaccaccctggtaagtgaccatatagacgagagcgaagtggagcgatcggtatcctaacgtgctttgtgcagacaagaaccccaacaacccagaggccgctgaaacattcaaggaaatgtccaaggcgtacgaagttctctccgatcctcagaagcgtaacatctacgaccaacttggtgaagagggtcttgaaggcggtggcggtgccggtggaatgggcgcggaggatctcttcgcccagttcttcggcggcggcggtggtttcggcggcatgttcggcggtggtatgcgggatcagggccccaagaaggctcgcaccattcaccacgtccacaaggtcaacctggaagatatctaccgcggcaaagtatccaagttggctctccagaagtccgtcatctgtcctacttgcgacggtcgtggtggtaaggagggcgctgtcaagacatgtgctggctgtaacggttccggtatgaagacgatgatgcgccagatgggtcccatgattcagcgcttccagactgtctgtcccgactgcaatggtgaaggagagaatatccgtgacaaggaccgctgccgcaactgccatggtaagaagactgttgtcgagcgcaaggtccttcacgtccacgttgatcgtggtgtcaagaatggccacaagatcgagttccgcggtgaaggtgaccagcttcctggcgtcatgcctggtgatgttgttttcgagattgagcagaagccccacccccgattccagcgcaaggatgacgaccttttctaccatgccgaaattgacctccttactgcgcttgctggcggaacaatcaacattgagcaccttgacgaccggtggttgtctgtaacaatcgcccctggcgaggttatcacacctggtaagtccttttcttttcgcgcgcgctccgcgcgaaactctcgtggtaccaacgtaacgcaattataggtgtcatcaaggttatcaagggccagggtatgccgtcgtaccgccaccacgatcacggtaacctctacatccagttcgacgtcaagttccccgaaaaccacgaacttagaaacctcgaacttttggagcaggttctgcctccccgacaggagacaaacaggcctcctgcggacgctatggtggaagactttgatttggaggaggttgataacagcgagcgctcacaagcacgcgctcacggggcggccagcatggacgaggatgacgatgacgttcctcctggcgctgagcg

SEQ ID NO: 19915 - DNA, 1411 bp, Emericella nidulans
cttgtgttctgccacttcatggtaagcttgaacaaaaccttcgagtattggcaagagactaactggtatagattggcatttcgagtaatcgcgagagcgccgacgactacgacgccgacatgcagctagcgaaagacctaggcatcgacgcatttgccctaaatattggagtcgatccgtacaccgacacgcagctgggctacgcctatgagtcggctgcccgcaacgatatgaaggtcttcatctcgtttgatttcaattggtaccacaccgatcaggccgctgccgtcggatcaaagatcgctcagtatgcaagcgagcctgcgcagcttatggttgacgacaaagtgtttgtgtcttcctttgcaggagacggtatcgacgtagcgcagatcgagtctagcgctggaactgacatcttctgggcacctaactaccaccctaacatgggcgactttggcgatgttgacggtgcgctgaattggatggcctgggacagtgatggcaacaacaaggcacccaagcccggtgccaatgtgacggttgccgatggtgatcgggcatatactgaagccctaggggacaagccttatgttgcgcgtaagtttgatgttctggctctcgagcactgtggctgatgaggatagctgcatcgggctggttctttacccattttggaggcgaggtatcgtacagtaagaactgggtgtttcccggtgatttgctttggtacaaccgctggcgagagattctggaactcggtcctcggtttgttgaaatcgttacctggaacgattacggagagtcgcactacattggacccttgtcgtctccgcacacagacgatggggcttcgaaatgggtaatggacatgtgagcagcattctttcattttcaatccactttgacagaccataatcctgacttctgcaggccacacaatggctggctcgaaatgtcacgccccttcatcgccgcctacaaagcaggcgagacctcgccggaccagtacattcaagacgagaagctgatctactggtaccggccgacgcccaaagacgtcgagtgcgactcaacagacaccaccatgggcggaagccctgacaactcgactggaaacttctttcgcgggcgtcctgacgggtgggagattatgcaggacgaaatctttgttgtctcgcttctcacgtctccggccacgatccaagtcacatctggggcaaaagagagcagcttcgaggcatccgctggagcaagcgcattcgccatggaaatgggggtcggggagcagacgttttcggttgttcgcgatggtgaaaccgtcatgtctggtacaagtctgaaggatattgtggacgagtgtgtttgcggcatatacaacttcaatgcgtacgtgggggttgtcccacca

SEQ ID NO: 19916 - DNA, 1411 bp, Emericella nidulans
cgcgcgcattagcggatctaaaagtggctggaaagcagtcggcaacccgtgtctctgctgataggtatcatggtattgctacgccagttccttctgcacctgcatcgaacttcactgcaaactccgtggccacaccacccccggcatataacgatgcctcagtgaagcgtctcgatgctccccagccggccttcacctcaaagcaaatgcaaaaaaccacccagcaatatacaggtaagacccataatatgctccggggcaaagcgaacccggtctcggtgtctagtcgcagccccaggcagtctcaggaagccactcgagcgccatcacccgctgctcctaggcgaagcgtaagccctcaaccgcaaccgcaacagcaaccggccactcgaggagagtcacgaatgagtcaatacagtcgcgctgcaagccccaatacaagccaataccaatcgagcagcgtgaagagtcgtcacagtcaatccccaagtgtctctactcccccacaacgcccaagcgactctccatattcgcctcatgactttgcaaagcgaagttctgcaagcgctgctccatcgccaactacaaccacagctcccagggcaccctcaccgaaggagtttgccaagcgatcttctcagagctcagcttctcgagccgcatccccgcagccacaattcaagcagcaagcctccgtccctcgagctgtatccccacagccgcaatacagacagcaagcttctgcccctcgagctgtatccccacagccgcaataccgacagcaagcttctgcccctcgagctgtatccccacagccgcaataccgacagcaagcttctgcccctcgagctgtatccccacagccgcaataccgacagcaaacgtccattccacgcgcggtctcacccaatgacttcgccaagcggccctctcagaactctatgccaagggctgtatcaccccagcctcagttccggcaacaagctcgaccttcgagcgccggtggaatggagctgcagctttcacagccggatatgtacggcagtagcggcgacggatacgcatccccgcagagggaatctagaagaccaatgtcgtactatgatggtggtagtcagcgcagtcgatccaggagtcgatcgatggcggtcgcggatccaggaagacagtttagccgcgatggccggcccattttgcactctggtatgtaccagatgtaccggccaatcatccatgtcatgcacaccttcatactaacctttactgtcctgatagcccgcgcactgtacagctacaccgctgccattcttgaagaacttggattccagaaaggtgatgtcctttccgttatccggcttcaggatgacggttggtgggaagctgaagtcactaccacccgcctaaggacggg

SEQ ID NO: 19917 - DNA, 1412 bp, Emericella nidulans
tccggtccggtctgattgtcagtcttctgtctatcggaacgcttattggtgctctctgtggtgctcctctcgctgataagctgggccggaaatggtccatcactgtctggtgtattatcctcatggtcggaatcattgttcagatttccgccccttccggtaactgggtccaaatcgtcatgggccgctggaccactggtcttggtgtcggcggatgctcccgtggttgttcccatgtaccaaggagagagtgcccccaagcacgtccgtggtgccatgatcagttcctaccagctgttcgtcacgcttggtatcttcctagcatactgtatcaaccttggaacggagagcttggatggtagtgcccaatggcgtatcactctaggtctgaccttcctgttcgcactcatccttggtctcggcatggccatgtttcctgaaagccctcgcttcaactaccgtcacggcaagattgacactgcccgtacgactatggcccgtctttatggtgtcccagagaaccacgtcgtcatcgtccgcgagctggctgaaatccaatcgcagctcgacgctgaaaaggagcagtcccagaaatggaacgaattcatcaccgccccacgcatgctgtaccgtattcttctgggtattgttctccaagctctgcagcagctcactggcgccaactacttcttctactatggtaccaccatcttccagggtgccggtatctccaactctttcatcactcaggtcattctcggagctatcaattttggaaccacctttggtggtctctacgttgttgagaactttggtcgccgcaagtccctcattgctggtgcttccttgatgttcatctgcttcatgatcttcgcctccatcggacactttatgctcgacgttgagcaccctgagaacacccccggacccggcaagggcatggttgtcgtcgcctctttcttcgttctcttctacgctacgacctggggtcccatcgtctggtccatcgttgctgagctcttcccctccaaataccgtgccaagggtatggctctcgccactgcttccaactggctttggaacttcctcattgggtatgtctataaatatcttcttatacgtaccgtactaacagttgccttagtttcttcactcccttcatcaccggagccatcgatttcgcgtacggctacgtcttcgcgggctgtctcctcgtcgctgtcttcgtggtctacttcttcgttattgagggtaaagaccgaactctcgaggagctcgactggatgtacgtcaaccacgtcaaaccctgggagagcagcaagtacgagatcccgcggatcacctaccacgatgacgctcgcggagccaggaaggagaatactgagcacgctgaagttgcttagttctcttgt

SEQ ID NO: 19918 - DNA, 1413 bp, Emericella nidulans
gcacggtccagcaggcgaatgaagcagagaagaatatcgagatatggaagatcaagaagcttatcaagcggcttgaggctgcccgaggaaatggaacatccatgatctcgcttatcatccgtatgcttttgctcctggaaccgggcgctctttgaaagcactaacatttttgcttagcccccaaggatcaagtatccagagcagcgaagatgttggctgaagaatttgtgagtttcgtcctctattatgtatgatcgagaattcctctgaccattgcctatagggcactgcctccaacattaaatcccgcgtcaaccgtctctctgtactttccgccatcacgtctacccagcaacgtctcaaactttacaacaaagtcccccccaatggtctcgttgtatactgtggtgaaattatcacttcagagggaaaggagcgtaaaattaacatcgacttcgagcccttcaagccaatcaacacgtccctatatctttgtgacaacaagtttcacaccgaagccttgagcgaattgcttgagtcggaccagaagttcggctttatcatcatggatggtaatggtgcgctctttggtactttgagtggcaatactagagaaattctccaaaagcttagcgtcgatctacccaagaaacacggccgtggtggtcagtccgcccttcgttttgcacgtctacgagaggagaagcgtcataactacgtgcgaaagattgctgagttggctgtgcaaaattttatcaccaatgacaaagtcaatgtcgccggtataattcttgctggttctgccgattttaaaaacgatttgaaccagtcagacatgtttgaccagcgtctgcaagcgaaggtcatcaaggtcgttgatgtgtcttatggcggcgagaacggtttcaatcaggcaattgaactttctgccgagactctaagcaacgtcaaattcgttcaggagaaaaagcttattggaaagtatttcgaagaaatcagccaagacacagggaaagtttgttacggtgttgaggataccctaaaggcgctggaattgggagcgtgtgaaacgctgatagtttatgagaacttggatgttactagatgggttcttaagaactcggaaggcaacgaagtcgtcgtccataccaccaaagcccaggaggaaaataaggagttcttcttggacaaggatactggcgccgaaatggaggttgtggaccaaagctccttcctcgaatggcttgcggaaaattacaaggactttggagcgactctagagtttgtttcggacaagtcgagtgaaggaaaccagtttgtcaaggggtttggtggtattggagcaatcctccgatacaaggtcaattttgagcaacttgccgattacagtgacgaggatgaattctacgatgg

SEQ ID NO: 19919 - DNA, 1414 bp, Emericella nidulans
ccgggggtgccgagtcatcgctaccacaagcacggttaatggcgtccgtgagcagccaggtcaaggctgatacgccgcaatccatcgtcgatctctccaagccgtttgatgggttaccgaagggtggcctcgctacattgcttttcggaaacaagaggaagttggcacagttagaagacgaagaggatggccacaccgaaaaacgtgtggctttggcaagccagaatggcgcgactcctatacttaccagcgcacctgaaggcctcctcccggcgcagccccaggaccctcccacaggacaacaaccgactccagagtttatccggcctgcggtggtgaacccatgtatgtccgtgagccaacttcgattagccgtaccgaaagttcgcacccacattgtacgcgctatcgactctgcaggcaagccgacagaacctcctagcacgtccggagaatcgaacaaatcgcgggtagatgttgttttcgaagctcgaaatccgtctggggctagcttaacaggacgagctgctgaccgtgagccggtccgactcactctatttcgcggcgagcagcctctttggcaggactttctcccaagaactgttctcctcgttacaggaaatcaaaatatgtggtcagccgcctgcgaagacggatcagtgtacatctggaccccggcgggccgtcgtctagtcagcgctctcgtcctcgaagcacaacccgttatcctagaatgcaacggtccttggatcctctccatatctgcagtaggcatgtgctacgtctggaacgtcgagcacctctcgtcgccacatcctccagtctctcttcagcccgtccttgatgccgccattcacaccctaggcgctcaccccagcgccgccccctccatcaccaacgcccgaatcaactccgaaggtcgcatcatcatcgccctttccaacggcgaaggatacgcctactccccatccctctacacctggcagcggctctcggaagcttggtgggccgtcggcagccaatactggaactcgaccgaagcccccgttggtaacctgcaatctgcgtcaaacacacagcagaaggacaaagatgcccgagcagccgtctcagctggcatcatcccgttcttagaacgcaacaccacaaacgagacactcctccgtggccgcgcttacttcctacaacgactcatcaaaacccttctgtcaagagaaggatacgaaagcttcgaatccagtgtttcaatcgcgcatttggagaacagactcgctggtgcgctctctcttggtgcaaaggaggaattcaggctatatctgtccatgtacgcgaaacggatcggggccgagggtctgaggggtaaagtggaggaactacttaagggtttgttaggcgggctttttgaaaacgatga

SEQ ID NO: 19920 - DNA, 1414 bp, Emericella nidulans
tgctctcagggatcttgatttttaaccagaaaggcgagaatctgatctttcgcgctttccgcaatgactgccgcccccggttagccgacatcttccgcatccaagtcatctcgaacccgcaggtgcggtctccgatcctcacgcttggatcgaccacattcagccatgtaaagcacgagaatatctacctagtcgctgtgacgaagagcaatgcgaatgcggcgctggtcttcgagttcctataccgactggtgctactgggaaagagctactttgggaaattcgacgaggaggccgtgaagaacaattttgtgttgatttatgagctgcttgatggtgccctctttccgcttcctacaatctttatagaaacagctgaggctaatagtatcttcttgtgataaacagaaattctcgacttcggctacccacagaacaccgaaactgacactctaaaaatgtacatcacaaccgagggcgtgaaatccgctataacaaataatccgtccgactcagcgcgaataacgcagcaggcaacgggcgcgctgtcctggcgccgcgcagacgtcaagtaccgcaagaacgaggccttcgtggacgtcattgaggacgtgaacctgctcatgtccgcgacggggacggttctacgtgcggatgtaaatgggcagattgtcatgcgtgcttatctgagcgggactcccgagtgcaagttcggcttgaacgaccggctgttgctcgataatgatgcggcgggtgccggggtcctccaaccccggagcaggagggaggggagttggtggacatagctcgtcgaagacaagggctgcagcgggtagtgtcactctggaggactgccagttccatcagtgcgttaagctaggccggtttgactcggatcggattattagtttcgtgccgccggacggggagttcgagcttatgcggtatcgcgcgacagaaaacgtcaaccttccgttcaaggtgcatccaattgtgcgggaaattgggacgacgaaggtcgagtacagcgtagcacttaaagcgaactactcgtcaaagctctttgcgacaaatgtcgtgatacgcattcccaccaccgttgaatacggctaaaactacggagcggacctcgcagggccgggcaaagtatgagcctgagcataacaatatcgtgtggaagatcgcacggttttctggaggctctgagtatgtactcacggctgaggcaacgctctctgcgatgacgaaccagaaggcttggagtcggccgccgctcagtctgaacttttccctcctgatgttcacgagctcagggctacttgttcgctatctaaaagtctttgagaagagcaattatagcagcgtgaagtgggtgcgatatatgaccagagcgggaagttacgagattcggtac

SEQ ID NO: 19921 - DNA, 1419 bp, Emericella nidulans
cagaacggcaccccctttcctcgctacttcagtgccatcagtcctacatttcaattccccgtccgcactacgacagccgcatttgtcttcgtcctgctctatgggctgctctacctagcttccacaacggccttcaactcaataatcacctctgcagtgctgtttctgaatatcacgtatgcggtaccgcagggaattcttttgctccagcgagcacgatcactgctcaccagcagctcaaagacgaatacggatatgagcattcttcctcccaggtacctgagtcttgggccccttctcggttcactctgcaacgccttctcaatcctgtggattattgtcctgggtgtattcgtttgcctcccgcctgagattccggtgaaccttgcgtcggcaaattatacgcctgctgttgcagtcggaatctttggccttattttgctgttttgggggcttggtgggaggaagatgtttgaagggccgcaggttgattgggaggggttggagttagggttgagggtgagggtgagaggagaagcctagcaacatgaaaacatgcagtgcaggtgggcaagctggtaagtgagataactgcaaagctagattgagcgtttagggtatagggcttgatattatactcgttttgcttgccatgtcatcctactatgcatcttcaagagtaagggcctgaccgacttggaagggagaattaggtccatcacgcaggcgcaatctggcctttatcagtcatatagctggctacacctttataaaggcatgtttgtcctttcctcgatttgtttctggcggtcatgtttgagaactagtctgtggagtaggagctagccctaactgcccgtagccgcaaccctgagctgatagaccgttcattcacatcttgcttagcttcatccactctagacacatgcaccagtctcttgtattcagtattccggctctgcatgcgttctcttctttttttcttctactgcggccatggctcgagcttctttcactaacttttgctcgactcgtttctgtccgacatcttttcaactttctctgctctgttatttcttgattccgagtcgctaggttggacttgctctgcattattgtgttttctctgcctgcttgtccgtttgctcatggttgtttcttcttcaattgcattgcgccttcgctggacgaggcaagtcatctgaatatatatcctctcaaacaatgcctcaataaaaaatcaaaaatattcttcgtcctgtccacgttcactggattcagtgcgaacgacttcttcgaggtccacaccgaactccgtgccatgattgggacgactggaagcttaagtctgagccttcgtcgcaaaataccatcatgatgacaaggcttcgtttgctttcgttagtctgaaagaagacc

SEQ ID NO: 19922 - DNA, 1420 bp, Emericella nidulans
acacgccctttggccgctttctctcgtacatgacggcatggatcaacacctttgggtggtggaccttgacagcgtcgcaagtcgccttcatgaccgagttcttgctaggcatgaaaaccatgtttgatccagactgggacggtgcggacaagggctggcttcaatttgttgtctacatagctgtcgtcttcgtcctgacattgaccaatgtcgtcagttgtcggtcggaacaggtgcttccctggctgaacaatttcgtcggcgtctggttcacggcgctctttgttatcctctctcttgccctgttgatctcagtcggcgtcagatcggatttatccttccagcccgcctccttcgttttcggacaatggatgaaccgcaccggctggcccgacggcgtcgtctggttcacagggctcgtgcaggccgcgtacggccttacagccttcgacgctgtcatccacatggtcgaggaaatgccgtctccgcgccgcaacgccccgcgtgtgatctggcttgctgtcctcctcggcgcaataacaggcttcatcttcatgctgatctgtcttttctgcatccaagaagttaataccgtcgttgatgcaaacctaccatttatcgaactgatgcaggagaccgtcggtctccagggcgcagctgttttgctcgcgctgtttatcttcaacggcctgggccaggggatcagtatcttgaccacggcatcacggttgacgtggggttttgctagagacggcggcctccctttcagtccgtatctcgcgcacatcgacacaacctggaaagctcccgtccgcgctctctggatgcaaggcttcctgatcgcgctagtgggagtgctctacctcttcgccagcaccgtcctcgacgccattctcagtgtcagcactatcgctctcacggtttcctacggcattcccatcgccgctcttctatatgtcggccgggacacgcttccgccgggcccattcaggctcgggcgttggggtgcactagtcaactggattagcattgtctattgtgctgttacaactgtgtttttcttcttcccgggaggtccggacccgaagcccgcggatatgaactacgccattgcggtgtttggcgtaatgctggttgtcgctattgggttctggtgggtgcaggggaagaagatgtacctgcgcacggaggatgcaatggcacagatgatttttgcgaggaggttggaaggggaaggggttggcttaagcgttggtccggcagataagaatagatgattcacagctttgctcttagatctttcacttaaatctgagtccatcagtgtgtcagcactccttaagattcaacaatagtagtgaattactggcagatagattacttctcaaagacgagactgaggatgctgcgccaaattgcc

SEQ ID NO: 19923 - DNA, 1421 bp, Emericella nidulans
cggcactgtgggcaacctcaccccggaacaagaggccaagctccaggaattctgggtcctcttgttcaaggtgtgtggcgtccagatggatggtatagaagaaaccgagaaccgtcccccgagtcccgcacaagaaaaaaagcagccgccaaagcgcagattcggtttctttggaggaggttctcaggagaaagatgaatctaccgcagcgaacgatgctgcctccggtatcgcgtcacttacaattaccgatggagacgataagttcggcacgtcgaaggagttccagaaggctctcgctgaaatcaaaccagaggacatgcggaccgcgttctggagcatggtaaaacaggacaacccggatagcctgctgctgcgtttcctgcgggcgcggaagtgggatgttaagaaagcgctcatgatgcttatttcgaccattcgctggagactgcttgacgcgaaggtggatgaagatatcatggtcaatggggaacatcttgctttggagcaactaaagagcagcgacagtgccgaaagaaagaagggagaagactttatcaaacaattccgcctgggcaagagtttccttcacggtgtcgacaagctgggccgtccaatctgttatgttcgggtccgtttgcaccgtgccggtgatcaagacattgaggcgctggaccgatttacagtgtttacgatagaatctgctcggatgatgttggtgcctccagtggaaacagctgtaagttctgcagacgtgggctggctggaattcatctaacaagatatcagtgcgtcatcttcgatatgactgatttctcacttgcgaatatggtataatctgcgttctaggctttttgagatttgctaatcgtgcttcaggactatcacccggtaaaatttatgatcaagtgtttcgaggcgaattatcccgagtctcttggcgtagtacttatccacaaggcgccttggatcttttctagttagttcccacatttgtcgccctgacctgcaggtttaacggacttttttttttttctaggcatctggaacgttatcaagggctggctagaccctgtcgtcgctgcgaagatccagttcacaaagacacaacaagacttggaggaattcatcccaaagtcacgtatcattacagagctcgagggcgacgagaaatgggagtacaagtacattgaacctaaggagggcgagaatgataaactgaaggaaactgccaagcgcgatgaattaataactcaacgccaaaagctggccaaggaggtccaagatgcaaccgttgcttggatccttgctagcaggaaaaaggaagaagataaggctaaggaggttacggaaaagagaaaggatctcatcggacgtctgcggactcagtactggcagctcgatccttacgtccgtgcacc

SEQ ID NO: 19924 - DNA, 1423 bp, Emericella nidulans
cccgtcaagtccctatcggttgccttctggatctggaaggccatcctctttgttgccataatcagctctccagggcttggctatgatacatcgtcgagccttcttccgctcctggccaacggctcggtcgagaccgcgccagataataagaatctgtctcttccaattccgctgaaattcgtccgatgggactcgatctacttcgttcacataggccaggctgggtacgtctttgaacaggaatgggcgttcagttctgcatacgggtatctggtcaattccttgtcttgtcgtatgtctgctcccctattagtctttggatatcggttctaacttattcagtttttttcccatcgtatgattcaaagggagtagcagagttcgctatcgctgctgttgtgctgtcacatgtggcccattatctttccgtcctaacattgtaccagctctctctcagtgtctttggctatgagaccgagagaaagaggctcgtttgctttctttctgcggctctgcatatcatctctcctgctggaacattcctctctgcgccctatgcagagtctctcttctcattcttgaacattgcgggactctacagttactcgtcctccctcgttgatctcaccaagcgaaagcagttagtaagccatgtgaaactcctcatttcgggatgtttctttgcgatagctaccgctgtgcgcagtaatggcatcctcagcgggattcttctagcatatgaggtggtcgctcgccgttcgcccagagcagcccgccgtctgtgcttcgtcattacgagcggctgcatcgtcgccctggggtttgttattcctcagtacttagcgtacaccgcatactgctcgaatgatagcctctcccgaccctggtgtcactcccttgtcccaagcatttatggctgggtccaggctcattactggtaagttcttgagaagtttgctccagatttagctacatgttaatatgcgaacaggggcgtgggattattccgatactggacagtgtcaaatcttcctcttttcctactcgctttgccaatgctgcttattctctttcagtcctgcttctggactctgcgcgcaggagctccctgctggcttaaaaactctgctgaagccggtcgtcttcatttgcccgattcctcagcccaattgcttaaacaactcgctgtggtccagctcgtgcttgcgacaatggctttaactagttatcatgttcagatcattaaccggatttcgtctgggtaccctctgtggtattggtatcttgctaaccaagctttggaaatcccaaatcgatcctcgtccgtggccagatatagcagtctgttcctggtgagcttacaagcaatggtaatttatgcacttgttcaaggcgttctttttgcctcttttcttcctccggc

SEQ ID NO: 19925 - DNA, 1424 bp, Emericella nidulans
ggcaggggtcctaagtcctacgcgtacttccatgccctggaagtttcacatcatgtctttataaacatgggaacgaagaaggtctacgtcttgcccgaaggatatgaggtgaaaaataagagcttggatgatattaaatacgtcgtcgacccatactacaccaaggacgaggtcgcaaaactggacaaagtagtcacagatgcattcgacttgtcggggagacgctatcgaccaggtatatcgctccctattcctgcgattcctcagataaagctaattgatgtatctacaggctttgttggtatgaacaatatcaaggccaacgactatttgaacgtcgtggctcaggctcttgcccatgtccttcccatccgcaattactttctcctccacgagtttccacaaccaggtacacctcagctggtcctgcgttttggtacacttgtgcgcaagctctggaaccccaaggcttttcgttctcacgtgtcccctcacgaactcttgcaagaagtcgctttacgttcatccaagcggttcaccctcactcagcagtctgacccagtggaatttctatcctggtttttgaacaacctacatcttgcgcttggcggctcccgaaaaccatctaagacaccaaccagtgttgttcacgctgcttttcaaggtcatctccgaattgaaagccaggcaatcacagcacactcagatacccagaacgcccgcctggtcttcaccgaatccggtaccattaacagtcaaacgacccccttcctcattctcaccctagacctccccccaacacccctattccaatccgcgaacagggaatctatcatccctcaagtacccctcaccactctcctgaacaaatacaatggcattaccgcctccgagaaactcgcccaccgtgtccgccaccgcctcctccacccgctccccccgttatctcatgttccacatcaagcgattcagcaagaacagatttgtctcagagcgcaacccaaccatcgtcactttcccgtccccgcgctcgcttgacatgtcgccctacgtagaacccaacccagagatctggcctccgggcgagccgatcctatacgacctgttagcaaacatcatcctcgaccccatgattaccgctcccgggggaacggaggacgctgctgaaaagggcgtcaatgcagcgtcgggcggcggcgcctcgtccagcggtgccggtgcggggactgagaaggtctcgtggctcgtccagctgcatgataaagccatggctgctgagaataccagtatccagaatgagcagcatagcggggaacagcgcggtccggagtggctagagatccaggacttgtttgttaagcgcgccgagagtgagacgcttttcaccaaggaagggtatcttatggtttgggagcgaaggaggg

SEQ ID NO: 19926 - DNA, 1425 bp, Emericella nidulans
gtccgccccgggaaaggttattgtgtacggcgagcatgccgtcgtgcacggcaaggccgcagatggccgcagccatctctctccgctcatatctccttgtcaccactctcagcaagtcgcagcgcacgatcactctgaatttccgcgatacaaacttgaatcacacttgggatatcgatcaattgccctgggatcttttccaccacccgtcaaagaagaagtattactacgacctcgtcaccactcttgatcaggagctctacgatgcgattcagccccacgtcgaagatatttccccagatgcccccgaggagatgcgcaaaatccacaagcgatccgcgagcgcgtttctctaccttttcctttcactaggctctccacagagcgcgggcgccatctacaccctgcgatctacaattccgatcggtgctggtttagggagcagtgcgagtgtctgcgtatgcatgagcgctgcgctacttgtccagatccgaacccttgccggtcctcaccccgatcaacccccagatgaagcagaggtccagattgagcggatcaatcgctgggcctttgtcggtgagatgtgcattcacggaaaccccagcggggtagacaacacggtgtccgcgggcggaaaagccgtgattttcagacggggagattattccaagccgccctccgtcacctccctgcccaccttcccggaactcccgctgctccttgtcgacacgcgacagggccgctccactgccgttgaagtcgctaaagtgggagctttgcgaaaagaatggccagtggtaaccgaatcgatccttgatgcgattgacaatgtaaccgcatccgccgagaaagttatccgagaacctaaccctgagggcttgtctgagaaaactcttcagcaattaggcaccctgatccggatcaaccatggctttcttgtctctcttggcgtatcccatccgcgactagaacgaatccgcgagctcgtggattacgccgacattggctggacgaagttgaccggcgctggcggtggtggctgtgcgattaccttgttgcgccctgacctaaatgatgattctctccgccaacttaagagtcaacttcaggacgagaactttggcatatacgagactacccttggcggtgacggagtgggcgtgctttggcctgctgtcctccgcaacggaaccgacgaagaaggcggcgaggagattgaccagcaaaagtttgaaaatgccgtcggcaccgagggtattgagcgtcttgttggcgttggtgtccaggagaaacgcgagggctggaagttctggaagcgagctgttgcttgacgttccttttcaccctagcgttctacccctgctacacttgcccatacttccccattctcaacccttatactaccatttgcgcccatattattta

SEQ ID NO: 19927 - DNA, 1427 bp, Emericella nidulans
tgatctggagcagagattgaagaatcagagtccattcgtacccagccagtcagtgttagatcgcaggcatgagagccctcgttccaatggtcgttgccgccacggccctggcattctcagcgccagccctcaagccccgtctcgctgacgggctagcacgcacgcctcagatggggtcagctaattcttccctttcttgggggtccagatcgtttcactaatgccgatatagatggaacacctataatcaatataactgctttcccaacgagagtattgtgcacgagaacgcgcaagccctagtcgacaccggcctcgctgacctcggctaccgctatgtgactatcgattgcggctggggcgtcgaggacagattgcccaatggcacgatcacttggaacccggagctctttccgcagggcttcccagcgatgggtcaatatctgcatgatctgggtctactgttcggagtctacggcgactcgggtattctgctgtgtgggagtccgcccaacattacagggagcttgtgtatgtcttcttttctttgccttcttccgcttgttgccgggcgaaaatatgctgattgggttgggatgacagactacgaggatatcgatgcaagaaccttcgccgaatggggagctgattcgctgaaatgtactctataccatatccttattctctagtcttagaatgctaacaagtcagacgacaactgctactctgacgccgcaactaactacccaaacgtcaattacgcgccttcaacatccccgcacccccgttttgcaaacatgtctcgctacatccaagcccaagaccgggacatcctattccaagtatgcgaatggggtatcgacttccccgccctctggcccccggaaattggccactcgtggcgtatcgggaacgacattatacctcactggcgctccatcttccgcacgctcaaccaggccgttccgcaaaccgactttgccgggccaggccagtggccagatctagacatgttgcttgtcgggctcgatggagtgttgaccgtgcctgaggagcagacgcatttctcgctgtggagtatcctcaagagccccttgacgattggggctgcaatcccgggtatgagggcggaatcgttggagattctgagtaatgcagatgttattgcattcaaccaggacgctcttggtgtcagcgcggccttgagaaggaggtggagtgacgaagggtatgaggtatggagtgggcctttggaaggggggaggactattgcggcggtgatcaactggagggacgaggatagggagatcacgcttgatttgccggacattgggctgcagtacgctgagacactgcagaatgtctgggcggatgaaaccgtgaatggggtcaagacaagctacagcagtgttgtcgaggcgcacgga

SEQ ID NO: 19928 - DNA, 1429 bp, Emericella nidulans
ttcgtatcatcatgggccttcaagaaagtcctcattgtcggcgctacctctggaattggccgggctattgcaaccagaccgattgagaaaggcatacccgtcgtgatatccggccgccgagaagagaactgcaggagtttgttcgccaacatggcagcgacaaggtcaaaagcaaggtctttgatgtgacaaaattggacaaagtaaggagaagcatgcaatgtacaaggacaagctaacagctcaagattcccgttttcgcctctgaagtcctcatcgagaaccccgacattgaatgcgacttcgtcaattcgggcgtccagcgcccctttgacttctccaagcccgacactgtcgacctcccgatgttcgaccaggagctggtcacaaactacgcatccgccgtatacctcagcaaagccttcatcccccacttacaggcccggaaaatcagacgtcactcatttatacaacctcacagatggcccttgttccaatgatgcggtgcccgaactacggggcttccaaagctgcgctgcaccactttattctcgctctccgcacgcagctgcgagatggtctggtggtagagatctacccgcctcctgtgcagacagagctgcatgacacgaagcatcagcgatctcaagaacggacatctaattgggatgccgctggatgattttactgacgaggtgtgggcaaggctacagaaccgcgaggagcagattgctgtcgggtcagcgcaggaaatctttgacgcgtttgagattaagcggcaggggctgtataaggagatgacgaagatgttggctgggttatttaagcagtttctgaggtagatagtagttgcgtgcttgagaagaatgcgaagaatttgttgttttctcttctcctttccttcttcttccccctcctattccttttcttttttaccttgtccctttcacggtggtgggcttgagacgatttgctagctgtctactcgccatatactctgtacattcagtcaggctcggactattaattcttgctactataaaacactagatatcactgttcccctgcctcatactacaagagtacgctccagattgatccgatgctcaatgtcacgagttacagtcgttgatgctaacaggtagtattagactagaagaattagctagagaattaaaacacagtgaccgttgagcttcctagtgtaacggaccgacgttggtgccaaccttgattcgtcattccggaagtcagcaacaatcatacgagaactggcctgtacatggcttatcccggaccagagattcaattggcagttggttcctagtggactggctcgtcttaattcgggcaatgctcgaatcaagacttcgggcgtagctcgtcacactcaacataatttcccgcactttctgagtttttctaaaaa

SEQ ID NO: 19929 - DNA, 1434 bp, Emericella nidulans
cgcaggttgaaggagcgtggaacaaggatggcaagggtccttcgatctgggacacattcgggcatactccaggcaaagtcaaagacaatagcaatgcggatgacgctgtgaggttctacgacttttaccgcgaagatgttgccctgatgaagtcgtatggtgtcaacgcttatcgattctcgctatcctggtcgcgcataatcccactcggaggcgccgacgacccggtcaatgagcaagggatcaagtactaccaggacctggtagacgagctactcaataatgggattacgccattcgtaaccctctttcactgggatgttccgcaggctttggaggatcggtacgggggcatgctgaaccaggagaggttcattcctgactttgtccgctacgcgcgtgtctgtttcgaacgcctagggccaaaggtccgtcactggattacattcaatgaaacatggtgtgtactcgctggcaggttatgcggcaggtgttcatgctcctgcacggtcatcgtttcgcgaactcaatgaagagggtgattcctcgacagaaccgttcatcgtcggccacacaaaactggtgacccacggccatgtttccaagctttaccgagaggtgttccaaccgcagcagaaaggaacaattggcatcaccctccatggcaactggtcggaaccttgggatgaagacgatccgcgggaccagaaagcagcagaccgggccagggaattcgagatcgcttggttcccggaccccttatacaagacaggcgactacccagcctcaatgcgggctcaactcggggaccgtctaccgcgtttcactcccgaggagtcaaaactggtactaggaagttcagaattttacggtatgaactcgtacacgacctttttcgtgcagcacaaggatacgcctccagatatcaatgaccacaaaggcaatgtcattgttcacgatacaaacagcaaaggcgtctctcgaggcgaagagtccgatacgccttggctgcggacggcacccactggatggcgcaagctgctcaattggatttggaaccgatatcatgtgcctatatatgtcacggaaaatggcacgacagcaaaaggagagacagctcccacaccagaggtactcatcgacactttccgtatgcgattcttcgaaggctacgttggtggattggcccgtgctgtcaaagaggatggagtggatatccggtcttactttgcctggaccttcaccgacaactggggtatgttcaagttccctttccctctcgaatctgactgacacagggtagaatgggccgctggctatactgatcgatttggatgcacgttcatcgactttgattctccaatgaagactcggtatcccaagcaatcggcatattatctgaaggctctgtttgagcatttgattgcttcatag

SEQ ID NO: 19930 - DNA, 1435 bp, Emericella nidulans
ccgctgccgccgaaattgtacgcagctttgtccgtgtttcttgcacgatgccgttgaagctagatggcttcccccaggcgaagaagactggcttcgggctcgttgttgacgctgacaaggggttggttgtggtgtcgcgtgccattgtaccgtataatctgtgcgacattaacattaccgtagccgattcgataattgttgcggccaaggtcgtcttccttcaccccctacagaattactgtatcgttcagtacgatccttccctggtgcaagcgccagtccagagcgcaaagctcagcacggagtacatcaagcagggacaagacacgatctttgtcggcttcaaccagaacttccgcatcgtggtcgctaagaccgcagtcaccgatattaccacagtttcaataccagccaacgcttcggctcctagataccgtgcaatcaacttagatgcagtgacggtggatactgggctaagcggacagtgttcgaatggtgttctagtcggcgaagatggtgtggttcaggccctgtggctgaactatctgggcgaacgtacgccaaactctcacaaagatgtcgagtatcatctcggcttcgcgacgccctccttgctgccggtcgttagcaaaattcagcaaggaatcctgccaaaactacggattctgaacatggagagctacgtggtgcagatgagccaggcgcgcattatgggtgtttcagatgagtggattgagaaggtcgcccaagcaaacccgtctcgacaccagctgttcatggtgcgcaaggtcgactgtccgccgcccgagttcaattctacggcggacagcttccaagagggtgatatcatcctcactttggacggacagttgatcacacgcgtgtcagagttagacgtgatgtatgagaaggagatgcttgaggcactgattgtgcgcaacggcgaggaaatgaagatccaggtgcctaccgtttcgacggaggatctggagaccgaccgagccgtggtattctgtggcgcagtgctgcagaagccgcaccacgctgtccgtcagcagatttcgaagctgcatagcgagatctatgttagcgcaagagtacgtccatagtcgacatgtgtttacatgtgctaatgaaagcagagtcgcggatccccagcataccaatacggcctctctcctacgaatttcattaccgctgtcaatggagttccaaccccggatctcgaccgcttcgtagaggaagtcaagaagatcccggataacacatacttccgccttcgcgctgtgacatttgacaacgtgccgtgggtggttaccatgaagaagaacgaccattacgtcagactccgttccctccataaacccattaccagactgactgatattgtcctagttcccaatgtccgaatacgtcaaggacgaatccgaaccgc

SEQ ID NO: 19931 - DNA, 1436 bp, Emericella nidulans
gcctggtttggtactctacggtgacgactgtttgtgctttgggatattacaaattgtactttattcgtgcttttttttgcgacttgtgctaacgcgataatctcagatggaagcactgtcttagacgccctcagagttcctactgcgccaccgctcaaaacgctccccacgtcactgttattcgaccggtcaaaggcctcgagccgcacctgtacgactgcctagcctcaagctttcggcaagaatacccccgtggcaaacttactgtgtgtctctgtgtgtcgtctcggagcgatcctgcctacgcgactttggagaaactggtcgccgacttcccccatgtcgatgcacgtatttacgtggaggaagaggatccgctcctccagcctgaccataaacccatgtataacctcggtccgaatcccaagatccgaaacatgagtcgcgcgtatagagaggcgaagggtgatatcgtttggattgcagactgcaatgtctgggttgggaagggagtctgcgggcgcatggtggacaagttgtgcgggctcggttcaggctccagcacagaatataaattcgtgcatcatctgccagttgctgtggatgttaccggggttattggcgtagacgagcggcgtgcgctggaaacaagcggcgctgccagagtgaaggacggaaagagcgcctgccgccctggtgttttggccatgggaggtggccggctagaagaattgtttctctcgtcatcacatgccaaaatgtatactgctatcaacacggttcttatcgccccgtgcatcgtgggcaaatcaaatatgttccgacgctctcatcttgactaccttaccacgactgccagctgccaattcaacccaggcatcgattatttctcggacaatatctgcgaagaccacctgattggcgatctactgtggaagaacagagtccgtgaggagaaagaggacggtaagcacctgggcaagcatgcgctggtctttggagatctcgctttccagcccatcgcaaatatgagcgtacaatcttacatagcacgccgggtacggtggctgcgtgtcaggaaattcatcgtcatgctggcaaccctagtggagcccggcacagagtcaatactctgttcgctatacggagcatggggcgtcaccactgttttggcggagtacttccagaacaagattctctccacatggacgacatttttcaccttcttcggcttttccatcctaacatggtgcctcattgactggaccgtctatatcatgctgcactccggcaaaaccgtcgaacgcgacgagaataccccatcattcgcgcgtccgcctcagggtacaactaggcggcgcttttcacactggctggctgcctggcttggaagagagatacttgcctttccgatttggttctgggctatctggggc

SEQ ID NO: 19932 - DNA, 1436 bp, Emericella nidulans
acgccgaagaagccgtgcagccaccgacccctggtgcaggcggggacgacgctgatgccgatgataacgacgccaaacccgccgtagacaacgaaattgacaacgacaatacaaatctgaatgaaaacgaggggcagaatgaactcaatgaggataacctcggtgattcagatgacgaatcgattctctctgaagtagacgaggcgcagtttgaagattttgacccggagaatgtggatattgaagaccgtccgcagctggatatcgatgaggagaatttgaagctcattgggcggcataaaaggaagaggacggaagaggaggggacctccaagcggaagaaggagggcaggcgaaggaaaagccggcgctatgcggaggaggaagagggtggaagtgatagagaagctggcgggaagcgaaggaagtcgaagaaggcggagcttgaggaagatgaagaaacgcttgaccctgctacgcgtacgttactatagcgaggtttatccttggacatggatttgctaacggtgtacaggtcgacgaagggctctcgatcgtgctatggacgaggcgctgaagaaacctaccaagagaagagccaggaaacaggatggaattgtatgtcttcagttgttattgaatgctgtgctacagtggctaatttaagtaggatttggaacaaatggcagatgctgagatcgaggatatgcgaaaacgtatgactcacgcggcgcagatggatgctatcaaccggcgcgaaggcaaaccagccatgcacaagctcaagatgctttctgaagtcgtctcgcttctcaaccgcaatcagtatgtcaacagtctggtcgacccggaaatcaacctgctggaagcagtcaagtttttccttgagccgctagacgatgggtctcttccggcctacaacattcagcgtattttgatgactgcattgggcaagctgcccatcaacaaagagacattaattgccagtggcatcggcaaggtcgtggttttctacacgcggagcaagcgtccagagcccggtatcaagcgcatggccgagcgactactagctgagtggacacgtcctattcttcagcgaagtgacgattactccaagcgagtataccaagaagccgaattcgatcctacgtatgtcctatccccgtttctcttgttccctccgactctttgtgcatcgttatctgaccgtatttagaaaaatcacctcacgcgtcaagtcagttcaagatagcgctgcggaggcgcgcgcacgcgagctccttcctccgcgccttgctaaccgtgcgcgcgccgaaatctcgcacactagctacactgtcgttccaaaacccacggtggtgcaggagagcaagtttgcgcgaccgttgggtgctagtggtgaagatcgatttcggaagatgcgggcgcgacagatt

SEQ ID NO: 19933 - DNA, 1437 bp, Emericella nidulans
accccctccctcgcagcaggctgtttcgtcccctaaccttacggtactgcctcccctcgtgactgacacacctgtcaaaatgtcgagtcggcaacgatcgtcgtcgcacgggaaggatcgcctctcaacattttccaatctttctgtagcctctcaaagccggtcgcggcctggatcacatgtcttccctatatttcattccagcttgccctatgctctggtgcgggattttgcttatcccactatccatcctttccattacggtccgcttccaccttccgcgtctgggctctcaagccctgtaagcgaaaatcgacggttatccgaccctccagcatcctgggacagctcgcggggtcagtggtcaacacagccttggggcactgatactggtcatggacaccagcaacttccagcaatgtcatttggtgatgggccgccgtatagtgaagatgaagatctgcacagccctgtgttttctgcaccacgtcatcgcagaaacaaatctacagggagcgacctgaacgggggaggaggcaagatttctggcagtaaccattatactcgtcatatgagtattgccggggaatacgaccgtggaaggctagtcagtatgaatgcggacggcagtgagacctattatgtgaacgatgatgacgacgctgatgatgggcctgggggtgaccttgtcacatacccgccggacgagagtcgatttacttaccttggctcttatactgataatcacggttacgggcgacaggaggggtttgattcggaggaagactatgctgggacgcaccgttattcgcgcgaatttcagttttcagttggatgtccggacgaggagatgcacggaaaagcggtagcgcttttcgacttcacaagggagcacgagaatgagcttccactgactgaggggcaggtgatatttgtctcgtatcgtcatggccaagggtggcttgtcgcggaagatccgcgaactggagagagtggtttggttcccgaggagtttgttcgtttagtccgcgacattgaagggggcctcacttccttgaacggggaagctgaagctgatgatgatgatgaataccctagcccagactcaacagactcccagcaagagatcacgccgacgtttcaatcggcagttaatggagatcttgggaaccccaaaagtggcaacgaaaagggagagaatgtagctccatcagagctggggcagttatctgggggtaaacaatgatctacgttgaagattagaagagacataagccgagaagcgcaacggtccctgaccgactttcttggcagacctgatttcttgaatgttccgagagttccccggctggaactcagtctgtcgatatatctgatacatgatagagcagtcttgactgaagctgttatgacttaggaggtgggatcgtgctttga

SEQ ID NO: 19934 - DNA, 1437 bp, Emericella nidulans
ccgccctggtggccatgtactggctggcctcatatgcctacctctattggtttcatccgctgtccaagtacccggggccgccgctcgcagcggtctcagagctgtggtatgcgtcagcctggacgggcggactctggaaccgcaagatcgaggaggcgcatcgccggtacggggacattgtgcgcatcgcgccgaacgagctctcgtttgcgaccgcacaggcgtttcgcgatatctacggggcgccgtccaagactcgcaagctgttccccaagtccgaccggttctatgacaacgggcacccgaacatcgccttcgtgctggacccggaggagcacgcccgccagcacaagatcttcgcgccccagttccgcccctcggctgtgcgcacccaggagccgatcgtacacgcgcacgtcgacttctgggtggcccagatagcggcccgcggccgcagcggggccgtccctgtcgatgtctctaagtggttcgagtggttgacgtttgatatcatcggagaactcacctttggccagtcgttcaatgcgacccgcgacaacaagagccatccttgggtgtccatcctcctggacgcgacgtacagcggctccatcttcaacctgcgcaagcggctggcctttgtcggcccgctgctgcgctggatgccgtatatctcctcgaccgcgcgggcggccgttgagtccgtctcccagcatggcgccatgacgctcgccttcacgcgcaagcgcattgaatcagggcctgcacgtaacgatgtcgacgacttccttgcgcacgcgatccgtgccggtggcatgaccgacacagagctcgctgaccaggcgatggtcctgctcacggctggcgcggagaccagcgccacggcattgacagccacgctgtggtacctctcgcagccggcgcacgcacactgtctcgagcgcgtccgcaccagaggtgcgaggcgcttttgccagcccggccgacgttaccggtgacgccaccgcacggcttccctaccttaacgccgtgcttgaagagacaatgcggctgttccctccgtcgcccgtgggcccgccccgtatcagcccggccggcggcgagaccgtcgacggcaccttcgtcccaggcggagtgtatgtctcagccgacgtctggaccatccaccacgacgcacgcaccgttggcgcccgtccggacgcattcgagccagagcggtggtgcgacggccagaagccatacacggtgccctttagcatcgggccgcgcatgtgcattggcgtgactctggcgtgggtcgagatgcgcattgcattggccaaggcagtgctcgcgtttgactgggagttggcggaggacgctgttggtgggagcggggactgggtagaggaggctaggctcaagcagctgtggcagaaaccaccgctgatgatgcgg

SEQ ID NO: 19935 - DNA, 1441 bp, Emericella nidulans
ggagaccgcaccatcgctgagaccgaaatatgggagacggtcgaagggaatatctacgtaagtatgctgctggcttcgctgttggaccatcctgattgcagagcagttccccgtttcgtcgatcaaggacaaaagccttctccagccgtccgatctgtctacgttctgtccttggaaagggcatgcttcgtactggagtatcgtggtcgatggtctgctgctatccccagaccagagaaacgccccatgctgacttttgactcccaggcaaaacgattgagaacgcagtgtggtactacagcgagccgtatgatgcggccggtaatattagagatcatgtagcgttctgtgagtctttttctttctttctttctttctcttttttatttttttttattatttaaggcacttctaacgtcaccagataagaacaaggtcgacataatcgaagaacagtagatgcaaagattttcagcaaacaacagtatcatcgattatgatcaatctacagttttgacactgcgctgcttgtaaaccctccatccaccactaggttctgccccgtaatatacttggccgcgtcgctggccagaaagaccgtcgcattcgtcacgtcaaatgcatcccccatccggccgattggaatcggccgttccatgatcttccaataggcatcttcctggctattattcctctggccctcgacaagcggcgtatacacaaggcctggagagaccgaattcatccggacccccctgggagcatacatgacagcggtcactctggtaaagtgaatcactgctgccttggccgtagagcaggccacctgcggcttgccgatgtagcgtagacccgcaatagaggcattgttgactacagtgccgagcccctgtttctccatgataggcaggatcacatggcaggcaaggtaaacggtcttcaggttgagctgctactgctgatctcacagctcttccggcatggtcgccggattgccagtcgccgtcgcatcaacattgtttaccaggacatcgattcggccgtgtcttgctataacggcggctgcgactcgccgcacctcgctcaacgaggtggcgtccgcctgcaagatgtcgcaggttccccctccggtcagatcctgaccgccgtgtactctgctgcttcgaggaaaaggtcacagccaaagacctttgcgccgctgtgagcgagaagacgctcgatcgctgcgccgttgccccatatgtctgagccggggatgcgcgactggccgatgcccatgatgagggcaattttatctcgaagttcggcatattttgggaagacgttggtcatggttgggccggtgtcgagtgagactgtgtgcgacgtaagtgtgcaaggttcgccgggctggacgggttcggcaccatgcagtctttacaacacagacgcaaagccgggg

SEQ ID NO: 19936 - DNA, 1441 bp, Emericella nidulans
atgccatccgaaaaacaacatcataccctgctttatcataaacaataccacctaacaacggaccaagcagaaaccccagcgcaacggcagacccctgatacccaatggtctgccctaaattatcgagcggaacggagtccgtgaggagtgcgaggcccgccacagcgaccatagccgtcgcgccaccttgcaaaaggcgtgcgatcacaaacatgaccgttgtcttggcaatagccaggaggcccattgaggcaccgaggaagatcaggcctaggaggtaggggagacgtcgggtaggcgcgatgtcgacaaggtagccaaagagcgggcagcagaggaacgctgtcaaggcttcgctcattaggagcaggcttacccagtagccacctgtgctttgttttagctctttgttgttgatggaggatggatcataaaattacggtcttgatatggaacatgcgctcgttcagccagggctgttgggaggatcggcaccacctagacagatgtcaaccggattcgtcagagtttgaatatggttcttaccattgcatagagaaagtagccctataacaaacgtcagtaaggcgtcggatactttgcgattgacggcgattgacttactgtgaacgaggagacccaaactgtcgcaatgataaagaccgttgatgaacggaaccggaggagccaagggggccgtgtcaactgcattatgttctcttaacttttaattgatacgttgcgccctaaagatatctcgatctcttcaatggatgtactctcacagatcgcgagcaagggagcaagggatcgccgctaagcttgactactgacatcagttccccaccacgcctataaatcaccggctgcagctctccaactcaaaacacaagaagcaattccactgcctgcttatacacaatgcgctctccacacctccagtatcttcaaaaatgcctttccctcgccgagcaagctccttctcttcccacaaatttccgcgtcggcgccctcctcgtctcccgcaaagacggcgatctcatgaccgaacacgatgagcttctctcgacgggctacacaatggaattacccgggaacactcacgccgagcaatgccttctctcaaattacgcctctagaacactccgttccggaggaccgtgtgtcagaagtcctccctgacacgccaggccgcaaactagtcctctacgtgacgatggagccgtgtggaaagcgcctatcaggtaacctaccctgcgtacaacgaattatccagacaaggaagaatggacggagaggtatcgagaaggtctactttggcgtaaaggagccaaccacgtttgtaggggagtcggaggggtgcaagatgctgacagaggccgggatccagtggagggttgtgcaagggcttgagagggagatcctgacagttgcgacggcg

SEQ ID NO: 19937 - DNA, 1441 bp, Emericella nidulans
atgcggcgtctttgcctggtaccccatttactgtccgtccatcataggttctcaatggaaaaacaggctgctgactcttctgtgcaacatagggcttgcctacggccaaatgaccagcaacctaatatcacaagccgccacaatggaactcaacggtgtgcccaacgatataatcaataacctcgatcctctcgcactcataattttcatcccagtcatggaccaatttgtctatccgttcattcgcaagctcggttttaacttcacacccttgaagcgcatctacgcagggtacatggtcgcctctttttccatgatcacagccacagtaactcagcattatatttatgtccgcagcccgtgccataacagggcttcctcttgcgacgagccagcccccataagcgtctggtggcagacgatcccgtacgtgctcatcgcgctatcggaaatattcacctcgatatccggctacgagtacgcgtacacaaaggcgccgcgcaacatgaagagtattgtacaaagcttgtacctcttcacgaacgcggtaagtgccgcgatccagcagggactgacgagtttgagtgcggatccgttgttgaagtggaactacggcttcattgcggtattagcgttctttgggggccatcttttctggtatacacattggcggctggatcgggaagaagattatttaaatcacttggagccgtcaagttttctgggacggggttctgggaggaagaagcgccaggatgcggacttggagaagtagggcttgcttttcctgtccgcttcctcctagtactcctgctttgtattgtcgtcatcttctggacttgattgatcatctggccttgattaatttttgccttgatatatgcactaatgtatctgaagtgacagaatcgaattgaaaaatctatgtatttagtgtctcgtagcaccatcgtcggttcccaggtatgaagcgcggccattaaatgaattgaattaaagaattgtcgaattttgcatcattgcgcatctgatcccagacgcaatcgtcgtatccgtactctaatacgtttcttttcagaaaatcgtctatagtcgatacgccctttcggtgtctccgctcgatattggccaaagcgcgacttgcagtcattcatcaataccgctccttgttattactggctatttttatttttattagaaggcaagtccctagttaaatgcttgtatgtcgggagagaatttgaaaagtcattcttagttgtctcgccttggcctgcgaaaccactgatcacgtggcgtcaagcacacttagggagccatatcccaaaagaaaaaaagatctgaaaacaagcaaaaagcatatgcgccgatgatgcccatgataatgtacagagtgatatcttccatccagtcccaacataacaataaacccacacatccg

SEQ ID NO: 19938 - DNA, 1444 bp, Emericella nidulans
tcatttttgaagctatccagatcgcaaattgacagatcaaatcagtttttatggtgttttgaagcgctttttctgctatttttgcctccctgcctccaattctgcctccgaactgtacacgccttccttcctgcgatccttacaatgccagcgcctcatccaaatgagcttcgagttcaagtcctctcttactgggccttagggattcagccacccgatatagccaagatgcttcagatcaacgtccgtacgatatgggatatgatccagaagggccaagatcgtggctacaatcctgctcagtccatgagggttaagcttgaatatgtggaagatggcaagcgctctggccgtccgaaggagatttctgaagctacagatatggcagttcttgcatctgtcaagcaggataggaatggacgtgagaaatcttctgaaatccttgcctttgaagcaggtatatctcattcttctgttttacaaatcctccacaagcatggctttacaattgttaaaccttcttggaaacctggtctaactgaagctgcaaaggctactcgtcttaggttctgcttggatcaccaacactggactctggaggactggaaggctgttatatttaccgatgagacttctgttatccttggccaccgtcgaggctccgtacgagtttggaggactgctagagatgctcatgatccaacatgtatctgaaggcgctggaagggatcatctgacttcttggtttggggatgctttacatatgataaaaagggacctctgcatatctttgaaccagagactgcttaccaacacaagaagtcagaggtagagatagcagctctaaatgcagagctggagcctattctcagggaggaatgggagatagagacgaggctaaagcgtctgcatcttcgtggggtccctgggcgtgttcctacatggagatttactgagaaaactgggaagcttgtacgaaagagcaaaggaggagttgactggtggagataccagcaggtattctctaatagctttattctcctatattgggctaaccagcttttctcaataggaaatccttcttccacatcttattccttttgccaaggcctgcaaaatcgaacgtccagatacaaaggtattagaggatggggcccctgctcataaacaccatgctcagcgccgcatttacagcatccatgaaattgagaagatctttgactggcctggcaattcgcctgatcttaatgcaattgagccatgctggatgtggatgaagaagcgtacaacttcacgtggagcacctagggacaaaaagactggaaagacagcttggataaaggcatggaatgagctccctcaggagaagatacagggctggattgagaggcttataaggcatatccaggaggttatacaacatgatgggggtaatgagtacaag

SEQ ID NO: 19939 - DNA, 1445 bp, Emericella nidulans
atgtctcaggccttcagtgatatgttgctaatttttgaaataggccggaccagtaaaggttccagaagtacctcgtctgggcgctgctccgaagacgaagataactgatgttgagaaggatgaggaggaatcatcaagcgcgggaaatgattctgcctccgaagatcagttcatggaggatgcgccggagtcgcctgatgctgctgaagaggccgtccaagctgtcccggagccgccaagtcggaaacgaaagcgagctgctggggaagatcttgaagagtcgtacatgcgtcgactagcaaaggaggagcagaaggaacagaagaagcgtcgagcagaacggtcaagctcactggaagaggagagcgaggacggtgaaaaagagagcccacaatccgaagacggcgagtcggaggatgaaggtgcggatattcccaaacacgaagctctagctggtgctgccaacgatgatgatgagctctccaagtcgaatcgaaccgtatttttgggcaacgtgtctacaaaggcaatcacgtcgaagtcggctaagaaagagttgatgaagcatctttcgtcattcctctcgacacttcctgagtctacgggtccccacaagatagattcgatacgtttccggtctactgcatttgccagcggcggcaagatacccaagcgcgctgcattcgccaagcaggaaattcatgatgatactacgcccagcaccaatgcatacgctgtctatagcaccgctcaagctgcgaagaaagctcccgcggcacttaatggcaccgttgtcttagatcgacacctgcgcgtcgataacgtggcgcatcccgccaaggtcgaccataagcgctgcgtattcgtcggtaatctcgacttcatcgacaacgaaaccggcaccgaagaaggcgagaaaaagaagaaaaaccgacctccggctgacgtggaggagggtctctggcgtactttcaatgctcacaccaaagcgtcacaaagtggtcctgccggccgaggcaatgttgagtctgtgcgggtagtccgtgaccgatccactcgtgttggaaaaggattcgcatatgttcaattttatgaccagaactgtgtcgaggaggctctcctgcttaacgacaagaggtttcccccattgttaccacgaaagcttcgcgttgtcagagcgaagaaggtagccaagaagtctgttgagaccacaggtgcacctaaggggtcggaccggacactacaaggccgtgctgggaagttacttggaaggtcaagtgaggctcggttgaaggcggcggccaagaagtcgatttcccagagctccctagtatttgagggcaaccgcgcaacagcagatgggtcatcccgcattcgagtgcggacgaagagtcgcggctccaaggccaaaaaggatagtcgaagcaagaagcgtgctgcggcct

SEQ ID NO: 19940 - DNA, 1448 bp, Emericella nidulans
gcgcctggagcagttgcttgccaagcgcacagaactagctcagctcgcaggtttcgagacttttgcacatatgaccctcaatgacaagatggccagaagccctgcagcagtatccgaattcctgaccactctcatcacaagtaaccgcccggatgtgcaagaagaactagcccagctacaggcgcaaaaggggagtgagctacagccttgggaccacgcatattacgttcaccagcgggtacgacagtatgaaacgtctcagaagactcgcaggtcacgcgagttggctgctatccctgagttcttctctctcggaaccgtaatgcagggattgtctcgtctatttgatcgcctttatggcgttcgtttagtaccccgtgaagctgctcctggcgagacgtggacacctgatgttcggcgcttggatgtagtagatgaggcggaccgcccagtagccgtcatttactgtgatttgttctctcggcctaacaaacaccctaatccagcccactttactctgcgatgcgcgagagagattactcaagaggaaattgcggagtcggcagcgatggacgcttccgcggttgtcgctcacccgaacgatggaatggcgacggctgtcgattcagaatccaagacgctccgtcagctaccgaccatcgctcttgtgtgcgacttccctgagccttcgtcttgcacaccatcgcttttaagcgaacacagcgtgcgcacgctcttccacgagatgggccacgcactgcactccattctgggccagacgcagttacaatccatctcgggtacgcggtgcgtaaccgactttgccgaactgccatcggtcctgatggaacgtttcgcgacggacccgtccgtgctagccctctacgcccgccactggcaaaccgaccaaccgctctctgaaaccatgatccaccacatggcccaggatcgggccgcgcacgcgccatctacggcgccgtcgagaacgaggcccaaatcctcatggcgctcgtcgaccaagcctaccacaccaccaagaccgggaactccttcctcgacaccacaaaactttaccagcaggtctactcaaggcacgccagcctcccagaccccgtagacgaacacggccgcccttcaacttcctggcagggattcttcggtcacctgtacggatacggcgccacatactacagctacatcttcgaccgcgcaatcgcgaacaagctctgggaagacgtgtttggcgctggagctgcggctgttgaccgctctgccggagagcggtacaagaacgaggtcctgcggtggggcgggggacgcaacggctgggaatgcgttgctggtgttctggggccgcagaatctgtccaatgccaacggtcgccttgtcgaaggaggggatgaggccatgcgtgaagttggacggtggggactcggccgtgatggcat

SEQ ID NO: 19941 - DNA, 1449 bp, Emericella nidulans
gctattggccgtcgcgctgttcttcgtttcgtcaattgtatgcgccacagcggtggatatggcaatgttgattgtaggccgcagttttcagggtgttgctggaggtgggcttatccagctcattctcataactatatcggatctgttcagtgtcaggtgagattaacacacttctagctcggtgcgttttgcttacgcaacgcagactccgtagcctgttcatgggtcttatggaatgtacctggacggtggctggtgctctcggtcctgtgcttggtggtgtcttcaccgagtccatctcgtggcgctggatcttttggattaatcttccagtatgcggtacggctttcgtgctgctgatcctgttcctggatgtccataatcccaggacacctatgctcgaaggaatcaaggcagtagactggtttggcagcttgtccattctagccatctccgtcatgattctcctcggattagactttggcggcgataccttcccctgggatagccctaaagtgatttgcttgatcgtgttcggcgccctgatgtccgttgcattcatctacagcgagaagcgtctggcgaaatacccgctcatgcccctccacatcttcacaagccgttcaaatattgcttgcttcttggtggacttcacacacggctttgtcagtcaatgctaaaacaattctactccgttttaaactgccaggctaacattaacaggcatttctcggtgcggagtactacctcccactctatttccagtctgccaaagcggcctcccctttccactcaggtctgctcattctccccttcatcctaaccgaatccttcaccagcctcgcagttggcatcgtgatccaccgcaccggccgctaccaagaggtcatttggctggggatggccctcgtgctgctaggaacaggcctcttcattgactacagcacttccacatcgcttgggaagatcatcggctaccaaatcatttccggcttcggatgtggcctgctcttcttcccgccactcctcgcactccaaagtaacatcccaacgaaagacaccgcaacagcaaccgcgacattcgggttcgtgcggaatgtcgccatggcgctttccgtcgtgctgggcggcgttgtcttccaaaatagcatgggtctgaagagggatctcctagaggacgctgggctgtccagtgccctgcaagaggactttacaggtgcggaggcggcggcgaatgccctggctgtaaaggatattacggactctttgcagagagaagctgtcgagacggcatttgcttggagtatccgaaatatctggattttgtatactgctcttgccgcagtgggccttgttgcgagctttttcattacgaagaggcaacttagcaaggagcatgtggagactaagactggactaaaggagaaggagaagaatactgcggaagtt

SEQ ID NO: 19942 - DNA, 1450 bp, Emericella nidulans
tggaggatcgcccagagtggtcagcggttatgaagagatggacgagtacggaaaagctcggactggcttggaaacgatatgatcgactagaatggatatatggagttaatgagaaagacatgtatggctcagtcggaatgcagggaacacacgaacttgagctacgaccgaaacagcactatgacacttccgttggatatggagcaaagaagaaggaagagcccgctccagtagaaggtttcttgattcgacttacctctcagacaggagctcaccagcggatgaacaggatgttttccaaacgtctttactttttcagtcaagatcattacctgtttttctgcaagccatcacaggcccttcctcctacaccaccatggctaagcgctctggactccggtataccatctactcaggaaatattggacaaggcccctctctcgtacgagatagatccttttcctttgcaggacgggcaaatatcctggttgtccattggaaataccgaacatcagaagcgtcgcgatgaggaagcatatgctcagtttcaaagggacatccacaatctcagcaatgccgacggattcatcaacctgtgtctggtgcaagaggtacgctctattccggatgatttctcatctgcttcaaatacccgggagacatgcgatcgtgggattacgcagccaaatgacccatcgcagttgcaagccggtaatgttggcgagcagtctactgacaacgccggatttgaaatgctccttgacaatggtctagttgtgcgcttccaggcatataatagcgcaacaagggatgagtggatgcagagattagacgccttggttcaatattggaaggcaagaattgtcgcagatgctgccgagctcaagaacactcggcagcgaaacctcgaacttctgggtatggacgaagagctagagtcggtgatagggcagtacgcgaagaagtgggaggtcaggaaggcagaagcctctcctctcctgcataatatgtgctccttaattggctgccggccaataaaggtacgtccttacaacaaacgcaatgaacccttaccatagactagccctaacctttccatggagatgtctggcctgctgtataagaaaccccgacgccatgcaacctttaagcggttccatgtcatcctcacggccggaaagctccttgtgtaccacagctccctccgcaagtacaacggcgccgaagtgccccatgtccactctacgcttgagtccaccatcgacctcgaaaactgctacatctactctggcctcatcgcagagaatgacctgctttattctaaccagacgttcgacagtaatcatccgggtcatggggccttgccacgagtgtatctttcctcggatatgtacacaagtagcgatgaggacacggcaatcacatttgtgatttggcagcccctccggaa

SEQ ID NO: 19943 - DNA, 1450 bp, Emericella nidulans; identical to SEQ ID NO: 19942

SEQ ID NO: 19944 - DNA, 1451 bp, Emericella nidulans
caatccctaatcccgcttaacaataggttgtattcataccgcacagagtcacatcggctcttcacgcctgcaaggattaagcccgcccgtgcaacgccaagccgtccctttcaaagcttgggcccagtcactgctttctcattggctatcaccccgcatgacggtctcgcccagcaaataaaacaagtcagatcgccacgtgccaagagtagcccctcatgaccggcgatcgcccagcacgttgctggtcatccgctcgttataggcccttgcgtcgtggacctcggggcagctgataagctccatggcagccggactggacgttgccaggcacgagggcagtttgtctattgtctttcgtgcagcgatgctctttcaaatagacgccgtctggtaggtggatctgtctggctaagcttgtcttctagagacggaacccaaggtgctggagacgggaagaacctgagcctggtataagttgctctgatagtcggttttctggcctttttcgggttttatcgtctgcgagtctcagttgttcaaattcagtccttggacagcacgcaccgcacgcaatatgtcgttgtcctcgctgagttccctcaagggcctcctctccccgaccacagaatcggagtacgatgtggaaaaagactctcatgacctttcacgttcagaagatgtagggagcacaaatggcgaaatcaagccccgcgaagccaaagagagcaagctcattgacggacgagtaatatctgacgccatcatcggtctttcggatgggatgacggtccccttcgcccttacagcaggtctctcggcgctgggagacaccaaagtcgtcgtctttggcggatttgccgaactcattgctggcgccatatctatgggactaggtggctatctcggtgcgaagagtgaagagtactgcccctcgtcttcgtatctttagactccttcactaacctttagttagggaatcctaccatgcgactctcaaagaaaccaccaagcaaacactcacgtcccccgccaccgtctcggacacgattcacgaaatcttcactccctacgacctccccgaccacctgcttgctcaattaacaactcacctgacatcttccccgcaccttccctccttcctcatgacattccaccacaccctccccgagccctctggctcccgagccctaacctgcgccctcaccattgccctttcttacttcctcggcggtttcgtcccgctcctcccgtactttttcgtcggcccagaccaggcgttcctggcgttgaagtggagcattgcaacgatggcgattgcattgtttgtttttgggtatggcaagacttgctttgtgtctggatgggcggggtcgaagaatataaagaagggagcatgggggggtctgcaaatggttattgtgggcggggttgcagcgggatgtgccatg

SEQ ID NO: 19945 - DNA, 1455 bp, Emericella nidulans
cgtctcgccacctcgcgattctttcggaagcggaccgcaacgaagccctaacagcgttacacgcagcgctttcaaggaacaaggatgccatacttgaagcaaatgctagggatatccaggcggcaacacaggctgtcaacggcggcagtctcaatcatagtgtcttgaagaggctcgatttgtccagaccaggaaaatacgatgatatgttgcagggcattttaagtgtgaggagtttgagggatcccagtatgtttgcgtcagcactcctctcttacgtatctggttttctttatcccggggttttctgattatgttgaagttggaaatgtcacgttgagaaccctcctcgacgacggccttactcttgagaaggtcgcatgtcccatcggggtactgttgatcatttttgaggcccggcctgaggttattgcgaacattgctgcgttgtctatcaagtctggcaatgctgcaatactgaaaggtttgcttcttaagttttggtatgtagttctgaactcctgctaatattcaaaaggagggaaagaatccacggaatctttcgtaacgatcgcgaacgtgatctccgaagctatttctcacaccagggtgccgcagtcgtctattcagcttgtgaagaccagagcggctgtctccgatctactggcacaggactcgcttatcgatcttgtcatacctcgaggctccaatgacctcgttagattcgttaaagagaacacgaaaataccagttcttggtcatgcagatgggctctgctctgcatatatccattccgatgctgacccggaaattgccctcaaggttattgtggattccaaaaccgactatcccgccgcatgcaactcactagaaactttgcttgtacatcaagatgctctcaaggaagttctaccgcctcttgccaaagcacttattgcgaagggtgtcactctccggtgcgacgaatcctctaaggctgcgctcattgaaaacttgactctcaaggaagcggggatgcttcgggatgcctgcgagtctgatttcaggactgagtttcttgatcttacactagccgttaaaacaataccttccaattcgcctctcactgacgtcgaagcggcaatagcccatatcaattcgcattcttcgaaacatacggatataatcattacggaatcagaaaatattgctaatattttcatgaaaggcgttgacagtgctggggtgttctggaatgcgtccactagattcgctgacgggatgagatacgggtttggcactgaagtcggaatcagtaccaataagatacactcgagagggccagttggtttggatgggttgactatctataagtatttgattcgaggcagtggtcacagggctggtgattattttgacggcgaaggaggcagaaagtataagcatcagaacttagagctatcatagacaaacatg

SEQ ID NO: 19946 - DNA, 1455 bp, Emericella nidulans
gtgcagagcgaacggtaagttatataccatagatctcaagcatattcacggtatagtaaccatgtccttccaagacctcctaggccagctccctttgctgaagagctatacccatatcctcctcgtctttcccctggtaaactcccagcgccagccagtccttgaggctctccaatgctctatcagacgcctactggccacgttcccctttctgtctggggctgtggtccaccaggttccccatcccggtcactcgggtacattcagtgttgttctccctgaaggtgattcttcagacagagtccaacaaatactacacgtcaaagacctctcttctatcctaccagactatgcaaccctcaacgccgctaaggcacccccggccatgcttccaggtcccctggtggcaccatcccgccctgcgtttccacgggtctatgaagagtcttctgcaccggtgttggagatccaggcctctctgatcaacgacgggcttcttcttacgcttgccgcacagcacaatatcgtagatgctacggggatcttctatattgcccatctgctgtcgaggtttatgtatgatccaacggccagcataccagacgctgaagttgcaatgggcaatatcgacaggagaaatcttatccctcttcttccagagaatcagggtctcccggaagagatgggtatctttacgatggatcggccgcccccgttaacccgggagatcctggacgagtataaatggaccctggtgcatttctccccagccgcggtacgagagatgcatgacgaagcgatgagccaaccaaacgatttcattgacggcgtcagcagcgtctcggttaatgacgccctgacagcgttctgctggcggagactctctataatccgcgcagagcacagccatacaagaggagaaggagcaacgactcaactgacccgtgccgcagatctccgcagagccatgggcctaaatccagggtatgcatacatgggccacatggtccgcacctcgaacctgcgtctcccgctgtcgacgctcgtttgcccacgcacatccctctcgcacatttcctctctcctccgcaaatgtctgagagagcacacagagccgcaggcaatctctgcctacgcgactcttctctttcggacagaagataaatctaggatcctctatgcggcagagttcaatccccttacggacctaagtgtcagctccgttgcgcatgtggatgtgcccagctttgggacggttctgggtaaaccaagatttgtaaggaggccgacattcggaccgttgcctgggggtatgtaccttggccctagtatggggtcagagggagaagaagctagtggtgatggagggctggatgcggtcatctgcctgaggggatgggaggtggaagggttagctaaggatccggagtggaagaagaaggtggttgtctggga

SEQ ID NO: 19947 - DNA, 1456 bp, Emericella nidulans
ccggactccatactgtctccagtctcaagcttggatcttccagtgtagttagaggacaaaattcgcagggaggtagcccagtgaccgctttaaccggttgacaatgacagccgcaacgaacattccgattcctgtctggttggattgtgatcctggtctgcaacccaacccggattgattctatcatctagcatagaagctgacactaatattcaggccacgatgtaggttctagcgatgttgtcgcacacctatgctacgaagtctaacgcagcgtccgtccaatgatcataggatgctttcgcaatccttctcgcagctcatcacccatccctgaaccttttgggcatcacgactattcatggcaatgcttctctcgagaataccaccatcaatgccacaagggtgctagaagctatcggcaggcccgaaatccctgtttatcctggaaccagaaaaccgttttgcaggcctgcagtccatgctcctaacatccatggtcagttgccaacggaacacgctcaattttatacagcaagctaatccgcgatggtgggacaggcgactcaggcattgacggaactgaactccttccgaaagcctccagacctcctatcacagacaaaaatcccatccttgctatgcgtgatgctcttatggctcagcccaagggcacaccatgggtcatagctacgggaacattgaccaatattgccttgttgtttgcgacctttccagaagttgcagtgcatatcaaaggtctcagcataatgggcggtggtgttggagatggatttgcgaatgccccaataagcagactagtcgggcatgaaaaccgggtcgggaacgtcactccattagcggagttcaatatctacgtacatcgctcaatgaaggattactagtgttggctcaagtctgacggcgatatagtgcgaccctgagtcggcccaatcgatcttcggcaacgagattctcgcacccaagaccttcctgatgacgctagacctgacgcaccaagtcctcgcctctcgcgatgtccaaacccgcattttgcacggcgatggtgacccctcaacagctccgaccgtccttcgccaaatgctatacgaactactcctcttctttgcgtcaacttacgaagccgaatttggtctcacaacaggtcctccgctccatgatcctcttgcagtagccgctgttatttcaacccttaacccggacttcgctaggagatatcccgagcaggctttaaagtttgatgaccgcaacggcgagcggtttgcagtcaccgtcgttacagatggacttcatggaacagatgtcgctatggtaggacagctcggccgttcagtagtgtccagtcacgctactggggtcaccattccccgcggagttgatattgatgcgttctggaatattattgtggactgtatcaggcgggcagatgagttga

SEQ ID NO: 19948 - DNA, 1460 bp, Emericella nidulans
acgccccttgcacgaaccctggcaaatgttatcaagacgacagggccggtgcccattgcggcatttatgcgccaagtactcacttctccagaggggggttattacaccaccaaaccaggagggggcggagaggtattcggaaagaagggcgactttgtcacatcgccggaaatatcgcaagtatttggggagttagttggtatatggacaattgcggaatggatggcacagggggggaaaaagagtggagtgcagctcatggagattgggccagggaaggggacattgatggatgatatgttgcgagtacgtgcatgcgtttccatctcttccgaggtactttaacacagtgtatgctcactatggtagacttttcgaaacttcaaacctttcacgtcgagtctcgaggcaatatatctggtggaggctagccctactttgagagaggtccagaagcagctactctgtggtaatgccgttatggaggaaacagatatcggccatcggtgtacgagcaagtactttaacgtgcccgtgatctgggtggaagatatccggctgttgcctcatggtgagtcttgcccggtgcccaataaagtccttcggctgagccccatctgcagaggaagataagacgccgttcatcttcgctcatgaattcttcgatgccctcccaatccacgcttttgagtcggttcctcctcaccggaaaatgaacagcaggaacaggagattatgacacccacaggccggacgaaactccagagaccaccaaaagcagcaaacacacctcaatggcgcgagctaatggtcactctgaacccgaaagcagttgacgagaacattaaagatgagccggagttcaaattaactctagcgaaagcatctactccgtcctcccttgtcattcctgaaatctctgaacggtaccgggcccttaaatcccagcctgggtccaccatcgaagtcagcccagaaagccgcatctacgcatcagatattgcgcgacgtatcggcgctcatcgcagccccctcggaccgcagcggggcgcaacgcatctgcaccctctgcaatcgcgaagcgcattccttcaggagctgccctgatcatggattacgggacaatgtcgactgttccaatcaactcgctccgcggcatccagaaccacaaaattgtccctgcactctcttcccctggtcgagttgatgtcagtgccgacgtggactttacgtcgcttgctgaggcagccctggaagctagcgagggcgtggaagttcacggacccgtagagcaaggacacttcttacaggctatgggtatcgcggagcgaatgcagcaattgctgagcactgtcaaggatgagaagaagcgcaagatcctggaaactggatggcaacgccttgttgaaagaggcggtggtggcatgggtaagctgtataaagtcatgactatcatccca

SEQ ID NO: 19949 - DNA, 1461 bp, Emericella nidulans
gggatctcgcagctcaaagcctgttcagtgttgactgcactaatacggagtagtcctgctggcaaaccaaataaatggcggggaatcgggatgcgggccgattgtgcctggccctttaggcattagcaaaataacatatgccagatttgtcaggctagtaatttcacgtgacggctccgaaattatgctggccgccggaacattttcttacctcacgttgttgacgagttcgcggcgacaaccattactcgttaatatcaatggctgctagtgagccatcaagatacctggcaaaatcattgccgcgggctattgtccccgctgcccgccctcagggtttctgctggaggcgcaatacttctgaccaagcgtccgccaaaccgtccgctctcggtgaccttgagtcggacgggctgctgaagggcacacctccgccggtagaagctgcgaagccttttgaccccgttgcacgggcacgagcgcgaagagctcagctcccacgaagtcggtaagtttgtccctttagggacctgcaaatcgtccccgattcttgcggaagattctcatttcttcatctagctatcaattccgttcgccaaaatatgatcgcggtccgttgcatcctcacaggcctccgcccccatctgatccatcttctcgcctcttcgtgcctggccctttttctctcaaagagtagagcagacccacgagtcgaccatcgcctccgatatcatgactctttgctatgtccacaatccgccaggcttcaagcctcccccaaaggcgccccgtcttcgctcttgggatgatagctctccttaccacaaaaatcgatctctccgcggtccccgtggcggcgacgttctgcgactcctccgcaagccaataaccttcaacaacatccccaagctcgagcgaattacgatccacagttacgtgaagaatgccgcgaaggagaactccgggtggcttcacgtagcgggtatggcgctgcaagccatatcgaatgtcaaggtggagacatacaagtcaaagaccagcgttgccaaatggtacatctctcccggtagagataccgtggccgccaaggccgagctttacggagagaacatggagcacttcttcggaaagttggtcgacattgtgatgcctcgtctcaaagattggcccggtgtcaagggtaccagcggtgacagcagcggaaacattactttcggtctagagcctgagcaggtcgctttgtttcccgagattgaggtcaactacgatatgtatgactcttattctctgtcttattgctttagaaaacaattgaataactccagtactaactcgaatctttgcataggtacccacccaagatgattcctggttgccacattacacttcacacaactgcgaggactgataaggatgcccgattacttctaagtgccatgggagttccgttctatggcaagc

SEQ ID NO: 19950 - DNA, 1462 bp, Emericella nidulans
cggaatcccgacgtcgttgcgcgacacccatcggcggaagacctagacgctgcccagcagcttatttcgtccgcccaagccggtcgagaacacccacaggatcgacattacacggataatggatctcggaagtctgaggcgggggctccgcacagtcatcatgagggagagtaccccatagttcagacctccgagactccaatgaacgggcatcatgttgaaaagacatctccgaaatcccaaaaggatacctcgttcctagggcattcttgcaggttagtttgacagttcacgatctggatttatggtgcactaacaatcatctttcagtaattgtggaaccaagagtacccccttatggcggcggtctcctactggagctatgatttgtaatgcatgtggtctctacttgaaagcccgcaatgttgcaaggccgactaaaagaaaccgaacgcaagcaagtcccgaggcgtatcacccgcaaaaccaatccgttggttctcaacctgatcccgctgttactggaagcgaaggttgtactggttcttgcccgggtggtggaaactgcaatggcacaggtggtgcagaaggatgcgacggttgtcctgcctataacaaccgcgtttacaagtcgactgcacgaggaaacgtcgcggcgcatgcgctgaacagggcaggaaattcggatgctgttccgtctccagaggctgaagcacctgcaaggaatagtggacaaccagagggtaatatgctggtggcttgccaaaattgcggaactacagtgacgccgctctggcggcgtgacgagaacggccatccaatctgtaatgcatgcggtaggcttcatccgtcctctcccctttcactctgacaagcaattaattattggatatcaggtctctattataagcttcacggttcctatcgacctaccacgatgaagaagactattatcaaacggcgaaaacgggttgtgccggctctgcgagaaaattccccgactgctgctacccattcttcacacgggtcatctgcatcgccagaagcatcgtcaccagcaactctggcctattcacatgacgagcgccatcgatattacagttcagagcctgttgaccaataccaccggatttcaccggcggcacagaggccatttggattcgcaccaccgccggttgattttacaaatttcaattccggggctgtaacgctacctcaccacccgcctccgcctaggctcctcgagccaggccatccacctctttcccaattcgctcgacgatcaatctcaccgagctcgtcagggaactccaagaaacgaacacttgcagaggccggtgctaatacagacactggccccgttccaactacattagaggccgggtcgaatcaacttccacccattgtctcgtctgctaatccgccaccacccgctcgactaagttcaatatcctctatcctc

SEQ ID NO: 19951 - DNA, 1466 bp, Emericella nidulans
ctgccgcctccagggagaaactgttggccaagaaccctgacgatgtggtatgtttacttcgtattatgggagaattctatgtctcacgctttgggggcaggtaatcacgctcgctgttcgaacgccgctcaccaaggcgagaaagggtggtctcaaggacactcgtcttgatgacctgcttatctcgttactgacggtatgttgggaaatctcgcacccgccaggtctgcttgtatagtctaatgggtggaatagagtgtgcgtgaaaggtccaagctggatccgaatctcgtcgaagatgtctgcgtcggcaacactctctgccctggccaggcatatgttgcgcgctctgccgtgctcgcagcaggattccctataacaaccgctgcatcagttgccaaccgtttctgctcttctggattgctggcgattcagaacatcgcaaaccagatcattgccggctcaattgatatcggaattgcagtaggtgctgagagcatgagcaccaatgccgacggtggcgcaccggacctgtccgaggcgatcttgtcgcaccccatcgcgtcgcaaaacacgcaacccatgggccagacatccgagaatgtggccggtcagttcggtatcgcccgcgagcagcacgatcaattcgctgccaaaagctatcagaaggcggagcgtgcccagaaggcgggatggttcgaggacgagatcgtccccgtcaagacgcagatcaaggaccccaagactggcgaaatcaaatccatcatcgttgatagggatgacggtatccgctatggcacaacagctgagtctctggggaagattcgctctgcgttccctcagtggaagccaagcaacactactggtggaaatgccagtcaaatcactgatggtgcagcggcgcttgtgctcatgaagcgatctcgtgcacaggagcttggccagcctattctaggcaagtttgccggagcaaccgttgttggtttggaacccaggatcatgggaattggccctacctatgccattcccaagattctctcgaagttcggtttgaccaacaatgaagtcgacatttttgaaatcaatgaggcgtttgcatcaatggtacatagtccccttgttgttgtgtgcgggggaaaccactaatactcgacagggcgtttactgcgttcagaaacttggtttggatgaggctaaggttaaccctcgtggtggtgctatgtaaggcgtcagctccctgtaagaagattgttggctgactattatagtgccttcggtcatcccctcggtgccacaggcgctcgacaggttgtgactgccctatccgagttgcgacgaacgaacaaaagggtagccgtcacctccatgtgtgttggaacagtaagcactatcttctcagaaatgcatcaaccattcactaacggtctcgttgtagggcatgggtatggctggtatctttgtttccg

SEQ ID NO: 19952 - DNA, 1466 bp, Emericella nidulans
cggcctcatcgtggtcagcatcttctatgccttcatctcagcctcgctatcagagctcgcctcagccatcccctcggcaggcggcgtctatcattggtcctcggtcgtcgcaggccggtacggccgcgcggcgggcttcttcacagggtacctgaatgcctgcgcatggctactcagcgcggcatcgatgagttcgattctaggcaacgaagcagtagccatgtatctactgcgtaaccccgacgtagaatggcacagctggcagccgttcatcgtcttccagattgtactctggatgtgctgcggaattgtctgctgcgggaataggttcctcccgctgttgaatcgaattgcgctcatttcgtcgatgggtggcttgttcattacgattattgttctcgctgctatgccgcgtggtcggtgggccagtaaccagcaggtgtggaggacttattataatgaaacgggggggtggtctgacggcatttgtttcctgagtggcctgctcaatgcggcttttgctgttgggacgccagactgtattagccatctatctgaagagggtaatgctcttccgtagcattctccatgatgggatagatatagcatgctaacagggtggcatccagtgccgcagcccgaacggaaagtcccgcaaggaataatgctccaactcctcacagcattcagcacagcattcatctatcttatcgctcttttttacagcataaatgacatcgacgccgtcttcaacagcgcactcaacttccccaccgccgaaatctacctgcaagcgacaggctccaccgccggcgcagtcggcctcgtcgcactaatgttcctcgcaacctttccaaccctaatcggcaccctcacgacaggcggccgcatgtggtggtccctcgcacgtgacaacgctaccccctttgcgccgttccttgcaaaggtccatcctacccttgatgcacccgttaacgcaactgtcgcgatgacaaccatggtgacgtgcctagggtgcatctatggaggaagcacgacggcttttcaggcattgatcagctccttcatcgtactcagcacgctttcgtacgccggcgcgattctcccccacctgctaagcggtcgaggccgcgtcattttcgggcccttccgcatgacccgaagctggggattcattgtgaacgtgctcgcggtggtgtatatcgctgtgacggtggtgttcttctgcttcccgtttacgttgcccgtgacggtgcagaatatgaattatactagtgtcattaccgtaggtttaatgacgattgtgctggcttggtggactgtgcgggggatgagagagtatcagggcccggtgtatagtatcgaagctgcggaaaagattgctcatgaagagacggagagggttgccgaggaggttggggtcttgggcgagggggttgggacgagggaataagctatagtataga

SEQ ID NO: 19953 - DNA, 1467 bp, Emericella nidulans
gccgcaagacgtctacggggatgagcagaatgcagagatcaagtacaaggtgctgagctggtggtatgtttctttttctcttcgtctctttcttatatgtcttgctttcttgattcttatgttcttttattttatcttattttttccttactttattttgattttgatttcattatttttctttccttgtcttctgctcagcttatacaatattacaatgcttcctctcagctactaactgattaccaggcaagctggattccgtgagttagacactctggggtgcctggagcagcgcgtttccagctgcttgagcggactggagtatactgatgaagcgcagtaatggtcgccgaaaccgtctcaatcgggatcctctctctacccagcgttgttgctgctttaggtcttgtcccgtaagtcatgcctgacccggttcctgtccgcgccattctcaccccgctagggctgtgatcctcctcgccgccatcggactcatgtccacctacacgggctacaccatgggccagttccggtggcgctacccgcacgtgcagagcatggccgatgctggtgaagtgttggccggttcgttcggccgtgaattcctcggcatgggccagctactgctgatcgtcttcatcatggcctctcacctgctgacgtttaccgtggcaatgaatacgattacggaccatggaacctgcaccgttgtctttggcgttgtgggactggtgatctcgtatgtgctgtgcttgccgaggacgagtgcaaaggtctcgtatctgtctgttgggtgtatgtctagtccagccgtcccgtcacgctctactacacttggtgagcttacatcatgtgctgacccggtgcagcgttcttgagcgtcctctctgccgtcctgatcgtcatgatcgcagtcggtatccagaagccctggaagggtgagctcgacgccgttgtcgacacgaatctttaccatgcgttcctgggagtgtgcaatatcgtcttctccttctgtaagtcgtgtcgacccctttgatctcctatggcctatcttctaaacatccttagccggccacgtcgctttcttcagcttcatttccgagctcaaagatccgcgcgaattccccaaatctctctttctcctacaaggcacagatacgatcttgtatatagtcagcgcggtcgtaatctacgtctacgccgggccggacgtgacttctccggcgctgggatccgccagtacggttgtcggaaaggtcgcgtacggggttgcgctgccgacggtgagtttctttggtttgcccactggcgctttgtctattggaggtgaagtgcgagatggctaaccgttcaacgcagatcatcatcggcggcgttgtcaacggccacgttgcaagcaagtacgtctacgtccgtgttttccgggggaccgatcggatccacaagaaggatatcattgctgtg

SEQ ID NO: 19954 - DNA, 1469 bp, Emericella nidulans
taaagatgctgttatgtgtatttcggcgaatcaagttcttttgcctgccgtgttctgcggtatcatcggagcagggggtgtctacacagcggcatcgacggcgcttacggcttcagaagtctcaaagcagctaaggcagtccaggagtaaagtgattgttgcgtgtccggagaatagggccaaggcgcgggacgctgcgcgggaatgtggtataccaccggatagggtgttggtactagagagtatggggcaccggcggcttttatgccaaggtaatttcgggaggaattacctgcaagcaacggcagagctggattgggagcggattgcggatattgatgcgctggaaaataccaccatctgcctgctctattcatctgggacaactggtccgcccaaaggggttatgttgtctcacatgaatcttgtttccgaagccctattcactcagttggtgttgcgggactctaaagaagggaagccacatctgaacgttccctatcgaacagtcggacacctccccacagcccatattgcagggtgtctgggatgtttcatcacacccgcggttgccggagggacagtgtactggatgcccaggtttaatatcgatgagttcattgactattgtaagaagtatgcagtgaccttcttgtcaacggccccgccggtttaccatggaattgtgcggagtgaccgcgtgacagatcagttcaagacccttgtccgggccgagtcaggtgcagcgcccctgagcttagagcttcaagagcaagcggaaaagatgctgggatgcaccatcagtcagcgttggggaatgaccgaatccactggaagcgtgactaccatgccctggggacaatccgacaataccgggggtatcagtccgttactacccaatatgaggttacggctcgttgatgaacggatgagagacgttagaagtggagacgagggcgagatcctgctcaaagggccgatgatcacgaaaggttatttcgaaaacccggaagcaactgcagaagccttcacaacagatggctggtacaagactggagatatcggagtctataaagatggaaaaataatcatggttgaccggaaaaaggtaagcacataagcatcaccatcgaagtgaactgctaaccctcgcccaggagctcatcaagtacaaaggattgcaggtctctccggtagagatagaaggattccttctcacacatcccggcgttgcagatgttgccgtggtcggcgcacgcgatccagaggctccaggtaacgagctacctcgggcatatgttgtgatcaaggctggaagcagtgtctctgaggcagagttaaaagagtacgtcaagtccaatctggcaggccacaagcagctccggggtggagttgtattcatagacgagatacccaaaagtgcatcaggaaagatcctaagaaggatactgcgggaccaagcaagaagc

SEQ ID NO: 19955 - DNA, 1470 bp, Emericella nidulans
tgatcgtactcctaagtaccggcaggagatccagcaggtaagcaacattattttgatgtattctgtgttgtctcaatataccctttgggaatctggcagaggtggggtggaagagctctatttttattacgttgcttcgttgtatcttgcgattgttctctctgctagagactcaagcaactcccttgtcttggacctgatacggatctcctttctcctgcgcctagacatcgtctgctcccatatttggaagcagaaatggtcttacaaatatacgtgtctgggaatttctctgatgcgtgtgggcgagaatcagggattgagaccgtgctcgccttacgtgatggcagtagtgctcttctgggagtctcgatctatgcatcgcgggcgagagcgacccttcaggttgaggctgtggatgaaactctggaatcaaacgagagctcttttgagagcaagagaatgtttgctgccaaaatgactaacttttctgctagatgatgtttgtatctggagaaactgctgagccttcaattgagaccaccacccttatagaagatattgtgcgacagcaagtagtcgagcttgtgagccactgcttcctcacggatcgtcggcgtatactaaccaatgcatgtatagcttgctcgcagtactgccttagctactcgccgtggtgtcagatccatatctactgatgatttgatctttttgattcgtcacgacaaggctaaagtgtcgcgtttgaagacatttctgtcatggaaagatgtccggaagaatgtgaaagactctgacgacaagggcggcgctgatgcggctgactttgccggggccgatgaccctatggctggtggcgtcgttgcaggtccccaggatgttgcatctaagcccaagaacaaaaaagcgcgtgttgggcttgcttgggacgtcaatagcttctactcagtccaagttccagagagagatgacgaagaagatgaagaagaggaggagcaaaactatgctaccctccagcgtcttgccgctgcagacgagcggaccaaacacatgactagagaagaatacgttttctggtccgaatgccgccaggcatcgttcacataccgcaagagtaagcggttcagagaatgggctgggtttgggattgttaccgaatcgaagcccaatgatgatatcgtcgatattctcggctttttgacctttgagattgtgcagactcttaccgaagaagcgctcaaggtcaaggaacgcgaagaccgcgagaaaaaccgccgtggaggagcagaaaacagcgcagaagatacaaagaaacgcaagcgcgagacggggctcttcgatcctcctgaggagggccgtacgcctgtggagccgagacacattcgcgaggcgtaccgcaagctgcaagctactccgaacaagaacattgcgatgctccttcataatggccgtctgccagcgcgaatgcct

SEQ ID NO: 19956 - DNA, 1470 bp, Emericella nidulans
ggctagcaaggccaggcaacactagatggcttattatatttgacaatatcgaccagtattctccagcccaaggccatggtcactgtggatatgatatctacgaattctttccaaaggctgatcatggatctattatgatcacttcccggctccaggggctcactgaacttgggaagtcatttccagttcggagacttatgcacaaagatgctacacagctattgtttcaaagcagcggcttctcagctaaagatattacgcagatgggtgctgaacaaggtactgtactattagctagacttgaagaacatgactaacatcaacagaccttataaatcttgctagcctgctggatgggctctcgctggcaattgtcatagctggggccttcatgcgtcaaacaggaacaacttttaaagagtatttagagctctaccagacttcctggttcgacttgcagtcacagtcagcacccacacgccaataccagcaaggcaatattgtacaaacatggattatcacctataaagagatacagaaacgtgatcccactgccgcgaaactcttgctcttactcgcattttttgataaccaggatatctggtatgaactgactcaaaacgggttggactactccaacccgccaccatggtttaaagcagcagtgtcaagcaagctggtctttaggacaaagataaaagcactagttgagttctcgcttgttgaaataaaacagcaggagggaagctatactctgcatcccgtggtacaggactggtgttatcatattgctgcctccaatgacctcacaaaccaactacaggagctggcgttcatctcggttggatatacagtccccagtcgggacaccagagattatgcaaggcttgagcagcgattacttcctcatgcaaataacctaatccaaaggaatataggctattggcttgatatacagcctgaagacagaatcaacatttttggagcctttcatggcttaggtaatctctacttacatcaaggaaagctgaaagaggcagaagggatgtatcagcgagccctggcaggcaaggagaaggcactgggtcctgaccacacatccgcccttgatacagtcaacaatcttggtcttctctactctgatcagggcaggctgaaagaggcagaggagatgtatcagcgagcactggcaggctacaagaaggcactgggccctgatcacacatccaccctgaatacagtcaacaatcttgggaatctctactctgatcagggcaagctgagagaggcagaggagatgtatcagcaagcactagcaggctacgagaaggcactgggtcctgcccacacatccacccttgatacagtcaacaatcttgggaacctctactctgatcagggcaggctgaaagaagcagaggagatgtatcagcaagcactggcaggcaaggagaaggcactgggccttga

SEQ ID NO: 19957 - DNA, 1472 bp, Emericella nidulans
atgcaacccggccctaacccattcatgctccctactaagtgctctgtcatgattcaggcaatgcggactcctcatggtcgccgaaacaatatccctgggcattctctccatcccagccgcaatcgcaggtcttggcctcgtcccggccatcgtgatccttctcgtcatggggctcattgcttcatatacgggctacgtgatcgggcaattcaagtggcggtatccgcatgtcgtcagcatggctgatgcaggtgaggtcctgatgggccggttcgggcgagaggttctcttcggcggccagatgctcttcttgatcttcctcatggccagccatatcttgacattcacagtggcaatgaacagactgaccaaccacgggacatgttctcttgtctttggggttattgggctgctggtttctcttgtgttttccctgcccaggacaatgaaaaatatgtcgtggctgtcgcttgcttgtgagtaatagcctaccacaatgagatatgaggctaattctatcacttttatccagcatttatcagtattttcacagcggtcatgatcgccatggtcgccatcggtgtcgagcaccctggaggcccagtcaaagccacagccgagacaaatcttgtcactggctttacagctgcgctgaatatcatcctgtcatacggtaagactcctcattctcttcctgtcagtgatatatccgtctaagtcttacagcgagccataacgccttcttcaacgtcatcgctgagttgaaagagcccagagacttccccaaagccctcaccctgctgcagtgcattgacattaccctttatcttgtttccggtgtcgtgatctactacttcgccggggacgacgtcaagtccccagcactcggctcaataaacccattggtgtctaaggttgcttacggggtggctctaccaacagtaagcccgcctcagctctccttagcacttcctctagacctagctcactgtgaactctacggtagattatcatcgccggcgtgattaacgggcacatcgcgtgtaagtccatctacacacgcgtcttcgccggcacctcccacatgcacaagcaggatttccgggccgtgggatcctggatcggtattgcggtgggactttgggtcatcgcctgggtggttgcgactgcgattccggttttcagtaaccttcttagtcttatggtatactcaccctaacccgtcttccgtctgatgcagagactgataagagacagactgcgctcttcgccagctggttcagcttcagtcttcctgctgcgttctggctgttcatgaaccgtggcctgtggttctcgagcccaaggaaaactggaatcaccatctttaactgccttgttttcgggatgggtgttgttatggtatgttttcgttctctatctcacaaaaagcgaatccacaactaatcacatatgcgccagtgtgcaattgg

SEQ ID NO: 19958 - DNA, 1473 bp, Emericella nidulans
cccctcttgagctgaacagctactaaatcccgtagagagagtcgattcccaacctgaaaacccattctcagccctgatcgaggaccagtctatcgttatcatcccaacattcaccttggaatccggcgttaccctctataacgttccggtagcctatacaacccgcggaacactctcaccgagtggtgacaatgctcttgtcatctgccatgctttgagtggtagcgctgatgtggctgactggtggggacccctacttggcggccccggacaagccttcgatatctcgcggttctttgttgtctgtctcaatagcctcggtagtccgtacggaagcgcaagtgcggtgacctacaaggatggaaacccggaaaaaggcctgtacgggcccgagttccctcttaccactgtccgtgacgatgtgaggtgagtgccaaaattcattcataatacaaaatggtgctaacgagttgaagaattcacaagatggtgctggacgatcttggtattaaacaaatcgcggctgtagttggcggctcaatgggcggcatgctcactcttgaatatgcatactttgggaaggactacgttcgagccatcgttcccatcgcgacatcggcacgacactctgcctggtgcatcagctggggggaggcgcagcgccagagcatctacagcgaccccaagtacgaaaatgggtactattcattcgacgaacctcctgccgctgggcttggtgctgcccggatgtcggcccttctgacctaccgaagccgtaattcgttcgagtctcggttcggtcgaaacgtaccagacccgtcgaagcggcagaacatcaatggtacagaaagactacctactcctccgaacgagcattgggcgatccacaatgatggccacaagggcaattggagcggccgtaactctcccgcgccagagaaacctgcggagaagaccgaggtgcagtatatggacccacagttctctgggaccaagactttcagcaaaagtgtcagcactaccgatggaaatgctcagaaacgacctgcgacctatttttctgcccagtcataccttcgctaccagggagacaagtttgtgaaacggttcgacgccaactgttacatcgccatcactcgcaagctggatacacatgacgtctctcgccaccgagcccgtccggactccgaaaatcccgttcgtgaggcgctttcgcagatccagcaacccgccctggttctgggaatcgagagcgatgggctcttcaccttcgaggaacagaaagaaatcgccgagggcatcccagactcgagactcgaacgcattgacagccccgaaggccacgatgccttcctacttcaattcgagcaggtcaatcagtacatcctggagttcttccgggaggttcttcccgacataatgtccaagacgcccacggatggtgccgccatcgacggtgttggcaagctaacc

SEQ ID NO: 19959 - DNA, 1474 bp, Emericella nidulans
tcggctgcaaagccaacggttcggcttccatgtgtcctagatttcagccgacccgtcaagtccctatcggttgccttctggatctggaaggccatcctctttgttgccataatcagctctccagggcttggctatgatacatcgtcgagccttcttccgctcctggccaacggctcggtcgagaccgcgccagataataagaatctgtctcttccaattccgctgaaattcgtccgatgggactcgatctacttcgttcacataggccaggctgggtacgtctttgaacaggaatgggcgttcagttctgcatacgggtatctggtcaattccttgtcttgtcgtatgtctgctcccctattagtctttggatatcggttctaacttattcagtttttttcccatcgtatgattcaaagggagtagcagagttcgctatcgctgctgttgtgctgtcacatgtggcccattatctttccgtcctaacattgtaccagctctctctcagtgtctttggctatgagaccgagagaaagaggctcgtttgctttctttctgcggctctgcatatcatctctcctgctggaacattcctctctgcgccctatgcagagtctctcttctcattcttgaacattgcgggactctacagttactcgtcctccctcgttgatctcaccaagcgaaagcagttagtaagccatgtgaaactcctcatttcgggatgtttctttgcgatagctaccgctgtgcgcagtaatggcatcctcagcgggattcttctagcatatgaggtggtcgctcgccgttcgcccagagcagcccgccgtctgtgcttcgtcattacgagcggctgcatcgtcgccctggggtttgttattcctcagtacttagcgtacaccgcatactgctcgaatgatagcctctcccgaccctggtgtcactcccttgtcccaagcatttatggctgggtccaggctcattactggtaagttcttgagaagtttgctccagatttagctacatgttaatatgcgaacaggggcgtgggattattccgatactggacagtgtcaaatcttcctcttttcctactcgctttgccaatgctgcttattctctttcagtcctgcttctggactctgcgcgcaggagctccctgctggcttaaaaactctgctgaagccggtcgtcttcatttgcccgattcctcagcccaattgcttaaacaactcgctgtggtccagctcgtgcttgcgacaatggctttaactagttatcatgttcagatcattaaccggatttcgtctgggtaccctctgtggtattggtatcttgctaaccaagctttggaaatcccaaatcgatcctcgtccgtggccagatatagcagtctgttcctggtgagcttacaagcaatggtaatttatgcacttgttcaaggcgttctttttgcctcttttcttcctccggc

SEQ ID NO: 19960 - DNA, 1475 bp, Emericella nidulans
ggcagactgcgcgacgaagattcaatatacgatcgcgacgatggaactctacgtttgagactagggaatggtctacgccccttgcacgaaccctggcaaatgttatcaagacgacagggccggtgcccattgcggcatttatgcgccaagtactcacttctccagaggggggttattacaccaccaaaccaggagggggcggagaggtattcggaaagaagggcgactttgtcacatcgccggaaatatcgcaagtatttggggagttagttggtatatggacaattgcggaatggatggcacagggggggaaaaagagtggagtgcagctcatggagattgggccagggaaggggacattgatggatgatatgttgcgagtacgtgcatgcgtttccatctcttccgaggtactttaacacagtgtatgctcactatggtagacttttcgaaacttcaaacctttcacgtcgagtctcgaggcaatatatctggtggaggctagccctactttgagagaggtccagaagcagctactctgtggtaatgccgttatggaggaaacagatatcggccatcggtgtacgagcaagtactttaacgtgcccgtgatctgggtggaagatatccggctgttgcctcatggtgagtcttgcccggtgcccaataaagtccttcggctgagccccatctgcagaggaagataagacgccgttcatcttcgctcatgaattcttcgatgccctcccaatccacgcttttgagtcggttcctcctcaccggaaaatgaacagcaggaacaggagattatgacacccacaggccggacgaaactccagagaccaccaaaagcagcaaacacacctcaatggcgcgagctaatggtcactctgaacccgaaagcagttgacgagaacattaaagatgagccggagttcaaattaactctagcgaaagcatctactccgtcctcccttgtcattcctgaaatctctgaacggtaccgggcccttaaatcccagcctgggtccaccatcgaagtcagcccagaaagccgcatctacgcatcagatattgcgcgacgtatcggcgctcatcgcagccccctcggaccgcagcggggcgcaacgcatctgcaccctctgcaatcgcgaagcgcattccttcaggagctgccctgatcatggattacgggacaatgtcgactgttccaatcaactcgctccgcggcatccagaaccacaaaattgtccctgcactctcttcccctggtcgagttgatgtcagtgccgacgtggactttacgtcgcttgctgaggcagccctggaagctagcgagggcgtggaagttcacggacccgtagagcaaggacacttcttacaggctatgggtatcgcggagcgaatgcagcaattgctgagcactgtcaaggatgagaagaagcgcaagatcctggaaactggatggcaacgcc

SEQ ID NO: 19961 - DNA, 1475 bp, Emericella nidulans
cgagtctccgaatactggaaaagtgagcctgggcctatcggtaatagtgagagtgactttgaaagatggagcttaccacgaggtatgtcggaatccctagccgaactacgatattcgacacgacgttgatgggctgggggtatcaggatcttggatacggacatattgagaattgcaagggcaaggccgcagctttcgagaaggctaagaaagaggcaacaactgacgctctgaaacgcgctctgcggaacttcggcaatgttttgggcaactgtatatacgacaaggactacatttccaaggtttcgaaactgaagacggtaccagtaagtggcctcgttccttggccttagttcatgacactgacatacccgcagtcaaaattggatgtaggcgatctgcatcgccatcccgactttgctcccataaaaaaagaaccaatgcgagtgaagccgtctctggaagacgacgatctgccccccaatccgtcaatagcgggaaggaacacttcgaccaatagtgccgctgatatggacgcggaattcggtagtaagttgatgcaatgtacagctcattttaccctaggtcgctgatcggatcaggtgatgtttttgatgaggctgatttcaatgtcggtgagggtgagtacccggatgggatagtagcagaagacactcaaaaaaggcaccaaccgccaacccctgttgggagacctaatgctcatctaaatctcccaaaacatgctcttggagcacaagcaagtggcaatcaacatgttgtcactccgtctaaaccagaaagacccatgaaccttgccccagcgggcaggcagattcctaaccaggccctaaacaaccgaccgttccctccacccgcccaaaatcaatatacaaatcaaagacaatccgttccgctccccggttcaaatggaggactacaaaatggaagatcaataccactgggccaacgcgctagtaatggcatggccacaggctctgatgctggcgcacaggtacccatcaaacaggaacatggtgcaaaacaaccaaacccagcaccgcaaaatacggccgtcccggctaccccaggcataaatggtcaagggcctccagtcgtgggatttctctccgcccgcggagccgacatgctacgtgaaaatccacatagcgccgccaccgtagccccagccttcaatccgcacgcggagagcccttctatccgcaagacggccggcgtcgaccacaccaagagcatacccatctcaaaaccaatgctagccggtagcgcctcaccattatccaaccaaacacgcgacttcatcaatccctccgcagaaatgcatcgaaagatcggcgcccccagcggcagtgtggtcggcggtcccatgaacagaggtccatcggtatcctcttaccgtcctctaacacggccgaatgttgaccctaaagctgctgcacaaaacaacaccgccgccg

SEQ ID NO: 19962 - DNA, 1477 bp, Emericella nidulans
taaagatgctgttatgtgtatttcggcgaatcaagttcttttgcctgccgtgttctgcggtatcatcggagcagggggtgtctacacagcggcatcgacggcgcttacggcttcagaagtctcaaagcagctaaggcagtccaggagtaaagtgattgttgcgtgtccggagaatagggccaaggcgcgggacgctgcgcgggaatgtggtataccaccggatagggtgttggtactagagagtatggggcaccggcggcttttatgccaaggtaatttcgggaggaattacctgcaagcaacggcagagctggattgggagcggattgcggatattgatgcgctggaaaataccaccatctgcctgctctattcatctgggacaactggtccgcccaaaggggttatgttgtctcacatgaatcttgtttccgaagccctattcactcagttggtgttgcgggactctaaagaagggaagccacatctgaacgttccctatcgaacagtcggacacctccccacagcccatattgcagggtgtctgggatgtttcatcacacccgcggttgccggagggacagtgtactggatgcccaggtttaatatcgatgagttcattgactattgtaagaagtatgcagtgaccttcttgtcaacggccccgccggtttaccatggaattgtgcggagtgaccgcgtgacagatcagttcaagacccttgtccgggccgagtcaggtgcagcgcccctgagcttagagcttcaagagcaagcggaaaagatgctgggatgcaccatcagtcagcgttggggaatgaccgaatccactggaagcgtgactaccatgccctggggacaatccgacaataccgggggtatcagtccgttactacccaatatgaggttacggctcgttgatgaacggatgagagacgttagaagtggagacgagggcgagatcctgctcaaagggccgatgatcacgaaaggttatttcgaaaacccggaagcaactgcagaagccttcacaacagatggctggtacaagactggagatatcggagtctataaagatggaaaaataatcatggttgaccggaaaaaggtaagcacataagcatcaccatcgaagtgaactgctaaccctcgcccaggagctcatcaagtacaaaggattgcaggtctctccggtagagatagaaggattccttctcacacatcccggcgttgcagatgttgccgtggtcggcgcacgcgatccagaggctccaggtaacgagctacctcgggcatatgttgtgatcaaggctggaagcagtgtctctgaggcagagttaaaagagtacgtcaagtccaatctggcaggccacaagcagctccggggtggagttgtattcatagacgagatacccaaaagtgcatcaggaaagatcctaagaaggatactgcgggaccaagcaagaagctcggcggg

SEQ ID NO: 19963 - DNA, 1478 bp, Emericella nidulans
cattctccaaggtataaagttgggacaagtcaatctcaggaacgaattgtattatagacactgccaacgcatttcagaggtctacagatgtcagtcccaaaacttatcaccaggtcaaccgcccgcgcggcatccacatcaacatccgcccaacttaccaaggcagcgggtgatatctccagtgtctttcccagcttgaggccggactataaaccggagccgttgccaccgcggtttaaagatctaaaggagcgaatatttcgcagaaacggggatgctttgaagaagagctgggaaaggcttttgcccagtctggaagaggaggtggacaagattaaggcgaaaaagagcggagtatgtatgataacatagatgagtaccttaagactgacggtgctagatcatccctatcgtggattactctgacgttgtttccggtgatgtgtctccggcgctcctggcggagatccgtcatcgcggatctgtcgttatcagaaatgtggtgccgcggaaagaagcacgggcttggaaggagagaatagaggattacgtcgcagccaatcaggataaagtcaaggcatttcccccagactcaccggcggtgtttgagctgtattggacgccgtcgcaagcagaagctcgagcccactccaacgtgctagatacacagcgtttcctgcagcgcctatggcattcgacagaccccaacacacgaatctcgacgcggtaccctctttcatacgctgacagattgcgtatccgacagcccggcgacagcaagttcactctaggacctcacattgatggaggctcattggagcgttgggaggaccccgagtactccagggtatacgccaaaatcctggaaggcaagtgggaagaatacgacccatgggacgcaaagcaccgtatcgccgcaaatatggatttgtacaacggtgcgggcgcctgctctatgctgagatttttccagggctggctgtccatgtccaagacagccccaggcgaaggctcgctacatgtctgccccatgcttgtgcacagtactgcgtacactatgctcagaccattctttgacagtcagacactacagccagcgatggacgctaccttcccggggtcggtgcctggtgcgtgccaggagtacaaccctattacacatccgcatctcgagctggagacaacgatggtgtccgtccctgaggtagaacctggtgactatgttgcctggcattgtgattctctgcactcagtcgacaaggagcatcggggtaagggtgactcgagcgttctctatatcccagcaaccccaatgtgcgatatgaacgtcgattacctgctcaagcagcgaaaagcggcgctcgcttactccccgccatgggacttcccaggggccggcgggccaggcgaacttggattcaagggagcgttggactggaattcgattagtgctgagggacagcgagccatgggcttgg

SEQ ID NO: 19964 - DNA, 1480 bp, Emericella nidulans
cgatggcatcggcggttttcttcctagatctgaagggcaaggcaagtgaattcaggctagacagtcaccatcaccccaattattcgtccactgcatacagctaagccacctcgtgctgaccgacctcttttttgtagactcttctagcccgaaactatcgcggagacattccaatgtccgccgtcgagaaattccccatcctcctcagtgacgccgaagaagaaagctccgcggtacctccgtgcttctcgcacgaaggaattaatgtacgtttggtttggtgattgcgcctggcgacggtttcccttacgtgtcgcgctccccgctgctctccccgcaacccgcattgtcattggacttggttctgtgcgcgctgtaccagcacattttagctacctcatattgcaggtagtttagataaattctggattacgagcctctgggccgtgctcatgttttatgtttgtctgtactaaccaagttatagtacctctatatccgtcacagtaacctctatatcctcgccttgaccaagaaaaacaccaatgcgacggaaatcctgctctttctccacaagatcgtcgaggttttcacggagtacttcaaggtgctggaggaggagagtatccgggacaacttcgtcattatttacgagttgctcgatgagatgatggattttggataccctcaaacaacagagagcaagatcctacaagagtaggcctcaccctattttgaacactggagcacgttaggttaattgttaatcgctaggtacatcacacaagaatcacacaagctggaagttcaggcccgaccacctatcgccgtcacaaatgcagtctcttggcgaagtgaaggcatccgctaccgcaagaacgaagttttcctcgatgtggttgaatctctcaatctcctcgtatccgcgactggaaacgtgctacggtcagagattctgggcgctatcaagatgaagtgttatctgagcggaatgccggagctccgtctcggcttgaacgacaaggtcatgttcgagacaaccggtcgggcatcgcggggtaaggccgtcgagatggaggatgtgaagtttcatcaatgtgtccggctgtctcggttcgagaatgaccgcacaatcagcttcatcccgccggatggagagttcgagctaatgagctaccgtctgaacacacaagttaagccacttatctgggttgaatgtttggtagagtcgcactctggttcccgaattgagtacatgttgaaggtgcgtttacccctttccctctgttcagtccatacctaatctataacatcaggccaaagcccaattcaaacgccgcagcacggccaacaacgtcgaaatccttgtccccgtcccggacgatgctgactccccgtcgttccgcacaaacatcggcacagtccactacgcgcctgaaaagtccgccatcgtttggaagataaagcagttcggcggcgg

SEQ ID NO: 19965 - DNA, 1480 bp, Emericella nidulans
gcgcaaccgcagaaaccaaagttatctgaaaaggaataccaacacctgaaacttcaaacggcccggctaaagcagaagtttgagttcggggttacgtcgctatcgcgcgcactcaagaccgctcggggctttgaaaggcagaagctcgggaggaggcagaaagtcgcaaagggaggaccaggaacggagatcgcagttgcgcatgcgaaaaaggcgaagtcgaaaccaaagtcgaatgttagtcctgaggagactctcaggaggatcgaaggggagattcaggtcttgaaggttggttcaaccttttccttccccgtgtatttcgttgatttcggaatgagctcgtttgactgacttcggtgcagagcctcgacccaactacgactgcggaaaaatatctcttcaagcagctagccaaaacgaaacggattgccgagtcacctgttttctaccgtttcaaacaatctaaagaaaagaagatcaagcttgagggaccaaagagtacggaggaagcgaatgttacagcgagactttttaagtcgaatcccgtgcagaatgtcttgccgggtattatggagggattaaggggattgtttggattggaaggagccggggcgaaggggaaaaaggacgagagggacggtgggaagaggaaggctggagaacaggctgggggtagaaaggatgtttccggggatgagtccgtgtctgggtctgaagatgaggatgaggccgatgcgcgagacgcggaggtctggagcgggatatagacatgaaggatgcagagagtggtgacgacgaagaggactactcgcacttcgacgcacgactagcctcagactcggaagactccaacgacgacctcttaagtgaagacaacgataataccggatcaagacatgctcgccgctcctccatgtccatctcgctctccccatcacgctcgccctccccatcgcaatcgccaccaccaaagaaacccaagtctacatccgcttccaagacccccgcgacaagcacaaccttcctcccgtccctcatgatgggtgggtactggtctggttctgagtccgagcctgaggagctcgaagaagccccgaagcggaaaaaccggatgggccagcaggcgcgtcgggcactctgggagaagaagtacggtgctgcggcgaaccatataaaggcggagcagcagaaggggcagaaaggtaaaggaaaagggggcagagatgccgggtgggatttgagaaagggtgctacgggcgatggggatagggatcgagatcgtggaaggaagaagttcgggactgggtcgaatgctatggctatgagtgggaaggataggtttgggagtggtactagcaccgctaaagagagaacgactcagggtgcgaagagcaagaagacaaagccgcaggatgataagccattgcatccttcttgggaggcggcgaggaaggcgaaggagcagaaggcgacggca

SEQ ID NO: 19966 - DNA, 1482 bp, Emericella nidulans
ggcaccgctcggtgtgatacatggcaacaactcctagcttgtcgactcatccttggaattggggtatgctgtatatgaacttacagaccatgataccaagctaactagtcggaatctagataggtgcaaaggcgtccattgccccagtgtttgcagccgaagtagccgcagaccatttacgaggccggctgctgatgatgtggcaaatttttgacacgttgtacgtttttactcagaatattaccgccatctgctcagttactgagatattaatctattgcaagtggtattttcattgggttcctatgctactggattgtcggccgaagctggcgcggccttctcggcagcgccgcagtccctgcccttatcctccttgtcctcgtcttcctgtgcccggaatcgccccggtttctcattagaagagatagatacccagaagccttcctgagcctccgccaactacggggctccgatatccaggctgccaaagacctatactacatccacgcgcagctgcaaatagagactgaattgattaatgggaagcggccggaggagtggtgggccaaagaggtctatcaggaaaaggtaaaggcacagtcattcttccagagagttggggctcttttcagtgttcggaggaacctgagggcttgtattgcggcgtttctcgtcatggcagcgcagcagctttgtggggtgagtgaagtgtggccatacatactctttggtgctctaagattttatacagatcaacgtcctttcgttctactcgtctacgttgtttcgatcagcatcttcaacttctagtactaataacacgacgctaagcgatttctcgaatcccgctgacattgtcaactgcgaaatacccatggacgatacagtcgcgtggctgaacttcggtaggctacccacaagtccagatcggttccaagcactcatatgatctaggattcggtctcgccaacttcctattcacaatcccagcgtatatgttcatcgacagaagaggccgtcgtatccttttgcttgtctctcttggggggatgttcttcaccctggtcgcaaccagcgggttcttcctgatcatcacgccagacgatgcacgtaaaggcctcgtttctacgtttacaattgttgtgtttacacttttctacgggatcggggctggtcctgttccattcacattcagtgccgaagtcttccctctggcattccgcggtaagtatgctctacaaacttcttggtgcatcatgcgcgtttctgacagcgagactgaattacagaggtcggcatgagtttcagcgtcatggtgaacttcatcggcctgagcatcttgattctctttgtgcccccgctgactactgccttctcgccggatgaccccaacagagataaggcgcgtttagtaggccagtctaatttgctctttttctttacgtatgtgcttctttcatcttgacactggaaaaatag

SEQ ID NO: 19967 - DNA, 1482 bp, Emericella nidulans
tggaatggattctgcgagctggaatcggaaccagtatgtatatcttgatttatgttgccccacccatactcatactcaaaaggctctcttcaatgtgatgctccgggaatttggagttagaggtgtcaaagttcaagagattgtatcattggatgatgaactcttggctttcttgaagtaagggtctctgagcctcaggatacatgctgtatactgagcacgcgcaaatccgtacagtaagccagtttacggcattatatttttgttccgctggcaagaagatgatccagagaaacaggaagcaagctgtcctgaaggactttggtttgcaaatcaagttcgtattcccagctctattttcaccgtcttgttgttgactcacgggcgattgtcatgctagacagcgaataatgcctgtgctagcgttgctctcctgaacatcgtcaacaacattgaaggcgcagatctcggagagaatcttcggagcttcaaagattttaccatgccatttacacccgcactgcgaggagacgcaataaataactttgaattcgtcaaaagaatacataactcgtttgctaggtacataatcataagcagctacgattgtcaagtggatctaacattgcgcgtaggagaatggatatgctcaattccgacctccagcttaaatacgaggcggcattcaagcgcaatcggtcgaagaaaagtagccatgaggagcatgaggctgatgcgggattccattttattgcctttgttcctgccttggggaaggtttggaagtttgatgggttagaacgccagccccaggccctcggttcgtgctgtgtaatgaaggaacatatggcgatgttgctaatatagactataggtgtattcgagccggaaagcgattggctagacctggtaaagccgaacatagaggcccggatggataaatatgggatcgagttctcaatcctgagccttgttcgagatccgctaccggatcttgtcaaccgactcgcagtgaacattaaacagctgcaggcgattgagagggctataaacccacaaaagccagaactgggttgtgacgaatcgtcggctagtgaaccccttgatgagaacaccctcttgggccccgatgaatcttacggcgtgaccgaagaagccttcaacaaggcagctatgcctgttggggaagcagaaaaatattcagggtttacagcagatgaattgtcaaaacaccgcacggaactgagcagggcacaactagacctccgaacggctattcgagaggaacagcagtcgcagcgggcagacgaagagtatgccgaggggcggagatatgattatggaccggcaataagaacttggctacgctttttggcccggaagcggattattgaagacttgattcccatatcccaacagcgatggtagaacgaatatggtcttagttgccctgattggaagatactctacttacagttgtgc

SEQ ID NO: 19968 - DNA, 1483 bp, Emericella nidulans
tcccgtacttgtgcgggttcgagacacagatcactgggagcacaagcccgttctgcgacgtctttacgaagaaggagattctacagtacgagtatcgtcaggatctgcgctactactacggcacgggtaggagtcggagccagccccttgagtgttgagatgactgacgctggccgtaggtgcgggtgccggcaagaatatgaccgtccagttcccagttctacagggcattgtaaatcttcttaaggaaggccctaacgccaccacagagacgagcagtggctcagagaagcttccacctctcattgtggctttcacccacgacaaccagatcaacgagctagcgtctatccttggcgtcttcgacaaccaagaaccgctctccgcgcagcgaatcgatagagatagagtgagtttgacatcactatccacagccagctagtctaacctccctagattttcgttagtagccgcacatcgcccatgagggcgacaatcgctttcgagcgtctgaactgcaaggcccgcaagggcaattcagtcaacgtgcgtattctgctcaatgatgctgtttaccgtaagtggattcaagagtccaggccgcttctttgctcaactccatttgacaaattgtcctagctgtgccttcctgtcggtccggaccaggtcaaagctgccctgttgacgaatacgccaagtatgtcgccaaaaaaaagcgcaagtatggctcatatgcgtctgtttgtgggctttcggaggacgagttgacgaccattggtgaggacgaatctgtcactttcttcaagaatctgacgttgccttttttgaatattgttaagccatgatttgggcaagatcatgtggtcggtatctttgcttgtctacagtgaattgagcatatatgagctattaatagtggatgggtgcaagatcagctcggtgaatatctggtatatagcgaaccctgtctcttctacaggttattttacctttctcaatctctacatggtttttatctaaatatcccgcatctactttaaacctcctatattggaacctgactatccgtctgccacttttcccctccaaccttcgtttacggagtacaccttctacacaacaacacaacacccaccatcaaaatggcaatcctcagcaccctccgacgcaaaacccgtctttcctccctaacactcctcgtgaagcttcttcgggctatcattgtttcagtcgtccgtttcaccataaagacaaagccggacccagatctcatcgagtacattccatcaatcaccatctctccctcgaaaaagtctgaaaccacaattacagctccatcaccaacccacaacataaaggtacacatctacaacccacctccagcccaatcacaaccgcaaccaacaactgacaaatccaacccaagccccgtcttaataacggcctgcgggtccggcttcataatcccaggcctaggcctcga

SEQ ID NO: 19969 - DNA, 1486 bp, Emericella nidulans
ggtctgggagagatggccacttggttacctcgctcttctggtttcactggttatgccgttcgcttctgcgatcctgccttgggttttgcattgggttatacgtacgtcgccaatgattcgattcgcgcgcaatggctgctgacagcgatcttgcagatattggtttaaatacattattgtcacgcccaatcaattaacagccgctgcgctggttatacagtactggctgcccgccgacaaagtcaatcctggagtctggatcacggtattcctggtcctgatcgtcttcatcaattactttggcgtcggcttctttggagaattcgagttttggctctcctccttcaaggtcgtcgtcatagtcggcctgatcttgctctccttcatccttatgctgggaggcggtcccgaccatgaccgcaagggcttccgctactggaaggaccctggcgcgttcaattcgtatattgacatgggccccgatggtaacggttccgctgctggacgcttctacgcattttgggcgacgctggtttctgccacctttgcctatctcggaacagagctggttggagtgactgtcggcgaagctcagaacccacgaaagacgatcccacgcgcgatcaagctgaccttctaccgtatcatctttttctacgtgatcagtgtcctgctcgttggcacactggtcccctacgacagttcagaactcaaacaggcaaactccgcgagcacctcttcggccgcctccccctttgtcctggcgattcaactctctggcatccccgcgctcccccacatcctgaacgcctgcatcctggccttcgtcttctcggccgccaactcggatctctacatcgccactcgaaccatctacggtctcgccaaggaggggaaagcccccaagatcctcacgaagaccgaccgccgcggcgtccccttcgtagctctaggcctctgcaccctcatcgccctcattgcctacatgaatgtttctagcagctccaagaccgtcttcaagtacttcgtcgacctcgtcagccaatttggtctgctcagctggatctccctcctcgtcacacatatctgcttcgtcaaggcgcgcaaagcccaagaaatccccaagaacgagctcgcctacaccgctcctctcggcgtctggggctcctatttcgcccttttttggtgcattgtcgtctccctaaccaagagcttcgacgtctttactggtgacacattcaactacaagaccttcatcacctcttaccttggaatccccctctacctcatcctcatctttggttacaagttcaccacccggtgcaagcgtgttctgccccacgaggcagacctctacactgacaaggacgctatcgaccgtgaagaggcggcgtatcttgcgcggcaggaggcgaagagggctgcgcagggcgccaaccacaagcaggccaattggttctacaagacttttgtctcgtggctgttc

SEQ ID NO: 19970 - DNA, 1488 bp, Emericella nidulans
cctatcagagaggatgcggtctttggtgaaatcagagaaggcggcgtcaactaccgcgatgtaagtggcccatggtcgttttgaataagattgacctaatcaagtcgtggtcaggttggctggaagggaacgacagccttgatgatgaaggcccagctggggctgggcgttctgtctatcccccaggtcttcgacacagtcggcctcataccggggatccttattgtgttggcgatttctggaatgaccggctggtcaaactggatggtgggcgtcttcaagaggcgccatccagaggtgtacggaatcgatgatgttgggaggatgctatttggccggattggcttcgaagtgctgggtgcggcgtataccttgcgtgagtgatattcgccatacgctcttttacttgctaatgttcccagtttggatttttgtctcgggatctggcatgttgagcgtgtcaatcgccctcaacgccctctcctcgcacgccatctgcactgcaatctttgtggccatttgcgctgttgtcgggtttgggctttcgagtatccagaccctcgccaaaatgagctggcttgcatgggtaggtaccgcctgtatcattgttgcgggtgagtgctctactactctttgtagttctctttcctgaccggtcccagtgtccacggtaacaattgccgtcggagtccaaggccatcctcccgcaatcgacggcgtcgtacccgaggctgactacaagctgttcaacagccccagctttgctgaagccatggccgcggtctcgacggtgtgcttgagctacgccggaacgccggcgttcttcaacattgcagccgagatgaaagaccctaggctctacactcgggcccttgcaatctcccactcaatcattacggtcatctacatcgtgtgtgggacggtcgtgtactactactgcggttctcatgttgcatcgccagcgctgggctcggcaggggcgctgatcaagaagatctgttacggtatcgccctgcccggcctggtcgtttccatggtcctcctccttcatgtaaagtcctctccctcttcgaatgaaagcacgcttcgctgactctcccagctacccgctaaacagatcttcgtccgcatgctccgcggctctaaacatctcacatcccacacgctgatccattgggtagcctggttggggtcgaccttcgctgttgctctgattgcctacataatcgcgagcggcatcccagtttttagtagccttgtctcgttcgtgggcgccctgttcggaacaccgatgtgcttccagccttttgggtgtatgtggctatatgataactggggctctgggacgtcgggtaagccactaagctggtggttcaaggtctgctggagcagtttcatggttcttgccgggtgtctcttgactattgcagggacgtacgggtctattgttggtattatcgattcttataacgcctccgggggttcaag

SEQ ID NO: 19971 - DNA, 1490 bp, Emericella nidulans
tttttgtcctcttaccgatacccaagcacaagcatatgagagacttttagacagtgatatcatccattacattaagacctcgaccaataaatgcgactgtggttccgggaggaaggccgggtggtgctgccatcaatatttaccctcaggcaggcgttggcaaacttacgtgtttccagctatgcaaatcctgcagaagctgagcaatcatcttgctatcctcattccacagagcacggactcgtttgagaagcaggaaaaggacaaggagatgctggagattgcggtgcctgatgagtgggagaggctatatcgcacgagagattcaataatcaactatgctgatgctgaatattgcggtaagtggaaagtcctcaggaaacttctgaaatggtggcacgggaatggggacaaggttcttgtgttttcgcacagtgtccgcctcctgaagatgttacagatgcttttcaaccatacaagctacaacgtcagttacctggatggatcgatgacctatgaaacccgggccaaggttgtcgacgagttcaactccgatccgcgacaattcgtgtttttgatctccacacgggctggcggagttgggctgaatatcacatcagcaaacaaggtcgtaatcgttgatcctaactggaatccgtcccacgatctccaagcccaggatcgggcgtatcgaataggccagacacgcaatgtagaggtctttcgcctcatatccgccggtactattgaagagattgtctatgcccggcagatctataagcaacaacaagcgaacattggatacaacgccagctccgagcgacgctacttcaagggcgtgcaagaaaagaaagaccagaaaggtgagatttttggcctccagaacattttcgaataccaaaacgacaacattgtgctgcgtgatatcgtcaacaagaccaatatcgccgaaagtaaagccggcgtacaggtcatggatatcgaactggaactggaagaagcgggctccgaggacggttcctggagtagaaatccagacgacgatgatgaagccatgagccaacttgccgccagaatccgaggcgaaacagacgacgaagttatttttccccaccggcaacaatccacaactccatccaaacacgacccaatccaagctatcctcgccggcgcaggcgtcgaatatacacatctaaacaacgaagttgtcggctcttctaaagtcgaggaacaactaagccgccaagctcagctagctgaggatgacagcctggccaacctccaagtcttctgcgactcgcaagatgaggtcgccggtgcggttgtagctccgacattccagaaaaacggccgaccggtgacatttaagtaccatcccccggaagacgtgatgaagcgccagttctgtagcatggcgagacggtttgggttcccgaatgcgacggaatttgcgcttgttgttgagagcatgacgcaggctgagaggaggg

SEQ ID NO: 19972 - DNA, 1493 bp, Emericella nidulans
atcccgtcctcaatctgcccgcactccggcgtcgcgtaacccgtctcgtggggggcctacttcagatttccagatgggcgcctttggtgcaccatcccgtttgcctccaggcaccacgtctgaaatgcggtttgcgttatccaactcacgccctgcatccataggcagcgcattctcattcccacgaatgggcatgggcagtggtgttactccgctcagtcgcagcaactcttctcaacccatgtcgcctcgtgcaggttcgggcaggtctaacacccgcacaggcagcaagcgcgagaagcagcaggcaaagaaagaggaggatatggccaagtccatgcccctcacagccggaaaggaggtcccgggtctgcaagtttctgccactggatggaaacctcgcagtattggccaggctgccgctgcttctggtcctacacctggtggccaccttcccccggatgttgttcagcgtaaggtcaaggccgctctaaataagatgacgccggaaaacttcccgcgtatatccagtcagattctggagattgtctcccaatccaaggatgagtctgacggacgtacgctccgacaagtcattcaacttacattcgagaaggccaccgatgaggcacactgggcttccatctacgccaagttctgcaagactatgttggagagcatgagcatggatattaaggatgagaacatcaaggacaagaacggcaatgttgtggccggtggtagtctgttccggaagtaccttctcaaccgttgtcaagaagaattcgagcgcggttggaaggtcaacctccctcctaagcctgagggtgtcacggaggaagcggctatgatgtccgacgaatactacgctgctgctgctgccaaacgtcgtggtctgggtctcgtcaagttcattggtgaattgttcaagctgggcatgttgacggagcgtatcatgcatatgtgtatcaagaagcttgttgattatgagggcactccagacgaagctgaggtcgagagtttgacaagtcttctgcgcaccattggtgctgccttggattctcccgacaatgagcagaaccgtaaatttatggacgcctacttccaacgcatcaacctcatggttcagactccgaacttgcctagtcgtctgaagtttatgctaatggtaagtcatccaatttctgtatggtgacaacagcatgctaatttttttttcaggatattatcgatctgcgtaatgctcgctgggtctcgaaggatgctgacaaaggtcctaagaccatccagcaaattcgtgaggaggtatgtgtcttcacatctgttgagatgattggtttcactaacttttctaggctgctcgtgcgcaacaggaggccgagatggaacgtcagcgccagcaagccagccgcggaggaggtggacgcgccgccatgggacgtggtgatgcccgtagctactcgtctggatacggacaggtacccccgccggat

SEQ ID NO: 19973 - DNA, 1493 bp, Emericella nidulans
  unsure (1)..(1493): unsure at all n locations
gattgcaaaccgcggcgagatcgcctgtcgtattattcagacgtgtcacaagctcaacatagctaccgtcgcggtctacgtcaatgagtatgttctccctttttgcatgaagacacgttgtcgctaacagaagcagagacacatcatctcgccatattagagatgcagacgaggccattaatattggaagcattgatcaatgccctcgcaatccgttcctagatggagaactccttatccgcaccgctctgtctgtaaacgcggacgccatccatcccggatacggctatctcagtgagaacgctgagtttgctcggtccatccgcgacgcaggaatgatattcatcgggccaagtgataccgccatgtccactttgggcaacaagcgtgcggcaaaagagtacctcagcaagcatgcgccagatgtccccctaatacctggctacgtaggatcaagccaagacgcaccggagcttagtaggattgctgcacagatcggctttcctgtcatgctcaaggcgtctgctggcggtggtggcaagggaatgcgaatcatccgggaagctggacagttgcaagccgagttggagcgggcacagtctgaggccctgcgttctttcggatccgccgattgtattcttgagatgtacgttgagagcagcaaacatgttgagattcagctactgggagactcgtatggagaggttgtctcgttcttcgagcgcgattgttcagtgcaacancgacatcagaaagtcatcgaggaaacgccgtgcacctttctgacggagaagacgaggcaagagatgagtgctaccgctgtgcgcattgccaaactccttggctacgaaaatgctggcaccgttgaattcgtcgtcgatgctgtgactggcaagttctatttcctcgaagtcaatgcccgtctccaggtcgagcatcccatcacggaggaggtgacaggcgtggacttggtctcgctgcagctctatgtagctgcagggggaagtctacgtgctctacctgcgctccaaggcctcacccaacaaggtcacgcaatcgaatgccgcctctgcgccgaagatccacgcaagaacttcttccctgagcatggcaagatccatttgtggctgccagcatccggcgtgctggggccaggccgtgatgttcgctacgaggctgcagtacagtcaggctcctcagtctcgatatatttcgactctatgattgcgaagattgtcgtctgggcaccgacaagagccctcgctatagagaaaatggtcaaagtcctcgcgcatacaatctgcgctggtgtccaaaccaatcagcttctgatgcagcgatgcctcctgcataaggcattccataaccctgcatacacaacgtctttcctcagcttacatctcgatgagctacttcacgagcctggtggcctaattgctgagatacgcaagtccctgccgatagtcccggcagttgctctgcgtcacctggcc

SEQ ID NO: 19974 - DNA, 1495 bp, Emericella nidulans
tcacacctcaatttgcccccagactatgccgatgttcgtgaacaaatcgaaacactgcgcacgatcgcagcaactccagatttatcgcgtcgcggctatgtgcggcagaaacaatctggaaagctatgggtccgcgagcggcttgaacagcttttagatccgaatagttttgaggaaatcggctctttgtccggcacagtagaatggaagaaaacaggaccgatgcgtgagaagccagtttcattcgtgcctagcaataacgttcagggaatgggaaagctgcgtggacggcgcgtgctgctgacagcagacgatttctccatacgcagcggacacgcagacggagcttcggcggggaagacaatttatctggagaagctggccgttgcactcaagctgcctgtggtaaaactggttgatggtagttctgggggaggtagcgtcacaacgattcggaaggaaggatggagctatctcccgtatgtgccaatgtttcactatgtcatacagcaattgaatgacggcatccccaacgtcggggcagttctgggaccagcggtatgctccccttccacccatatatgcacacctgctaatacgctcagatcgggcttggagccgcccgtgtcacgtcgtgccatttctccgtcatggccgccgacgtaggcgccctgttcaacgcaggtccagaggtagtaaagggagcaacgttcgaagaaggcctcggctttcaggaccttggcgggcccatgatccactgtacgaatggaacgattgataacatggccgctaatgaagccgaatgcttcgagcagctacgtacagtgctctcctacctccctaactgcggtcgatacaatgcgccccctgtaatcccgtgcgatgaccaagaaatccgagaagacgagtctcttcgccggattatcccccgcaaacaaactcgcatgtataatccctggacgatcatcagaagcgttgtggataacggctcattcttcgagattggagctctctggggccgcaccgcaataacgggtcttgctcggctcggtggccggccagtgggtataatttcgctcaactgtgaagtaaacagtggcgctctagatgcggcaggaagccagaagcttgctcgacttctgaagctatgtgacgtgatgaacctgcccgtgctgcaatttgttgacgtccgtatgtactccgcccgctcatcgtgagctcaatgatagctaacttccagtgtagccggttacgcaatcggcaccgttgccgaacgaaccgcgacaatgcgatggggtatcgaactcgcaaaagcatacttcagcaccacaacgcccatcttcagcgtcattacccgacgtgcctacggcgtcgccggcggtgtgatgctcggcgcgagagacccgcacgtccaggtcgcctggccctcgggacaatggggttcccttccgctagatggcgggatcgaggttggacatcggcatgagttgcggga

SEQ ID NO: 19975 - DNA, 1495 bp, Emericella nidulans
cccctgaggaagaggatcctacggaagatcgaccttcagtatgacgaaccttgtatgcatgcgctcaataactggccgtctcccaagtaccatcccggtgatgggcctctgctacatgctccagtacttggacaaggtaactctgggctatgccactcagctcaacctacgaacagacctcgtaagcctatccacccacctgcctttccaccgcatcctattcaaagcaaacattacgtccttcagaatcttcacggcagcgagtacagctggtgctcttcggtcttctacttcggaaatctcttctggagctggccttccagctatatctccgtccagttcccgctgggcaaatacctaggcgcgtcggttgcggtctagggtgttgtgttcgcaacccatgccgcatgcacgaactttggcggccttcttactgcccggttcttcctgggcgtcaccgaggcggctgttgcgcctagctttcgctcatcatgggaatgttctatagaacctctgagcagccctcaaaaatggtgctctggttcctcgggaacgccgtcgccaatatcgtctccggcttgattgcgtatgggatcgggacaaacgacccaaacatcgcttggaagttgctcttcatcatcgtagaatgcgtgacggctgcatatggggtctttctggtctttgtcctgcccgactcgccatcggaagcgtggttcctgaaagcgcataagaggaagattgccgtacaccgaaccgtcgagaacaggacaggcgtgatggagaaggcgtgttcagagcagatcagttggtcgatgctttgactgatccgcaagcttggttgctggtcgggtatagcctcacccaaaaatattcccaacgggaggtttttcggtagtatcaatatgcaggaagtgcagtgcagtgtatcgaggcgtgatctagggcgctgacggggaacagttcagcagtataattatcaacggctttggcttcagcgagctgaattcgctgctgctcccagcacccggcggtggtcttcagatccttgcattggctgtcatctgctgggcagctacctacgccaaaaagagtcggattatcctatgattttggtggtcctttttgcacttgtcggcgttatcctcatgaatacgctcccggactccaatcgatggggaagatgggcaggtatcttcctcctcggtcccttcgcaaccagtattctcatctctttgagctaaatacatcgaatgttggcggcttggcgaagaaggcgattgtctctacggtgcttttccttgcatattgcacgaggaacatcgtcggtcctcagctgttcttgacaagaaggctcccaaatatcccgtaagtagcatatcgtcggtggattttcatacctggctgacagactgcatagacttggctacgaggcgtccttgttggctttgccctcgccatcctcttcctcgtccggctttatatctactacgagtgc

SEQ ID NO: 19976 - DNA, 1500 bp, Emericella nidulans
tcgcagtgctcgacggaggaacgggtttcctcaaagtcggatatgctgcgcaggtacgtctgtcaagtcctcgagtttctcttctcagtctagggctccgtaatgactttactcttattttacagaacttccccgagcaccagttcccttcgatagtggggcggcccatcttgcgaacggaggaacaggctggcgatattgttgtcaaggatatcatgtgcggagatgaagccgctgccgccagatcgatgctccagatcagctaccctgtatgtccacatcccgctcgttctacacctcgccatggaatgctcgcgagttccgctccccagattcccaatggtagtgtgtttacactctggggctgattcctatgaccgctatgtagatggaaaatggtatcgtcaagaaatgggatgacatgcaacatctatggaactacactttctacgataagatgaagatagatcctaccggccgcaagatcctcctcactgagccgcctatgaacccgctgaagaaccgcgaacagatggcggagatcatgctggaacactataacttcggcggagtatatgttgctatccaagcggtccttgcactatatgctcaaggtcagtgcagaggcaaccgaaaattactcagttgctgatctggcggactctaggtctcagcagcggagttgtcgtggactctggtgacggtgtcaccacatcattcctgtttatgaatctaccgttctaaatcaccacatccgccgactggacgtcgcaggtcgtgatgtcactcggaacctcatcgcgctgctactccgccgcggttatgcgctgaaccgtacagccgacttcgagaccgtgcgccagatgaaggagaagctcgcctatgtgtcctgcgacctcgaactcgataggaaactctccgaggagaccactgtattagttgaatcctacactctcccagacggccgtgtcatccgagtcggtagcgagcggtttgaagcccctgaatgtcttttccagccgcacctggtggatgttgaccagcctggtatggctgagttgcttttcaacaccatccaaggcaccgatgtcgacgtccgctctagtctatataaagccatcgtgctcagcggagggagcagcatgtaccctgaacaaccgacacggctggagaaggaattgaagcagctgtggttgacacgagtactcaaaggcgatccagaacggctgagcgtacgtcatctatcacactaactgctcagtcatctaagctcgtgctgactcgacacaacagaaattcaaagtccgcatcgaggacccacacccgacggaggcacatggtatttttaggaggagctgtgctcgccaatctggtacgttcatggttccctttctactgccgagctcatccctttacttaccgtatcatgaaacagatcgcagacaaggaagacatgtgggttaccaagcaagagtgggaggaacaaggagcacgcgcgct

SEQ ID NO: 19977 - DNA, 1500 bp, Emericella nidulans
gcattgcctattcataaggcaaaaggaagcctggtcattgcgggaacagtgaatgggacaagcgcagttgacattaaggttattcgcactggcaaggacactcagctcagcaagattgtcaagctggtacaagacgctcaaacaagccgagcttccattcaacgcatggcggatatcgtcgctggctattttgtaccatcgattatcagccttgggttggttacattctttggctggatgtttgtgagccacttgctgcctcaccctccgaagatctttgtgacaaaagaaggcgggggtaaggtcatggtctgtcttaagctgtgcatctcagtcattgttttcgcctgtccgtgcgctctgggactcagcacccctacagcggtaatggtcggcacaggggttggtgccactcagggtatcctcgtcaagggcggtgctgtactcgaggctgctaccaagatcacacatgttgtgtatgacaagaccggtactttgacaaccggacagatgagtgtcaccgaggctagaattgagcctcactggagttcaagtgactggcgtcgtcgactctggtggttgattgttgggctggcggagatgaacagcgagcatcctattggcaaggcaatccacttggcagcaaagagtgaatcaggaaattcgggcgaaggtggacttccaggaagcttaggcgatttcgaagctcgcatcggcaagggcatagctgccttggttgagccagcttccggtgtcgaacgcgtccgctaccgtgtcctgattggaaatgctgcttttctgcaatcgcacagcgttgctgtcccagaatcagctgaaacgactccagatgcttccggttacaagaattcccgggtcggcatcacccaaatccacgtcgcaatcgacggtcacttcgccggcacgatagctctccaagataccgtcaaggtaaccgccgtagctgctgtagccgccctgcaccgaatgggaatctcgacctctttgattactggagactcccgcgcagcggccatctcaatcgcctcggctgttggcatcgcacccgaagccgtgcacgcctccgtctccccttccgataaacagtccatcatcgcatccctccaagagacaggcgatcgcgttgccatggtaggtgatggcatcaatgactcccccgccctggccaccgcgtctgtcggcatcgctctcgcctcaggcacagacgtcgccatggaagcagccgacatcgtactcatgcggcccgacgacctgctctcagtcccggctagtctcgccctttcccgttccgtcttcaaccgcatcaagctcaacctcgtttgggcctgtggttacaacattatcggcctgcccttcgcaatgggactcttcctaccctttggcgggtttatgctcccgccaatggctgccggtgcggcaatggcgctttccagtgtctccgttgtagtaagcagtctcctcttaaaattctggagacgaccc

SEQ ID NO: 19978 - DNA, 1502 bp, Emericella nidulans
cggggcgaaacctgatgacctaccacctcccaacaaagggcagtctagatagatgggccgaagacgtaagtgacgagagctggaatttcgacaacatgctcccgtacatcatgaagtcgcaaaggttcacaccaccaaacaacaacctccgcttccgcaatgcaaccccgacgtatgaccccgctgtcctggggcgaagaggacgactagacgtgacttaccctaactacgccaatggtcttgcctcgtggctcgtccgtggctttcgggacatcggtcttgcggccatccgtggcttgaacggcggccagcttattggatccgcctataccctaagcaccatccagcctggcaaccagcaccgcgcgtcatcgaagacagcataccttgatccccttatcggacggaatttgaatctgatcatctatcagtcgacgcatgcgaagcggattctcttcagcaatgatactgtggccaccggcgtgcgggtcagctctgagggacaggaatatacgctctccgccagaaacgaggtgatcgtctcggcgggagcattcaaaacgcctcagctcttgatggtctccgggataggccctgcggccaatcttgagcgttatggtatcccgcttgtggcggaccgaccaggcgtcggacagaacctgcaagaccacactctcgctggcccctcatacagagtaaacgccattaccggctcctcgaatagcatccctgagttcataaccgaggcgcaaagacaatacaacagcaacccaccacgcggcgtgctcacgaatactggcgtagacattctgggctgggagaaagtgccagagcaactgcgaggcaacttcagcactgagaccgaagacgccctcgccagcctcccagaggactggccggaactcgagtacctacctgtctacggctactttggggatcaaaacaactacatggtcacgccgaatgatgggttcaactacctgaccatcgccgccgcagtggtttcgcccctgtccagaggcacagtggatatcgcttcgaacgacaccgaggtaaatcctatcatcgacccgcgctggttcgcgcacccgggcgatatccaagtcgccgtcgccggatttcggcgctcgagggcgctaatggcgtcccccgcgatggctggcattacgcttggaggcgaatcgtatcccgggacagacgtgcagaccgacgatgagatcgtcgagtggctgcgcgaagcatccaacaccgttcaccatgcctgctgcacggcgggcatgggcccacgggataaccctgactcggtggtcgacacgcagggaagagtcattggggtttctggcctcaggattgtggacgcctcgatcatgcctttccttcccccaggtcaccctatttcaatcatctgtaagttctcacttgcatcaattgctgggatcctaatgctaacgttgtcttccagatggtctagccgagagaattgccgagtcgattcttgctga

SEQ ID NO: 19979 - DNA, 1503 bp, Emericella nidulans
tttttaggaacccatttttgaagccgtgtctaaaaccattatcagctctgatatttcagctctgatagtacattgaacacagaacgcgatatgtccaccacctcgcctacctcgccgacctcatccacctcaacttcgaccttcgcctcaagcccaaccctctcacccgacaacctgaaaagacaacctcaaccgtccgcgtctacaaaccaagttcctactgtgggctcgctgaagaacttcaaacgctcggtctcgtacaacatccacacatccgtccctgaagaggacgcacaccggcacgcgcacaccacctcgcccactggatggacgcttgacgaagccggctgcaaccagatgatgaaagcgtcgctaaccggtctgcttaactgccaggaagtcaagagcggcgcggcgagcgcaccgtgcagaacatgcttatgaataccgaaagggatctccgacgcgcgcgaagagccagtttgaggactggggcgttgagtgcaaagagaagcacgaacgcgagtccagatctagctgtcagatccaataaaggctctctagatgggccgaagggggataagtgaacgaaccaactgccgtgcgatgggatatcgtttctttaaacatgccgcgtccagaaagcggatgagagcgattggcttgaaacatctatactggaaagcgacgcaatcacctctacaattccaaccgccgaagggcgtctcagagaagcgccaggctcgtgcccatggcaggaaaaggggctcatcccgccgttcatgcaaccgatccttctattgctagtaaagccaagtctatagcgcttctagaacaatcaaattgtggtaggatgaattctaggccatgaattcttagccttgaatcctaagccggatgggaaatccatcgctgtgtatgtagtatgacgtgttatgactgccgctcctgattggctggccgctattacctcgtcatgaagtcatgcggcggccatatttatattgacagagagtcctttcggttctgcaacatctaacgacgactttcagaatttataacgttcagaatgacaatgactatctcagctctccccctccgccgcaccgccggccttctctcccgcacccgcctcgctggcagtacgtccctcaactgcactgtaaaacaagccctaacaagaccagcacccctccgcttcgcaagcaccaagaaagcacagagtacgaaagaagccgacccagcctttagctccaacgccaagaaccccgtctccagcagcggcgcctcacaatctatcaacctgtcgcgcggcaaggaagctcgatcctctgatacagcggatacgcgatccgtgcagagccctatttcgtcacaggatggaccgacgagcgagcagcatgccggagaggagcagacgagcgcggacgcaatgatcaagaatgaccccagcgaaccggccgagaaaaagagggcgaatgtagaagcggcagggaggaggaa

SEQ ID NO: 19980 - DNA, 1504 bp, Emericella nidulans
gccggtaccgcgagaaagaccctgggcatctgtctgctcctggtagtggtgatactatggaccgcgtcgaactttctggctagtgtaggtatttgtccgaactgtcttggattctcaaacaagaactctcacactccttctcacagactatcttcgccgatgatacgtactccaaaccgtttttcgtcacctacctgaatacctcaatcttcatcctgccactcttcacaatcgtctccagcaggctctggagtctcttccgtgcggggaaattataccagatccagtcatttgaaaccctactacaacgctttgattccagttattcaagcgctgaatctgagcgcattctcagtcatgaccatggcactggtcctggcgccgattttgggcatgggcatgggcatgatggttccggagcgtggagcgcttctaggagaggtagtgtgggtaaaggtcatagaaaagagaaattaggtctgaaggagaccgcgaactgagctttcatttttgtttgttgtgggtgagttgtccctcaatcgaacttttgcgccgtgctttcattgtggtgaataatggctaatggagtccactagtttactgtaagtgatagggtgcaacatgggccttcctgaaatatgtgttgatcaactgcattttaaatgctaggcaaactacttctcaatggcatgtctacaatttactaccgtcggcagcaccacaatcctgacatctaccagcggtatgttacttaacctacacatgaacccaagacacacaatcttaaataataacctgccccaggcgtatggaccctaatctttggcgccgtgctgcgcgtcgagaaattcaccggccgcaaatttctcggcgtcatcgcttcactgctaggcataatcctcatatcccgcgtcgacctctccgcaaccgacgaccccagcgccggccgtgatggcagtggaagcacattcccacccaaatctgccggcgagatcgccctaggcgacgcgatggccgctttcagcgccgtaatgtatggcgtctacacggtcgtgctgaagcgacaagttggcgacgagtcccgcgtcaacatgcagctcttcttcggcctagtcggtgtcttcaacatgttccttctctggcccggtttcgtgcttttgcatctaactggtgtggagcccttcgccttacccaataccaggagagtctggatgattattctcatcaacgcgctctcctctctcctttccgatatctgttgggcgtatgcgatgctgcttacgtctccgctcgttgtgacggtggggcttagtctgacgatacccctttcgctggtgggccagatttttttgcagggggagtatgcaacgcccttatattgggttggggcgacgattgtttttgtttcctttttggttgtcaatcatgagaatcaatctcaagaggctgtgcaggggtatgatgttcttccgggggacgagagaggtgattaagtagtacatga

SEQ ID NO: 19981 - DNA, 1504 bp, Emericella nidulans
ggcacccctcgaccggaatctccgtcctcattgtcggtgctggaatgggtggactgatgacggcgttagaatgctggagaaagggccatgatgttgcgggaattctagaacggagtgagggacctgtgtattcaggtattttgttgatacgtctcgtgtattcccccagagcatgagaaaccgagtagttaactctatactttctcgagataggagatatcattgtcatgcagccttctgccgtatctataatccggcactggcccgacatgctccatgatatgaaagcggagcaagtccacgccgtcgttagctacgaaactcatgatggacggcacatttacggcccaaccgtcccctcgttcaatgaccccgagcacctggaaacacgcaaaggtccatttgttgcccccgctcaggttcgccggaaattctaccgcatgctcctgcgccaggtcgcaaggtgcgggctccgcgttgaatatggaaagacggtgaagagctattttgaagatgaaaaggatggcaagggcggcgttataatcgcaacaacaggagaagcagaggtcagagtggctgatatcgtcgttgcagcggacggcctcaaatctccttcagagatattgatagccggtcagcatgttcctccaagatcaagcgggctgagtatctatcgcactgcatttccgaaagatttagcaatgcagaatgagctcgtacggaagcgatggagcgatagtccacccatctgggaatactggcttggaccgggcatgtatcttggtgtcttcgtcggcgacgatattatctccttcggattcacgccccgtgatgacatcgttgaagcacagccactgaatcatgggagcctgatacagatcccgagactgtggcgcaggctatgctctccggtgcaggagactgggatcccgctgtgctagcgctcattcgaagcgcgccgaaaggcgcaattgttcattggcctctcctctggcgggaccttcgccgcgagtggacctcacctgccggacgggtagtgcaagtcggcgacagcgcgcacagcttcattcctacctcaggaaacggaggctcgcaggccttggaagacgcaatcacgcttgcaacatgcctccaattagccggaagctcgcagcgtgcatatcttgggaccaagatctacaatcttctccggtatgagcgggtctcttgtgcacaaaaaatgtcgttcgtgaattctcagctgaagacgggcacggactgggatgcgatctggaaggatccggcgaagatcaggacaaggtttcctaagtggatctttcagcatgatccggaggcgtatgcatatgaaaagttcggcgaggcgtttgcgcatttacttgatgggagagagtttgtgaatacgaactatcctccgggccatgagtttagggcttggacggtggaggaggtttggaggaatattgcagatgggaagagagtggaggatttgttggatggtgattgg

SEQ ID NO: 19982 - DNA, 1507 bp, Emericella nidulans
  unsure (1)..(1507): unsure at all n locations
atggctaccgttgcggtgggcactcctctagcggaggctttgagcaatgctattcaaccaaaactggtggagatgggctggagttctgatagtagcgattccgcgctgactgagtacgttattttaatgctcgtcaatggcaagactcaggaacagattgccagcgaactctcaaacgatctcctcgggctaggcgaaggcgatacacaagcagtggatttttcaagatggctctttgagcaagtcgacgctttcaaccagcaaatcaatggccagagtgcacagacatcgaatgacaacgcccaagcgattccgtcatttgacgaccaagagaccacaacgtctcaggtgcaaggccatgaaaaaggaccccagtcatctgatacgaacatgagtgacgccggaatttccgccntggaatgtaggtattcattgatgaaaaagacttgaaatcatactaatgtcgccgggacacagacctacgggaccaaagtcaatgcgcaacggccgtcaaggcggccaggcaggtcggggtagaatgctcaaccagatcaaccgaaacctagatcgcggggattctggattgcatcgtattcgcgaccagactggtggcggccgaataaactctcattcacgcggcggaaacaggggcgggcgctttaaccagaacggtaatggaaggctgtttggtgggcgcggtggcatgggtatggggaacaaccagatggcaggtgctgcgggcaacctgatgaacatgaacccgaacgatcagatgcatctgatgtccctccttgaagaacaagcgaggatgatggcacaactcatgcccggttttgtctcaccggcaataaacccggcgtttcagcagtctggcccacaacgctccttgtcggaccgagttgaacgcccaagagggccccgtcaacatggggcctttggaaatcgagcgcaacgtgcagactcgaaaaataacgacaccgatatggacatgacttccgacggtgccgtgcaaaatggccaggatgaaaacaacacagataacatttgccatttcaaccttcgctgcacgaggaaggactgccccttcgcgcatcagtctcccgctgcccccgagggtactcctgttgatgtttcggacgtgtgctcttatggtgcggcgtgcaaaaaccgcaagtgcactgggaggcacccctcgccagctgtgaaatcagcccatcaagcagaagaactttgcaggttcttccctaactgcacgaatcctcactgtcatttcaagcatccttcgatgccgctgtgccgcaatggtgctgactgttccacccccgactgcaagttcacgcatctccagactgcctgcaaattcaatccctgtcttaaccctacttgtccttacaagcacgccgaaggccagagaggtgcatttgccgacaaagtctggaccgcagactccgctaaagcaaaggcacgcattagcgagcggaagtttgtcaacgacgaggatgccccc

SEQ ID NO: 19983 - DNA, 1508 bp, Emericella nidulans
cgcttcgccaagcaagagcattccgtattgactgcttgaaatgacaggttcggaatgtcagccacgacactcagcctcgtctggaactggcagagacatccatacactgtcttgggacggcgaccacgatcctgcaaaccctttcaactggtcgatttcgcgaaaatgggccgtgacatatctcgccgcgctgatcagctttctgactatgatgaacgggactatcatcacggttgcgcactttgagatcgcagaacttttcaatattgacgagacggcatttcctcatacatactggccagttacaacatggccgtcggcggtgcattctctgctctgttcctccttcctctggcagaggactttgggactcggcctgtcttcctcgtcacatacttcgcgtttgtctgcttcctcatcccgcaagcagtcgctcagaatttcgccacattggttgccacccgtttctttgccggtgcttgtgtcgccatcttggctaatacggctgctggggttattgggaatgtatgggatactgagtggtcgagatcaatcccagtcagcctgtatatcttcggctacatggccggtagcagtatgggtccggttattggagccgccgttctccagtccttgtcatggcggtggataggctacatgcagctcatttggtttggagctctgttcccgatctactacttcttcttctacgagtcccgcggcgacattatcctggcacaacgagaccgaaaaatgggcaaaaacggcaaagacatcctacccggacaccccgcacattccaagctaaaccttcagaatctcgccgtcagctcaacaagaccagtcatccttttctgtaccgagcccgtcctcttcgtctcaaccctctggtctgccttcactgtaggaaccatcttcctcttcacccaatccgtcgaacaagtcttcattggcacttacgactggaccatctccaaaacaggctacgtccaagccgccgtcgtcatcggcgaaggaataggcttcttcttctccttcctctcccgtgaactctactttgcatctgcttcccgcaatacggaggttcccaatagcctcatcccagaagcaagactctacatggctgttctaggcggcctcttcggcatctctgcgggaatgttcacatacgcttggacatcgtaccccttcatcccatggattgcaccggcaatcagcttggccatggtcggcgccggtagcgtactcgtcgtaacgggtgtatctgactacgttgtagacgcctacagccagtacgcgggcagcgcgattggagccgtcgccaccggcgagaatatcttctctgcgttcttgccgctcgcgactatgagtatgtataataatcttgggtttcagtgggctagtactctgctggcgttcgtgtcgctggtgcttgcccttgttccaacgttgatgtttgtttgggggagggaggtgcgtgctaggagtcggtttatgaatgagttagc

SEQ ID NO: 19984 - DNA, 1508 bp, Emericella nidulans
ccgctgcttgttgcagcctcgcctgttgttgtcgactcgattcacaacggagccgctcccatcctttcatctacaaacgctaaggaggtcccggactcttatattgttgtcttcaagaaacacgtagaccctgttgccgcctctgttcatcacagttgggtgcaggacatccacgggcagaagagtggtggaagggcagacctgaagaagcgtttcctcggcttggaattcggattcggcgaagagatctatgacggtctaaaggccaccttcaatatcgcaggatccctcatggggtactcgggacatttccacgaggatacgatcgaggaaatccgcaaacatcctgacgtaagtacaccgccggaatacgctctgcccaaactgacggtcatcttttcatagatcgagtacattgagcgaaactccgaagtccatacattggaggacacggacgttgagaagaacgccccttggggtttggctcgtatctcgcatcgggacagactcactttcggtacattcaacaagtacctctacgcttccgagggaggtgagggagttgatgtttacactattgatactggtatcaatatcgaacatgaggactttgagggccgtgctttctggggcaagactatccctaacatctacgcggatgaagatggtaacggtcacggcactcactgctcgggcaccattgccggaaagaagtacggtgtttctaagaaggccaacatctatgctgttaaggttctcaggtccagtggctctggcaccatggccgacgttgtccagggtgtcgagtgggctgtcgagtctcatctcaagaaagccaagaagggtggcaacggcttcaagggcagcgttgctaacatgagccttggcggtggcaagtcgaagacccttgaggatgctgtcaatgctggcgttgaagccggtgttcactttgctgtcgctgctggtaacgacaacgccgatgcgtgcagctactctcccgcagccgctgagaaggcagtgactgtaggagcttcgacccttgctgacgagcgcgcttacttctccaattatggcaagtgcacagatatctttgctcctggcctcaacattctgtcaacttggattggcagcaagtcggcggtcaacaccatctcgggaacctccatggcttcgcctcacattgccggtctcttggcgtactttgtttcccttcaaccgtccaaggactctgctttcgcagtcgatttcactcctgagaagctcaagaaggatatcatatccattgccactgaaggtgtccttactgacattcctgcggacacccccaacgtaagttgcgcgttggaatttttactggtcttaactaacttgtgatttagctccttgcttggaacggtggtggctccaccaactactctgatatcattgccaaggtggctacaagagcggctctcatgtcgactccactcctttcaaggctggaggtatcctcgcccaggccatgtaaa

SEQ ID NO: 19985 - DNA, 1510 bp, Emericella nidulans
ctcatctccatgctgaatatcgaagtacacctacaagatccgttgcgttattaagccaacacaagccgccgagcgtcagggcaatctcaccttgttggtgattttcggtccgcggggctcagaggcattaacaagagccaggccaagagccacgactaggaagaaagataagaaaaggctcttaaggctcgtcatcgtccacaggtttccaaccgcgccgaatatggtaggtgagagctggtttaaagacaaggaggagttccggagctcaattcgcggaggacagcttgccttatcaatggacagcggactaattagcggtaatttacatctcgataacactcttaacttagctgcataattgcagcctaaggccatagatggtccgtgctcaaggctccagattgcaaattaggcttaaagataccggaagaacgctgttgcgggactcaatttctcgcgctaccatccagagcaaagaagccgcttgacacagacctggatcattgagacgacacgaaacaaccgccaaaatggtatgccggatattatcattttatttcctttcataaactgaccgcaagccaggtcttcatcttaggcgtgaacttccccgagggccagctcgtccaggcaagaacccccgttaatgaagcctcgatatgcggcgctttggtcgtctggcctcagacctaaccaagtttgtctatttagaagtctcttcagaaatttttcggtgtcggcccgcaagtctcatcgcgcatcatgtcccgtttccacatccaccaaacatgcaaggtcggcgagctggccaacaaacaggtcctcgacctgacggctgtgctttcagaaatgaagattgagaacgatctccgacgacaggttctcgatgacatcaagcggttaaaggagactggaacttaccgtggccggcgccatgcgcttggactgccggttcgaggacagaggacaagaaacaacgtaagtttatccatgctcctaatgctgaccttgagaagtagtatactaattcagttgctctagaacaaaatagccatcaggcttaaccgtattgatagacgactttaaatgtgaacttcagggtgtggctcggttcgctctggtcgctctggcggctggtttaggttattgtgcaagggcatggcaaggcgttgtatgttagtattatgtatttttcaggattgatacttttattcccctagagatcgacggaatgtaacggaaagatgtttatcagtttgtagcatgatgccagagattaaacttttgtttatatgtagacttcaaatctgtctttatgtaaacttaactagaagacaatacgccctcgccgcggttgatttgaattcgcttgtcttcaccggcgctcacaatgcccacctcacgatcccagcacacgctaaagactttgacaccctcacctcccacgcgcttgctgttcgccttgccctcttcctccaagctcttccgtgagatagaatatacgctt

SEQ ID NO: 19986 - DNA, 1513 bp, Emericella nidulans
tgtttcagtcgaatggcagatacagcattatttctgtgccaagtccgggaagctggaggcttgagtactactcacagcggcactctctatcaatgcaacgccaatccgtctcctccagtgggtgcaacgcactgaaagattcggacatgagacttgaggctaccatgtctgtttctcagttttgggacgtcctaaggtatttgatggatatgaaaaaggtcgaatcggggaactatgagcttcccttctggggagggttcctaggctatttttcctacgaacttggactggcttgccttgctcaccccaaacacgaaagtggaagcatcgcagatgaccattgctctcaggagagcgccagtgctgatgatccaccagatgttagccttctgtggactgacaggagcgttgttgttgacaatgagactggtcgagtaattctacaatcgactagagaagcagacaatctaccagctggctggttagaccaggcctcaaaaacactggaacgtttctgttgtatggacattctgccaaaaccaaagaattctgcctccgacgacgagtttcttgattcagttttgggccggggagtcatccagtttcccagcgagaatgcctaccgaaatcaggttgaggcttgcaaggacgaactgagggccggtgagtcgtacgagctgtgccttacctgcgagacatccatcactttaccatcgcccgatgttcccatcggccgcattgagttcccttggaaattatacaaacgactgcgcatgtacaatcctgctgcgttcagtgcctttgcgagacttggaaatagcaagattgtgagtagtagccctgagtgctttctcaactgggaccgacactcgacattggagatgaagccaatgaaaggaactgttcgaaagtccgacagcatgacaatggaaagggcacgggagattcttggatcaaccaaagaaatggctgagaatctcatgattgcggatctcgtacggcacgatctctatggcatctgcggtgctggcaacgttcatgttgagaaacttctcaaagtggaggatcacggtcgagtatatcaaatgataacccatgtcaaaggtcatgttgacccacatcgaccgggatatgctgcaaagagccttccacgactgcagtcgtcgaatatgtcaggatatggactcacggcattgcagcgatgtctaccaccagggtccatgactggagctccaaaggaacgatcctgtatgcacctttcctcaattgagggccggaagcgcgggatttactctggcgttatgggatttctcgaccttggaggaggaggaagcttttctgtcctaatacgcacggcattcacatcatctaacgacaatgacgacgttcaaaagtggcgaattggtgctggaggcgcggtaaccatgctgagcagcgccgacggtgaatgggccgagatgctcaccaagctacagactgtctgcggcatatttatgccttcgcacgcgaaatg

SEQ ID NO: 19987 - DNA, 1516 bp, Emericella nidulans
gcccacgctgccagtgcatccgacgtcgacgccgccgtggccgcagctaaaaccgcgtacaagaccagctgggcttctttttctcctgcacagagacaagcatgtatgctcaagtttgcagacttggtggagcgcgatgcagaacgacttgccatcctcgagtccctgcctacagggaaaccggtgacgcctaccatccactttgatattgcgcatatgttggaggtttggagatgtacgttgcgtgcccctcacaccgatatcttccgctatcttctactttcagagggacagcagactgatatatattgagatagattatgccggctggaccgacaagatctccggcgaatcgtaccctgagtccaacggcgtgtacaagatcgtccgccacgagcccctcggcgtctgcgcggggatcgcctcttggaacgcgaccttcatgtatatcggttggaagattgcgccggctgtcgccgcaggcaactgttttatcttcaagccgtctgagaagtcaccgtttgggacgctggcgctcggtgcgcttttcgctgaagctgggttcccggcgggtgttgtgcagatcctcaacggcggtgcagagacaggtgctgcattggcgaggcacatggatatcgcgaagattagcttcacgggctctctgggcggtggcaaggctgtgcaggaggcggcgacaaagagtaacctgaagaaggtcaccctggaacttgggggaaagagcccggcggtggtgtttgcagatgcagagcttgagagggctctaggagggtaaggctactccctttccatttggctgggaaacaggggcatggttttgttactgatactaaagagctgacgatgtagggtctgcggtttcctgtttaactcgggccaggtctgtgtcggtacgttctccatatactccattgttttcggcttcaaccctgccatactgacaaagaaaagcgacatcccgcgtcctcgtacagaaaccgatcttcgagaaattcacccagggcctcaagtccgccttcgaacagacctcctccactcttggcgccgaccctctggacaagaacgtcagctacggccccatcgtcgacaaagcgcagttcgacaagatcatgtcctacatcgccatcggcaagcaaaccgccaccttactgaccggcggcgagcgaaaaggcgacaagggcttcttcatcaaaccgacaatcttcgtcaaccccgagcctgagagcccgatcgttaaagaagagatctttggacccgtcatggtggttcagacattcgagacggaggaagaggcgatcgctctggcaaatgcgaccgtgtatgggctggcagcttctgtgtatacgtcaaacattgaccgcgctctgagggtatcgagcgcgctcgagtgcggaggcgttgccgtcaactcgccgttcctgccgcaggtaaatacggcgtttggaggcatcaaggcgagcggaaagggacgagagctgggtctctatgggctgctgga

SEQ ID NO: 19988 - DNA, 1520 bp, Emericella nidulans
ggacttggcaaatctgttttcgagcagattaagcatcacctagcccggaatgtcgtagacagctgtattggcccaggttaactgcaatggctgttggcaaaagccataggaggcagcagttagatgagaactaaagatgcctggcattgagacagtgtgaattctaactccccaagcgactccacttttatggactggtatagatttaacttgcagtgcgtgtgttctaactagcgtctctagattgcttccacgcccaccttattcaccttaggtatcgatactctttctgctacggcttagctatcatgacgcagaccttgatatcctcgtcacgcttcttgtgctgatgattccagcgcatcaaatgtctgtgaattgagttgaatccgatgcaatatctttctggatggtcgtcttcagtctcagtctggcgtgctcttcgtggacggtaagcacctactcccggcgttaagcctcctctgacataaacccgctttatctccatcctcatatataaaaacaccgtggatatcccaagacccaaatacactgaactgatacaccctacacgtatcagctgcgagatggcaacatatctcatcaccggcgcgtcgcgcggccttggcctagagcttgcggcccagctggccgcatcgcccccgtccgaagtcagccttgtattcgccaccgcgcgagatatcagcgccagcggtctaataggcctggcgaaaaagttctcagaaagaatcgttcccgttcagctggaccccagcgacccggagagtttacgcgccgcggttgcactagtcgacaaccatcttcgaagtagagggctggacgtgctcatcaacaattccggggtgcaacctatcactcctggaaaaattgagatggcgtatgtgtatttcccttgtgtccacgggcgggctgcttgttgacatgcatttaatgccagtgacgatctcaccgaggtgttccatacgaatgtcactttgacccatttcgtcactcgagccttcctccctttgttaagacaggggaatcgtaaggttatcacaaatatgtaaggccttggtgccatgggccggtacgcagctgactgtttcctcctatgtccagttcgagcaccctaggatcaatctccctcagctcccagttctcagggagtccagcccacgcatacaagatatccaaggccgcgatgaatatgatgacagtgcagtacgcccttcagtacgcagacgaggggttcaccgtgtttgcggtcagtcctggtgtaagccctcaccccttttccagacttcggcgagcctcagaaacactaacagcatcaactaagtggcttcgcacagatatgggtggccagtgcgccgacctccctgtcgaaacaggcgcagagcaagttctgaagtgcgtgaataatgttggaaaagaactcaacgggcgctttctgaatatccacgttcctggctgggagaatgcaccaggtccaaatcagtacccgggaggtgatgcgc

SEQ ID NO: 19989 - DNA, 1521 bp, Emericella nidulans
ctccgcgagagccgcagttggcagctgagccggcctctgagctggccgctgatgctaccacaatgccttccaagacgcatacggatgagccttcaagttcggccattgacgattctcttccgccgattgacaaaagcttaccgaccgatgatactgcccttccagctatagatatgtcgtgccgccaatagactcgacgataccagcattaccgcctattgacacctccttaccaccgctagacacgactatgcccgctatggatgatctacacggcaccgatactcacttttcatttgacaggttcgacgaggagacggctgggcatggcttaggtgaaaatgggtcgataacacacgatcagactacagaacagcatgggtcttcttccacccatgttcctcaaaaccccgcatcttcgaacggagtgcattcggacgcgccagctcagcaacaccaacattatgagcaacagcagccggcacaacaccactattcaccacaacagcatacgccgacgccacagtcacaggcaccattgccccaacagcagcaccagcaaccgcatcagcagtcccaacagcccctggacatgtataacaaccatcatagtgcctcgccgcctcatacgaatcctcctatgcaaggccagccttcgcaaattccgcaagctcccattggatcgccaatgcctccgatgtcttcggtcagtcagtacatggcgggatatccgtcaatgaactcaggcggtcagatgcattatcagctgcagggcgatgcgaacaaaatgttgtcgagcaggcacaagaaagaagtgaagcggcggacgaaaactgggtgtttgacatgtcgcaagcgacgcatcaaggtacgtaaacaatttatagaaaaacatattgcatagactatttgcaatgcaaagcaagggcagttggtgtgtgtgaaatgcgcgaggttggaggttgcgttgtgttgcttcgcttgcgtcgccaaaatcttcggctcgcgtccagcccaccaccggaaaccccgccatttattgtcgcttgttgacgctccccgacttcccatgcccacctttctaataccccttcttgttgccgtacttattcggcttccctttttcattacgctttatttcacttgcgcttcatcttgaattcgccattgacaacactcccgttagtgtgacgaaggacaccctgtctgccgcaactgcgttaagagcaagcgtgaatgtttaggctacgacccagtcttcaagcaaccaacaccctctgcgatacagcctgccccaaatccgcagccgtcgctggtagttaacccgcaggatccttctcctcaacaatcgtcgtatcctgctgcccctcctggctacgtaccggcctcgtctcagcccttcgccccttcgcaatctccgtctacctccactgatcgctacgagtacaactcgtcaattgacccgtcactcaaccaaaacaactcctcagacatggcaagtgttcagaatatcgccgacgg

SEQ ID NO: 19990 - DNA, 1522 bp, Emericella nidulans
ccactgaggcaaccgcaatcgtgaaagtattcctagagacacattttcatactctcttatccgggctcgatgcacgaacacagcgtcgattggagctagatcagtacattgagacctttcctctcagcccagaagagtggttcgtgtcaggaaacactgggtcactcaagagcgagattatcttcgccaatatcgagtcctgaagagtcgcccgcaagacaaaacctctcgcgctggaactgcttctctcgcaggcttcgaacccctcaagatattgggaagaggaagtttcggtgtcgttcggctggtgagagagaaacgcaccgacgagcagactcagtcgggtcgagttccgcttgcccccaaaactaaccaccgtcaagcaatgacgggggtgaaaaaggatgtctttgccatgaaagttatcaggaaatcagtgatgattcggaactgccaagaggctcatctgagagctgaacgcgactttttagtcgcttctgctaaatcccgctgggtggttcctttgatcgccagctttcaggaccagaaacatctctatctggtcatggactatatggttggtggtgatttccttggcttgctgattcgacataacatactacgtgagagcattgcccggtggtatgtcgcagagatgattctgtgtattgaagaagcgcaccggcttcgctgcatccaccgtgacgtgaaacctgacaactttcttatctctgaatctggtcatctgaaaatatcagactttggtctggccttcgacggacactgggcgcacgaccagtggtactttacttatcaacgtcactccttactcaagcggttgggcatccagatcgacggtgacgctgaagaccagaaactgtcgcacgacgcaaacatacagtcccttggcacaactcgtgaggatggaagcatggaagatgactggattcaccctcccaccaacggcctcctgcactggcgtgacaagaaccaaacccgaacgatggcaagaagtgtcgtcgggacgagtcagtacatggctccagaagtcattcgcggccacccttatgacggtcgatgcgattggtggagcctcggcgtcatactatatgaggtacttactttttctctgcctttctgcttgtcgctcgtttaacatccgcatagtgcttgtatggtttcactcctttcgcttccgaggatcgtcatcagacaaaactcaagattcatgtgagtggtctccaatatagcttgttcattatgtctgggttttgctaatatagcatgaaaaagcgtcacctccagacattgtacttcccagtccaccgacccacggacaaactggtatcagcagacgcgattgatgtgataaactcccttcttcaagagaaggagttccgcttgtcttcacccaaatacaaacaaaacgacgctattagttccaagccggcaaagtgttccttctataagccggactcttcgaatccgagttatcaaggtcattacgtctaccccgatgatg

SEQ ID NO: 19991 - DNA, 1523 bp, Emericella nidulans
ccgagcgacctccccgagatgtttcgaccccccgtgaaccgcgcaatgcgggttctggatcgatcattcttcaaaaaaacggtaccgctctccgctgcgacaatattcaagaattcagacatctcaagggtgcgacgggcgttggagcagagcaaggatattctcgcattaccgcgcttgaatacgatccaggacattaaacaggatgatgtcgttaaaaagtgcttactgcttaaggagaccattaggcatgatggtatgatctgtgaatgctgttatgtatggatattggttaacgtgccgcagatactggacatggtcgccgactattaacgagttggttgataatggggttgttggtgttgggcccttcgatctgacgctggactacgactattggcttcactgtgagtacaagaggctacaaaaagtaatggaagctgactttggctagccgatattattagtgccgttctaccggaggaactactcgaggaagttccgcagggctttacgcaggtgggacatgttggtaagtcgagcaaaacgccttgtgcttctgctctggagaactgaccaatagcccaactgaacctccgcgaacaattcatcccgtggcgacaccttattgcacaggtcctcctggacaagaacccaacgcttcgcaccgtgatcagaaagaccgaggatgtgggatcgcaaagcgagttccggacgttcccttacgagctccttgctggtgactcagatatgaatgttatccagcatgaacaagactgcgaattccgctttgatttctctcgcgtatattggaacagccgcctccatacagagcaccaaagactcgtggacctattcaagccaggcgagatggtatgcgatgtgatggctggcgttgggccatttgcaatccccgctggaaagaagaagatttttgtctgggccaatgacctcaatccgcacgggtacgaggtgatgcaggatgccgtgaagaggaacaaggtcttcaaatttgtcaccccgttcaaccaagacggaaggagcttcatcaggtggtctgctagagccctccaaaaatatgacccagtgacagtgaccatccagccaagaacaaagcggacgagggacgcctccggtcaggtgaaagagacccagccacctctagaagtatacacccgtccgaaagtctttcaccattacgtgatgaacctcccgggaaacgcccttgagttcttggacgctttcattggcgtctatgcgggttgcgaggaactgttcgaaccacacaccaaggaacagctccccatggtccatgtgtactgtttctcaggccactcggagaacgaagtcgacgaccatattgatatctgcaagcgcatgtccgagaggctggaatacccgataacagtagaggaccgcgttggaggagctggaaacacagagctggagctttctatccataacgtgagactggttagccctaacaagcagatgttctgcgcgagtttccgacttccccgcgc

SEQ ID NO: 19992 - DNA, 1523 bp, Emericella nidulans
gagacaaaacagtatgactatatcgtgttaggtggtggtagcggtggtagcggtagtggccgtagagctgccggttggtacggagcgaagacattgattgtggagagtggacgcgctggcggtacttgcgttaatgttgggtatggaatgactcgaccctggtgaaccagcgcattgctgattgatacccgtgtagctgcgtccccaagaagatgacctggaacttcgcttccatcaccgaatcgatcgaggccggccgccactacggttatgacctccctcataatattgacgtaaactacacacatttcaagaaactgcgcgactccacaattgagcggttgaatggcgtatacgagaaaaactggggtaacgaaggaattgacctcgtgcacggccgggctcgcttcgttgagaaaaagaccatcgaggtcaccaaccaggacggcagcaggacacggtacactgcgccgcacatcctaattgcgaccggtggccgacccagccttccggatatcaagggctctgagcacggtattagtagcgatggattctttgagattgaggagctgccccctaagcttgctgttgttggtgcggggtacatcgccgtcgagctggcaggtgtcatgggcactgtcggcgttgacacacacatgttcatccgtggcgagaccttcttgcgcaaattcgatccaatgatccagaagaccatgacggacgatacgaggccgtcggcattcacgttcacaagaagcaccctggtatcaaggaggttcagctccttcgcgacggcaagggcaaggacaagcttctcaagctgataatgaacgatggctcggagatggaggtcaacgaactcctatgggctatcggccgtgtccccgaagttgaggatttgcatcttgagatccccggtgtggaactcaacaagagtgggcacgttgttgtcgacgaataccaaaacaccaacgtcgagggcatttacgctattggcgatgtcacaggtcaggccgagctaaccccaggtatgttacagcctctactcttctcaaatccattgaggaaatattcttattaatatgtcaacagttgctatcgctgccggccgccaactcggcaaccgcctcttcggcggaccccaattcaaaaatgccaaactctcttatgacaacattccaacagtcgtcttctcccaccctgaggtcggcaccgtcggtctcacagagccgcaagcccgcgagcgcttcggcgacgagaacgtcaaggtctaccacacccgcttcccggccatgttttattccgtcttcccgcccgaggagaaggcgaagaacccaactgagttcaagatggttgttgcaggaccagaggagaaggttgttggattgcaccttctgggtctcggtgttggggagatgacgcaagggtttggagtagccgtgaagatgggtgctacgaagaaggactttgacagctgtgttgctattcatcctactagtgcggaagagcttgttactttgcgt

SEQ ID NO: 19993 - DNA, 1525 bp, Emericella nidulans
cggtccggcgaggacatttgatcagaaggcgctgactttatcctcatttaggcttccgagactcgcactgaaagtgatgcttttggcgagatccaggtacgacagttggttccgagtcgatcacatatgacatctaatcaaacggtttaggtccccgccgacaagtactggggcgcgcagactcagcggtaaggcatcgtcacttgagttacgcgaggaaatagagtctaagaggctgacgaatggatagttcactgggcaatttcgacatcaaccagccccaggaccgcatgcccgatgctgttgtcaaggcttttggtattctcaagggtgctgctgctaccgtcaacatgaagtttggccttggtaagctctgtctgataaaatttaggcaagaatgcgttgtttaatagcgtctagatcccaagattggtgaggctatcaagcaggctgccgctgaggtcgccgagggcaagctccttgaccacttccctctcgtcgtctggcagaccggttccggcactcagtccaacatgaactccaacgaggttatctccaaccgtgccattgagattctcggaggcaagatgggctccaagaagcccgtccaccccaacgaccacgttaacatgtccgcttcctccaatgactctttcccaaccgccatgcacattgccgccgttctagagctggagaacactctgcttcctgctcttacgagccttcgtaatgcccttcagaagaaggtggacagcttccagaacatcattaagatcggccgtacccatttgcaggatgccactcctcttacccttggccaggagttctccggatacgttgcccagctcgaccgcaacatcgagcgcgtccaagcctctctgccccacctgcgctaccttgctcagggtggtactgccgttggtactggtcttaacaccttcaagggtttcgacgaggcgattgccgctgaggtgtccaagatgactggcaccgagttcaagaccgctcccaacaagttcgaggttcttgctgctcatgatgcaatcgtcgaggcctccggctcgcttaacacccttgccggctccctgtttaagatcgcccaggacatccgttacctcggatccggcccccgctgcggtcttggtgagctcatccttcctgagaacgaacctggttcttccatcatgcctggcaaggtcaaccctacccagtgcgagtccttgaccatggtctgctctcaagtcatgggtaaccacgtcgctgctaccattggtggcatgaacggtcagttcgagctcaatgtattcaagccactcatgatccgcaaccttcttcacagtgtgcgcattctcgccgatggcatgaagagctttgagaagaacctcgttgttggtcttgaggccaacgagtccagaatcagcactctcctccacgagaggtaggttttacgtacccgccttactgtttcatgtgtgctaactttctcagtctgatgctcgttacctgcctcaaccccgtcatcggt

SEQ ID NO: 19994 - DNA, 1526 bp, Emericella nidulans
cgactgggacggagaggacgatccgaccaatcctcgcaactggtcagagcccaagagatgggcgcatgttgttacaatctctattctggctctcatcacgtacggcgtctctctatgcgcaattaaggtgcccattggctaacatttctgtaggaacatggcccctacgatgtgcgctccgggcgtcacggcaattgaggctgacttgcagataagttccagtgttgccagtacacttgcggtcacactgtacgtactgggaatcgcgattggccctatgtttatgtcgccactcagcgagctctaccgccgtgcgcctgtttaccacgccgccaacatgatgttcgtggcctttatcgttggcagtgcgttaagccagagcctcgcccagtttctcgtcttccggttcttctccggctgcgctggtggtaccccgatggcgcttggcggtggaacgattgccgatatcacaactatccagaaacgagcggcggcaatggcgttgttcagtatgggacctctgacgggaccggtaagtcgctcgctgtcgctcccgctcccgctctctaggctttattctgtgcaagcatcggcttggctaatgaatccgtttaggttctcggtccagtcatcggaggcttcgttaccgcaggaatgggttggcgttggacgttctggttgctatctattctgggaggggtggccggagcgacggcgctggttgtcatgcgggagacgcaccctaaagtcattctggagcgcaaagcagccaatctacgtgctactactggcgacttgaaactgcgttccaggcttgccagtggtactccgctctcacccggacaggtccttctccaaattctgatccgaccactcatgctgctttttggatcgcctattctactcgtcatatccctctacgtggccttggtgtttggtgtgatgtaccttctctttactacctttcctagcgtcttcgagggtcaatacgggttcagcacgtctgtatccgggctggtatacctgggtctgggtgtagcattagtcgctagcatgcttctattttacgttctcaatgagcgggtacaggcggcacagatgaaagcagacggagtgcaacaagttcgaccagagtaccggctgctcctgatgatctggttcagcccgttcgtcggggtgggcctgatcatctacggctggacagcatactacaaggttcattggatcgtgcctataatcggcactgtcttcatggggttcggagccttttttgtgattgtaggtctctcacaatatctaaggaactgatgctaacaattggtcatttagatgccggcacaactctacctggtcgacgtatttgggtcccaggcggcagcctctgctctaggcgccaacaacctgttgcgctacatctcaagtaccttcttgccactggcggggcctgccatgtaccgtagaactgattacgggtgggggaatacgttactagggctccttgcacttgcattcgttccggggcctct

SEQ ID NO: 19995 - DNA, 1533 bp, Emericella nidulans
tggcgaataaacctgctgcaaagtcggactctgttgtccagctcctggagtctatgggagctgtcctatatgtcaagactaatgttcctcaatcattgatggtaggttcttgaacttctaccagctaataccaggaggatcaagcccaaactgacaacaaatagatgtctgattcctacaaccacgtctttggccaatccgtcaatgccttcaataccaagctaatctcaggtggtagctccggaggcgaaggcgcgcttgtcggcgcaggaggaagtgtcctcggaatagggacggacattggaggttcgatccgcgtgccatcgaacctccaggggctgtattcgctctgtccgacgacggggcgcatcccgtggaattgttctttgtaaaccccctcctcctttatgcggaggatagacagtggtgaggaagatgctgacatctctggtccagcatgcaccaacactatctcgtcccacccgtcgcaggccccatggctagaagcgtctcgactatcgaatactttatgcagagtctcctagactccaacccatggaatctcgatcctggatgtattcccattccgtggcggagagaaacagcagcgtttccggatccgacgagaaagctgaaactaggtattgtctatgatgacggcgtcgtacggccacagcctcctgtgatgcggctcatgcgggagcttgcaagggagttgacgaatgccggtcatgaaggtattttactacttagccctgactaaccgccacttacctatccgagttaacaatatatcgtagtagttgaatgggacacgtctcttcatagaaccggcacaaccctctggactaggtccatcctcgccgatggcggataccactgccggcagctttgctcgctcgtcgatgagcccctaattcagggtatggtcgttggcacatcagcagacgagctctcgagtgtggagaaggaaaaagtaagtactttccaaacaaaccctccaaacccgctactcatgacagtgcaccccagctcgaagaagaaaaatacgcctttcaagaatcctacctagctcaatgggtcgccagtggcattgacgccctcctccttcccgttacaccctggttggggtataaaccgaagcagtgggtgcagagcaaccagtggctcggctatacggcgctgttcaacctactcaattatgcagctgtcactgctcccatcgggaaagcggatggggagcttgatcatccagttgctggaattgataatgagtggaagggctatgcgccgaggaataaagcggatcgctttaattatgatcagtgtatgttctttctcccttcagcctatttatacctcttgagatattggcccgggcgcgccacggggggcggggttcaaaactgaacatacgctagcctgaactgttattaatgattatagatgatatcgatctggtcaaggggatgccagtgactgtccagattgtagggggaaggtatggggaggagaaggcggttgcagttgcga

SEQ ID NO: 19996 - DNA, 1538 bp, Emericella nidulans
aggatcgtatatgagacatttgggctagggaaagtgctagaaggggcgcggggcatggtggatgagggatttcgtgtttactcaacagatggagagctagtcaacgaggtccctctaacaacgaacgaatatggagcgagtcggatagcctatcatcgaagagacctacatgatgcgctgaaaagagccgcactggcgaccgatagggaaggccaggcggtcgagatcagagtctcgtctcgcgtggttcactgtgatcctattaatgggactgtagagactgagaaaggcgagaagataggaggcgatgtcatcataggagccgatggcatgtaagtacaagtcccccttcgcgttcagactgacagtaagcagacatagtgttcttcgaaaatatgtcctggaggacgagattaccccattgccaacaggccattccggtatgacctaactctaaaaaggtgttttgcaatagctaacggctgtagcgtaccgcctcatggtaagggtgtccgtgatacattgaatcatgctcacaagacagatcccttcagacatcctcgaagagcaagaaccagaattctgcagtaagatcaaccctagaagtcccttcacgtcgatgatggtagcacatgactgccgtctgatcatgggccctggccggcaaggcgaagtcttcgggattgttgccctactccctgatggtacgtgcaagctcttaatgaatgaactaccaggcgctgacagtcggcagagcggatgaatgaggatcccaacgcgaaacaatcctgggtctcggaaggtagtctagaaaagatgctagacacattttctgagttccctgactggatcatcagcattttcaagtaagcttgtgtcgactgtcatgagcgcgggctaactcgctcaggcattcgcgggacctcggattatggcagttgcacgacatcgtaaggacttcaccgcctgataccgagtttgtactgattcgcttggtggtagaaccctcttcgcacttggtaccgcggccgagttctcctcattggagacgcggctcatgcgatgctaccaacccaagggcaaggagcgagtcaggcaattgaggacgccgaggcactgggtgctttttttgcagaacaggctgacagcccttctggtgaagagatcggccgaattttcgaagtagtatgatcccgctgaagccttgctctagtcttacgatttgcaggacgttttccgtagccgacacaaccgcgcgggcctgatccaagcctatagccggcaggcagcaaaaccgggtactgctaaaggcgcgaaaacagtcacaatgtaggcaccgctcttggcgtcgtcaacacggactaatcagactgtataggaaacccgacgaattcatgacgtttaactgcaagtatcacggggcgaaggattggctacggcgacagacagcctccgcagcgtaaggtcactcaatgatgatgtatcttgcggtagaaaaatgtgttgcggtgacttttgtagtctggtaatgtcagcct

SEQ ID NO: 19997 - DNA, 1539 bp, Emericella nidulans
tacaagtaaccaaataacaccatgtccaacccgtttcccatcgacaatctcccctacggcgtcatctcgaccagcgacgacccaaccccgcgctgtgcaacagctctagacaacgacgctatcgacctgagcgctctcgagagagatgggtattttaagactgttcccgggttcgaaacagcggtgttctctcaggtaaacttcgccaacgatggctagaacgtcaactgatgaagtcctcaacagcccacgctgaataccttcgccgcccttcccaagtctacccaccgtcaagtcagggctctcctaacagagcatctcgtggacgtaaacacgcgctcaaaatatgccactcccctcgaaaaagttacaaaccactatccaatggaaacgaagaatttctctgacttctattgttccctggaacatacccaaaacgtacctctatcctctcaattgccccttaccacacgctagatagtgtaggagaaaaagggaaggaaaggaaaaagaaaaagcaaagaaactgacaccgccaaaagtgcagcatgatcatgaatgcccccataagtccaaattggtacgtcattccgagtgtctacaacggccgcacctcgtccctccgcgtcagcgggacccccgtcgtgcgtccaaacggcgtcttcgcaagcaatccttcggaggagccgaaattccagcccgcgcgccttttcgactttgaactagaagtcggcgtgtttctctctcgtcccttcccacccggcgaaattctcgatattagcaacacaccggactatatcttcggtcttgtgattctgaacgactggtctgcgagagatattcaagggtatgaaatgccgcctcttggcccgttccatggtaagggcacggcgacgacgatctctccgtggatcgtcactaccgaggcgctagaggggtgtctgtcagggagtgcgaaggtgcagagcccggcgccgttaacgcatttggcgtggaaagggaagaaggaggaggagacgtgggatgttgagttggaggctagggttgtcagtatgtttgccttccatatactatatcgtctcgcagcgagagggtcaatggttgatgttaacgtgcacagggaacggccaatcttacgtcgtaaccgaaacgaatcttaaagagctctactggacgccctaccagtccctcgctcatctcaccagcgcgggagagggtctcagcacaggtgatattttcggtactgggaccgtaacgagcgcggtacgtgacctcttacctacctaatatctactagtacccttgcttcgattctttgaactaatagctagcagcgaacaaacagcaacggtgaaaatatcggcatagcatgcctcttggagcgcaacttgccgcataataaacttgctagcctcgctgcagcggggatcgtttttctagaagatggagatgaggtcattatggagggctggtgcatcaatcggcagacggggcggaaatttggtttcggagagtgtaagggggttgttcttcctgccc

SEQ ID NO: 19998 - DNA, 1539 bp, Emericella nidulans; identical to SEQ ID NO: 19997

SEQ ID NO: 19999 - DNA, 1540 bp, Emericella nidulans
ggcggtgcggtcgttatcccgccctgcttctccaatttcccctcatttcccttatcgtagtctccactagaaatataatggaggcgtgatggctatggtcttgaagccagatagtccgtaggataattacagcaccatgtttagaaacgccattcgagcgcgagtctctctgctacccggccgcctacccgctgccctagcctgccggtggaactcgtctgtgccagctgcgcaaaatctcaggatcaacggcgaccgtctatggtatgtaggcaactgtagattagtcaagtcatggctgacgccgcgcaggaatgatattcacttcactgcccaatacagcgctccatccccgggaggggtgacccgattatgtgcagacgagaatgacaagtttgcccgggactggttccgagaccaagtgctgcagctgggtgcagagtacaaggtcaatgcgacgggcagtcaattcgcagtattcggcggcgaggactataccgtgccaccgattgccatggggagccatcttgacacagtagccacaggcgggaagttcgatgggccactcggggtatgttactaagtgaatactgtacggcatgacaaggctgaacgtctgaacaggttctatcgggtctggaagttatacgcagcttcaaagaacagggcatcaagacacgtgcccccctcgccctgattaactggaccaatgaagaaggtgcacgcttcttccccccactgggctcgtcgaccgtttacgcagggcagacgggtgtagagcaggcgcatgcgtccctctccaatgatggttctggcatcaccatgggagacgggttaaggaagatcggctacgtcggcgacggtccaaacacattcgaggaatttcccatttcggcccattttgaagtccacgttgagcaggcaacggacttggaaaaggccggcaagccggtcggctgggttgaagggtggcatgggataacctactatgaggtgaccttttccggcgaggacggccatgccaatacctacccaatgtacggacggcgcgatgcattgactggcgcagcaaaactcattacgcagctcgaaacactggcatatacaaaaaacggatataccacggtaaccaacatccaaagcgggccttggggtgcatgcaacatccagtcgaagacgaaggttgtcttctgtcttatgcacagagaaggagaaggactggaggacatgggcgctgatattgtccggtcaatcaagggcattgcctctctacatggactggagtataagttaagtcgaccagtccatcttttgccgggcaacttctggccagaggccgttgactgtgttcgtcgagcttgcggtgataggggtatcggatcacgcacgggcactggccacgattcgactatgacccggctcaaatgtccaacagcgatgatcttcgtgcgaggaaaggatggaatcagccattgcgcgaaagaatggagtgacaaggaggattgtgaagaaggcgctctggtcctcggcaaggcagtgc

SEQ ID NO: 20000 - DNA, 1546 bp, Emericella nidulans
cggcgcccgtgtcgattttattgaagtcgcactgccaccagcggagcatcttgtcgttggcggccaagcctgcagctttagtgcaggatcgcatctatagagactacatagattagtatcgttaccttggctatagtacttgttgtactggcaattcagctgacggttacggccttgctgtcctgtatccacggccgcccagatattcaagcatgagagtgtctctgccgtcgcatacaggataagtacttagatatataagcaaagatataccaagggcttgattgcgcgcgtccacaccgtcgtgcttgccacaatggtgtttgatactctcaatgctccccagccgtatcaagagcattatccaccccggtggaacgtacaccactcgtcctccccgcttccaaatggacactctatcattccaaatggacactctatcattccaaatggtaaaactgccgtagcagtgaccaatggagcagataaccaacatcagcataaaggcaaggaggaagaaatcatctccgcacctgtgcactatatctcgaccctcccaggcaaagacattcgcggtaaactcatctcggccttcaacgagtggttccaaatcccagatgagcagttggagatcatcaagcgagcggttgggctacttcacgtggcttcattgctgtaggctctttcaccctcacccaccaaaccatccagttcagacagattgacaatttgtgtacgcgcagaatcgacgatatcgaagactactccaaactccgccggggcttccctgtcgcacacagcatcttcggcattccgcagacaatcaactctgctaactacgcctacttccaagcacagaacgaggtgctgaaattgcgcagatgcgagaaagccttacgtatctttacagaggagcttctgcggctgcacagaggccagggaatggatctctactggagggattccctcacctgccccagtgaagaggagtacctggacatggtggcaaacaagacgggcgggctttttcggctcgccattaagcttattcagttggaaagtgacgttgatgagttcgtgcgcctcttgagtttcttccattattttagacaagagctgaacagacttgattacggcgcagggactgcgtccccctagtggacctgctaggtataatcttccagatccgagacgactaccagaatctgcagagcgaccagtatgccaaaaacaagggatttggcgaggacatcacagagggcaagttctcgtacccgattgtccatagtattcgaagtagcagtcgtactggtgtcgggagcgacagcagtctgcaactgctgagcattttgcgccagaagacggaggacgaagccgtcaagaaatatactattcagatccttgagaagacaggcagttttgagtttacgaggcagaagttgagggatttgacagcgagggctagggatatgcttactgaactgagggagaggtcgggggctggagcgggggctgcggggttgcttggcatattggatttcctgga

SEQ ID NO: 20001 - DNA, 1546 bp, Emericella nidulans
gttccgcgcacagcagaacgcttttgacgatgcagtcggtacggtgcttttgagcagtatcctttttgatgaaggggggttcttagcttctatatgctaatcgctcgtttttcgcaatagccaaagcaacggatgagaacttgacctccgagaactgggagtacattcttgtatgcaatgcccgctgcatttccaagacatgcctttttggatcagttaagcatagatcatctaacatttgatgtcgcgttcacaggatgtatgcgataaggttggggctgaggagtcagggtaggatactggtctttgatcattgacaagtgatgctgttgaacaactccactgactggaatcaaatacagtgcaaaggatgcggtcgccgctttgatcaagagactcgcacataggaacgccaacgtgcagctgtacactctcgaagtgcgtgtcacaatccttccaccaactgcgcgagactgacgttatttagctggccaatgcattagcgcagaattgcggccctaagatacatcgcgaactggcgtcacgaagctttacagacgcactcttgcgtctcgctggtgatagggtatgcctccaccttagtctaacggatcatttttactgactggtggaacaagaacactcatcagcaggtgaaatccaagattctggaacgtatggaggattggacggagatgttcgctagcaacccagatttcgggattatggaacaggctttcatgaagttgaggacacaaagtacgcactattccgtttcctgaataggtcttatagcttacatctcccaagacccgaacctacaacccccgtcgaagcccgggaagcgggagattaccgacctagatcgccagaaagaagaggaggaattgcagatggcgcttgctctttctataagagagaaatccggttcagcccctcagccgcaggtggagagtagtagctcggtctcagctccagaaaaccaagcacaagctgcgcctgctggaccagttccttcaggtacttctgctgctacagtttctagagttagagctttgtacgattttcagccgtctgagcccggagagttacaatttcggaagggagatgtcatcgccgtcctagagtccgtgtataaggattggtggaagggctctctgagaggccagacagggattttcccgcttaattacgtggaaaagcttcctgatcccactgttgaggaacttcagcgggaagctcagatggaggcagaggtgtttggccagatcaagaatgttgagaagctattgactcttctaagcacgcgcagctcagaactcaatgtccaggagaatgaggaaatcacaaacttgtacaactcaacattatcaatccgccccaagttggttgagctcattggaaaatattcgcagaagaagggtatgtctcccaactccttaggtcagtctctttcagttactgacttacactcgcagatgagttcactcaactcaacgaaaagtttatcaaagcgcgaagggactatgaatctctcttggaggcg

SEQ ID NO: 20002 - DNA, 1548 bp, Emericella nidulans
caatgcggagctaacgttgtttgtgcagcggcggctacaatgtcccccttcaggcaaacccgttcagcaatgaccttaaggtcctagattgtggtgatatccctgtcacttcgtacgcctccctcagtccgatgtcaataccagaagatgtatgtgctgactgccgcaggtacgataacgcctgggcgatccagcagattgaggaagggcacaacagcctcctcatgcgcaagccctacacctccgccaacgagtacggtctctcgcgcgcaggcaagacactcccccgtatcataactttgggaggagaccataccattacgctgcctctgtgcgcagtatcaacaaggcttatggccctgtgactgtcatccatttcgactcgcatctgtatgaatccctcccctatcaacagtccatcccctctccagactagatgaagatttctgacccattgcagtgacacctggaaacctaaagtcttcggtggctcccccagcgaagtcgcctccataaaccatgggacatacttctaccacgccgcaatggaaggcctcctccgaaacgacacaaacatccacgccggaatccgcacaacgctgtccggaccttccgactacgaaaatgatggatatgtcggattcgagatcgtggaggcacgtgaaatcgacactattgggaccgagggtatcatcaagaagatccgcgaccgcgtagggaacgacccctccaccccgatctacctgtccatcgacattgacaccattgatcccgcatttgcgcccgcaacaggaacgcccgagaccgggggatggagtactagggagctgaggactttgattcgagggcttgatgggttgaacctcattggggcggatattgtggaagttgcgccagcttatgataccaatgcggaactgacaactatggctgctgcggatgtgctgtatgaggtgctgacaatcatggtcaagaaggggccgttgacggttgatgagcggagtgacttgtgaaatggtgatgagataatgagatgtttttctatgacggtggataaaggtcgaacttcaatatcttaaggtgacggtacatggataataataatgctctaacgaaatcgaaacaaagtaatgctacctgagcaaaggcatcattggatcttgccatttcttttgccatttccctctgttcgaaacttgcactgaaattccggcaaatgggcctgcgtggtagatactaccatgctgtatgatagttagccaagttactccagaacggcttaattgccatcgcttcgatatccatatccatatccatatctcactactagatatgtctacacatgggaccagcgttttagtaactggacagcttatataccacccttagccctgatagaaatatctagcgagataatagacagggtggaggtgttagcgtctgaaatgactctggtcggcatgccttctcaccagcatgctgtggagtccagtggcagtactagcggccgtcatcattcaacaggtaagaactgagttgaaaagatat

SEQ ID NO: 20003 - DNA, 1548 bp, Emericella nidulans
cgctgcgcaaagaccacgaatgcggctgagtaagcgcacagcttgacatcgacatgaatgccaagagtcagcctgtccatcaccgcgggattcatttctagatttctctctttgcgagacaggtcacttacttgctgatcccgtctccttttcgcgtgaaagcttggtttccgtccttggagaagcacccgcctatttgcttcgtccattccccgtcgcaagggcatgccgcagatcgatgggaggagctcctctttgcgcaacacatcgacttgaatcgtcattgacaccatgggccgcccggtagtggagggccagccggacgctgggttgaggagtttagatcattgtacgcaagatttctgaccatatccttactggatctgaaattgacttcttcatgctctagatcgaaatcaactccctccttggcgatactggccccgacaaaagcttctcccgttgatacgatatgagaccccttacctggcttggtgccaggagaagatccgtaccccggcattggattcgtatttcgcattcacagcgaatctcggaactcatacattctttatggtctttctgccgatcttcttttggagcggctatccaagcttaggccgggggtaagtcgtcaagggaattcattgaagcgattaattgacccgctttggtggctaacggtgcgcttcaattagaatggtccatttactggcttccggcgtgttcttcagcggcttcattaaagaccttctctgtctcccacggccgctgtctcctcctttacagcgaatcacaatgtctggctccgcggcgctggaatatgggtttccttcgactcactcaaccaacgccgtatcggtcgcggcatacgctctttatttgttgaactcgcccgactcgactttgagtgacggcctaaacttcttcctccaaggcattacgtatctctatgttacatcgatcgtcttaggccgtctgtactgcggtatgcacggattctttgacgttgtcgttgggtcggcgttgggtgttctactggctgttttacattgcactttcgagaccgctatagatcactacgtccaggttggtagcggaaagcaggtcgcactcgtggttcttgtcatcttggcccttgtccgcatccatcctgaacccgcagacgattgtccatgttttgatgacagtgttgcttttgcgggtgtaatgatcggtgcacaggtggcatactggaatctggcgcgagcgaatgcgacctggaccaacccgcatccagcaactcttccccattcaaggtatgagagcctcggctgggtaactatgggcctacgttttcttatcggggttgtgctattatttgtatggagggaaaccatgaagcccaccctgttacgcattctcccgcctgtattccgcgggttggagaagctcggattggtcctacctcgccgctattttacaaacgcctcgtgagttaatcttcaggagtcattaattgcggtccgctaaatcatatacaaggcaatatacaaccgtcccctctca

SEQ ID NO: 20004 - DNA, 1550 bp, Emericella nidulans
attccaacttctaaaaaccacctcaggcaacagcttcagacatcctcccaaatacagatattgccatatcaggggggaaaatctacctcctcggacaaaacctctcatccctctttcctaccgcaccaaccctctccgcagacggtgcctatgtcctccccggcggcgtcgacagccacgttcacctgcagcaagacaacagtccgacgggggatacttgggagacgggcacccgatctgcaattgcaggaggcacaaccacagtcctcgcattcgcgtctcaaaaacgcactgatgggtctctcttccctgtagtggaagagtaccaccgccgagcaagtggcaatgccttttgcgactacgggtttcatcttatcctgagcaatccgacagagaagatcctggctgaggaactcccagtcttggtcaaggaagaggggatcagtagtgtcaagctgtacatgacctaccaacccatgcgtctgcgggactctgagttactagatgtcatgggcacaacccgctctctcggcatgacgacgatgatccacgccgaaaatgctgacatgatcgactggatgacaaaacgactcgaaagccagggtcgaactgaaccgtacgcacacgcattggcccgtccaaatatcgccgaagatgaagcgacataccgcgccctttcacttgctgaactcgccgacgtgccgattctcatcgtccacatgagctcatccgtagcggcgaaacatgtccggcgcgcgcagacaaagcttctccccgttcatgcagagacgtgtccgcactacttattcttcacaagcgagaagctaaagggggaggacttccgtggggcgatgtgtgtctgttcgccagcgttacgtgagagtccgatggatctcaaggcgatgtgggatgggctggtgaatggcacgtttacgacattctcgagcgatcatgcgccgtcaaagtatatcttcctacctagccttctacatcaactgcctacagtagcaccgacaaggtagagtatgcgataggctaaccttgactaatcgagcagattcgaccaccagctcggcaagaagaagggcacaagctctttcacgcagatccccaacggtctccccgggctggagacgcgcatgccctcgctattctgcgcgggcgttctaacgggccgtctgtccgttcaaaagttcgtcgaattgacggcttcgaatccggcaaagctgtacggactgtcagatcgcaagggaaccatcgcaccgggctacgatgctgacctggtgatttggtatccgacagccgagcaggcggaagcaatgcaagcgggctctagttctagagtgacgatgaaatcattccagctgaagaacgaaatgctccatcacgatatcgactacacgccctttgagggaatggagttcaccaattggccacggtacacgattctccgggggaagcttgtctgggatcgagatggaggtggtgttattggcggcaaaggggacggagggtacttgaagcgcggtatgagcacgctgagcaggccg

SEQ ID NO: 20005 - DNA, 1550 bp, Emericella nidulans
ggccgaattccaggaccacaccaaggccttggaggtcttggagaaggagtacccgatcaaggatggtcttgatgtcgacactctgcttgattctgacaagcacggtgcgctgacctacaatgacttcctcattcttccgggatatatcggtaagccgcgcgctggtctcctaaaccacggtccgtgactgaacttcgatggcaaggttttcctgcttccgatgttactctggacacgccagtcaccaagcgtgtcacattgaaggctccccttctttcctcgcctatggacacggtgaccgaacataacatggccatccacatggctcttctgggtggcttgggtgtcatccaccacaactgctctccggaggaccaggctgagatggtccggaaggttaagcgttacgagaacggattcatcttggatcccgttgtgctttctcccagggcgactgtccgagaggcgaaggagctgaaggcgaaatggggattcggcggcttcccagttactggtaagttctactttgcttctcttctccctcttttcgtgatgattcccatctatctcttatataactttcgttccactgaagcgacgagagttgcaatgtagagaaaaagattttatctgatttctatataattgcatttctggctcaaacacttaactggcaaatcagttatgctgactgattttgttctcagaaaatggaactctccgctcaaagcttgttggtattgtcagcactcgcgacatccagttccacaacaacctcgacgactctgtcactgccatcatgtcgaccgacctcgtcaccgcacctgctggcaccaccttggctgaggctaacgaggtccttcgtagctccaagaagggaaagctgcccatcgtcgatgagaacggcagcctcgtctctcttctctctcgcagtgatctgatgaagaaccttcactaccctcttgcttctaagttgcccgcctctaagcagctgatctgtgctgctgctattggcacccgcgaggaggacaagcaccgactgaagctcctcgtcgaagctggtcttgacattgtcatcctcgacagcagtcaaggcaacagtatgtatcagatcgagatgatcaaatacattaagaagacgtaccctgaaattgatgtcattggcggaaacgtcgtgactcgggaccaagccgcggctctgatcgctgctggtgttgatggcctgagaattggcatgggcagcggcagtgcttgtatcacacaggaggtcatggctgtcggccgtccccaggctctctccgttcgccgcgtcacccaatttgcggctcgctttggcgtcccatgtatcgctgacggtgggatccagaatgttggtcacattgtcaagggtctcgctatgggcgccactaccgtcatgatgggcggtctcctcgccggtaccaccgagtctcccggtgagtactttgtcagcaacgaaggccagctcgtgaaagcctaccgtggtatgggcagtattgcgccatggaggataagaaggctggcggcaacgg

SEQ ID NO: 20006 - DNA, 1552 bp, Emericella nidulans
cgacgatcttgagcgcgaggagagagacaagaagaaggagcaaggcgatggcggcgatggcaagcaacctggtggtgatggagatgccgaaatgaaggatccggatgcgaagaagaaagatgaggatgacgatcttctagacgaggaaatcctgaattcaagcacagcggacattatcaagcggcggcgaatgctggagaacgagcttcgcataatgaagagcgaataccagcggctgacgcacgaacaaaatacgatgaaggagaaggtcaaggacaatcaagagaagattgagaacaataggtgagacttctagctcttctagatggcgtggcgatttggaactccaccggaaaccaggaactgggcgcagagtttcctgcgaataggggctagtagtcctcgttcatttctaacattcatatcataggcaactaccgtatctcgtcggaaatgttgttgagctgctagatttggacgtcgaagctgaagctgccgaggagggcgccaacatcgatctagacgccacccgagtaggcaaatccgctgtcatcaaaacgtcgactcgtcagaccatctaccttcctcttatcggcttagttgatcatgagaagcttaagcctggtgaccttattggtgtcaacaaggattcatacctcattctcgataccctgccggcagaatacgacaaccgggtgaaagcaatggaggtcgacgagaagcctacagagaagtacacagatattggtggtctggataagcagattgaggagatcgtcgaggctattgtatggcccatgaaggaagcagagagattcaagaagcttggcatcaaggcgccgaaaggtacttatcaaacagtatctggtgtaaacagactcacaactaatactgctcataggtgctctgatgtacgggcctcccggcacaggaaagactcttctcgcccgagcctgtgcagcagaaactaacgcaaccttcctaaaactcgccggcccccagctcgtgcaaatgttcatcggtgacggcgcgaagctcgtccgggactgcttcgcccttgctaaagagaaggctccctcgatcattttcattgatgagcttgacgctgtgggcactaagcgtttcgactctgagaaatctggtgatcgtgaagtccaacgaaccatgcttgaactccttaaccagctcgacggatttgcctcggacgaccgcatcaaggttctcgccgccaccaaccgcgtcgatgtcctcgaccccgccctcctccgttccggccgtctagaccgcaagatcgaattccctctccccaatgaggaagcccgcgccaacatcctccagattcactcgcgcaagatgactgttgaggactccgttaactgggctgagttggcacgcagcacggatgagtttggtggcgcgcagttgaaggctgtctgtgtggaggctggtatgattgcgctgcgaaaggggcacagcaagatcgggcatgagaactatgtggatgccattgctgaagtccaggcaaagaagaaggatacgaacatgggtatct

SEQ ID NO: 20007 - DNA, 1560 bp, Emericella nidulans
  unsure (1)..(1560): unsure at all n locations
tgaccaaacagcgtttgaacaagagacaaaagacaatgtcgtcgactgggatgggccaggcgatccccataatccacggaactggccagcatggagacgcatgagccaagtcgtgctcgccagcggtttcttgctcactgcgtaaggcggttactgtactcctttggtgaagccattcccgtgctgactgatagccctacagcaacctcgccgcgacaatgtttgcccctggagccgcctcgcttgcgaaggagttccatatcacgagttccaccattgtcagtctcaccgtgtccatttacctttgcggcttcgccgttgggccaatgttcattgccccgctctctgaactgtatggacgtcttgtgatctaccacgcctgcaatgtcatttacattggcttcctcatcggatgtgcgctggccaaaaacacaggcatgttcctcgtttttcgatttctggccggatgtgcatcttcgggcccattgacagttggtggaggaaccgttgccgacgtcgtcccgcccgctcagcgtggaagggccatgtctctattctctacaggaccacttctgggaccagtaggtgacatcgcccgcatgatccgtcataatgctgacgatcattcaggtcttgggcccaattatcgggggtttcgtgtccgagttaatcggctggcgatggacattttggatcattacagttctagtgagtgaagtacgacctctgctattctcgagtcgctgacagttcgacctaggcaggagtattgttcatcatatcgatcttcttcctccgcgagacaaatgccgccgtgctgctagaatggaaggctgctcgtctccggaaagaaactggtaatacggctctggtttcgaagatggatcgaggcctgaccccccgccagctattcgtccgcgcgattactcgaccaacaaagtttctcctcttgtcccctatcgtgctcctcctatcacttctgtgcgcgttcgttttcggcctcctttttatgctgttcactacgtttcccacggtctttgaggaacaatacaatttctccgccggcatttctggcctgtcatatctcggcgttggaattggaatggccgtctctctcggagtctttgccgctgtgagcgacaagctgcaaaaggcacttggagattcgcccaaacctgaagggcgcctaaagcccatggcgtgggtcatgcccgccgtaccggtcggcatcttctggtatggctgggctgccgagaagcagactcactggatcgtgcccatcatcgggacatccttctttgggttcggccttctctggatcataatgccgacacagctctacatggtggatgcttttgggcctnngagtgccgcctctgctttggctgcaaacgtcattctccgacttctttttgcagcttttgttccattggcagggccacctttgtatgcggatctaggacttgggtggggaaatagcgttctaggttttataggcgtggcttttcttccagtgccactctttttctatcattacggaggatggcttagggagcgttt

SEQ ID NO: 20008 - DNA, 1564 bp, Emericella nidulans
ctgcccccaatgggcacaaatacgagcagcctattggtttatttataaacaacgagtttgttgcatccaagtctggcgagaaatttgccaccgtcaatcccaggtatgcatctctggtgatgcacggtagtagctatattctaatatacgcgctagtgatgaagaggaaatcacccaagtttatgctgctggagaagaggacatcgatatcgcagtcaaggcagcaagaaaggccctcaaagatccctcatggaagcttcttaccgcaacagaccgaggcaatctgatgctcaaattggcggacctcattgaccagaacaaggaaaccttggccgtcattgaaacatgggacaacggttggtagaatttgtcaattttatctcaacctattctctaactttcataggcaagccgtaccaggtttccctaaacgatgacctctcggaggtcgttaacacaattcgctattgtgccggatgggccgataagatccacgggcagaccattagcacaacaccggccaagtttgcatacaccctacgtcaacctattggcgttgttggccaaattatcccatggaatttccccctagctatggctgcatggaagctgggtcctgcgttggcctgcggcaacaccgttgttctaaagcctgcagagcagactccgcttagcatcttgtaccttgccaaattcattaaggaagccggttttccaccaggtgtcgtcaacattgttaatggccttggtcgtgtggcaggatctgcattggttacccatccaggcgtggataaggttgcctttactggctcgaccatgactggtaaggaaatcatgaagatggctgcaggaaccatgaagaatgtgactttggaaactggcggcaagtcacctctgcttgtttttgacgatgcagacctcgagcaggcggccaagtgggcacatatcggtatcatgtacaaccaaggacaggtctgcacggctacgtcgcgtattcttgttcacgaaaaggttcacgatgaatttatcagacttttccgcgaggccgtggcgactaccagcaaggttggagacccattctcagatgacacgttccagggcccccaggttaccaaagcccaatacgagcgtgttctttcttacatcgagagcggcaagcaggagggcgccaccctggtcgacggcggtgtcccatacaagaacgtcaaggacggcaagggtttctttattgcgcccacaatcttcacaaacgtcaaggacaacatgcgcatttaccgcgaggaagtgttcggaccgttcgtcgccattgccagattctcaactgaagaggaagccatcgacagagccaacgacacaacctatggactgggagcagccgtcttcacgaaggacattgagcgagcccaccgtgttgcatctgaaattgaggctggaatggtgtggatcaacagcagcaacgacagcgacttccgcgtgccctttggtggtgtcaagcaaagcggtatagggcgcgaactcggcgaagctggcttagaggcgtacacccaaatcaaggctgtgcacg

SEQ ID NO: 20009 - DNA, 1565 bp, Emericella nidulans
ggctggcacgcagatgggtaatgcggcctgggaactgtaagtctttattactttgtgatccttctggcagcggctaatcgctcgattactatctagttatctcctcgagcacggcctaacggccgatggtcatgtcaatcccgatatcactacggacatccaccggaacgactcctatgtgacaattttcaccgaacttggcaatggcaaattcgttcctcgctccatctttgtcgacctcgacccttcggtgtgtaacgggcgagtagggagctggaatttgagctgacaggcttatggtggtatagcctatcgacgagatacgcactggtacctaccgccacctgttccaccctgagcagctaataagcgggaaggaggatgccgccaacaactgtctgacctccgaatatttgagagccgcgtggtaagccaagctaatgcgttctagatgctcgtggtcactacaccgtcggcaagacgcttgttcgaggcgttgttgaccgcattcgccgtgtggctggcgtgcattggaacccttccctgagtcctggattatatactaatttccttggagatagctgctcttcacttcaaggttttatgatcttccacgcctttggcggcggtaccggctccggtttcggcgcacttttacttgagcatctctcttcagaatatggcaagatgtccaagctagagtttgccgtctacccatctcctcgcacgtcgactgccgtggtggaaccttacaatgccgtcctatccacgcatagtaccattgagaactcggagtgcactttccttatggacaatgaagctgtttacgatatctgtaagcgcaagcttgacatcccccgccctggttataataacctcaaccgtctcaacgcccgggtcgttagctctcttaccaccagcctgcgtttcaatggtgaccttaacattgacttgaatgagttccagactaatcttgtgccattcccgcgtattcactaccctctaatcttgtatgctcctgttatctctagtagctgcagtacttacaagagcttcaaggtcaaggatcttaccttgcagtgtatgtgtcctgtcttttcttctaaaatatcccttcagtctaactgtctggcaggctttgaacctaggaaccagatagtcatctgcaatcctcaaactagaaagtatatagcagtagctctcttgtaccagggtgatgtaatgcctcataattgcgcccgggctattactgatatcaaggccaaggcctcttttaacctggtcaagtggtgtccaactggttttaaacttggcattaacaaccagaagcctatgtttgttcctaacagcaagcttgcttctattaactgtttagtcaccatgctctctaatttgaccgccattgctgaggcctggagtcgccttggccacaaattcaaccttatatactctaaacatgctttcatttattagtacgtgggtgagggtatggaagagggcgaattctcggaggcccgcaagaacctagcagttctagagaaggactacgaggagatcaccggcga

SEQ ID NO: 20010 - DNA, 1566 bp, Emericella nidulans
gccgatctagatgaaattgtcgataagattgtcagtggtttattcagcgtcacgtgtacaatgggtgcgtaattactgaatggctgggtgacattcttactgattggaccaggtgccataccgatcatacgctgtccaaaaggaggtgcagctgagcttatcgcgacaaagctagatcgtaaattacgcgatcacattctcaattccaaagacaacttattctcagctaacaaaaagtccacccccggtgttccttcatcacggccggttctcatcatcgttgaccgcaacgttgatttggttcccatgctctcacactcgtggacctatcaatcgcttgtgcaagatgtgctgcagatgcgactcaaccgtatcacggtagaaacacctgtggatgagtcaaatcctgccgctggcacaacaaagaaggcctatgatctcggcagtaatgacttcttctggaagcgtaacgccggtgccccgttcccgcacgtggcagaggatatcgacgccgagttaacacgatataaagaggatgcgaccgaaatcactaggaagaccggagccttctcgatcgaggaccttcaagcagatacgagtgcctctgcgcagcacctcaaagccgccattactcttctacccgagctacgagagcggaaatcgattctcgacatgcacatgaacatcgccaccgctctgcttaagggtatcaaagaccgccaactagataacttcttcgagcttgaagagaatatcaccaaacaatctaaagcacagattctcgagttaattagtgaccctaccaagggcactaaccccacagacaaactccggatattcctcatctggttcctgagcacagaaactgaactctcccgtgcagacatcagccaattcgaagaagctcttacccgcacgggagtccaggacatcagccccatcgcttacgtcaagcaagtccgcgagctcacccgcatgaccatgatgacgacggccactgcagctccacagcagcaatcctcggacctcttccgcggcttctcctccctctccaatcgcctcacagaccgcatcacttccgcgccctaggcgcaaacttcgactccctcatctctggagtcaagaacttccttcccgccaacaaagacctcaccctcactaaaattaccgaatcaatcatggaccccgcctccgcgtctagctctgcaattgccaaaacagagaactacctctacttcgatcccaggagcacaaatgcacgcggaaccatccctcctgcatctgctgcccgcaacactcagcaaggcgcatcatcaagcggctcaggtatacaggctagctttgggcagcgccgccaggcctttaatgaagcgattgtcttcactgttggcggtggcagcatggacgagtacggcaatttgcaggactgggtgcaacgcacgagcgggcagcagggccatgagggggcaggtaacggccgcactgggcatgaacctcttggtggtccgagacggcgggttgtctacggtagtactgacttgatgaacgccaatgaattcttgaccg

SEQ ID NO: 20011 - DNA, 1573 bp, Emericella nidulans
ggagctggctcacaggccatctcctcagcctgaagaaatatactgatcgcctaccagccgatgcgcatgttctcttgccgactcatgaactggccgtggagtttgccgatactgaaatgttcctgatggatacctggccggtgtttcctgcacttgttatggtctatgacccggatgccgcactgcagatctcgaccaagtacaatctgcccaagtctgctatttttcccagtctgatgcatccaatcaccggcgggccgagtatgatatcgatgaacgatgccgagtggaagaaatggcgttcgatttttaatcctggcttcagtgctgggaacatggttgaccaagtgtcgactgtcgttgactcggttcaggtcttttgtgatattctacgtgagaaggccgggacagggttggtccatctggacgacctgacgacccgactgacgatggaggtcatactcaaggtgaccctgtgagataacaacggcagccttcctttctgttttgtaacccacatgtctaattgggctctagtgatatggactcgaactatcaacgctctgataacgaaatggtgcacgcgctaaatactatcacgaaatggcactcattctgggacccgcgcgtccgtgcaaatccgctgcggcccctggttcaaaaatactacggccgtgtcatggataggtgcatccggaaagaactcgacaagaggtttgcagagatgcaacaaggccagcgctcggcctcgacctccaaacgcgttaaatcggttatcgccctcgctctcgaggcatacctggctgattaccaccaaaaagacggcaaagccagcaagctagacgacaatttcgcacaatacgcaacccaccagatccgcctctttctgtttgccggcaatgacaccacatccagtagtattgtctacgtgtatcatatgctctcaaaacaccccaaagctttagctcgggtgcgacaagagcacgatcgtatctttggcacactgccgtccgccgcaccacaacttttgaagtcgaacccagccctcctaaatcagtgcccttacactctagctgtcatcaaagaaaccctgcgtctgttccccccggcctcaactacacgtgaggggcgcgacggagtcaccctcaccgaccgccttggaaatagctatccactaggccataccattggcgcagaaataatccatccgaccatccataagaatcccaggctctggccacaagccgaagaattcatcccggagcgctggcttgtagatcccgggcacgaactctatccgagtccggctgcatggcgcccgtttgagcacgggccgcgaaactgtatcgggcaaaccctagtctataacgagatgcggatagtcatagtgatgactgcgaggacgttcaatatcaggcccgcgtatgacgagtgggatgcaatgcatgcagcaaaagaagggcttttggtgaaacttgctagagggctaggaattggtggtaatccgctcaagactgtgcatggcgagagagcgtatcagactgagaaggctggaacacatccggccgatggg

SEQ ID NO: 20012 - DNA, 1574 bp, Emericella nidulans
cgacgactatcgctcgaatggtgattactaccgtggcggtggccgcgcacgcactcgatctcgatctccttatgatgacagatattaccgcccctcagcgcgttcccggcgggatgagcgtgatgaagaaaggcgacctcgccgtgaacgcgaacctcgcaaacgaagtgattcgagagatagaagccctgaactcaacgaagacgaacgcgaccggcgtactatctttgtgcagcaactcgccgcacgactgagaactaaggagctgattgccttctttgaaaaggtcggacctgtcaaagaagctcaaatcgtcaaagaccgagttagtggaaggtccaaagggtgagtttcatcctttctccctatcttttgtctatcgctaagaagtccattctagtgtcggttatgtcgaattcaaagacgagagttccgttgcgcccgctatccagcttacaggacaaaaacttctaggaattccgatcattgcgcaattgactgaagccgaaaagaatcgccaagcccgcaattccgaggcaagcagtggcaataaacactccgccccttttcacaggctttatgtgggtaatatccatttcagtatcgatgagaatgaccttcagagtgtctttgagccatatggcgaacttgaattcgttcagctgcaaaaggacgaaaccggtaggagcaggggctatggcttcgtgcagtaagttcccgaaccccctgaactgtattatctgcacaataataacgtctgtattctcaggttccgtgaccccaaccaggcccgggaggcattggaaaagatgaacggctatgaccttggtggtcgggctatccgcgtcggccttggcaatgataagttcacccccgagaacactcaacgtacccagagccagagtgcaaaccaaagtaactttcagggctctatgttctcgggctctggcggacgtggtgtccaggctggaggcaccagcaacttcgatcgtgcgggtggtcgtgagcctgagaagggaaccgctgccagtgccctagatgacacagacgttgccggtgtgaacttcaacaacttcagtagagacgcattgatgaggaaacttgcaagaacagatgaacctgctgagccctccgcagacgacaaacagcaaaagatactccttccgaaaactgaacccaagcctttaccggttaatgtcaacatggcgagtcggtgtgttttgcttcgcaacatgtttgacccggctgagttcgtacaccctacctgcatctataacgctgaccttgctgaccaaatctgtagggaggagggtgaatcctgggttaaggagctggaggatgacgttcgcgctgagtgcgaagaaaaatatggccatgttgttcacattgcactagatccaaattcccagggcgacatatacctgaagttcgaccgcgtccagggtggagagaacgccatcaagggcctgaacgggcgcttcttcggcggcagacaaatcactgcgcaacctgtcgtcgatgctgtttacagcagcttgttttcccgaacaaaagcaatctaatcttcatcgacc

SEQ ID NO: 20013 - DNA, 1575 bp, Emericella nidulans
cgccgagcagtatccgattgccgattatatctctctgccaactgcctctccagctccgattcccaagatccaatacgacttccccgccgaatcatggtttgctcgtatatggcggaagaggaagcagggcgcggtgaaggaggctttcaagcatgcgtggaagggctacaaaagcaatgcctggttgcgggatgaactgtcgcctttaagcggtggatacagaacttcctttgctggctgggcagccacactggtggatgccctggatacattgataatcatggatcttacagacgaattcgaggaggcgctggaagcactcgagcatattgatttttcaaccaccgattcaatccagatcaacgtgtttgagacaaatatcagatacctcggaggtcttcttggtgcacacgaccttacagagggcagatatcctattcttctgaagaaggcgactgagatagccgattttctctacgggtcgtttgatacgaggaataggatgcctcagtctcggtgggagtggacaaggtgagaatgcattctggttactgcttggacaggccagcttcggccctcaaaatgattatttcatcatattgatagtagttagatccgcatcgggccagaccattcatcctagtgggaacactattctcgcggagctgggttctctgaacctggaattcacccggatgtcccagttgacgggagaccagaagtactttgacgcgattcaacggatctcagaccacttagaatcagctcagaaagaaaccctggtgcccggtttatggccaatgatggttgacgccgagagcatgcggttttccgatcctcggtacacaattggtggtatggcggattccgcatatgaatacctccctaaagagcatatgcttcttgagggtcggacgcaacagtatcaacgaatgtacgaatccgcaattccagcgatcaaggagaggatgctgttccgcccgatgaccaagggtggagaagatatcctattttcaggtaacatttacgctggtacaaaggccagtcggaaaaaggtagaggcacaggcggaacacctcaagtgttatcttgggggcacgattggcatcggggccaaagtgttcaatcggcctgaagagctgtcaatcgctcgcaagctaaccgacggctgcatctgggcgtacgatatcatgccctctgggatcatgccagaagtcatgtatctcagcccttgcgacgacttggaaaactgtccatgggacgagcaaaagtggtatcgagacgtgcgcgcgcggccaccgcctcatgcgaacattgcggatactgaggaagcggcgaaattgcttatcgagaaattcgacctggtcccaggtgtcgccgaaatcgccgatgcacgctatatgttgcggtaagcgctgaaacagctaacgtgagcgaagtttgctgaatgtttggtaggccggaagcaatcgagtccgtatttatcatgtaccgcatcacgggcgacaagaaatatcaggatgctgcgtggcggatgttcaacagcattgagaaggccactcggactaagtatgc

SEQ ID NO: 20014 - DNA, 1576 bp, Emericella nidulans
gtgtccgacgcctgcggtctctacaacttgctcttcaaagacctccttcctcctgctgaacccctctcattacgattccactcgctcgaaactcctcaaaactagaacttacaaacccaacccacttgacctcatacgcgtttgggcgagacatcgaacctccaggagcttggtttcaatcccaagctactcggacctatcgaggcccatttctttaccatctacccctcataatggacgtgattccatcgactacgccaggtgaggccgtgcgcatctcggcgaagagaacagccgagcttttcggtcccgaatatctcatggtcacaccctccgcctcgaacggatcgattggtgtttcctaccgacgaaaaacagaatatgaacatgtgaaggagcttcctccagctcttgccgcaaaacaagcgcaagcagccgcagcaaggtcgaagcggcctaagatcagttcacggtcagaaggatcgggctctggggacaagagtggcgcgtctacggcccttgtaaggagaggaggtcgcgcgagcggcgctgcgggagatgacaagccaacgagcttaattcagagaccatcagccacacggcaacaacctcccgagtggcacgcaccatggaagctgatgagggttatatcgggccatctgggatgggtgcggagtttggctgtggaaccgaataacgagtggtttgccagtggtgctggagaccggacaattaagatctggaatcttgcgaccggtgcactgcggttaacccttacgggtcatatctcgactgttcgcggtttagccgtatccccgcgacacccatacctcttctcctgcggtgaggataagatggtcaaatgctgggatctggaaacgaacaaggtcattcgtcattaccacggccatctcagtggtgtatacacacttgcgctccacccccgtcttgacctgctagtaactggtggtcgagatggcgtcgcacgtgtgtgggatatgcgcactcgcagcaacattcacgttctgtccggccacaccggcactgtcgcagatgtacaatgccaagaagccgaccctcaagtcattaccggatctctcgacgcgaccgtccgcctctgggatctcgcagctggaaagaccatgggcgtcctcactcaccacaaaaagggcattcgcagtctagccacgcaccctcgcgaattcaccttcgcatctgctagcacagggagcatcaagcaatggaagtgtcctggtggcgagttcatgcagaactttgaaggtcataacgcgatcatcaataccctctccgtcaatgaagacaatgtcctcttctccggtggtgacaacggctccatgtccttctgggactggaagacgggataccgctaccagactatcgatacaaccgcccagccgggttcgcttgaagctgaagctggtatcatgacgtctacgttcgataggacgggcctgcgcttgattaccggtgaggcggataagactatcaaggtctggaagcaggatgatcaggctacgccagagactcatcctgtgacgtgggctccaacactggg

SEQ ID NO: 20015 - DNA, 1577 bp, Emericella nidulans
tagtatcaagctggcgaatgatgtgacttttagacggtatgtcctcggcaggcatgattacgggtcggcaacttgttgctgatttgacatttttcaggatgaaccaaacgatggagaagatggcgaagatgtcggagtcagattacacgcattttgtacgagttgccttcgggcatacaacaccagtccagccggactatgaggcggctgggccggttgaattcatagacccgacattgaacgactctcagaaggaagcaattcagttcgccttggcctccagagacatcgccctcatacatggacccccgggtacaggcaagacgcacactctaatcgagttgataattcaaatggtcaaaaggaacctccgagtgcttgtttgcgggccatcaaacatatctgtggataacatagtggaaagactggctccgagcaagatcccggtcgtgcgcattggccaccctgcccgcttgctgccatcggtgctagatcactcgctggaggtcttgacccagacatccgacgctgcggctatcgtcagggacgtgcggaaagagattgatgagaagcatgctagcatcaggaagacaaggtttggcagagagaagcgcgcgatctaccaggatatcagagagctacgccgggagtttagagagcgtgaatccaagtgcgtggacaatttagtccgcggaagcagcgttgtacttgcgacactacacggagcaggcggtcatcagctgaaaaaccagaaatttgatgtcgtaattattgatgaggctagtcaggcactagaagcccaatgctggattccactgctgtcagcgccaaaggtcgtccttgctggtgatcatctgcagctcccgcctactgtcaagtccacccctcataaaacaaaggaggcaggcgaagatggagagcaggatgcaaacggaagcttctccctcgagaaaacactatttgatcggctgctatcattgcatgggccgggaataaaacgcatgctgacaacgcagtatcggatgcatgaaaatatcatgcggttcccgtcagatgagctgtacgaatccaagctcattgcagctgagagcgtcaaatctcgccttctaaaggatctgccttacaatgtccacgagactgatgacactaaagagccggtggtcttctgggacacgcaaggaggagacttcccggagaaagttgacgatgaggaattcgcaaaaaaggaaagcctgctcggtgaaagcaagagtaacgagatggaagccttggtggttgcgaggcacgtggataacttggtacaagccggtgttaggcctgaagacattgctgtcatcactccatacaacggccagttggctgtgctatcacagatgctacgggaaaagtacccagacctggaattagggagtgtcgatggattccagggccgcgaaaaagaggctgttgtggtaagcctcgttcgcagtaacagtgaacacgaagttgggtttctgggagaaaagcggcgtttgaacggtatgcctcctgcccataactcttactaccttgagtgaggtctgacgcgattccagtgg

SEQ ID NO: 20016 - DNA, 1579 bp, Emericella nidulans
tttgccgctgctagggtgcccgcctacgccatcacgcgcccggtgatgcgcagtgattctcgcgccgacgctgtcaaggaggccttttcgcatgcctgggacggttactacaactacgcttttcctcatgacgagcttcacccgatttcgaacggttacggagactcgcgaaaccactggggcgcgtcggccgtcgacgctctatcgacggccatcatgatgcgcaacgcgaccatcgtcaaccagatccttgaccatattgctgctgtggactactccaagaccaacgccatggtaagtttgttcgagacgaccatccggtacctcgcgggcatgatttctggatacgacctgctcaaaggccctgcggcggggttggtggacgacagcagggtcgacgtgcttctagagcagtcgcagaacctcgccgaggtgctgaaattcgcgttcgacactccttctggtgtgccgtacaacatgattaacattacttcgggcggcaacgacggcgccacgaccaacgggctggccgtgaccggtaccttggtgctggagtggacgcgtctgtcggacttgactgggaacgacgagtatgcccgcttgagccagagagctgaagactaccttctccacccggagccagcgcagtacgaaccgttccctggattgattggaagcgcagtcaatattgccgacggcaagctcgccaatggtcacatcagctggaatggtggcgcagactcgtactacgagtacctgatcaagatgtacgtctacgatcccgaacgctttggcctctaccgggaccgctgggtcgcagctgccgagtcgagcatcaaccatctggcttcgcacccgtccacccgcccagacgtgactttcttggccacttacaacgaggagcatcagctgggcctgaccagccaacacctgacctgcttcgacggtggaagctttctgcttggtgggacattgctggaccgccaggactttgtcgacttcggccttgaccttgtcgccggctgccacgagacgtacaactcgactctgacgggcatcggccctgagcagttcagctgggaccctaacggtgtgcccgacagccagaaggagctgttcgagcgcgcaggcttctacatcaacagcggccaatacattcttcgtcccgaagtcatcgagagcttctactatgcatggcgcgtcacaggtgatggaacggtacgttcactcagcgctgcttccgtaggaagaccatactgaccgctttagtaccgcgaatgggtgtggaacgccttcaccaacatcaacaagtactgccgcactgcgaccggtttcgcggggctggagaacgtcaatgcagcgaacggcggaggccggatcgacaaccaggagagtttcatgttcgcagaggtgctgaagtattcgtttttgacttttgctcctggtacgtttccctagttctggttcacctgtggagaatattactgactgcagcagaggacgactggcaggtgcagaagggcagtggaaatacgtttgtctataacaccgaggcgcacccgtttaaggtgtatacgcc

SEQ ID NO: 20017 - DNA, 1580 bp, Emericella nidulans
ccagagagcatatctggtattgcaactcttcgaaggggaatataggcatcaaagttaaccctaccagagctatcccaagccgtctatggactgatctgtggatgctttctaagattctagggaattggctaagtgcagaaggttgacacatttaggtagtgctttgtttgcttatatcctgattcaggccatcgtaggtatttatttgtctccttaaaaattcaatttcattgatttacttttatctttattttttattttttgtcaagtctccttgaccagctttacggcaagcaaatgcccaatatatcggcactcgatctgtgccctatcgccgactgtgatagttacctagggctaggtgaaggtgcagtcaaaatatgatatgaaatggccgtatgatcgcagcgttcaaaaatgatgctacagccacggatagcacgcaataccaatcaccttctcaaggaaaccattaccgcatccatggggtaaatggtgtcagacctcgcctggtcaaactaccactgaagcaagcagacaagcgagcaagcaagcacgcaatcgccgaagcccgatcgcatcgttgtatacttcttttatcgccgaaagtatcactacctccatacatacgcgattgagagtacagatggtgcaagaagggatgcggagagacgtacatatatatgctgtaaactctccctctctggtgagaccagccggtctttcaccacatagagactgatcaagagagaaaatggcaccctccattgctgaagagcaaccacataaggccgacgtcgtcgtgcctgtcaagactcctcctgccaccaccgagaagcccaagattcgccgtatcatcgatgaagaaggcggaactaccacggccagcgtacgttctatcattctcttctttctctagaataactctaacttttccagtatccccactacctcccggtctgggatcacagcgagaaatacccacccttggagcccttcacacacagcgaccccggcctgcgcgcagacccgtccctccctgacctgctgaaatcgggcacgaggatccaaaaactgactcctacaattggctctgaagtcacaggcgtgcaactgtcgtccctttcggctgccggaaaggaccagcttgcgctgcttgtggcgcaacgcaaagtcgtggcctttcgagaccaggatttcgccgacctgcctatcgcggatgctctcaagttcggctcatactttggccgccatcatatccacccgacttccggtcagcctgaggggtaccccgagatccatctggtgcaccgacacagcagcaagggcgagctggacgcgttcttcgcggacaggaacagtacggttgcatggcactcggatgtcacgtacgaagcgcagccgcccggcacaaccttcctctatatcctcgatacccccgaggtaggcggggacacagcgttcgtcgaccaagtcgaggcgtatcggcggctctccccagccatcaaagagagactgcatgggctcaaggccgtgcacagcgggttcgagcaggcggagttcagcagacagcgtggcgg

SEQ ID NO: 20018 - DNA, 1581 bp, Emericella nidulans
cccggcggctctagagatcgttaaaatggtcctcggcgatgacatcctcgtatcgaacttcaccgcgaacatcgcaaagccgggctcaggatccatggccctccattcggatcagtcccttgtcgtccctgagccttggggggcaccctgggccgtaaacatcatctggtgtttgtctgatgtctacttcgagaacggggcaacgctctatatccccggtagccataggtggaaacgaaagaacgaggtaccatcgaatgctgtggaaatgctcaaaccatttgtcgctaaagcaggctccatcatcgccatggacgcacgcgtttggcacacgtccggcgccaacatcacgaaggaccaggatcgcgcgcttctatttgcattttacagcgcgccatttctaagacagcaggtcaactggacagcggtattctcgaaggagacgagagactcgttcagtccgacttttcgcaacctgctgggccttgatatcatggcgaacgcgggcaagacgtcggatatgggttatgaaacgaagcccctgtttgtttagctgttgagaatgagaaacccacagggtctagccatctaggggcgccaagctgctggagtagaaactaatgccacgtaggtatagctaccgtccaattttatcttcatcattttctaaccagtcccttgtgggtccggggctgagcgtttgggggccagagtgagaagccaaaggccagagctgttcgtgacggtccagccaccccctagtgccctggatcagtgaagatcctggcgtccattggccagttcgtatctgaataatattgcactactcaggaggagcggacattagccgccctactagaccctggctcatagggccccaaacggaaccaaccgctttgtagccatgcggctgaggttaaataggcgccagactggccgccaatgtcttctcggaaatcaagcccgccaacatgtcttctctcctcaaaatctcgatcatcctcgccggaatggcggccgctcagaacactgagtgtggctgttattcgacggatggcgtcacggctgccacatacacgaaccgcatctaccatgatttccgctccctagatgagactggaaccctctacactggagagcctgctaacgtcaccaatgacgatgagtctgccgctgcacctgtgcagtctgggtatctgacgtccgatggctttgtcaatgacttcggtatccagacatggggctcaccagcgagtgaagatacgccgttgagaaaacagtatagcaatgcgaatgtctatattggtcagctcaaccgtcttatatctttggagccacgtatactgacatgaccccagagcatgacggctccagcagttcaacgcacctcactctgcgctcctaccgcaacgcggactttgtctccactgccgagatcgacagcaagctgcaaaacatcttccacgcctctatcacagtccgcgcgcgcgttcgcggggccgccggcgcctgcgccggaatcttcacttacctcgacgacaagactgagagcgatattgagatcctgacccgcgacccgac

SEQ ID NO: 20019 - DNA, 1581 bp, Emericella nidulans
ttcgggagaggcaccgcaagagcctgttgtctcgcctaagagcggtaggttacaacccaccactgatcggatcctcaatttctaaatctgtctaggcagcgtctttgagaagcgtctagtcgaggcttacatcgctgagaatgggaaggatccggtgaacggggaggaactctctacagaagacctcatcgaggtcaagactcagcgcgtcgtccgaccccgaccacctacgcttacttcgattccttcgctgctcagtgtgtttcaggaagaatgggatgccctcgctttggaaacatacacattgcgtcaaaccctggctcaaacgcgacaggaactaagcgctgcgctttaccagcacgatgcagccgtcaggtgatcgcgcggttgacgaaggaaagagatgaagcacgcgacgcgttatccaaggtcaccgttggtgcaaggtcttctggcgccgctgcagatgccatgcaggtggactcagctggcctgcctgacgaggttttggcgagggtggagaacacgcaggcatcgtacgtcacccggctcactcactactatactgccatctaaatgtgatcattgactttgtttaggctctcaaaaactcgacgcaagcgccctgttcctgaaggctgggcgacaggtgaagcaatttccgcgtacaaacctacggaaagcacggacgcattctaccccggtggaaagtcgttatcagtcaatgtatccggtgatttggtgctcgtcgagactgctgaagggactgttggcgtgttttctctctctcaaaaacagatcattcacactctgcagacagatggccacgttacaaatgtcctctgggcaggcgagaaagcggttgttgcttcctccactgggtctgtgaaggtttttgagagtggcaaggagatcgcgaacttcaattcccacgctggcgcagccacgggtcttgccttgcatgcaactggggatatcgtggcctcggttggagaggacaagagctacgttctgtatgaccttacaacaaacggtgtcattttgcaaaacttcagtaacacatgtgagtgattctctgggggggtaccccccccccaccaccctcgaagacacctgggcttcagctaatccttctcttcttcagccctgctctcggtgcagttccacccagacggccaccttctcgctgctggtggtgccgatggtcaaattaagatctatgacataaaaacaggagccttggctgcaacttacgaccttgctggtgctgtgaaacgcgtatttttctcagaaaacggaacctacttggcagctgtcacggagaactcgacgatggtctcaatctgggacttacgcagctcgaaagaaattaaggtgctcgagactggcagccaggtggattcgattcactgggattataccggtcaattcctcctgactggtggccctagcgggctgaccgtccagcaatattcgaaggcttcgaaggtgtggacggaaccattacgcagtgcggtccccgcagttgccgtggcctggggttctgccgctcagagtatcatggcgctggataatgatggc

SEQ ID NO: 20020 - DNA, 1583 bp, Emericella nidulans
cggcgcaaacggcgtgaagccatcaaagctaaatatagagaccaggcgacgcccctgcgcattcaagcactgcatcttggtggtgataggggtactactcccacgagcgaagcagcaactcctaacaacgaaacagcaggtaagcaatcattcccttcactcttgaatagtagcggtatgataacatgtacagagtcagcggctactccggacggcggttcatttcccgactttagcattggcaaagacttggatttagtcaaagatggtgccgtggatggcgctgacaaagatgaaccttcagctgcagactacgaccctactattgacatgaaagccgaaagagaaaggcacggggggcagagtaatgatgtctcggccgcgagctatgatgaaacgaaaacaaccaagcaggacgtgcttttgcctgacgcaccgtcgcaacaggagccagaggcaaaggattcatttgatatatttgctgaggatgacgatgacatgtttgctgaagataccgaggaaacgtcgaagccggcgcacgcatccgccattgctgtgccccaagcgcgggagctcgacgttagtatgatggataattgggatgatcctgaaggatattataacctccgaattggtgagttgatcgacgggcgttaccatgtgcaacagaatctgggtaagggaatgttctcgtcagttgttcgagcgaaagattcaaagacgggtaacgttgtggcaatcaaaattatccggcagaatgacacaatgaagaaggctgggttgaaggagattggcatcttggaaaagctccgagaagccgatccagaggacaagaaacatatgatcaagttcgaacggagcttcgagcacaagggtcatttgtgcatggtcttcgaaaacctcagcatgaacctgcgggaggtgttgaagaagtttggccgagatgtaggtttaaacctgcgtgcaattcgagcgtacgcccagcaaattttcctgggattgagcttgatgcgtaagtgcaatatcctccatgccgatctgaagcccgacaacatgcttgtcaacgagcagcgcaacatactgaaagtgtgcgacttgggttccgcgtcgctggcttcggataacgagattactccatatctggtcagccgattttaccgggcaccggaaatcattttgggcatcccctacgactacgccattgacatgtggtcgatcggctgcacactgttcgagctctacacgggcaaaattctcttcacgggacgaaacaacaaccagatgctcaaatcgatcatggagtgccgtggcaaatacccgccgaagctcctgcggcgcgggtctctggcgcacctccacttcgacgaaatggccaacttccacagcactgaagaggacaagatcaccggccgccttaccacccgcatcatggacttcaagaagccgacgcgcgatctcaaaacccggttgatgggcaagggcacacggggatgacagatagcgaggcaaaggagctagctttgtttgtcgatctgctcgatcgttgcctcagtctgaatccggagaagcgatgcacgccagcc

SEQ ID NO: 20021 - DNA, 1588 bp, Emericella nidulans
tcgcagcgtaaccactttccctttatcccctcttctcgtattggggctaagaatcgatacggggaactacatgacacgatggcttacaatcatcgcataagccaacaattccatagctcccagcagcatggccggggtagtcgcaagaaggaagatgagaatgacgccctgatgcgcctggtacgtacataagattccatcatggcttccctcggctctatggactaaccgataaatagcccgacaaagagatcgcaggctgtatcaatgacatcggcataccattcactgccgccgacctaatcaagcccaaccctcagcaggttcaaatggtgctggagtggtttgcggagctcctcatgaataccactcgagaaaccgttgagcctgcaatgcgcgcagccgctgacgatatatgcggggactttccggatattgtccctacagatacgcgaaacctgatgggattctttgtcaatatgagaagactaatggcggaggtatgcgtgcttattatccatgcgacgcgagtatcaacaacgaccaatatgctaaaggctgtttttacagtgcggtgtgaatgactttacgtttaccgacctgacgaaacctacgcacgatcgccttgtaaagatattttcttacctcattaactttgttagatttcgcgagtctcaaacagctgttattgacgaacatttcaacaaaactgaaaagacgaagcaacgaattgaaacactgtacaccgagaatcaggagatggagcaacgacttgaggaaatgcgccgggtcctcaaagcaaacgaggctgaggttaaggaaaaagtgaggaggaatgatgaactcaagtctcgccttcgagagttaggtcgaactcaggagaaagtggcggagactctggaacgagtcaaagccgaaaaggcgagacaacagaacctactgaaggaaaagatggagagaacagtaagaactcgtcaagaggttgagaagttgcggccatacgtgatggaaagtccggcaagcctccagtcaagcctcacagaattgtcggaaagtcttctacgggagaagaaccagatcgatgccatggaaaaacgcgcccgagcgttgcaaacctcctcggacacgttcactgttgtcagcaacgatgtccaagcatgcatcaaattgctcgaggatatcgctgttgagctgcaaaaagaagaggacgaagagtctcgagcttcgagaaacaaggaggccatctctgagagaggtaacaatgtaagggaagtcgaacaaacagagaagttactgcagcggcagttagcccggtggaacgagagaatcgaagctctacgtaacaccgctcatgagaaggcgcaagtggctcaaaagcggatggaagagcttcgtgaggtgcagataaaactccgagaagagcgaacagaaaagcaacgcgacatggagcgaaggagaatcaggattgagcaaactgagaaaaaggtaataccagtgtgttcttgttgggtttccattcaatagtaacttattggtgcacaaatagccgacttgaaagagagcatcgaaaccgaaatacagagcgcgc

SEQ ID NO: 20022 - DNA, 1593 bp, Emericella nidulans
tggtagcgttgcgccttacctaggatcaaactaactaggagccacagggtatcgtcgctacagcgattccaaaaaataacgagcgacttccacgctctcgaccatattgggtggtacagcggggcctgcttcctgctcgtcggcaccacctctgccccatggggaaaaatgtacagatttttctcggccacatacacctacatgatggcgcttggcttttattcggtggggagtgtggccgcggctgctgcaccaaacagcattgctttgatcgttgggcgtgcctacagggctggggctgtgcgggacgctggggggctccgtactgatcatcaacttcacggcagaccccaaattccgtccaatgcttattgggctgtggatgggcgtttttatgatcgctaccacgattggaccgttgcttgatggtgtgttcaccagcgaggtcagctggcgctggtgtttctgggtcaaccttcccgttggcggcacagctattgttctgcaatttctcttcctccgcatgcctaagcacatcaagcccacctcagcaacatggacagagattctccgccatctcgacctcagcgggtgaaccgtgctgttttgctccgttatttgcttctattggctatggagtggggagtctagcgaagcaatggagtgacggtgctgtcatcgccacgttggccttgtgggtggccttgtccattgcatttgtggccatcgagtggttccagggagagtatgccataatgccactgcgcatgctgaagccgcgcccattctggtcgcatctcctctacgcgtggatgtaagtcgtacttccctttcagaagagagatccgtccacctagctgactgttgcagtgccaacctgggcaacttccagatcctgttttacctgcccatctatttccagtccatgcatggctcgcccgccatcatgagtggtgtctatagtttgccgttcatggccttctacacccttggtgccattattagcgccattctcgtcgggaaaacccatctactacagcctattgagcaagtcagggggctgatcgccgtgctgggcgccgctctgatctactgcattgacgtcggaactcccaaagcctggtggatcggcgcgcaggtcccgtctggcctgggaactgggctgggaaaccaggtgcctgtgacggcgctacagggctttgcgactccagaaactgtggccgccacgatgggcgtcgcctttagtgagtcgtccggagtcgactgccatgattgctgctaacagtgtttccagtgtgccaatccatcagtggcgcctattttgtatcagccggaaattccatcttcaataactacatgctgaagactctctctgtcacagctccgcgtatcagctcctttgagattttgtatatgggcgtgaccgacctgaagaatgccttccacgggaaagaccttgccttgattcgacaggcatacatggtcggcatcaaggatgtcttcgccttcgctctggcggggcctgcctcaccgtcgtcctggccttgatagttccgttcaagaaattgccagatcatgaagccaagaaggctg

SEQ ID NO: 20023 - DNA, 1594 bp, Emericella nidulans
tgccatgagcgcactgaacgacgtctcaagagctgtacactcaggtcgggaccatctcggcgctttggcttttgttggctacgcggtgcctccccgacctctcatgggatcgaaggcgtctccaagccaaactgcaacacagctgcccggtagtagtaccatcgccgctgctccattcgactcacttcagaacctctcggtggagctgcctcttcagacagcagacgagctcaacaacaccttcggtgtcccgtttcagctcgaaagtcagatttcgttcgactgggtccccgcttcgagtgaccgaccaagtacggctcggacggtgtcgcaaccggtagatatagtgcgcgcgatcgagggcgagctcacttggcgagactggcacgaaagttggtggaatataccagatacctcgcaggctaatcaagcaggtaaacagcttggatgatcttcttacttttcgtcatgctgaggatgcacgatcaatcgtggacatactgtaacaggagcttcagatctcggccaaagcgaaacaatctaagcctgaagtggtaatgaatgtatattatgtaataatgcacactggatccggtaactatccaaaagtagcctggcgacgaatggaatctccaatttttgttctcagcgccgataccaacgtctagactacgcgcaccatggatacaggcttgactccgtttgcttctcttctcgtatcccccgcagagcttcagtctgctctcgcggggcctccatatccacgacgcatcatccctttggcagttggccaaccgtcgcatcttgcctcgtttgaaatacagcacattccgggttcggtgtaaatatatatttccaaccgttaaccacgacaagacgttaaccatggaaacagattcttcaacatggacgagatcagggaccggtcatccccctatcctcagatgctgccttctgcgacacaatttgccgaaagtatgaccaagatgggtcttcatccggacgatattctggtagtctacgatgcgctggaggtcggactctattcgtcacctcgtgtggcctgggcatgtcgccactttggccaacgagacgtccatgttttgaataacttccctcgttatgttgcagaagggttacctctttccactggacccttatcgaccctgcctcctgccgccctggagtatccaataaaaaacccagattccaaggaagtgatatcatacgacgagctacgcggtcttctcctatctgataagaaatcagatattcagatcatcgacgccagaatccccggtcgattctcaggcgccgaaccagagatgaacccggccctgcggtctggacatatgccgtcggcactgaatgtgccgcttgcatctatcatggacaaggacaaggtcatattgccggctgaagagctcaaggcacgtttccaggcggccggggtagatgggcaattgcctgtggtgttgacgtgcaactctggagtaactgcggctgcgctcgacctcgctttgcagctaagtggatacaggatggagcgacgactgtacgatggcagctggatggagtggacgagaagaacgca

SEQ ID NO: 20024 - DNA, 1595 bp, Emericella nidulans
ccctcgcctggcaagccttcttgatgaaatcaaggatgagaagaaggtctcactggccgtagctgatcctaagttgggtaggtctgatccccgcttacataccgacagtgtaattgacttgccgctgcgtaggaaatgccattggcaagcttcccggtcttgatatttcattaattgccgattccacaacggccgacatctaccgtgccattcgtgaacatctgcctacgctgattcctggtcttctcccccaagacatgtccaccatgtctctgggtctttctcactctcttgccagacataagctcaaattctctcccgacaagatcgacactatgatcgtgcaagctattggtctgctggacgaccttgacaaagaactaaacaactacgctatgcgtgtgaaggaatggtatggctggcatttccctgaactcgccaagatcctcaacgacaacatcgcctactcgcgactcgttcttaaaatgggtatgcggtccaattttgagaacgccgaccttgcagagatcctccctgaagaaattgaggcggctgtgaaggccgcggcagacaggtctatgggtacagaaatcagcgaggatgacttggagaacattcaggccctggctgaacaagtcgttggtttctctgaataccgctcccagcttgccggctatatcactgcccgtatgaacgccatcgcccctaaccttaccgctcttgtcggtgatcttgtgggagcccggctcatcgcccatgggggtagcttgaccaaccctctccaagagccctgccagtactcttcaaattctcggtgccgagaaggctctcttccgtgctctaaagactaagcacgacacacccaagtacggtttgatctaccatgcctctctgatcggccaggcgactggaaagaacaagggtaaaatggcgagagtgctcgctgcgaaggcatctctcggtctccgtgtcgacgccctcgccgaatgggacgacgatgtcaccgaggaggacaaggctgcccttggtacagaggcccggttcaacctggagcgcaagctggccgcattggaaggcaagcccctcaagcctcgtggcgttgctattggtcccgacggcgcctctgcccaacccggcaagttcaacatcaacgaagctcgaaaatataaccctgacgcggacgccgtggatcaggataaggctactccttccaagaaaatgctcgttcaggaggttcaggacgaagaaatggctgatgctgattccgacgaggaacccgccgctaacggggtagactcagactcttctgacgaagagacgtccaagaaatctaagaagagcaagggctcagaaatcgagaagctagccgagaaggccgggctaagcgtcaaacggtacaagcgcaagctagaacgcggcgagattcagttcgacgccgccggtaaccccagcgccataagcaagaaggacatcaagaaggccaagaaggaggccaagaaggaggccaagaaggcgtccaagggcgatgacaaggagaagaagcgcaagcgatcagacgagaccgaagacacggacggtaaaaagaagaagaagaa

SEQ ID NO: 20025 - DNA, 1598 bp, Emericella nidulans
catactgcgctgccccaggtgcattccccacgtataagtattgaccctgtgcttgaggctcgtgtggtacgcaaactggatttgcgggtaccgactcttcttggctttttgtgtaagcctccattctagtgggagtatatttctcaatgtggggttgtctgactcggacctctatagacctgctcgcgctcctggacaggagcaacatcgggttagtcttcctggcactccccatactaaagtagacgctgactcctcatagaaatgcgcgaatcgcagggatggaagaggacatgtcccttcatgggaacaaatatccatggcttctgacgatattctacatatcgtacaccctgtttgagcctcttgcattaatgtggaaaatcatgcctccgcatagatgggcagccattactgccatgacttggtgagcttgcagactaagagtgcgccctctcaattatcttgacctaactggtatttaggggtattgcggcaacatgccaggccgctgctcagaactggtctgggttgatggctttgcgctttatcctaggcgcacgagaggcaggttttggtccgggttctccctacctgctgtctttcttctacggccggcgagacttggcttgcgctgcggattgttcgtctccgctgcgcctttggccaatacgtttgccggtgcgcttgcatacggtatcacgtcaggacatgccctactagcaaactggaggctattattcctagttgagggagctccatcactggcggcggcatttcttgcctggtactttttgccggaccatccctcttcagcctggtttctgacagaggaggagaaagacgttgcgcgacgccggtcgcttcgacgtagcggtgaaggtgagcgtgttggaggcgtggatctgaaagagatttttcagactttattcgatgtgaaaccgtggattacggcggtacgtacagttgatttgtttctgttcgatactggcctaactaacggcctggcctccgcagttgatgtacttcagttgcaacgtgagcttttcctcgctgccggtattcctcccgacaattctagaagacatgggttttgagtcgatcaatgcccaaggcttgactgcgccgccattcttcgtctcgtttatcttcagtatcttgactacttggcttgctgatcgatttcaacaacgcggcctgacgattgtcttcttttcattggtgggagcagtgggctacgttcttcttgcagcttgcacatccgtcgcagtgcgctatttcggcgtattcctggcagctgctggggtattcccatgcattgcaaacattcttccatgggttctgagtatgctccctttctggagttgaggttcctaacttgctaacgtgcgagctacagataaccaaggttctgatagccgtcgcgggatgggtatcgtcattctcaatataatcggacaatgcggccctttcctaggaacaaatgtctttcccagcagtgatggccctcgctatattcgtgggcagtccatttgcgcggcatttatgttcttcaacgccattcttgctctcagtctgcgattcctcctcgcgtggga

SEQ ID NO: 20026 - DNA, 1600 bp, Emericella nidulans
gtgtacatccggcaacatgaattatcgaacttgaagaactatcgatatgcaggcgtggaccattcgctcatcagtcgatatgtcctcaaaccggtctataataattttgtgatcaagttctttcccatgagcatggcgtgagtagtgacgctggtggcatttttttgtgtatggcttgactaacagccttctcttatcttagacctaatgctgtaagtctactagcctctcagccctatgcatcaaaataaagagcctcaggaaccaggaaataagagaccgatggcgctcatccctgaagacctgagcacaaaactgatgaaggatccgaaattaactgaagaccggtagatcactttgacaggcctattcttcgtcttgatcaacctctttaccgttctatactataacccaagcctggatcaggactgtccaccatgggtctatgccagttgcgccatcgggctattcttgtaccagacgtttgacgctgtagacggaatccaagcgtatgtttcatcatctgtcgtgtggaggatggaactaattcgccttatagaaggagaactaagcagagcggccctcttggcgagctttttgatcacagtaagtggagtagctgatattcttgcaaatcatgtcactgagacttgttctgcaggtgttgacgcctgcaacacggccctgggagtcttgatattcgccggagtcatgaacctcggccagacttgggctactgttctgacactttttggatgtatgttgttccggagcccagaagcagtgcgaaacctaatttcattcccatagctaccatgaccttctatgtccagacctgggatatgtattatacacaagtgttgacgttgggcatcgtctctggtcctgttgaaggggtactgacgctttgtgttgtcttcgggttcaccgcatatatgggaggcggaagtttctggcaccagcctatgttcgaaacgatcggtgttcctaaactcgagttcatccctaagcagctctatgacttgcccttcacgcagtggtatctcatttatggtgcggtcatgcttttcttcgccactggctcgagcatcgcgcatgtcatccaggttcgcaaggaacgtggtaaggattcgattggtccactcttcggtatccttcctctcgccttgacgtgggtagttgtaccggcgtacctgtacctaaacccgacaatcctcgagaactacctggttccctttgccctgtatgtcggcctggtcaacgcgtatgccgttggacgaataatatgtgcccatttggtacaccaagactttccctatttcaacattcttcttggacctcttgctttggctgttgttgacagtgccggtgcactttttggtgtctggtcgtcaactctgattggtacaatcggacagcctgctttcgttttcctatgcctgggtctgggccttggcgtctacgggagctttgtggtaagtcctgcctctacattaagcatttacaaatcgctaattgtcctagcatgatatcattaccaccatttgtgattatattgatatctggtgtttgacaatcaagcacccctatgtgccagagg

SEQ ID NO: 20027 - DNA, 1600 bp, Emericella nidulans
tggaaggtctctggcacaaacaacgttcctttaggactggaaattggctacgttcctaactccaacggcggtcagtaccctggtatctacatgttctcccaagctgcccggatgtaccgacccgtcaagtacctacccctcgacatgctcgactacgtcggtccctttgaacagccctttatggagattgcctgcttgccttcggacctggtcaaaggcctgtcaacccatatcgaattcacccctacaaacatcctctccatcgtcgccaacatgactcccttctccgactataaccaatccccccgcaacatgtaccagtgccaaatgagcaagcagactatgggaacgccaggtacagcaatcgactaccgaacagataacaagctttaccgactacaaaccggtcaaacgcctatcgtgcgaccaccgctctacaacgcttacggacttgacaatttccccaacggcacgaacgccgtcgtagccatcatctcatacactggttacgacatggacgacgccatgatcattaacaagtcctcgcacgagcgcggcttcggatacggaacagtctacaagacaaaggtccactccctcgacgaaaaggactcaagacgcacaaagtccaaacaagccgtccagaaacttttcggcttcgccccgggcagtgaaatccgcgctgaatggcgcgctacccttgacgaagacgggttcccccacatcggtgccgaaatcaaggaaggatccatcgtagccgcgtatcacaccgtccgatacgacgcgacgtccgactcctatataaacgttgacggcatcacgcactttgtcaaatacaaggacagtgaaagggcatacatcgacagcatccgcattatgggctcagaaaccggtaccgagcccgcgcaggctatcagcgtcaagtaccgtattcctcgaaaaccaatcattggtgataagttctcttctcgtcacggtcagaagggtgtctgctcgcagctctggcctgctgtcgacatgcccttctccgagagcggcatccagcctgatctcattattaaccctcacgctttcccttctcgtaagtctctgttccaaacatgttttctccttcccccctcttgtagaagtatctaataagaaaaggaatgacgattgcccaaatgatcgagtcgatggccggaaaagctggtgctctgcacggccacccacaagactgcacccccttccaattctctgaagaatatacagcgacagactacttcggcgaacagctgcggcgcgcgggttacaactactacggcaatgagccgctgtactcaggtattaccggcaaagagttcgccgccgatatcttcatcggcgtcgtgcactaccagcgtctgcgtcacatggtgaacgacaagttccaagtccgtaccaccggccctgtcaacaatctcactggtcaacccgtcaagggccgtgcgaagggaggtggtatccgtgtcggagagatggagcgcgattctctgattgcgcacggagcagcgtacatcttacaggatcggttgatgaactgttctgattcccagcgggcgtggatctgccgcgattgtgg

SEQ ID NO: 20028 - DNA, 1603 bp, Emericella nidulans
cgcggaggtgtcgcgaagttatgcaagctgtggtggagcgctgcttctggtcgatgctagtcaaggtattcaagcgcagactgttgcaaacttctacctcgccttttcgcaaggcctggaattgattcccgtcatcaacaaggtggatctcccgtcagccgaaccggaacgggctctagaacaattggaacagtcctttgaacttgacacagaggatgcagttctggtctcagccaagactggtttgaatgttgaacagctgcttcctacggtggtagagaagattcccgcgtatgtcttgggttccttagaggtccgttttgaaatactgacaactgagtaggccgatcggcgactgtaagagacctctccgtatgctactcgttgattcttggtatgattcctacaaaggcgtgatatgtttggtccgtgtcttcgacggtgaggttcgggctggccagcaagtcgtttctttcgcaactggcattaagtactacgttggcgaagttggtatccaatatccgcttgaaacgccgcaaacagttctccgtgctggccaagttggatacatcttctttaatccgggtatgaaacgaagcaaagaggccaagattggtgatactttcacaacagtcgggtccgagaaggccgtgcagccgctgcctggtttcgaggagccgaaggcaatggtctttgtcgctgcatatcccgtagatgcggaccatttcgaacacttggaggacagtattaatcaacttgttctcaatgaccggagtatcaccgtgcagaaagagtcttcggaagcgctcggagccggtttcagactgggattcttgggtactttgcactgctcggtgttcgaggaccgtcttcgtcaggagcatggggccagtattatcataaccccaccgtcagttccggtcaaggttgtttggaaggacgggaaggaagacattatcacaaaccccaatcgcttccccgacgaggacgacgtgcgcatgaaggttgcggaactgcaagagccgtacgttatggccaccctgaccttcccggatgaatatctgggaacagtcatcgaactttgcgaacgaaccgcggagagcagaaaagccttgaatacttcaccccgacgcaagtcattctcaagtatgaactgcctttagcgcagttagtcgacgatttctttggcaagctcaagggagggacgaaaggatacgcatctctggactacgaggagtccggctggaagcctagtaacatcgtcaagctgcaactccttgtcaacaaagctccggttgatgctgtcgcccggctcgtacattacagccagaccgacagactgggaaggcaatgggtgaccaagttcaaagagcacgtcgaccgacagctgtttgagattatcatccaggctgcagtgggcaaaaaaatcgttgcgcgtgagactgtcaagccgtaccgaaaagacgtgttggcgaaactccatgccagcgatgtcagtagacgaagaaagttgctggagaagcaaaaagaaggtcgcaagaggcttcgagccgtcggaaatgtggtgattgagcataaggctttccaagcgttcttagcaaag

SEQ ID NO: 20029 - DNA, 1605 bp, Emericella nidulans
gtggaacaacggcataaattcagagatggtaactacttttaccagatctcgagcgagtatcgtgttgcccgtccagagtcgaggaacagttggtttccccagattagaccagacaagtcaattccgtcgacacccgcgacggcagataactggaaagattccccattgagtgcacactcacgatctgcgagcgttgaccaaaatgctcctcaaacaccgaccacgccatcaaggtcgaagagcaaagcgtcagttatgctctcgaagacattgaagtatgatgtcgaccctcgcaagcgctcgaaccggccagaggtgattgatcttcactacgaccggctgcataaccctgacaactgtttccatattgaattaagctggatgaatactactcctaagcttatcgaggataccgttcagtcatgggccgcgacagctgagaagttcgggctcaagctcgtccaagtgcctattgccgaggccagtgccattgatcagacacagccattccgccagccatatagggtcaagctcaaagtgccccctcccaaaggtcccagctcgacgattttcaacgcagcttcattctcgcagcaagacgcaccagacccgcattatttccagaagctcatcctaaagaagtttgactttgtccttgatttcgaagcccgctcagccttccctccagatgtggaagtcggctactcctggggaagacccgactaccgctactcccaatacatccatcaatcaggcactctcctcgttcaaatcacagacgaaggcgacttcctcgtcctcgcaaaccgcctcgtcagcacccgcaccgtccccttcaccggcacgcgcgaccgcgaccaccgcgcccgcgcaggctatgaccccatgggtacgatcgaacgtgatcgtctctccccgcgactttcccccctggtacgcccaatccatgacatcgccggccccgcaagcccaatggcacactcctccctagactcggctagcctctaccgcgcccccgagcacgtcctgcacgggttcgaggagttctgcaacgaccccgttagactagggcagctatacagcgagtctttcgtctatccggtttccgcgaaagcggcgcctaccacggcgtcttgtgttgactcgtctatcccgtcgctcgagttgccggcgccggttatcgggcatcatatttcgccaccgccgggaacgccggtgagacccgagacgaggactcgcgctgcgagcacgagtgctaatggcagtctgccacttattgacccaaggagtcggcagcgtgaggagagttcggttgcgagggggagcccgaggagtggtgggttaagaccgttgaatttgagtggggcgtgaccactacatatcatttactataatattcacttctcagcctcgattatgttgtaactatagctatattatgattgagatatgacatttcagaacactttggaataatctgaatgcttttacccgagccagccggcttttttcccggcaggatttagtcaaatccgccttgtttactcttcagcatcaccccacttacctccatcctctgctttctccaactctcaaacattctac

SEQ ID NO: 20030 - DNA, 1615 bp, Emericella nidulans
atgccaccaaaagcacataaaacaaagcaagatttaattgagtaagagggcaggatataatgcgcgattcaagacattaaaaatagaaaatttcaaaaaattgcgcccgcagcgcgtgcatacaaaattcatcccaatacacttcaagggagacttcatggccgccaatctcaagcagaactctgcaaccaccagcataggctatccctatattaagaagaggtcttgataggatagatagtattacttgacattcatggagcagctcccaggcccttgcatgtatgtaagatggcacaacttatcctggatgaatccttacccttatcttgactaatcagaaagacctgggtaacagagtttacaaaaaggcaccctgaaatcaaaaccaggtttgcttggaagattaattgtcagagagtactttgtaaagatcccaagataattcgcctatttttcaatgagatataaaggattaaagttgagtataggatatcagataataatatctacaactttgataaaactggctttgctatgggcctaattgcaataataaaagtagtatcttgagcagaaatgccaggcaaaccatggcttatacagctgggggattacaagtaggttactaccattaaatacatcaattcaactggatggtcagttctatcaaccattatctttaagggaaagtgctatagagagggatggtttaaggaactctctattccacatgcctggaggattgaggttagtaataataaatagactatagatataattaggctttgctggcttcaaaaatgctttattccagctatacagaggtggcaaaggggggagtatatactccttattctggacagccatagaagctacttgaccccagcctttgacactatatacaaggataataatattatccctgtctgcatgcctccttattcatcttacctcctgcaacccctggatgtgggctgttttggccccttaaagagggtatacagatccctgattaagcagaaggcacgcctaggatataactatattgacaagcttgatttcttgaaggcttattcagaagcctataagaaagtctttataatagagaacatttaaagtagattcagagcaactggattacatcctttctcacctgctgcagtactggataagctgcagttaagaccattgactcctacaccccccccccccccccaagcagtacctcccaagcagaggtactgcttcaatcccctcctctcaactctgtacaccttatacagtccgtcaggtgtatcaaaaagcttcattagtcaaaaagcttctaaaagagggctctaggagtccttcaagcccctcaaaacaggcgctggatgaatttgtaaagggctgtgaggtggctatttacaatactgggttgctggcacaggaaaacaaggatctctgcttatttatagcagataacatggcaaaaaagagttgttctaggcgtctaataactcttacagatggactctcatttaaagaagccagggaccttatttcgtcgagaaataatgaattacaagctggtgggggggggttcaagctccagtacccttccaacttcgga

SEQ ID NO: 20031 - DNA, 1618 bp, Emericella nidulans
tccctgggtgaatcaacgacgatcttacgatggtcatttgtgcaccatccgctatgtgggcaaagtcgacggaacgtctggggaatggctaggggttgaatgggatgatccgacgcggggaaagcactcaggccagcataatggagtgagatactttagatgtactgtgaccctttgaacagctgtccaggcgcatgtactttccacgaagtgtcatcaaaacatctctaatctgcagcaggcttaagaaatcaccctacggcagggtcatttgtgcggccttcacgcccagcagacagtccgcgcactttctagaggcagtccgcgagaagtacgcatctgattttgagcagagtcgtgagagacaagctcgtccggatgcggagttcgaagagcctatcagattcaaaagcaagattgctgaagaagtgggcttcgacaagatccggaagcagctcgcggacgttgaggagctgaaaattgtgctcctggatggactacgcgtggcgggtctgcttgcgcaggaggctagtcgagaacaggttgaagaggcacgcggccagatcgagcgtacttgtcctaagatcgtggagcttgatttgagctggaatatgttgaccaaatggagggatgtttctgatatctgtcggccgcttaggcgattgagtcttctgaagctgaagtgagtcttcttgcgttaacgaacagttcaggctggctgactgagttttccttagcgggaatcggtttgagcctgttgaggagggcttgaggtttgatgggatcaaagagcttcatctggatgacactttacttccatgggagcaagtaagtggaaacacggcggtctgtgatgcatcgctgactggcgcagatatcaagagtggctgctcagtttccgtcactcacctggctctcggcttcagcgaaccaaatctctatggtgcggacccaatatccaacactataattacactcattctcgacaacaacgaaataggttccttgtcttcaattagagcattgacttctcttcagaacctcgagcatctgtcactgcgcggaaactgcatcgacgccgtagccgcagctgaaactgagggtcattccttccaattctcaagaagtcttcgatctgtggatctctcccgaaacaaaatcaattcgtggctgtttattaaccaacttcccgagatcttcccgggcctgcgaagccttcgtgtatcagggaaccctctttacaaccaagccgtggcaccgtcatctatcaccggtcttcctgagaggccgatgacagtggatgaagcttacatgctaacactctcccgcctctccgctttggaggtactcaattacagtacaatatctgagaaggatcgcaacaacggcgagctatattacctgtccctgatcggcaaggagctgtcagcgcttccggagaccgcagagccagatatacacaaagcacaccctcggtacagggagctatgcagaatctatggggagccactcatccaacgagcctccaaagccactgggtcaggagctgcgcttaacccacgctctgttgcggcgcgattagtgcgaatggtattccatctaactcaggcagagtggg

SEQ ID NO: 20032 - DNA, 1618 bp, Emericella nidulans
gcgcgtctgcagcaggagattcagggcatacctgacgacttgggaagcgtgcgagtgcagttctttgaccaagcgaccggttcagctacaggcccggcggtgtctgtcccagtggccgatgcgacagtaaaaaatcttgagactcttttgaacacattacaaggaaatgtaggtatgcgcgctgaatttattcgcactgaaggccagcgctaatctcgccgacgccttaggaagaggatgaacgagtaccataccgatttactttccagtccgatgacaaggacagcaaggacagccagacaattgatatcctagcagacatataccactcccttttgaaacctggggtgaaaacaaccgaagataccattcaactttactttactccacaagctattttccgggtaaaggccgtttcacggtgctccgcctccatcgccggacacggggaggctatcctcgctacatcgttctcacccgtttcttcttctacaatggtttccggcagcggagactcgacggcgcgcatatgggactgcgacacaggaacaccattgcacactcttaagggacacacgagctgggtgctagccgtcagctactcgccgaacggagcaatgatcgcaacaggaagcatggacaacacagtacggatatgggatgcaaagaagggtcaagcgctgggggcaccattgaaagggcacgtaaagtggatcaccagtctagcctgggaaccctaccatctgcaacagtccggccaccctcgtctcgcctctgcatcgaaagactccaccgtcaggatctgggacgtcatctcgaagcgcgcagacatcgtcctttccgggcacaaaggctcagtaacctgcgtacgatggggtggaacaggtaaaatctacacctcctcccacgaccggacaatcaaggtatggaactcgcagactggtaccctgatccagacattgtccgcccacgcccaccgcgtaaaccacctcgccctgtccacagacttcatcctccgcacagcctaccacgaccacacaggcaaagtccccgagtctgacgcagacaaggtcgccatggcaaagaagcgcttcgagaaagcagccacaatcaacaacaagatcgttgagaaactcgtctccgcctcggatgattttaccatgtacctttgggacccggagagctccagcaaacccgttgcacgcctcctcggccaccagaaggaagtcaaccacgtcacattttccccggatatggcctatatcgcctccgccggattcgacaaccatgtcaagctctggaatgggcgagacggaaagtgcgtcacaaactaacctaaccctcaattagagcaatttggctaacctaccatcgcaggttcatcacaaccctccgtgggcacgtcggcgccgtctaccaatgctgcttttcggctgattcgcgccttcttgtttcctcctccaaggacacaacattgaaggtgtggaatgtgcgcacaggaaaacttagcgaggatctgccgggtcacaaggatgaggtgtttgcggtggattggagcccggatgggcagaaggttggtagtggaggtaaagataaggctattcggatatggaggaac

SEQ ID NO: 20033 - DNA, 1619 bp, Emericella nidulans
ggcctgtccggtcatgtttccatttcaaaacccattactcaatcatggatgaaaaggctccccccaacggaagttgccctgacaaagacatccaagtcgggactgtcactgtcagtgacctcgatgaaggccggctctttctgagacaacacaatatcacaaacaatgacctagagggcttccttgccgatgaggttcgcaacaaagccctcgtgcgcaaggtcgacctcatcctcctgccgctcctcgcagggacatatatgctgcaatatatagacaagacggccctggcttattcagccgtcttcgacctgctgccatcgaccaacatgaccagcgagcagtatagctggcttgcctcaatcttctacttcgcgtacctcgtcgccgagtatccatggacaatcctggcccagagaacggccatggccaaggtagtttcgggcaacgtcattgcctggggctcaatccttatgataacagcagcttgcaagaactttgcaggcatagcaacttgccggttttttctcggtatattcgaagcgcccattacaaactgcttcatgatgattgtggggatgtggtatacccgacgtgagcagcccttccgcgctgggatcttctactcctgtaacggaatgggcgctatagtcggcggaatcctgacttacggcattggccaaatcaagaccatcgccgtctggcgcgccatcttcctcatcctcggtggtatcaccgttgcatggggccttgtcttgctccttttcttgcctgacgatattctctctgcgaagcgtttcacaatcgaagagaaagcacttctcgttgccagaggaaggctcgcgcgcactggaattcttagccaccagatcaaatggtaccaaattcgtgaagccctgctcgacccgcaagtctggatcttgttcctattcatgctgctaaacgaaaccatcaacggcgggctcgccaacttcagcaagcttatcatcaaaggtctcacagatgacagtctcaggaccgtggccttgggcataccattcggcgccttccagctcctttgggtcttgtcagggacattcattgcgtcgaaaattccaaatactcgcacaatcgtgatgtttgtgtatctaatcccctctcttgttggcatcatcatgctgtggaagctctcccacgaaacccagagaatcgcagtgttgttcgggtactacatctcgggtggctatgtgtgtagtttggtccttgccttgcagatgccagccaccaacctgggcggatacacgaaacgcgcgactagtgttgccttggtatttctggcgtactgtgccggcaacatcatcggaccgcatgcctttctcgcggcggaagcacccatctatcagacaggatgcaagcttatcatatcatgcctagctgtgcaggcggccttgtctatttgtctgcggtttcttttgattcggaggaacaagcaaagggactctgctaccgctgatgcaccggtgtcagaagaggaagaattggcggatataactgattttgaggttagtttctatcctaattctcttagatggtggactgacaaaaggtactcacagaatcctcgattccgatacgtgctt

SEQ ID NO: 20034 - DNA, 1624 bp, Emericella nidulans
caccgcctttgaagatggctttcaagaagtcctacaatgtttacttcctttgcgggttcatgacccttggtatgaaaccgtgattctactgtggggatgatactgactggccaggtggtggtctgttcggtttcgacatctcgtcgatgagtggtaagctgaatgctctgcctgcagcggcaaacatctcaccatcgcaggtgtcttgggtaccgcggcctacaacaactactttcaggtcggcggcggcaattacaaacaggtactttggtgttctcaattcaattgcagatctatacgctaacgttttagggtggaatcacttgtgctatgccatttggatcgctcgtcggtgccctagcctccagtttccttgccgacaaatactcgcgtgtcactgcaattcagttctcgtctactttgtggattattggatcagtgtacgtatagtatatctactctttgacctgatctgactttttagctttcaatgtgccgccaacggtatccccttgctggtcgtcggtcgtgtcattgcaggcctctgcgttggcatcgcctcagctatggttccggtctacatcgccgaagtgagcccaaagcatatccgagggcgaatgatatcgctacagcaatgggcaatcacctggggtatcctgatccagtacttcattcaatacggcgctagcaacgtcgacggcgggcctgacaatgaaacccagagcacagcggccttccgaattccatggggtatccagattgtccccggtgtaatttacttcgttggtttgtttctataccctaaatcgccccgctggctggcgagcaaggaccgctgggacgagtgcatgcatgtcctcgcccgcctccacgggaacggagacatgaaccacccccttgttctggcccagtacaaggaaattcaggacgcgctcgcccttgaacgtgagcaggctagcaccagctatcaggagctcatcaagccacgcatcgcaaagcgtgttttcctgggcatgagtctgcagatgtggtcgcaattgtcgggaatgaacgtcatgatggtaagaatgttcttcgccataagagcacagtcaaattaacaaacgcagtactacatcgtctacatcatgcagtccacaggagcgggctcccctcttctaacagcttccattcaatacatccttaacacggcccttactctcccagcgattctctggctcgaccgcttcggccgccgccctgcgatcctcattggcttcaccatgcaagcaatcttcctttacattgagggtggcctgcaagccggctatggtcgctcgactcgaccgtccgacgacctaaacgccatctcctggaccgtggcggaccacccgggtgtgggcaaggctatcatcgccatgtcgtacctctttgtctgctccttcgcaacgaccattggtccaacttcctggacctacccggctgaaatctacccggccaaggtccgtgccaaggctgtctcactggctacggcgtccaactggacctggaactgtctccttgcgctctttgttccgccacttctgtggaatatcaactggaagatgtacatgattgtacgtttacccacccaccaaccactgca

SEQ ID NO: 20035 - DNA, 1626 bp, Emericella nidulans
cgtgtacagcactatattcggaacgaacgcgcgaccgggttgccgtcaatcgatgtacgtcaatcttttccagattccagtaatatatcctcgtgcatttttgtccactgagtcgctggttctagcggctgccgacactcgactccacacccatttgtgttccccccctggaccatcgcaagcacattgacctgcgggtgatattgggattgtcagaagagaagttggattactgactgcattcagcgaattgattagatatattgtcatttccgcgatctatacaagatgaagtactctttcgccctcaccctggccaccgctgggtccatggctgctgccgcccagcaccagcacggtcaccaccaccaacacagcaagcgtgaagtcgtcacggttgatggtcccactgtcgtcaaatacatgcttgataaccaactcatcagcgccgagaaagtgtgcgagggtatcaccgacggcaccttggcctgggctaacggccagcctccttctgatccttgccaggcttcctcgaccaccagcactgaagcctacacccctactgctaccgctgcgaagttcattgagactgaggcctcttcctctactgcgacctctacatccactaccgtgagcgtgccctcgagcaccacttctcagccggccgccagctcctccagtgcttccactgccactggattggatgctcccttccccgatggtgagcttgactgcagcactttcccctcggactacggtgccgtgcctctcgactaccttggtcttgacggctggtctggtatccagtatgtgaccctggttggcgagattataagcgacatcatcaccgtcgtcaccggtgacagttgcactagcggagccatgtgctcgtacgcttgcccacctggttaccagaagtctcagtggccctctacccagggctccactggccagtccgttggtggtcttcagtgcaagttcggcaagctgtacctgaccaaccctgacctttccgacaagctttgcattaagggtgttggtggtgtcaaggccaagaacactctgagcgaccacgttgctgtgtgccgtactgactatcctggtgagtgatacccgtcagcaaatgcgagttgtgcttatggctaaccataaacaggaaccgaatctgagactatccccatcagccttaacagtggcgagaccaagcaagtgacttgccctgatggtgccacctactacaagtgggagggcaagaccccttctgctcagtactatgtcaaccctgccggtacctcgcaggaggagggttgccaatggggtgatggcagcaagcccatcggcaactgggccccgatcaaccttggtgttggcgagaacaacggcaaatggctttctatcttccagaactctcccaccaccaccgagaagctcgactttaacatcaagatccagggtgacaaccttagcggttcctgcaaatacgaagatggctccttcatctctgacactggctccaacgactctggctgcacggtaagctttcatgatctgattcgtccactgaaactgaggctaaattatttacaggtgcaagttatgtccggtgacgctaccttcgtcttctac

SEQ ID NO: 20036 - DNA, 1626 bp, Emericella nidulans
ggaccttcgggagggctgcttttgctcgaccttcccccgtcgcacgccgcgccctccagccctccaagctcaatggcttcccttcattcgctcgcctcgccagcactgagaccgctgccggtggaaagattcaccaggtcatcggtgccgtcgtcgacggtatgtacctcagataccgccaattctccctcgttggcggctacgcgaaaatcttttctacacccgatttcatcacaacatccatcaataaaaacctcaaaataatgtcaagacctgatatctgacttgggaattacagtgaagtttgagggtgagaagcttcccgccattctcaacgccattgagaccgagaacaacggccagaagctcgttctcgaggtttctgtatgtaattgatatcaagaaaccgattgataacaccaagttctgatggctgacactttcaaagcaacacttgggtgagaatgtcgtccgtaccattgctatggatggtaagtcgcttcctttctggcgtgaaacttcgtgtgatcaccatgtctttgctcaagatattgatatctccgttctaggtaccgagggtcttactcgtggtgctcccgcccgtgacactggcgctcccatcaccatccctgtcggccctggcacccttggtcgtatcgtcaacgtcactggtgaccccattgacgagcgtggccccatcaaggccaccaagtatgcccccattcacgctgaggctcccgagttcaccgagcagtccaccactgctgagattctcgtcactggtatcaaggttgttgaccttcttgccccctacgctcgtggtggtaagattggtctcttcggtggtgccggtgtcggtaagaccgtgttcattcaggagctgattgtaagtttcgtatctgggacttcacacgaaaatgtctaatttctctttagaacaacatcgccaattcttacggtggttactctgttttcaccggtgtcggtgagcgtactcgtgagggtaacgatctgtaccacgaaatgcaggagaccggtgtcattcagctcgatggtgaatccaaggtgtctctggtgttcggtcagatgaacgagccccccggtgctcgtgcccgtgtcgcccttactggtctgaccattgctgaatacttccgtgacgaggagggtcaggacgtgctgctcttcattgacaacattttccgtttcacccaggccggttctgaggtgtctgcccttctcggtcgtatcccctctgccgtcggttaccagcccactctggccgtcgacatgggtggtatgcaggaacgtattaccactaccaccaagggttccattacctccgtccaggccgtctacgtgcccgctgacgatctgactgaccctgcccccgccaccaccttcgctcacttggatgccaccactgtcttgtctcgtggtatttctgagttgggtatctaccctgctgtcgaccctcttgactctaagtctcgtatgctggacccccgtattgtcggtgaggaacactacaacaccgccactcgtgtccagcagatgcttcaggagtacaagtcccttcaggatatcattgccattcttggtatggacgaactttctgaggctgacaag

SEQ ID NO: 20037 - DNA, 1629 bp, Emericella nidulans
gtttccctagagtcaaactctgcttaagtcgtattccagtaggagaacggcaccatgaaccctaagctctaccagttcttcgttgctctcttcgcctctttcggctctttcctgtatggctacgacctgggcgtgatcgcctcggtcgtggcctcagactccttcattgacaaatttgtccgcggcagcagcaccgtctctggcaccgtggtagccctcttcacggcgggcgccttcttcggtgcattcggcgcagggttcactgacccgctcgggcgtcgaatgacactggtactgggctccgtcctctttatcattgggggaatcatccagacagcttccgtaaatctagggatgctgtacttctcacgtattttttcaggattcggtattgggatcctcgtcgagatggtcccgatgtttcaggcagagatcgcccatgccagaatcaggggtatcctgggctcgctgcagcagaccatgctgggtattggaagccttgccgcaagttggattgggtacgggtgtgagcatcactggtcgaacacgggaaacagtgtgcagtggaggttgccgtaggttgcctgccgttctattccatctcagtgcatcacaacgggcggtgctgatgagactagcctggccttacaggtcgtccccgccatcggactggcctcgtgcatcttctttttccctgagtcgccgcggtggctgatcgatcatgaccggcacgaagaagggctgcggaacctcgccactttgcacgccaacggcaacgagaacgacgcatatgtcctggccgagtttgaactgatcaagcagcaggtagaggaggagcatcggcacggggccaagtcgtataaggagctgttctccaatcgatccaatacccggcggattattctggcttgcgcgtgtcaggcgtcgacgcagatgtatgaccctcctttgtttacaagactggtgttactattacgcacttagagtggcagtcacgagaccaacaccaatactgaccttttacaggactggcgtctctgccatccaatacttctcgcccgccatcttcgcccagatcggcatctctacgtcccaaaccctgctctaccaaggcatcaactccatcatcggcgaactcgcccagtttatcttcttcttcctcatcgaccgcgtcggtcgccgccccctccagattggtggcaacattgcctgcggcctcgcgttcaccatcggtgcagcgctgatggccgtatacccgccctcgtccacaaacacctctgcacattgggcattcatcgtcaccagcacgtggtttttcaatttctgcttctgcgcctccggcacaatgtcctggatcatccccgcggaagtctttaacaccgcgacccgcgccaagggcatctcgctagccacgatggtctcgttcgcgtttaacacaatgatcgccgaggtaacgccggttgcgttggagaatatcggctggcggtactatattctttttattgtgtgtgactttggaaatgctctcttcttttatctgttcttgccggagaccaagggaattacactggaggttatggacgatctctttacaaactcgccgctgcttgtccctggaagtcggtggca

SEQ ID NO: 20038 - DNA, 1635 bp, Emericella nidulans
tgtccaggggttcgccgttaatcaggttatgtgtactacccaaacatacatgtctgaggtccttcctcctatactccgtggcccgatcctcggcctctttcctacctttatcctaatgggccagctgatcgggagcataatcatctatgctatggctgccagacgcgggccagaaggctacaagctctgctttgtgtccgagtggccattctctgttctcccgttcgtggtctccttcttgatgccagagagcccgacatacctcatccgagagaatcgtcttgacgaggcccgcagatgccaggagcagctctcatattcgacagaggaagcagatatggtctttcaacaatgccgtttctccatcgagctagagaagaaagccaaaggctctgtgccggggtattccgattgcttcaagggcaccaatcgccgccgaacaatggtcgttttattcgcctgcctcctcccacagctcttcggaatatcgctgctcgccagaggcagctatttcatgcaagttgtcggcatgaacgcgcacaccagcctcatcttcctccaggtaggtgtcgggctaggcctcgtcgctaacgtgggtagcatgatcacagtagccaagtttgggcgccgccctctcactctcttcggtctgatcgcttgcacaatcctttggatggggatgggcattgcgggttgtttccctggaactgcgactgtctggtatgtggcctccccatagatcaaatcaggtccttcagaaaacgcggactcaactggctgatcctctaaaccaattaggtacacccagatgaccatactttttgtagtaacgcttaccggtctaactatctggcctgcctcatacgccttcggcgccgaggcgtcctctctgcaactccgagctaaaacgcagggtctgggctggctggtcaattgtctctcgaatggtatccttggcatcgtgctgccttacatttttaatgacgatgagggggcgctaggcgcgaagaccgggtttgtctacatggggttttgcatcctttccctggccgcggcatggaggattgttcctgagatgaaggataagaccgccatggaaattgatcaggtgtttacaggtgctcagcggaggatcgtgcatggcgacgaggaagaaattgcggttagggagagggaggagaaggcgtgggaatgtggatttggaagaccctatgttgcttagcatggtatgtggtacattactatctaataattttatgtcatgcttgttttacgacttgctattgacagtattgtcacggacatgcagttagagggtgagatatgaaggtatccagcaaaattgctgcagatatagagcttttgtatatacaggcagctgttaatgctaccggctgccattcgtgcttctatccataaaagatagcaatgagtagatggtagctaacttttgtttgatacatcgggtaaggccgagtcaggtagactaggcaattgcaggatatggtcgcatcccagcgatctccttccgtacaaagctgcggtagagccacttcgtcgttaacgaacgagtttaatggagcagtgacgtccgcaaattgtatctcgtcacacgaaatcacacggagggatgca

SEQ ID NO: 20039 - DNA, 1635 bp, Emericella nidulans
ccctctctgaaccccgcacagaaggacttcctcgtgaggacggtcaaggattgggcgacacaaaatggccttatggtcagacctgcacctacattcgtctcgaaagaatccgaccctcgcggcgtattggcgacaaatgcaccggtgactctgtttcctagcccgtttccgaggacgtgcttcgaagaggccaaggcgctgcagactctgtacaataagctctatgccgcgataacatgcaatgaagaatggattggcaaaattatggaagagtaagggttatcttctgagttcatcttgtttccttatttccttgcgtcctttgtatttttctggagacatgctctatcagaaccacagaacctagactaaacatggcctctgactgtagtcttattgacgttgatgacttcatctcgaacctctggaaagtgcatcttgccgtcaaggaagagggctacgctcaaacactttctctcggtctttttcgatctgactatatggcacacgctccgtcaacttcaacgattcccgagttaaaacaagtggagttcaacacaatttcttcatcttttggcggattgtcgtcactagtggcgtccttgcattctgaactcttagattctcccccgggcagccccatcgcttacccgtcacaccctttgctgaagccaaaagccatccctgaaaatactgcagtagagacgttgtccgcaggtttggcaacggctcacaccgcgtacgggcaatccaagtcgcaaccacagctgcctacatgtatcttgttcgtggtccaagaaaatgaacgaaatatattcgaccagttggctctttcgcgccaactcacgaaggtccacaagataccggtcttccgtttgctaagctccgagattctcgaccatacctacatccccagctccaatccctcacgtcctctgatctaccgcccgccatatgccgaagagatacactttgaagtaacaaccgtctacctccgttctttctacacaccaaccgactacaactccaaccgtgactgggaggcccgaactcaccttgagcgctccgcagcaatcaaatgcccaacagtcctcaaccaactctcgggctccaaaattgttcagcaggtccttgccacgcaaacgggacaggaccatctcgcaaccttccttgccgacactgacccagctctcatttcccgtctccgcgcaaccttcgctccgcaatacgacctctctgtttctggaaagggccgtgaactcgcactcagcccctcgacggcggcaaaccacgttctcaaaccccagcgtgaaggcggcggcaacaacatctataaaacagccatcccagatttcctcaattccatccctgagaacgagtggaagcgctggattcttatggagcttattcatcctccagcggccgcgaagaacattgctctccgtagcgacggcgaggttctcgctggtggagttattggggaactaggcgtttatggcactattttatgggatcagagtaataaaatgattcttcataatgagcagggcggatggttgatgcggactaaggctgaaggtgtgaatgagggtggtgttgcaacgggattttcgagtttagatagccttgttttgt

SEQ ID NO: 20040 - DNA, 1638 bp, Emericella nidulans
  unsure (1)..(1638): unsure at all n locations
tgacccactggcggtggagagtttccgcgatgcagcggaggagtgtatgctatacgttggatattgttaaggagccttattgacatactttgttagatcttctgcggcttgcctcatatgtgcgcacatctatgctttcaagcagacgcctccaacctatccctcacgacttcgaatatgctctgaaacgtcaccatttgcctgtcggctcccttatcccgcacctacagcctaccccaaaagtcgaacccacccctaccctactacctagccctccgccagaagaggatgacttcaagatcttaccttctctcgaaccagagttaagtggtgaggacgaccgcgccaggagcacatacatcccgaaacactttcccgagttcccgagcaaacatacctaccgtcacacaccagtctataccgagcgagaacgagatcctcgtaagatccgtgagcgagcagccgacgatggtcggcatggagaggaagcgttgcgaaagctcgctcgagcggcgttcaaagacaatcaggccggatctggtggtcgtgctaagaaacggtggggtgggaagacggagagcttcgagagcatgtttgacaagacggtcaaggggttaaccaaaaaggtgacgnataatgaagccgcaggccccacaggcagttcaaacgcgatggaaatcgattccggcatcaccccggtcactgaacgaaagcccgccgtatttaaaggcttaactagcattgaattaccacccatcataaattgcgaacggggcttttggcggcgaaccgcggcgccagggagacaaaggccggaggagaatccaagcgcaaagcataatccagaactgtcaagagttgagagttgggtaagcacataagagacgcgggcagttgtgggagcgagaagcatcgtagcggcgtcgggcgtttcgcatttgtccttttttatagcattattcgaagatacccatgtgaattatatttgtaattgccacgagaatcgctatcctgcactgtaccggcgtataatgcaaaatccaactaaactccgtaaatgcgacattgtattccgtgctcttgctgatatcaagcctttgatttattccgagcctcgctttctcgcgtcgtatctcgttccgcttgtcgcaaaggttcccacgaggtcgtctcaacggtcaacccatccgcacatctattacagagccaagtcagcttattcgcacgccattgcacatcaatccgtcaaccgcttactttctgaaaagccgcacaacttgattgcagacaacaacccccggcccaggaggttttggcggaggattgcacgagtattgtaccatttccataagcttgcatttctcaaggtccactgcgccgcccttgcgccgcttttcttgatggaagttcttggttacaatgttgacgtgttccgggagcttttccacgtcgaaaagggggacgaggggtgccattgatgccgttcgaagtttgtgaagttgatatacagtgtcagcgtggtacagagctgagtggtgtcttttgtagagaaaagcataggggaagttgatgaagtgggtgtccgggtgcggaatcaaaaccgtcggagttagatggactattacatccgccgatgct

SEQ ID NO: 20041 - DNA, 1638 bp, Emericella nidulans
gcctggggtcatccctgggtggtcctcccattagccgtgatcttatatattgtagtgctcggggtatatcgcctattctttcatcctttatcgcgctttccgggccctgtcctcgcagctttgactgtctggtacgagttctattacgacggaatccggcgaggcctgtatacttttgagattcagcgcatgcatgaaaagtacgggcccgttgtccggatcagtcccaacgaactccacgtcaacgagccttcctttattgatgagctgtacgcgggatcggggaagaggcgtgacaagtacccctactccacgtgccagttcggtattccggacagcgtttttgggaccccgggacatgacctccatcgcctgcgacgcggcgctctcagcagattcttctcgaaaacctcagtgacgaagctcgagcctataatcgagaatgccatcgggaaactctgcacgcagctcgagagctattctgggtcgcagcaacccgtgaagatggacatggcctttagttgcatgacgactgacgtagtgactgagtacgccttcgctaaaagctacaattttctggactcacccacgttcgaacccaacttccaccgccccattgttgccggggctgatctgggtccgtgggtcaagcagtttcccgttctgctaaaggtgatgaacgacctcccaaaatggatcctgacgagaatcaaccccgaggcggcagtctacatccagttccaagaagacctacggagacagatccgtgaggtgcaatcacaggtcgataagggagagtcgaatgggaagattccgaccatttttcacgaactcttgaccggggatctgccagaacaggagaaacggattgagcgcctctggcaggaaggtcaaattgttgtgggtgccggtacggagaccactgcatggacactctctgtcacgctgttctacctgctcgacaacccgcgcatcatgcgccaacttcaagaggagcttgagcggatcattcctgatgcggcacagtctgtgacttggcatcagttggagcaactcccgtatcttagtgccgtgatctgcgagggcctccgtctatcatacggagtgagcagtcgattgcaacgcatcaacccccttggacccctctggtgcggtctcgggatgcgaaaggcggccacacggaaaggcctgggtggagtatgagatccccaagggagcgcccgtcgggatgacttccaccctgatccataccaatcccgaactgttcccggatccgcatgagttcaagcccgagcgatggctcgatggtgcaggaaaacgccatcattcacttgacgggtacctgttgtctttttctcgcgggagtcgtcagtgcattggtatcaagtaagagcagcctgctccctccccagcagggagcctttgctaggcgtctacagtattgggcgatcttttgctgacagacccacagtcttgcttacgccgaactctacatgggactaggcttgttgattcgacgccttggccatcgcctagaactctttgaaaccaccagcgcagatgttgagatccactacgaacgctttctgccgacacctaaagacggaacacagggcatcagggttctggtccatccgg

SEQ ID NO: 20042 - DNA, 1641 bp, Emericella nidulans
tcccggcgcctagcgtacaacttcaaccagggctctcgcagtcgcgccgccctgaagtccatccagcccgtcaagcgtggctttgcttctcccgtcgctctcccgtccaccactcagtccaccaccctctccaacggtttcacggtacgacgacgcattggctcttgagattgtgtcctggctttgctaacgactatagatcgccactgaatactcgccgtgggcccagacatcgaccgtcggcgtctggatcgatgccggtagccgagcagagactgacaagaccaacggaaccgcgcacttcctggagcaccttgccttcaaggtgtgtttcctaaaaacccacaattaaatgatggctaacaggtcatagggcactagcaagcgctcgcagcatcagctggagctcgagattgagaacatgggtgctcacctcaacgcctacacatcggtacgctcggattgatggaacgatcgatggttttgcgtcattgcaaactaacaatgcttttagagggaaaatactgtctactacgccaagtctttcaacaacgatgtccccaaggccgtcgatatcctcgccgatattctgcagaactccaagctcgagtccgctgccattgagcgtgagagggacgtgatcctccgtgagcaggaggaggttgacaagcagctcgaggaagttgtcttcgaccaccttcacgctaccgcttaccagcaccagccccttggccgcaccatcctcggccccaaggagaacattcagaccatcacccgcgacaacctgaccgactacatcaagaccaactacactgctgaccgcatggtcctcgttggtgctggtggtatcccccacgagcagctcgtcaagctcgctgagcagcactttggctcgctcccaagcaagcccccaacctccgcccttgccgccctcaccgctgagcagaagcgccagcctgagttcattggatccgagatccgtatccgtgatgatactcttcccactgctcacatcgctcttgccgtcgagggtgtcagctggaaggacgacgactacttcactgcccttgttgcccaggccatcgtcggcaactgggaccgtgccatgggcaactctccctaccttggcagcaagctcagctccttcgttgagcgcaacaaccttgccaacagcttcatgagcttctccaccagctacagcgacactgggtaagcaccttgtcccgctttattggctctttcactaattttgcagtctctggggtatctacctcgtctccgagaacatgaccggtcttgacgaccttatccactttgccctccgcgagtggtctcgtctgtcctttaacgtcaccgcggccgaggttgagcgcgccaaggcccagctcaaggcttccatcctcctctccctcgacggtaccaccgccattgctgaagacattggtcgccagatcatcaccaccggacgccgtctctcccctgaggacatcgagcgcacgattggccagatcaccgagaaggacgtgatggactttgccaaccgcaagctgtgggatcaggatatcgccatgagcgccgtcggcagcatcgagggtatcctcgattataaccgtatccgatcggacatgagccgaaacgcct

SEQ ID NO: 20043 - DNA, 1642 bp, Emericella nidulans
ggccctccgcagccatacaggtacctttttccctcccacaccatatatctatacatgttgaccatgctggacagtccccaatatgcacccccgccataccccccgccaagttcctaccgatatccgccaccaaattaccctccagcttcagcaccctatgcacccagggaccctcgatactcaccttcaccctacggcacaccgccgcttccaccccgcccatcctcggaatctcagtctcactcgcctagcttacgctcgtacccaagtgcgccacctttgccaaacccccatccattcgtctaccctctttctaactctaccagcgtccccgccctccggggttcaaccgctcccaccccggcccccctcaggtttccaaccctttggccatggcgcgccatcaaactaccacttccagtactccagctgtaccggccggtggcgcgccctcttaattgggataaactactttggccagccgaaccaattgcagggatgtatcaacgacgtgacgaacgtctcgacattcctagcggagcggtatgggtatcggcgagaggacatggtgatcctcacagacgaccagcagaacccgaagagtttgccaacgaaagcaaatatccttcgcgcgatgcagtggcttgttaacggggccgttgcgaacgacagtctttttatccatttttctggtatgtttagccgccgcgttcagtcgtgtggaattcaatttaacggactcaggacatggtggtcggacacccgatcttgatggggatgaggatgatggttagtcgtactccgtattctctttactgtattgtcacgacatggctgtcagtggcaaagcggaccagactttgacatgggtgtctaggcttcgacgacgtgatctacccggtggactaccgggtggccgggcacatcgttgacgatgaaatgcacgatattatgttcgtccactctttttacgttcacaactaccatctactaatgccagcagggttcggccccttcagcctggagctctgacggcggtcttcgactcctgccactccggaacagccctcgacctcccctacgtctactccacccaggtctgtcttccattcctcctcgccaattcgcaagatagcatcactgacaagcgtacggcagggcatcctcaaagagccgaacctcgccaaagaagctgcatccgacctgttctccgcgatcacctcctacggccgcggtgacttgagcggcgtcgcgcaaaccgccattgggttcttcaagaaggccgcgataggtgactcggcgcggcgccggactgtgcgcacaaagacctcaccggccgatgtagtcatgttttcagggtcgaaggactcacagacatcgtacgtccgtccgtcatctatcaatattcagacggaagagacaacggtagcaaatgctgacattgtacagtgccgacacattccaggacggcgaagcacggggggccttaagctgggcatttatcaaggtgctgcagcggcatccgcacctgagctatgtgcaactgctgaatctgatccgagcggagctggaagggaagtatacgcagaagccgcaattgagttgcagtcatccgttaggtaagttcccatgctgggttccg

SEQ ID NO: 20044 - DNA, 1643 bp, Emericella nidulans
ccagccaacaggtatgccaatcgccaactaaggtttcttcatcgttacgcctgcttgccaggcctcttcatcaacaacgaattcgtccccgccgcgtccggcaagaccctgaccaccgtgaatccctatgacgagtctataatcgcaacagtttcctctgccggcccgaaagacgttgaccgtgccgtcgcggccgctcgccaggcgtttgcctcagaatggcgcggcctcaccccctctgaacgcgggctcctgctcctccgccttgcggacctgtgtgaccgcgacaaggagatcctcgccactatcgacgcatgggataacgggaagccgtacgagcaggcactgggcgaggacatagccgaggtcattgccgtcttccggtactatggcgggtgggccgacaagatccacggttcgacgatcgatacgggcgatgcgaagttcgcgtatacgcgacatgaacccctcggggtgtgcgggcaaatcatcccgtggaattatcctgttatggtatttctcctcttcgagatttctcctttctgaaacatgaaccgcttgatttccagtgctgattgtgtagatggccgcgtggaaattaggtcctgcgctcgcgtgcgggaacaccgttgtcctcaaggccgccgagcagacgcctctctcggtgctgtaccttgcgactctgataaaggaagctggcttcccggcaggcgtcgttaatctgctgaatggcgaaggggccagcgccggcgccgccatcgccggccatcctggtgtcgacaagatcgctttcactgggagcacaaacaccgggcgcgtcattatgaaggccgctgcgggcaatttgaaagcgatcactctagagacaggcggcaagagtccgcttctcgtatttgatgacgcaaatatagaccaggctgtcaaatggtcccatgttggtatcatgagtgagtgccttggaatctagccactaacaggaccgaaatagaagctgattgggagatatataggcaacatgggccaaatctgcacggccacttccaggatatacgtccaagagacgatctatgatacctttgtcgagaaattcaagcagtacacgatcgagaacagcaaggtcgggtcgcaattcgacccctccgttactcacggccctcagatctccaaggcgcagcgcgaccgcatcctgagctacgtgcagtcggccaaatccgaaggcgctcagctggtactcggtgacgagcctgtctctgaaaagggctactttgtcccacccacgatcttcaagaatactacgcgggagatgagtgccgtccgagaggagatatttggtccctttgtcgtcattcagtccttcagtacgcagcaggatgcgattaacaaggcgaatgacactgagtatgggcttggggcggcggtgttcacggaaaatatcacgcgggctcatcgcgttgcggccgcaatccaggcaggcatggtgtgggtaagtgtctggtccttgtctattcttaggatatgccgatcagagtggatgctaagttaagtagatcaacagttctcaagactcgcattttgctatcccctttggcgggtacaagcagagtgggattggtcgggagttgggtgaatacgctctggcagcg

SEQ ID NO: 20045 - DNA, 1643 bp, Emericella nidulans
gaattggagtactccttgcaggcattgttttacttgttttctatgctcgtggagtgcagtctgaccgaacgctacttacaggcccgttactttcccgcgtgggactaggatccatcctgggcgctttggttggcaccctaatggccattcttgggttgactgagataaaagtgcttgagttatcggctctactggctgccgtcgggagcatctgtggcgcttcggtcgcaatcttcggtagctcacagcgcttatcgctgcctttaccgaactcactttggggttggcttgccattctattcaccgtcagtcagtctattggcttcgcatccaattcttatacgatttgggaggatgagatcttactattctttctttctacgttcggagttgttgccggcgtctctgccatgcgccaacagtcaacaacggacagggttctcggggtctaccattcaatcgtgttcgtcatattaggaaggatagcatctctatctcgcctttgccgtgaggagcaaatgccattctgccgctcgacttactatgcctctagcacatcttcaacctccgctccgtggcagctgactattccattcctcgtgacgctcatcttgccaacagtcatcaaaggtttctatgccggatcgaagtcctatgaaggagcggccagtctgtggattggtattggtttccgtctaggactgtttgtcacctcaatcttctgggtcctggaggaaatcgacagcaaagaatggctacctctcagcgatgaaagtctgaagacagtcagggtattcttagcccagcttgtcctcggccttgcttttgctgctggcacaacggctttcacgtactcaaaaccgtgcgtgagcatcagcgtggcacaaacaaatacagagcccgaaccgaagcgtccctcgctcggcgaacaacaactcccaagaactacggtcacaatccttggcttcggcaacgttcatggcacccgcttcttcttcctcgcaatcaatttttgtctagccatcaccctcatgcagaagcccatgggccaaggcgccatgggcctcctcctctggcaaatcctttctcttcttgaaatccttgacacaaacgctctcgtcaccaacaactcctccatcggccctgtcgtcctcggcctcctcggctccttttactatttcaaaacaggccaccaggcaaccattagcagcattcagtgggaaacggcattcatccccctcacaaccgtcaagtatccctggtccccgctcctcgtcgtcctcaacacctttggcgcgcagattcttaccgctattgctgtccccttgaccgttttatggaaacggccccttcaactcaacgataagagcgcctcctccacctccgaaaagccagccctcagactcctctccgacgttgctcaggctgcggcgacatatatactttactttgcgacgatcaacctcgccacgacaatgtgggcgggtcatctccgccgccaccttatgctctaccgtgttttcagcccgcggtttatgtttggtgcaattgttctgggtgttgtagatgtcgtccttattctcttctccattgctggtgtgcggtggagtacactcagtgttggagaaatttttggttggtga

SEQ ID NO: 20046 - DNA, 1645 bp, Emericella nidulans
tgctttgctgcaaggacataaaccctaacaagcagaaatcaagattggtcggcggtagtaaagataagccgaataccagcaagggcaagccccggctcgtgctgaaaggccgcatctacatggcgaacgtcaccgatatcgtctggcttcaaaaaccaggtaagccgaagttcattagcagtgcgaaccacctcatggtaacaaggatttgctaggctcttatcgcattcagatcttctggaaaggggaccctggtgtggtggataactttattatccgctatcagaatgaagatacaatgcggaaatggtacaaggacatcaatacacaacgggagatacaagcggagcaacgcagtgctcgcaataccggcacatccgattccgaatttacctacatgaaatctttgagcaacatcccaaacccttaccagcaagaatatgatgttgaagagcagtccacgaaagaagcagctttcttctccgaatttcctatgagtcgcaatgcttcgagtacaagtctccgaacccgatctgcgacaggtggaagtggtagctctggtcctccactttccactagccgaccccgttacccagcaatgcctgactcgactttgtcagtacacacacagttccctggtggaagtatgtcgccaggagagagaaatggcaactcttacttctctcctaccgagtccgccaggtcgagctcacaatcggtggatacccttacaatcgccaggtaacccccgtcaccccatggggcgacgacaataacccatacacagcccctgccctctctcgcgccacatctagggacggttctaactcgggttattttaatggcgcaccaccgaatgggcgcagtgctcaacgcccgtccctgcctccaatgtcaggtagtaaccaatcatcgaacagcgcgtcccagaggatgcgtccgcgagcagcccggacattcaccatcacaatcctgaatcgcgtcggtacatgggtgttcacacaatgcaaacagttgacaatgtgcccgttccacctattcctgctcatatggccaacatgaaggcgcccgtcaatcggagccagaataactccccgactaatcaatctcttcccattcgaacgaatacttctcacgccttccatgagcctcagtactccgacgggcgagcggccgcgcctctttcagatcagccaacttctccattaagccacgaacccgaggaggagccgttcatgccgacccaattgaaggccaaagtcaactttgacgagaactatgtaacactggttatttccagcaatatcggattccgtacgcttaccgaccgggttgacgccaaactcgccagattcaccaaccgctcaattggcagcaagacggtccgtttacgttaccaagacgaggacggcgactttgtgacaatcgacagcgacgaggccgttcaactcgccttcgtggaatggaaagaacagcatcgtgaggagcttgcacgaggtcaagtcggcgagatccaacttttctgccaaccgatcgagaactagacgacgccgtttgcacccatctctaatcccctcctatctcagcttctcagcttccgctgagattgctcttccgaaattgtttcaatgggccgaaacggtgg

SEQ ID NO: 20047 - DNA, 1649 bp, Emericella nidulans
gggataccccctcgcacgttgaaatgatgtcagacatcaagtccgggtcaacaacgcagattgacctcgcgatggatccaatcctcgaacgcagagtcatccgcaaatgcgaccttcacgtcgtcccaattctaacacttttattcttattcgccttcctcgacagaatcaatatcgggaatgcgcgattgctcggcctggaagaagaactcggtatggaaggtcgccagtataacgttgctttgtttgtcttcttcattctgtatattcttcttgaggtgccgagtaatatggttctgaaaaagatcaagccaagctggtggctcagtggaatcatggcgggctggggtattgtcacaatttgccagggggtgacgcaaagctttggagggctcgtggcttgtcgagtgattattgggggccttgaggcagggtttatgcctggtttgtctctgccacctttctataccccatccgctttaggcaatagtgctgacttctggataggaagcgtatacctaatcaacatgtattatcgccgccacgagcttcagcggcggctgaacttcttcttcagtgctagtatcttcgctggcgctgttagcggcgtatgactcttctcctcccctttcctttacttcagcatcaagcaaagaaacactaataccgacgagcagttcctcgcctatgcaatcgccaacatggacggcaacggcggctacaaaggctggcgctggatcttcattctggaaggcctagcaactgtcgtcatagccataatcgcaaaattcatcatcgtcgactggccagagtcggcaacattcctgaacgaggaagaacgcgcttgccttctccgccgtctagcagaggaccagggcgaggcgcaaatgaaccggttcgacaagaaggccatgaagaggacgttttccgatccgaagatctaccttgggtacagactcccttaaacgtttctcctgtttcatgttttggacaggacacagtgattaatatgcgtgtagacccatcatgtatttcggcatcgttaacaccggctatgcggtctcgttcttcacacccacaatcctgcaacagctcggctggacctctattcgtgcccaagtaatgtccatccccatatacgtcgtcgcgatggtaatcacgctttcaactgcctggctcagcgaccgcctggcccatcgttatgccttcacactcgcgggagtgctcatcgccacaatgggctatgtcatgctcttgtgtcaaacctccatcccagttggggcacgctacttcgcgctcttcgccatcactggcggcggatatctaactcagccaatactgatgggctggttgagcaataacatggctggccattacaagcaatccattgcgtcggcgatgcaaattgggttcgggaactgtggcgggttagtggcgagtaacgttttctttgatagtgagaagcctgggttcagaacggggttcggggtgagcctgggaatgacatgggtctgtggcgtttcttgcgctgtatttctggcatgtcttgttagagagaatagggtgagaagtcaggggaagagggattggaggtttggtctggaggaggaagagaagaggaacttgggggatgattatcctacgttccg

SEQ ID NO: 20048 - DNA, 1651 bp, Emericella nidulans
tgcttttcatcgcactgggtctcctttataccaccatccaggtcgtctaccgtctctatctaagcccgctatcgagatttcctggcccgcgccttgccgccgcaacaggctggtacgaggcgtactttgagctcgtccacaagggtggcggacagttcctgtttgagattcgacggatgcacgaggtttatggttgagtacgcggaatcagatagcttgactcttgtactcaccagcacctcacaggccccatcgtccgcatcaatcctttcgaactgcacatcgccgacccggcctactacagcaccctctacacctccacactaaatcttgacaaagcaagtcacatccagcaccgcttcaacgcgccaaccgccgccttctcaacgcccgaacatgcgctccacagacgccgccgcgccgcaatatccccgttcttcgcgaagcgccgcatcgacgagcaggcgcccatgatccagtcacacgtgaacgtgatatgccatcgtctaagtgaggagtacgcaggcacgggcaaagtgctctgcgtcaacgagctatacggcagctacgtgacgggtgtgataatgacgtacgcgttcaaccggtgcccgcggttcctggaagaagaggacttcgtgtccgcgtttgggaagagcatccaggggctcaaggagtttgtgcactgggcgcagcagttcccttgcctgccgcggatcctgcagaacgtgtcgccggtgctcatgggcgcgctgttcccagctatgcaggcgagtctggtgtttcaggaggtaagctttacactctctccattcaaatattctgctgctggcggactgacaccgggaaggaaatgcgcatgcaagcacacgccgtcctttcaggccacggccaaaagggcaccatctttcacgacctgctcgcctcagacctcccccgctccgaactcaccctcccgcgactaaaagacgaggccatgagcatcgttggcgcaggtattgaaacgaccaagatggccagcgtcgttacgacattccacatcctgcagaacccgcgcatcctccaaaaactgcaggacgagctcgacagcgcgatccccgaccccaccgctccgccgtctctgagcgtgctggaaaacttgccttttctcgccgcttgtatcaaggaggggattcggctgggctacggcgcaacggggcggtctccccggatctcccgtacggaatcgctacgctatggcgcctggagcatccccgtgggcgtcatggtcagcatggatagctaccacatgcaccatgacgagagtgtgtttccggatagttacgcgtttgtaccggagcggtggctggacggggcaagggggccagatgggacggggagcctaaataagtatctggcctcgtttagtcgcggcacgcgcatgtgcgtgggcattaacctggcgtacgcggaaatcacaattgtgctggcgaggctgtttcgcgggttcgtgatggagctgtatcagactactaggaaagatgtggactgttatcgggatttggtggggatggaggttgtgagggggagtcggggggttagggttaaggttgtggggaggagagagtgagttctttggcttgttctgatatggctgcgttccactattgactat

SEQ ID NO: 20049 - DNA, 1654 bp, Emericella nidulans
caaatatcactgtgatgtgtgctctgtggacgtcacttcgactgtaagaagctcaaccccgctgtaaaagtgttctttgtttcgtcccaatctttgttcccctcctccgggcccgtcttcattgctgaccccgtcgtgcgttaggttcgcatatcatgcgctcacccatcttgccctgaatacgatctatgtgtgccatgttcgcggccggagagaaaacaaaaaaccatgacccatctacgcatccgtttcaggttatagaacagaattcggtgcccatcttccaagaagattggggtgccgacgaggagctcttgttgctggaaggtgccgagatctatggcttgggttcgtgggccgatatcgcagaccatattggtggatatcggacgaaggaggaggtgcgtgatcattatttgagcacatatattgatagcccaaacttcccattacctgagcgcgctgatccggaggatacgcgtctccaagactcgatttccaaggaggaattccaggctcggaagaaaaggcgcattgaagagcgcaaagaggcagctaaagctgcacctcctaccacaccaaagcagaagcctacagctagtgtacccgcttgtcatgaggtgcaaggttacatgccgggacgactggaattcgagacggaatttatgaacgatgctgaggaagctgtgcaacacatgacctttgagcctggtgcgggcgagacgcctaatggtgaaaccgacgccgagatggaattgaagatgactgttgtcgacatttataatacgcgccttacggcgcgaacagagcgcaagaaaatattgtttgagcataatctcctcgaataccggaaaaacacagctttagagaaaaagcgcacaaaggaggagcgagagttactgaacaaggcaaaaccattcgcacggatgatgaaccatgaagactttgaggaattcaacaagggcctagaatacgagcacaatctccgcctggctattgcacaacttcaagaatggcggcagatgggaattgctgatcttaagggcggcgagaaatatgagcaggagaaacaacaacgagctcagcggctcatgccacaaggatcattcgacagatttgcgagtacacggcccaagcagaatcagcaatctgagcagcctactgccgccaaccaactaacaaccccagagctcccattacggctccaaaaagccgctgacgcgtcttctaaggcgcaagaacctaatgtccccttgaacgatttcgatcgtatgtttgccgcgaacggtgacggaccggccactcagccccccaaaactaaatttgtcgttcagcccttgaacggggtgattccgtggaaactggagaatgaaggcgcgccggacctccatctgctaacaaaggaggaagtggagctctgcgatgcccttcatatccagccgaaaccctacttggtgatcaaggagacgctattgaaggaatcaatgaaagctggtgggagcttgaagaagaaagatgctcgggctctttgcaaggtatgttttttcttcacacatattccatagtaccggcatacaccactaacaacttgcccaatcagatcgacggcaataagtctagtcgaatattcgatttcatggtgcacagcggttgg

SEQ ID NO: 20050 - DNA, 1656 bp, Emericella nidulans
tcagtggcgggaactgcaaccgattagctttggtgctcttgctagcagtagctcaagacaaggccccggtgagtcgtcacaggcaggtgaaagcagcaatgggctcctctcgggaggggcacgtagcggcggcggcgagtacgagatgatgaacatgaagggagaaggcgcagtatagcctttccagcttttatttttatgtcttattcttatgttgttgctcggcagctgttacggtacggggctaccgatcacttcgtttctcactgtatatttagtgtatgtataccctagctggcatgataatctagagcaggcgttttgggttcgaatgtcatattgtttattggatagaacacgcccagctccggttcattaactgcagtatgaatgatgtatcctacctaacaaacccaatggcttctccctgctcaaaggctgtgacgagccatatctaaaccaatagatttcgcataatcgaacgccttcaaacaacatgcgccttccgacaacaagctgcaccaccgcatatctccaactcaactccaacagatgaagtggggtggagataagactgcaaagttaaaaggatgattgcccctgccgtttaggctcccatctaattaaacatcctttgtatctcatttatccataccttatatctgtcatcccattctcagttgccggcctactgacaagcgaatctcaatgtccaccaccaccgcgacactgacaaacccctcccccgcacaggtggcagtagcacccaatcccgagctctcgaacgagaacagtacaatcaagaacattcccccagctgccacagacaaagtcttccaagccaccgcgcgcggcaaccgcgccggaaccctcaagccacgcggcatcccgaccttcagcgatccctatgccgagcgccaatggataaaggagcacatggccgcggcattccgcgtcttcgggaagcagggattcaacgaggggatcagtgggcatatttctgttcgcggtaaagtccctgcatttcctcctatttttatcttcgagaaccatgttttttgctaagacgttgtgcagaccctgtgctcaaagaccacttctggatcaacccattcgggaaacacttctctgccatgaaagcgtcagaccttgtcctcgttgatgcggaagggtacgtgactgagggaggagcgcagcaagctatcaatgaagccgggttcatgatccactcggagattcataaggctcgtccggatgttatggctgcggcacatacgcacgggatttatgggaagacgtggagtatctttggcaagcccattgagatgcttacacagggtatcactcgtccgaccctttgggggttttgccagggttatgcttacaagataatacagatgcatgcaacttctacggcaaacttgctgtgtatgaagaccacggtggcgtcgccctagcccaggacgaaggacgggccattgccaaagcgttgggcaaggagaatattgcttgtatcctgcagaaccatgggtgagccaccttgccctctgcgctacataatggttacctaatatgtctccagcctcctaacagtaggctcgaccgtggacgaagccgcctggctcttcgtcagtctcgattctgcctgccacgcgc

SEQ ID NO: 20051 - DNA, 1656 bp, Emericella nidulans
tgccattgcttgctgccgactgaatacgacctaccgctggtgcatgagcggaacaccaatgatgaacaatgtcgaagaattgcattctttattgaaatttttgcgaatccgtccttacgctaacctggatcgtttcaagagagtgagtggtttagttttcccggaatttccgctacgtatcgcagactaattgaggccaattaggacttctctgcaccgttgaaaaccaacaacaagcacctccaagagaaggcgatgacgcagcttcgcattctcctcaaagcagttctactacggcgcactaaacattcaaagatagatggcaagcccattttcgacattccccctcgattctcggaaaaggtccatgccgtttttagtgaagatgaactggaattatacaaagcactggaagcgaaaactcaacttcaatttaacagatatctcgaggccggaacagtggggcgaaattattccaacatccttgtccttcttcttcgtcttcgacaagcctgctgtcatccgcacttgattactgattttagtgtcaagctcaacgaggcttctgaaggagtcgatttcatcgccaacgcagagcaatttagcaacgaggttgttgctcgcttacgggataatgagaatcttgagtgcccggtctgtattgatgcagtggacaatccaatcatttttttcccctgtggacatgggacatgcagtgaatgtttctctagaatttccgatccgtcgctttccttgcagcaaggcattgatggagctgcgcaagtgaagtgcccaaattgtcgtggagttgtcgaccccaagaaaataaccgatcatgtatcttttcggaaagttcattttcctgatgagtctgaggattcagctggtctggggggcttggggattgcgattaaggaagacggggaccgtgacgataccgatgacagcgacgagggcgcaactttgtccgattttatttcgaatgacagcgactgtgacttaacgcctcccaagagaccgaaagtaagaagcaagggcaaaggcaaaggcaagcccagaaagactcttgccgagctgaagaaagaagcctcgaaaaaccaggaatcgaaacgcaagtacttgcgtcgcctggaaaagacttggattactagcgcgaagattgagaaaaccatggagattatacgcgatattgagcgccgggacaacaatgaaaagatcatcatctttagccagtttacttctctactggatctgctcgagattccaattgcgcgtgaaggtcaccggtatcgtaggtatgatgggagcatgaagccagcggatcggaactcggccgtgctagactttactgatgaccccagctgcaaagtcatgctggtgtctttgaaggcaggcaactccggtctgaatctagtcgccgcaaaccatgtgattatttttgacccgttttggaacccttacgtcgaggagcaggcggttgaccgtgctcatcgcattgggcagttgcgagaagtccatgtccatcgaatccttgtaccagaaactgtcgaagaccgtatcatcgagctccaggataaaaagcgcgctatcattgatggtgcattggacgagaaggaatcgaagaacattgctaggttgagcacccgtgagcttggc

SEQ ID NO: 20052 - DNA, 1658 bp, Emericella nidulans
atctgcagaaattgtgactttacgtggtgttaatattgttccaggtatatcggcgttctgaatgtgacattctcgaagaagcgctccaagaaatcttcggaggctcagcttgaacaatcagacgttgatgctacagatgatccgcaaaataaaaatactgtcgcaaccaccggacacagtttgcacgaagctgcgaattctgtggagaaagagcgcatttttagccagaaacaagtcactggtatagtacctaaggtgatactcgaaaataaccgccatattattcctgttgatctgttctctcataaaagacctcgcacagcgactgctgcgctgtctgacatgcgcccatcctccaacggggccgggcgcaccactaaccagcgaaaccatgaacatggttcgttggatgaaaaactctcccactcgccagcgaaaaagacttggggtgctaccactgtcaatcggaaactacaagaacaggttctcagagaggtattcagcccacctgccatccaccaccataggcgccatgcccgaggactcctcaaccctacgagaacgacatctgatggccatcgtcggagcgccaacctttccgaatgtcttatcacccgtcaacctcgcattatggaacagatggaaccaccccgatctcctgccattgacattgtaaagaaaggcagcgacggtcctggcctctcgtcgtccgcttccacggctcttgagggtggtcagcagcaccttgaatcggtaaggtcggaggaggccgtcccacgttctagctcggtgtcgcgaactcgaagagtacgacgtcggcactccggcagtggcctgcagaggcggggaacaatggattcggacaagggcggcggcgaattaatctttttcgaggatgagggatacggtggtgacaaggaggatgaaatattctcaatggaaagtgacgcgcctacgtcttctaccacacctggcgaagcaaggctctctagctccagcccgtctaaagggagtgacctgattcctcaagataggtggacttctggtggtcctgtcgtcgaatcttcgaagagccccgcttttccaggtttcaacgacaatatattatcgcagcctccagccaatccaaaggaagcgcaaacaaggaaagatgacagggtgcagttcttccttctgctagaagatttgactgccgggatgaacaagccttgcgtcttggacctcaaaatgggcactcgtcaatacggtgtggaagcggacgacaaaaagcggaagtcgcagagacgcaagtgtcagaacacgacctctcagcaacttggtgttcggctatgtggcatgcagacctggaatgtgaagaagcaggaatacatatttgaggacaagtactttggtagggacttgaagtcgggtcgtgagttccaggatgccttaacacgatttctctacgacggcgttagttacttaagcgttgctaagaagatccctattatcctcgacaaactggcgaagctggagaacatgatccggaaacttaagcggtaccgcctttatgccagtagcttgttgatcctttacgacggcgaacagaatccccaacacaaagcctctcaacatgaagcggcttcaaacgacaatgcgagaaatcatctgcaacgccg

SEQ ID NO: 20053 - DNA, 1660 bp, Emericella nidulans
gaacaagcgagacgagcgagccaggctcgtagctgtgcccaagctcgtacccaaagtcgccctccaagtcgtggtagaagtcgtcctcggtcacgtccgcgcgaggcttcgttgggaaggacccaggatcaagctacgggcaagaaaggcaagaaatggaagaaaacgcaagaccatgaacaacaccaaaagcaggaagaggcgcggtcccgaaggagttcgaggaagcctaatccctcacgggccgggtctctacggactacgcaaggggaatggggagcatcaggtgctatgcctacgagtggaggacaatttggacaatctgagaatcagcagggacaggatccttggcctgcttctgcggatagccggggagatggccagtggggtgatcagactcagaatgatacttggggtcaggcaggaaataagacgcagggtgcgccgggcaatgggcaggatgggaatactgttttgaacggagatacatggggtgatagcaacaataatgagcagggcagtggaggaggccgctggagtcctcacagaaaccagaataagaataatgggtcccgagacaattggaacagtggcagcaacaacaacaacaacaacaatgacgatagtagcggcggacagcagcagaatgttcggaagtggaagagtcacgatgatacagcgaatgtccaagactctgctcaaaaggatgatgagatacactggtgataaatcggcgagatattagtgcacctggtaagattggagcctcaggaataataataatttgaaactgggaatgacgtttgtggatctttccccgcgagtgcgggcggtgaggctccaggagtgccaggaccagcggcaggtgacgatgccgctcccaatttcaggtcgagcttcaagcaaatcttcccccgcttcttcattctgtcaactagctggcaattttcatcgtgccttgcacacacacataatacaagactctttatattgctcaagttgatctcggattacccgcgtatgcgaacttccgaccagcgctccggatcctgatcgaggctgcctgaccagcctccacccaactatgtggaacgacgaagataacaacccatacggcgcattcgacagcgaggcgcggctgtcagagtccctgcactcaactaccatcgaatctcgtaaggatttggctttgcgaaacaatgcaacctattaacgtccttagctttcaatcacgattacccccctccaccatccagccactcatccaaccccgacatttccgacttctcacagcacccagaagcaagcgatgacgatgaaggagactatgtcggccaggcaaaccgcgctgggtactcccacaagagtgtatacgatagccggatcgagcagctgctttacgagaacccggacatgccgattctcatcaccgacgccgggaagaaccacgagggcggcgggagctttattgtgtacacaatacgcactggggtatgttctatagccggtggtcttacttttggctaaagtaagcaggatctagaggttcggcgacgctactctgaattcgcttcgttgcggcagacgctcgtgagcctccatccaactctcattgttccgcccattccggagaaacactcgatggccgattatgccgcga

SEQ ID NO: 20054 - DNA, 1661 bp, Emericella nidulans
tccgcgcgtcgatatcctcatccttaacgcggggatccacagcttcgtctatgagaagacctcggacggccatgagaaagccttgcaagtaaactatctatccaatgttctcctcctcgccgagctactgccattccttgaatccacagccgagcaaaccggctcggccgtgcgcataacctggctcggcagccgcacatactatctcagcaacagcctcgagaagtccgatatcctcacatacggcggcgggatcctgcaatacatggattcagagaaggcgtctgccagcgctgggatgaaccagtactctgatcgaaaacttctctgcgcgctgtttgtctatgagcttgcgtcccgactgaacagggacaaggttactctcaacctggtttgccctggcatggttaagacggacctaggcagtaatgggccattgtggattcggacgctgattgaaattgtcaagatactccgggctaggccggtcgaagttggcggatggcttgtgctcaatgcggcggttgttgccgggaaggagagccatgggagcttgattggggataaggaagttaccgagtaagttctttccatcgttccctagacataggcaggtagtgagatggcaggtgacttaacgttataacacaggcctaccaagtttatcaagtcgagcgctgggcaggagctgcagaagcggctctggaaggagacagttgaggagatggccacgctgacggaactgctttcagcttttgtctaatatctaccaagctatcacctaaatattgtcatctcatcccggtagtctccctaattgcatgtacttcccgcccactccaatcaaacatctcatttaggaattccgtatccaattcaaagcaaccgttgccgtcctctctggtcgtgcgtctaccattctcgctttgcactctcacacctccaggcttattttgtgactgtcgttgttcaaggccctcatactcaaccttcagctggttctgtccgttcatcatctgtatgccatgcctttgccgctgcaactcccagtgcgcaaagacatctctcaaacagttcctactcaatccagaatatgcaccggtagagccaggccaatggcacaagtatgataccaacagagaagcacaccgaatcggttccacacagcgcacgaagaaccagaggtgtggcgcaaatgcggaagacgatacgatagataagtagattcggaggtatcggatgcagaggcgaattatactagtactttctcagacacttctagcaaaaaaaggaaaagaaaagaaaagaaaagggggagcggaggggcagaattcacgtaccgattccacaactggtcttgaccttgatcgatgccgatattcggatctgaggaaggtgttggccgtaacggggatcgtaagaaaggactgtggatctggattgccatgtgcaggtgaatcaacgtcgccaacctctgagcccaggaatctacctcgctgttcgtggtagtccctgcggcggactccatcgcgtctctcgttatccttgcatctgaaacaaaccctcgatatatctcctctgaaatcaaccctgtacttgcgcttgcgttatgaacagtgtcgataagccgatgttgaatacgagcaatttcactgcgagcc

SEQ ID NO: 20055 - DNA, 1661 bp, Emericella nidulans
cgatcgccagttgcggctttgggctgccagcggacagcaagctttagaggagtcgcgggtgctcttggtcaattcggacggaccgtggggcaacagaagcacgggggtgtccggcgtagtgggtgtcgaaacgctcaagaatcttgtcctcccaggcgttggaggcttcacgatcgttgaccctgctgtggtaactgagccagacctcggggtaaacttcttccttgagaatgaaagcctgggcaggtcaagagctgaagagacgtgtcgactactgaaagagctgaatcctgatgtagaagggagctttcgaaccaaggtatatctgccatgtagggacatgtccgcaagccaaactcctcatgctaacccgtttactatcagcctattgcggagatacttcaagaagagcccgggattctggcacaacataaactcattctaatatctggccctatagagcattcatcactgcgggccctctgcgatggtgccaaaaagctagcaatcccggtcctctacacgcggtctgttggattctactccacgttctctctccagcttcctgctgtgtttcctatagtagaaacgcatccagacccggagtcaacccaggaccttcgtcttctcaatccctggccggaattgactgcggctggtgctagtatcaggaacttggacagttttgatgatcatcaacatggccacgttccatacgtattattacttcttcattatttggaaaaatggaaggaaactcataacggcagcgtaccctcaaactataaggagaagacggcatttagggacttcgtgcggtcttgcgcaaggacaaataattcacaaggcggggaagaaaattatgatgaagccgttgcagctgtgctaaaatcgcttaacccattcagtttgcggagttctacccgggagatttttgagatggaagaatgcagacaattaagcgccgcttcggccgatttctgggtcattgcatcagctgttcgcgaattctacgaaacacaccaacttctccctcttcctgggtcacttcctgacatgaaagcccagtcagccgactatgtctcattgcaaaatatctataaaacgaaagcaagggaagatatcgcagaagtcacggatattatcagaaggttagagtctcagttgggccgagccgccagagttgatgataaggatatcgaaatattttgcaaaaacgcctcccacatccaggtgattcgtgggcgtgatattccacaagtggatggtggtgaagacaccaaaaagcgtctacgactcgagcttaataacgacgaatctctaattcccgtttacctggcttttgaagtcctggatactgtcgtaaccgggattcaggagggaaagtatcaccaagacgccctggacgatgatgggatctggtcttccgaaattggtcgcattctcgctgttattgcagcggacgctgccgttgacgaggcccgaaatcgtgtccttgacgccgcacaggagctgcggaggacaaagggtggcgagctgcacaacatatcctcccttactggcggtttagtggcacaggaagctctcaaggtgctcactaggcaatatgtacctttggataatacgtgcatcttcgacggcgttcgcagcagcagcgccat

SEQ ID NO: 20056 - DNA, 1661 bp, Emericella nidulans
tgccccgagttcgcgttagttcaagccaaaattgccatgagaaggaaggtcggctcctactggctgtacaggctataaaaaaaaaggagattacatcaatatgcgaggcagcacgtcgcttcaatgtgcctgaatctacactacgtacgcgactacgcgggactacaaatcgcgccgaatctcgcgcaaatggccataaattgactgagattaaagaggaagtgcttaagcagtggattctttctttagatctacgcggagcagctcctacaaaagcttatgtacaagaaatggctaatattctgcttgcaaagcatggttccaccccaatccagactgtcggccagaaatgggtatataattatactcaacgccacccggagcttgagtcttgcttgtcaaggcaatacgactgccagcgagcaaagcaagagaacccaaaggttattcaagcatggtttaaaaccgtacgagccacaatcgaacaatacgggatcctactggatgatatctacaactttgatgagactggctttgcaatgggcctttgtgcacatcagaaagtgattaccaagtcagaatcatgtggccgaagaccagttctacagccaggaaaccgtgaataggttactgcaattgagtcaatcagtgcttctggataggcacttctaccaatacttatctttaagggtaagcagtataaccaagcatggtttactggccttccacctgactggcgatttgaaattagtacaaatagatggacaactaataaaattagcctttgctggctttagaagcaatttatcccgtcaacagagcattatacgcgcggaagatatcaacttctagttcttgatggccatggaagccatcttacaccagagtttgatcaaatctgtacagatcataatattatactactttgcatgccggcatattcctcccatcttctacaactacttgatattggatgttttgcagttttgaagcgctcgtacgccagcttggttgatcagaaaatacggcttggcatcagccatattgacaaacttgatttccttgcagcctatctacaagctcgaatcagtacatttaagctagatataatcagaaacagttttcgagcagcaggactagtgccattgaatcctgaactagtactttcaaagcttagtattcaggcttgtatgcctacaccccctggaagccgtggcagccaggcaagcactttttgcccacatacaccagcaaatgttgatgagcttctaaagcaagcttctttactcagagattttctcaaacagcgcttaaaaagtccactatcaccatcccataatgccctaaaccagctaattaaaggctgtcaaattgcaatgcaaaagggcatactattggagcaagagaatagggcactacgtgctgaaaatgctatacaaaggggaaagcgagctcgtacgcatagatggatagctcatgataatggtctttctgtacaagaggctacagagctcgaggaagctcataatgcgtcttttcaggcaatacctggtccatgcgggccaccagcagaaggtgcacaaacaccaaaggcacgggcattacctacatgtagtacctgccatagaattgggcatagaagaaatgcttgtccaaataaa

SEQ ID NO: 20057 - DNA, 1661 bp, Emericella nidulans
tgccccgagttcgcgttagttcaagccaaaattgccatgagaaggaaggtcggctcctactggctgtacaggctattaaaaaaaaggagattacatcaatacgcgaggcagcacgtcgcttcaatgtgcctgaatctacactacgtacgcgactacgcgggactacaaatcgcgccgaatctcgcgcaaatggccataaattgactgagattgaagaggaagtgcttaagcagtggattctctctttagatctacgcggagcagctcctacaaaagctcatgtacgagaaatggctaatattctgcttgcaaagcgtggttccaccccaatccagactgtcggccagaaatgggtatataattatactcaacgccacccggagcttgagtctcgcttgtcaaggcaatacgactgccagcgagcaaagcaagagaacccaaaggttattcaagcatggtttaacaccgtacgagccacaatcgaacaatacgggatcctaccggacgatatctacaactttgatgagactggctttgcaatgggcctttgtgcacatcagaaagtgattaccaagtcagaatcatgtggccgaagaccagttctacagccaggaaaccgtgaatgggttactgcaattgagtcaatcagtgcttctggatgggcacttccaccaacacttatctttaagggcaagcagtataaccaagcatggtttacaggccttccgcccgactggcgatttgaaattagtacaaatggatggacaactaatgaaattagccttcgctggcttcagaagcaatttatcccgtcaacagagcatcgtacgcgcggaagatatcaacttctagttcttgatggccatggaagccatcttacaccagagtttgatcaaatctgtacagatcataatattataccactctgcatgccggcacattcctcccatcttctacaaccacttgatattggatgttttgcagttttgaagcgctcgtacgccagcttggttgatcagaaaatgcggcttggcatcagccatattgacaaacttgatttccttgcagcctatccacaagctcgaatcagcacatttaagctggatacaatcagaaacagttttcgagcagcaggactagtgccattgaatcctgaaccagtgctttcaaagcttagtattcaggctcgtacgcctacaccccctggaagccgtggcagccaggcaagcactttttgcccacatacaccagcaaatgttgatgagcttctaaagcaagcttctttactcagagattttctcaaacagcgctcaaaaagtccaccatcaccgtcccataatgccctaaaccagctaattaaaggctgtcaaattgcaatgcaaaagggcatactattggagcaagagaatagggcgctacgtgctgaaaatgctatacaaaggcaaaagcgagctcgtacgcatagatagatagctcatgataatggtctgtctgtacaagaggctacagagctcgaggaagctcataatgcgtcttttcaggcaatacctggtccatgcgggccaccagcagaaggtgcacaaacaccaaaggcacgggcattacctacatgtagtacctgccatagaattgggcatagaagaaatgcttgtccaaataaa

SEQ ID NO: 20058 - DNA, 1661 bp, Emericella nidulans
tggtttcttggtttgggcattggtatgtgcgagaagatacagaaacgatcagatactgatcccggcagcctactaatctcatgctgcaacggtttccaattggtacgtgggtttgatatgtttgctaccttgttccacagacctaattctgcccaggaaagtatctcggcatcaatatcttcatgtggtaagagccccattcacctatcagctcggacacccagctaagaatcaggggcgtttttctcatcatccaagcggcatgccataacttcaccactctcgccgtcctccgagccctaggtggtgctgccgaagcctgcgcagaccctgcattcatgctaatcacgagcatgtggtacacacggcgcgaacagccagtgcgtatggggctttggtatacagccaacgcgtttggcattgctctcggcggcctgttgggttacgggattggtaatattaagggtgcgcttccgtcatggaagtacgagttcatcgtgatgtacgtcttcttcctgaagtaggcataccttgtgctgataagggtagtggcgctctttgctcagcctggggcattgtcatgttcattttccttcccgactccccggtcaatgcgccaggcttgacacaacgagaacgtcggattgccgttgaacgactacgggaaaaccaaaccggtatcgagaacaagcacctaaagccacagcaggtccttgaggcattcaccgactacaagatgtacttcttcttcgtgctgggctgtgtctgtacgtcgctatggtcccaccgattaatcgcgtacagattgatagagattgacatccgcattcaggcaacatccccaacggcggtatctccaacttcgggacaatcattatcaaaggcttcggattctcgactctcgttacgactctgatgcaggtacgtttgtctgacatactcattcacaaccccatcaaaccatccaaacggactgacatgtgaagattccctacggcgtcctaatcgcactctcaatcctagcgtgcgtctacctgaacgaccgctttgaaaatcgccgatgcgtattcattttgctattcctgatccccaatctagcgggagcattcgggctgcgcttcgttcccgagagcgaacaaatcggccggctgatctgctattatctcacagggccgtataatgcggcttttgtgttgattcttagtatgcagaccgctaacactgccggtatgtctggtcgacgccctcatctcagctctgctgggtgtaatttgagatatgaaggatgctaatcgctactggatgatgtgggttaacaggacatacaaagaaagttgtcacaaacgcagtccttttcctgggttactgcactgggaatattgcggggccgttcttttacaaagagagtcaaaagtagatgccctttgcttaccttcttcccttcactcctctatcaacaagatctgatgatctcatttgataactagaccgacctactcactcggcatatggtccatgatcgtttcgcatctcatcgaagctgtcctaatcagtacactgggcttgctcctccgctgggagaacaagaagcgcgatcggattcagagccagatggaggtcggcttggagggacgggaccttggagccacagcgttcttgga

SEQ ID NO: 20059 - DNA, 1662 bp, Emericella nidulans
tcaccctctccctttagttagagcatcccatcattccaacttaatcctctctcctcgattccattatctcccacttcctttccctcagacttcctcttcttgctccctttcctttctacccacgcccaccccccctccccctcttctattctctccagtggccctccggaacggcgcgtcttctgcttgattcagaagttccgtgtcttcctaggatctggtcaccatttcctttcgtttctcctcttcctctgcctcgttatctctctagacttgcccgttgtcatcttcagctctgaacttttctttttctttcctccttgtttctttacacatggctcgaccgctctagacagcatctgccgctcctgacccttgtgttccttacatcgtacctcatcgctggctcctccctcttcggtcctcgttcgatccaagcgttccaatactttcttcttttcattcgacaacattcgcttccctgcatttgtctgagcgactttcttaatcgtttgtaccagtataattgagctgcggacatttattagaccaggtacgactattcccgctgccccgttgcttggtaccgatccatctgtcctccaaattgtgattcagctggataaacttcgtcgatgaggccctcgcccaatcttcgaactcggttgcgtggttgtacaatgctaactgacgaatacgtggtacagattctcccccctgttcccccctaccctttccctcgctcgagtgcctcccgaacactatacactgcttggacgatagcaccgaagggttcaattcgcctcatttcctgggttaggatctcttcggaagacgctgctaagaacgcgtctgacttcgacagctctgcaattcgtggaggagaacaacatggcagctttggtacagacgattcctcagcaaagcagcgcggttccggtgctccaaacacgcccctcttcctcgtcgggtgctttcacaacttctcagtccttacaacaaacggactctcgaaatcccgccatgtcctggaatacctacaacacgacgggcaattcggggggctatcggcccggtcatcaggttgtggccccctacgcctttaccagcactcccaacctctctaattcacccaacttgcagaaccgtcagtcatggtctcctagtttgaggcccgagcatcggacgtcctctgctccctctgctccccaactccccgcgaatgcctccctcgtcggaaacaattcccgtcccgttcatcacactgcagctggttctgtatctacttcatcttctaactcctccgtccaatcacacatgtccaaagacgatacggcgattccttctcgccagcttcgcggtgatccttctattcgtcccttatctaccgccaatttgccttctccaacaccttccttcatgaacatatcctcgcctacagtatctcgtccttcacccgaccgataccgtcgtgggaaccgtcgttcggatgcctctgcaggtgcacgctcatctccaccaattctggatgaaaatccccagaacacgacatccgctggtttatcaggagtaagaagtctgataccggagggtaaaggtcatacccgggctaccagcgcagatgataatactcgatcggataagccgcaaccagagttggca

SEQ ID NO: 20060 - DNA, 1662 bp, Emericella nidulans
gaaaatctaccgatcacctttccccaaccttgagatcgagtcggtcgacctggtctccaaggtcttctcgaacccgttcgatactcccctttcccgtcccatgtatatcgatgccctcagcggagaacagtacacgtacggggatgtcatccaacgcacgcggtccctggcgaacgggctgcaacagctattcggtctcagggaacacgatgtcgtcgctctgttcagccctaatacgatcgactatcccattgcctgccacgctatcatcgggtccctggccgttgtggcccctactagcgcggcacttacggctcaggaactacacgctcagctgaagaccagtcgggcacgattcatcatcgcccactcgtcgcttctttctactgcaagagcagcagcaaagggcacctcgattgagaaagtcatcgtcctcgacggccaatcatctgcacccggccacctcacctgccagcaattagcgagcacctatgcccccaccgcactccgccaaatccctgctcacgaagccgggtcgcgaatcgcattcatctgcttctcctcgggcacatccgggccagcgaaaggcgtgatcaccacccaccgaaatattacatcgaaccttcaacaatggcgcgcccaactcctcgactcaggctccgcagctcagcgggtcgaccgcaccgccgcgattgccttcctccccttcagtcacatttatgggctgaatttatacatgtgccagtgtctaacgtggggcacgcctgtggtgatcctcccgcgtttcgatcttgacacgtacctctcgtgcgttgagaaatacaagccgcaggagctggcgctcgtgcctccaatcgcactcatgctggtcaaggatgatcgaatccgcaattacaatctgcgcagcgtacggcggattctctccgccgccgcaccgctgacaatcgagctctcgtcggcgcttgagacccgatttaaggatatctttggaacggaggtcttctgcacgcagtcgtggggacttaccgagacctcgccaatcgcaactggaatcccgaatgatcgaatggacaagagaggtgccggcgtaggttgtattgtgccaaatatggagtttcgtttcgttgatccggagacgatgctcgacgcggacgtgggcaaggatggagccagccaacccggcgagatctggtgtcgtggaccgaatgttacaccgggatactataataacttggaggcaacgaggggtgcgttccacgtggatgacgatggagtttcgtggtttcgtacgggcgatattggcgttattgacgctgagggatatattaccatacaggatcggatcaaggagatgatcaagtacaagggcttacaggtcatcccgagcgagctggagggtaagcttgttgatcatccggatgtggtagacgtcgctgttattggagtctgggtggacgcaagggcgacagagttgccgactgcgtttgttacgctgcggcagggtattgacgatgaggggagtaggaaaggtcattgaagatattcatctctggttcaacgctagggttgcgaaccataagcggttgcgaggaggcatatatgtggtagagaatatcccaaagagtccgagcgggaaaattctgaggcgggtgttgaagcagc

SEQ ID NO: 20061 - DNA, 1664 bp, Emericella nidulans
ccactcttcccccactctaccatatttaccgaagcctcaactctacctccaacaacaacaccaactatgcccataacaataccaccggcagaggccccggctatagccccggtcccatctccgatcctagttctggtcaaagagaatatcgctcaatggcatacttcgtaaactgggtacgtccccggctatcatttctccttccccagtaccgccttctaacgctattccaccataaataggcaatctacgcccgtcaccacaatccacaagacctcccagtctcccacctaacacacatcctgtacgccttcgccaacgtgcgccccgaaactggggaagtctatctcagcgacacgtactcagacatagagaagcactatcctaccgattcatggaatgaccagggaaacgacaacgtctacggctgcgtgaagcagctctttttgcttaagcagcagaatcggcacctcaaggtcctcctcagtgttggcggttggacatactcgaagaatttcgcgcggatggcagctacagaagaggggaggagattgtttgcgaaatctgcggtagagctgatgggggatctgggtatggatggggttgatgttgattgggaggtgagctttgcttgcctaagacatgaagttgggcagaatgagggctgatatgaccggatgcctgcagtatccagaaaatgacgatcaggctagtgactttgttgagttgctgcgcgagacaagagaagtatgcctaccaataatctcttctacgtatcagtcctaagtaggcaatgctcacaagctgaacccaggaactcgaccgatatgctgccgacaacgacagcgacaagcccttcctcctgagtgttgcgtcgccagcaggtgcgtcattcttccctcctatttctcagtaaccctaagttccataccctaatctccccttacaaaacgaccaactgacagagccaggcccaagcaaatacaccaccctgcacctctcctccatggaccgttatcttgacttctggaatctaatggcctatgactacagcggtagctgggatacaatcacaggacacaatgcgaatctcttcgcgtcaagacaaaaccccgcctcgacacccttcaacacccacaccggggtaaccgcttacctagccgctggaatccctgcgtcaaaaatcaatttgggtatgcctctctacggccggtctttcacacacaccgacgggccggggacggagttcgagggtgtggggtatgaggggagctttgaggcgggcgtgtgggattataaggcgttgccaaaacccggggcggaggttgtggaggttgaggagattgccgcgagtttcagctacgacgaagacaagaaggaagttattagttatgataatgtgggtgttgtacggcacaagggggtgtatcttatgcgtttgggtatgggaggtgggatgtggtgggagtccagtggggatcgggaggtggggagtggggggagtttgattgagacggtaagtttgcccttctatcgtcttctctacttggccttggtacacatggtttggaagacaaagggtggatgctaatatgacggttgggtgcagttggtcgacactctcggtggggtgaatgccctcgacaagtccgagaaccagctgg

SEQ ID NO: 20062 - DNA, 1665 bp, Emericella nidulans
ggctttgaaatcccaggtatgcttcccagaattcctacacttctagcattacacaaacgaactgacaatcttcaagggcacattgtcaaccggtaaccgcactgaccaacaacatgaagaagtttcaccccctgctccggcaacaaatggtattgataagggacacatcgatacgctagacccagaagatcctctctggcaaatatacaaggacatcgctactaaattcgatgatactgaagacaatactccggaagctgaaccttcaaaaccggaggtgtatttcgatgatgatgccgacattccggaggaggaagagaataaagttcccaccctatccaagcgaaaacgcaaagaattgaacaagctctccgtcgctgagctaaaagcaatggtcaagaagcctgagttagtggagtggacggatacctcagcccctgatccgcggctactggttcatataaaagcgcaccgaaacgttgtcccagtgccgtctcattggtctctcaaacgtgaatatctatcatccaaaagggggatagagaaggcaccattctcgttgccaaaattcatccaggagacgggaatagccgaaatgcgtgatgctgcactagaaaagcaagaacaagcgactctcaagcagaaacaaagggagagggtgcagccaaaaatggggcgactagatattgactatcagaagttatacgaagcttttttccgcttccaaaccaagccagaattgactcgatacggtgaagtttactatgaaggaaaggagtttgagactaaccagcgacatctgcgccccggggagcttagttcagagctgaaggaggctcttaatatgccgcctggtgcacccccaccttggttgataaatcaacagcgatatgggccgcccccctcttacccagctttgaagataccaggccttaatgcccccccgccgccgggtgctatgtggggttatcaccccggcggctatggaaagccgccagtggacgaacataatagacccctttatggaggcgacatttttggtgttttgcagcctcagcaaaccatgcagcagggcgaaccagttgaaaaagatctctggggagagttacaggaaccagaattatccgatgaggatagcgaggatgaagaagaagagctcgacgaagaggacgtagacgcaggactgcaaacccccagtggaatggaaagtccaagtgggttagtgtcagcagttccgtcagagctggctggtgttgaaaatgtctccggagagtttgatgtgcgaaagcactatcaaggaacgcaaacagaggagtctgctgatcgccggagtgcttatcatatcatccccgaaaggcaaacggaggtacaaggcttttttggcggtgacagggcgtatgatttgcgcccggctacagatagcttacctgtactgggaaccgaagatcaaactcgaaagcgcaagaaacccggagatgtcgatgtttctgttaatccggatgatatgcaaagtgaggatggaatcagtaaggacaatctgcaaaggctttacgaatctcagaggcagcaggagagcaaccccaattgggagttccaggaagatctcagcgacatgattgcccacgagagtaggaaaaggctcaaacaggagaagcgaaacaaaca

SEQ ID NO: 20063 - DNA, 1667 bp, Emericella nidulans
tgggtagcgcaaccatcaatcaaccggtcggtaatacggactatacgcagtcgaccgttgcgattattggggcggggatttcgggtttgtcgcctgtttggcatccttgatcctgacggtgctgtgttgctgatatctgacgccaggaatgtgcatggccattgaccttctccgtcgcaaccaccgcaactttgtcatcctagagaagggcagctcggtcgggggtacctggaacgataataaatatcctggctgtgcttgcgatggtacgccgtagcttgtcctatatctgatgattggtaataattggcttcgcagtctggagtgccctatacagctattcctttgagcagcggtctacttggacacgcgaatacccgggccaggaggaaattctgcactatctcaccggcattgctgggaagtacggtctctacccgcacatcagattcaattcgaccgtcgaggaggcgcgatgggacgacgaggcccggaaatggaagatcaaggtgtctgtgtccggcgcgaaagatgcccagttccaggagggatacgaactgtcggcaaatgtgctcatttcaggtgtcggacagctgaatcagccggcctggccaaatatcgacgggatgaatgaattcaaggggaagagtatgcattcggcgcgatgggactggacgtacgatttcaaggggaagaggatcgctgtgatcgggaacggtatgctcagtcgagtgggattttttgggtcaattattttggtagacagaatagatgctgattgaacttgacaggtgcgactgcgactcagatcgtaccagaagtcgcaaaaacagcgtcgcatctgacggtctaccagcggactccgcaatggatcatcccccgagacgacaagcctgtgcacccggcgcagaaagcattgctctctttcccgttcttccgaaactgcaagcgctcgttcatgatgctctaccgcgagatgagccacgacttcatcgtcaagtcggacgccaaaaactcgcaagaagtccgggagctctgcatcgggcatatcaagaagggccttccctcaaagccggaattgtgggatgttctcacacccagctatccacccggttgccgccggatcttggcctctgatgactactacccagcgctgggccgggagaacgtcaagctggacacgcgcaacatccagcgcatcaccgagacggggatccagatccccgatggcgagacaactgactttgacctcatcgtatacgcaaccggtttccgcacggttgagttcctgcacccgatcaaagtgtacggcgcaggcggacgcgacctggccgagatctgggacggcggcgcgacggcctactacggcgtgacggtcgaggagatgccgaacttcgggctgctgtacggacccaacacgaacctgggccacaactcgatcattctgatgatcgaagcgcaaagccgctacctcgccgcactgatcgacccggtcatccgtgccaaagaggccggcgtatcactggcgatccagcccaagacagagatcgtccgggccttcaacgcggacatccagaaacgcctggggaagagcaacttcgccgacccggcgtgcaacagctggtacaaaacgccgacggccggatcacgaacaactggcccggcac

SEQ ID NO: 20064 - DNA, 1668 bp, Emericella nidulans
agctgctgggcagacgagccggtataagatgcgtacccagtaaaagctataatcaaaccctgtctcgtccatcccttgcgcagcatctcagctcttttcacaccgggctgaagcctctccgagtctgaacggtcagcatcaagcagtggaggtggtctctccacagcaggatcggtatccagtgcacctttgggcactgctgaaatatcgtcgagagccattgttgtggatgtgagggatctcgaactgaactttggaaggctgccagacaattcaaatatgcaagacctccaatggtctagtctaacaagggcttaagaggccgtccgttcggaacgtcttcttccgcacctcgtcggtctgccctcgattgggagcagccttcgtattgacctagattgtcagaccacgcgaaaagacccacgagcagccacaagaagcgaactgtacccaatagcgtcccatcataagcgaacttaatcttatctaggcccagtttacaagaaatcagaagatcagataacaaatgccaagtcaaagccaaggcgtccgcttcaagccacgcaagcctgggaggattgaaatcggagttatcccggcttaaagagtcggattccttgcctggtctcattagacaatccttgtgattacagagttgaagtgtgatgactcactgggcatttagtcccattcagccgggggcagcccggaatatggccgcgtggcagattgcaggaaagaaagacggaccttaccagatcgatgtttcatggccgctgacctggtctgagtctggagatgcctccggtaaaagcgcaaacgcagtgtaagtggagctcctggcaatgcacaatcttgctctggcggtcgaaatttaatcatatttttttttccacgccagctaccttgtagacggaaacgcgctcttcctcaccgcaaccgagacccttcgacgacgggagtcgcatcgaccaagtgagacaggaaccgtcgtcatcgccattggttatcctattacagactctgtcttcagccctcggcgtagctatgacctaacgcctccttgtgatcattacatcccgcccgaggggccggatgggagcccgaaaccggaagcccatggaggcgccgatgagttcttgacctttatcgcagagatagtcaggccatttgtggagttgaaagtatttcctgcgcgtctctttcggccgtactgcgctattcggccactcttatggcgggctattcgcgcttcatgccctcttcacaaaaccatcaagtttcgacgtttacctcgctgccagtccgtcaatctggtggaataaccggtctatcctgaccgaagcaagacggttcataagtggtgcagcacttttttcaagcgcccatcctgttctccggttgtcattcggctcgagggagcagtatcctgtccgccaacgggttgaatcggatgaaatgtttaagcgaaggcagcgcgctgctgagcagcgtcggatgaacgacaactgcgaggagctttactcggagcttctggccagtggaagactctgtaagctggaggttaaagagtaccttgatgaagatcatgggagtgttatcggtcctgccctgagcgggggtattatgtttcttagcaacctcagtgcctgatcaactaccgatagg

SEQ ID NO: 20065 - DNA, 1669 bp, Emericella nidulans
tgcccagctcggtgctgtcttctccgtctccggccccgttgtggtcgccgagaacatgatcggatgtgccatgtacgagttggtgagtgacactagtttatgcagtgcctttctgggctatcgctcaagctgctgccatcggtgaagctcttctacgcgggctttgttgcttaccatcgatgattagtgccgagtcggtcatgatcagctagtcggagaggttattcgtattgatgcggataaggctactatccaagtctacgaagaaacaggtactgcctccgcctattatgatatgtcatcaatctgacaatactgttcttagccggtctaacggtcggtgatcccgtcatgcgaactggcaagcccttatccgtcgagctcggccccggtttgatggaaacgatctatgacggtattcagcgacccctcaaagccatttccgacgaatcgggtagtatttatattccccgcggtattaaagtcaatgcgctggatcgcaagaagaaatgggacttcaagcccggcaagtacaaggtcggcgaccacattacaggcggtgatatttggggtaccgttttcgagaacagcttgttgaacgaccacaaaatcctccttcctccccgcgcaaaaggtacgatcacccggatagcggaagccggtagctacactgttgaagaacaactgctggagattgaattcaacggtgtcaagaccacacatgggatgatgcacacctggcctgtccgtgtccccaggccggtcaacgagaagcagtccgccgactcgccgttcattgttggccagcgtgtgctagactctctattccctagtgttttgggcggtaccgtctgcattcccggtgcctttggttgcggcaagactgtcatctctcaaagtgtgtccaaattctcgaacagtgatgtcattgtctatgtcggatgtggtgagcgtggtaatgagatggctgaagtgttgatggatttcccagaggtatgctcattaaacgttgccgaatatcgccaatactaacgtgcttgtagctcagcatcgacattggtggccgcaaggagcctatcatgaaacgtacatgcctgatcgccaacacctctaacatgcctgttgctgcccgtgaagcgtccatttacaccggcatcaccattgcggagtactttcgtgaccagggcaagaacgtggccatgatggcagactctagttcccgatgggccgaggctctgcgtgagctttctggtcgtctaggagagatgccggctgaccaaggtttccctgcctaccttggcgccaagctcgcctctttctacgaacgcgctggtaagagtactgctctgggaagccccgagcgagagggaagtgttagcatcgtcgccgccgtcagtccgcccggtggtgatttctcagaccctgtcactaccagtacgatgagtatcgtccaggtcttctggggtctggacaagaaattggcccagcgcaagcacttcccttcaatcaacacaggtatctcttacagcaaatacaccccggtgctcgaccgttactacgagaagcaccaccccgagttccctcgtctgcgtgagcaagtccgagagctgctctccaaatctgaagatcttgatcaggtcgtacagctagtcggaaaggctgcgcttgg

SEQ ID NO: 20066 - DNA, 1672 bp, Emericella nidulans
gggttcagcggcgtatatggacttcatagatttcgtcagctgggcctcaatgtgaaggtattcgaggctggggctgacctgggaggtgtatggtactggaaccgctaccctggactccgtgttgactcagaatggccttattatcagttgggcatccccgaggtatggaaagacttctacttcaccgaacgatttccgaagggcgaggagatcagaagttactttgaccacgccgataaggtgctcaatctgaagaaagacatccaattcaatgcccgtgtcaattccgcaacctgggacgagacccggctgcagtggaccgtgaccactgaggctgggcacactgccactgcgcagtatctgtgcctcttcaccggcgtccttcaccgacaatatatcccgggatttcctgaccttggagaatacgagggccaggtcttccactcggcagcctggcccgaaggtgtcgatgtgaccggcaaacgggttgcggtgattggagccggagccacaggagttcaattggtacaggagttatccaagagagccagccatcttacgctattcctgcgccggcctccgatctgcttcccaatgaggaaccggccaataatgccagcggaagaggagtgctggaaaccctactatgagcttctcttcgatgccagcaggaagtcgcccatcgggttccccgtctctcggcctacgaagggtatatacgatgtgtcagagagcgagcggaatgagtactatgagaagctatggaaaaccggcggtttccatttcggagctgggaactaccctcaaattcgcgtcgacaagaacgcatcacgcatggcttatgccttctgggcaaagaagacccgcgtacggattaaagacccgattaaacgcgacttgatggtacctctcgatccgcctttctggatactgacgcgacggtcgccgctagagattgactattacgagtcgctggatcaggatcatgttgagatcgtttcgctggcccaggcgccgatccagaagtttactgaacgcggtatacagactgcagacgggaagcacagggagtttgacaacatcgtctgcgcgactggctttgagagcttcacggggtcgtacgtaatatccttccactactaaggaaactaaccagccacccagggtcgcgacgatgaatatccaaagcaaggatggtgtttatatcaaggacatttgggcgaaggggatccgaacctatctcgggatcctggttcatgggtttccgaactgcttcttaagctacagcccccaaggtcagttactatacggtgtatgatatcaccaaagctgagaggcgacactagcaccgacggtgatcgcgaacggacccacggtcctccagtgtcagatagacttcatcgtcgatgcgatcgctaaaatgagagcggagaaccttgaacgcattgaggctacggctgaagcagaagagggctggagacaaatgatccttgaagtaggaagcaagacgctggccgcggaaacggactcgtggtggacggcggccaatgtgcccggccagccacgacagttcctgacttacgtcaaaggtattgggaactatgagacggaatgccgggccacgcttgacggctggaaggggtttgatgtgagggagcggcctaactgtggc

SEQ ID NO: 20067 - DNA, 1674 bp, Emericella nidulans
ggggactgcaagcgcgaaaagagctgaaagccgtcgaagcaagattcgagctttcgagagagctgtaggttgtccctggatcttgcaccttctcgtaagctaagttttatagtctcgagcaggcgaaagaggatattgatgccgaaatcataaagcaagagacccaagcagcgatagaaacattgcaagatctgcaatcccaatttgaagcagtgagtagcgcctggctgacatcgaccccggggttgctgaacggtcactagatgaagcttgtcgacatagagcagcaggctagccaaattctaactggattaggattcaaagaggatgccttgagcaaaccattctcgacattgtcgggtggctggcgtatgcggtgcatgctggcgagcgtcctgattcagaaccctgacatcatgatcctggatgagccaaccaattttctagacctattaggagtgatctggctggaagaatatctgaagcagctcagagattcaacacagacgaccgtcgtcgttgtctcccacgatagggactttgtaaatgctgtctgcgaagaaattgtcatccttcgagaccaaaagctcacttattttaaagggaacctgtccgcatatgaacaggattttgaagaacagaaactatactggggccgcatgaaagaagcacaggagcgccagatagcccatatggaagcaaccgtccgtgagggcattaaagttgggaagaaaaccaacgacgaaaacaagctccgcatggccaagtcgcgacagaagaagctcgacaatagaatgggtgtccaggttaacgcacgcggagggaggttcaagctgaaccgagatctagctggctggcactcaagtgctcgggcggagattgaagtgccgcaggatgaaaagggagctctgattgccttgcctgaccctcccgagctgcgatttcccggcccgcttatatcactagaggggatcaccttcaagtataaaactgatgcatccccagtgttgaagggagttgatcttgtgatgcacttgggagatcgcgtgggtctcatgggccttaacgggtgtggaaaatcaactctgatccgtctggtggccggcatctccgtgccgactcagggaaaagtctcctcgcactcgcggctaagaatggggtactacgcccagcattctattgaggagctgaaaaccagggggctgggagaccctagcctgacggcgttagggctgatgacaaaggacgtggatggctcactcaatgaaggccagttgcgagggttgttatcgtctctaggtctccaggggaagatagtctccgacgttccgattcttcgactctctggaggacagcttgtaagaaatccgggaacagcttaagagctagtatcactgatatatgccacacaggttcgtctggccttggcgagaatcatctggaacgcaccgcatctactcgtcctcgacgagattaccacccatctcgactaccatacagtcacggccctcgcaaccgtattgtccactttcaaaggtgcaatactgctcgtttcccacgatcgattcatggttcgagctgtgattgaaggaaaacgcgacctagaccacaaactagacgatgactttgaaggcgtcgaagaggagtcagatatggagctaccacggcggcgag

SEQ ID NO: 20068 - DNA, 1674 bp, Emericella nidulans
tcacccttggcaacagcgacaagcttaactacgatcatcttgttgttgcccccggtattgcgctcaactttggcagcgtccagggcttgtctgaggcgctggccgccccggactcgaaagtctccaccatctactcttacgacacctgctccaaggtcttccccacgatcgagaagctcaagaagggtcaggccatcttcacccagcctgccggcgtgatcaagtgcgctggtgcgccgcagaagatcatgtggctcgctctcgactactggaagaaagctggcctctacgaccccagcaaccctgccggttcggccatcaagatcgccttcgccactggaacgccctccatgtttggtgttcccaagtataacgcgaagctcgaagagctgcgcaaggagcgcggcgttgaggggctcttccagcacgatctggtcgccatcgacggcaagaaggccactttcgcccgtcccaacggggaatcaagcgtcacccgggagtttgatctgctgcacgtcgtcccaaagatgggtccccacgcgttcgtcaagaacagcgctctcgccaacgaagccggctacgtggatgtcgacgacggcaccacccgccacaagaagttcgccaatgtctggtctgccggtgacgcgtccagtctgccgacgtccaagaccgccgcggcaatcaccgccgaggcgcccgtccttgtccagaacctgctccgttcaatggacggcaaagaaatcgacgccacgtacgacggctacacttcttgcccgctaacgaccgaatacggcaaagttcttcttgccgagttcaagtacggcggggtcccgaagagaccttcggcaagtggttcggtatcgaccagggaactcccaggaaggagttctacttcctcaagaagcacttcttcccatgggtctactacgaatctatggtcagtgggaagtggggtggacccaagggatggttgtaatgatagacgagagcatgtatattattgaatagtatagtaaaatagagcagcaatgatctattaccgcttggagtaggtgggcatcgtccttgataatcgctatggggctcgggccgcgctgcccaggtggaccaacaacccaggcgacaacgctgatcgtcaggagtacgggcattggtaaggacccttgttgccggtagtagatgcatacgtgcccagccaatcattgctatgtgtctttttcgcaccaaattattcagagtcgtacgtggccttcgatcctccaattcactctccgacagtccaaatgggaacgggccgccaagggcacctaagaaacatctttagccggattgtttctaggcaagccttagtctagcccccaatgctcgattatgggggctcaacctatgtctactgtcatcccagcagatatcagcctgttcggctcgatcccagagcgctggctgaccactccggcgtgggacatggctggcctcttctgccgcgggctgaacaccctccattctgttccattccgaaatagtgtccaagccataccacgatgcttaatgcgatgcttaaggttgcagatgatccttgccgctttgtgctagggcgcctggttgggcttttagaccgcgtctggcttggtcttgctcgtggcgtctcgtttccaccaatagcccccgatcgcg

SEQ ID NO: 20069 - DNA, 1676 bp, Emericella nidulans
tgtgtcgccttcagcggtggtctcgacaccagcgttatctgttagtctttccggttctgtcaattgattccccgcgtgctccaagctgatcgagaacacacagtgaaatggctcatcgatgagggctacgaggttgtcgctttcagtaagtaacatcttcaattggaacttgattgtctgctctgatactaacaaattatcagctgccgatgttggccaggaaggtaaagcgatcactttgaaatgcccaccgctacttgcgctctgacactcccgccttctagaggacttcgccgccatcaaggagaaagctctgaagctcggtgccgtcaaggccgaagttgtcgatcttcgccgtacgtgtttcgaaaaactgctaaatttcacaaagaaatagaattaacgcagtggtaaacaggcgagtttgttgaggaactctgcttccccgccattgcttgcaacgccatttacgagaacgtctacctcctcggtacctctctggctcgtcccgtcattgctcgtgctcagatcgaagttgctaaggttagccttctaatctgcaatttatttctctaagcattgacttaccaattgtaaacagcgggaaggatgctttgctgtctcccacggttgtaccggcaagggtaacgatcaggtccgtttcgagctcgccttctacgctctacagcccgacatcaaggtcatcgctccttggcgtgacccccgtttctacgagcgcttggccggtcgcaacgatctcctcgcctacgccgctgagaagggtatccccgtcacttccaccaaggccaagccctggagtatggacgaaaatctggcccactgctcttatgaggctggtatcctggaggaccctgacatcactcctcccaccgacatgtggaagcttactgtcgacccccttgccgctcccgacaagcccgaggatttcaccgtccacttcgagaagggtctccccgttaagctcgagtacaccgagaacggccagcagaagactgctacggacgctgttgacatcttcttgactgccaacgccatcgctcgccgtaacggtatcggccgtatcgacattgtgagcctgctctaaattgattgggtcgagcctgaggctaatatatactaggttgagaaccgtttcatcggtatcaagtctcgcggctgctacgagacccctggtctcacctgcctgcgctccgcacacgtgtaagtgaagcttgtgcgttttccgtcggataaatctaacctgccgttcatagtgaccttgagggtcttgtgctcgaccgtgaggttcgtgctctgcgtgaccagttcgttactatcaactactccaaggtttgttcagcccttacatagctcagtcagtgttgcttacgatccgctagctcctttacaacggtctctacttctctccggagcgtgagttccttgagcaggccatccctgcctcccagaagtcggtcaacggcaaggttcgctgccgcgcctacaagggcaacatgatcatcctcggccgttcctctgagaccgagaagctgtacgatatgtccgagtccagcatggacgagattggtgactttgctcccaccgagactaccggattcattggcgtgtctgccatccgtctgaagaagtacggtcagatgaagcaggccgctggc

SEQ ID NO: 20070 - DNA, 1677 bp, Emericella nidulans
ccgtcatctgcaacatactttcaatcgagtgatgacggtacgtaccagcatccaagtcaaatctcatctgcgcgtactcttctttcttggtggagtagtagtggggtcgaccttttattctatcgcgcggcttggtcagcttctagctttccttaatagctagcgagtatttagacaatggcgacgtacactttcacatccctcagcgacacttccgtgttaatcttatctgtcgggaacaagagtaccgagagggcggcgaaacccgcaacaaagagcgcgactgtcgtgaagaagccgaagaccgcttgggcacgatttagtgtcgagtgcatcgtttatttttctttgtgtctccctgtcggtgggagagatccgttgtaggagaggtgcccagaagggatgggatgggttggatgcggataaagccacatgtccccgtctgcgctccagaggtttcggctgcttatcgataagatcaagcttactggaaactggtactgtgaaaacgtaagacggtgaagtatattgcttctcttaaaagtctggcaggtttatattcttgtttaatacgatgagagattctcaagttacaatagctctttggatgatctacttttgattatactatccgccgcatagctcaattcagacagcttaaagttgaagatcactccgctctccacctaagctgaccccgcgctacttaggtatactgcaagactccaacagctaagtcccagtcttaaatcatcctctcgccgattcgctttgatatccccgttgctagaggacagcaattaacgatcttcaagatgggcgaccacgttctcttcttctacggtacggtttctttgttcccctgccttttctaccgtagcgttgcagatatataaccccaccagcgcgactcacttcatcatcaaatcctgagtaaatattgaatcagtactaagcagcaagtcaggaacccttatggccccccaaatccttcaccgtgtaatccacggctctccgacgccacaacaatggcaaaaagaccttctccagtttcgtcccgcagtactgcacggctataggagacatcgagtcaggggagctgattatccgggaatcatcagagagtcagaatcgacgcaggatgctgctacggatgggtctgagtctgcaacaggtaaagcagcgctaccttcagggcctgaaacacggtcgcgcgcaagcgttctcggcactgtcgtctcaggccttacggacggcgatatccacagactcgatatcttcgagggcgcagagtataggcgggaaaaagtttctgtgcggatactgcgggaggcattatcaaaggacttgaacaatcaagacggggttcggaatggggatgagaaccgggcgcatgtggacgcagatgcagctagagataagcacatcaaggatgtgttggaggctgcgggggcagattttgcagatgaagaggaggaggttgaaacggagacgtatgtgtggattgctggacggactatgttagaggatgcagaatgggactttgaagccttcaagagggataagatggcgtggtgggtttctgctgatgaaagtgaatggtgatatatgtttaactagatattgtgcgatgggtttacggagattatgcaggtgttgatagagcctgtatagaat

SEQ ID NO: 20071 - DNA, 1680 bp, Emericella nidulans
cgacagaggcccctgtctggacacaagaagtccacgtcgaatgatcgttggatgtctacttactcccgtgccggtgtaccgactgcttcatgtgaagcttgctcacttccgattgctgggaaggtcgtcaccgctgccgggacacgttttcatccagagtgcttcacttgttaccactgtcatactgcccttgaatgtgtggcattttaccaggagccggacgaaagcggaatgaacgactcgcagatccttccgcagatgaagacgcccattctttgaggttctattgtcaccttgactttcacgaattgttcagtccgagatgcaaaagctgcaagacaccaatcgaaggagaagtggtcgttgcctgtggggcagaatggcatgtcggtcacttcttctgcgccgagtgtggtgatgtacgtaccgtgactcccgaatgaggacttctgctaatctctaacagcctttcaactcgcaaactccttttgtggagaaagacggctatgcctggtgcctgaactgccactctcgcagaactgcacctcagtgtgcaggatgtaagaagcctgtccttgacgatatcgtgatcactgctgtaggcggaaaatggcacgaaaactgtttcgtctgccatgaatgcggcaacgggttcggcccagatggccggtacttcgtcaaggaaggtgagcccagacggacggccaaaggccgaatcattggagggccggttcagctggctgtgtgtgagcgatgcgaaggcattcgtctgaagtcgtctcctagggcctgattgtggctttggtagtaggtgatctctatattatgactaacgctaggttaagctgctgttcgtgccattattgggtattcgcaacgccgaacagatttatcattgcttgttatgtcttttctgtcttatttacattatgcatggcaagcgactattttataacgatctaatgaaattggctgggcttttttttttgggctttcaaattatgctgatatcggtagcgaaatgtacggtctattgcagtatagaaaaaaaacctcaacttgaaaagcctctgataacccaaaactcctaagggaaagcctcccgcaatcgtcacgactctcaaacccattccgggttactcttcctcctaaaaacagccacgtacttatttcccccattcctcgcaaccttctttccctcttctgtggcctctttcataacccgaacacactcgtctttttcaatgtcctcctcgctcactcgctcaaacaattccgctgacccctctctcttccccactgattcttgcacctcctcctgaccttcaccctgcttttgagcctgctcagcctcaacatcgtacccaaagtgccttagaatccagtaatggtactcctccacatccgtgatcgtatacagcaagcctcccggtcgaagcgcatacgcatactccgcatttagcgtctcgctgacaatcctcgccttatgcttccgcgccttgaaatgaggatctggaaaacagatgaagatcttggatagttgaccgcgcgcgaagaaatttgggaggaatttcatcgtgttggcgcgaatcgctgtgatgttttggtatccgcctgggattagggtcgacggaaagatctcggagtcatcgactgagggatcgttggcggtgggggtct

SEQ ID NO: 20072 - DNA, 1680 bp, Emericella nidulans
ttggtctaataatatattcccatagcatctggttcttatactttgtaaatgcgttccagatctctgtgaccagcagcttgaatccatacgtgaccagttcattcaatgcacactcgctatctgcactaccgacagccattggcgatgcatttgccgctgcgacatatcttcccatggcgaaactgatggatgtatggggacgtgcagaaggctttttattcatggtcatttgcctgactattgggctggtacttatggcgtcctgcaatgcctttgagacctactgcgccgccaatgtaagtcgccgcaaacaatccttgaggaaagcaagtcctaattgcttaggtgttctactacgttggcttttatggtatggaatatgccgtcgatgtcgtgacggccgatgcttcgagtttgaggaatcgtgcttttgcgtatgcattcacgtcctctccttacattattacagcctttgcagggccaaaagtggcaaaggacttttattatcaagtttcttggcgatggggctttggtgcttgggcaattgctactcccataattgcactgcctctatacggtatgctaaagtataacttgcataaggctcagcaagaagggtactgtatcagaagaccgagtggccgcacggtactcgaaagcatccgacactggtctgttgagtttgactgtgcgtatcatccttttgccgaaatatccttgtctgaagcataaggctaatttgatgctttccagtgttgggagtgtgcatatttactgcaggccttgtattgttccagctaccttttgacattgccgattatgcacctgaaggctgggcctcagactacatcatcgccatgctagttgttggcttctcaatgctgttcttttttgcaatctgggaaaagtggcttgcgccagttcctctcttcgagtggcgtctgcttaccaaccgcaccatcataggtgctgtactcctggacgcaacttaccagctctcaaactactgctggagctactacttcacttcctggctgcaagtcaacaataacctaactatcgcgacagcaaactacatcaacaacatctttgatgttgtctctggcgtactactgctgttcctcggctgggtgatccgccgagttggcaagtacaagtggactttatacatctccatcccactttatatcttcacccaagggctcatgattcatttccgcaaacccaatatgagcgtcggttatcaagtgatgtgccagattttccttgcaattgctggctcagttttcatcctcgttgaacagattgctattcttgctgccgtagatcaccagcatgttgccaccgtattggccattctgaacgttgttgggactattgggaattctgctgggttgaccatcagcacatctatctggcaacacacataccggaacgctcttattcggtatcttcctgagtcggccatgtctaacttcagcagcatctacgatgatctcagaacgcagatagggtacccagtaggcagccccatcaggacggccatccagatggcctacgcctatgctgaactcagactacttgctgttggctgcggcattatgatgcttgcgattccttggtgtatccttattagggatatcgatttaaagaggaagatgcaggtcaagggcactgtgc

SEQ ID NO: 20073 - DNA, 1681 bp, Emericella nidulans
cttcaagttgggataatcaccaacaaattatctaaacagggtgacgaattccgcgtgccatggtttgagatctgcttatacattctgtttcggtggcttcagggcaaccaggggctcattgggtctctccgttccaccctctggatccctgttagccagtattcgtacatggagctttcaaccgctgcttttgagcatgtccatggtctcagcttggacttccatcttgggaagaagacaggtgaagttctctcggcccttagtaagggtagctccatcaacacctttttggagcaagttaccttccaggttgttccaatgctagtcgatttatgtgtcgccattgtctatttccttgttgcgctagacgcgtattatgctcttgtcgtcaccattgtgactttctgttatctttacgtgactattcgtatggctcagtggagagcggagattcggcgacagatggttaattcatctcgtcaagaagatgcggtgaagtgagttaaacagcctaattctcttcatctttttggatttactcatataacgcttttaggaatgactcgatggtctcttatgagacggtgaaatatttcaacgcggaagagtatgagtttggacgatatcgaggcgcagtatccgacttccaaagggccgaataccacgttcttttctcgctgaacctgatgaacacttcgcagaacaccatttttatgctcggccttctgatcgcctgctttattgccgcttatcaagtctcgctcggacaacgggatgtaggtcagtttgtttcgcttctcacgtatatggcccaattgcagggcccgctcaactttttcggaacattctatcgttccattcagtcagccctgatcaattcggagcgcttgctggaattgttcagggaacagcctacggttgtcgaccgacccaacgcccgaccattggcggtttgcaagggagacatcaaatttgacaatcttgaattctcctacgacgcccgtaagccggcgttgaacggccttacattccactgcgagcccggcaccacaactgctctggtcggtgaatccggtggaggaaagtcgactgttttccgtctgctcttccgattctacaattctgaaagaggccgaattctggtcgacgggcatgatgtggaaagtatcaccattgactccctccgaagacatattggagtggtgccgcaggacacagttctctttaatgagactctgatgtataacctgaaatatgccaacccaagtgctacagacgaagacgtctatgaggcatgtcgggcatctagtatccatgataaaatcatgtcattcccggatggctacaacaccaaagttggtgagcgtggtctgcgactcagtggtggggagaaacagcgagtggcaattgctcggacgatccttaagaacccgcgaattattctcctggacgaagccactgcggcacttgacactgagaccgaagagcacatccagggtgctctgtctacgctatcccgtggccgcacgatgctcgtcattgcacaccgactgagtaccatcacgacggcggaccgcatcctggtcctgagcgagggcaaggttacagaaagcggaacacatgatcaactgcttgcaatgaagggtcggtatgcaagcatgtggcgcaaacaaatacgcgc

SEQ ID NO: 20074 - DNA, 1684 bp, Emericella nidulans
ataggtcttaagacagagtttatgttgggggacaaaagaacccttctatcaaaagcattgaaacaaggaaggaacgaacttgtttgcgaacttttgttatccccagccatgaatatcaacttgcttcataacgaagttttgcgggtggaatctgaagggggccatgagaaagtcgccaagctactgctggagaagagggctgatgtcaatgcttccaatggagttgctctgcggagtgctgcagcacatggccatgcgaagatcgtccagctcttgttggagcatggagcggatgttaatgtatttcatggatattctctgcggttgctgcagcacggggccatgaaaggattgtccagctcttgctagaacatggagccaatgcaaacgcttctgatggagacgcgctgagatgtgctactgaaacggccttgagaagattgttaagctactcttgtagaagggagctcacgttaatgcctccgctggagaagctgtacatagtactccagattgggttcaggatacagaaaggtcgcgaaataaatagcgggttgcgttggttgataccagagacaagctacagcgctggacgcggcgcgctgcatagggcttgtgagcggccggatcagttgcagtcgtaggagctataataagaaagaagaaaaggtgaaagaagactgttcagtgctgaagcttctgctgttggtggatgggatcatgcaggtaacatagggaactgatgttaatcgtatgtgacagcttgtcatatatggaacttcccaattttcgcttcgtcaatgcaagttcccgcttgccgatgcttacttatgcagagaattctgctatttccaccagaagctatttctcttccaactgtcatattatactaggatgcttcttattttttatttcttatgtatctaaaccgctgtatagagctaggttggaagaatcagactttcattcttttatattattaacggctgatgctggtgattaggtctagcctgacgctccataaatatagagcagaatatcagacaaaagtcagagaaactcttgctatttttcttaatcctggagggattatagcagtgctctaaactttagtcacacactacccacccgccattcgctcaagtgggtgattcaccaccttgctcatactaactcacctgcactcaccctagatttgtgccgcccacttctaaaagcagcagcacactcagggcttgttgcacttttattcgcgttgataatgatggcttaacttcatctgagcggacgggaagccatgctttccacaccttatggttgtatgtacttggaatgcatggatcctgtatgttatgctatacgtgaggctcgtgctcatattttccaacttcgctatggaccaccactacgcatgcaagtggtatgccgttgtcctttgcgaaacaacagcatcaccctccaatgttcaagtggtaccagccatccaatatgactgactcaagagtgatcaaattcaatatcgccggcaaagcgatcgatgtcatccactgatattcgtctatgagcgtttccgcacatattagtagtttgtggcgtagcccaatagtcgcgagacggtatatgatgagagtggttggctatcgtattcggacaaatgagcgaatatagaacaatgaatcaatat

SEQ ID NO: 20075 - DNA, 1685 bp, Emericella nidulans
ttagttcttattttcatatttgctcgcatcaaatatacaaacctaaccccaccaccattcacacacaatgtgccctggtgcagacaatgagcccaatgggcaaacaaacggcgtcaacggccagtctaatggtattactgtgaatatgcattatctacagattcaatgctaattttttttctttcaaggagaccaccccggtttcaccgcggttcagacccgccagaaccctcatccttcccgtaacccctacggtcacaatgtcggcgtgactgattttttgagcaatgtctcccgcttcaagatcatcgagagtactcttcgtgagggcgaacagttcgccaacgctttctttgatacccagaagaagattgaaattgccaaggcattggatgagtttggagtcgactacgtgagtcatccagtgtgtattggtttgatgccacttactgacggctgttcgctctagattgaacttactagcccttgtgcttctgaacagtcaaggcttgactgcgaagccatctgcaaacttggcttgaaggccaaggtaagttcccattggtaatgagtcggcgcatacactgtctaatgggccaaatagatcctcactcatattcgatgccacatggatgacgctcgggtcgctgtcgagactggtgttgacggagtgtaagaattcttccacgttttctagctgtctttagtactaatcaggtgtacagcgacgtcgtcattggaacttcctcgtatctccgcgagcactctcacggcaaggacatgacctacattaagaacaccgccatcgaagttattgaattcgtcaaatccaagggcatcgaaatccgattctccagcgaggactctttccgctccgacctcgtcgacctgctttccatctactcagccgtcgaccaagttggtgtgaaccgcgttggtattgcagacactgttggctgcgcttctcctcgccaggtgtacgagctcatccgtgttctgaggggagttgtgagctgtgacattgaaactcacttccacaacgacactggttgcgccattgccaatgcttactgtgctctcgaggctggtgctactcacattgatacctctgtccttggtattggtgagcgcaatggtattactcctcttggtggtctcatggctcgcatgatggtcgccgacccccagtacgtcaagagcaagtataagctggagaagcttaaggatattgaggaccttgtcgccgaggctgttgaggtcaacattcccttcaacaactacatcaccggtttctgtgccttcacccacaaggcgggtatccacgccaaggctatcctgaacaaccccagcacctacgagatcatcaaccccgctgatttcggcatgtcaagatatgtgcacttcgcgtctcgtctaacaggctggaacgctatcaagtcgcgtgctcaacagcttaacgtccacatgactgacgatcagtacaaggagtgcacggccaagatcaaggctcttgctgacatccgacctattgctattgatgatgcggatagcatcatccgtgcttattaccgcaaccttagctccggcgagaacaagcccctcatggatctgactgccgatgagcacgctcagttcctcgccaaggaaaaggagcttaccgagagtggcaccgctctttaagggcg

SEQ ID NO: 20076 - DNA, 1688 bp, Emericella nidulans
ccatcattgttgggggcacgactatccagggagtggggttcctggtttcattgatggtgtattcggccttcatctaccgattgatgtcccagaagctgccaagggagaatatccggcctgggatgtttgtctctgttggcccaagcgcatttacggtagcaggacttgtgactatggctgctcaggcgaacagtgttttcccggatgattttatgggcgacggcattttggccgccaacgtcttaaagatcgtggtcaattttgcctccttatggctctgggggtgagtacttttgctgccacagatttccaagctgacctctcagtcttgcaatattcttcttcttcatcgcaagcttcgcgcacctatccgccatcggccctgggcgaatgattttcacgatgggctggttctcgtttgtctttccgaatactgcgctgatcacgtcgacatttgcagtgggaaatgcattttcctgcaaacctattctaattatagggtgtgtcatggttattcctcttgtgctgatgtggctcttcgttgtttatatgatgatccgcgctataatcttacgtcacatcctctggccacagaaaggagaagacaaagacgagggagggtttgaaatcaatgagatcaggcctggcactctcggtgcagaattccagtaaggtttctactgacgcagatgattgtgctgctaccatttgaatgaatgatcatagtttggagggatttgaaagattttgtatacatgtgatttaaaccaaaccattcaatgccattcgaaaaaaaagcaggctatataacctcacggatttgggctctgaacacccatccacagtagtatgcatagtatagaagtaatcacagctggcgtcggcaggctccgatggcaagggttcgcaggctccaccttcttgggaacggtccaatccatggcgggcgtgccacatggaaccttatccatctaacttggctgttttttttttctgcccctcggactctgtcttcttaaaatattattacgcgttttcctctcctctgcttaatatctgttgcttgaagaacactcgctgttgagctttcggctttatcacgcacagctcttatccatctctcgtcttatcgcgctatcgggaaacctcttatcgtcaatatgccccaaaaagtctatgtcacctacaaccaggtatgaattgctcagtctgcgcattcaagattccagagttgcagaactaccctacacaacatacccgccttaagggctcttcactggatactcgtatgtcgacgtcaggtcggtctaacaattgttgggtataggtccacaagctatgccaatcctcggctgaacaaatcctcaacacattccaccccaacttgatgatcgctattggtggaggcggttatgtccctgcccgcatcctccggtaaatcgaccagatatcatagagaaattatgatctgatcaatcactagatcgttcctcaagcgccccggcgagcccaacatccctattcaggccattggtctgtcgctctacgaggatcttggtcgcggtgacccagaggaggtccccggtacaaaggttacccgaacacaatggctggacctgagttccctggaaatggccaacctgattggcaagaacattctcattgtcgacgaggtcgatgacacccgg

SEQ ID NO: 20077 - DNA, 1689 bp, Emericella nidulans
gctatatacaggggtgcaccatcttgtccaagtcatcgaatgctcctttgtgccgctactttggcggtctccgctacgctctgcctccatcagaacggtggcgcaaagcgcagaagttacccgcgagctatatttatggcaccaaggaccgtcccttccaatgccccggtgctacaaacagatgtccacaagcaacgttcttagagtctccggtctcggaggctgcgcacgaggattgctttcagtgtaatatatgggttccttttggagatcctccggcaaacggtacgtaccagttctcatctcgcctcttaagctctcgggtctatactaagcttctccataggatggcctgtccttgtctttatacgtacgtactcaaccgtttcaccgtttcaccttacaaatacagagctaatgggatactagacgggggtttcctgcaattcggtaccccaaactccttttccgcagcggccctcctgggtgagacagactttggcgccattatcgtcatgccagcctaccgtctgaatgctctcggctttctctactcctcagaactagaacaagacgccacttccgttggcgaaaccgccggaaaccatggcttctgggaccaacgcatggctctcgaatggaccaaagagaacattggcttatttggcggcaacggctctcagctcacgcttgctggatactccgcaggcgcatactctgtttgttaccaactagcctacgatctaaccctcccagagtctcaatcccttgtcagacgagcctgcatctggtctaattccttcactgtacagcctaaatcccccacgcttgcccaaacccagtttaaccagctcctttcggccctcaatattccaatctccttgtccccagccgaaaaactctcccgcctccgctctaccccctcgtcaaccctcctctccgctgctgcaagtatagacctgcacgagttccgccctacaaccgacaacgctttcatccctaataacctcttccacaccctcgacaacggcaccttcgcatccaccttactcgctcgcaacatccatatcatcaccggcgaatgccgtgacgaacacttcctctacggcacatggcgccccccagtcaagaatacgctcggctcgctgcgcgctaggctgctggcggattacccccggcccgtcgtcgacgcccttatgaggatatactacccaaacagaacattaccggcagattgcaaggactggtcatccgatgcctttggccgaatttacgcggacatgcaggtccaccgtatgcagcgcggattcatctacgcgctcaccaatcccataaggcccagagagccaaatctcggcgagagagtttctaaactcatccaccgctaccgcatggaatatcgtcttaaatgcgcggacgtctctactccaccgggatggggcgtcacacacgctacggaccagtatatctggttctggggcaatgggcagatcgtcctacccgaggagaagaagattatcaggaatgcggtcatcgatccgttcattaagtttgtgcgtggggagcaggagctggggtggggggccagtaatcatagggagatgaggacgttgaagccggatggaaccgtggagatttggcgcgacgggctctgggacgaggcagtaaggacctggagggcgctaaggg

SEQ ID NO: 20078 - DNA, 1689 bp, Emericella nidulans
tggcggtcattcatcctgggtatcgttgtgtccatgggtggtttcatcttcggttactctactggttagcatcttcatcatgattgtgttagtgctcccgctgactgggcaggtcaaatttccggcttcacaacaatggcagatttcaagaagccgttcgccgagcgccaagcaaacggcgagtacgtcttcagcaacgtccgcaacggtctaatcgtcggtcttctctgcattggaaccatgatcggagccctcgtcgccgcccccatcgccgaccgcattggccgcaaactctccatgtccttctggtcgatcatccacatcgtcggtatcattatccagatcgccactgactccaactgggtccagattgccatgggccgttgggttgccggtctcggtgtcggtgccctctccagcgtcgtccccatgtaccaatccgaagctgcaccccgccaggtccgtggtgccatgatctcggccttccagcttttcgtcgcctttggtatcttcatctcttatatcatcaactacggtaccgagtcgatccaatccactgcctcgtggagaatcaccatgggcatcggtttcgcttggccactgatcttaggtctcggagctcttttcctgcccgagtccccccgttacgcttaccgtcttggccgtattgacgaggcccgcaaggtcatggccaagctctatggtgttgaggttaaccaccgcgttgtcgtccaagaaatgaaggacatgaaggataagctcgaggaggagcgcgctgctggtgttgctccctggcacgaggttgtgactggcccccgtatgctctatcgtactcttcttggtattgctctgcagtccctgcagcagctctctggcgcaaacttcatcttctactacggtaactccattttcacctccaccggtctcaacaacagttacgtcacccagatcattcttggtgccgttaacttcggtatgaccctgcctggtctgtacattgtcgagcactttggtcgccgtgctagtctgatggtcggtggtgcctggatggccatctgcttctacatctgggcttctggtaagaataaatccatcctgccactcaaacgaaagacatcggctaacaagtctcatagtgggcaactccgttcttgatcttgacaacccgcagaacacccccaaggccggagccgccatgatcgtgttcacctgcttcttcatcgccggtttcgccaccacatggtcagtcacctcgtacatccgctacaaatctaacatactaacatgaccacctaggggtcccatcgtctggtccatctgctctgagatgtaccccaaccgcagccgcgccacaagcattggcattgccacttgtgccaactggacatggaacttcctgatctccttcttcaccccatttatctcaggctccatccactttgcctacggctacgtgtttgcctcctgctgtgttgttggtgtccttatcgtcttcttcttcgtcaacgagacccagggccgtaccctcgaggaagtcgacaccatgtatgtcttgcatgttgtcccctggaagagtgcttcctgggttcccgatgagagcatcgtccgtgatctccaccctggttccgatgctaacaagactgagggccttgggcaggcggagcatggtgaggagagcaggccggagcc

SEQ ID NO: 20079 - DNA, 1696 bp, Emericella nidulans
gccttaacagggccctcgtctaaggagagaaaatacgatcgccagttgcggctttgggctgccagcggacagcaagctttagaggagtcgcgggtgctcttggtcaattcggacggaccgtggggcaacagaagcacgggggtgtccggcgtagtgggtgtcgaaacgctcaagaatcttgtcctcccaggcgttggaggcttcacgatcgttgaccctgctgtggtaactgagccagacctcggggtaaacttcttccttgagaatgaaagcctgggcaggtcaagagctgaagagacgtgtcgactactgaaagagctgaatcctgatgtagaagggagctttcgaaccaaggtatatctgccatgtagggacatgtccgcaagccaaactcctcatgctaacccgtttactatcagcctattgcggagatacttcaagaagagcccgggattctggcacaacataaactcattctaatatctggccctatagagcattcatcactgcgggccctctgcgatggtgccaaaaagctagcaatcccggtcctctacacgcggtctgttggattctactccacgttctctctccagcttcctgctgtgtttcctatagtagaaacgcatccagacccggagtcaacccaggaccttcgtcttctcaatccctggccggaattgactgcggctggtgctagtatcaggaacttggacagttttgatgatcatcaacatggccacgttccatacgtattattacttcttcattatttggaaaaatggaaggaaactcataacggcagcgtaccctcaaactataaggagaagacggcatttagggacttcgtgcggtcttgcgcaaggacaaataattcacaaggcggggaagaaaattatgatgaagccgttgcagctgtgctaaaatcgcttaacccattcagtttgcggagttctacccgggagatttttgagatggaagaatgcagacaattaagcgccgcttcggccgatttctgggtcattgcatcagctgttcgcgaattctacgaaacacaccaacttctccctcttcctgggtcacttcctgacatgaaagcccagtcagccgactatgtctcattgcaaaatatctataaaacgaaagcaagggaagatatcgcagaagtcacggatattatcagaaggttagagtctcagttgggccgagccgccagagttgatgataaggatatcgaaatattttgcaaaaacgcctcccacatccaggtgattcgtgggcgtgatattccacaagtggatggtggtgaagacaccaaaaagcgtctacgactcgagcttaataacgacgaatctctaattcccgtttacctggcttttgaagtcctggatactgtcgtaaccgggattcaggagggaaagtatcaccaagacgccctggacgatgatgggatctggtcttccgaaattggtcgcattctcgctgttattgcagcggacgctgccgttgacgaggcccgaaatcgtgtccttgacgccgcacaggagctgcggaggacaaagggtggcgagctgcacaacatatcctcccttactggcggtttagtggcacaggaagctctcaaggtgctcactaggcaatatgtacctttggataatacgtgcatcttcgacggcgttcgcagcagcagcgccat

SEQ ID NO: 20080 - DNA, 1700 bp, Emericella nidulans
ggagatcgcagaactgatcaaaacaagtcgggattctttttcatcattcgccaaagcaaagacagcaaagctcggtacgttataattatattgcaggtgaatgcgaatgtgacggttagctaatgggtattgtgtagttcgccagttgctcgatttgtttagtgagattccgaacaccctcgatattcagattgccgtcatccgatcttgcattgaatgggccgtcgccgagcgacgatcctttctacggcagaacctcgagactaggttggtggcgatattcatgcagaagcaaagctattatgacgctttaaacctgatcaactcacttctccgagaactgaagcggctcgacgacaagcttatgctagttgaggtgcagctattggaatcgcgggtataccatgcacttggcaaccaggctaaggcgcgtgctgcgctgacggccgctcgcacttcggccgcttctgtctacacacctccgaatctgcaggctggtttggatatgcagagtggtatgctgcacgccgaggataaagatttcaacacctcatactcttactttattgaggccctagaaggctacagctcgctggacgaaggagagaaggcgacagcagcgctgcaatacatgctcctctgcaagataatgctgaatctggtggacgatgtcacaaccctactgggctctaaacaggcccagaaatacgccagtccgcgacttgaggcgatgaaagcagttgcgcgcgctcatgcaaaccgttcgcttgaagagtacgaaaaagcgctctcggattaccggtttgaactaggaagtgatgccttcatccgtaaccacctccgccgactttacgacgccatgctggaacagaaccttatcaaggtcatcgaaccgttcagccgtgttgaattagaccatattgctaagatggtgggtttggatacacagcaggtggagagaaagctctcacaaatgatcctggacaaggtgatcattggagtgttagaccagggcgccggatgcttgatcgtttacgacgagactgagcgtgatcaggcttacgatgcggcactggaaaccattgcgagactaagtaatgttgtggagtcgctgtacactaaccaggcatcgcaactggagtaaggctatctagacgtttcgtgggatcttttgtttctgtactccagaaatgacataagttagagacatgatcggcacatcgaaaactcatggtctacatactcaaattgcatttgtaatttcgtagcacccaggggtttgatcttgaccttggaggattgatattgtccaaaacgggtaaagcgcgatcgcgactcagcgaagtttggaatccactgaagactctcagtcaacggcctccaccgcattgggctggctctgtctcttgaaattaccgtgtcgcaaatatcgaatacagatttcttcggctttccggataaattgccaatcatgaacgctccaccaatgccgccgggctacggacgagcctatccccagggcgtccaacggtctcctgccacgcctcgtcgcggaccccaagctccaggttcgttcagtactctctgccatgcactgaaccccggcgcgtaattttctcatatgtaatagtatctaaccctggtgcttgattcttaggccctatgcccgtcccaatgcctcaacacgccgtgcctcctca

SEQ ID NO: 20081 - DNA, 1702 bp, Emericella nidulans
ttgagttactgctctctagatagcaccactttgctgactagccaaatctagacttcgaagatcagacccttggtgtcgggcgccatcctccgaaatgtcacctttgataaggctcgttacgaatctttcatcgctctgcaagacaaactccaccagaatttggcgaggcaaaggacactcgtctccattggtactcatgacttggacactatcaagggcccgttcagctatgaggctctgccgcctaaagacattcgctttgtgcctcttaaccaaacaaaggagatggacggagaggagctcatggccttctacgatgtatggcccactgtgtactgagctggtccggatgctaatactgctacagaaagacaagcatctaggcagatatctccacatcatccgcgattccccggtttaccagtcatctacgacgccaacagaaccgtctgctctctccccccaattatcaacggagagcactcgaagattacgctaaacactaagaatgtttttattgagattacagcgctcgataagacaaaagtggaaattgtgaacaaaatcatggtttcgatgttctcgcagtacacatccgagcccttcacgtaagaacccatgcattcctgtgctcaatttaaaggtttcgggagctgatctcgctataaacagggttgagcctgtccagattatctctgagcacaacaacgagacgagagtcactcctgacattgcacctcgaactacacaggccgaagtctcgtatatcaaccagtgttgtggcttgcagctctctgcggaggagatttgtagactcctgacgaagatggcatatgaagcgacaccgtctagtacttctcctgacttaatcgacgttcacattcccccaacacgtgcagatatccttcatcaagcagatatcatggaggatgttgcgattgcctacgcgtttaacaatctcccccggtccttcccaagcaagtcaggcacggttgctcagccgttatcgatcaacaagctttccgacatcattcgcacagaggccgcaatggcgggttggtccgaggtgctgcctctgatcttgtgctcccatgatgagaactttgcctggcttaaccgcacggacgacggcaacacagccgtcaagctggcgaaccccaagacacaggagtaccaggtcgtgcgcacaagtcttcttcccggtcttttgaagactatccgcgagaacaagtctcactcagtgcccatgaagatcttcgaggtcagcgatgtcgccttcaaggatctatcgatggagcgtaagagtcgaaacgaaagacactttcgtgccgcatggtacagcaaaactagcggcttcgaggtcgtacacggtttgcttgaccgcatcatgtcaatgctgaagtccgctttcatcatcggcgaagagggcctggagaacgccgcagtcaaggactcgcagtactggatcgaagagctggacggtaagtcttcctcatttacaagactcaaaggtccctctagtcactgatataacgatacagacccaacttatttccacggtcactcggcctctatccacgttcgcattgccggcaaagaccacaccatcggtacttttggtattctgcatcccactgtgctggagaactacggtctgaaataccccgtcagcacgcttgaaatcaatatcgaaacattccta

SEQ ID NO: 20082 - DNA, 1714 bp, Emericella nidulans
  unsure (1)..(1714): unsure at all n locations
tcgagcgctgcttccagcatttaaatgactttgctactgagggattgcggacgcttctatatgcccaccgattcttagacgaggccacatatgcggagtggagatgcgcttaccaagaagctacaactagtcttgtcaatcggcaggaacggattgaacaggttggccagcaaattgagcaacagctcgaattgaccggtgccacagcgatcgaagataagctccagaagggcgtcccagagacaattgacaagctacgccgagcgaacattaagctatggatgcttactggcgacaaacgggagacggcgatcaatgttggtcactcatgctgtctggtcaaggattactctagccttgtgattctggatcaagaaatgggcaatgtggaagagtccatttcgaatctgacaaaggacatcttgaacaaaacagttgctcactccgtggtcgtgggcgatgggcagacgctctcaatgattgaaggggacgagaccctttgcgccgccttcttcaaacttgccattcttgtcgattcggtgatttgctgccgtgccagtccgaagcagaaagcttttctggtcaagtcaattcgccggcaggtgcaagattcggtgactctggcaatcggcgacggcgctaatgacatcgctatgatccaagaggctcacgtgggtattggtatcacgggtaaagaaggtcttcaggctgcacgtatttccgactactcgattgctcagttcagattcttgctgaaattgcttttggttcacggccggtggaactacatgcgagcttgcaagtatactctcggaacgttctggaaggaaatgctcttctatcttactcaagccttgtatcagcgatggaacggatacaccggtacgagtctgtatgagccctggagtcttagcatgttcaacaccctctttacctcgctcgccgtcatcttcttaggcattttcactaaggatctctctgcatcgaccctcctcgccgttccggaactctacaccaaaggccagcgcagcgagggcttcaacatccgcctctaccttggctggacattcatagctacgtgcgaagccatgctcgtctactttgtcatgtacagtcttttcggcaacgtcactcttcaccacaggcaacatcaancgatatcttctccgcgggtcttctaaccttctccgcctgcgtgatcatcatcaacacaaaactacaggttctcgaagtccacaataaaacatacctctccttagcggtcttcatcatctctgttggcggctggttcctctggaacatgattctctcaagacaatacgacttcaaatcgggtgacggcatttaccatgtccctggcaacttcctgctccactctggtcacgatctctcattctgggttgtactacttataaccgttaccgcggtcatcatcttcgagatcatcgtcgcctccctccgcgcgaatattttcccgactgatgtcgacgtcttccaggaatatgagaaggatctggatatcaggaaacgcttcgaagaggccgctgcgtcagagttgcagcagggatgggaccatggcaagaagaaatcaagcttcgaaatcgcccgcgaggaagcggagatggaggcgcgcgagagacaggttgctgagctcctggctaggccgagagttatgagcgatgcggctaagaacgattcttcgcgcggcgttggt

SEQ ID NO: 20083 - DNA, 1714 bp, Emericella nidulans
tcctagggttgatcctttaacttctgtttttttttgcttacaaagactaataataccagctactcggtatcgaatctccccgattctctgatatgatgcaagactatatcaccggtctcgtcgtcggcgccccgtacctagcctgcgcaatcatcggctgctggctgaccgagccgatgaatcgatactttgcgcgacgaggaacgatcttcatctcctgtgttatcgccgccgtggcctccgtctgggaaggtgtagccaactcctgggtcaacctcttccttgcccgctttgttctcggcctcggcattggttccaagtcctcaacagtgccggtctatgcggccgagtgttcaccggcacctattcgcggcgcgctggtcatgcagtggcaaatgtaagtaccacgaatagttaggatgcctgaccattctaacgtaatctaggtggacggcattcggaatcatgttgggcaacatcatgggcgtcgcattcatgggcgtggaggaagacctaagctggcggcttatgctcggtagcaccgtggttctcccaatcatcgtttgcttccaggtctacttctgcccggaatcaccccgctggctgattgagcacaacaagatacccaaggccttcaagtccttccgcgttctgcgcaacaccgacctccaagccgcccgcgatctgtactacgcgtatgttggcgtccaactcgagcgcgagatcaacaaagggaagaacttcttcaccatgttcctagagctattcactgtcccgcgtaatcggcgcgccacgctagccagctggatcgtcatgtttttgcagcagttctgcggcgtgaacgtgattgcttactactctaccagcatatttttgaattcgggatacacggtacaagaagccctgcttgcgtctatggggacgggcattttgaactgggtttttgccatcccggcctttctcaccatagacacatggggccgacggaacctcttgctcttcacattcccgtttctttccatatggctcctgtgggcgggtttctcgttttggatcgagtcgaacatccccactagtcgtaaacgagtggccatggtcacgacgggaatgtacctcttcgaggtcttttactcgcctggcgaggggcccgtgccgtttacctactccgccgaggcgttcccgctgcatgtccgggaggtcggcatgtcttgggcgacagccacaacgtggtgcttcaatttcattctgtcatttacttggccgatgctggagcgggcgtttaaaccgcagggtgcattcggctggtacgccgcttggtgtttgattggatggtggctggttttgctgtttgtgccagaaacaaaaggtacctccatcaccattactgaccttatcctcacaaatgagtacattctgacacacttagaactcacccttgaggaactcgaccgcgtcttctcggtgaaaacgcgccgccacgcaaggtaccagctccgaaacgccgtctggcatttccgcacctgggtgcttcggcacaaactcgagccgatgcctaaattgtatgaggagccggattcgccgaccacgccgtcaccaccggatgtggaggtggagcccaaagtgcgctcagagaatgtggagaatgtcggtgcatagctgggcaagaccagcacgaaacagaggaggacagaatcactaacagggcggggtcggc

SEQ ID NO: 20084 - DNA, 1716 bp, Emericella nidulans
cagacaagtgctgctccgtcccggtcggatcggctgcggcggtaccgatcgaaacttcaatcagcattcttcctcttcccgcacaaggtctatcgccgcttcctcttttctctccttcactctcctctcttctaccttccaatcctcttgtttgccgttgactttggggtactgtcaaaatgtttgctgccagaaacttcgctacccctgcccgccaatgcctgcgctcaacgcgtgtggcccccaatcttgcatctactcgtctgcaggtaaatgcagcgccgtccgcttgcgatgaagtcaagtgttcgtcaaatcgctgacttttgtctagtttcgctgctattccgccgctgccgacgagcgggttgctaagttcaagggacagaaggacactgatgtatgttgggctattttgacacttctcttttcttttttcgctcttgaagctttgttccgaatatcggccatttctcaactggcgatgctatgaacgaatctgggaaacaatatcctattcttggattgctgctaacctgatattcgcttggttctagggaaaatacacggtcactttgatcgagggtgatggcattggacccgagatttcccagtctgtcaaggatatcttctccgccgcaaacgtaacgcttcctctcgtcgtcatctagctgcgatgctgttatactaagtcgcccacaggcccctatcaagtgggaatccgttgatgtcacccctattctcaaggatggaaagaccgccatccccgatgctgcgattgacagtgtccgcaagaactacgtcgcgctcaagggtccccttgccgtacgtaaagccacgtccgtcgcaaagcgcattgctaaatcacgtccagactcccgttggaaagggccacgtttccctgaaccttacccttcgtcgtaccttcaacctcttcgccaacctgcgtccttgccggtcggtcgctggttacaagaccccctacgacaatgtcgacaccgtcctgatccgtgagaacaccgagggtgaatactccggaattgagcacgtcgtcgttgacggcgttgtccagagcatcaagctcattactcgggaggcttccgagcgtgttcgttcgtcgctttccagtatgctcgctctatcaacaagaagaaggtccgtgtcgtgcacaaggcgaccatcatgaagatgtccgacggtcttttcctcaacactgcccgtgaagtcgctaaggacttccccgatgtcgagttcgatgcggagctgctggacaactcttgcctgaagatcacgactgaccctaccccctacaacgacaaggtcctcgtcatgcccaacctgtacggtgacattctttccgacatgtgcgccggtctgattggtggtcttggtctgaccccatccggtaacattggtgacgagtgctcgatcttcgaggctgtccacggttctgctcccgacattgctggcaagggtcttgccaaccccactgctctgctcctcagctccatcatgatgctgcagcacatgggtctcaacgagcacgctagccgcatccagaaggccatcttcgacactctcgctgagggcaaggtaagtatctcgacaacctataacttcgttgatacttttaactaacttctttgtagactctcactggtgaccttggtggtaaggccaagactcacgagtatgctgacgccatcatcaagcgcc

SEQ ID NO: 20085 - DNA, 1717 bp, Emericella nidulans
ccctctaatacccttacatgtcattcctacacagcaagtactcgacctgctaagcttttcaatatggaagatccaagcagtttaccatcgttgtatccgggactctttgttctatttcttctttactttgcaggagatctcatcgcaacgaggcgtgccgcacagagacaaaaagaccaccctctcgtgggtagcccgtcgtggtggacgcctcgcttcggtctaaaccttgtgttcgcagctagggcggttgagatattacagacaggttaccacaaggtaagagcaactccgttattgaaaacctcaacaatgagttgtgcaacggggatctgacaaccattgttggtctgtttagttcaaaaaccgcactttccagctcatcagaggtgacggtagtgtggtgattctgccgctgcatttgatcgatgagctatcctcactaccacaatcagtggctagtagccatggagcacttgaacgagacctcctagggcgctacaccggtctcgatattatcctcactagtcgtatgcatcacaccatcgtccagcgaaagtcacaccccgtcttgcagcgcttacaccctccctgcaagacgaagtgtcgttagctgtgcaagaagggtttctcattctactgaatggacgattgtcaaaccttatcaaattctagcacaggttgcagcgaaaatagctgcgcgggcaatggtgggaccatcattttgtcgcgaccctagatggctagatatctcagtcaactatactgaaagctgtgagagacctcaaaactccttggaagaataagcagaggtgctctggctaatccaacgcagtattcaggacgatcgttatcctgcgactgttccctgggtggacacatccagtattgagccgctgtctgccttcttactgggcgggcaagcgatatctccaacgcgcaaagggtatccttgggccgaagatcgacgaattgatccgtaggaatgataccggagagtggtctcccgagcggactgaaagcgactttaatgtcctttgctggctggttgaggcagccaagggtcgagatagaaacgccgaaacactcgcccatattgaggttctccttgccttggctgcggttcatacaatcctattacggttggtcaatgtgctatatgatcttgtagcgcaccccgcgctattcgaggagctaaaggaggagattcaagatatcggttttaatgaagactggaattttggctcatacaataaattgcgcaagcttgacagtgtgctgcgcgagtcacagcgcctatctccccccacaatcttggggctgaaacgcctctttctccagccctataagtttacctcgggcattactgtgccggctggaacgtatgttgccctcccggtgatggcaatcgaaaacgaccccttgcacacggacaacccggaggaattcgacggcctacgcagctatcggcgcatcgaacagaagacggcaagcatgagacccaatcccaaagatggcccacagttctcgacaattgaaaagacagtactgggatttggctacggcaagtcagcatgtccaggtcgctactttgcaagtctcgtattgaaaatggtctttgtcaaactgctaactgaatatgatttccaattcttaccgggtagaagccgaccgaagaactatctggtgcatgaatttcttttcccatggccatggg

SEQ ID NO: 20086 - DNA, 1717 bp, Emericella nidulans
tgcagacccgaggcagtgttcccgtattttgggcagaggtcaacaacctaaaatacacccccaaactccaagtgcgcggagtggaaaccgccgtccaagccgcacgcaagcacttcgccgagcagattagattgtatggtgataattaccttgttaacctcgtgaatcagaagggaagagaggaacgtgtcaagaatgcctacgagcagctgattcgtatcctggtgtcttcaccaaacgaattgaccgaggcggatgatgaatcctcggagaagctacatgtcctggagccggaccatccacaaaaggagatggatcgtctccattacgtctactttgacttccataatgagacgaagggtctcaggtggcatcgtgcggactgctaatggatcgccttatcaacggcctaaaccagggcggttatttccgcggcctagaaaacccgggtgctgctggtgggcagctcgaagcaagagccctccaaagcagcgtcgtgcggacgaactgcatggactgtttggatcgcacgaacgtcgtccagagtatgctcggtcgctgggctctaacgagacagctcacggaagcgggagtccttcgtcccggagaagcggcaaacgatgatcaagagttcgaggacttattccgtaacatttgggcggataatgccgatgtagtctccaaggcatattcaggcacaggcgccttgaagactgacttcactcgtactggccaacggacgagagccggcatggttcaggatctgagcaactcaatcactcgttatgtgcggaacaacttcctagatggcccacgtcaggatgggtttgatgttttcttgggggcttatcttcccccggaatcaactctgggaaatctccggatctttgtcgatcgtcggccgctcatcatccaatctattccatacattttcgccgcgggcctctttatgatcattattgccctattcacacgacgactccccgatgcagccgtctggcccttgcgcttattcgtcgttttctggctgctaatttctggctggtgtgctcgtttcatgcttgcacacgggatgctctatgtgagtcggtgaactagatatatactcttaagactgctaacaagatgcttcccaggtaaactggccgaagctcaacacgcccgccgcgggctcagaaggctatcaagatgcgcttatcaaggctcgctctgatccagtcatcgggcaactccttccatccagaagacaccagagaggatatagcaatgctcgccttggtttcctggaagaaggaaagaccaggatcgagtagtcgtatttcctgcactcatacctgcattcttccctttgccccttctttctttcatctagtcccgtgctttggactcgtcatgctgggcatattttgcatccattccctttctcttggcttctattattattcttcggtgttttcccccctctttattaattcgtcttttagtttaccggtttccggagttatattatacgcgtagaagtgtacaacaccattcttttttacatggcagcacttttaatggaaggctacgaatcgtataactgccaacatgcacgtacactacattaaattaatactgcgaagtgggtgtaactctcagtactcttaagtcacgtgatatcatactccgggactcttgttctgcttagagttgatcgagtcaatgcagcccctcc

SEQ ID NO: 20087 - DNA, 1718 bp, Emericella nidulans
cttatatgatacaagtgaggctgacagtgattgtgcaggtagacgtatgagctcattttcgactagcgaggtgttcacaattaatagaggcatagtggcggcttctacctatgttggtagttttgtatctgttcgcgtacatcgacaagacaaacattggtgaggacaagcagactggttaacctatatggatctgatattttaggaaatgccaaaatcgaaggtctcctcccgagtttgggaatgagtggagggcaatacaacattgctttggctatatttttcgtgccctatgtcctcgcaggcacgtcttctgtcatatacatgcaaactccgctaatttagctgcagaggttcccagtaatatcatcttaaaccattgtaaaaggccgtcagtctacttgggcacgttgatattcgtctggggtgtgattatgctctgcacaggctttgtccaaagcttcgacagcttacttgcgattcggttcctgctaggcctattcgagtttgtcccctggcggtaaaggcatgtgaatactcttactaagtcttaccaggtccggctttctcccaggcgcagtcctcttaatttcgaaatggtacctccccggagaaacgcaaacgcgcatcgccatactctacacctccgctgcatccggaggcgccttctccggtcttcttgcgttcgctattgccaaaatgagcggtcttgctggctacgagggatggcgatgggtaggtgctctgctcccgtaggtagtctgtggactatagtaatccgagtgcagattttcataatagaaggtctagccaccattgttctcgcaattctgaccttcttcctcctccttgactccccctcgctgtcgtccagctggctcaccccctctgaaatacgcttcctcgaactccgccaactagccaacagcgtccaaagtccgcacaacagaaaaagcgttaactggtcagccatcaatagcgtcttaaccgattggaaaatctacctcctcatccttggaagctggtctaatgcggtccccaattacgcgatgaaattcaccatgccgcagattatcgccggcatggggttcacctcggccagggcccagctactcaccatcccgccttatgcactcggcgctttctcagcatttgtattctccatctttgcggacagatacacctggcggatgccgttcattgtcgtgcctcagctagcgcaagtcgttgcctttagcatactttacacacatgcggccaacatcgaagaaaacatagcgttgtgttatttcggcgtctgcttagcctgcttcgggtatcatccatccatcctattcttaagagctaatctgctaacatttccgactgacagcatgtaccctatcctccccggtgtcaacgcctggaacgtctccaacacaccgcaccttgccaaacgggccgtggctatcggatacctgatctgcatggggaatgtgggcggcctcatcggtagcttcatctacaagcaggacgaagctccacggtatgtgactgggtacggaaactcgttcgcctttgccgcggcgggaatcgttgcgtgtcttgttcttgagtttgccctctttaggttgaatcgaagcaaggagcggtttagtgaagatgaggttagagaacggtacactgatagtgagctggaggagatgggggatagaagtccactattcaggtatacgctg

SEQ ID NO: 20088 - DNA, 1719 bp, Emericella nidulans
atgaccatgatagatcttaacccggacttgtccttcacagctaaaagtgtggcccttttgcttttcatcgcactgggtctcctttataccaccatccaggtcgtctaccgtctctatctaagcccgctatcgagatttcctggcccgcgccttgccgccgcaacaggctggtacgaggcgtactttgagctcgtccacaagggtggcggacagttcctgtttgagattcgacggatgcacgaggtttatggttgagtacgcggaatcagatagcttgactcttgtactcaccagcacctcacaggccccatcgtccgcatcaatcctttcgaactgcacatcgccgacccggcctactacagcaccctctacacctccacactaaatcttgacaaagcaagtcacatccagcaccgcttcaacgcgccaaccgccgccttctcaacgcccgaacatgcgctccacagacgccgccgcgccgcaatatccccgttcttcgcgaagcgccgcatcgacgagcaggcgcccatgatccagtcacacgtgaacgtgatatgccatcgtctaagtgaggagtacgcaggcacgggcaaagtgctctgcgtcaacgagctatacggcagctacgtgacgggtgtgataatgacgtacgcgttcaaccggtgcccgcggttcctggaagaagaggacttcgtgtccgcgtttgggaagagcatccaggggctcaaggagtttgtgcactgggcgcagcagttcccttgcctgccgcggatcctgcagaacgtgtcgccggtgctcatgggcgcgctgttcccagctatgcaggcgagtctggtgtttcaggaggtaagctttacactctctccattcaaatattctgctgctggcggactgacaccgggaaggaaatgcgcatgcaagcacacgccgtcctttcaggccacggccaaaagggcaccatctttcacgacctgctcgcctcagacctcccccgctccgaactcaccctcccgcgactaaaagacgaggccatgagcatcgttggcgcaggtattgaaacgaccaagatggccagcgtcgttacgacattccacatcctgcagaacccgcgcatcctccaaaaactgcaggacgagctcgacagcgcgatccccgaccccaccgctccgccgtctctgagcgtgctggaaaacttgccttttctcgccgcttgtatcaaggaggggattcggctgggctacggcgcaacggggcggtctccccggatctcccgtacggaatcgctacgctatggcgcctggagcatccccgtgggcgtcatggtcagcatggatagctaccacatgcaccatgacgagagtgtgtttccggatagttacgcgtttgtaccggagcggtggctggacggggcaagggggccagatgggacggggagcctaaataagtatctggcctcgtttagtcgcggcacgcgcatgtgcgtgggcattaacctggcgtacgcggaaatcacaattgtgctggcgaggctgtttcgcgggttcgtgatggagctgtatcagactactaggaaagatgtggactgttatcgggatttggtggggatggaggttgtgagggggagtcggggggttagggttaaggttgtggggaggagagagtgagttctttggcttgttctgatatggctgcgttccactattgactatgtatgagtta

SEQ ID NO: 20089 - DNA, 1720 bp, Emericella nidulans
cgactgaagttgctctgcgggttttctctatgcggtttgggtatgagaagcaagatattgttcggaataggggtctccaacttcacaccgaattcacttttgactcttcagtcaagaagatgacggttgtttacaccaataaacaaactggactcaacgaagtctattctaagggcgccccagaagcgctcattcctagcctcgacattattgacgaggaaaaggaagtaattcaagatacagctgagagactggctggagaaggacttcgcgtgctttgcatagcgtacaagaaatctcctatggacgacgagtcgcaaatatcttctcggaatatggccgagtctaacctaagatttgctggccttatagggctgtatgacccaccgcgccttgaaacagcagcagctgtccgcaagtgtcagatggctgggattacagtccatatgctcacaggtgaccatatcagaacggcgatggcgattgcatcggaagtgggcatcctcgacccgatcgttaatgcaaagtcgagccgcctcgtcatgacagccaaggaatttgaccgtctttcagatgccgatatcgacaagattgaacagctaccgttggttatcgcacggtgcagccccaccacaaaagtgcgcatggtcgaagcaatgcatcgacgaggggcgttctgcgttatgacaggagacggtgtcaacgactcgcctgcgttgaaacgtgctgatgtaggcattgctatgggcaagaacggtagcgacgtcgccaaagaggcagcggatatggttttgacggatgacaattttgcttcaatcgtgaaagctgtcgaagaagggcggcggctctttgacaatattcagaaggtattttttacctgtgggaaattggacacggctaacttgattagttcctgatgcacttgttgatatccaacattgcacaggtcattctccttctgattgcgctcgcttttaaagacgaggcggaaactcaatcttccctctgtcgcctctggagatcctctgggccaacttggtaacttcctcgtttctagctctagggctaggtttggaggaagcccaaccggatatcatgtaccgcccgccgcatgatttaaaggtaggcgtcttcactcgcgaacttatcacagacaagatggtatacgggagctttatgggctgtctctgccttgtggcgtttgcgagcgtcatctacgtccggcacgcaccgcaagcatgggagacgactgcaatgagggatggaatagcacctgcggcactgtcttcgaagcacgagctacgacttacgcaactcttacttttctgcttctcgtcacagcatgggaagtaaagcacttctcgcggtcgctattcaacctcgatccagaccgatacccgggcaaactctcagtcttccattcaatctggcgcaaccagttccttttctgggctgttattgcaggattcctcatcgccttcccagtgatatatcttcctgcggtcaaccgcgtggtcttcaagcatcaaggtattagctggcactgggggattgtttttggctgcgttgcggtttatctgacacttgtggagagctggaaagcaatgaagcgacgctttgggattgggtctgggaagaacgcgacgctgacgatggccgatgcggagatgagggctggattgaggagcctgacacccatttccctgagtgccaacgccag

SEQ ID NO: 20090 - DNA, 1721 bp, Emericella nidulans
ggccgctttgagtggaacccgataaggtaaggcttggtaagaagcttacgaatggccacgctgcctcagtttcaccatagtcacatcctcctctaaacggagtattcttcacttttcttcccactaatatctcccctcgatctgcttcacttttgtatcactcgtgcttttgctggttcttccttttttccggcagtatatacattgcgctcgcggcgctcacgaagcgggagttctggtccggcaccgtgtttgactaccgttatcaatgagtccttgaaacctccaatcgagttccctgaactattacctttcactacgccggcgatctcctgctcatagaatgggtcttttgtcattccgccaaccctcttggaggataagccgctcacaattctatccaatatgggcattgtcacaactcctccttaatcccatcgcagttttagctcagtctgcagccgactattatgtggaatctttacccgggccccagagggcccgttactaaagatgcatgctgggtgagttttacaccgagcccttttcccgcgtcgatgcacggttaaccctttcttcccccttcaagacatattgaggtagacccggagcacaacggacatctttttttctggcactatcaaaatcggcacattgcaaatcgccagcgaacaataatctggttgaatgggggacccggctgcagctccatggatggcgcgctgatggagattggcccgtaccgtctgaaagataacgaaactctagaatataacgagggatcatgggacgagttcgcaaatcttctctttgttgatcagcctgttggaaccggtttcagcttcgccaataccaatagctatctgcatgagctagatgaaatggctgcccaattcatcactttcttggagaaatggttcgccgtgtttcccgagtacgagcgagatgatgtatgtccgaacttagatgtctgtcttatgatgtcttctaagctgacttgcgggacctgacagatctacatcgctggcgaatcatatgcgggccaatatattccatacattgcaaaagctattcaggatcgaaacaaagacatccacgaaaagcaatctagcagtgcgcgttggaatcttcgcggtcttcttattggcaatggttggatatcgccggcggaacaatatccggcgtatttgagctttgcctatgaagaaggtcttgttgaggaaggtagcaagcttggaaaagagcttgaaactttactctctatctgcaagtctaagatggaaactggacctaaaatatccataacggactgtgaagctgttttgaataagcttctggacaagactgtggattcgaacaaccaatgcatcaatatgtacgatattcggctcagggacggttcttgtggtacgacctggccaccagacttggtggatgtgaagccatatttacatacctatgaggtgattcaagcattgaatatcagcccagagaaagagtcaggctgggacgaatgtgacggcaatgtgggggccgcatttcggccgcaaaaatccgaaccatcagtcaaattgctccccggcttgctcgagtcgggtatcgaaatcctcctcttcagcggcgataaagatctaatttgcaatcacgtcgggactgagcaacttattagcaacatgaagtgggcaggtggtactggctttgaaacatccccgggggtatgg

SEQ ID NO: 20091 - DNA, 1721 bp, Emericella nidulans
tggaacggtggcggatggatcctccctgtgttggtcggtggccaacaagtctttttaaacattgacaccggctcctctgacctgtgagtgcctaacctcgttgttgcgcataagaatatggtactaattttgaagctagttggacagcaagcactttgatgcctgaggaccagcagaataccgttactcgaggatccgtgtataatcctaacaacagctcaacgtcacgagaggttgagggatacacttttggcctagcctatgcagacggatctggagcttctgggcctgtgtacagggataccgtcaacattggcggcgctatcgtaccggacttcgctcttggggtctgcgatgatttgcggtatggcgaaggcagcgacggcactcgcgacactgctggaccagtcggtttagggtttggcaaattgaactccattcgacccaacccgcaatgcaccttcatggaatgcttagagccgtacattcaagaacccattttcggcacagcattcaagctcaacagcactgggttcattaactttggctatgtagactcagaggcgtacactggtcccttcactgaagttcccgttgccaacactagttcgggcaacgaaggccaatggatgagcctaggtgtcagttttggatcaggaggtgatctcttcatcgccgacccgcttgacatggactttgactctggcactgcttctctatctgtttcgtcggacatagctgctgcctactgggcccttgttgagggtgctgatgactcctccggttcttgggaatatccgtgtggtactgagctgcccgatctcgactttgtcttctctaatgtcacccatggtcattccactgtgacgattcctggtaagaatctcaagaatggtgatggtaccacgggcatgtgtggcacctggatggatgtagtcgatggacgtggcaatgctggtgtcccattctacatcagcaaatacattgtctggaaccaagcgaagcctagcatgtctttcgctgatcaggccaattgatagcaggaaggcatcctccggcttgttgctctgcatacttctatatactctgctatctaacaactcacccatctcttatatatgcgcgcgaaaaaaaaaagccttgtatcattgaaagttcaaagcgtaatttgaagtccgtaaattaagtgtcccgacgtgctctgcagaggacactcgtggcctgaggtattaacactaatcctcttttgtcgggaagtggccaacgcgaccccaacgcgactcagattccgagatccatgcagattcattcattgagctcggtttgaaaaatcaagaaaattccacctcaacaaaacggctttaaaaagcctctcatatcaatttctctcatcgcactactccgaataaacaaccccccacgtcttcgttctctctgaaccgcgcggtcgtgaatcgagagctcctccaacatgtgtgcttcaccgaattcgtccgtccgcccaaaatgctgactgtgattccagggagagctttgacaacatctacctagacctctcaaatcagcctggcaagtgcaaacttgctgaaactgggctaggttggcgaccttctggcggcggcgatactttcacactcgatagcagcaacattggcgcggcacaatggagcagagcagcgaaaggatatgagctaaagatcttatcgcgttcatcgggtgtt

SEQ ID NO: 20092 - DNA, 1723 bp, Emericella nidulans
ggcgaccagaagcccggaacgtacgtcaatgcactctgttttcctgttgacgtgtctctaacagcggtttttcagctctggcctgcgaaagaaggtcaagatcttccagcaagagaactacaccgagtccttccttaccagtatcttcctctcgatccctgagggcgctcaggacgctttcctcgtcattggtggcgatggtcgctactacaactccgacgtcattcagaagatcgccaagatcggtgccgcctatggtgtgaagaagctcatcgtaggccagaacggcatcctcagtaccccggctgccagcaatctcattcgcaagaggaaggccaccggtggcattctcttgacggctagtcataatcctggcggtacgacactcctagacaccgagtgaacttctcagctgactggataggccccgataacgactttggtatcaagtacaatctcaccaatggcgcgcccgccccggaacaggtcaccaataagatctacgaggtctcgaagtccctcacctcctacaagtacatcgacctccccgaggttgacaccaccacagtcggcacccgcagctatggccccctcgaggtggaagttgtccactcgaccgaggactacgtctccatgatgaaggagatctttgacttcgacctcatccgcagcttcctcaagaagcaccccgatttcaaggtcctcttcgacggcatgcacggtgtaacaggcccctacggcatcgatatcttcgtcaacgagctcggccttccctccagcagcaccatgaactgcatccccaagcccgatttcggcggcggtcacccagaccctaacctcgtgtacgcgcacgagctcgtcgaggccgtcgacaagaacggcatccacttcggcgccgcttctgacggtgacggtgaccgcaacatgatctacggcgccaacaccttcgtctcccctggcgactctctcgccatcatcgctcaccacgcaaagcttatcccctggttccaaaagcacggcgttgacggcctcgcccgctctatgcccacctccggcgccgtggaccgcgtcgccaaggcccagggcctgcagagctacgaagtcccgacagggtggaagttcttctgcaacctcttcgacaacaagaagatgtccatctgcggcgaagagagctttggtaccggctccaaccatatccgtgagaaggacggtgtctgggctattgtcgcatggttgaatgtcatcgccggcgtcgccgagcagaagcccaacgaaacacctagcattgcttcgatccaggctgagttctgggaaactgacggccgcactttcttcactcgctacgactacgagaacgtcgattccgacggcgcgaacaaacttattgccgcgctgagcgagaaggctgtcgacaacaagagctcatttgttggcagcaccatctctggccgaaaggtcgttgactctggcaacttcgcctacactgatcttgacggcagcgttaccaagaaccagggtttgtatgttaagttcgatgacggcagccgtctggttgtgcgtctgtccgggacgggaagcagtggtgctaccatccggctgtacgtcgagaaatatgagggcgataagagcaagtaccagatggctacgcaagattacctcaaggataatgttgggttggcgctggaattgctcaagtttaaggagtttgttggccgcgaggagc

SEQ ID NO: 20093 - DNA, 1724 bp, Emericella nidulans
ttgacaagtctcactattgggtatgtcggccatatcacatactcagtacgacatgtaatagctaacgcccacggaaacgaagacttgctattgccgtatttctctcctcgcttgacgcaattatcgtcagtacctctctggcagccatcgcggaggacatgcaggcttttgacaagagtagctgggttgtttccagctatctgacaacctacttcagtacaatccaacgcgtgcatcgcaagaagcatgatactaacgctaccaggtttcttaataatatgggcaaactttagcgacctggtaggacgcaaggttatgctcatcactgcactcgtcatctttcttggcttctccggtggctgcggcggggctcaaactatattgcaattgtaagtaaagactagctgaatgagactcttctaacagaagtctttgacagaatcatcctacgtgcgttccaaggagccggcggcgcaggcatattcagcatggtgcccatcattacagcggaaatggtgcatcccgacaaatatgcggtgtacaacgccaacatggcattttcaatcgcattgagctttcttctcgggccgctcataggcggtgccctcgtagaccatacgtcctggcgctggattttctacataaatctcccccctggtgctgtcggtatcttactggtatggctttccatgcccggtgcgtttcctgatctatcgatgcctacctcactctggaatctcccaaagaatgtcgacttccataggagggtagattaccctggtttcgggcttcttctggctgcatccattttcctgattgtggctattgaagaggcggcggtgttgtatacgtgggataatgccgtggtaattgtgctccttgtgctgtcctttgttctggtttgcgcctttctcacctggatctggttccttcaccgcagcgactctttcagagagcccgtctttctctgggaatttgtcaaaaacagggtatttatgggaacgtgcctgtacgtggccctccctaacaagcataagagatgagagcatactcactaggaaataaggatgaccctcctctctggtgttcctttggtaacgctcgtccttgaactccctggccgctttcagatcctcaacaacaactcagcctttgattccggcattcgcatcttaccactgacattgacaatcgccatatcgtcagctttggcaggaggactgaccgctcgaggccgcgtacccccgttggtcgtgttctccgccgccgccgcattgcaaatcgtcggactgggcttgctgtactccgttcccacagactcaccactgagcgcttctctatacggataccagaccctcattgggacaggcgtaggcatgagtcttgcaactgctatattgacggtcccgtcgctcgttagggagaacgggatgtgtaagtgcccgctcctccccctataccaagatagaccccatacttgctaccccgactaattgtaagcagccggagcactgggaagtatagtgcaatttcgagtcctcggcggcgcagtcgggctatctgttgccacgaacttgctcaacaatgctgttcaagaccgactccagggccagattggtcctgatgtgcttcatcgtatcatggaagatatttcctccatggtatctctcccagattctactcagatgtctatcagggatgcctttgcggatggctatcagcgc

SEQ ID NO: 20094 - DNA, 1725 bp, Emericella nidulans
ccgcgacgccaggcaaatacctcagctggacaagcgcatacatcctcgtagtctcacgggtcatcggcagcggcatcttcgcgaccccgggctcgatcgtaaagtcatcaggcagtatcgggctctcgcttttgctctggggcgccggaaccgtccttgcggcatgtggaatggtcatatcgatggagtacgggtgcatgctgcctcgttcaggcggcgataaggtatacctcgagtatacctaccctaaacctagatacctggcgtctacgctcgttgctgtgcaggccgttctcttggggtttacggcaagcaactgcatcatctttgcaaagtacacggtgtttgcgttcggcggcgcacccacagagctcactcataagctctttgcgacgggtctgctgaccctcatcactattgtccacggccggttccgtcagacgggcatctggatccagaacgtgctgggatggctgaagatcttcctgatctcatcgatttccctgacggggatctgggtcatcctcctccggccaagtggaattgagagcggtgccggcgctgcatctgcggcaatggatcagggcttgatgaactgggataccctctgggagggctcaaactggagctggaatctcctttcgacctcgcttttcaaggtcctctactcgtatgccggcctgaataatgtcaataatgtgcttggcgaagtgcgcgatcctatccgcacactcaagacggtttgtccggccgcactcttaacatcggcggcgctgtatttgctagccaacctctcgtacttccttgttgtcccgcttaacgagattaagcagagtggagagcttgttgcggccttgcttttcgatcgtctgttcggtccgcgtgtaggaggaacgctgttcccttttgctatcgccgtctctgcggcaggtaatgtcatggttgtcacatttgcgctggtacgtcttatctcactttgattttctttttttcacctccaactacagtcctaaagaaagggagaacaggcccgagtcaaccaagagatcgctcggcagggcttcctcccttggggcgacctcctctcctcatcgaaaccattcggcacccccctctggggcttgatagtgcactacatcccatcaatcctggtcataaccctcccaccgcaaggcgacgtctacaacttcatcctagatgtcgagggctacccgggtacgattttcggtctcgccatcacagtcggcatgctgattctgcggtatcgcgagccgtacctgacccgtccattcaaagcgtggttacccgctgtttggctacggatcgttgtgtgcttggccctcctggtttcaccgtttattccccctccagggcacaagggtgatgtggagtttttctatgcgacgtatgccgttgtcgggaccggagtgtatgtccattcatcttttgcattctcattcttcctcgtaggttccgaagtgatgctgactgatcatgcaggcttgcctttggagtgatttactggtacgtgtggacagtcttgcttcccagatggggcgggtataaactcgaggaggaggagaaggtgctggacgacggaacagctgttacaagattggtaaaggtttgagcatctgtagacattcctactacatttcataggcgtaaactactttactacgggtcattattattttcattaatatgtccatacggagatcgctt

SEQ ID NO: 20095 - DNA, 1725 bp, Emericella nidulans
cgaataaaccgcgtcactactaccctaacagcgaacactaccagcaacaaccaccccaaacacctcctgcctttccgcagccgaacctggcgcggagccctcactactcacacgcaccttcgcccttgccaggcgctctgcctccattgaatggcggcgcacccacgccagcacatccatccgatccttcgccgcaataccaggcacactcagctgcagggactccacagtacccccttccacggccttactccggctccctgttacccgccagtggaacatctccatacggtccttctactccttcacatgctcacccgtccagtcgaccagatagccatgctcatgtgtcgcctaaaaaagagccggagtcacactttgcagtgaaccatggagcgcctgcgtactctgtgatgcgcgagccacaggcttcgcctccaaaggaagctgtacgttcttttcgaccatttatctctctcctcgctgttgccactcttttctttctgatgttaacatgtttcctttcactacagaaacctgcccgtgccgcggaccccatgtcgtttgctagcattctttcgggacccaccgaggagcaagctcctcccaaaatacagtctcctacgcctggactaggtacaattcattcagcggttccagccgccaatgctacaagcctaaaccctccaccggcttcttttcatcctaaagtcggagacattgagcctgttcctcccgtctcggctccacgattggagaagaaacctagcgcggataaacgccaacgtaataccgagaaagaagacctgaaaagcgccgagaatccaaccaacggtgtgacggaacctcccaagattctccgcccacctcgcaggattatgtcagaaaaggagacggaaatggtgaacaaatacatggtcgagatcgataatgcagagaagagtgatgtcgaagccccaggatttgaacaagaacgtgaacgctatattctcaaaggaaagaagcgcgccttagatgttgaacgtgccgagagcatcaggcgcaaggtatgcttttatcaaccctccagccatttatgtctgacatgtatctagcgtcgccgccacgattatcttcttaaactcggaaaatcgtttgagaaacaagctaacgcgggtatggatcggttccgatacgcaaacgaagcctcagtcatttccgaagttcaagcgaaagaaattcaggatgaaaaggaacgcaagaaggatatgcagcggaaacgccgaagggagaacacagtgcgaatggaaatgcagaagaagctcgaagcagagcttaaagcgaatgagacccaggactctgccgagaaagccaaattcttacgggaagccgaacgggcgcaaaggaagattaaaactactaaacgggccttggaaggcgtcactgaacccgaagagattggcgaaattaccccattggctcccaacctggaaggaggtataaccagttcctttcacattggccgaagctctccgtcgaggcgcaaaaccggacgcggtggtcccgttacacggccgaagaagtcaaaggagcagaagcaagccgaaaaggatgctgctgaagctgcatatgccgctatggagaacgacgagcccttgcctcttgctcccagggaagacccacgaaaggagtccctcaagaaggatgccaagggtggtcgctctaaggaagccaccccagttcccg

SEQ ID NO: 20096 - DNA, 1727 bp, Emericella nidulans
acgaacatttgcgccacaccctcctgcaagatgtcgagtcactacgaaaacagggagcaagcgctggagaagtccttgagatagtgggcgatgtgacggacttaaagacgtcaacggcactgatcgatgaagcagtcaagcgctggggaaagctggacgcttttgtcgcgaatgcgggtgttttcaggcaggctgagctgttcgagtataccagaccttctcccactgtgcgagatgcgacatcactctgacagtcatagactcgagcccgatctcctcaaccacagccttgatgtgaatgtgaaaggcaccttctactcgtgccggtccgccgcccgccaaatggtcaagcggggccacggaggctccatcatcgccatctcctcggtgagcgcgctagttggtggtaggctacagacgccctatactcccacgaaggcggcagtactctcactcatgcaatctagggctatcgcactagggaaacacaagatccggtgcaacgcgctgctgcccgggacgatcatcacgcaactggcagatcacgatataaaagatccagcgaagaaggcgtatctggaagcgaggattccgttagggagggttggcgagccggaacgatgacagggccagcagtgttcttggcgagcgaggagatgagccggttcgtcaattggagtggcctgctggaggatgggggaatgttttgtaacctgcagtagttgtaagcatagttgatctgaatgcaattgtccaacaaaccttggtaatcccgaatttgaatataatccaggtcaagaatgattttcacgaccctcacacattattagtgtaggaggtaaatagagctaacagatcctcacgggggcaccaaggagaaagtgcatcctccactttgatctatcatcttcttacttttattccagttttctcttctgcctccaacaatggtcttaggagaatgaacactaaccttgttcgattctcgagtggtcgaaaatctcgtggtcgcggattgcgcaccaagaccggctggtatgtgtcgaatctgctttgtctcttcgttatccgctcgtgtttctatcttccccggttacctacctttcatgactaagaagagaacagtgtaacttgtcgcaagaggcaccttaaatgcgacgaagtcaaacctgtttgcggacatggtcaaagtcagccctcagtgcgactactctcgatcctcctcccaccaccctgccgagcaacccgccgaagacgaggccatccagtcatctccaaacacaaatactacagcccagtttattccttcagtaccagaaacaggcaccgataacgtggctggtgtatcgcctcgcgaacagccggattctgccgtcctttcgtggaccggtcatagccaaccctgccttcatccactcgatcagctagcagccattgtcgcaattgaccacacttctccctttgctaatagccttacagcaccgcagtattctcctgatattccacagtcggtgaccatcaccatcgagtcccccggaccagctataaatgccgcaactgtgcgatggttcgacttactcgccaatgatgctgtccgcgaaacccccagatctcgagcgtattcggctccggtcaagaggtattggaggatgcggatgaatcacagattacacctttacagcgtgccacacgtataggggatcgaacccatcttaatgaagaggccg

SEQ ID NO: 20097 - DNA, 1731 bp, Emericella nidulans
tttgatagaacgagacatacaaacacgccgacaaagacggtcacttccgacgtaaagactcggtctttcgctcctgggtatcagcatcccctgacgctgacttccccgccgaaaaggaccgctatgtgctatacctaaattacggatgtccatgggctcacaggacgaacatcgtacgctccctcaagggcctcgaagacatcatccagctagtcgtctgcgacttcgaactggggtcccaaggctggtttttctccgaatccggacggaacgggtcagcaaagaaagacccgctgtatggatttacgacgatcagccagctctatttcaaagcagacccggagtataagggacgatatacgattcccgtgctgtgggataaaaagaaggagacgattgtaaataatgagagcagtgagatcattcgcatgttctacacggagtttgatcacttactgcccgaggagcggcgcgaagtgaatcagcctggtggcgggctgtatccccctcacctgaggggtgagattgaggcgatgaacgagtgggtatacgaccgcatcaacaacggggtgtataagacaggtttcgctgcgacgcaggaggcatacgaggcaagcctgcacccgcttttcgaggcgttggaccgcatcgaagggcacctcgcccagcccgggcaccagccgtatctctttggggagcatatcacggaggcagacgtgcggttgtatacgacaatcgcacggttcgatgtggcatactacctaatcttcaaatgcaacctgaagatgatccgacacgactacccgctgattgacgcgtggtaccgacggctgtactacgacgagtcggagaagacgcgcggaggggcgtttgggaagacgaccttcttgggccttgtaagtcgacgggccattccatcctggcgcagggacttgacacgacagctgacaatccaacagtacaaattcggctatctggcggcgcttggcaagaaacaaagcgttgatagctcccagctgattgtgcctgctgggccaaagcccgatatcctgccgcgtgacgcgtagatccggtttactatcatccaccggcttattttgagttgtaaacgggaatttgccgtctccttgcagttacgaagccctgcggcttgttagcgtaatgcatagcgtgtggttcgtcatccaattcccttacatggcaaagtaatggcacgtcattcatacggcgactccgtagaagatctttgttagaagatgctgctgcgcttgagcacatggctctgccgtgtcccgagagtatggaagctcgcgcagatcgagcaccatccgaggaggcactataggtgtctagtgaccacaacaccgtattccaaacggcccggcagactttaattgtcagtatacgagccccattccggactatcgaagtcagtaggcgagttaattccgaagacgagacgttggataagtataacttcggtaggataaatgccggatgagtcagtcatcaggcttgtgcggggcgggcagcggggcttcattgatccatacccagtacacagttcagctcccccatccctgagtttggtacgaggcgtctcctgaatcctaactctatgatccgcttaggtcagtctgtgagtgttaactaccccacgagcgaggcagtgcttaaccattcgggattcagagacgaatagagccatatgcacgtctcgctcaagccggc

SEQ ID NO: 20098 - DNA, 1732 bp, Emericella nidulans
gccatgggcggatttgagcattatcggaattgctggcagttccggctctggcaaaacgtctgtggcaatggaaattgtgaagtcactggacttaccctgggttgtcatccttgtaatggtatcatgaacaagcttctcttactagaaatgggccccaatatagctatctgatttatgaggtctaacgcgttgcaggattcattctacaagagcttgaacccggagcagcatgccaaggcacatcgcaacgagtttgatttcgacagcccagactcgattgatttcgacgtcttagtgcagtgtcttagagatctcaaacaagggtatagtagccataatcttttgactcgtgctgcaccagtcgtcgataatccctgctacttttcctggaactgacgttctttgcctacctgaaagaaaaaaggtagacatacctgtttattcgttcgtcgaacaccaacgtcaagcccataccacccccctctattctccccatgtcttgattttagaagggatccttgcattccatgatcccaggattgtggagcttctagacgtcaaagtatgctccccgttatcattagggagattgtcgcggagcttacttgtatttcaagatcttcgtagaagccgatatggacgtctgtttaggccgtagaggtaagtaacccggtgattaacgaccggtagctttctgacggcagccaaatagtcctgcgtgatgtcaaagaaagaggtcgagatattgatggaattatcaagcaatggttcaactatgtgaagccttcgtacaaaaagtttgttgagcctcaaagatcggtctcaggtaagcatgagtttcttcatttatccaatttaaatgggtatctatgctaaacaatattatagatattatcattcctcgaggtatcgaaaataaaaccgcgattggtaacagccccctcaaccaatcttcttactgctagtctaacgagcaaggcatggttgtacaacatattcaacgcatgctcgaagaaaagtccgagaggcacagtgcaaccctccaagagctccggcgcattacattcgaagaacagttatcacagaatgttatcatgatgccgcaaacgcctcagtccattgggatgaatactatcctccagaatccggagacggagcaagtcgacttcgtgttctatttcgacaggttggctgctttgctgattgaaaagtacatcctaatatccgactcgagccattcgcacggtatggctgacagcaggtatagggctttagattatacttcgtacgcacccaaagaggttgaaacccctcaacataacatgtacagtgggttgaagcaggaaggcatcgtatcagcggttgctattctgcgaggaggctcatgtctagagaccgctctcaaacggacgattcccgactgtgtcactgggcgcgtgctcattcggactaatgagaccaaagaggagccccaactacattaccttaagttgcccccaggtatcgaacagcattcgaatgtcatgcttcttgattcccagatgtcgagtggaggtgcagctttgatggcagtgcgtgtgttgattgaccatggtgtgccggaagacagaatcatttttgtgacttgcgcagctgttcagtcaggcgtcaagcgattggccgccgtttacccgcatgtcaagctcattgttggacgtattgaagaggagagcgaacctcggtggatggagca

SEQ ID NO: 20099 - DNA, 1738 bp, Emericella nidulans
cccgagtctcctcgctgggtgagtagccaccgtccatccatgcatcaacagcgttgacgagccagctcatcgcccatgaccgccacgccgacgcccgtcaggtcctctggtctgtccagcccaatgcccgattcatcaaccaagacgaccccgtaatcaacatggagatggcggagatcactcagaccatggctgaagagcggcaagcggccgcagagggctcttttaaaaggctcctcacggacggaccgcagcggttccggcatcggacactgttggctatgggcggccagatgatgcagcaactgtcgggcgtgaacctcattacctactataacaccgtgatctttgagcagtcggtcggcatgacgcataacctggctctattgcttgctgggttcaatggagtcgcgtactttttgtcggcatttgtgcctgtttggaccattgaccggtatttgtctaacctgcctcctcctgttctgcctatcctgttaccctgaaagctgatcaatacagactcggccgtcgcaaactgatgctctttgctgctgctgggcagtgcgcctgcatggctatcctggctggcaccgtctatgacggtggtttctcggccggtattgtggccactgtgatgctcttcctgttcaactttttcttcggagtgggaatgctcgccgtcccgtggctgcgtatgctcttgttttatagctccagatccctaattaagactgactgtttttctatagtcccagccgaatatgctccgttggccatccgaactcgcaccgctgcgttggcgacggcaacaaattgtacaatccgactattgcccgttccaggtcattttccaggctaatattaatagggatcttcaccttccttgtcgtcgaaatcactccagtcagcatttccagcatcggctaccgcacatacatttactttgccgtcttcaacttttgctttctgccgatcatttacttcctctacccagagacacgtaatctcaccctcgaacagatcgaccgcctcttcacgggcgagaaggtgcggctgcactgggatgcctcgatgggagtggctggtgatacggagcatcggctgcaggagaagatgggagacgcagaggtgcagcatgtggagtgatgctatattcttccccgggtagatattttgcggcagtggcaacagaactgactcgttaagtgggtaactctatctctatttcttcagatcttgattttttatgtttattttttgtctctcactactcctttgggatcggacattgtccgactatcctccgttctccactgcgctgcgcttgcgcactcctgaacaggcaaattctcttcgtgcagtgcattgcattacattcttaagtaattctggatttccatgtgttgggacctctttagacaaaaaggaatctgtctcatcctcttgatgtaatgttatggatatcaatatgaatcctgctgagcatgaggactcttcccgttctataccccgcaagcggactcgcaccggctgtgtgaattgcagtcggcgcaggagaaaatgtacgttggaactatgtagaaggtagtatgatgcgctgacaatataggcgacgaggccaagccaacttgcacggggtgtaaacgtcgaggggaccgctgccagtggcgcgtctatggggcatttcgcgatgccaacatcaaggtgctggagccagggcatccgtcgatgagccagg

SEQ ID NO: 20100 - DNA, 1739 bp, Emericella nidulans
gcttctacggaaggactcctcatctacagcctggatacggaattcctgttcgacccgtttgatctcgatatctctattaccccggcttccattctttccaccgtcgaaggtgcaaagaaggctgctgccaccggcgatgcgaacaacgacgacacttacttgaaggcgcttgtcatggcgttccgtctcaatgaagccaagctcatacgtgccgttcacgaagctatccctccctcagatattgcccatgttgtccgctctgtaccaaccgtatacctccctcgtcttctccgatacgtcgcccacgcttgcgaagagacgccgcatctcgaattcaatcttctgtggatcgagtctctgttcagtagccatggtcgatacttgaaggataacgcaggttcactgggtcctgagctccgtgctgttcagcgtgctcttgatgatatcaatgaaaatatcaaacgcctctcccagaagaacgtccataatctcaactaccttctcgctaagcctgtcctgactgggaggaaagcccccgccctccccaaagcgattgacactcttgatgcggccgccactaatggcgatgctacaatgagtgatgccggcaccgatgcggagggcgaatggcatggtttggaatgattgtatgtcagcttctctatacctttctcttctctgattctttgtgttggacatcctgcctcattctttgcatttgcgcttggcgtttcataccgtgatgctatataccttagaataaactgggacggctaaaagttctcctgccttttgtgtacatacgctatgtaataacagcacatcccactgggtattctcaatttctccatgtttattcaagtggttcttggacgtttcttcgatgaagcacaatttctcgattttaaaagctctaggtaagatgaaggcggcctcttccgatgctgttctcttgctggcttcaacacatagcaaccggtaggaatcaagctactgcatgttataatcatttccagctctactctgtcctctcggggcccaccgtcagtcatttcaacaaaggccatcctggtttgacttgcatggtgggtggtgaatggaacagtccacgctaaccctaaactgtgcatctgtaaacaggcctctatactcattcaccttcaacttcattatttcactccagctaaagaggtaatcaaggtatatagcagtcttcattgcttttcctctatctcttttcctctttttctctccacctgctccttccacgttcattctgtactgttcattctgtactgttatatccatagccgttggcctcttcccgcactatcaaagaatcgacttgggtagtgtcattctggtttgagattgttcacgatgtcccccatggtcctttgcacttcgttgctggtcttgcttgcctggcttctctcgaagtctcccactgacaccacccctgttaatgttcctactgtgacgctcggtcgttttgtcccttgttttgttgaccgtctgctgttctgcgccaagggaccgtttctcatatacgatggctataagaaggtaggatttgagttgcctttctgactttaccacgagcatactcacctgttgcgcttagtataagaacgttccgttccgagtccgcaaagtcgatacggatctcctcgtcctcccagcaaagtatctagaagagattcgtcatcttcctcacacgaggctcagtcttctggacg

SEQ ID NO: 20101 - DNA, 1742 bp, Emericella nidulans
ccggaaagcaaaaggcccagaagatgtccctcgggaacttcttggctgatgagagtacgcttcgaaattcgagactcccccgcgcacacatacatggctaactaccgtagactttggctcttgggccgatgagatggaggacatgcccttgcctggtaagtgtttattcactattgtttggtatttgatggccttgactgatgtgaatgctctatagccggtaagcgaccacttccgcgagacgcacacactgcccgattgccagatatgtctttttaacactccgcagctcccgctccctccagctttggaaccgacaaaagtccccctcctgcgtcatctgctggtttcggcggacccagtttcaacggtacgacccgctacttggtttggcgagaaatatatgtgtattaactggtgaaagaccgcggttttgctatgagggagccccttcccctgcctacagagcctccgtacaccgctcacattggaaatctgtcctttgatgctacctcgggcgatatctccgaccttttcgctgattgcggcgttacgaacgtccgtattgtggaggacaagttgacaaaggctcccaagggtttcggttacgtcgaattcgaaaccgtcgacggtcttaagaaagccctcgacctctccggagcgactcttcagggcagatcgatccgcgtcagcattgcagagcctcgtatgttgttcccgagcatatacttgtacatggtactaacaggttacagccaaggaacgtgatgtgaaggaacttgactggacccgccggggccctctcccagatgttgctcctccgcgccgagtgccggatcgcgcctctttcggtcgtaacctcgacaacctctctgacgccggcagcgaacctcgacgccgtggtggtttcgagagcgacggcaaggtccgtgacttctcgaactgggaacgcaagggtcctctttctcctccgcctatgagggaaggccgtccccgtaacgatgataatgcgggtttccgaacccgctcgcctgcctggggtgagggacgctctcaggacggctcacgtcctcccagacgcgaattccaggaacgcgcccccactgccgtcgaattggacaaccagtggagagcctgaatgaagcccgacggccccaagcaacccagcaaccccccctgcccctgtgccgctggtgccgtgccggacgttgcccctgctcccgccacaagaccgaagctcaaccttcagaagcggaccgtgactgacgccgccgggagccccagccccagcaccgaatcaaagtctagcatcttcggcggtgctcgtcccatcgataccgctgccagagagaaggaagttgaacaacggcgccaactagctctgcgccagaagaaggaagctgaggagaaggcaaaggccgagaaggcagagaggcagaaggctgccaaggaggcggccaaatccgagaagcccgtctcgacccttgaccccaacggccgggatcagcaagatactcctcggggtggcggtaactttgagatcctccggcgggccggtgaggatgagagcggtatgagcgccgaccaagatcctgaacagcaggctgaaggcggcggcgccgctgctgcggaagccccgaaggccgatgataaggtgaacggttcctggagggctggacctacctcgacggagaacgcaggtgacgacgagggctggagcaccgtcagctcaaaaccgcgca

SEQ ID NO: 20102 - DNA, 1743 bp, Emericella nidulans
ggactttcgcttcccccgacagtttcctttgcattaccagcgacgtccactctatcagatctttgcgaaaaggtctcatcatatatcccttattctgtgcccctccggtccctcatcttaacaacaacaaataacaaacaaattctcccctcgtcgctcgctgtttctgaactcatctcaccaaatggcgactcaactctcctcccccttcgtctcacggttcctatgtgtggcggaaagggtggttttggctctcaacttcgtgctgccggtgggcgcatgtcaagcaggcgcaagcgcaatcagggcgacgacaacggctccagccgtaatctcgatgggcggcgtcttcgtacagtcaacgaggccaaggcccttgcagaatacctcgccgtgaaacccgagatggataagaaggagaaagaggagcgccgacgacggtgggaggctgttgttgaagccgcggaaaagcgccaggaagagctcaaaaatggaggtgggaagcaaaagatcgacggtcaatggatggaggataaagatgagatgaatgagaaggctcgagaggctgttcttgcagctatgaaggagggcacttggacggataatctgaaggacgccctcctaggcgggtcgagcacgagtgcaagtgagggaagtgggcaagaaagtgcttctgcgtcggaggacagcggggaggaggccgagatgagggatgcgcctgcgcaacctggttcggcgcggcctgctgcaccgaggagatatatcgggttcgacgatgatgatgaattcatgagtgactctgaagaggatgaagaagctatgaatgaaggttcagaaggaaaaggaaaagcgaaacataagtggtcgcgtttttttgctgtttaagagcacttttcttaatttggttgttttagcgcatttatctgttccagcacaaatgtattcatagtcattcaagccgtgatcttactatgatcagtattaaatatgctttttattttgttgtagtaggtatcttgtactttacgtagtaactatgtgatctttgtttcttttgccagcagatgccatatcggctatcgccactgcaactcttttcggatagcggagcgaaccgataacgccccaaaagagctctggaatttggtagcaaaacttctctcaccattttcattctcgatcatcatgtcgtcggccctcaggcgcatgagcccgagagttttgtggaaattcccacgacaatgccaacaagcgcagcgttttttccgcagccagcaccctcccagccgcttccggcgggaggttgtctgtggactggcactcctgtcgaccgttcagctgcgaagacaatctaccagcgcatctaaccctgtgtcatcaacagagtctactcaggctgttctaccattatgctgtcccggatgcggggcgtattcgcagactgtcgagccgaacgagccaggattttacagcaaaaccagaaagcaaacccgaaagctcttattggaagcgcaaaaggaaccgttaaaggaatctgcaacgcaggaggcggtatttaccgtacaaaaagctgtcgaggaagcggagattgctcctaagccacatcgttagtattccacacgtcctcctcgattgcgcctaacagtttgttgcaggtgatatattgctcgaaaatgcagcggataccgtcagccaatatctcgagaaatcacagtcaccggtgcaagtctgcgacagatgtca

SEQ ID NO: 20103 - DNA, 1745 bp, Emericella nidulans
tcccacatccgcatcaccgtctggaaggcgatcggctagccggagccctcttcacgaagaaggaagcgcagatcgccctgaagaagaagggaagtccagatatgatgactacgcgccgatcattggaacgtcatccgtgcttcgttcacgcaacccagaagacattggcattcagagttccttgcgtgtgaaaagagtcggcaggttgacgggcacatttctcaacgggcccgccagacgcggtgtgctgagacgccagagtgaggaggatcaatcaccaagctatctctccgactctaaggaagccgaaggcggtgataacaatgactataattacaaaagtgcgagggcctcgtctcccaaagtatcatgggcagatcccgagcaaccacagaagactacagactatcgccgcatttcgtccggtgacgggccattctcaaggtcctcttcgccgaagtcatatgtgtcacactccaaatccaccccgggatcatcttctgatgcctcctcaaaaccttcaagctcgaaagagcctatatttaaagtacctcctcccccgacattaccatccacccgtgaccaagagaatgaacctccaccaacgtttaagcgaaccaagccacagggattcgattttctagacaaaccggagaaactttcggtggtttacggcgatgacaagaaggaccaagagcttccagcagggacatcgccaaggaagatactttctaatcggagtaacaacacacctcatcgacccgcgccccctcctcctaagatgtccgtgttagaaaccgccactgccacgggaggagcagctacggcatctcagtcgcgcaaaaagcgtaccgaagtttcgattaatcacaagccattcacccgcttggattgcatcggtcgtggaggtagctcgcgagtttaccgtgtaatggcagagaactataagatctttgctctaaagcgtgtaaatttagaggatgtcgatccgacgaccttggctggctacaagggggagattgatcttcttaagaaactggaaaacgttgaccgtgtggttcgcttgtttgactgggaattgaactcggacaagcgcactctcagcgtgctcatggagattggcgagtcggacctggaaaaggttctgacgtataaactgaatgctgaggatgccacttttgatatcaacttcacccggttctactggaaggagatgctggaatgtgtccaggcggttcatgaatacaatgtcgtccattccgacttaaaacccgccaatttccttctcgtccaagggagactaaaactgatcgattttggaattgccaacgccatccaagacaatactgtcaatgtacaccgcgagcagcaggttgggactccaaactatatgtcccctgaagcgctggttgactcaaatgcctctctgggtttaccagcaagtgttggcaagatgatgaagcttggcaaaccgagtgatgtatggagtctgggctgtatactgtacaagatggtctacgggcagcctccttttgcaaagattgccaagtactacgagcgcatcatggcaattccgaatccgaaagtgaagattgattttccagctttcggggtcggcggcatccaggtgcctccaggactcatacggactctgaaagggtgtctgcaacgagatcagacactgcgaccgactatcagcgacctcttgggtcaacgggacccattcctgtaccccgacgcacagc

SEQ ID NO: 20104 - DNA, 1748 bp, Emericella nidulans
  unsure (1)..(1748): unsure at all n locations
cgggtcagagccagcacgctaagtactactccatcataaccttgaatcaaaccgtattgagcgccaaggaagaacaagttggagttcagttgctcgatatctacttctctctctttgtggttttgcttaagcctaagaaacatgtcaaccctaagggtgacactaagcatggaaagggcaaaaaacgaggtgggaaggacaagaacaacgctgagacgcagaatgaggagatgcaggacaagctgatatcggcggttttgaccggtgtcaaccgagcttatccattcactagctcaaataccgagaggctttcgaagcacatcgagaccctcttccgcatcacgcactcatcaaatttcaatactagcatccaagcactcatgctgattcagcagctgacatcaactcatcaagtatccagcgaccgtttctaccgaactctctacgaatccctgcttgaccctcgggttgctacctcttcgaagcagtccatgtatctcaacgtgttattcaaggcgctcaagaacgacgtgaataccggacgaatcaaggcatttgtgaagcgcattgtccaggttcttggcctgcatcagcctgctttcatttgcggagttttctatctgatccgtgagctggagaagactttcatcagtctgcaatctctttatgatcagccggaagacaatgaaagtgatgaggaagaagtattcagggacgttcctgatgaagatgatgtccaagagccagcaccagtgcccgaagagaaatccataccttccaaccgctatgacccccgtaagagagatccagagcacagtaacgctgacaaggcgtgtctctgggaaatagtaagttcttattntatccatctacagactgccgcctgctcacattgtatagctcccttacctatctcatttccacccgtccgtttcagtcaatgcaactcatctactggagcaccagccgatgagcggaaagcccgacatgactctgcacacattgacacacttactcgaccgctttgtctaccgaacgccaaaggcaacggcttctacgcgcggctcttcgcttatgcagccacttgctggcagcgaggcaaaggacaggttagtcactaccagccagcacagtcaacaactaccgctcaactcggaggcattctggaagaagaaagccgaagacgttgcggcggaggatgtcttcttccacgagtactttagccgacttggtaaggacaaggagaaggcccaaaggaagaagaagagcaaagacccggttgagcgggatgaggagggcgatgtggatgacgacgacctcagcgaccaggagtctgaaatctggaaggcacttgttgattcaaggccggaggttgaaggcccaggtgatagcgatgatgacttggatcttgatgacctcgagtcggcttacgacaaatccgacgatgagggtgacgaagacgaggtcatcttcaacgatgaatctgatgaggagatggaggacgttgaagaggaagacgctgcggccaaggtcaaggcagccaaggctaagagccgaacttccaaggacgacgacctcgaggatgaagaggcctttgacatggacgtttcagacgaggaggcctttgtcgacagcgacgaggacttgccgtccgatgtcgagctgggaggagtggaactccccaaggaagacgacaaggccgggcggaagaagaggcgcaagctcaagcacctgccgacattcgcgtc

SEQ ID NO: 20105 - DNA, 1750 bp, Emericella nidulans
gtgtacaggcaagtatcaagtagatattttgttttccacttgtgcttacagtagtgaccgaagccttgactatcgagaatgcatgtggttggagatatatgtttctaaatagcaaattcctctagtacaactgccatcaaatgctggtgttcacgaagcaggctgttgttcggtagaagattgcagggcatcgattggtggaggcagattatgtgaaggagttttgcccgccacactgtaaggctcgaaacccacaccgaatgtggaggagaacttgcaacctacaaccacctgtgccacccactatcatttcttccggcgaggcaccagcgtccatttgtgctactaacttacatcaattaggtatagtatcctatcgtccctattccctctaccgcggtttagattcttttttatcccgcttttcctctcacgccgccctccgcccctctacgacgctaaccgcgactcaactaggccaagttcagccaactgtctatcgaacattctctcattacacagcatttagaagggttagataaaagtcgccatcatgcctcctaagaagcctgatcaacctaagaagaagaaggccactgtcgatgacaaggtttgttaccgtccgagaagacttttcgtcgaagcaatgctaacagcgaactcgtaaacagacatttggcatgaaaaacgtacgtcatcgcgccctgcccttcccagtcgacactcgaaatccataactaacgggattacgctggacagaaaaaaggtggaagcgccaagaaacagatcgcccagttacaggcccaagccgctcacagcaaaaccgccgatgagaaacgaaaagcggccgagaaggaacggcgtgaagcagagaagagggctgctgagcaggcgaagaaggaggcgctggagctgttcaagcctgtccaggtgcaaaaagttccctttggtgttgacccgaagacagtgctttgccagttctacaagcagggccactgtgagaagggtcgcaagtgcaaattcagtcacgacctaaatgtcgatcgtaaggcggccaagaaggatctttacactgattcccgagaggcggaagacgagaagaagaaggccgacaccatggagcaatgggacgaagcgaacttcgttcgtgttgttcttagcaagcacgggaacccgcggacgacgactgacaaggtctgcaagtacttcattgaggccgtcgagaaccagaaatacggttggttctgggtgtgtccgaatggaggtgataagtgcatgtacaagcatagtttgccgcctgggtatgtcttacattcatgcgtggctgggtcatgatgctaataactttatagattcgtcctcaagacaaaggagcagcgcgcagcagaaaaggctatgatggacaagtcgccgctcaacaccctgaccctggaagattggcttgaaagcgagcgacacaagctcaccggagaattgactcccgtcacacctgaaaccttcgccaaatggaagaaggagcgcatggacaaaaaggccgcggaggaacaagcccggaaggctaaggaagccactggacgaacattattcgagagcggcaactggcggacagaagagagcgaagaggagtcagacgaggatgacgacggagcgtggaacctcgctgctctacggaaggagactgagagaatacgtgagcagaaggaagaggagcgtctggcgaaactacacggtgagcaacagccaggtggtg

SEQ ID NO: 20106 - DNA, 1751 bp, Emericella nidulans
cgccgtgacaccagcctgaaggccaactggcgtgtgttcgccatcaccctgtacatgggcatcgccttgttcgagtatggcttcgacaagggcgccattgcgggcttccaagcaatgcctgggttcttgcaggtgtttggatatcagactgagtctggcgagtgggatattcatgtacagcgctccatttctttccctcagcattttctcttttctcccattgcctgatacacatctctcttttgttaacactgtcgtctcaccgattaggccggtccccaacaaatcatcacctcgttcatgattctcggcagcgtcatcggctccctcctgacgggttttgtcggcgctcgcattggccgtcggtatggattgatgctgggctcactgattgtgatcatctgcgtcgtgatcatgtcagaaacgaccgttctcggagctctctacttttccagactcttaatcgggataggaaacggccttctgctgaactttaccgtgctctacctgcaggagtgcacccctcctcgctttcggggcctttgcctgagcatggtcacttgctggatcaccattgggacgacgattgggatggtgagtctcctccattcgccctatccttggtttgaagattaggaaagaaagttgctaatataaacgtaggtgatcaatcaccaaaccaacggcatgatgagtcgagaggcataccgtatccctctttacgtctgctatcctgcccctgctatcctcatcctcacgctgccgctcctccccgagtctccccgctggctccttcagcacggaaagccagaggccgcgcttcgtagtcttcagtttttccgacaaggtgcctacgacgaagttgcggtgcagcaggagttcgaggagatgaaggcagcagcggcacgcgagagagaccaagagattcatcagaacaaatggcttctcttcttcgaattattccgcggtcataatcttcgcaggaccatcattgcagttgcggtgggcacagccaatgccgctgtcggtgccatgttcatcctatcgtatgggacatactttttccaggtggtgcgtcatcccctcccgttcataccatcactgggtctaacaggttctccaacaggcaaatgtcggagatccattcaagtggattatcgtgaccaactgcgtcggtctcgcgggtctgttcaccacctgggccatcgtcactcatgtcggacgccggcgaatcatcctcgcaggatgcgtaatatgcaccctccctatgctcgtcatggcagccgtctactccgcgcccaacgtttccgcagacggtgcaggcattgccctagtcgtgatcgtctcgatctacgtcttcggatttaatttcggcctcgaaccttacgtctaccttgttgccggcgagatgccttcccagaaccttcgaggctacacaatgggcctgtcgaccgcggtcagctttgtgtttgcgtggctgagcgcctttacaaccccgtacttcatcaacccgggtgagctcaactggggccccaagtatggctacatctggtttggcagcggtatcatcaccaccgcgttcctgtggtactatctgccggaggtaaggggccgcacgctggaggagatcgatgagatgttccggaacaatgtgcccacgcgagcattcgccaagtatgtgtgtgtggagagaatggaggcaaatgcacgcgcggtctccactgttaagggggagagtaagcctaatgcca

SEQ ID NO: 20107 - DNA, 1757 bp, Emericella nidulans
gacgaggcggtctccgcaaagatacacgaatggagtgccgacgcagaacggaacctgccatatgtgaagtggtataacgtctggggagagagatatggcgtggatcggttggtcacgagcgaggggtggaagaggttgggtgcttggggcgctgagaacgggtttgtctctcctatctttgaactcgtttcagtttgagacgggaatgcgatttactgatggctggtgtgtatcgtaggataatagcactgggctatgaagacaagtacgggaaggagaggaggatggcgcagtatgccgtgtacgttctatcccacccttttccaaccaccaagatcttgcagatagtgaactagcaaacactgactctacccagaaactacatgaccggtccctcctcaggcctgacctcctgtcccgcaagcatgaccgacggcgcagcactgatcctgtcaaacgagatcgcccgcagatcgctgccgcaagaccatccattccaggtcgcattgcgccgtctcacctcgcgcggcactgacgcctggacgtctggacagtggatgactgaacgcgctggtggaagcgacgtacagaataccgagacgtgggcgacatactcgccgctcccggcatccgaattacgcaacgcgacgggtcagcctcagatcgacgaaggcgagtacctcgtcaacggcttcaaattcttctcctcggctacagacgcgaacattgccctactgcttgcaaagacgaccccctccggcaagctgagtgtcttcctcgctccgctgcgccgcacaatcaccgacaaggacgggaaacgccacgaggtaagcaacggtgtgcgcatccaccgcttgaagaacaagatgggtacaaaagagctgcccactgcggagctggagctcgtcgacatgcgcgctcatctcgtcggcgacctcgacaggggggtgcagaccatcgccccgctgctgaatatcacgcgcgcacatacattcctcggctcgctggggaactggcgccgggcgctcagtatcgcaaaggcttttgcgaagaccagaacgacggtcggggaaccattgtggcttatacctatgcacttacgactcatggcggagcttgaaggacggcatcgtgcgggtatggaactggcctttttcacgattgctgtcatggatctcgtcgagaacaagacgcgggatggtcagcgcgagctcgcgcacctcccaagggcaggcgcagaagcaaacactgtcttcaggaccctaaccgcactctcaaaggccgtgatatcaaagatggctgttgtgggagtccaggaatgccaggaggcaatgggcggcgtggggtacatggatgagccagacgaaccggagtttaatgtttcgcggatcctgcggaatacgttcgtcaactctatctgggaagggacgaccaatgtcctggcgagcgagtgtgtgcgattcctgctcaagggggagaactttgacgtcctcgctggatgggttgagcgagtgatgcggctgcttggggatggcgcggtcccagatggacttggactgaggagtgcgtggacggcttttaaggcgcggtttacatctttgcaggattcgccagctctggctgttgctgatgcacgtcgagtcatgttcacgctcgcctggattctggccggaactctgctggtcctggatgcgagaagggatggggatgccgttacgggagagattgcacggcggtgggtgagtgggcagctggga

SEQ ID NO: 20108 - DNA, 1758 bp, Emericella nidulans
tggatgcgatgggaggtgccattgttgctcatcatatctttctatctcaccagaacagtctatcgccttttcttccatcctcttacgagattccccggcccaaaaatcacagcagcaaccggtctgtacgaattttaccacgatgtcgttcgagggggaaagttcctgtgggagattgagcaaatgcaccaagtttacggtacttgctccatccaccaaactgatcatggctgtgttgactcgctggaagggcctattgtgcgaataactccttgggagatacacgtcaaagacccccatttctacgatgaaatctacacctcggcacgaaaatgcaacaaagaccccaacttcgtcggcatgtttggatcaccaacctctatgatcgcaaccgtcgaccatggacatcaccggttccgtcggggaatattgagcagtttcttttccaagcgctcaatcagagatatatcaccccttatcaggagaaaagtgcagaggctcatggagcggctcgcggagttctaccaaaccgacactgaggtggatctcagcgctgcatttgcggccttgacggcagatataatctccacctactcctacggcgagagtttcgacttcctcgaggacgggtcgttccacagcgaggtgcgcgacgccattatggagaccgaaaagttagatcatatcagtcgattgtttccagtcgtgttgacggttattcgacatgttccggtatgggcctttgcgattgttaaaccagcgactgccgttattgcgggaatacagaaacgagtagcggagaagtctgctaaggcgctcaaaatgactggatcaagcaaggaagaatggaccatgttcgatgcacttactgacccaaagctgcccgcttgcgaacgaacgatgtcgaggattcatgacgagggcatgatcctccttagtggcggcacagaacctacggctaatgcattgacagttgccgcgttccatatgatcaaccagaaggatattctaaccactatacgcgaagaagttcgggccagtggacgcgatgttaagaaagcgtctttggctgaacttgagcagttgccgtatttggtgagttgagcatccctgtgatatacgacctgcaaaacatgtactgaaagccgacagactgcagtagtcaacgaggccctccgcctctctcacggcctttctatccgttctccacgaatatcacctacagaagccctgacttataaaagctacgtcattccggctggtgtatgttgccgtcctctgccatagcgccgtgaatactgacaagatctggcagacccccgtaggtatgtccaactactttgtccacatggatccctcgattttcccacaccctgcttccttcaacccgaaccggtggattgaagctagcaagaggggagagaaacttgaccgattcatcaccgcgtttgggaaaggaagtcggcaatgcattggtatcaagtatgttatgttgcgcctattacacaatctattcccttccacagcttcatcatcgtaggcggggctaacgtctgttccgtatacagtctcggctacgcagagctttacttcgccctcgcctccttcgcaacgttctttgactaccagttgcatgacactacggaggagaatgtccgcgttgcgagggatcggggtgtcccattccctgaagctggacatttgacggtgagagcaaaagttgtaggagtgcatgctgacccagctagaaaagaagac

SEQ ID NO: 20109 - DNA, 1758 bp, Emericella nidulans
gcggcttgcaaggaggtcgtgtttgactctcggagcgccaagttcaccgaccggatgatagcgcagggttacaacatcaactggctggtagatgggttgccggccgcgcaacagaatcttggaaccgagcctcaggcttacactcctggcttcgctctcggtgagcttgacgagagcgaaaaggccgttttgcacaatcatttcgatattttaatcgactatcatccggtcaaggttggagacaaggagaagtatcgagtcatcggtgtcctggtccaaccaagttctcgacgtggctcgcatgtctctgaggacgggacatccatttgcaatgaggaaggaccgatctatctggatgaggatgcagataccacggtggcttggacttacagtgtaagctggcgtgaatcgtctactccatgggcaacccgctgggataagtacctgaaggttcagtacccgaaaatccactggttttcccttgttaacgccgccgtgtttgttatctttcttgttgggatggttagcatgatccttgttcgcgctctcaagaaggatattgctcgatataaccgtctggactcatttaacctagatgatctggatggaacgtcagctgctatggaggacggcatccaagaggactcaggctggaagctggtgcatggggacgttttccggtgtccgaagtctcctttgcttctcagtgttctagttggcaatggagctcagcttttcatgatgaccggtgccactgtcggtacgtttaccgtacccagtagttctctgtttgggctaacgttggcttagtttttgcgatgtttggcttgttgtcacctgcgaaccgaggttttctagccactgccatcttgatcatatacactctttttggtttcattggcggctacgtctcagctagggtttataaagcgtttggtggtgaatcctggaagcgcaacattatcatgaccccggttctagttccggcgtttattttcagcgtcttctttctgctcaacctgtttgtttgggccaagggctcaagtggcgcggtgccgtttggcacgatgcttgcccttgtgctgatatggttcgtcatcagtgtaccgctgagtgtggccggtagctggattggtttcaagcagccggtacggtctctccacgacaaatactgtcatactttctttctaaccatcgcataggctattgaaggacctacgaagaccaatcagattccaaggcagatcccgcccatgactggtagtctgaagacaatcccttcgctatttcttaccggcatacttcctttcggcgctatttttgtggagctatactttatcatgacttctctctggaccaacaagatttactacatgttcggcttcctgtttttgtgctatggattgatggttgttaccaccgctgctacaacagttttgttggtatacttcctcctctgcgctgagaactataggtggcactggagggcgtttgcgggtgcaggaatgactggagtgtacgtctttcttaacgcgcttctcttctgggcgaccagggttagcttcggcggcctcattggagctgtactttacgtgggctactctgccttgatcgggtttgttgtcttcatccttacaggcaagtttctaccctatccgcttgggtcggcctgcttactaattctcgcaagcaggctctattggtttctttgccagttggctcttcatacagcgaatctatcgctctatcaaggtcgac

SEQ ID NO: 20110 - DNA, 1769 bp, Emericella nidulans
ttgccagccggttcgtccatgaggcgattgctcagaacaaccacgccgcagtgtcagaaacaaccgaagaagccagcgcaacggattcggtgatgcaatacgagcttcatacgtctgggcaagagccaatatcattctcaacggcggaggacgacgatgacacgcggaagttctacctggactatggcgatgatgactacgagaccaattcccagtcttcctctagcggtgacggccactcgcatgtttcaaacgtcgatttggacgatttttatcgaccgccgggttacacgtatggctcccaaatgtctggattcgaccctgcttccagccatgaggatcataccaacttcttttccgacgccgaggacgcaaatactgacccagccgcggaccctcactttgcagagtccgtcatacatcatggaaccagtgagtatccaacatgttcgtgtctcagcctgattgctaatctggcgacagcccaagagagaaactatgatattgaccagtttatttcgcaatggctctaccaatcgtctactgcgtcgataccaatgctgtcactatcgccgcaggtatttcttcagagtactttatccaacatcatgcgatggcagccaccggcgaagatcacgcggccgagcggttatactggagacttctacgacatccaacagatcccctggtgggagaggttgcgggtgaggcgagctgatgcgcgccggttgcgagaccagacgtatgaatcgtaccaaaatcttccacaatacagccagcgacggacagggaggaggctgcctgaggaagagttttatttccagggaaaatcgatgtacacggctcacaaagccacgatcgaacacttccagctccgcaacctgatgtccgttcccgcgtacaacactgtacactttgcgcacgaatccaagttgtattcgtgggttccggcatatgacgacttgcaatgtctgatcgacctgtccgtacctaatgctgagtccggttttcagggcccggtcaagatttcgaccatgaaaacggctgtaggtgtatctattgccggcggcttcttcggagaatatgccgtgcgggctatggggactgaaaccaagggagtggaaggatacgttacaaaagaccccaacggaatcaccaaccacatcgatatcatcccaagtcgcacgaatcggtcgccaatcgggatttttgcttctaatgatcgccatgtgcggacactagattgcgaaactaacacctttcttactgatcatgaactcacgcatgcggtcaactgtacatctacttcacctgatggtcggctccgtatcgttgtcggcgactcccccgatgcctgggtcgttgaagcggagacaggccgaccggtttaccctctgcgtggacataaggatttcggcttcgcctgcgcctggtccccggatatgatgcaggtcgccactagcaatcaagacaagtcagcgataatctgggatgcacggacatggcgcatgctggagaagatcgagtccgacgtagcgggctaccggtctctacgattctctccagtcggcggaggtccgcgcaccctgctgctctgcgaaccggcagaccggatagtgattgtcaatgcacaaacataccgatcgcgccaggtccacgacttctttggtgaagttggaggagcagactactcgcctgatggaagcacaatatgggcagccaacacggacgagcggtttggtgggtttatggagtacgatcggcggcag

SEQ ID NO: 20111 - DNA, 1774 bp, Emericella nidulans
gcgccttctgctcggcatgtccataatgcaagtcgtcttccccatggtctcgatcttcctggtcttcctgcagtgcaaacccaccgccgctctgtgggactacacaattacccacgcaacgtgctgggaccaggccgtcatctacaacttctcctgctgggtcagcgcgtacacgaccatgaccgatatcatccttgcccttgtgccaatcaccgtcttctggaagctgcaaatgcgtcagtccaccaagatcggggtctgtatcctgctgggtctgacattgctgtcggccatcgtgattttggggtctatagcactacagtatcggagcatcgccgatccccgcactctgttctctgactcaacgctctccccacttcatttctcttccaacctccaacttcgccctcaaaatggccaactcaacctcagactcagtaaatgtccttctctacgggcttggagcgtacgtggctctttgattgatcataaggcaacaagagccgcccgctgaccagctggttctgtcgaacaggatcggctccttctacgccttcatcctcaacaggtgcgaccgcgtccgtctgacggtggtcgcgcgctcgaattacgatgccgtgctgaagaatgtacatttcggccgtgtgtataggcacatagaacatataatactcacaagagcatagggaatctcgatcgatagcaagaaccacgggaagaacacattccgtccggatcggggtatgcgtccatgacctttcttctagtctcaaatgtcccatttcctttcttcgttccttttattaaaagacgttcggcaagcttatgagacggtgggacagtaatccgcgccccctccgacgttgcggggagccactttgactacatcgtttgcacgcacaaagcctttgatccacgcggcgccataataccactcgaccccgtcgtcgacggaacaactacgattgtcgttctgcagaacggggtcggcaatgaggatccattccgtgagaggtggcccggtgtcacaataatttcgggggttgtatgttcttcattcctattttgtggatatttagctaccttttctgcgtctcgtcatttcatctctccagactggccagtcttatatccagaagcgtaaagggaagcataaagagtagtgctaactgaaaaaaggtctgggtcggcgcctctcagcctgctccaggagtcgtttaccacacccattccgaacacacggagctcggcctcttccccaaccgctcgctgaacgatgcgtcgctagaagagtcccgtctgcagacattcacatccgtcctcagcgctggtggaacacatttcaccaccttcgccgacatccagccccggcggtgggagaaggtcatctggaacgtcgcgtggaatgccatcaccgcgctcacagaccaggatgtatcatcctggctgtcctcttccccggatgcagtaccgtatacaagacaattgatgaatgaagttatagccgttgcgaagggatgtaatgtcgaggttaaagacggacttgccgatcagcttattgagcgtgcacaaaggctgggtgcgctccggacgagcatgcaggcggaccgcgaggccggcagggagatggagatcgaggtaattttgggcgtgcccgtgaaaaagggacgcgagctgggtattgatacgccgcgtttggaagggctctatgtgcttctggtggctattaataggcagatcaaggataaaagggcgaactagttttgccatgaaa

SEQ ID NO: 20112 - DNA, 1774 bp, Emericella nidulans
cgcgttggcattcttgcttcctgcaattcaggctcagcaaactctctatgggcaatgtatacactaaccggcgctctaattttgcattgctaacaagtatcaggtgggggatctggctggaccggtgctacgagctgtgtagctggcgcagcgtgttctactctgaaccaatgtatgcgcattcaatacagcttgggatgttgctaacaacccgaatagggtacgctcagtgcttgccagccgcaaccaccacgtctactaccctgaccacgacaacatcttcagtaaccacgacgagcaatcctggctctacgacaactacaagctctgttactgtcactgccactgcatctggaaaccctttcagtggctaccagctctacgtcaacccttactactcatctgaggtgcaaagtatcgccattccatccctcactgggacactctcctcgcttgcaccggcagccactcgtgccgccaaggtaccttcttttgtatggctgtacgttatttcctcccatatggttccgtgtataggactgaagtcagacaagagatgttgccgcaaaggtgcccacaatggcgacctacctcgcggatatccggtcacagaatgctgccggagccaaccctcctattgcaggccaatttgttgtttatgaccttccggaccgtgactgcgccgctctggccagtaatggcgagtttgccatttcagatggcggggtgcagcattataaggattatattgattccatccgcgaaattctcgtggagtactcagacgtccacgtaatcctggttattggtgagcgcgatctacccgctatattggaaggcaattctgatctccttgatgatagaaccggacagtttagctaatcttgtcacaaacttgaacgttgctaaatgtgccaacgcccagagcgcttacctggaatgcacaaactacgcggtcacgcagctcaaccttccgaacgtggccatgtatcttgacgctggtattacccattccccctttcgttctcagttccctttcagtctgtcgcagtactaaacaagacaggacatgccggctggcttggctggccagcaaacctccagcccgccgcaaacctctacgcaggagtctactcagacgccgggtcaccggccgcacttcgtggtcttgctaccaacgtcgccaattacaacgcctgggcaatcgatacctgcccttcatacacgcaaggtaactccgtttgtgacgaaaaggactacatcaacgccctcgctcccctgcttcgcgctcagggctttgacgctcacttcatcacagatacgggtaacctctccctcttagctcagtccttcccttctctagagtccttcctttcttcgttatttaatccgaccgctaacttctgatggttgaaaaggccgcaacgggaagcagccaacaggccaacaagcctggggcgactggtgcaacgtcatcggcacgggcttcggcgcgcgcccatccacgaacacaggtgattccttattggatgcttttgtctgggttaaacctggtggcgagagtgacgggacttctgatacgttcgcggcgcggtatgatgcgcattgcgggtatagcgacggctgcagccagcgcccgaggcgggaacttggtttcaggtatgtacatgaacgctcttacagtatatttgataaatgttagacctgagaggtcatgcaagtgctgatgatttacatctccaggcatatttcgtgcagcttttacagaatgcga

SEQ ID NO: 20113 - DNA, 1775 bp, Emericella nidulans
cgaccctcatcaagcggtacgaccttgcttcgaccttctatttctcatatattcctgcaaacagcaatgtcttcaattcgaacccttcatcttcccaagactaatgacatgcatatatgtacagactagaagccgcgacttcccgcctggaggacatggcgatgtcgttagatgaacacgatgcccagaagaagaccgctgacaactcggccgcgctggagccgcaagcctctgagcgacctacaccaaccgcccctgccgcccccgcagctgctcctcttccaccccagatcgaagacttcgatacattgattagcaaggacgttgggaatttcgtgcaactgggacagaagattggaggtctcgtcgcagagcaggtatgatgccaggtgtcataatagttgctgaatgccttgctcatttgtttttaagtccaacgctgtccttgaagccttcaaggcggagcgcacttacctctatgtctcgaccaaggcgaagaagccagaaatccagcctccggagcttatgaccggactccacacggcatccgatgccatcaacaatcttcgggagtctaacagggcatcgcctcttattgaccatctgagtgccgttgccgaaggtatcgttgccctgggctggttttttgatcccaaacctgccgatttcgtcagcgagatgctcggaggtattcagtactacggtaacaaggtgctgaaggaatacaaagagaagtatgcgttttgcaccggaggtcatgttgcaccgtggtttactgacagacttgcagggatcgtacccattatgactacatccaagcgtactaccaaatcttcaaatctctttcatcctaccttcgcaagcattaccccaagggcctgacatggaatgacaaggatggaatagatgcacaggaggcactcagactggtcaaaaacagctccgactctgctgctggcggtgcaggaactccccctccgcctcctccagtgccgactttgaatatacctggtggtggcgcgccaccaccaccaccaccccctcctcctccccccatgatctccgaacagcagagttctggcgcctcatctgatatgtcggctgtgttcgctcagctgaaccagggagacgctgtcacacaaggcctgcgcaaggttgacaagtcccagatgacgcacaaaaacccaagcctccgagctagctctaccgttcctggaagccctagctctagttcccgctccaagtctccagcccctagcaaaaaaccaaagccagagagcatgcgtagccggaaaccgccccgcaaggatctcgaaggcaccaagtggttcatcgagaacttcgataaccccggagacattgtcgaaatccccgccaagcagaaccaatcaatcctcatttctcgatgcaacaagactatcatcaaagtgtccagcaaggccaatgcgattgccatcgataattgccatggcttgtccattatcgtcgactcgctcgttagcagccttgatgttgtcaagtgctccaagttcgctcttcaaattgacggcgttgctcctacactgcttatggaccaggtcgatggcgcaactgtttatctgtcgtcccagagcctaggtacggagctcttctctagcaaatgcaccgctgtcaatgtgatgcttcctccaaaggaaggcaccgatgaagatacaaaggaatgtccggtcccggagcagataaagacctccgtcaaggatggtgttcttgtcagcgaaattgtcgagcatgcgggc

SEQ ID NO: 20114 - DNA, 1777 bp, Emericella nidulans
ctgcggctgcacaaaccacacaacaccctctgccagctccttgcgctcatgattatctggaatgcctggctcgctttcgacgcggggacaacactagccctcaacttcaagagcatcatggccgcctgcgtgacaaatctctgcgccgcttcgggtgcccttacctgggctggcctgacgtatgcagaaactgggaagttcagtctggacagtacgttcctcggtgctatcgcgggtctggttctcattacgccgagcgcgggttttatcgatctgagtacgtcggtcgcgtttggcgtggttggtgccgttgctgggcgacaggcgctgcggattaagttcaccaagggtgctgcccttcgacgctgggtcgataacggagatacatttgcgacacattgtttgggtgggctgcttgggacggtagcgacggggctttttgcgcaacgtgaggtcgccgcgtacgatggagtaaccatcattgccggtggatgtgtttttgatagcaattggcgccagcttggggttcagctcgtggaggcgctaatcgggtttacgtggagttttgtcggaagctacgtgttgtatgctttggtagattgcgtacctgggttggaagttttagctacggatgagtgagtttacaccttcaactttgagatgtggactaacgtgtcagggatatcattctcgggatggacgcatcacagatgggcgagtctttgcacgaggcacagtgggctggcgaagaggactaccacccattccacgctgaaattcaactttgaccgaacccgtgttatgcccctatatatacacataccaacatagaatcaatccaaggtctatgtcacgcctagttgaaaacgaccgttttgtgtccgttcaacaaaactctgcgctcagcaaaatacttgacagccgcagccaaaacattgctctccacattacttccggcatgagtcaactccttcggactcaaggcatggttcacgcgaacgacattctgttcgatgataggaccctcatccagatcgcttgtgacgaaatgcgccgtcgcaccgacaagcttcacaccgcggtcataagcctggtggtagggcttagcacccttgaaactgggcaggaaactgtggtggatattgataatttttccagacatagcgtcgcacagcgtcggcgacagaacctgcatgtaccgagccaagacgaccaattcaatatcatactccttgatgagttcgagaatccgggtttcctgctgctgcttcgtgtccgccgtcacggggagatgcatgaagggcaccttgtacgttgccgcgagggtctcgaagtccgggtggttcgatacgatgagtggcacctcgatcgccaactggccggtggactgccggaagagcaggtcattgaggcagtggccgatcttggagaccatgatcaggacacgcggcttgtgggcggcggggaggagctggaaggacatcgagtgcgcggtggcgatcggggtgaaggcttcgcggagggcctcaagggagggggccgcagcaccatcgctggcgccagttgtatcggggccgaagtgcatgcgcatgaagaagcggtgcgaggtgggatcgccaaattgcgaggagtcgatgatgttcaggttgtgttggacgaggaaaccggtcacggcgctgacgatgccgggccggtcggggcaggagagggtgagaataaagctcatgttgaagaagaatgctttgaatcgaattgaatcgcttctgggctctgttga

SEQ ID NO: 20115 - DNA, 1777 bp, Emericella nidulans
gccgcaaacagggccagattcgttctcgacatcattgcgcaaacccgcgccgtcgtcccgtccaccttctgcattggcatcaaattcaactcagccgaccacaactcctccagctttgaagacaccatgacccaaatcggcctcctagtcgatgcaggcattgacttcatcgagatcagtggcggaagctatgaagatcccaaggtcttgccttgcttttcccccatccattacatctgtgaagcgtactgaccaaatccctccgggtagatgttgaatattggcctacagcaagcagaaaaatccgcccggaccgtcgccagagaagccttcttccttgaattcgccgccgccgtgcgcgagcgctacccaacccttattctaatgctaaccggggggttccgctctcgtgccggcgcagactacgccctttcccagaacgcgtgcgaccttgtcggcattgggcgtcctgcggcaattgacccgcattttccaaagttgctgctcgatgagagcgtgcaggaaagtgaggcgcagttgcatttgaataggatccctgtgccgttctgggcgaagtggattccgcttgctgctataggggctggagcggagagcgtacgtcttgtcctttttcccttttcctccccccttcccctcccagccagcttcgggtaggtagctaacgatggtgtagacgtattacactgggcagattcaacggattgccaaaggaatgaagactattgtaccgttataggtaggtaaaagtctgaacggagtttgcgaaaagtgtatactagctggatgaggactctgtcgacaaggctgtgccgcagtgacactgagggctcattgtatcatggtcggttgccggaccgaggtatctagatgataccacctaattatttgaaattcgatttctcttagccgtatccaggccttgatagctgcaacaattatagaagcagacagctcatcaagctgctgatcctcttgaccgacctgatgataaattggccgtccagcctccttttatcttttcgtgcagtgtatattgaacaaggcacaataccgcctttaatatgccatgaaccatctcatactcttcaccatcacctattccgtcaccgggagaactatcagtgtcgcagtaggcaaatcccgttcaagctcggaacctttcaacctaccggatgtgacactattcatcgagggttggatctccattcggaattattgtctgtcttcctctagagctcgttgatgctcttgagctctagtacaaactcggattgaaccatcagaaggagaaggcgctgagaatgagaagagtgaatgtttgtgcgttgagccattattttaagcgcaggcgtggagtgtagataagtccatggcctggggttataacacgaaaaggcgctgatgccgttgggtaagggagaacatcgaagccgcaccaattcgggatttgttcttgatagttggtaaacttgcagtgaattcggttgttccattcattctaacgtcttatttcattttgtctgcttgtcttctgggtccaggcattacctagtctcatgctatatatttgaatgcagtattacaagagtgtctggtatactttaaagaatctatttcaatatcagaagataacaaataatcctactgcagacgcataacatgcagtttctagtataacaatatgagatgatttcacatatttcgattctcgtgcttgataaatcacctaagtaagccagagcgtgaccaggaaaaa

SEQ ID NO: 20116 - DNA, 1777 bp, Emericella nidulans
tggagatgtgacattcatttcttacacgaataatgtccacactggaaaacaggggtttaccaagggtggttctttctcgacccataataactgtaacccagggggtgtgcattttattgatgttaacggtaggcacgcatcattctggtcacacaggaacagctgatactaatgcgagattacatattcaggtgatggactggatgactacgtctgcattgccttggatgggactacctatgcaagcatcaacaacggagatggcgattctgggagtaacaagcctccctcctttaccgatattggactgtggaagagtccagaagagcacgatcagaagcatgtgcgtctggctgatattgacggtgatggtcgagccgattactgtgttttggcagataatggcgatgtcacatgttggcggaatggatggattgaagacaaaccagcatactggcagcctctcggaaagcgcttcactggaaaaggcatgggtgacatccgcggcgtgagattcgaagatattaacggcgacggtcgcgacgactggatgtgggtggatgatgatggcgctgcgacgacatatacgaactcccgaagctgcatcaaaggacaggctggcgatggcttaaatgttgtttggcggcagggattttacaaagatgctaattctggcccgacacaccctggattgagtgggatatttggtagttccggattacgagatcaggtttacttcgccagagtatacggtgaggtagcggatttcggggagcttgggagacaggactacgtgttcatcgagaaggtacatctgacgagaattctgggccaatgtataacgtacatgtctggaagaataagggggcaggaggggcaaagataaaaggtatgatttgtataagtcatgccccatatgaaagattaaagctaatgattacagccgacggaaatagatattgcaatatgaaaggtcatgagaacggtcgaatggattacgtttggatccattccaccggctatatgcgtctctatccgaataagggactggttgaagtgcccagtgacgggtcaagtttctggggagccaacgaaatcatctttgacccaacacgggagcaaatcggaactaagcttgaccggcgcgatctgcatctggcagactgggacggggacggagcctgcgatattatttggacagaccctaacaatcaaaatagggtacaggtgtggcggaacaaggtcaaggaaaccgggagcattgagtgggagtataatagcaatgctgtggatcagctatactgccctgagcatcgaggccttggttactttgaccgtcccgtccattttgctgatgtttctggttacggcaaagccgactatctgtgtgttgaaaaggatgggcgcacttggggctgggttaatggggatgatggatgggagtatattgatcagttcaaatactccgagcagaaggatagggcaaacattcactgggcagacgtgaatggtgatggaaaggcagatttgatttggaccgacaagttctcaggagacgggtcagtctggtataatcttggccgacgtgatatcaacggatccagatacgagtggggaccactgggacccagatacagaggtgctgttgaaggctcatgcacttactttcctgatctggatggtgacggccgtgcagacatgcatagtatctggaattccatcaacaacacagctcagacatggtacaacaaatgtgctaccaaggaccatactggcg

SEQ ID NO: 20117 - DNA, 1778 bp, Emericella nidulans
cggcgtgaatgtgcctgtcgtgctgtgtgccaacaagtccgatcttgctgccgatcataccgagacgcaagtcatcgaggacgagatgttgccgttgatgtcagagttcaaggaaatcgattcatgcattcggaccagtgcccgagaacatcgtaatgtcaacgaggcctttttcctttgccagaaagcggtcacacaccctatcgcacccctattcgatgcaaaggaatcagccttaaaaccggcggctgtcgccgcgttacaacgcatcttctacctcagtgataaagaccgggacggttatctctcagataaagagataaaggattttcagatgaggtgttttgagaaacctctgagcgaagaagacttggtccatataaaagagacaattcagaaaacacatcctgactctgtgacgccgtccgggatagattgccggggatttattcatctgaacaagatgtatgccgagaaaggacgccatgaaacagtttggatcatacttcgcgcatttcagtacaccgatagcctttcgttgcaagagagctatctccacccaaagtttgaggtgcctccgtttgcatcagcggaattgtctcctgagggctatcggttctttgtcaaccttttccttctctcagacaaagacaatgatggtggactcaacgatgccgagttagcatcattgttcgcacccacccctggattgccgccctcttgggctgacggctcatttccttcatgcactgtcagaaacgaggctggccatgtcactcttcagggctggctagcacagtggagtatgacaacctttacttctcccaagacgactctggaatatctagcgtacttgggattcgagtcttcagatcggagcaacccctccacgaccgcggctcttaaggtaacacgaccccgtaagcggagaaaacgtccaggacgcgtcggtcgcaatgtcgtccttggccacatagtcggagctccggggtctggcaaatctgcccttctcgatgcttttctgtcccgcggatttagtaccacttatcaccccacaattcaaccgcgtaccgcagtcaacacggttgagcttccaggcggaaaacaatgttacctgatcatggatgagctcggcgagttagaacctgcgattcttgaaaatcaagcgaagctactcgatcagtgtgatgtgatcgtatacacatatgactcgtcagaccccgattcattcgcatatatacccgctctcagggcgaagtatccacacctggaggagcttccgagtgtgtacatcgcactcaaggctgacctagaccgtacaacccagcgcgctgaacatcagcctcatgaatacacagctctattgaatatgcctggtccgccgcttcatgtgagcgttacctggagttccattcaagaggtgtttgtgcacatcgcagaagccgcaatggaaccgagtacagcattccctcggagcgaggaagacgtcgagggcaaatggatgtcgtggggaattgctctcggagctgtggtttgtgcgggagctgctgctgttatgatctggcgacgagtcagtggtagtggagtctgacgcctggttgagggcgtccatgctgtaatgatggaactcgatacccctgaaatcaattattgcgttgctttggatagatttattgcgaataccgagcaatgtatatgaaatcttcgcaatgtgttgagctacaggcactttgtcgaatagacagccattaaggttaagaacctgacacaggcgtcca

SEQ ID NO: 20118 - DNA, 1780 bp, Emericella nidulans
gaaaagatcatcttcgaggaggctttcaagtacgggtgtcaagcacgcgagaagctgtggcacgacgctggcctgatagaagccgctgagtttggaagcggttccgaggactaccgtacgtacatatgatcatgtaacaaaaccatattaactcatgggaacagatttacatctcctgcagccggcagctttagacttaccgttgcggccctcccagtatgctgctggtcctattcccagtctgaaagattttcaggcacagtggaccgcatgggatatagtcaccaaagcaatgatcccacaagaagagctgctttcaaagccgattaaactacgaaattccctgatattttacctaggacatattcccacgttcgctggtaagttctatcgcagacggacttcaattgggctattgcttactcaagctttcagatattcacttgacccgtgctttgggtggcaagcctacagaccctaaatcatatcaactgatatttgagcgcggcatcgaccccgacgttgacgatccggaaaagtgccattctcacagtgaaattccggacgagtggccatctcgttcagaaatcctagattaccaagaccgggtcagaaacaggatacgatccacactcgagatacccggcctgtccaagaacagaacgctgggtgaagccctttggatcgggtttgagcacgaggcaatgcacttggagaccttcctctacatgctgatccagagtgagagagtccttcctccgccgggtatccaggcgccggatttcaagaagatatttcttgacgcaagagaaaatgcgaagccgaacgaatggttcgctataccagaacaaaccctatctatagggcttgactcttcagaggacttgatgccaacgtcaacattcggttgggataacgaaatacctaagcgcaatgtaacggtacaaccatttgaagcgcaagggaggcccgttaccaatggtgaatatgcccggtaccttcagaagaaccaaattcacaggtggcctgcctcctggattatgaccaatcaagcagatggagttgcgaacggtagcaccgcaactgaggattttctaactgacttctctgttcgcacggtcttcggccccgttccacttgagctagctcaggactggccagtcattgcatcctacgacgagcttcaacaatacgcttcatggatgaattgccgcctgccgacgttcgaggaggccaaaagcatctatgcacactcagctcgtctaaagaaaactcttacagacgcgtccgcggatgcagctagcaacggactcaaaaacggctaccacaaaccgcatcttagaaacggcaccgtcaaaattgctccttctacagcccaacccgtcctcccgccctctgcatccgcatcctctccacctgtttttctcgacctcacgacttgcaatgtcggtttcaagaactggcatcccatgcccgtgatccagaatggcgataaactggctggccacgcagagctcggcggcgtttgggagtggacttcgtcacctttggagccccatgatgggttcaaagccatggagatttacccaggctatacttgttagttttccttctaggcacactcgtctgcatcattcactgacttattctcttcctagccgacttcttcgacggaaagcataatataatcctcggtggttcgtgggcgactcatccgcggattgttgggaggacgacgttgtaagtcccattatcgtattcagttcctggaaaaggctaa

SEQ ID NO: 20119 - DNA, 1782 bp, Emericella nidulans
gagtcatcgcttcccaagtgggttgctccaaatctgatattcggcgtggtcgggtagacggtccacccgctcaggcacgttaacgtcacaccccaaccctgcttcttaaagccttcatgctctcaacagctaaattcgccaggatgcccaggaccaacggactgactgactgactgacgaactagcaaagcaagcaaccagaatggcgctcctcggcctgctcgaaacctaccgagatccgctcgcctttgtggctgccctctccgcggtgttttaccttctctcctgcctgcaccgacgatggcgacggtaccagtttgcaaaggagaacggatgcgaaccggtcgtgggaaagatccctagctatgatccttttctatcgctcgacagactctatcgcttgaccaagctggccagaaaccgcaagttgctggaaaacaacgttcagcggttcaaggaatttggcaatacccatcgagccaaacgcatcaccacgccgatgatcgtgacgcgcgatccgcaaaatataaaggctattctttcactgaagtttggtgactatagcatgggcgataggatcaggatttttggccctctcctgggccacggcatcttcacctctgacggcgaggactgggcccgatcccgccatatgatccgccccaacttcgtcaaagaacaagtcgcgcaccttgagattttcgaagaactcatggacgacctctttgcccttataccgaccgacggcagcactgtcgatcttcaggaactatttttcggcttcacgatcgactctgcgactgaatttctttgcggccataatgttcatagtctgaagaagcggcgatcaggggttatagatgacgagccggacttcgctgaagctttcaactactcgcttgacaacatctcgaagaatggccgttttggcccactgatgtttctgaatcgtgacccgaaagctgttgaatcgcatcgcatttgtcacgagagcatggaccagttcgtagacaaggctatcagaatgcgcgagagatataatgaagagaagattgtcgacgaggctgcagagcgcaggtacatgttcctttacggattggctcagcaaaccggcgaccggaggcgaatccgtgatgaagttttgaatatcctcttagcaggtcgcgacacgacggcttcgcttctgagcaacatgttctttctgctggcaaaacatccaagcacctgggcgaaactgcaggaggaggtcgctacacttgaaggccgtgctccgacttacgagcagctgcggaatatgaagtaccttaaatactgtctcaacgaaagtgagtgaagccgtctaatagctggacccaagaaaactaacatccgcagcgctccgtctcttccctgtcgttccggtcaactcacgcaccgccatcagagacacggtccttcccgttgctggtggcccagacggccagtcgcccgcttttgtcccaagggcacgatggtcgcgtacagtgtctacgccatgcatcgccgagaagattattatgggctgatgccgaagagttccgtcccgagcgttgggccgatctacgacccggttgggaatacctgccgtttaatggaggccctcggatttgcgtaggccagcagtatgccttaactgaagcagcgtatgtcacaacgcgactcgctcagcgatactcaattctggagagtcgtgatcctggcccatgggaggaaaagctgacgttgacgttgtgctcgtataatggaacccaagtcagtcttcgg

SEQ ID NO: 20120 - DNA, 1783 bp, Emericella nidulans
cctggctgggctcgagcatctaccttgttcagctgattgctcagccggccatcgcgtatatcctcgtcaagatccgcttgggcaagttccttgctgttatggtcttcttctgggggatctcactggcgtgcatgaccccggccaggtccttcggggggctgttggcttgtcggatctttctggggttgtttgaatccgggattcgtgagtcatcactatcatcttttccgcactggtatcgaaagactgattcttgtagcccctgcatttatcgccattactcagatgtggtatcgccgtcgggaacagccaatgcggcttagttcgtggtatgctatgaatggcgtcgttaacatggtgagtctttgctggaactctatactctgggccataggcactaacgagaatacaaacagtttggcagtctcatcgccttcggcctcggtcatatccactctagcctcgcgccttaccagatcatcttcctcttctttggacttgttacgatcgcctttgccttcatcgtcttgtgaggacaagccctcctcttacattgcctgctctaatatggtcgtgattgctatagattcttcctccccgactcgccgatgcaatccaaatttctcaacgaagaggacaaactgctagcaatcgagcggctccggatgaaccaacaaggcattgagactcacgaatggaaatgggcccatgtcagagaagcattcctcgacctcaagtccttcttctggttcgcgttgatgttctcaatctcgtgcgttgcacccttttcgcctatacggaaactgttctaatacgggtgtgcaggatccccagcggcggcatcaccactttcggaccactgatcattgagtcgttcggtttcgaccagctcaagaccatgctcttcaacatgccgttcggggcgatccagctcattgcaactctgggtggcgcatggctcgcgaccagatacaagaccaagggaggtgttatcgcgctcctctgcctccctgctatcgctggctgtgtgatgttgctggagattccccgcggcgacgctcacaaagggccgctgcttgcgggctattatatcgtaagcatgtcccttcattgtggttgaaaggtgctaacagtgctagatatctgtttaccccggcattagtaggtttagtcgaatctgttcatggatgatacattaacagcaacagcaccgatgatctactcctgggctgccggaaatacagccggtgagacgaagaagaaggtcatcaacggtatcttgctggttggccagtgcgccggtaatgtatgtgcccagacagtagatcactagagtgaagttaagtcagagcagaacagagctaaccgcagcaggtcgttggccctaacctctataccaccgatgaagctcctgggtacagacgtggtctcctttccaagtaaggcaactcgaacctatctctgttctgtatctgatgtggaaatagtctcgccatgttctgtgtcctcgttctactctgcgtgtgagtctatccctactccccctccctcgtgtagcaataactgaacgtctagtctcaacttgatatacatcttctacctcaataaacggcaggaaaagagacgtgtggctatgggcaagcccgcgaagatcgtcgatcgctcaatgcagattgtcggtgagaccgacatcgacagcaaggacgatgtcagtcagagggtggacgataatgcgttcaaggatctgacagattttgagaatgaggactttgtctatgtatat

SEQ ID NO: 20121 - DNA, 1786 bp, Emericella nidulans
attcccgtcccaggcgagcaggtcgatcgatcccggctccatatggcgtggcagcaagtggcagctcgccatccagccctacgcaccatatttgtcaagtccgccgctgaagacgggctgtacgatcaactggtgtataaaccagccgaggcagcattcctactgtgggaacggcaggatgaggatgccgtttggaaggcactcaaagacttcactcgacaagacaatcccgaccagccgccagttacttccattatttcgaccacggtggatggcaaaaccttctgcactgtcgatattagccgtgccctcatcgatggggtctctattctaatcatgttccgtgatcttagtcgggcatatgcagggttgttagagatcggggaggttgtacgatacagtccatatatccgctacgtgcagactctccctgcggggatgtcaatagattattgggggagctacctagaggctgcctctccatgccactttcccgtgctcaacgacgacatacaaggggagaacaagttacatgcattgaccgtggacctgaaagacgcaaagggcatccatgccttctgcgccagacataatgtcacgccggcgattgttttccaaatggcatgggccctcgtcctcaaggcttacactggtcaagacgacatctgttttggctatctgaccgccggtcgagacgttccggtgttgaacatcagcgacgcggttggcgtcttcgaccccgaacatcccttgaaccgtcgagaagagatgattcggcagtgcaaagccggggttgcggtggtaggggagggtaaggaagccctgtttcagggcttggtcgaacatgtcgtcatccttacccaggacttaatcgacgacttgctcgtcagcgaagtctccaatattcaggccgctcatgttgacacggaccagagtttcctcgctcttggaggagactccattacaaccatgcaggtgtcctccggctctcgctcgcgcggcctccagctcgcagtcaagcacattctgaggagcaagattatccgtggggctgctacacaagcgtcgcacaagactaagtgcatttgtatgggcacgagcacgagtcaacgattttctcttctatcagccggcgaattggaggaagaaatagatgccctggtcatgaagctgggctactctggcgccgatgccgtggaagacgcctacccttgttctcccatgcaggaggacattctgatcagtcaagccacagcgccagagatgtacaagttctttgctgtatgctctcttcgggcaaggaattctgcagaccccgtcaatatcgaccgtgttcagctagcttggcgtcgcctagttgccagacacccagcgttgagaacattcttcgtagagggtctgtcccaagatgggctttacacgcaaatcgtgcttatagatcatgagccccagatccagcatgcggcggatctggacagcctcttcaagtaccccgaggaccacccccttgactaccgggacggcgcgccgcctcaccgtctcaccatctcgcaaggcggggacggcgtagtcttcatcaatctcgaaatcagtcatacattaattgacggaagctcgatggcgatcatcctaggtgacctcgtcaaggcgtatgacgacgaccttcccacgggaccgctataccgccactatatcgcggcaatacaggcgcgatcaacggagaaaacgctagcattctggacagcctacctccaagatgtgaagcccgtgtttttcccggccctac

SEQ ID NO: 20122 - DNA, 1786 bp, Emericella nidulans
cgttcccataatgccgcgagaagagcctcttctggctccacgccaatcatcagaacagtcatccattcgaaatgctgaggaggaagacgccttgttgactggcgagcggactcaccgcggtggaagtcgtcgtggatggggcttctggagagaggtcggcctcttttcctgggctctaatagccaccgttgctgttattatccttgcaatcgtctatcagcgagagtcaagctggatacagagtcacaagaaagaaacatggggtccaggaggaaaaccaaccggcaaacgcaaccttatcttcatggtctcggacgggatgggcccaactagtcttaccatgactcgaagcttcaaacagcttacgcaagggcttccagctgacgaggtcctcgtgttggacaggcacattcttggtacttcacggacaaggtccagctcgagtctggtcacgactcagcagccggagcgacggcattctcgtgcgggttcaaaagttacaacggcgccatctctgtgcttcccgaccactcaccttgtggaacagtacttgaggccgcatctttggctggttacaagactgggttggtggtgactacccgcatcaccgacgctacacgcaggcttcttcgcgtcgcacgcaaaccttcgacagtatgaagaccagatagcagagcaagaaattggtgaacacccactgggccgtgtggtagacctcataatgggtggtggacggtgccattttctgcccaatacaacggacggtagtgccgcggagatgatcgtgatctggtggcagtcgccaaggagaaggggttctcttacattgacgaccggaaaggttttgacagcctcaatggtgggacggaagcaaagctaccgctgctgggactctttgctgagaaggacatcccttacgaactcgatcgccgcactcagaatgatgtgtatccctctttggaggagatggctcggaccgcgttgaagatccttagccatgctacagaggacagcgatcaaggatttttcctcatgattgaggggtcccgcatcgaccacgcaggccatggtaacgacccagccgcgcaagtcaacgaagtgctcgcctacgataaggcctttgctgcggtcctcgagttcctcaacgacgattccaccccaggggtcctgggtgcaacatccgaccacgaaactggaggactcgcctgagctcgacaactacatgacacttaccccgaatacctatggctccctggcgttctggccaacgtcagtcactcctcggaatatgccgctcaaaagcttcaagactaccgccgccagaagaccgacaagccctctcaggaggcctacacgcgggacctcctcaagaaatctttaggcatcgaagacgcctcacagcaagaaatagacgccctacttgatcccaacaacccaatcatccctagctatgtcttcgccgacatggttagtcgccgagcccaaatcggctggtccacacacggtcattctggtatactatcgcccttccttacctaaacctctcatatcatcggaactagcaactaatccctccaaaaggtgtcgacgtaaatatctacgcttcctcgtcaagagacgcctggccgctacaagtaaccacgaaaataccgaaatcggcgccttcctagccgactacctcgacctcgacgttagcgccgtcacaaaacgcctccagaactctgagttctggaccgccgctgaaagcataagcgtaagcgagagcttcaactggctgggcaacccg

SEQ ID NO: 20123 - DNA, 1792 bp, Emericella nidulans
tcgcctacgggcgacgttcttagtatcggtctgctgcgttggatccttcctgttcgcgtacgatacgggcattattggcggaatccttactctggactcgttcaagcagtcgtttcgatactcagaggcagagcgggcagatatcgcttcaaactctaccagtcttctgcaggccggacgatgtccttgtctcgactcccaggcagttctggcagcttgctgaccttgtgtcctcgatctagctttcttttcctgctttttcgcctggccgttcaccaaaaagtttggtcgccgatggtcgatcgcgctcgcctctttgatcttctgtatcggcgggatcatccaggtggctccaacgcactcgattggcgcgttttatgctgctcgtgtgatcagcggtgtcggtgtcggcatggccaccgtgatggtgcccatgtacaggtaatcctctgctgccttatattgatcttgaactaagctgacatcccgtcgtggacagcgcggaaatgagccctaaagagatccgaggacagttgggcagtctgttccagttcttcttcacgctcggcgtcatgacctcgtactggatcgactacgccgtcgaaaaatacgtcgcatcctctgatcgccagtggcagatccctatcggactgcaactcgtgccggcggggatcctgggcctcggcatgctgtttctcaaggagagtgtgcgatggctcgccagtgtcggtcgacatgatgaggcgctgcaatccctgatctgggtccgtggaggagaagacacagaggaagtccgcactgaaatggcagagatcctagacggcatcagcgccgaagtggctgcaactgagggcgtcacctggaaagagctgaatcttccagccaaccggttcaggattttcatcgcgataagcatccagatcggtacgtctccttgttagatagcgactctcaattgggtctatgctgacaactgcagccgcgcaatgcactggaaacacctcgctggcatactgtacgcttgctcatctaaaacatgtctgcgtcctggactgaccgtagcagatgcgcctcagatcttcggtgccgttggaacgagcgagaacgacacgctcctgatcacagggttcttcggtgttgtcaaagttgtagcatgcgggaccttcgtccttttcctagttgaacggattggccgtaaatggtctctagcccttggcgccttcatgatgggagcactcatgcttatcgtcgcgatcctcgcgaaggtgttcacgccagattcaaccgctactgaaatatcgtctcctaccgctgcatcgattgcgatgatctatctggaggcggcctcgtataacatgtcctgggtatgctaacagccagagccagtccgtactggaccgccagcacagcaagctaacaattcgactagggccccgtaccatggctttacatgagcgagatcttcccaacgcgaattcgggagatcggtattgccgttggaacagctacgcagtggttgttcaactttgtgttctcgcaggcgacaccgcatgccgtgaataacatgggctggcggacgttcctgatgttctgtatcttcaactgggcaatcgtggtctacgtctttctgttcatcagggagacgactggcaagtccttggaggagatggaagatggtacgtatttcatagtgcaggtatacaataatgctgacggctcgcagtattcaaatcgaacattgctcggtttaggaaagatgaagagcgtgctgaggatggagctcctacatata

SEQ ID NO: 20124 - DNA, 1794 bp, Emericella nidulans
gaacaatacaggatcctaccagatgatatctacaactttgataagactggctttgcaatgggcctttgtgcacatcagaaagtgattaccaagtcagaatcatgtggccaaagaccagttctacagccaggaaactgtgaataggttactgcaattaagtcaatcagtacttctagataggtacttctactaatacttatctttaagggcaagcagtataaccaagcatggtttacaggccttctgcctgactggtgatttgaaattagtacaaatagatagacaactaattagacttgttaaaccacgggttggggcgggtttttaggcctagctgatccgcccacgcgggttttggggtgggttaccttcacagtaaaccgcccatgggtttagcaaataattctaacccaacctaaataacccaaaataacccagttatgcatatcattactctaataagcagtgatctacatagttaataaaatactgtatttaaatactgtattataactatctaagtaagaaaatataatctaaatacagtaatatacctattcagatatcttggcaacccagcaggttgctccgccgggctttggggcagccaaaaatatccaaaacccaatagataattagaaggtctaacccaacccatttcttggcgggtcggggcgggttggggcgggttttgtgggttgggtttaacaagtctacaactaataaaactagcctttgctggctttagaagcagtttatcctgtcaacagagcattgtatatatagaagatattaacttctagttcttgatagccatggaagccattatataccagaatttaatcaaatctatacagatcataatattataccactctgcatgccagcatattcctcctatcttgtataactacttgatattggatgttttgtagttttgaagtacttgtatgccagcttggttttcagaaaatatagcttggcattagctatattaacaaacttgatttccttgcagcctatctacaagctcgaatcagcatatttaagctggatacaatcagaaacagttttcgagcagcaggactagtgccattgaatcctgaaccagtactttcaaagcttagtattcaggcttgtacacctacaccccctggaagccgtgcagccaggcaagtactttttgcctacatacaccagcaaatgttggtgagcttctaaagcaagcttctttactcagagattttctcaaacagcactcaaaaagtccaccatcaccgccccataatgccctaaaccagctaattaaaggctgtcaaattgcaatgcaaaagggcatactattggagcaagagaatagggcactacgtgctgaaaatgctatacaaaggggaaagcgagctcgtacgcatagatggatagctcatgataatggtctttctgtacaagaggctacagagctcgaggaagctcataatgcgtcttttcaggcaatacctgttgccatatcccaaagcctggctcgcaggttgatggcctgtggcctggatgatagtccgtgacccaggcggtcggtcgtcgggcagaataagaaacggtatcactagcgatagcttcaaaacaacacaacaatcaatcatacttcatacatcaattgaacttcgcagaattgcaacaatacctggtccatgtgggccaccagcagaaggtgcacaaacaccaaaggcacgggcattacctacatgtagtacctgtaatagaattgggcatagaagaaatgcttaataattaata

SEQ ID NO: 20125 - DNA, 1798 bp, Emericella nidulans
gccgagggatccgctgattggtttggttgggaaggttcgtctatcccccaacttcgacaagcacccgctaatcaagctgagggctacagccgtccagtggaaaatcgactacattgaatagcttgacagatgcttcttcgaaagtcggtatgttctattgcgcgcaggatgcagggtaccattggcttccatatactaactgagctttcattggttaggaaacttcccgtgagttctgctaaaaccgtcctccgcataccttctcttcgagacgtctttgcctgcaacagaaaacttacgaggcttacttatacatggtactgatctcagaaccccagatttactactattgatccacaacgagccattggctatctccaaatagactgtgcttgtaaacggtacggtgtggcagataaatgcaagccaaactacggtgcttgtaccgatgggaagcgctcggttcccatcgagcttctggatgttgctggtctagttccaggggcgcatcagggccgtggcttggggaataagttcttggacgatctgcgccaggcagacgcgctaatccacgttgtcgatgttagtggaacaacggacgcagaaggtcggtggcacgaatttctgtatagtcgagtagtttattgacgcactggagtgtaggaaagtctacacgaggatatgatccttctcaagatattgagtggctgaggtcagagatcgtgcggtgggtgctgggaaatttgatgcagaaatggtacggcaccagcctacttatgccacaactgcacaccacgctaatttacttaggggctctatcaagcgcagacatatggccataagtgagtgggcgacatctttgataccattgcgattgattgttgactcaaacatcagaggcaaccgcgatggagacgttacaaaaccaattttccggatatggaagtacaccatcaaccgttgcacgatgtctggaccggttagcgttgaaagaaccactcgaagaatggtcagatgagaccgtagagcaagtcgtgcaagcatttattgacgagaagttcccgacggtattcgccctaaataaaattgatcaccctgatgcagacaaggtgagatttttcttctgctgttatatcattgctaaccgactatttatagaacatcagtaagatcgccaagatgcaggatcctcagagaatcgtcctctgttccgccatatctgaagtttttcttcgaagacttgccaaacaaaactatatcaaatacactgagggcagtgaattcttagatacaagggaagacctcattgcagatggagatccggacgggggaggcctccgggagatggacgaaaagctgaaaacgtatgagacagctgccgcctgcatagagtcttactaacgtcgaatcagtcgcgtggagaacttgaaagatatggtactttatcgctttggctctacaggtgttgtgcaatgtctttcgcgggccgccgaggtcttagggcttgtaccagtcttcccggtacgaaatttacacaccttttcctctgggactggtactgcggcatttcgagattgtgtccttgtaaagaagtgagtaattctatacttcgaggttttcccatctgtctgacatctggaccaggaatagcactgtgggtgatgttgcgcgtaaggtcatgggcgatgtacccatatcttatattgaaggcgttggaggtgtccgcgtgtcagaagatgagattgtggcagttgggaagcatgatgtaagtgtcttcttctctgagtatgctctaatc

SEQ ID NO: 20126 - DNA, 1798 bp, Emericella nidulans
ggtaagttacctggagtcacgggcacaaaaagaatgtcgtttcttgttttggttgctgacccacgtaggaccatcaagcgccaggaacgagctgcgcggttcgcttctctgcctccagactatcatgcgccctttacatcagcggacaaaaggatagtttcggagcccattgaagagctcgtacagacggtccaggagggcacgctctcccctgtcgatgtcctccggacgtacggcaaggttgcgtgataagcacaagagaagacgaactgcattacagaacttctacttcccgaggcggaaacctgggctcagactgaggtcaacctcaagggcccgttggctggagtgcccgtctcgttgaaagactcaatccaggtcaaagggttcgacatctcactcgggtactcccgtctggcggggaaaccgtatgcagaggatggcccgctggtgaaactgttgaaagatgcaggtttgtaccctggccctgtatgtttggccctgtatgttagggaggctgaccattgcaggcgcggtaccgtatgcgaaaacagcactccctgtgacgcttctgtcgttcgaatcggccaacgcgctctggggaccctgcctcaaccctcacgtaccccagtattctcccggcggatcaacaggcggagagggtgctttgctcgctctgggtgcccgcatcggtattggctcggacgtcgcgggttctgtccgtgttcccgctgcatggagcggtatctactctctccgttgcagtaccggtcgctggccaaagaatggtgtcaacaccagcatggcggggcaggagggggtgccgagcgttttcagtccaatggctcgtacgttaaatgacttgacgtactttacccgatcaatcatcagcatgaagccgtggaagtacgattacaccgttcatccaatcacctggcggagtgaggaagagagcgaggcaaagagcaagtctctgagagtcggattgatggcaactgatggtatgtcccaagtcgcctaagtagtatcatactaattgaacaggcgtcattcctcccactccggctattcaacgcgctgtgactaccacggcggctgccctttctgctgcaggacaccaagtcgtcgagatcacacccccagcgactgcggacccgtttaccggccttcaccttgcctcgcagctcttgaattcagacggctgcgagactttcaactcgcacttttacagcttcgagccgtccgatccgggtgctgcgcaactgtccctgattgcaaacctgccccgtcctcttcggtacctctactacctctatgtgcggtatatccgccgcgatgagaaatgggcaactttgatccagagcttcggttccaagagcgcagcccagcaatggaagctcgtcgcaaagcgcgaggcttccggtcaacctggcatgcctggtgggacgctgagtcacagcagtacgactttatcctgtgcccggtcaacgcgacacccgcgcttccacacaaggccatgaaggacgctgtctcgtcttgcggatacacctttctctggaacctgctcgactacaccaccggtgtgctgccggtgtcgcacgtcgacccgaagaaggatgctctgacggctccgtataaaacggttttgaagcagctgggggccaaccatgctctcgcgcagggtgcctggaagcactacgatgcgtctaaaatggcaggcctgcccacggctgtgcaggtggtcggtaggaggtggcaggaagagaaggtgctcgggtacatggcggccgttgagagc

SEQ ID NO: 20127 - DNA, 1801 bp, Emericella nidulans
cgctggtgaagggcttcaagatgttctgaagtcaaaccttggtccctcggggactctgaagatgtacgtatcaagctcatatttctgggtctgcaaagcttaagctaactaatagtcaggctggtagacggtgctggtggtgtacgaattatccatgccactgaaacgaccacaatgtctaatggtgcacaaacagattaagttgaccaaggatggaaacgtgttgttacgcgagatggtaagttgatcctcagcagcaagatgtggtcggactagctaacaatcgcagcaaattcaaaaccccaccgccgtaagacttaccttccactctttggagacgatatcctgtattgactttcaaaggtcatgattgctcgggctgcgactgctcaagatgatatcacaggtgatggaacaacgtcggttgtgttgttggttggagaacttcttaggcaggcggatcgtcacatctcagaaggattgcacccccgagttataaccgatggttatgaaatcgcaaagaatgaagctctgaaggtgaggaaagccaaacatcgctctgactagcgctaagtggtttgatatagttcctcgataagttcaagatcgaacgggcgattgatcgcgaacttcttctttccgtcgctcgaacctcgctcagcacgaagctgaacagcgccctcgccgagaagcttactcccgatattgttgatgccgttcttgcgatccaccgagctccggaaaagccagacctgcacatggttgagatcatgaccatgcaacaccgcacttcttccgatacacagcttatccgtggtcttgcactggaccatggtgccagacacccggatatgccgaagcgcgtcgagaacgcctttattcttacccttaatgtcagtctcgagtacgaaaagtcagagattaactctgggttctactattcatcggccgagcaaagggataagctggtggaaagtgagcgtaaattcgtggatgcgaaactgcagaagattgtcgaacttaagaagcaggtctgtggcgatgaccccaagaagggcttcgttgttatcaaccagaagggaattgatcccctgagtttggacgtccttgtgaagaacggaataatggctctgcggagagctaagcggaggaacatggaacgccttcagctgatttgcgggggtaccgcccaaaacagtgtagaagatctcagccctgaggttcttggatgggccggccttgtttatgagcaccagctcggtgaagagaaatacacctttgtggaggaggtcaaggaccccaagtctgtcactatccttattaaaggtcccaacggacacaccattgcacaggtcaaggatgcggtacgggatggtcttcgatcagtgtacaataccatcgtcgatggctgtgtcattcctggagcgggagccttccaagtcgcctgccatgctcacctaacatcggacagcttccgcaaatccgttaaggggaaagccaggtggggtgtcgaggcattcgctgacgctcttctggttatccctaagactttggcggataattctggacacgacatccaggactctctggccttattgcaggaggaacaggcagacggcaacgttgtcggcctcgacctcactaccggtgaacctatggatcctgtgcaggaaggcgtgtttgactcgttccgcgttctgcggaactgcatcgcttccagtacaggtatcgcctcgaacctacttctctgtgacgagcttctgaaagccaggcagatgggtaaacaaggtggacccggcgg

SEQ ID NO: 20128 - DNA, 1807 bp, Emericella nidulans
cggtggttgtgaccgggaagtgagagtatggaacatggccaccggcgaatcgatctatctactacgcggccatacgtcgacagtgcgttgcctgaaaatgtcagataagaacacggccatttccggctcgagagatactacgctgcggatatgggatctgaggacaggtacgtgccgctctgttctggttggtcaccaggccagtgtcaggtgtctggctgttcacggagatatcgttgtttctggaagctatgataccacagcgcgcgtttggagcatatcggaggggcgttttctgcgagcactatctggtcattttagtcaaatctatgcgattgcctttgatggccgccgtatcgcgactggcagtcttgacaccagcgttcgaatctgggacccaaatactggccagtgtcatgctatcctccagggtcatacgtcgttggttgggcaactgcagatgagcggcgatactttggtcaccggtggctctgatgggtcggtccgcgtttggtcattgactagaatggctcccattcatcggttggcggcccatgacaacagcgtgacgagtcttcagttcgacaataaccggatagtcagtggtggtagcgacggccgcgtcaaagtctggtgtctgcggaccggacagcttcttcgggagttgtcgacaccctcggatacggtttggagagttacgttcgaggaggaaaaggcagtcataatgtcgagtagatccggtcgtactgttatggaagtaagttggacccgctgtgtttcttgaaagtctctaacattctgtaggtctggagtttctcaccacctccagaagacactgagtttgacgcagcaacaatcggcgcttcgtctagtatatctgaaccaccaccggttcgcgatagtcacccaatacgaccactcgtacttccggatcttccgcaaagaagcgatggcgaccaagtaatggtggatgttccaccataaactgtggagtgcttcaacacgacaaactagcgtcttcttaatttgcaccttcagcgttgttgcttcggtttgctgcttctaacgagattccccgcaccgccggcgtgcaggattggtcacatattcactggttagcatttgcattctgggtgtttaggttcatgctgcaatgttttctgtctatggacttcgtggagttagatagggaatggctgccatactggcttgataccagctggaatcttatgcggaaattgtactcattttagtttgcgcctcaggaggtgctccttttgataacaaaaagcccctatacactttgcctttttacttgtaaatcagtgctatagcacgtagatctctccccatcgtaaaagactgggggatgatcccattcgtcagctgactgatctcacggatttagcgttctccgctcgatcttcggcttgagccatgcacaagactcttataaggtccagctactactacatttcgacagtctacaaactacaatctgtcggagtcgattactcccgtcacctcaaaaagcgctcctggaggcgggaatttatagggaccgaggcgtggttcaccatgtccgatcgccgattactagtgaggtcgtgtattgaacacttgatcgcggaatcgactgggacagtcgggtcgttttaacatagataccacgctcggagtacggcgttcagttcaatactccgatttgcctctactgagagccaatcaacatggtctatgctggccgcagccgtgggtgtcatttgtgccgcaagaggaaaatcaaggtaggacaaaatctcgcatt

SEQ ID NO: 20129 - DNA, 1811 bp, Emericella nidulans
gcagcagccgatattctcgagtacgatccggatttgagcttcatgccgttctttttcggcatttacctgctccagggaagttttctactcttgcttgctgcagataagctacagggggatgcgaatccgagcgtcgtccgcgcttgtgagactatcgtgcgcgcacatgaggcttgtgtcgttacgctgaatacagagtatcaggtatgtcccctgccggttcctaaatttagctatgatatagctgactgaagaaaacagcgaacattccgcaaagtgatgcgctccgctcttgcccaggttcggggacgcgttccagatgattttggtgagcagcagcagcgccggcgggaagtgctgtctctttaccgctggaccggtgatgggacggagctcgcgctctcttgagcctcatactcccagctatacagctattacgattacacgacatataaactgaaagtggatgaaggacggttaacttgtctcctgttgtatatcctctgcgggtgatacctctgctggtcttaggagggagtgccgagccgtacatagttgatacctctttgctcgtgcattcagtatgttgttcatcactgtatactatagttactctcataccccatttgttagctggccaattcaacttgcatccttgtcttctgcttttgggaatcttcaatccatctccagtagagtgactggccatccaggagccgaggattacagtatgacgccacagtggagataaggataagcgattaccgataagctggccgataaggaatctccgcgttctttgccctcgtaactccttcagcagaacaagatcaactttcacgcgatggacgaaaccattctctcgtaatccagaatcatacaacatggctctacttaagaatctcacgagttatattcgccctttggcaagctgttctaccacgacccccagatttctccccctcaccatccgccgcggcctcggtattccaccccaataccttcttgacgactacaccccgcgctacgccctcctcacgtctaccgacgctgccaaaaagcgcagcctagcctacacccatctctcgaattgcaatctctgcccgcgcaaatgtggcgtgaaccgcttcgaaacaactggccactgcctgatcggcgccgaaacggcaaaagtgaacgtgattgcgcctcatcgtggcgaagaaccttgcatccagggctttcacggcagcggcagcgtctttttctcggggtgtaatctgcggtgcgttttctgccagaaccacgatattgcgcataaacgtaacggcttcgatctcacccccgaggagttagcggaatggtacatgaaactacaggatatgggacacgtgcacaacattaacctcgtcacaccagagcatgtggtcccccaggttgtgttgtctattctagcggcgcgggatatgggcctgcggatcccgattgtgtataatacgtcttcgtttgatagcctcgagtctttggaactgttggatggactggttgatatctacttaccggatttcaaggtgtggaagtcggaaacgtcgaagaggctgctgaaggcggatgactatgcagagacggcaagagagagtatcaaggctatgcatgagcaggtgggggatttgtcatttacgagcgatgggattgcgaagaagggtgtgctgctgaggcaccttgtgatgcccgggaaggaagatgagggcagggagatcatgcggtggctggcagagaatgtgagtaaggatctgtatgtgcatattatggagcagtatcggcccgatgcg

SEQ ID NO: 20130 - DNA, 1816 bp, Emericella nidulans
tgcaatatgaagttcatcctccccctcttcacttctctccctgtagccctcgcctggctcccgggcatcgacaaagacatttactccgccgcaggcacaaacatcttcaatgtgacatctgcctccagcaaacgctggctcccggcctcgaaaaagatccgcggcgtcaaccttggcagccactttgtcatcgagccgtggatggccagcatggcatggagcaatatgggctgcagtgggcaacggtccgagttcgactgcgtgatggctctcgggcaggagactgccgaccaggcctttgcggaccactgggggtcctggatcacgcaggacgatatcaaccagatggtacagtacgggctcaacacaatccgcatcccggtagggtactggctcaaagaggatcttgtctacgcggactcggaacacttcccaaaaggagggatagggtatcttgaggacgtttgcgggtgggcaagtgatgcgggcatgtatatcatcatagatctgcatggggctcctggagcgcagcagcctaagcagccatttacgggacaggtgagtggcagtctcctactggacattggtgcagagtggcttattaaatatgcatgcagtatgcccctaaccctggcttctaccaggactaccagtacgaccgggcgctggagttcctcgagtggatgacgacaagcatccaccaaaataacaagttccgcaacgtcggcatgcttgagatagtcaacgagcctgtccagaacgcagaccaggcctcctccatgatcaacagctactacccaagcgcgttcactgtaagaccatctgtcttctcattcccaaccggtcaagcgaaagtatactaacgtctccaagcgcatccgcaacactgagtcatcccttggcatcaccagcaacaactacctgcacatccaaatgatgaacgagaaatggggctctggcgatccgacccaatccctgacagacaattacttcgccgcgtacgacgaccaccgctatgtgaagtgggactccagcgtcgccgtggataaggaaagctatatcagcgcctcctgtgtcgacgaccgtggcggcaactggccgaccatcgtgggcgagtggagtctcagcgttcctgacaatgtcgagcacactgcagactgggagccatcgtccaacacggacttttacgcgaggtggtttgcggcgcaggcgattgcgtatgaaaagcaggagggctgggtgttctggtcgtggaaggcgcagctgggggactacaggtggtcgtataaaggtgagttcattcgtctttggaagtgcatggctaattttatagatgcggttgatgctggggttattccaaaggatctggatagtatctatgactactcgccctgctaaagggcacagtagcaggaagaacaaggtagtcattcggtagcagcaaacgtcgcggcgactaaatgcgagttgatcgcgttcgaaagaagaagccgtagcaatactcaatcattaactggccatggctgataatgaaaaacagtagaccggaactcagtttcctctccttgaagtcaagagcgactcctcaatgatatctatgccgtcagcattcaatccgcaggttgtgagtccaaacactatccaggcacctggggggccagagaaggaccgcttgtaactgctggaaaaaaatttacaaggagtacgcgaataagtctttggagggttaggcagcaaatcaagtagtctatattcccctcaaggctggattcgtactcacgagcaggtagtgttctatttggtgccacgctgagcg

SEQ ID NO: 20131 - DNA, 1817 bp, Emericella nidulans
tcagtgcgaatcccgcctccagagacttcttctatcgaggaccatttcttctggacctacacggaggagccgcaccgttcacgacggcaagcaatcatcaaagcacacccagaagtacgtctctccgcctcacttccgactctgtgcttcagagagctaactcgtacgatcttccaggtaaccaagctctgcggaccagagccgttaaccaaatacgtggtgctgggcgttgtttccctccagatatgctgcgcataccttctccgcgaaacgtccttcttctcctggcggttctggttaacggcgtacgtgatcggagccacttcgaaccaaaacctcttccttgccatccatgaaatatcacataacctcgctttccggtcacctatggcaaataggctcctggctatctttgccaatcttcccattggattgccctacagcgccgctttcagggtatgcatatactaaactcctttggttcgcaatagaaaaagaaactgatcatatgcaatagccctaccatctcacccaccacaaatccctcggcgtcgctggcctcgacaccgatcttcctacagccttcgaagccttcgtactcgactctctcctcggcaaagccttcttttgcaccttccaaatcttcttctatgctgtccgccccatgtttatctacagtccgcccttcacaataattcacctcataaacctcttcgtccaattctccttcaactacatactcacaaagatctgcaacggctccctcaacccactcctctacctccttctcagctccttcctcgcgggttccctccacccctgcgcaggccacttcatcgccgagcactactttttttcaaatgtagaccatggcacagaatcactccgggaactgaagggggaaaagggcgaaaaacatcctctcacctcccttccgcctccggaaacgtactcatattacggcccgcttaacattctcacctacaacgttggtctgcacaatgagcaccacgatttccccgctattccgtggacaaaacttcataccctccaccgaattgctagcgagttttacgagcctttaccctgccaccggagctgggtctgggttatttggacctttatcctagatgagaatgtcggtccgtggtgccgtgttaagagggcacaaggtggtcgtcttgtgggaggtggtgatgccaccggtcgtgcaggagagggaatttccgctgggcccgacgaggcaaatgatgatgggtggaaagagagcgagattcagaattgatctggtttaaataggtctacccatatatgtagcttaggcagattttcgctatctttctattcctctctattggatcgattcggatgataactgggtaatcgcatatctttgcgcacttcggtatgtacgctatggatgcttgcagtatcggagataatgatttcctatcatccatatgatatatagtctgcacaccctaaatactacaacctatcaactacaagtcttatggacttgcttcagagaagacaaaaaaaaagctcctccagaaaaggcacgtaccagtatgcacgagattgcttgacttttagctttgcagtctatccgtaagagccgcgtttctgtcttgaagggaagaagctataagtattcagtaccattcgtggtgattacttatattatctgcctggctatcaaggcgggcgttcgtctagaagtgatagtaacctggagaataatatttacatcaagttttaacgggaaaaggcagaggcatgggatcgaaggacgagatagatcagtctacacgcca

SEQ ID NO: 20132 - DNA, 1817 bp, Emericella nidulans
aactttcactctctggcaaacttcctggatatgctctggagaagtcattggaaaatgaggaacttatgagccgtgttgatgccttcacccgggcagtcaaaatccgcagggctgtagtatcgaggacccccgcaacttctgcagtcaccagctctttggaaacttctaagctgccctataaggattacaattatgcgcttgtccatggtgcttgctgtgagaacgttattggcaccctgcctctgcctcttggagttgccggtccccttgttattgatggtcaaagctatttcattcccatggcaacaactgaaggtgttttggtagccagtgccagtcgaggcgccaaggctattaacgctggtggtggtgcagtgactgtcttaactggcgatggcatgactcgcggtccctgtgtcgggtttcctacacttgcacgcgcagctgcagctaaggtctggctcgactccgaggagggtaagagcgtcatgacagcagcattcaactctaccagccgctttgctcgactgcagcacctgaagactgcccttgccggtacctacttgtatatccggttcaagacgactactggcgatgccatgggtatgaacatgatttcgaaaggcgttgagaaagcactccatgtcatggctacagagtgtggattcgacgacatggccaccatctctgtgtctggcaacttttgtaccgacaagaaagcagctgctctcaactggattgacggccgcggcaaatcagttgtggctgaggctattatccccggtgatgttgtgcgcaatgtgctaaagagtgatgttgatgcattggtggaattgaacactagcaagaatctgattggcagtgcaatggcaggtagcttgggcggattcaacgctcacgcatcaaacattgttactgcaatctttctcgcaactggtcaagaccccgcgcaaaatgtggagagcagcagctgcattaccacgatgaagaagtaagtagtatactttgatgtctttctctcctggtcggcgctaaccacgttttagtacaaatggcaatcttcagatcgctgtgtctatgccttcaattgaggttggcactatcggtggtggtactatcctcgaagcgcagggtgctatgcttgacttactaggcgtccgtggctctcaccccaccaaccccggcgacaacgcgcgtcagctggctcgtattgtggcagccgcagtgcttgctggcgaactgagtctatgctctgcgcttgcggctggacatcttgtcagagcgcacatggcccacaaccgcagtgccgctcccactcggtcagcgaccccggtctcagcggctgttggtgctacgcggggactgtccatgacgtcttcaagatagatatcatgagtgcatgcctttctccttcctaccttttacgataaatacgatgcgactaggctttcttacgacggccattctggaactaactgtccctcattcggttcgctcacccggacttcttccacttccggcacacattttctgagcttttttacatgtgggttttacggcgaccgtgaatcatatggtcagcctcatttttttttgggagtctattgaatatactggagtctgggcatatacatagaactgcgctacggattgacctgaacaagagatatactaaaaagcaaaggagacgagcagtcgctctttgcacaagggcagctgttcgtcggactacatctgaagatgattgtttgcaatgtatggataataacatgtgtatgaataatacatatactagtcgaatcaacttcgccgagcaa

SEQ ID NO: 20133 - DNA, 1830 bp, Emericella nidulans
cttgggatgcctgggatgctattagaagaacttgtaaataccactccaggcttttcgtaggtaagaaaataatatctgacctttcttcgattctgataatcgtggctaagatacctgctagctctctctttaccgaagcaccttccaccgatggctgttcagtcaagatggcattctgagccagtccacttgtttaccatcgactcgaacacgttcatcaaaaatcagaaaggatatccagtcctaagtaaagctcaccaggcactgatttccaggttcatgcgtctccgcaccgctccatggatcttgctttgcgatgttggacctataccaggtgtagagacggacaatgcgtccagtctccctggctctgaataccctagtcttgcacaggctgcggcttcaatcaaaaagcatcatgaccctactccgcatctgtcatacatgagaaatcttcaatcacgtcagcctccccgaactgccattgagagattcggcactggctaccaagactacctgcaagcgccactgcagcccttaactgtcaatctggaaagtatcacatacgaagtctttgagaaggaccctatcaaatacgaatggtatgagcgcgcgatcgcgaaggctttaagcgattgggtagaacaaaaaaagcccacgtcaaacccggatggccgtgtggtcgttgcagtagttggtgccggaagaggtcctttggtgactagggctctcaaagcaagcgctcagtcgggtgttgagattgacttgtgggttgtggagaagaacccaaatgcatttgtccttctccagcgtcacaacgagaatctatggggcggaaaggccagccttgtgcactccgatatgcgtgcttggaaaggaccgcgcgtacggaaaagcaccaccttgtcgacagaacccgtcggacagtctctgggtattgaaggccaatttctctacactcctgaccctaaccaaaaaactgcagattcccctagcctggacgctattgagtttgaggactccaaaatcgatattgttgtttctgagcttctaggttctttcggggacaatgaactctcgcccgaatgtctagacggcgtcaaccatctgctgaatccagtacacggcatctcaatcccagcatcttacacggcacatctcacgcctatctcagcgccaaaactccatgcggatgtcacgaaccagtcaatcacaaaccctgcagcacctgaaacgccttatgtggtcatgttacatgctatagactacctttctactaaccaatccgacgccagcgcaggtaaccccgctaggtcttcagttgcgacagttccatatgaaccaactacaccatttgtccaaacagcctggtctttctcccatcctaatcgagatatacctcctcagccggcttcaacgtcgatgatatccaatgcacacaatgtgcgccggactcgtttaacgttcccggtcccaaatcgtggagtttgccacggccttgcaggctacttcgaaacagtcctgtaccgcgatgtggaactgtccaccaacccggtcactatggacagcaagagcgcgaacatgatcagttggttcccgatctactttccgctcaaggtaaggcgccctggatgaggctgaaaaggtgtcgatatctaactagtgcctagacacctctaaatgtccccgacaatggcgaaattgtcgcgacaatgtaccgacagaccgatgaccgaaaagtgtggtacgagtggatggtggaagttttcgctttggagggtggctcagaaccagcatcagcatcagcgccacggtcagaacgcatcgccc

SEQ ID NO: 20134 - DNA, 1832 bp, Emericella nidulans
attctccggccagcccaaccccagttgcagcgtagtgtagtgcagcctcactctcacgtcagacaaacagatcgggcatttttacgggaggtatgaagatacgaagggtagacacgggaggtacggtaggtacgaaaaacggacagacgaatacggtccgcatacaaccggcgtatggtatccatacgatatggatacggtgtgggtacaattgtaacggtaacaataccgtaccggtacagtaccatggcagtggcagccaatgtggcagccaatctttagacgaccagctgggtcactctcactgcccgtcatagccaggacaatccgcgtcgacgtatgataccggcagaggttcttctcccggcttctcgaactcgcgctttccatgacccttacactccatacgctccatacattccatacatgtcgtcatcgccgtcactgctcagcctcggcccgattcagactgactgcggactattatcccgcgggctattttccctcttatcctcttatctttgctacttcgatcagatctaattgtactatattatactgtaagcttactgacttgagctctgacttgagctgaggggcagagtatcctctgattatctacatatatcgtatctaaccctaacccgctcacccgctaacctggctatcccactctattgtacgaagtcattatgcgcctctaccatgagtccaagccagagccagagactgggcttcggaaggaaaatgagaatgaaaatgagcataaaaatgaggatgagatagaaattgaaccgcaggtccatatcgtcgaagtctccccgcgcgacggcctgcagaacatccccgagttcatccccactgagatcaaggtcgccctgatccgccggctagcaggcaccggtctacagacgatcgagatcgcctcggtcgtgtctccaaaggtggtgccgcagttggcggattggagggctgtgcttggacatcgggttgtcaggcggctgtcacagtccgggggcggcgggccagcctctgcttctgagtcagactcagagtcagagtcagagtcaagccagcaaagcgagtctagcttcgagtccgagactgaatttgaactggaacttgagccgcgagagggcttctgccttcccatcctcctgcccaacctcaaagggctatccctcctgctctcgcactcaccccggccacccataagatccatatgcgtcttcatctccgccaccgcgcccttcagccatcgcaacatcaattgctctgttgacgacgggcttcttcgagcccgcgaggtgacggtcgctgcaaaaaaagccggaatcccgcgagtccgcgagtatatatcgtgtatcttcactgacccaatcacgcgtgaaccaacggatccgtctgctgtgctgcactgtacgagattcttacttgagtctggggctgatgaaattgcgttgagtgacacagatggatcggggtccccgggtctcacttcctcgttactgaggtatcttcttgagaacggagttcccgtggacaggttggcgtgccatttccacgatacgcggggtaggggactggagaatgtgtgggcggcgtatgaagttggggtcagggtctttgacgggagtgttgctggactgggagggtgcccgtttgcgccgggggcgagggggaatgtggatacggtgagtttggtgaagatgtttgaggagaacggggtgagaacgggtgttgatctgggcttacttgatgaggttggcaagtgggtaaaggggcgtctgaggggatatagagagtgtggtaggaatggcgatggaaacggg

SEQ ID NO: 20135 - DNA, 1833 bp, Emericella nidulans
cgcccaagcgaagatgggtcagttacatctgggatacattcgataagtcacccgaggagcgacggcttctcacgaagcttgatgctgcaattctctctttcgcatcgttaggtgagttattgtttccaggcttgcggtcacacttcaccaccatccgcactcgctaacaacagatcatttccaggatacttcatcaaatatctcgaccagattaacataaacaatgcctttgtttctgggatgtacgttcgttgctcccaaagccctcctctgctctacaccacatgaagaaggacaaggcctgatagaacgtaggaaagaagatttgggcatgtatcaaaaccaattgaactacatgcaagccgcatggactgtgggctacgtaatcggcgagatcccgagcaatatcatgctcacaaaggttcggccgcggtattggctgcctgcgatggaggtagggctcacttatgctcttagacatgaggaggatcgctaatcactgtcaccgcttagctcctctggacagttctgacgatgtgtctctctcgctgtaataaggcatcgcagttctacgtgctgaggttctttatcggtatgcaaaacctcgatactagccagcaatgctctagccccagaatgctaatactacgtgcctgcaggcctcgccgagagcacattctaccccggcatgcagtacatcattggctcgtggtatcgaaaagacgagctggctaagaggtcatgtatcttccatacaagcagtggcatcgccagtatgttttcgggatatctgatggccggcgtgtacaatcttggtgggaggggaggctttaaggggtggcagtggtatttcgcttcccaagactttatcgctctaatcatgggatagcatgcactgacgaaggatacaggctatttatcattgacggggttatatccctcccagttgctctattgggctttgtcatcttaccagatgtgccggaaatctctaatccgtggtatttgaccaagcaagtatgtttgcccctcttcaaataggacaaggcgggactaaacaggataaaggaggtacaactctgccagaaacgaatggagctcgaaggccgcaagaacagaggaccgtacacaaaagcgaaactcaagaagatcctcacctcatggcatatctattttcttaccggactgtacatgtacgatgaccaacactgccaagagcaaagaacttatttctgacgcgcgcagaacgtttaacaacgccaatggcggccagccggtcttccaacagtacctcaaggcctcgacgaacccagtttactcggttggacagataaactcctacccaacaacaacctatgcggtgcaagtttttacaacccttgtctacgcttgtacgtcccaattcatccatccagccaagtggaagctaatccagtgcacctgcagggacgtctgactccatcctccgtggcgctcgctggcccccaatcctcgtgggcgcagtctcaaacataacatgctacacctcactagccgtctgggacattcctgatgggtggaaatggacatgttacatcatgtctggtgctgggtacggacttagcggtctgtgcatggcatgggcgcacgagatctgcagcggtgacaacgaagagcgcgctctagttgtgggctctatgaacgagatggcgtatgtgtttcaagcatggctgcctcaggtcgtttggcagcagattgatgctccccaatatagaaaggggttcattacggggacggtgatgagtgtcctcctgataattttcacgctctcaatacgcagcttgcagacgaggg

SEQ ID NO: 20136 - DNA, 1833 bp, Emericella nidulans
aacccatacgaactcagtcctgttgaggttgagaacattcatctcttctcaaccctcgttgaccgattgcaacatcaacccccgggcacgattctccgggaacctcaaatccaggaattgtatgaaagtatcggagcgcttcggccaaagctggcacgcagctatggtgaaacgatgagcaagcatggtaatgttctagacttctactgaagcactgatataactaaccgggttagacactttgctggatctccatgccaaactgtccacagtggtacgatattacgatcgcatgttggaagaaagactatcgagcgcatactcgcaacataacctgggttacggccccgtccctgggggcgctcaatacccgaacatctacccatcgatgccttctacaacagctgaagtgagaccgggcgcagaaaatttctattacgggaattcgggcgtcgaaccaccagcgcctgctcgcacgccttactcgcagccacctcttgaacgcgagaacggcgtggtgagctcttcgatgcacccaccacttcaacagccttcttcaggtccgtactggaacccgaataatcattcaatcgcatcgcctcagccaaacgtcaacgcattcaatagcaataacacgccttaccctggcccaggtgctccgtcacaattctatacttcctcggcataccaagaaccggagaagctgtttcagcaacctaggcaaggggagcctgagtcgccttaccagccgtctccagtgacgaatcgcgactcgtactatcagtccgcagggttgccgtccaaccctgtagagcaacagccgccagtcgatcatgggcaatccccaggtcacgcgcagccagcagattcgcgatcatcgcagtcggggcagcctaaagcgactgaccgtcggctcaatcgtattatctaccacaggagcaacaacagcaacaacaacaacaacagcagcagtctgcacaaggaacgggctaccaaggatatccccagggaaacacaaattaccaagctccttacggaggggacgtctctcctatcagcgcgccccctcctgtgcagtatcagcaaccagcggcgcctcgaccggttgtggaggagagcctgatcgagttgtagcctcacctttctgacgatcctttaatttgtgttttatgctaccttatgataccagatgaattggcctttcctggttgcaaaattggatgtacattgttcctgatagtagcaataatttctctaaatttcgatttgcgttgacttggtatggggtagtggcgagtctagactctacactagtgactcgattgcggcgataaaaagctggatgggaacggcggaataacgcgtaatagaatcctcgccagtcttccttggaactgacaatctctcctcttcacttccaccatcacctccatctctacccctcttccgctcgttccatctcatacaatacctgatatacctcgttcgacagcccttctcttcgccccgatctcccctcaggccgccgaggtcgcttctcaacccctgtccaactcgtcgtaatctaccaatcgactggccccgcgcttgtcagtagctggggaacagctatcgcttatcaataatagcttttctttccgtttctttttctgctgtttcatggtcgaatcggcccagctgtgttacagactattattgctaagtgaaggataattgcaggaggcagcctccaatcactgataccgatctctgccgatagctgctggtcgcccaattcggacctttcttcgctgctaccgccatgccgacgacttcaaacaacgcgtcccccgt

SEQ ID NO: 20137 - DNA, 1836 bp, Emericella nidulans
cgcagtgattctctccctgcaccacacctattccaccccctcttttgtgtcttgattctcgcggcctagccgggattctgccgagcgacattccgcaatcctatgctttgcatgccgctgaccggttctgatttcttagttgcaccgcgagagtgtcctcgtcaagcccgtcaacaccccgatcacgccgctttgcagtaagtacacgctagcgacagctctgcatttagacttcacatagcttccttttctttgttacaattatcctcccattatatactggcttgctattgcaatggctgacagtgacgacaagcgagcctgacaacgctgacctgggagcacgtccgctcagcaggcagcttccgcgatgccatcaaccggtttgacgccttcgcccaggaacacctcttggataggaagctggaattcgcctttgtgaccttggattcgtgggatcttcgggttcagctgccccgagaggctcgagataaagcagttgtccttcccgcgtaccttcaacactcgcggacatttgaccttcgcaccgagtaccagagatggcaaacccaccaccccgaatctcttccctttggtcccagctctctctccaacatctgtgctgcgctcgaagtcgaacccgttcagtcctctgccccgatcaagcataaccttccattccacctgcaggctttggcgcccgcttccccccgtcgggccatggacgaggctgttacactggcccgagttctccgggggctgattaggaagtctcagcccgctcatgagcatccggagattcttactcggccaatggatgcgagagcggatgttcgtgctttcttggcagagcgtacacaggtgcttcatctgagtggtctgcctcacgatactactcagtcagaattggagagctggtttacccagtttggcggtcgcccgatcgctttctggactcttcgtactccggaccagcacaaaccgaccggtaccggattcgccgtcttttcatctcatgaagaggtaagtccaaccgtgtctttactcctctcgtctcacaaatctaacatgaaacaggctgcggagagcctctgcatgaacggacgtgccctcaatgagaaagccattgaggtttctccatcatctagccgtgttcttgaccgagcagcagagattctaaccccgttccccccgtcgaagaaccgccctcgacccggagactggacctgcccctcttgtgggttctccaactttcaacgccgtacagcgtgcttccgatgctctttccctgcgatagccgctaaccctgacccaatggcttacgggtacggctatgggcctccctcgatgatgccaccccacgttggcggccatggtcacggaatgggacactctcgtggcggtaatggtggagtggttccattccgtgcgggtgattggaagtgtggttctgagggttgcggttaccataacttcgccaagaacatcaactgtttgcgctgcggcgcccctcgatcaggagctgctgtcgttgccgactcggcgtttccctccccaatggaccctccgtcgaacttcggccacagctccatgagcagcaccccagcacctggcccatttgcttccaccggcgctgcatttggcggattcaaccagcctttcggagggcatcctgctacctatggactcccttccggccttggaagcgctcctggcgcgtatccacctatggggcagatgacccccggttatggttcaacaaactcctctcatgctgccgcctctttcgccaacccggcaacccaggcggctttcactggagcagaccacacctcc

SEQ ID NO: 20138 - DNA, 1839 bp, Emericella nidulans
ccatccagggcgaggaggtgcagacggtgaccgagggccgccgtgacaccagcctgaaggccaactggcgtgtgttcgccatcaccctgtacatgggcatcgccttgttcgagtatggcttcgacaagggcgccattgcgggcttccaagcaatgcctgggttcttgcaggtgtttggatatcagactgagtctggcgagtgggatattcatgtacagcgctccatttctttccctcagcattttctcttttctcccattgcctgatacacatctctcttttgttaacactgtcgtctcaccgattaggccggtccccaacaaatcatcacctcgttcatgattctcggcagcgtcatcggctccctcctgacgggttttgtcggcgctcgcattggccgtcggtatggattgatgctgggctcactgattgtgatcatctgcgtcgtgatcatgtcagaaacgaccgttctcggagctctctacttttccagactcttaatcgggataggaaacggccttctgctgaactttaccgtgctctacctgcaggagtgcacccctcctcgctttcggggcctttgcctgagcatggtcacttgctggatcaccattgggacgacgattgggatggtgagtctcctccattcgccctatccttggtttgaagattaggaaagaaagttgctaatataaacgtaggtgatcaatcaccaaaccaacggcatgatgagtcgagaggcataccgtatccctctttacgtctgctatcctgcccctgctatcctcatcctcacgctgccgctcctccccgagtctccccgctggctccttcagcacggaaagccagaggccgcgcttcgtagtcttcagtttttccgacaaggtgcctacgacgaagttgcggtgcagcaggagttcgaggagatgaaggcagcagcggcacgcgagagagaccaagagattcatcagaacaaatggcttctcttcttcgaattattccgcggtcataatcttcgcaggaccatcattgcagttgcggtgggcacagccaatgccgctgtcggtgccatgttcatcctatcgtatgggacatactttttccaggtggtgcgtcatcccctcccgttcataccatcactgggtctaacaggttctccaacaggcaaatgtcggagatccattcaagtggattatcgtgaccaactgcgtcggtctcgcgggtctgttcaccacctgggccatcgtcactcatgtcggacgccggcgaatcatcctcgcaggatgcgtaatatgcaccctccctatgctcgtcatggcagccgtctactccgcgcccaacgtttccgcagacggtgcaggcattgccctagtcgtgatcgtctcgatctacgtcttcggatttaatttcggcctcgaaccttacgtctaccttgttgccggcgagatgccttcccagaaccttcgaggctacacaatgggcctgtcgaccgcggtcagctttgtgtttgcgtggctgagcgcctttacaaccccgtacttcatcaacccgggtgagctcaactggggccccaagtatggctacatctggtttggcagcggtatcatcaccaccgcgttcctgtggtactatctgccggaggtaaggggccgcacgctggaggagatcgatgagatgttccggaacaatgtgcccacgcgagcattcgccaagtatgtgtgtgtggagagaatggaggcaaatgcacgcgcggtctccactgttaagggggagagtaagcctaatgccactcatgtggaggttgcttgagctagacggttcgaacttactcaaaacaag

SEQ ID NO: 20139 - DNA, 1839 bp, Emericella nidulans
ggccgctttcatgggcattgcccctggatacatatctcgttccgtggccggaagctacgacaatgaagccattgccatattcctcctcgttttcaccttcttcttatggattaaggcggtcaagaacggttccattatgtggggagcactggctgctctgttttatggctacatggtctccgcctggggtgggtatgtattcattaccaacttgatccccctgcatgtctttgtcctgctctgcatggggagatatagccccaggctgtacatcagttacacgacatggtatgcgctaggaactcttgccagcatgcaaattccttttgttgggttcctgccaatccggaacagtgaccacatgtccgccctgggtaagcgtgattcttatggagccacagcagtgtgctaatcatggctcaggtgtctttggcttgctacaacttgtggccttcgcggagtttgtgcgcagttacattcctggcaagcagttccagagactgctgactgcctccatcatcctaattacaggcctcgccttcgcggggcttgttgtcttgagcatgtcagggattatcgccccttggagcggtcgtttctattcactgtgggataccggctatgccaaaatccacattcccattattgcttcggtctcagagcatcagcccaccgcttggccatcattcttcttcgatctcaacttcctaatctggctcttccctgcgggtgtttacatgtgcttccgtgatctcagagacgagcacgtgtttgtcatcatctacgctgtccttgcgagctactttgctggcgttatggtacgattgatgctgaccttgactcctattgtgtgcgttgcggctgccctggtcttatcatacattctcgacacttatttgaagacttcacccggcccggttacacggggaaggtctaacgatgaatcctccgaaggtctccgttctgccaggtctcctgaagtcggaatcacttcttacttctccaaagctgtcacgacatccgccgctattgtataccttctcctgttcgttgcgcactgcacctgggtgacatcgaacgcctattcatctccatctgacgccctgtcgagccggatgccggacagaagccaatttatcatcgacgattaccgagaggcttactactggcttcgccagaacacccccgcaaacgccaagatcatgtcttggtgggattatggttaccaaatcggcggcatggcagatcgcccaacgcttgtcgacagcaacacgtggaataacactcatattgctactgtcggaaaggccatgagctcacgcgaggaagtcagttacccaattctccgccaacatgatgttgactatgtcttggtggtttttggtggattgttagggtattctggtgatgatatcaacaaattcctttggatggtccgtatagcagaaggtatctggcccgacgaggtaaaggagcgagattttttcaccgcgaggggagagtaccgcgtggacgaccaagccaccccaaccatgcgcaacagcttaatgtaaggcatttggatttcagtatattgagtgaagtacttactgactacgcttacaggtacaaaatgtcgtaccacaactttaacaagctcttccctatgggccaggctactgaccgtgtccgcggagccaagcttccggccgagagccctcagctctctactctggaagaagccttcaccagtgaaaactggattatccgcatctacaaggtcaaggatctcgacaacctggggcgggaccacagcaacgccgtcgcctttgaccgcgggaacaagcggaagaaggcgag

SEQ ID NO: 20140 - DNA, 1839 bp, Emericella nidulans
cactttttacattgtttactctgtactatctcctccttcatcccgtgctgaccatccgtcgaacgcgtacaggtcatcaaggctctctacgattatcaacccgaaccagggaacacccaggaattggcatttagcaagggcgatttcttccacgttatcagcagggaagacgactcggactggtacgaagcgtgcaatccccttatccctaccgccagggggctggttcccgtgacctttttcgaagttatcggcaaaacccagcgagacagcagcggatccatcgacctgggcaagaaaaaggaaccgcacgactctggcttcgctgatcgcgctacttcttcaggttctgaatttggttcaggctcctctaagtcttatcagtcgcaccccgcattcccccgaacttccatgatgggcaaagccggcggaggcgccatggtgtatggggtcgttcagtacgatttccaggctgaacggcccgatgagttagacgccaaagcaggcgaggccatcatcgtcatcgcccaatcgaaccctgaatggttcgtcgcaaaacccatcggtcgccttgggggtcccggcctgattcccgtttcgtttatcgagcttcgtgacatgcagagtgggcaggctgttgcagacccgctcgaggctgtcaggcgcgctggtgttccaaaagtggaggagtggaaaaagatgactgccgaatataaaaacagcagcatcagtctaggtaaaatcgagacgactggctccatgcaatccgtcacttcgggtatggagaggatgtcagtgcgacagagcgcggaccatgtgagccacatgagtcaaaacggccatgctaatgtaagtcaatactctagcgggattcatcttcgacctaacatgtacaggcgtaccataaccgaaacgcgagcaaggcgtctattgccccgtctacccatcagcaaccgccgccccacagtcagcaacccttagtcgcacccattgctgcctcgatccctcggtactgcttcgacaatgataagtactggtacatcattgaagttaagatggaggacggtcgctgctgggagctgtcgcgatactaccacgacttttatgatttccagattgctctgttgacccagtttgaggaggaggcaggcaatcggggcaaaccccgaaccctaccattcatgcccggtcctgtcgctcacgttaccgatgccatttctgacggccgccggcataatttggatgaatatatcaagaagctcttggctatgcctccacacatcacccgatgcgctctcgtccgtcagctcttcgcgcctcgtccaggcgacttcgagattgacccgagtgcttttggagaagatgcccggttctcaggcggctcgcagcactcgtctggccatgagctttctcccagcgcctcaaggcaatcgtcgcaacaacagaatgggccttcggaacgaagctctcactctcactcccattcacactcccactcgcaccagcgatctcagacttccagctctattcccaacggaaagccccccatggtccgacagcaaagttctcttactcaagtctcaacctcaagtggtggtgctttgaaagtcaaggtcaatttccaagacgatctcattgctatccgcgtcccgagcgatatcaatgtccagcagctaaaagaaaagcttatggaccggttgaagatcaatgacgagatcgtggtgcaatacaaggatgaggcgtcgggcgcctacgtcgaccttatcagcgacagcgatctcgataccgctatccagcggaattccaaacttaccctctacgttggactcgcatagaata

SEQ ID NO: 20141 - DNA, 1839 bp, Emericella nidulans
gttgattcgtttgactcttgcgttcatctatttcagacgtccttcaccatgaaattccggcttaaaggctcgacggttggtcttctttcgtggctggctgtggccgcggcccaaacatataccgactgcaatccgctggaacaaagtgagacctctgcccgttaatggggcctaaaatgctaatattttgaaggttgtcccgcagatcctgcactgggcggctccgccaattacgacttcacccagggcgcatctgatgactttaccgaagtcatgtcgccgtcttatggcagcgacggagcgagtttcaccgtggcaaaacaaggcgatgctccgctgatacagtcggactggtacatcatgttcggacacgtcgaatttgtgattaaggccgcacctggagtcggcatcgtcagtagtgccgtcttgcaatcagatgatctggacgaaatcgactgggagtggcttgggggcaataatgaatatgtccaaacaaattactttggaaagggcaacaccgccacctataaccgtgcagctacccatgccaattcaggaaatcacgattcctttcatacgtataccattgactggacttcatcccatgtcgtatggcagattgacggcaacactgttcgtgtacttactcccgactctgcagagagcaaccaatatcctcaaacacctatgatggtgaaagttggagtctgggccggtggtgaccccaacaataatgagggcacgatccgtgagtttatctctctctgcgtccctgttagggcaatatatataacggaatttgctaatatacttgtagaatgggcggggggagaaactgattataccgctggacccttcacgatgtacctgaagtccattaaggtgaccgactattcgaccggcaactcttatacatacagtgacaacagcgggtcatggcagtcaataatatcagatggtggcaagatcaatggcaatagtgcggctcagtcaatgactgatatcgggacggtgccctcaataaccgcgactgccgacagcgggccgattccctttgagggaacgcatcgcgaaaccacaagtttctccacgcccagtatctatccttgggtcccccggccaagtagcgacgacgattcggactcatctccgtccacaaacttgccaggagattggcattttgctggcagcggaaaacctcagccacccagccggtcctctatgagtgagcattgcccacaattccgttttataccctcgtcaaatttcatgctaaagcgatgcctcttcacaacccagtatatgcgcccgtctatgtctgcctcgtatcacttctggtcgggtttatactccccctccgaccttgaacctacggacgaatctcctcgttgggtgtttcctgaaacagacccagcagagctatccgacgccactaccgacgaatttagaagagtgtcagccacgtcaggacaggatcgcaatggcctcaccataagtgccgcgaaccgcatcttcaaaatctcttgggttttgggtgcctcttgtgcgcttctaggtagcctgctagtatctgcctgagaaagatcattcaacaaactactgaatcgacttccaagctggcaggcgcattcacccacgactctctagagatacgcgacgaacattcacgaataaacgaattctcttacggttacggcgctggcttaaaggatgaattttcccgtccgtttctccctcctcttcctacatctatttccaggattggatggccagtcttcgaagtggaaacggcaggatccctcgaggtaaaatttccatcttccgtcaattcaccagctc

SEQ ID NO: 20142 - DNA, 1841 bp, Emericella nidulans
ggcaccacgagaacttggacgagatggacgaagaagacgacgaaggagcatccagctctgctgctccgcctcccatgccgcagattccacagcaatatgtgaacggaggcaagtgagccttcgataatagtgcagtcaaaccccgagattgactttcctcttgtatattcccgagcgctttgagttatgttgacaagcagacgagtgatgaataagtctggttttttttttttcctaaggtactgtgttatctatgagcttgattttctcctgcttcctgaataattttgatagatcttgctcttcctgttgagcaaagttgacatttgcatttcgaatatacgaggtcgacaatgttatccacaattattttgcgatgaatcacaggagctgcgtatgcatttacctatatatagcccgtgggtctagctatataatgacagcttggcactcaggagaggagagcctgtagcctgtcgcaacaaatttcacaaatcatgagggatcgtacgaccggatccatgagactagtcttgaaagagaagtggtctagatgtgataaatagatttgtatgactcaattagttgagttgatacctagtttcgctcctgaagcgggagttgtgttttgtttgtgctcccccccggcttgctcctgcatcttcctctctttctctaagcatctcctcttccacatcttaccgtttcgaatccatccttgttatcgattttatatctactacttctcattcagtttgatttgcgaccatggccgagcaggcaaagctaccagaccagcccagccagttcctgagacccaggtcccggacaacggcaagcctgagcagcagcccaccgcaaccgagtccgcgcctgcaccggaacctgccactacagagcccaccactgctgcaactgctccttcagctgtagatggtaccggagaaactgctcctgctgcacctgagcccgcagtgcgccagtagcagccgcagccgcagctccagctccagagcctaccaagtccgaaccgcagcccgcagttggtgaacagagcgaacccgcgaagaaagatgagcccgcaaagcctgaatacttcaccaaaactcctgcactcgagcagttcttcgatcgtctccctaccattctttccaataccggccatcaggagatgtggggtgtacccctgaagcatgaagttaccgatatccccacaatcaacgtccttatcaaattcctccgagcaaacgccggtgaccttaaagctgcagaggatcagctaagcaaggctttgacctggcgcaaagagaacgatcccattgctttggctgatgcgtcaaagaacagctatgatgcatccaagttcaaagggttgggatacctgactacctatcagcgcgaggggaagggtgatttggttgtcacttggaatatctatggtgctgtcaagaagtttgacgaaacttcggcgatatcactgagtatgtagctgtcattccttccctcgagacatttagctaatggaaaggtcaggtttatcaagtggcgcgcagctcttatggaactagctgtccaggagcttaagctggaccaggctacgtcagtcattgactacgatggcgaggacccctatcaaatgatccaagtccacgactacttaaatgtcagctttctccgcatgaacccgaacgtcaaggcggcaaccaagaagaccattgacgtcttcagtaccgcttacccggagcttctgcgcgaaaagttcttcgtcaacgtcccagccattatgggctggatgtttgctgtaatgaaagtatttgtcaaccagaacaccgcccgcaagt

SEQ ID NO: 20143 - DNA, 1842 bp, Emericella nidulans
cctgaacctgaacgaatgcgcctactgacaagaatgcgtgccagaccagccttcctcaaactctgctggtgagccaatttctcctctagacgtcatggatgcctcgtgagaacccaaccaacttctctcgcagttcggcgaaactgtgaacaacataatcggccgcacgttgaaccccatcaaccagaatctctcatgtggaggctcatctggaggtgagtttgaatgattttccctgacacccactattcttacatgcgtccaggcgaaggggcgttatcagccttgcacggtagctctgtcggcctaggcacagacataggtaacttttcactgtcaagcagcctagtaccttatcatgagagttagagaactaataactacaggtggttctgtgcgcattccggccggtttctgtgggatattctcgctcaaaccaacccacaaccgcctttcctaccgggacgtggccaacgttgtaagttaacctcttgcctagtcaaaggagagcaagcaagcagaagagccatattgatcaaaccactagattcccgggcaaacgacctatgcgtcttctgtcggggtactgggtaacacgattgaagccatacatctagtcctcagctcgctcatctcgactgagccctggctccgagacccgaatgttgcctctctcccgtggcgccagaacatagcagatgagaccctctcccgagcaggcaaaggaggccaatgcacttctgctggagacaagcaacctctaaaacttggggttctctggacagatggagtcgtgacccctcacccgcctgtggcacgaggcctgcgtttgactgtcgacgcggtgaaaaaagcgggccacagggtacgcattcaactcgtctcagggggttctcgaagagagccagtctacatctatattccggattactgacaaagtcctttctcaggtcgtagactggacgcccccctcccaggcaacggccaaaagagtccatgtgagcccgcgctcttatctcccattcactgtcccggacagcctgaagcacaaaaacagctaacccgagcataaggtctcctttctgaaagccgatggggccacgacatcaaccgccagctcgatctatccggggagccattgatcccccaactcagggattcattcactcttcgagatccaatgtctctcctcaaataccaggccctcacaatcgagggacgggattacgaagcggcttattcggattattggaacgagacggccaatgccgaagacggtatgctcctttatccatgccgaccttccaaagacttctgtagatggagacccaccaacatatccgatacgattctcactagccggttgcaggacagatagttgacgccgtgatcatgcccgtcgcaccacatgcagcagtcataccagggaaattttatcatacaggtagactacccactagacgtccccttcctcccgtcttccttgccttgaaccccccaagcgggatgcgcgcgtgagcaattggagtgctgtacaattattgacgaaccatatggtcctcgagtagcgtataccgaggccattaacttgctcgattatagcactgttgtcatacccgtcacgagagcagacaagaaccaggatctagcggacccggactatgcgccgttgaatgaacttgacgcgaagaattgggaggcttgtaagtgttcgctatcgcgcgagagattcgcaagccaccgctgacacctggtacctagatgatgcggatatctacgatggcgcccctgtcggtgtgcagattgtcgcgagaaagtacgaagaggagaagatctgggcga

SEQ ID NO: 20144 - DNA, 1844 bp, Emericella nidulans
aggtgctggtcgtcggtggcgggccagctggctcctatgcggcctcggcgcttgcacgagagggaatcgacgtggtcctccttgaagcagaaaagtttcctaggtgcgcttccaggaatttgagagtgatggctttcattattcgtgatgttcccatattcttacacgtgcaccagataccatattggtgaaagcatgcttccgtccatgcgacacttcctgaagtttatcgacgcctacgacaagtgggatgcccatggtttcaatatcaaggtaagaaaaaagacgacaaccctccagctttaaaagaacaccactgctaatgctcagagcagaaaggcggcgccttccgcctcaactggtccagacctgaaacctgtaagcctcagctgatctaatggccacggcagagattccaactaaccatcaacgtcgtctattagacacggatttcattgctgccggtgggcccgggggctacgcctggcatgtgatccggtctgaggcagacgagctgctgttcaagcacgccgccgaatgcgcgtgccagacctttgatgagaccaaggtggcatccattgagttttcctctcccgatctctcgtctggaggcacgcacccctttggtcgccccgtctctgcgacgtggactcgcaaggacgggacttcaggaacgatctcgatggactacattgtggatgcgtctggtagaaacggtctcatcagtaccaagtacctgaagaatcggtcctacaacaagggcttgaagaacgtggccagctggggctactggaggggagggggcgtccatggtgtcggcacacacaaagagggtgctccctatttcgaagccctcaaaggtacgtcctcgcccggctgtatcttccaccttacccatgtgaagggaaacagtgctaactgattgtttggctcaacagatgccagtggatgggtatggtttatccctctgcacaacggtacccactccgtaggtgtggtgcagaaccaagagatggcgacggagaagaagcgaaaaatggccgagccttcctccaagggcttctatctggagtccctggagtttgttcccggcataaaagagctgcttgctaacgcggagctcatctcagaggtcaagtcggcctctgactggtcatacagcgcctcaagctatgccttcccgggtgtacgcattgccggagatgctggatccttcattgacccgttcttctcttccggcgttcacttggctctttctggagggctgtcggcagcaacgaccattgcggcggccattcgtggcgactgcgatgaaaatgttgcggcgtcatggcacgataaaaagacatccgaaagttacacacgctttctcttggtggtctctagtgccttgaagcagatccgttctcaagatgagcccgtgatcagtgactttgatgagggtagctttgaaagagcctttgacctattcagacccagtacgtccattctctgtgatcatcccacggcagaagcaataattctaacggcgtaacgtctagttatccaggggcaggccgatgccgatgcaaagggcaagctcactcaagctgaaatctcaaagacggtcgagttctgtttcagagcatttgcgcacgtctcgttcgagcagaaagaggctctcgtgcagaagctcaagtctctagggcacgacggagatgcgtacgacgagaacaaccgcaaggctctcgaggaaatcgagaagcagctgacaccagaggagcagacaatcttgaagacactaaagggacgccgcatggtgcgccccgaggattcgctcaacattgacaatttcactctcgact

SEQ ID NO: 20145 - DNA, 1846 bp, Emericella nidulans
tggctgcggtcaaggctgagaaaacatcacaatcttctgcaaaggcgctaaagagccacgaaaggaaagttcaggatgatctcaagcgtaatctgaagcaggagaagcaggtcctgcgacctgctaggaagcctttctggttcgagaaattcctctttttcgtctcttcggaaggatatctagttcttgggttagtgtttatctcctcgacaaaatgtggatgctaatagtaacgtattcagtggtcgcgactctatgcaaagcgaaatgctctaccgtcgatatctccggaagggggacgtattcgtacacgccgacctggagggcgccacgccaatgatagtcaagaacaaaccaggagcgttgagctcttccatatccccaacgaccctatcacaggcgggcaatctttgtgttgcgacttcgacggcgtgggactcgaaagcaattatgtccgcatactgggttgatgcggcccaggtatccaagacttctgctgtcggcgaccttctacctgttggcgaatttcttgtcaaaggggaaaagaatttccttgccccgtcacagctagttctgggctttgctgtaatgtggcaaattagcaagggaagcctcgtcaaccataagagctttagatctgaagaagcacttgtttcgcaagctcgggtgacaggcgaggataatattgctaatgttcaggaaggaaacccagataagcttattcaggcttccgagaaggctgacggggcggaggaacagaagcaggagcaggaagaggaacaagcggaaggttcagagtcagatgacgagcaaggagacaacaatgcaacttttacagagaaccaattgcatccctctacggacaccatgcaggaggcggagacgcacaaagaagaagttacagatctcgcaggtaccgttgaacaagaggatacgcaagagaatgaaggccaaggcgaggcagacgaagaggcggaaggacaggacgagaaggacgagcgggcagatgaccagtcgggaaaggacgacgccgaaggagctaccccacgatcccaagggaagcgacacctctctgcaagagaaaaacgcctactgcgcaaagggaagcctattgacacaccaactgcgaggtccgaagctgcaagcgaccgctcaacaccagcagctaacggaacgtccactgggcccgaaacaaagcccgccccagccccagtccgcggccgtaaaggcaaagcaaagaaagctgcatccaaatatgcggatcaagacgaggaggaacgagcactggcgcttcgtcttttgggcgcaaacaacgccaaagcacagaaagccgccgccgaagccgaggcgaaggcgaaacgggagaaagaagctgaagaggcaaagaagcgccgcaaagcgcaacacgaacgagccgcccaggcggagcgcaaacgacaggctttgtttgaggaaggagcaactgatgactatgacgaggaaactgccgctgccgaagcggctgatcttgaatggctacctgcactcgtggggacgcctcatgtcgacgacgaaatcttggcggctatcccgatatgcgcgccgtggtcttctcttggtcgatacaagtaccgagtcaagttacagcctggaacagtgaagaagggcaaggccgtcaaggagattctaggacgatggttggctgagactacaacgggcaaggttaagaaggagcatgctgaggatctgggaattagtcgagtcgctgcagagagactccgcgccaaagagggtgagttgctcaaggcatggaaggatactgagatcatcaacaccgtaccagtaagcaaggtacggattatgatcg

SEQ ID NO: 20146 - DNA, 1850 bp, Emericella nidulans
gccagatttgctggaggtgggatggtgcctgatcttcccgctttaatattggcagaccaaaggaaggatgatgtgtttcatcatccgccactgacgccactcagcgcttgctcggagttttattacgttgttatgtagggtcactaccagggccgtttcatgttattgtctgtataaccagcaaagcatgcccagtggccagagccgctatgcccccagcccagaatccttgtcaaggggcgatggaatttccctcggagcaagccgccgtctctgatttttatgatatacatactctgggcacccaatcattatcgttcatctaccaacatgttggatcctgactcgaacatctcgattgatccactcggctctcttgacatatgtcgccatcgtgccagtcggcccaccggaacgtgccttggcctggcggagtaaaattgtccaagggttgtatttgcccgctctcacctctcttcgagagacgtctctgcttggcagggttgtcgccgggtagggctggaagctgatataaaacgtgcgctggtccttggtctggatgctcaactctagcatcgattcctaactggcagccggcaacttcagcaaagcaggctttgcattacactccttttgatcttcttctgtgtctctccttaacactcttctcctgtgtctgccgtgcagtcttttttgcttattatcccttttttttaccctcttttcgtatatcagaggtgaggatggctcctggttgtctgcggtaatcttgttctaggtgaatggctaagcgatctaggatcatccatcgtttgaaacggttctttctaaatcatggctcctctaactctctggaagatgcccatcctgatcaccttcattgtcgccctggcggccttgaccaacgcagtacctatccgccatgcccactgggaccacggccatcattccaggaccagaaccctaaccagcactcatacttttgctcccaccccaaccttcactccaagtgttacgccaaccgccacccaggccaccactgttgccaacgcggacgcagccggccctactacaagcagcagcagcagcaacgagatctggcaaccggaagtcggttccccttggcaaatcatcctctcctctgctctgtcccccaatacggcctccaaaaaagcttcaccagccttcccgatttacgacatcgacctcttcgaaaacacctcgcccacgatcgcctccctacactcccaaggcatcaaagtgatctgctacttctccgccggcacttacgaagactggcggcctgacgcctcctcattcgactcctcctcgctcggcgccggactggacgactggccgggtgagaactggatcgacctgcgctccgagaatgtgcgagctatcatgtcgtcgcggctcgatcaggccgtcgaaaagggctgcgacggtgtagatcccgataacgtcgacgcgtacaacaacggtcagggcgggttggggctgactgaggaagactctgccgattttgtgaactggcttgctgccgaagctcatgctcgggggttgtcgattggcctgaagaacgcgggatccatcatccctcgggttattgcgaatatgcagtggagtgtgaacgaacagtgtgctgagtatgatgagtgcgatgtctttcagcagttcgtggaccagggcaagccggtctttcatattgaatacccggaaaacggacaggttagtacgtcgggcgtggacaaggtagccctttgtgcgcagttcaaaggggcagaggggttttcgacggtggttaagcatatggatctgaatgagtgggtgcagacttgctagggagc

SEQ ID NO: 20147 - DNA, 1861 bp, Emericella nidulans
ccgctgtcggaatgggtgcttgacgctgtctcctcgatggggttcacccgcatgacaccggtccaagcatcggccattcctctatttatggctcacaaggatgttgtcgttgaggctgtcactgggagcggaaagactctttcattcttgattccagtagtggagaagttgttgcgccttgaagagcccatcaagaagcatcatgtcggcgccatcatcgtttctccaacaaggtatttggcttaaagcaggtcgagctaatggagatgtccatgctgactcttcgcagagaactccgttcgcagatctacaacgttttgacatccctactcgcgttccatcccgcttcggcggctgtgataaacacttccgaaaccgaagacgttccccggcctaaacactcttcctccgttcttagagtcgttccgcagctcctgcttggaggctcgacctcgcctgcagaagatctgagcacctttttgaagcgctctccgaacctcttggtggctactccgggtagacttctcgagttgctttcctccccgcacgtttactgcccacaatcgtcctttgagatgcttgtcttagatgaagcggacaggttgttggatcttggcttcaaggaaacactgcagaacattttgcgccgacttccgaaacaaaggcggacggggcttttcagtgctagtgtaagcgaagctgttgatcagattgtccgcgtcggcctgcgtaatcctgtcaaggtcgtggtcaaggtcaagggggcgtcgggagttgatgacaagcgtacccccgccaggttggcacttctttacccttctatactctcatatacttatttgatgcagccttcaaatgacctatttgactcaaccaccaaccggtaaatttccagcactaaagcacattcttaattcagtgcaaccgacgccctccaaatcaatattcttcgtgtcaacttgctcaggtgtcgactacttatctgtcatcctcccgttgatacttggcaacgatttccagttaatacctcttcacggaaaacaccctgcaaacgtgcgtcaaaagaatttcaaccgtttcgttaacgctcacaacccggccatccttctcaccacagacgtcgcttcccgcgggctggacattccgtcggtggacctcgtcgttcagatagaccctccttcggacccaaagaccttcattcatcgatgcggtcgtgccggcagagcggtcgtagaggtcttagtgtggttctgctccatccgggcagggaagaagattacgtctccttcctagaagtacggaagaccccagttgcgccttttccgcaccccatcactgtttccgacgccgaagccgccgccgctacagaaactgctcggaaagtagtaaaggcagaccgcgcaatccatgaccgcggccaaaaggcctttgttagttggctaaggagctacagcaaacatcaagcaagcagcattttccgcgtcgcgacctggactgggagggcctagggaaagcgtggggactactgaagctgccgaagatgcccgaattgaaaaatttcaagggagacaaaactcttggtgtccaaatggattgggatacgtacgcatacaaggataagcagcgcgaggaagcgtcgcttagagctcctacaagagatggcggaatctggccaacaacaaacaacgaacaagaagcgtccgaacgagactgtggcctggagcaacaatgctgagaacagaaacaagaaggccaaacggcgcgacatgaaacaggtgcggcaggagaggaagcggtgggagaagatgacggaggaagagaagaagaaggctctcgagacagagcagatgctcgagcaaat

SEQ ID NO: 20148 - DNA, 1862 bp, Emericella nidulans
ggcgccgcaacgtctacgataggggaagccacgaaggagattcgcttaacactctttgacgaaccccatcaccatgaagagggagtcgaatctcgcagggcaataggaggtacatcctcttctcaacggctcacctatcaccttaagaaagtcgagaaccggcttgttcagtacagtctggaggcccgcggcatagaacgagtgcaagaagacgaacgcatcccgcatatatcttgggtttcgtacttgcaggttttcctgctgtggatgtcggttaatctggcagcgaacaacatcactcttgggatgttgggccccgccgtatttggcctcagctacctggactctgccctttgcgcagtatttggggctctcttgggctccatatcttcctcgtggatggctacatggggacccatctccggtatacgtactatggtgcgtttcaccttcaagccctgatttggcttcactaaacgagtttaggcatttggacgctatactatgggatggtggcctagcaaactcgtcgtgatattaaacctcattcagatgatcggatattgtctgatcaactgtgtcgtctgcgggcagattctctctgcagtatcgccgaatggaagtctatctgtggctgtgggtaagaatgcctggaaacttctcatcttcggctccggcaactgaaccaaacaacaggtattgtgattattgcagtcatcagctggatgattgccacgttcggaataagggtcttccattattatgaacggtaagcgcaagtcttcaattagggagacaaaatgatctaatgtgtgtagttttgccttcctaccccagattatcgtcatcagtattctgttcggcgtttcgtcttcaaaggtcgacctatctacaccatctcagggagacactcgcacagtgataggaaatcggtacgctgcttcgtgccttgcattgcaagtgccctttctaacagagtcttcacactagcatctcattcttctcgctctgtgtcagcgccgcaattacctataccccattagcggccgatttcttcgtctactatccggtgcgcacatcgaaactcaaactcttctccctttccattctcggcctccttgtctcgttcaccctcgccttcctttgcggtatcggcctcgcttccagcataaacattcatcctgagtacgcagcggcctacaataatgggcagggcgcacttatagtccaaggcttcagctctctccacacttttggcaacttttgctccgtcatagtcgcccttggcctaattgccaacacgattgcaccgacctactctgcaggggtcgacttccagacgctcggccggtacgccgagaaggtgccgcgcgctatttggaacacctttggcgttgtgatttacaccgtctgtgcccttgctggccgaagccatctcgctgacatcttcaccaacttcctagctcttatgggctactttgttgctatctgggtcgccatcgtcctcgaagaatgtttcatcttccgtcgccgagataatgaaaatggctatggttactataattggctcgtttggaatgacccttccaagcatcctgttggcattgccgcgctgattgcattcttgacgggttgggctggcgctattctctgcatggcgcaggtctggtatatcgggccgctggcaaacttggttggagaatatggtgctgatgtaagttccccgttgtcctttgcgtcataaagttggatttagagatcgtctaacaaatattatccagatggggaactacgtgggtttttcgtgggctgctattgtctacccgcctcttcgctatctagaacgaaggcagtttggtcgg

SEQ ID NO: 20149 - DNA, 1864 bp, Emericella nidulans
gccgcgtaatactaaagaaatccagagccccagttccaccgtgcagatgttcccgggacgaccgaacatcgacacacttattgggatggaggttgagaatcaggtcggggctatgggtgtgctggtctgcggtaatggcagtttgagtgacgatgttcgccgtgcctgccggactcgacaggatcggacgcaaattgattttgttgaggagagtttcacgtggtagtctgcttaaccaagcctgcggggtgagagtggttgatgtaaagaatcttacggatggccagaatatgaggctttcagatcaagcgatcaagcttttcgggttgctagtgaaaatgctggtttctcaggcgcttagggctcatctagcagacagcttgggtaggttagtgtcgacacattacactttcgttgtagatatttcaattctagccttgtcatggcttctgtcctactttacgccactttctgcagcgccccgcaattagatgattccacttaaggccgcgggcacagagtaaagagccctatagaaggctggagctctgaggaagacggtttaaaccgattggatagagcgagggaaagactgccaaagatgacagtattctgttaccgctgttagaaaagcccttatgtagattattttattcgtcaatcattcatcgctaattgtcaagataccagtgttagttggtgaacacgaagctcattaccgaagcttagaaatcagctcttgtggggtctccggatgtcgagggactgatggcatcatcgcatccgatccgaacagagtacagagtacaaatgccggatctccggccaggcaaaatgacttgcaccaccttcattaataatagagtattggatttgtgtagataatgagcggggtaacgcctgctcttaggctacttaaaggctgcttctcccagttcagcttcaattccaatctccgcattcctcttaaacattctcaactattaaactcagcttcatctcgtccctacaatcggctcttttctactacttcacccgtcatgtctaggccggatatcacgttgtacacagcccagacccccaatgggattaaaatctccattgctttagaggaattggggtatgtcaacttaccgttatatctatagccaacgttaacttgccacagcatcccctacaaagtcgagaagatcgacatcagcaagaacgtccagaaggagccgtataactcacttcctatctacaacatacctcagaactaaattgcaacagctggttcctcgaaataaaccccaacggccgcatccccgccctgacggacacttttaccgacgggcagaaaatccgtcttttcgagtccggtagtatccttacctacctcgctgagcaatatgataaagactacaagatctcctaccctcgtggcacccgggagtactacgagacaatcagctggctgtatttccagaacgccggcgtaggacccatgcaagggcaggcgaaccacttctcgcggtacgcgccggagcgcattgagtacggggtgaaccgatacgtaaacgagacccgacgcctgtacggcgtgctcgataagcatttagcaaactcaaaatcggggtaccttgtcggcgatcatatcactatcgcggacatctcgcactggggttgggttgctgcagcgggatgggccggggttgatatcgacgaattcccgcatcttaaggcttgggaggagagattggctgctagagaaggcgttgagaagggaaggcatgtgcctagtccgcatacgattaaggatttgttgaaggataagaagaaggcagaggagatcgcggcgcaggggagggcatgggtgcaggag

SEQ ID NO: 20150 - DNA, 1869 bp, Emericella nidulans
tcgagcagagcggcaaaagctcgctgtacagccaagcaaaggaggatgataagtcctccaaggctctacctgcggtcggacaggagaacctctcttcggtgactcctcctcatgagtcctatgaggggcatcaccggttcgatcccactgcgacctggacagaggaggaggagaggagggtaatttggaagaccgactttatgctcatgacatggctctgtttgatggcaagtaccgtggatgactgcaggaacatctgctaatacgccaatccagttcttcggccttcagctggaccgtggtaatctgtccaatgccctgaccgacaatttcttggatgatctcaacttgaccaccgacgactacaacaacgtacgttataacgacgtgttctgttctatcccttttttttttttttttgtttttttgcatttgtaagctcgactaacggcgatcgcagggaaccaccatccaactcctctgttttctcgcagcggagttccccgtgcaacttctcattaaacgcttcggtttccggcgagtgttgcccatcctgatgctgctctggagcttggtctcttggacgcaggcttggatgacagaccgagcatctttctacgtgaccagagcgctgataggcgccttcgagggaggttttatcccaggcacaatcttgcttgcaacgtacttctacaaaacaaaggagctttccatccgattgtcattcttctggtctactctgaatgtgagaaccctttatctgagccatgcgttcatggagcgctgacaatcccaggctgcccgtattatatcgtctttactggcggctggaattctcgagatgagggggaccaggggacacacaggctggttctggctattccttatcgacggacttataacattcgtcatcggcttgtttgccctcttctatctgccaagttcacccacgaggacgaagagcatcctgtatcccaaagcgtggtacaccgagcgccaggaggtgatcatgatcaacgtacgttctccagagactgttgagccaataaactgacatttttagcgtcttctgcgtgatgatccgtccaaaggtcttactcacctgcatgaacgtgctactctccgcgacgtgcttaacgcatggaaggacaagtccatgtgggggctgtactttatcgggctgattgcctacattccccaaagccccgtgcaggggtacctgtccctgacactgaagagactcgggtttacgaccttcgagtcgaacatgctctcaattccatcagctgtgctccagatcatcctgatgctcatcctgtcgaagagcagcgagtacttcggggagcgcacattccactgtgtgattggcgagttctggtcgctgccactgctggctactctcctcggtctgcctgatcatggatacaactggggccgctttacggtcaccacgatgatctcaggatatccgtatttccatcccatcgtgtcctcatggatatcagagaacacatttgacgtgaaaaagcgagccatcactgcggccacatataacgtgattgtccaaattggctcagtcatatcatcgcgtaagtcgaggtatccacccctggaaacagagctgaccaaaacagagatctaccgcagttatgactcaccgtactactaccaaggaaacaaggtcttgatatccatctgttccctggcgcttgttgtttttgtggttcagcgcgagtacctcaggcacctgaatcgcctgaaggagcggaaatgggaggccatgtcgcccgaagagaggatcgaataccaagccgaccttgctcaacgggagaaagacggaaacaagcgactagatttccgcttcaagta

SEQ ID NO: 20151 - DNA, 1873 bp, Emericella nidulans
tgattcgaatcattttctctagctattctctctgtctacgacaagaccggtcttctggacctggcaaaaggccttgccaagcacaatgtccgcctgctcgcctccggtggtaccgcgaggatgattcgggaggcaggattcccagttgagtgcgttctcattcaccggcatccgtgtattcgtataagtgatttgggttgtcgattcgattaaggatttactagcagctatatgattattccagagactgacggacatcagagatgtttcagctatcactcacgcacctgagatgctgggtggtcgtgtaaagaccctccaccctgccgtccacggcggtattcttgcccgtgatattgagtccgacgagaaggatctggccgatcagaacatcgccaaggtcgatttcgttgtctgcaacctgtacccgttcaaagaaaccgtcaacaaggttaacgtcaccatcgaagaggctgttgaggagattgatattggcggtgtgactttgctccgtgctgcggctaagaaccactcccgcgttaccattctctcggatccccaggattaccccgaattcctcaaggaactcgaggcaggtgagatcaccgagaccagccgccgatcctacgccctcaaggccttcgaacacactgcggactacgatactgccatctctggcttcttccgcaagcaatatgctgggaacggcgagaagcacctctctcttcgctacggaaccaatccccatcagaagcctgcgtcggcttgcatgcctcagggcaaacttcctttcaaggcactcaacggctcccccggctatgtcaatcttctagatgctctcaacgcgtgggccctcgtcaaggagctcaagcaggctctcggatacccggctgccgcgagtttcaagcatgtgtcgccggctggtgccgctgtaggtgtccctcttagcgataaggagcgcaaggtctacatggtcgacgatattgccggcattgagtcctctggattggctcaggcatatgctcgtgctcggggtgcagaccgcatgtccagctttggtgatgtcctggctctcagcgatgttgtggacgtcaccaccgccaagatcatctcccgcgaggtttcggacggtgtcatcgctcctggatacgaaaaggaggcgctcgagatcctgtctaagaagaaaggtggcaagtaccttgtccttcaaatggacgactcttacgtgcctgccggtgaggaaacccgtactgtttatggtgttcagcttaaccagcaccgcaacgacgttgttatttctccctccaagaccttcaacaccatcattactcctaaggatctcaagaccctccccgatgccgctctgagggatctcaccgtggctaccattgctctcaaatacacccagtcaaattcggtctgctacgcccttaatggtcaggttgttggtctgggcgctggccagcagagccgtatccactgcactcgtcttgcaggtgacaagaccgacaactggtggatgcgtttccacgaacgtgtcttgaatatcaaatggaaggcaggcaccaaacgtgctgacaagagcaacgccattgacctgctgtgctcaggtcagactcctcgtaacgagattgagcaggccgagtacgagcgcgtcttcgaggaggtgcctgcgccattcacacaggaggagcgcgaatcctggctcaagcagctgagcgaggttgcagtctcctcggacgctttcgtaagtccaccaacaatgtcttcatggtctcttactcactttccatcccccagttccccttcatcgacaacgttttccgcgccgcccgctctggtgtcaagtacattgctgctcccagcggtagcc

SEQ ID NO: 20152 - DNA, 1875 bp, Emericella nidulans
cggtttcacggcagggaacatatgatgaagtttgggaagtcgttgaggattggcaagacgagtgggataagaaatcggttcgctgagccgccgaggtatgttgggctaagcagtgagttgggtgatgatgagtggtgatccttcgttcgtttggagttagataagtagatgttcttgggcatcggtacgaaatagtctatcactagattgacctggatcgtggcctggtatgtgttatcttggagcccaatacagatatttctctctgtggaccaccagatactgcaggtggagaggtaggtaagttggcctctggcaatcatgtatagtaatacgatagtcaatgttagaactatgcctcgaagtacttaatcgtccatgaatgctattggtctaatttaagctaattagaggcccatctgtcccttctcccttccattgtcgacatacaaggcaagaaaatacgactatagtgttctatcaaagaattgccaaaccgggcactttaaagcaaccacaagcaataagcgtactcggcctttagtgcgtagttcacacctgcgcaccggtggccataaatgacaagccagaagccgcagactgcatttggggggccgaaattctggcctaagttactttatacctatgatagacttgatatataagcgggaggtatagctacattagggctagaaatgctagactcggctcaccatgtcgtccctggtcaaacacgcaggtcatccccggattcacaaagtgctttccaaatatgagtggtatcgaagccactgcccagtaacagaacctggccctaggcagttcaacaggcagaggcggagattcacggagcgctccgcgcagacgcagagcggcgaagaacggagtatccgctgctggaatttggagacatgcggggtattgcctacttgtggttctaattcccctcctatttattatggcaggcggcgctgaagggaattgtttacgcagatttatcatttaattcttccgctattgaaaatggtgttcaattactgcgcctacgctgatcccgcaaccggggaggaccgcatcggccaccttgatcaccaatccctccaaatccagcctttatccttcacatcaggaacaaggatcaccaacctctaccaagtcattgaagccggccaggccagtatcgtcagtgcccgcgctgagcccctccccttgtccagcgttaaactcctccccaccatttccggccgcgatatccttgctgtcggcaagaactacgtcgaacacgcaaaagaattcaactcctctggctttgattcttcagacaaagtcgaccagcctactgcaccagttatcttcacgaagcgggcgacttcgatcattgcgcatggcgaagatgttctcctccaccccggcttcactgaaacccctgactatgagggcgaaataggggttatcatcggcaaggcagggcacaagatcccagaagaccaggcgatggattatgtctggggatacacaatcatcaacgatttcacagcacgcgagagacagcgcgatcataagcagttctacatcggcaagtcccctgatacgtactgcccgatcgggcccgttgccgtgccgaaggaacagctccctgaaaaggagaatattcgtctgcagacatttgtaaatggcgagaagaggcaagatgccacgctggaccagttgattttctccatcccgaatctcgtctcgaccctgtcgcagggtcagacgattcagcctggagacaccattgccacgggcacaccttacggtgtgggttttggcttccggcccatgaaattcctcaaggctggtgacgaggtcaaggtctccgtcactggccttgga

SEQ ID NO: 20153 - DNA, 1878 bp, Emericella nidulans
agtcgcaccccgcagaccccaagggacctcaagagcgcgtcgctccaaattcaggttcggattccgatccctccgatctggatctcttcactcgaaacgagaaggaagtagagcagaacccggacaaggtcactcaagatgcccatctcggtgtgcagaaagctgaggcagctgccctcgtctggagcagaccggccgtctacgcgacctacgcctggtgagttgagacgagtgttctgctgcttgtcactgctaacagatcaggatctgggtgtgcttcttcttgctcgctcttcagtcttcagttagttctaccgtgatctataacgcgtacgccaacttctccagcgctccccaagtcgcaaccgcgaatatcctctacagcatcatcggcggcgtgctgaaactgcccattgcgaaaatcctcaacctctggggccgttccgaaggcttcctaatcttccttggagtctacgccgtcgggctgatcattgtcgccgcttgcaatggacctgattcctatgcggcaggttacgtccttttctgggtgggctacaatgccctcttcctcatcatggacgttttcatggcggatacctctggaatgcgcaaccgagcgttcacctttgctttctctcagactccctttatctgcactgccttcaccggtcccctggccggtcagtcgtttcttgaggtagccaactggcgatgggcccatggagccttcgtcattatcaacgttgtcgccttctcgccgctagccgttgtgttcaagttttaccagaagaaggccgagaggatggggctgtatcagcacgagccgagtggtcgtaccacaatacagtcgattatccattacatccatgagtttgattgtatgttcactgctcaattttctcatgggccctgctaacggactagtgattggtgctgcgctgttgatggctggttgggttctcctgcttctccccttcagcttgacgagtgctggtcggtctcagtaccaagatgctacatttatcgccatggtggtgattggcttctgtctcctctttgttttcgccgcatgggagaaatggtgtgcccgtgttcaattcatccggtacgagctcttgaaacagcgcactgtgctgggagcttgctgcatggctgcgatttctttcttcgccttctactgttgggatctctacttttacaacttttgtattgttgtctacaacctcagcgtgtcgaacgcaggatacatgcttcagatctacaacgtcggctcctgcttccagggtgtgctctttggcatctacatccgtcagaccaagcacttcaagtacgcttgtctcctgtttggcctgcctctcctcattctcggcgcgggcctgatgatccatttccggggcgaagaccagggtattggctacatcatcatgtgccagatcttcatcgccttcggaggtggtactctggtcattggtcaggacatggctgtcatggcctctgccgacagagaaggcgtgccgatgatgctttcgctccttggactcttttccagtctcggaggcgccattggtcaagccgtgggggctgcgatctacaacaacagtttcaccggtgccctccggtctcggttgcccaatgatctcaagcacatggctgaagagatcaataacggcggataccttgcgcagatgaattaccctgtgggcggtgatatccgcaatgccatcaactatgcctggggccgcagccagatgtacggatccatcgcggccacttgccttctcgcccttggcatccctgctattgctgtgtggcggaactacaatgtcaacaagaagcagaacaagggtatcattatttgatctggtccagtactggctt

SEQ ID NO: 20154 - DNA, 1880 bp, Emericella nidulans
cccgtccgttaatgtccgacacctgtattgtgtgcttaggagaccttggcgaaagcgccagcgatcctcttgccgcctcggtgccaagacctgaccttgaaccggacggcaaggcacctgatatctctaccaaggcagaaggctccgatggaagtgaggatagctttatcgcacagttactcccctgcggccatattttacacaacaactgcttgaaaccctgggtcgaacgagccaacagctgcccgatatgccgccgtaccttcaatgaagtggagctgagtgaccgggtcggaggtaggaagattctgttccaaccctgtttaatcatctatgtgtggcagactggattttgacgcatcatgtataggcccagtgatatcctcctacgccgttgaagaccgtgttcaagtggcggatgtcgatccgtccatggtcgtcgaatatatagatgatgatgtctccgatttccagccctgccctatctgcggcgactctgaaaacgaggaagtgcttcttctttgtgacggctgcgatgtaccgacacatatatattgtgtgggacttgatgaggtaccagcgggtccctggtactgttcccgatgtgagacccaacgtcccatcggactatcttctgatgcagttgatagactgtcccatgcacaaactcggcggcgccaccgtaccagggcccagcaacggagggtgctgagtagaaaccaaatcaactccctgcactgggcacgtgtttggcaatcagtttgggacaatcttaacatagacttggatttccccttcgatgatgatcgagctgtcgagcgcgcgttgcagcaacaacgccgcgaggaagctaaccagagagagttccgcacctggcagcgccgttttgacgtcgccgagcggcagggtggaagaaatcgcttcagagacactgctgctctgcttgacattgaggcacctcgaccatcacgaccgcgagcgccgagggcgccgacacctgaacctgagtcgctagaggagatgagggcgtggaacgcctttgaacgtgcccgtgagatcgagaacaacccgagcgctgcacgaaaacgtaaagagccaacaatgtccccttctccggagcctgctgaacccgcacgcaagctgaaacgaccccgcacccgtagagccgaagatctcgcggcattggcggtgcagaatggcgagtcatccaggagtgctactgcccaggcatctgctcgtcttaatgccgacaactctagcgagccgagcttcctctcatcattattgaaggaggtcgaagatgcgtcaacgcctcaaagtgttaactcgtacggcccttcagctcacgtctccgccgagcaaagtactgtgggtctttcgtcgccttccatctcacctgttccttctaatcaatcatccccgcggctatcttctaccaccccgcctccgcactccggaagccggccaatatcaccaatgcagcttaccccaccgcgcgaagtgtcgtctcccacattctctccggaagtatcaccagctagttctcacaaggatgttagagaagaaacgccctcgcgctctagccctcgccgaatacctcgagcggcgcatatagttagggcagtaaggtcgaacgagagctcaccagctcgcattggtttatccctagaggtaaaatctgacattcaaaaactcgtcagcgcggctctcaaaccgcactaccggtcgaaggttgtctccaaggaggagtacaccgacatcaatcgaaatatctctcggaaattgtatgaacatgctctgggattagactcattagagtcaaccacaaaggctcgcttggaagccaaagctaaagaagaggtgcataacgcggtcgaagc

SEQ ID NO: 20155 - DNA, 1881 bp, Emericella nidulans
tggaagaagctgaggcggcattcatgaaaatgctcaaacgccacaatgttcagcctgattggacgtgggagcagacaatgcgtgaaacaatcaaagaccctcagtaccgggctctcaaagacccgagagaccgcaagatagcgttcgagaaatacgcggtcgaggttcgctcgcaggaaaaagatcgggcgaaagaaaggttcgctaagctaagagcagatttcaatactatgttgaaacgccaccctgaaatcaaacattacacgcggtggaagaccatccgtcccatcattgaaggtgaaaccatcttcaggtcgaccaacgatgaaaacgagcggcgacagtctttgaagaatatattctagaactcaagaaggaacacgccgagaaagaggctgctgcgcgcagagctgccatggacgagcttgttggaatccttaagtccatgaacctcgagccctatactaggtggtcggaggcacaagccatcattcaatcaaacgagagagtacaaaacgaggaaaaattcaaggctcttagcaaatcagatattctgactgctttcgagaatcatatcaagtctcttgaacgcgcgttcaacgatgcccgacagcagcaaaaggcagcaaaggccaggaaggaacgacatgcccgtgaacagtttgttgaactactaaatgagttgagatctaaaggggttatcaaggctggcagcaagtggtcaaaaatttaccctatcattcgtgaggacccgcgttaccttgggatccttggaaactcaggctcctctcctctggatcttttctgggatgtggtcgaagaagaagaaaggtcgttacgtggaccccgtaatgatgttttggacgtccttgatgacaaccgatttgacgttacctccaagaccacctttgaagaattcaactcagtcgtgtcttccgatcgccggacagcgaagatcgaccccgaaatcctccaggtcatcttccaacgcatccaggaaaaagcgctccgtcgcaacgaagaggagaaacacgcagcagaccggcaccaaagacgcgcaattgacgctctgcgctcccgcctgaaacgcttggaacctcctcttcgttccaccgatacatgggaccaggtgaagcccacactagagagatacgacgaatacaaggcccttgagagtgatgaactccgtcaaatcgctttcgacaaggtcattcgccgccttaaggagaaagaagaagatgccgagcgagatcgcgagagagacagagatcgcggcagccgccgtgaccaccatcacgatcgtgaccgtgaccgcgactaccgcagctacagaggcgagcgacgcggccctgccagccgccacagccggactccagaacccgacgcctacgaagccgaccggcgcaaagcccaagcagaccgcgagcgctcctaccgcaaggcggcgagcggactttcacctgtccgcgaaagatgggacgaacgagacagagaccgcgaaagagatcgagaccgccgggaccgggaccgcgatcgcgatcgcgaacgaagcacacgctccctcagtcactacgagcgcgagcgccgcgaccgcgaagaagagcgcgaacgctctttaccgaacccgcggcgacccccgcggtagccgcgacgagctcgactatggcggcgattcccggagcgccactggtgcgaccgcaagcaatgagcggcgacgccggcgcgacagcgacacggagagcgttgcaagtcgctcaactaagcggtaccggcgggatagtcgggatcgggacgcgagaaaggatagggagcgcagggagcgcacgcctacatctgctgttcctgggcctgcagcggatgaggcgaaggaggagaaggctg

SEQ ID NO: 20156 - DNA, 1883 bp, Emericella nidulans
ctaacacgttctacaaagttaccggctgctcgtcagggatcagccaatccctggtgcaactaatcgcgaaatcttctaatctgatcattgcgactgctcgtaaccctggttctttgtcttcaattctagatggttccagtgtccttaagctagcactggatgtcacgtcaattccatcaattgaggccgctctaaaagagaccctaacaaagtttggccgtattgacgtccttgtcaataatgcagggcatactcttgtgggcgatactgaaatagcacaggacaaagagtcatgtcagttgtttgacactaacttctggggcatggttaatattaccaagcatgtcctaggaattatgaggggaaaaaaccccaatagaggaggtgtgatcctgaatgttaggtctatgggcggatttattggtatccctggcggctctttttaccatgtgagcaagtttgccgtagagggatggactgaagccgtcgcgaaggagttgcctactgagtggaataataagtttattctatggctattattgataatgtggctaaccaaaaaaagaaaataaataaataaataaataaataaatacttatagtccatctatgcaatattgagcctggtggtgtcaaaaccaattatacaaccaccttgctgaagactatagcaaaaggggacacccagcctatgctgacctgaactatcccaccaacactctgctggggtatataggtaaggcagaaaactgggcttcctgggcagaactaagcacgattactgcagctatatattgacttgttagttgcaggggatgtattcctatttgtgttctactaggtgctgatgcctatagtacaattactatggacctggaaagtatcaagaaggatctagaggagttgaaagatatcagtcttggtaggtgatgcaaagcagctggactctattggtttcctacagaaggcttagggttgggtctgaggaagaggtgttacttaggcctttagaaaaggtatatccttatttctagctttataaaaggagaatttggagctaccctgctctttacaacctataagagacaagatacttaaaatagaaatagaagtaacagtatatactgagtagtagcaagttaagcttgatagagagcaggtaattgctcccacacgcagttccctgctaataaagctcctatactgccttaggttacctacattaaccacctgcagtcagaagccaggtatcagaggattataagggattacaatagcactgtgttgtagtttgtggaatactgtgttagtttatagtagctttgtctgtacttagcaggccagctgaggccagattatttataatatatgcaagagtacagataatataagtactctttaactactttcaagattatatatgcctttttctgtaaacctgacctggattatatatttatagtgtcaggtcttgcaaggctcctagcaaccctctgggcatctaaataccttggtatttgtgactatctctagtcaaatacccttcctactatagatctttggcccgccagcaaagttgatgagttcttgtcaagtttgcatattctctcatgcaatttacaggaactgaacttggtatcctgttcttagatatagatttccttattccaataaacaggggcggcattcttacctactatatcctccctttactggccttgcctcaagactgttgtcctaaacaggattcctgtaaatctcttatctggcatgatttcctgcccctctttctatacagaagatgtcctgcaatctaacagatattccttacaggtaaatagctatttaactacaaacttgaaagtggcgacgggattttcaag

SEQ ID NO: 20157 - DNA, 1888 bp, Emericella nidulans
ctatgtttactacgtggtctttatcgtggccgttcctctgatgttcaagaccgtgattgatgtttcgcaaggtgcgtccgcgtggagctgggtcaaaaacggagctgataccacctgcctcagaatcgcatcccacctacgctacatactctcatttgctctctccaggttggattccagggcggagagtcgtgagttttgcctcctcgctgccagttgacaatggctaacggacacttgcttattctcaggacaattccgacgcgcaatattctggcttccgcgataatatcccctacctcctcatccttttggttgcccatccttctcttcgacgcgtctacgagcactttactcgcacccctagtacacctaatgcgaacaataccatctctgtcactgccgccggagacgcccgagctgcgcgacgcatacgattcgactattactttgccctggtgttcatcacagctctccatggtatatcggcgatcaagattcttatcattctctacttgaactacaaaatcgccaaatctcttccgcggaaatatatccctgctgcgacttggagcttcggcatagggatactgtttgccaatgagttctgcggcggatacccgctggcgcgagttctcagcttctgggcagcagacgagacagggcgggagtccgctctacttctatgggcgcggcacttggacagctttggtggtctaatgccacgatgggaagtcctgttcaagatcactatcctacggctgatcagtttcaatatggattactactggagtttcgactttcctactagcagcccaatcgaagtaagtctcttttccgaggataaaccaactccctctgacgaccataagaagaagcaactcgatccggaatcgctttcagagcgtgaccgggtcaagatccccgccgaaaaagcagccttcaacggccgaaactatctcgcctacatcctctactctccgttatacctcacaggcccaattgtcacgttcaacgattacatatcccagcagcgatttccaccacaatcgttgacgaaaacccgcacaatcctctacggaactcgctttttcctaaccctgctctccatggaactgatccttcacttcatctacgccgtagcaatctccaactcacatccaaactggtcgctttacaccccagcccagctcagcatgctcgctttcttcaacctgcacatcatttggctgaagcttctgatcccctggcgtttcttccgcctctgggctctcgtcgacggcatcgacccgccagaaaacatggtccgctgtgtgtcaaacaactactccgccttcgccttctggcgcggctggcaccgctctctcaatcgttgggtcgtccgctatctctacgttcctctgggcggcggcagcaaccgctctatctcgagcccagcatcatcaacaagcggcaccaaaccaccgtcatctcccctttacgccaaagtccgccagatattcaacttcctcgtcgtattcaccttcattgccctctggcacgacatcaacctcagactcctgatgtggggctggctcatcaccctctttgtcctgccagaggtcgtgggcaccttactattccctcctagccgatggcgttcgcgcccgaacacgtaccgcgtcatctgtggcattggagcggtaggcaatgtgcttatgatgatgatcgccaatctagttgggtttgcgctgggcttggatggaatcaaggggcttttgtccgagctattggggactacgccggacttgtgtatctcatttcggcatgctgtgcgctatttgtaggtgtgcaagtgatgtttgagattcgggaggaagaattaagagccggaataaagatgaaatgt

SEQ ID NO: 20158 - DNA, 1890 bp, Emericella nidulans
ctgtcgataccagcgactagcgtactcagactgatctgctgtttcgtccgtcgttatgggtaaactgctcggtcgcctacgggcgacgttcttagtatcggtctgctgcgttggatccttcctgttcgcgtacgatacgggcattattggcggaatccttactctggactcgttcaagcagtcgtttcgatactcagaggcagagcgggcagatatcgcttcaaactctaccagtcttctgcaggccggacgatgtccttgtctcgactcccaggcagttctggcagcttgctgaccttgtgtcctcgatctagctttcttttcctgctttttcgcctggccgttcaccaaaaagtttggtcgccgatggtcgatcgcgctcgcctctttgatcttctgtatcggcgggatcatccaggtggctccaacgcactcgattggcgcgttttatgctgctcgtgtgatcagcggtgtcggtgtcggcatggccaccgtgatggtgcccatgtacaggtaatcctctgctgccttatattgatcttgaactaagctgacatcccgtcgtggacagcgcggaaatgagccctaaagagatccgaggacagttgggcagtctgttccagttcttcttcacgctcggcgtcatgacctcgtactggatcgactacgccgtcgaaaaatacgtcgcatcctctgatcgccagtggcagatccctatcggactgcaactcgtgccggcggggatcctgggcctcggcatgctgtttctcaaggagagtgtgcgatggctcgccagtgtcggtcgacatgatgaggcgctgcaatccctgatctgggtccgtggaggagaagacacagaggaagtccgcactgaaatggcagagatcctagacggcatcagcgccgaagtggctgcaactgagggcgtcacctggaaagagctgaatcttccagccaaccggttcaggattttcatcgcgataagcatccagatcggtacgtctccttgttagatagcgactctcaattgggtctatgctgacaactgcagccgcgcaatgcactggaaacacctcgctggcatactgtacgcttgctcatctaaaacatgtctgcgtcctggactgaccgtagcagatgcgcctcagatcttcggtgccgttggaacgagcgagaacgacacgctcctgatcacagggttcttcggtgttgtcaaagttgtagcatgcgggaccttcgtccttttcctagttgaacggattggccgtaaatggtctctagcccttggcgccttcatgatgggagcactcatgcttatcgtcgcgatcctcgcgaaggtgttcacgccagattcaaccgctactgaaatatcgtctcctaccgctgcatcgattgcgatgatctatctggaggcggcctcgtataacatgtcctgggtatgctaacagccagagccagtccgtactggaccgccagcacagcaagctaacaattcgactagggccccgtaccatggctttacatgagcgagatcttcccaacgcgaattcgggagatcggtattgccgttggaacagctacgcagtggttgttcaactttgtgttctcgcaggcgacaccgcatgccgtgaataacatgggctggcggacgttcctgatgttctgtatcttcaactgggcaatcgtggtctacgtctttctgttcatcagggagacgactggcaagtccttggaggagatggaagatggtacgtatttcatagtgcaggtatacaataatgctgacggctcgcagtattcaaatcgaacattgctcggtttaggaaagatgaagagcgtgctgaggatggagctcctacatatacgcagtgagactgcgtacggctgcga

SEQ ID NO: 20159 - DNA, 1896 bp, Emericella nidulans
accgcagctgttggccttgggccctggctttccagcaatgctgttctcgtgaaggtttgacttctgccacttcctggtcattcaccatggcgtcgttctcccagctcgcctcctctcccagaagagccggactttgagcgtcgattcctgcggtaccgcggggaggatacctcccccacaggccgtcgcgagatttggggatggtatgcctacggagtcgctgccgaggtgtttgccgtatgcggtgtcggtacgtactctagagagatcttcgccggttggtgctgactcttcaggctcgttcctccccctcaccctagagcaactggcccgcgagcaggggttcttgtcttccagtcatctgccatgtgtcggtccagatgcgcctcccgctgccggtaacggaaccgcgccggccaacgaggcctgtgttgtccgttgatgggcttggagatcaacacggcgagttttgctatgtacaccttctcgcttgccgtgctcatccaggccttgaccctcgtgtcctttagtgctcttgcggattatggtgagaccgtaaatatcccgtgatcatgccattatactgatatggtgcagaaaataaccgaaaggccctattactggcattcggctttatcggatccgcaacgtccatgctcttcatgctcatcgttccgccagtcttcgtactcggagcgctcctggttgtgatcggggtcacctgcctcggctcctcttttgttgtcctgaactcattcctgcctatcctcgtcgcaaatgatccctcggtacaaagagcctcgaacaagaataaggacgaccttcatgacctccatacggaaggagacgaattctcgctgcggtcttggacggacgaagaagataccggtgatcatgccggcccggcgggctcaaagaaggctgttgagcccgaaaaggcgtccagctctacgtcgcccgaactgcagctctctactcgcatctcgtcacggggtgtgggcttgggttactgtgcagctgtccttgtgcagattctaagcatattgttgctgttcacgctgtcgaagacgtccatgggcaaatcccacccaactctgccgctgcggtttgttttgcttctagtaggtatatggtgggctgccttcactgtcgtctgcagccggtggttacgaagccgtcctggccctccgttagagggtgtcacccctggcgctgggtatcgtcagaaatggcgtgtctggctacgcgttgttggttttgcgtggaagtctctctggaataccattaaggttgcactgcgattgcgtgaagttgtggtattcttggccgcgtggtttctgatttccgacgccatagcgacagtgtctggaactgcgattctttttgcgcggacagaactgcatctgagtaccgtctctgttggtctcttgtctatcacggcgacaatgtctggaatggcgggcgcgttcctgtggccgatcgtagcccgtcggtttgcgctggcgtccaaccatactattcttttatgcatagcactgtttgagatcatccccttgtacgggatgctggcttacatcccctttattcgaaactggggtgtgttggggctacagaagccatgggagattttccctttgggcattgttcatggggttgtctctggaggattggcatcgtactgtcgctctttgttcggcgagcttatcccgccaggcagcgaggctgcgttttacgcgctctacgcggccaccgacaaaggaagctcattcgtgggtccggctatagtcggcgccctgatcgatgcgaccgggtctgtccggtccggattcattttcattggcgtcttgatcctactaccgatgccgctagtgtggttggtgaatgcagagcgagggc

SEQ ID NO: 20160 - DNA, 1898 bp, Emericella nidulans
gttgaagctctgtggatacggtatgtcaccatattaacgctgatctgggaagtgaccaacagcaaagtcattcaatccttgagatccggagaataagccgtgcgcagctccaaacctactacaagatccaaacactgtagacgtgttgtcttgaccattggcgcgactcattttgtccacagtccgatttttctcaagtccgctttctaaggataaaaaaagcacagatggtagcttgattttacaatcttctttcctatcctttacctgtttattttacccggcataaggtaccttattcatccgaggtcaaagctctcatgttaacagtgacataccagttataaaccagccaaccagatagcagactttcaaatctatgacaacccactctcaacagccaccacacttgatgtggcatataagcaggagatgtcgtcgccctctcctcttctttcaccccatcactccctttcttcgtgcgcgaagtcccataagtcgacttgtatctatacatacatacctacctccagccttcattctaatcccaatttatcgagaatgattcaagacacctactccgaggtgcaatcccgctacggcagcatcgcgaaacaaacaaacgcagacaccaacgaaaataaagacgacaccgaagacaaactcgctcaagccttcggatacaccgcagcagagctctcttctctccccggtaaggcaaatctaggcctgagttgtgggaaccccattgcgttcgcaaatcttaagccggtaattcccatctgatcctatacttggaataatctggaagtcggtctaactgcgatcctaccgatctagggagagacaattgttgatttgggcagcggcggcggcattgatgtcttcctagctgctcgtaaggtcggcccggaggggagggctattggcgttgatatgactgaggttagccctctttccgctgatgcaatctcttaacaacacttatcctttgcacgttgaatagaaacacagcatcgtaaactgacgtctctcccctctgtcgcaactccaggaaatgattacgctcgcgaccaccaatgcaaagaaggctaatttccccaataaccaagtccaattcatcaaagcccccatcacctcaattccgttacctgattccagcgccgactgcatcatcagcaactgcgttatcaacctagttcccaaggatgcaaagcccattgtctttgctgaaattgccaggctgttaaagcccggtggccgagttgccatcagtgatatactggcacggaagcccttaagtccggcctttgtgagcgatattgcgctgtatgtaggttgcgttgcgggagcaagtctggtggaggagtacgaggactggttgggaagggcagggcttaaaggtatgtccgtgggcttgtttgtgatttcgatcccctggatggtagcagatacggtgccactgacaggatgatacacggaatttttagatgtgttgattgttgatacaaaggcggatatcaacctgtataaacagaccttggactccagtccagcggacagctgctgtgcgcctaaagagtcggttcaaatcccggccgcaaatttttcagatgttgacttcaatgagtgggtcggtgagtcttttctgcgctccatgcctgcggatagggtttgttaaacagtgatgcaggttcatttcagatctatgctgtcaagggtggtttctgaacagaactctaccgtacgtgcgccagatttctcttgactcttatagtcggaataggatgcgatagaagcgcatcgtgtatgtggttgcacaaatataccatggttggtaccagtgtgcctcctgataagggttggctatgttgtcaagtttgctagcagagagagag

SEQ ID NO: 20161 - DNA, 1900 bp, Emericella nidulans
ccgcaaaccggtagagcccagtccggagttcaagcttttgcactcggaggcaacatctgctttcatcgatggggactatgaccgcgcaatcgaccttgttaggcgtgccattcaggtcaaccctgagatgtttgcagctcactccttgctctcagagattttcctagcccaaggcgagaaagaaaaggccgtgacagcactgttcagcggcgctcacactcggccaagagatacaacagtgtggttgaaggtggctaggatgataacggaacaggcaggcgacgatagacaggctgtactgaacgacgtcctctactgctatagtcgcgtgcttgaaattgatccccaaaaccacaacacccgcttccagagggctgccctctatcggggcttgggtcacaatggacgagcagtaaccgagtatgagagaatccttagggatcttcctcacaacgttcgagcgctccggctccttacagataccctttccgagcaaaatcaatatcaaaaagcgcttgactattggtcagagagcatacagcactatatggcacaggagcctgaggagaccccagagttcacgtggtctgacgctaatatttacatcgagctgtatacgtacttgggacggcatgctgaagggctcaaagctgcgaaagcggtgtcgcgatggttattggggcgcaaagacgacactatgtgggatgactttgacgaggatgatcgtgaatgggaccacgccgacttccctcgaaggattaaagcagatggttatattccgaaacagtggccgccggactcgtatggcccaggtttaccccttgaatttcgcataaaactcggtctcttccgtttgaagctaccggagcggcacatcaatgaagctcttgtaagtctatatcagaagctgcttttttgttctctactaactctgtttagcatcacttcagatggcttaaaccagaagatacctcagacgggtctctagtttacgattacggtgacctctttcgagaagccgccgacgcgctcaaagacgccgagatgttcgaggacgcccttcgattctataggcccattcagaaaaccgagtacgcggatgtcagcttcttcatggccatgggagattgcttcaagtccctgggcgaactggaagacgcagaaaattgttatttgactgttgcagaacatgacacaagcaatattgaatctcgagtgcaacttgccaagttatacgaaagcataggaatgaccgagcaggcgctcagatatgtcaacgatgccgttctactaggacggcaggagcatagaagtaatcgccgacggaaggatacccggctcgaagagctcgcaagggagttcaagtcggtgaatgtggccgcagggcctaaagaccagtccgttgaatcctcatcagcccttggtaacaagggtgaggcagaaaggaccgaaaatatacagttccttttcaagaagctgacgcaattggaaccgaaactccaagctggagactctgaggccacggaggactggctagacattgctgacgctcttctgcgtgaatttcgttccaacagaatcttttacccgcttcaacgcaatgtggtattccttggatatagtagcaaggcgggcaaggatgcgcttatggatgaattacaagaaatggcgaatcggcttcaggagtcactaggtgcggtacgtccggtaggcgtcacgtccgggcttagctaacttcgcataggggtggatgaggaatttccgcagtctacaatccctacagactaccatggcatcagtttcgacgaatggcttgacctattcctgcagtacgccctaacggtggcaggtcaaggtgaattcagcgaagcgtatgatactctaggagccgctgcggacg

SEQ ID NO: 20162 - DNA, 1904 bp, Emericella nidulans
ttcattcagcacgttatacgacaaattcactattcgcaactcagggataaatgatagttcacgaaacacgtcatcctcgagccggttatcggccaggtacaagttccggagcgagccaccaaatgtagtggccacatgctgagagaaattcgaatctttcctggatgatgggctgccttctgcgaacttcgaagcagtggagaccttccttcctccctgactaagagaggaggcgaccgacggttttcgagtgctcccaccaccgggagagctcccactgggcgcgctgccagatgcctggctgggacgccgtgtttcctgctcttctacagtgcccaagtcatcataactcggcgtaactgagccaccgggtgtcatcgcgggagtagtaccagcagtagcctcgcccggaagctgaggtggcgggccgccatgcttgggaaagctatccagaacgtttgatgagacgttgagagtctctagtttcagacaataccagatctcttgaggcagccttcgcaagttacactctctcagattaaggtacttgagctcggtcaaacaccctatagacggaggaagtgacgagagaggattcttggccatgctaaaatgctcgagtttagtctgctcccagatgatgctgatgttttatcctccgttttgcagtggctccaccccgcttgaaaagaagattgccatccgtcccacctcggaaaccgtcatgtacccctactatgctaagtggatccggagtcaccgagacctccccctcaagctcaaccagtggaactccgtcgtccgatgggagttcaagcaccctcagccattcctcagaactcgagagttcttgtggcaggaaggacacacggcgcatctaactaaagaagctgctcacgaggaagttatgtacattcttgacctctatgcgcaaatttacgaggaactcctggctgttcctgttgtgaagggtcagaagacggagaaagaaaagtttgctggtggtctctacaccacgactgtggaaggatatatccctgctacaggtcgtggtatccagggcggtacatctcacggtctcggtcagaacttcagcaaaatgttcaatatcaccgtggaagacccatcagcgaagggcgacgaaaagaagccgcctctccacgtttggcaaaactcgtggggtctgtctacccgcactttgggtgttatggtcatgatccacagtgatgacaacggattggttcttcctccccgtgttgctgaaaaccaggtcgtcgtcgtccctgtcggaatccctgctaagctcacggaagaagaccgtgctaagctctacgctgaggtcgacaaaattaccgagactctcactgccgctggtgtccgcgctatcagcgacaagcgtgagggatactctcctggttggaagttcaacgagtgggagctccgtggcgctcctctgctaatcgagtttggccctggcgagtctgcaggcaattttgtctccactgcccgtcgtgtattccaggcaaggatggcaagggcacaatccccatccctgaactttccacagccgttcccgctcttcttgatacaatccacaaggacatgttcaagcgcgccgatgaccagtatcgtacacaccgcaagctcatcaccaactgggacgacttcacccccgcccttaacgacaagaatatctgcatcattccccactgtctcactgaggaatgtgaggatcaaattaaggaaatgagcgcccgcaaggctgaggaggattccggcgtggctcaagactctcgtgctcctagcatgggggccaagtccctctgcattcccttcgaccagcccgagggaattgtccccggcgagactaagtgcactaaccctaagtgcacccgatttgccga

SEQ ID NO: 20163 - DNA, 1907 bp, Emericella nidulans
ggcaacgttctgctcctcatgcgtgacatcaagaagattatggactttttgtcaatcgacaagacccgtcctgcttacgtcgaggatatgatgggcgtgtggcttcgacggaagccatggttccaggaatgcagtaatattcaatattacagccgagatgcttctcccagtgggctggctcgcgcgtccgaggactttaaccggttcctgcaggtagctaccgggcagattgacagcctcagtattatcaaggagaaagagcactctttctttgcgtcgctgactctaccggatctgcgtgaagcaggcgacatcctcgaggaagtgtgtgtcggatctgacgctgtggagctacgggtcgatcttcttaaggatcccgcctcgaacaacgacattccgtctgttgactatgtcgtagagcagctctcttttctgcgaagtcgtgtcacactccctatcatcttcaccatccgtacccagagccagggcggtcgtttccccgataacgcccacgacgctgcgttggagctgtaccgtcttgcattcaggtccgggtgtgaatttgtcgatctcgagatcgctttccctgaagacatgctgcgggccgttacagagatgaagggcttctctaagatcattgcgtcgcaccacgaccccaagggcgagctttcttgggccaacatgtcctggatcaagttctacaataaagcgcttgaatatggtgacattatcaaacttgtgggtgttgcacgaaacatcgacgacaacacagccctgcggaagttcaagaactgggctgctgaagctcacgatgtccctctcatcgccataaacatgggtgaccaggggcagctgagccgcatcctcaacggcttcatgacacccgtgtctcaccctagcttgccattcaaggcagctcccggccaactctccgcaaccgagatccgcaagggcctgtctctcatgggtgaaatcaagcccaagaagttcgccatcttcggcagtcccatatcccaatcccgctccccagctctccacaacaccctatttgcccaggtcggcctcccccataactacacccgcctggagactacgaacgcccaagatgtgcaggagttcatccgctctcctgacttcggcggcgcttccgtaacaattccgctcaagctcgacatcatgccccttctcgacgaagttgccgcggaagccgagatcatcggtgctgttaacacaatcattcccgtgtcgactggcaagaacactccatcacgcctagtcggccgcaacaccgactggcagggaatgattctgtccctccgcaaagcgggtgtctacggacccaagagaaaggatcaagagcagtctgccctcgtcgtcggcggcggcgcacggcccgtgcagccatctacgccctgcacaacatgggctactctcccatctacatcgttggccgcaccccgtctaagctggaaaacatggtctctactttccccagcagctacaacatccgcatcgttgagagcccttcaagcttcgagtccgttccgcacgtcgcgattggtacaatccccgccgatcaaccaattgacccgactatgcgtgagacactgtgccacatgttcgagcgcgcgcaggaggcagacgctgaagctgtgaaggccattgagcatgcgccgcgtatcctgcttgagatggcgtacaagcctcaggtgaccgcactgatgaggctggcgtctgattcaggctggaagactattcctggtttggaggtgctagttggtcaagggtggtatcaggtttgtttccttgcttcaatcatactcattgcatgcgagctaactgaacgtagtttaaatactggactgggatctcgccgctatatgagagtgccagggcatgtagctccc

SEQ ID NO: 20164 - DNA, 1907 bp, Emericella nidulans
tgctcatcacggaacagggctcgcaggcagtgctctggctttttggctctccaagctcggccacaaagtcaccgttgtcaagcggttccctgagtttagaactagcggcctccaggtcgataacggggtcagaatcgaggtgttaaggcgaataggtcctgagagtgcttttcgggccttatctggtccagagcaaggctgcaggtggccgacaatgcaggtaaacggtgggcttaattccctgccaacagatctggaacagggccacagggtttcaccagtgattttgaaatcatgatgggcgatctctgccgaattatctatgacgcaacgaaggaccgtgcgaattacaccttcggcagatcgattgagagctttggagaaaagatgcggccattgaggtcctcttcaggagtggagggagcccggtatgatattcttgtttgcgctgatggccaaggatcacggacgcgcaaggtcatgcttcgttctgatagcgaggatgctttttaatcgctcaatgaatactcaacctactttacaattccgcggtcgatggaggctggagaggagtacattgccacctcgtacatcgctcccggcgacaggttcgttctaactcgcagacataatccgcagaggattcaggtctatttaatcggcaaaagtgtcattaaatgaccgaaaggtgtccacaaaggggacactagtgaggagaagaaggcgtttgcagaggtctttcgaggcgcagggtggcaggtcgaagggattcttgaattgctcatggaagccgacgacccctactgcgagactcagggcctcgtcaagttgaatccctaggtcgtgtcgtgcttcttggagatgccgcgtactgtcttcggcaagcacaggcatgggcacttctagcgcaatcgtgggcgcttatatcctagccggagaaatatgggtacattgcccaggggatgacgcggaagtctctcacgagacggcattctgggcttacgatgacaagtttcggccgttcatggaccaggtgcagaaaggtgttggggatccgagtatcttcgatagcatatcgtggtcgcctctcaccatctctatcttgtattgagtcctgtggctggcatcatgcttaaggctcgaccgatttggggggttgcttggggatcaacctgaaaaggggtgggaactgccagaatatgggattttgatggatcatgctgagctgtagagggctgtaaaacataatttacttggaattccagaatagaatgaggatgcaaacctacgactacatctacatctgcagcagatgattaaagataaatctgtttataagcaaaaatcgtcatatggaagggccgcagaatgtatacggttgattataattaccttcaaaagcatttgtttagaaactagcttgccttaactaagataaagctcctagttcctcactgtggctactgaaattccagaaaccagaaataatacggattcaattaggagtattcatgcgacggagccagtgtttggctcatcgcgattgccagtttgtttttttttgaaggactctgtttccaaggactagtgcctataaggcgagaccacacctgtcagatatcatctaatatgcagagcggcctgatggccgtgagaacaagagaaaaaagtgagaggatagagatacgattgtcatgtcaatagtgtcgtgcttatcttacacatgctttgaagcagggtcatcgtttaggctcctagtatctaatcgtcttagcgaaaccaaccaccctttgggagaccattttgttgaaacgctatcctgcaccaacggcctcccaggcgcgtcgtctggcttcttcacagtaccagtagcctttttacggcctaaagtgggcttttcggatttc

SEQ ID NO: 20165 - DNA, 1908 bp, Emericella nidulans
tggcaaaagtacgtttgtagattggcagaaggtgaaactgcaggagtcctcacatgaaattccaaccggcagcatgccccggactatggatgtgatattgcgcggtgagatggtcgaccgtgtcaaggctggtgaacggtgcatcttcaccggtacgcttattgttattcccgacgtcagtcagctaggactgccgggtgttcgccccgaggccgttcgtgacaatagcggtttccgcagcaatgatgttggaggtggaggagtcagtggcctcaaggcgcttggtgtgcgggatctcacctaccgcctggctttcctgacttgtatggttactcctgatacaacgacccccggccagcaatccaaccagcaactgagcggccagtccaatcgaatcctcggctcgctaaaccaaaaccccgatcctgagcccgacgacgacaaggcacaggaggcatttcttcagagtctgagtccggcagaagtcgaggacctaaagaccatggttcactccgaatacatttattctcgtctagtagactctatggcgccgatgatttacggccaccgacagattaagaagggtttgcttctgcagctcgtaggaggagtggctaagtcgacagaacaagaaagcctgcagctccgtggtgacatcaatatttgcatcgttggtgatccatcaactagcaagagtcaattcctcaagtaagttacttgcttattaaaatgttccttgctgactagtcagatacatttgctctcttcacccccgcgccgtctacacaagcggcaaagcttcatccgctgccggtttaaccgcatcggttgtcaaagacgcggagacgggcgagttcaccatcgaggccggagctctcatgctggcgaacggtggtggtatttgcgccattgacgaattcgacaaaatggacatcagcgaccaagtggccatccacgaagcaatggaacagcaaacgatctccatcgctaaagcaggcattcacacaaccctcaatgcccgtgcctctattctcgccgccgcgaaccccatcggcggccgctacaaccctaagaccaccctccgtggcaacctgaacttcagcgcacctatcatgtcccgattcgatttgttcttcgtcatacgcgacgagcctaacgaggacgtcgaccgcaatctggcggatcatattgtcaacgtgcacatgaaccgcgacgcgccagtcgagccggaattcagcactgagcagctgcaacggtatatccgttttgcgcggacattccgccccgtcttccgggaggaagccaaggctgtgcttgttgagaagtacaaagagcttcgcgcgaacgatgcacaaggggggatgggacggtcatcataccgtatcacagtccgtcaattggagtctttgatacgtctctctgaggccatcgcaaaggtcaactgcgttgaggagattgtccccaagtttgtgcgagaagcctacgatctcctccgccagagtatcgtcacggtcgagaaggacgatgtcgaagtggaggacgatgaaggcgccgccaacgcagatgaggacatgcccgaccgcgaccgagacggcgacagcccgatgcgcgaggagccccagtcggccgccgcagctgagcccgttgaaccacgcgccaagacaaagattacctatgacaaatacatgaagattctgaacctggttgtgcgccggattcgcgaagacgaggcccaagcgggcgagggtgtcgagcaggaagacttacttgtctggtacctcgagcagattgaggccgagctgaacaatgaggaggatctgcagcgggagcgcagccttgctgttaaagtcctcaagcgcatggttaaagataacattctcatgccgattcgtggggagggccttgttg

SEQ ID NO: 20166 - DNA, 1910 bp, Emericella nidulans
  unsure (1)..(1910): unsure at all n locations
cgcgatgctcgcaccatgagataccccaattacaagtcgtccaacgacagatctcactttcgtcctctttcccccatatccgccgccttcagacgtcctctacggacacacaagagcgtattcccatccgtaaacaactcaagcaggaagccaaagccataaaatctcggaagcgagaacgacgagaacaggaggaagcttctcggcataagtgggagttgactgtgggagtggagatacatgcgcagttgaatacagagacgaagctcttctcaagtgcggcaacccattgatctcctgatacttgcaagtatctgatcattcagcttgaataggagcaccgacctcaccctccgaacttcccaacaccaacgttgctctgttcgacctcgcgtttcccggcagtcaaccggtcggtccatatacaatccgcggtgctttcgggataatgctgatagattggactaggaattccaagtggcgacccttctgcctgctcttcgcgccgcaattgctctgaactgcgatatccagccggttagtcgtttcgaccggaagcactatttctatcaagatcagccgtcgggctaccagattactcaatactacggtaggacgaatcccgtggtcttgccgttcggaaattgacttgttcagaaccattcgccagaaatggctacctcgaccttttccgccatgacggtattgctccagaggacggagaccgggttcgtatcggcattaaacaaatccagctcgaacaagacacggcgaaatcgcaagaataccctccatccatgcagctcctcgatttcaaccgtgtttcccatcctctcattgagataattacaatgcccgaaatccacactcccgccacggctgccgcatttgtgcgtaaggttcaagccatccttcaatcgtgtagcgccgtaactaccggaatggaggcgggtggtctccgcgcggatatcaacgtctcggtacggctacgaggtgacggttcaggcacacatcaatatagcggcatcggtgggcttggtcaacgcactgagatcaagaacctgagcagcttcaaggcagtagaggacgcgattatcgcagagaagaacagacagattgctgttctcgagaggngggttgttgtccgaaggcgagacgcgtggctggacgattggaagcaccgaaacacggaaacttcgaggaaaagagggcgaggtcgactatcgatacatgcccgatcctgatattccgcctctcctgattggcaaggatatcatctcggcgctttcgaataccatgccggcgggtccggatgcacttatcaacatgctagtcggccagtacggacttgccatagaagacgcaaagccgcttgttgaacttgaagacggggcacgactagagtattaccaggatgttgtcgatatcttacgtaatctacagcaagatctcgattcaaagactcaagccggtctcggccgtgttgctggcaactgggttctccacgaactcggcggtttactgagcaaggctggcctagcctgggatgccgaaagagttacagcggagtctctcgcggcgcttatcgaccagctccagcgaaagcgcattactggagcgacggccaaaaaggtgcttgccatgttatttgacggagaccgacggcctgtcgctcaactcctcgaggaggaaaatctgatcttgcggccgctgtcgcgtgaggaatacattgctctcgcttcagcagctatagagctgaacccgcaaatggtagaacagatccggagtaaaaaccagcttggcaagctgggctggtttgtgggccaaatgatgcgtatgggtgaaaaaggtcgtgtggaggcacaaaaagctgacgcgattctgcgagagcttattctaggattgtcgca

SEQ ID NO: 20167 - DNA, 1912 bp, Emericella nidulans
caaccacggctctgcacccagcaagtctcgctggcctggaaattaccggactctcccgctgtttcgcgtcccccagaatctctctaattattgtctgcatttttcttccactcctcccgttgtcctcttgtcccagccctcatttccgagtcgagtctgtcgatctcttttcattctttccaaaccttgtgattctttcgttcccagtcactcgctttcaccctccaccgatccttagccatccccgactccctccagcctgcagctcagccttcgacctcgcccgaacaatcgatgtgagcctccccgcccgacaaactacagcgtatcacaggcggcttggcaccacctttctggagatccaagccatcacccaccaagctttctacgctgcgaccgcgatctcctctcgtccggtttaccccagtccaccggtctacaacctgggggtttctgtcggaggttgtatgatagttgagaagtttggtgtcgctgcttattgactccggtcgagatcggtcacctcctgaatacttaaacggccttgagacgaaacagtgtctaggacgccgtgtgacaaacagggccggactgtcgaaacaaagtataccacgcctcctgaccgttcacgaaccgcgttccgcctgcttaccaccgcgtcggtggtaaaccgccatattgtacccacagcccgaatacttagacgataccagctccgtcacggagcactttgtcaagatttattcccacacatcatcacgagcgtccctgttcggcggatcctttgatccttcgttcagacgagatcacgggggtttccgcgggagagaaggctatacaaatgtgtccccggcccctaaacgacgcaaaatgtacaaaccgaattccctttggacgtggtcctttgccatcgtcacattagttcaaaccgtcatcacccttgctctgcaatggtatgtttgcgtctggacatcttatcccccgtgctttctaacggccgacttgcagctatatcttcgcaaacttccagctccaactcacagccgaagccgaacttgtgacctcctctaaaacaatcccaactttccttgcactgtacagtttcggatttctctacgaactattcctcgtgtacgacgctttgcgcctcaaaaataccattcaggttattggattgtgtttgtgcaatattggactgttggtttatggcgcagttcaggttcagcagatcaaggaagctgtgacagtcctaacggataatgatgcagtcaccacctgacatctgggccgaaactcaaccgttccttatcattattccgatcgttgtggccatgggtagtgtgctgatgatgatcgtcgcctggaagctttatgatgaattcgcatggtccatctacaagcacatcagcgctgatctgcgcatgaagcgtcgttatctaacgtaccaggtgcgtggatttgctcttgcccttggattcaagtgaagtattaacgtcttgccagatttacatcgcgctgcttaagttcgaccttttcttcttcctcggtttcacgatccaattccttgtcattgttacgaacagaaaagacacagaatttgcccttaccattgccgccataccggttacaatccttatcctcctctgtgcagcattattcgtgaagcgtgagagctcgataggaatgatcgccattattgtatgtcactgggttcatttgatgttggattatcctaacacttgatagcttctttatttcgcagccatggcgtacttcctcttcaagctggttcgtatgtatcaaccagcaaccgccaatgactattcaactgcccgacgatctctgacattctttgccatcattacactgatattgatcgtgatgacaattatcaatgcctgcgtgtgcatgc

SEQ ID NO: 20168 - DNA, 1914 bp, Emericella nidulans
ccatgacgttatcagagtggcacatactagtcctggtagaagggcgagtgcttgctgtcaatcgcatgaacgatgaaattgtatttgatcaagaggtcctggagccaggccaagctgctctgggtcttgtgacagacgcaatgaaaggcacttactggcttttcaccagtcaggacatttttgagatatgtgtccaggatgaggaccgagacgtgtggaaaatcttcttgcgcaagcaaaagtttgaggaggctcttcgatatgcccgtacaagctcccagaaagatgctgtttctactgcttccggcgatttcctcgcgagcaaaggtcgctatatagaagccgccggggtttggggcaagagcagtaaagcatttgaagatgtgtgtctaacactcatcaagcgtggccagcacgacgccctacgaaagtacctgctttcgcagctctcggtttataaaaagtcctcctcgatgcaaaggaccatggtggcaagttggcttatagaagtctttatgaccaagctgaatagtcttgacgacaatatcacaacgaaagcggaacttgccgaggggtcaagcactgaagagatcgagcacgaactgcaggccgttcgaaatgagtttcaagagtttgtgaccaaatacaagtctgacctggatcagaagacagcatacgacatcatcagcagtcatggacgtgagaaggaattgttattctttgccactgtggtaaacgatcacaactacgttctgtcgtactggatccaacgggaaaactggtccgaagcgctcaatgtgctgcagaggcagagtgaccctgaagtgttctacaaacacagcagtgtcttgatgactcacgcagcgaccggactagtcaacatcttgatgcgacagaccaaccttgagcccgagaagctcataccgcgttgctcaactataacagcacagtgacggtgccgctgagtcaaaaccaagcggtgcgttatcttaactttatcatcgtcaaccaccctagacccacggctgcagtgcataacacgctcatatcaattcatgcttcaagccgctcgtcctctgaagctggacttcttacataccttcagtcacagccatcatccccgcctccatatgatgccgactttgcgcttcgcctttgcatacaacaccagcggttccagtcatgtatccatatttacagcgctatgggacagtatctccaggctgttgagctggctttacagcacgatgacattgagctggcggccatcattgctgaccgaccagaaggaaacaataagctacggaagaagctttggctcttggttgcggagaaaaaaatccggcaatcagacacaggcatcaaagacgctatcgagtttcttcgtagatgcgagctgcttcggattgaggatctcatcccatttttcccggacttcgttgtcattgacgacttcaaagatgaaatctgcagtgccctagaggactactcccggcacattgatgcgctccgacaggagatggacagctcggcccaaaccgcgcgccagatccggtcggaaatcgccgccctcgacacacggtacgcgattgttgagcctggcgagaagtgctggacttgctcgcttccagtacttagccggcagttcttcgttttcccatgtcagcacgcgttccacagcgattgcctaggtcgtgaggtgctcgagggcgccggaggagagaagaagtatatacgagatctacagtctcagctgaatgaaggcgcactcacctcgtcccagcgtgaggaggttgtgaaggaactggacgggtagatagcggaagcttggtaagtaccttctgtttcatggaacaggtttgatctagccaaggctaattgctagcacttagtatcctatgcggtgaccacgcg

SEQ ID NO: 20169 - DNA, 1915 bp, Emericella nidulans
ccagttcacgccctccgtcaacagatcaactgtcgaaacaaactggttcacccagacatcctcgcatccactcaatgggacacgacatcgagcacagttcttcgttggccctgaagcaggctctcgtgatgaaagcccaccaatgacacccagcgtcgccgtcaacagctatactcctccaggcgcgattaccccaatcggcgaaccgaatgacccttacgcacgcagcaagcggccccctcaatcgaaaaatcttgcgcagcttgacccgcggttcatatttaacggtcgtgacttgaagcgcaggggtcaacattctggaacgtatgctcgcccatcaacggcgcgctcctccagtgcgtcggatctaaagggaagcgacaagcgtgccggtatcttcggggggaagaaagatgtgcgacagccagatacagagagcaagccgcatggccatatggcggaactcaagcgattcttcaagatgggccacaagcataagcgcggggaatcacctacgtcgaagaaatccagccgctcatccggaaagaacacgccttatcaaatggcaaccgataacgtcccatttgcggatgatcatggtctcaactccaagtatggtaagcttgggaaggttctgggctcgggcgccggtggctctgttcggctgctaaagcgtaatagcgacggtgtaacatttgccgttaagcagttcagggagcgccattcctgggaaacaatgaaggaatactccaagaaggtgactgctgaattttgcattgggtccactcttcatcacggaaatataatcgaaacactcgatatcattcaagagggaagccactggtacgaggttatggaatatgcgccgtacgacttgtttgcaattgtcatgacgggcaagatgtcgaaagaagaagtcgcctgctctttcaagcagatcctaagtggtgttgcttacctccacggaatgggtttagctcatcgggacttgaaattggacaacgtagtagtcaatgagcatggaatcatgaagctcattgattttggaagtgcagtggttttccgatatccatttgagaacgacatagtgcctgcatcaggtaagtcagtccaacaattccagatgcttgtggaaagcagtactgacttctttcaggaatcgttggctcggatccatatttggcaccagaggtttatgacgagaaaaaatatgatcctcgcccaacagatatctggtctctggctattattttctgctgcatgagcctacgcagattcccatggaagcaaccccgagttagcgataactcttatagactgtttgtttcaacgccaacaccgggcactccggtaccagacgctgatccaagacggcaccgccccgtcaaatctgcgccggatttacatagtgccgccattgaggacaagcctccgcagtacgcggcaaacataagcgaagagccttcgaaaatcatggctacgcccccgcggtcccctgttaagcccacgacaggcaaccaagaggaaaacctccccccggagaccacacaggagaagccaccaacaaaggacaccaactgtgataaggctaatacacagaacaaacccactcggaccaccagcaaagaggcacctccgcttccgcccgggtcggcgcaagcggctggtcaacgtcaggaagtcataaaagggccttggaggctacttcggctccttccccgggaaagccgctacatcattggtcgcatgctcaaagtgagcgtgaaagaccgggcaacgcttgacgacgtgctcacggacgagtgggtccgcaatatcagagcatgtcagcaggaggtgactggagaagtgatcaaagctcctggccatacgcacgtccttgagcccccttcccctagtgtgccggtggccagca

SEQ ID NO: 20170 - DNA, 1916 bp, Emericella nidulans
gaacttcaatgatgagggagtcaagcgcgctgtgcgcagctgggaggattacgcagctcgtggacttgcggacactgttttcaacagtgcgcgtgatcgcgactgggaagctatttcccagcccgacagcgaggaatcaggtataaactgggagcaatgggagaacgagggcgacgatgaacctgatataggtatgttgacatttttttttcctggacgattgctgacggtatcagtttacaaacttgcggcctatcttcctccgtctcttgttacattcctagaagacaagttcaactcgttcacaagcttcctcgaaagcagcggcatcttacctcccaaggataaagactcagcgtctgagtccaaggccgtcacaatggcccgcgacgccgtcaaatcagctgaaaaggacctcaacgacgcaaagaacaagctcaagaaagaagaggccgaccttgaaactgactacggcactgcttccatcttccgcgcccttaaaggggtttgtatccagaaggacgctggcgagtatacctacgagcactgtttcctcgaccaaacgaagcagatccccaagaaaggcggctcatcttcgcggatgggcaggttcgagcgcatcgggtccgtcagcgttgatgaggtcaatgaagcaggtgaaatcatccaggtgcagaagacctcgttggagtataagaatggccaggggtgctggaacggacctgcacgctcaacaactgttatcttagactgtggcgaggataacgagatcctgaaggtcgctgaggatgaaaagtgtgtttattcgatgcttgtcacaacaccggctgtttgtgctggcggcgaggagccgggcaatgtggctcctagggcaaaggacgagctgtgataacatagatctagaatacacaaacatgacactactgctttatttaattgcatacagcgttgattcgagctctcttgaaaacaattcatctcaagcgactaggcagctgaccaactagacgccgtgttcaggtacgggctacaccccgttcacaacccactcgaaaactacgaagacaatacttcccagaagaagctaatgcaggtgcacgtatctcattcctcatttcaataatctactcataaacaaacgaggcacagaaggtgcctgaaaatcagaagccccagcgtccaaaacaaacatcctcaacctctaccggaccagacagaaaccatgaatgccccttgttatgtcggttgtcatcgccgggcattcagtgttgacctcgaggtatttattgacgggagagatgctcgctcggacccgaactggttggcgaatttagtgctgtgaggtgacgttagcaggtaaggcttaggtcaggtgggaagacaggtggacagaccttgcaagagctgcaagagcaggagttgcactcgccggagcagcagttgcaggtgcagggagacatgttgatggtgtttgttggtagataaaccggtggaagatggttggttggttggttgattgattggatgaggaagtcgcgataggatgcagatggatagggaagagaagagaaccttggggacgaggctccttatatatctcttcttcctggctatcctggactaggattgctaccttacactagttcccctcactaagagtacgcctgttacatctgacactgacttcacctcagtatggcagccttctttcacccacgcccacgcccacgcccacgcctacaaccgccgatattgcagcctgcacatgcacggttacgacctacgcagcttacccttggtgctctgactggacaggctcagcatactgcgtctggcagtggagcatagtggacaccgaacagtctgcaagaatccatgtggtgcagcaggtgtgggtggtgtgttggcgggcaaga

SEQ ID NO: 20171 - DNA, 1918 bp, Emericella nidulans
ccatccacctgcgtggcagagtttgctgtcttcttcgacgatcagactaaccaaagcacacagttctaggaggccagaaaatcactggtgccgatgttcgagaccagtgcggtatgtcgagtcgaaatctgcgtcgtatcatcttatgttggtccgcccctgacgaattatagtccttgcgacccaagcgattgcaaatgtagtcaagagctctttcggcccctcaggcctggacaagatgatggtcgacgagatcggtgtatgcttgttacggaccccgcaatctatggctatacctttaacgagtgctaggatgtcacggttacaaacgatggcgccactattttgagcctgttggatatcgagcatcctgctggcaaaattcttgtggatctagcccaacaacaggatagggaggtgcgtacagtccataattaatgtatcaaagcacttgtgctgaatcttccaggtcggtgacggtaccacttccgtcgtcctcattgccgcagaactcctccgacgaggaaacgaattgatgaagaatcgcattcaccccacaactatcatcaacggatacagactagcgcttcgggaggctgtgaaatatatgaatgagaacatcgccacgaaggttgaccatttgggcaaggacagcttggttaacattgccaaaacgtccatgtctagcaagatcatcggggctgatgccgacttctttgcgaacttgtgcgtcgatgcaatgctgctggtcaagaccacaaaccagaagaacgaagtcaaataccccgtcaaggcagtcaatctgcttaaggcccatgggaagagtggaacagagtcagtccttgttaacggctatgctctcaactgcaccgttgcctcccaagccatgaagactaggataacagacgcgaagatagcctgccttgacatgaacctgcagaaggagagaatgaagctcggcgttcaaatcacagttgacgatcctgaccagctggaaaagatccgtgaaagggaatccggcattgttattgaacgtgtggagaagattctcaagtctggagccaacgttatcctcactaccaagggcattgatgacatggttctcaagctcttcgttgagaagggtgccatggctgtccggagatgcaagaaggaagacttaagacgtatcgcgaaggctactggagctacgttggtgagcacgctctccgatctgaacggcgatgagaaatttgaggcctcctacctgggtcacgcagatgaggttgttcaggagcggatatccgacgacgaatgcatcctcgtcaagggtaccaaggttcacacttcagcgtccatcatcctgcgaggccccaatgatttcagcttagatgaaatggagcgttcagtccacgactccctctgcgccgttaagcgaacattggaaagcggtacacttgttcccggaggcggtgctgtcgagacagctcttcacatgtaccttgaagagttcgccgtcacagtggtacgtaatatggcccccgccagttctcattcattctgacaaaaccctatagggctcccgcgagcaattggctattggcgaatttgctcaatccctccttatcgttcccaagactctagccgtcaacgcagcgaaagactcttccgagcttgtcgcacaactccgcaagagacacgccttgtctcagcgcgtccaggaaggcgaagctaatgagaaagagaaggccgtcgctaagaagaaggaataccgaaactatggtcttgacttgacaaagggccgtgtccacgactgcctcaaggctggtgtcttggagcctagcatgggtaagctcaagcagcttaagagtgcggttgaggcttgcattgccatcatgcgcattgacactatgatcaagctggaccccgaacgcaagga

SEQ ID NO: 20172 - DNA, 1925 bp, Emericella nidulans
gggtggctagtcggggcaagatgatgggccgcagttttggagataccaaaacagataagggcgatgctcgcaatcattctcgaaggattgattctcccgctgctgtcagtggcttgcctggcaagtcgaagctatcgctatcgacgtcgacagatgtccagcaacttcctgatgagacgactggttctgacgggttggcatggacgcaaactgcttcccaggaggccattatgcccgtcaacacggttcaagcgccttgggtgctcgttgatccattattccaggacagcagtcggctgacaaggttttatatcaaccactgtacgtcgtccactctttttaactcgtgaacacgtctaggctaactgatactctctgctctggtagtcaatcaaaaccttgcggaatatctgaccctatattccgacgtcaaaaacccctttcgggatctcatcccgttggtgggtgactcccctgtccttgctcactctctcgcggccatgggcgctttgcattatgttattttggcaaacggcgagttcgaccccatgccatggcccgtagggaattcgtcaagcagtgacatggtgactccacctaaagaaggcgggccggttgagcttagcactttgtctcggcgctcgtttaccaaagtgtacgagcagtttcttgggttcaagcaacgcgcactacaccagctatcacgagatatatccgaccctattctacgaaacgataacaagacgttggcagcgataatggttcttgctttgatggacgctgttgagtctggacgaggggcctggaaataccacctggagggtgcaaagaagctattgcagagccgcgaacatgataagccgggccaagctcaaacgatgatgaattggctcgatgatttcgctactgatgggtgcctagtgtgagtttctccaattcgtaagttttatgttttcggtctaatctgtaatagaatccagcttatgggtgctactttgacaaggcctggcaccctttcaaagccgttctacacatccgcgatgggagcttcggtcttgaagcgtctagaagaaacctcatgggtcggctgtcccgcctacctactagaggccatcttcttcgttcacgccttctttgacctcgacctaagtgacgaccccaattcacaaccaagcactgtctttccatctgtctacctccccaaaggttcaaacccgctccagtgtcccgaaaacctccccaggcacatccaagcgtttgaccctgtcgcctgggcagagtccctccaaagctacctcttcctcccagacctctccatgcgcattgcgctggctaccatatataaagccgccgtctacctttatgccacaagagttctttcccgtcctcgtcccggcgcaacaaccatttctgcaactatcggtctcccttcagaccacgccgaggtcgcaacctttcttatcaaccagttctctctcatcccgccctccgatccacatttcaaatgcctcatttggccctcgttcattgcaggcgccgaatgcagagatccagcgcagcgcccgtttatgctcgaaatccttcgtactttgtacttccacatcacaagcgtcaacgtgcgcaacgccgcgtgggttctaacgatgatgtggcgaaaacgcgattccagacgcgcggagctgtcgaggtttcgtgcgactaccgcagcaacggccgctgcggatttatattcagacagtgctgggtctgatttgagctttcctgctgcgtcaagctcgccttcggtcattacttctccggctactgcaaccgataccccgtcaaccaccacccctttaagccctattgaggacaatcattatgatgatgacgacttcgactggattcacgaattggatgattccaatattgattggctctttata

SEQ ID NO: 20173 - DNA, 1927 bp, Emericella nidulans
cccgcagccgattgagtcgttcatatccggcgccttgggcggcgggatcgctacggcggccacgtaccctcttgatctattgagaacgcggtttgcggcacagggatctggcgacaatcgcgtctacgagtcgctttttgcgtctcttagggatattgcgaagactgaggggactgtggggttctttcgggggtgcagtgccgccgtcggacaaattgtgccgtatatgggattattctttgcgacctatgaggcgctgagaccggttatggcgactgcgcctgaactatcgccgattcccttaccgcctgggtctggggacgcggcggccggcattgtcgccagtgttctcgcgaagacgggtgtgttcccgcttgatttggtgcggaaacggttacaggttcagggtccgacgcgcgcgttatacgtacatcgcaatatacccgagtatcgcggggtcttcaacaccatgggcttaatattcaggacgcaaggcctacgtggcctgtaccgcggtttgactgtgagcttggtcaaagctgccccggcaagcgcggtcaccatgtggacgtacgaaagagctctgaagcttctccgggaacatgagatagctgctggtcgtgacgagtaggagtcacatagatgtatagatattctggacattttcttagactaatatatatactacggttcggtgtggtcttgattagcataatcttagaaattatatttatttgtactttatgggtcctccgccgaaaattaagcggtaaggccattggaagaatttaaaaaggggcaaacaaatcaacgaacgctacacgaaagaaagggggtgtcgcaaacagattaacagaatacacattggactttggcaagagacgtcgggcataccaagaattaaaccagccatggtaaggcaaggagcgtcccttgattagtactcggcttcttcgccctccatatcaaggctgtccccagcaacctcctcgtaatccttctcaagggcagccaagtcttcacgggcttcggagaattcaccttcttccataccctcacccacgtaccaatgcacgaacgcccgcttggagtacataaggtcgaacttgtggtcgagacgactccatgcctcggaaatggcggttgtgttggaaagcatgctgactgagcggtcgacaggggcgagttcgcttccggggacacgcgcgggtttctggtagttaattcccaccttgaaaccagtaggacaccattcaactaggttgaaggaagccttggccttgagcgacgcgatggcttgggtgcagtcacggggcacgcagtctccacgatacaggagggctacggccatgtacttgccgttacggggatcacaaacgaccatctggttgttaggctcggcacctagatgcaagatcagttattatatttctgtgatgtaggcgacggaatacgttagcagccaaagtgaaaacatacactggagagtgagatcctggaccttgaagctctcgtgagagctgcggttgcttgaaataacgggcgcgtacgagatcaaggggtagtgaatacgtgggaacggcacaaggttggtctggaattcattcagatccacattgagagcaccatcaaacctaagactggaggtgatagagctgacaacttgggcaatcagacggttaaggtgctcaaagctggggcgaggaatatccaagttccggcggcagatatcataaacagcctcgttatcaacgaggaacgtgcagtcggagttctcaattgtgctgtgtgtggacagaacagcgttgtaaggctcaacgacagcggtggaaacacggggagaaggatacactgcgaactccagcttggacttcttgccgtattctgtggacagacgttcgaggagaagagcgccgaaaccagagcc

SEQ ID NO: 20174 - DNA, 1927 bp, Emericella nidulans
cggcaagcaccatggcaagactcaatctcatatggtaagttctgttctctgtctttgcgtcgactctttctctggttttcgtggcgcttggaaggcgcctcccgctatgacgtctgtcctgcccctcccggttcagtcaaaatcagttccagcggtaggccgggaaatcacaaacgagccccggttgtggtttccaggaaggatgcccgtcctaaatagaccgcataattggcgtttctggccttttgctggtctcgctgtgggcgttccatgaagaccctgctcgtatttacagtgacgcttctggctacgctatctgttcgcaggacgtaatgtcgcaaactgcgcttcaattgtgctctctcggtacacaggtctgacgcgttgatttgctgtcaatttctgtcctttttgactttgctaccttcatttactgcagcattggatttggggcttgggctgacgttttaggcattcgaaaatgcttccaccagtgttgccgcctcccagatgcgtaatgccctgaacgctctcgctgagactgtccccgatcctaacgagcgcaaacgattcgaggccgagatggacaacttctttgctcttttccgcagattccttaatgataaggccaagggtaacgtcgtcaattgggaccgtatcgcccctccccagccctcacaggtcgtcaactatgacgacattggcaaggaatcgtctgtcgagttccttaacaagctcgctgtcgtcaagctcaacggtggtctcggtacctccatgggttgcgtcggtcccaagtccgtcatcgaggtccgtgagggcatgtccttcctggatctgtccgtccgtcagatcgagcacttgaaccgcacttacaatgtcaacgtcccctttgtcttgatgaactcgttcaacaccgaccaggacacacaatccatcatcaagaagtaccagggccacaacgtcgacatcattaccttcaaccagtctcggtaccccagaatcatcaaggactcgcttctgcctgcgcccaagtccttcgatgctcctctgcaggactggtacccccctggtcacggtgacgtctttgaatcactgtacaactccggcaccctcgacaagctcttggagcgcggcgtcgaatatattttcctgtccaacgccgacaacctgggcgctgttgttgatacccgcatcctgcagcacatgatcgacaccaaggctgaatatatcatggaattgaccgacaagaccaaggccgatgtcaagggtggtactatcatcgactatgagggcaaggtccgtctccttgaaatcgcccaggtgcccaaggagcacgtcaacgagttcaagtccatcaagaagttcaagtacttcaacactaataacatctggatgaaccttcgcgccattaagcgtgttgtcgaggagaacgagctcgaaatggagattattgccaacgagaagtccatccctgcagacaagaagggtgaggccgaccaggccatctaccagcttgagactgctgttggtgccgccatccgtcacttcaagaacgcccacggtgtcaacgttccccgtcgccgcttccttcccgtcaagacttgctccgacttgctgctggtcaagtccgacctctaccgcctcgagcacggtcagctcgtcatggaccctaaccgatttggcggtgtccccgtcatcaagctcggctcagacttcaagaaggtttctgacttccagaagcgcattcccagcattccccgtatcgtggagctggaccatctcaccatcactggagccgtcaatctgggccgcaacgtgaccctgaaaggtacggtaatcattgtagctacagaaggcagcacgatcgacattcccccaggttctgtactggaaaactgtgttgtacagggcagtcttcgcattctcg

SEQ ID NO: 20175 - DNA, 1929 bp, Emericella nidulans
tgcagcatttcgactttttcctctttctagccctccactcaccgtctgccagccgacttctgcagaataagcgcgcttcctcgctcttctttccctttcgcctgatccgttggtggattggttcctgtcttgtctgttcgctcccacccgattctctcctaccacccacttcgtcgctagtcctgcgccaactcctcttgaccaaacacctctcttatttttcttttttcgatggagttactgctatctatggacggctctgcatccactgctcatcgctgacaatcaacgatctagacgccctcttcatccacgcctaacttgctgatctgcacttgtgggctgtgcttttgcgactcgtctcaaggagtggatttctagattgaaactttccagccagaaggggggagaaattatcaagtgggcatcagttggggaaaaaaaggaaaaagagacaagaggatcggggaggaagaaaatttttttctttgactcatttggatgagcagcagcagcgctagctgctgtgagtgaccaaaaccccccgaagccctgttgggtcaacacgtttcacgtcatccacagtgccttcaccaaagccagcaccccctcccgcttggggacccaactcgggccttggcgccgccaaaaagtcatgtccaggaaagctcctctcgccgcctcggtcgaggaatatgatgaggacgctcatgtcagtctccctgaaacccgtcaattcgccaacgtcactgccaaacgctccaagtctgacttgaagaagtcggccagggtgcccttcgtcgaggctgccagtgactcgggttactctagccgcaccgctgcgacggtcaacagcacccaatccgccccgtcgggctcgagacatcctcccgcccctcttaaggtcgatacatcgcacaaaaagactgatcttgaacgagttcgttcaagaacaaaagaacggccacgagatcgtagcgcccatccatcacgggaggacagaatgcatgcgggcccttactcggccggctatccgccggtccatcttccacggtcaccgtcggtatcccaccgacatgaacgaacgtatactaggcactatcctagcaacaactgggaccccgagcagagtgtgtatcacccagcgcacgctgagtcccgaccaagagagtaccaatattactcatcgcaagcgtcttcctacgattacccaccgccgtcgtcccagacgtcgcgttacgctccggcagccgttgttgtctcatccagtacccggcctcatggtcggtctgcccggtcgaactcctaccatgcgaataacaggcccgtgagcttcaatgggatgatgccttccatgaacgggatcatgtacagtagctctccggttggccgatatgaccatggcccgcctctttcctcctcggcttatgcagaactgccttgcctattctcccgctccttccgtataccaacagccgccattttatccctatccagatgccacaagcccgcccgaacgtatggatcgttcaatgtctcggcctagggagcaccgccagccccgaccgtccatatttgagccccccgcgatcgactatgatacttctgaggaagaggaggaagaagaggaagaggatgtggagggcgagttgatggaaccatccccacctcccccacctcccggaccgccccgtcaagcacggccacggcacccgtctcattcacttgatcgtggggaagacgaatactaccgatcgatgccacggccgccactcaagcaaagggcccctccacctcagatcatccagaaacggcccgggctacaccacaagtcagctactgccccctccatcgtgtcagagcgtcgcgggtcgcgttctctcgacttcaccgaacttcaggatgttctctccgagtatggatacaacc

SEQ ID NO: 20176 - DNA, 1930 bp, Emericella nidulans
gcttgccagaggaacctctttgtatcttttctgtccttaaagtgatccttttccacaagatactttcagcacgtatataattgcattgtataacaagatctctgatcctcggtgctctgaagtaaatatagaaaggacgttgagtagtgccgcactagagcaaccttgagtgggtttcagcccgctttatttagtcagtcttgctctcgtcgtcatcgccaatcgggcaacctgccactccttcacttctcccgttcttcttctccctctcccgctcgctcttttcccagttttattctcaatcttgtgttcttccacgcaggagacatcatcgcttttgcgtctcttcctccaaacggagcccacgaccaacttgtgtgacgggcgcaagacgggatgagtgaagcagagacccaacaggcccgaggacaacgaccgagttgtgggaaatggagcttgaggtctccgtggataatgagcagcaattctggaccagtatgattgtgcttcccgtattttctgcgcttgtggtctccgttctgagaactgacctgttccgcatccgcgcaggcatccaagagattgtatccgccccttgctcgacggaagacttaatcgatgatgcgttacgggcgtatctaagtctgacgactaaatataaaggtatcgggcattattttgcaaatactacggtccgtcgcatgtgctaatcaacttccgcacccctccagagcaatatctccagtccgagtttgaggttacaacatgttcgctcacactggtttcgtcggcaatctttgtcgctcataaggactatgtccggcggcagatgatatacgctttattgcaggtaccgctcgctgtttatactattctcgaggaatcgctattcatactccagacaggaagatgatcccgtgacgcttcatatgattgcatctttccttctcttcgatggccggcaccatgagattccactttatatgatgaatgaggagggtcgttcccgcggttactcgagttgcttcaagtgcaatcgtacgcatggacgatgaaagcgcggcgaatttacaccggcttttgatggaccttttgtatgagttgtcacggatacagaaaatcaaaattgaagacctcagtgagttttcaacgctttaatctgttgccgtgctggaattgctaatatgttcatgataagttcttgtggacgacgattttgtgcggggtcttttcgatatcattgagcatgtgtcgtatgatgccaatgacccatatcactatcctgtcattcgtgtactggtacgttcctctttgccgcctctctgcaggtcacttgctgaattgcgcgacagttggtccttaatgagcagttcatgatatcagctcataaccctgatggggagcaatcgccattgacccccttgaccaacaaggtcattaaagtcctttccatgcacgggaactcgtataagacgtttggagagaatatcatcctactaataaatagagaaggtatctcgcccgttgcgccgtttcgtccatattatgcgctgacacttggctagctgagacttcgttgcagctcctcactcttaaactcctatatcttatcttcacgacaccaagcacctatgagtatttcttcaccaatgacctccatgtcttggttgatattctcatacggaaccttcttgaccttccggaagaagcttcggctttgcgacatacttacctcagggtcctctatccgctgatcgctcatacgcaattaagattaccgccgcactacaagcgcgatgaactcaaacgtatgcttagcctgcttgtccgaggtcagctgactggtgacgctgctgccgactctgaaaagatcatgcactttgatgaagtcgacgaaacaactcgaaggctagtccttcgatgcgccgcc

SEQ ID NO: 20177 - DNA, 1935 bp, Emericella nidulans
ggtcgttgcggcgccatttagcaaggttcgattgtgggatctcccgcgttactcgagcctgctttcccgcgcaatcaatgagatgaactacagtccgagctgcaaactgtctctgctatatgagacgcgtttctgggagcaccagtcacagaatcctatcttcgggggttgcgggagtgtcgacgttccgggtgtcgggtcggtctgctatccgagtttcaacatgaacggcactgggcctggtgttgttctggcctcttacatctccggcacacaggcgaggtctgttggagctctgagcgatgaggattacgtgggaatcgtacagcgagcgatggtggaattccatggcccggttgccgcagaacagtttaccggtatgactggcgcccattagttttaccccctcgttcgaacaccgtccaagtattaacaggcttcgcaggtatatacaaccgtcaatgctgggagatggatgagcatcaggccggtgcatgggcgagtccgctcgtagggcaacaagatctgtttctgccggcttactacaacaccgagtttaagacaatcttcatcggcgagcatacgagctacacgcatgcctggatcttttctgcactggactctgccgttagaggaacgacgcagttacttttagatcttgggcttgtggacgaggcgaagcaaatcgtggaagagtggatgggccgttggattaagctgtagcacgtcattttgggctgagtgaagtgattaggtgaagcggggaggggattacgagagacgagctcatgtatatatggattagatgataatatgtaaatattctgggttggttgatatattaataatgggcgtgtaacatggttcaatagcctattgctaccggttatccaatcttgccctaaccaataggtgcccgaccgtcactatatattcgtagcttttttctaccatcccattctcctccctcatattggtctccacgtatgctagcaaccatgaaagcaatcagactacaccccaactcagacgagaaacacccctacagctccagcaacccggcgccagcatctgcgctccacctggacacgatcccgatccccaaacccggcgcttccggcgatctcttagtgcaaatcaaggcatcgaccataatccgcgacacactcacttggcctgagacatatgagcgagaatacatcacgccggggcacgacttttctgggatcgtcgccgaagtctacaacaaggaatccaaattccaagtcggcgatgaggtctttgggatgcttgccacggaccgtccggggagttgggcggagtatgccatcgtgctcgaaggagaggtcgcgctcaaaccatcaatcctgacgtgggaggtagccgctgctttgccactcagtgggatgacggcgtatgaagcgctatttgttcatgccggagtcgccgtacccggtgacgagcaagccctgcgcaactttagagaaagagctgatctccgtaatgaagagggcaaaaatgagcatggaaagagagtattgattaccggcgccgccggtgctgttggtatgtacgtggtacaacttgccagactcgcaggcctacatgttgtggcggcaaccagctcgaaccagcgaaatgccgagttcctgcgtggtcttggggcagacgagacgtgggagtacacagccctccagggtgatgctcaccggaatgcttacgacattgtcatagataccgttggcggacaacctctggtcaatgcctggggctgggtcagagatggcggaaacctggtctctgtcgactcgagcagcttcaattttgtcgaggagcatacgggccggggcattgcaagagatagggtcaaggctttattctttattgtcgaaggtagtcatcaagccctgaatgctctttcgcggtttgcggagc

SEQ ID NO: 20178 - DNA, 1941 bp, Emericella nidulans
aggcgcggctgtcagagtccctgcactcaactaccatcgaatctcgtaaggatttggctttgcgaaacaatgcaacctattaacgtccttagctttcaatcacgattacccccctccaccatccagccactcatccaaccccgacatttccgacttctcacagcacccagaagcaagcgatgacgatgaaggagactatgtcggccaggcaaaccgcgctgggtactcccacaagagtgtatacgatagccggatcgagcagctgctttacgagaacccggacatgccgattctcatcaccgacgccgggaagaaccacgagggcggcgggagctttattgtgtacacaatacgcactggggtatgttctatagccggtggtcttacttttggctaaagtaagcaggatctagaggttcggcgacgctactctgaattcgcttcgttgcggcagacgctcgtgagcctccatccaactctcattgttccgcccattccggagaaacactcgatggccgattatgccgcgaaacccacaaaggcgaaagaggatgcgggcattatcgacctgcggaagcggatgctagcggttttcttgaatcggtgtcggagaatgaaggagattcgcgaggatggcgtttggtggaggttcttagacccgaatgttagctgggtatgtgcagcaaagaaaaacgcgtctgggccatgctaacagtgcctagagtgaggttttacattcccaccctgcgtcttcggtgcccaagaataatctcaaggcgcctcccttgaccctgcgaatcccacacctgctcatgcttggctgccggtcccgtctgcctctgcaaaattgaagagcacgtcaggcacgttctcctctccaaatgcggaggcttcaggtccagaaatcctaggtcgctttccgcccgagtcgcggaagctgagcgagaaggacctggacccatactttatcaactttgaggcctctactcgagaattggaacttctcctgcaaggtaatatggaaaaagtgaatcgaaggacacttgcacatttgtccggactgtctgcagacctgatggagctgggagcgcggtacaatggattctcgttgtcagaacagtccccaactgtggccactgcaattgagcgggttggacaagcggcggacacatcttacatcgagacggaagagctgtcacttgcgctgggcgcgaactttgcggagcccatgagggagagtgctcagttcgccagtgtggttcgcagcgttctacgataccgggtgcttaagagggtgcaggaggatatgacgagagacgaactgagcaagaagaagagtctactggagtctctggagaggagtgagcaggaggcgaagcgtattgaacaatacctcaaccgtacctcaccacaggctccgacaaaacaacgctccctttccacgtcgtcggccactagtagccaggggggcactgacgagtcgcggccaagtggcgaggagactgcgtctattgattctgacttccccccgacgcatgcagagcacgtttcacagcgataccccgagtcaggacagacgtcaccacccgcacaccgtaagacatcgagtggaacgtttgttgcaaacaagattttcgggcgcatcagtcacgcggtccatggattcgtggatgtcgatcccgagcggacacgacgggaccacattggcaaaactaaagaaagcttggtccaggtactagccgcgaaactcccgcactcatctaaccctaacgctaactgagtacagctggagcaagcactgggggtttcggagaaggacgtcaaggacgccagcgcaggagtcctgcaggacctgaagcggttccagaaggataaggaggcggatcttcggcggtacatggtatgttcccttctggatcccttgcttgcggctgatgtggc

SEQ ID NO: 20179 - DNA, 1943 bp, Emericella nidulans
aaataaaaattagctctatacagtaccctgcagttctaatacaagcagatattatatatactgttagccaattatctgaagccttaacaaatcctttaccagactatattcaggctgcaaacagggttattatatatctatatataatatatttcccggcaattaaatactcaggcaatgatactggcaaggaagttgttatattagcctctaatatagtatttgctgactaacctgaccagcaaagctctgcaggatacctttgcaagttatataatagcctgattaaatagaaatctagaaaacaatatacagtcacaactttaataactaaagctgaatatctagctttatccaatacagcaaaggcaatatactagtagaaaagggtattcagaaccataggttttgatccgcaacatcagatagcagtatactgtgacaaccaacagaccatcaacttacttacctctgaaaatatcaagcaataatctaagctctgttatgtcaatatacatagatcctggctttgtcaagaggttcaggaaggccgactctatgttaaatagatacctaccaaccagatgattgcggatggccttaccaagagcctgataatctaaaaataccaagaatttgttaggatgctcaacctagtagatgtaaaagaccttatccaatcccaagaaggaagctgaaggactcttgatgcactgagggggtatgtcaactagaggaggttcctccttactaatcaatattcagcaccttgtttgtttgcctgtctgtttaatactttatgctgtttatatggcagggatatctgtttaacaccttatactatttgtatggcaaggatatctcctgcataagcaagaaccttctttttgaagccttggaaaaggtataaattgcctatacagatcatagttaggagatcaagaccttcaatgaaatcgttcactacagatattgattacataaccaccccaataatccacacccacgtaacgcggacgggcgccttaccggtgcctatccgccagtaggaatatgagggatcgccagagccgtaccggtccgccagtaggaattcaagagacgagctgtactgggatcaacccatatattattgcagtaagatatggtggtatacataatcaccaatgcatcactgtaatagtattgcttggagatgccgaactaactatactggaggttatatgaagggcctcctgatgctatatatatagagatctccaagcaatcctttcaatattcttcagtactaatcaagctccctccattggataattattattgatagtcattgctttgttgtagctagagaaccccgacgttagaccacgtcttacactgagcctcttgtggatgactgtttaacagcagtacttgggcgactctaacatgccagagcggcgtctgctgaaagttatgaattctggcagcaatgaagatattgcgagcttggctatgatacagttgcatatccaagggcaggatttctggaaagttggtatttttagaggtgtagtatgccaccatgttgctgtagaatattaacagaggcagaaagattaaagggaatctgttatcagcttttatctcaggtgagcctaaccagtgtcgacactagtctgctattatataggagaagagaattgtgaaagggcctgttgtgctagctatgctcaaggtacaagtattttcttcaaaaagttgctttgtttccaggaggagccattgaagggacatctctgcccggctgttcacaagtaagtggtctgtcatgtcaagccaaaagtgggcaagtacctggatggattcctctggaaagaaacagtactcctgatggcgcctggctatatatacttctgcaagccagtctctgtaggcttccttgctgaataggttgttaacaa

SEQ ID NO: 20180 - DNA, 1944 bp, Emericella nidulans
tcgttgttcgactgtccgcacctaggatgacgccgtctttgaagttgattgccatgctatcagaaagccggagttttagtcgatatggctttgaaaaggctgatgaaaccactcacattgatgttcctaggctaggaaaagcagtgttagtttaggtcacgatgagcgagtttgaagtaccggaacttacttgacctcttcactcttcaggtgattcatgtcaatgtgaatcccatctaaaacagatatcagtaacgccgtaaaatatatttgagacgccagtgaggagcttctaaccttccccgagcatccccgtcataccatgactggcgaccatagtgtttgctaggagtgttttgtgcaagaatttgactagttccggcgtagacgagagcagagcaagcgtattttctaagagcggacggataaatgaaagttgaagtgtatggtgcgagtagaatatatgtgatgagaaacagcttcagcagagctcaggcaggcgagccttacgtgggcaagcaagctggagctgattccgccaggcggtcagggcaactgggactctcattggtcaagcctcccgccgtcttctccccgcaacatcgcccctagcctcctgagtgtacatcagtctatgcaatcaagcaggcttacagccttctatctaacatctgtacatccgccgaggctgagttgcgcactgggccggcttatattgcccagtttcttgttatatctcggcttggagcagtctaatctctgcaattactgtcattcttgcctgcgctttcggcatccgtgcgactcaacatgtcggaatctccgccgcccccaccgtcatggagtatagccagcatgacaaacagcgccgttcagttcatgcgccttccgatgctggcatcttcaggcctagctgtcgtcgctagcggtctcttatatttcaaacaaaagtttgtcccacctgcactgcaatattggtgcaactggctgaatcctcctgggaaactgacaacatgtgcagcgagttaatttatccccgaaatatccccgcagatgcacgtacgaatgtgcccaagcctcgccaatttggtatcgaggactacgaagagcttcagctacgtactccggacggcgaaagcttgcatgcttactttattcgtgctccccgcaaacgagtagaccagaatcttactgtgttaatgtttcacggcaatgcgggtaatgtgggccatcggattccaattgcgaaaataatgcaagactacctgggctgccatgttttgatgttggagtatcgtggttacggtttatccaccggcgtgccggacgaacatggactaaagattgacgctcagacagcgctcgatcacttgcgactaagaggagagacggcaaattcacggattgttgtatatggacagagccttgggggagccgtggccataaaccttgtcgcaaacaacgaagacaagggcagtatctccggtttgatcctcgagaatacctttctgagcatccgcaagttgatcccaaggcatgttcccagttccatctcagcttctaatatctgcacaatgataacaatatccagcgttttccctcccgctcgataccttgctcgtttctgccatcagacatggacgagcgaggaagttctgccgaagataacaaagactcctatactttttctgagtggactgcaagacgagattgtgccgtaagccaacatgaacccttttcagattggtgataaagcccgtaatcaatgaattgacttgcaacaggccatcgaacatgacgcaattgttcgccatctgtaactccaagcgcaaagtgtggcgaactcttcccaacggtgcacacaatgacagtgtcgcagagccagattactttgagcatattcactcctttgtcactgaagaggtcctcaagcataactgatga

SEQ ID NO: 20181 - DNA, 1944 bp, Emericella nidulans
gcgattcgtttcggcgtggagtgtcaggagtgcaagcacgccgaatgcgtctgtccagaggtagcgccctttgtgaccgccggacttttgcggcggtacccaggttgacggatcggctagtgaggagggggagaggggcccgtagagggtcgagagggccgaggtgaaggtttggaagatctgtgactgcgactgtgactgcatgattgtgggcgtggtcgagatggagtgttgctgctgggagagtgctttacgactcggacgaatgctggatctgtggagctggagacccagaaacttacaggtggtgactaggcgaatctgatgcatcgcttactgttggatacccctgctgtcacagtatgagccagtgatgcttggccaaccagctgagtgagctggttgatgtggtgatgaagtcatgatgacagcccgctgtcattcttcccacctccaaccctaactttatacaacaatgcacaccaactatccgcctttacctggagaataaacgcatgagcgagtgcaccacaaagaatgaaatgaacaacctgcgcaatctttacaatactctcaagcatccatttccaaccgcactctcaacgaagccaaaatcgaaccccaatgctagcaccatgtccgacctaaccgccctcttccgcaccaccattcgccccctccccgcgatccacgatccatccttcgccctccccttcgactcatacgcccagaaccgtcttgtccttttaggtgacggctcccacgggacttccgagttctacgccgcccgcgcagagatcaccaagcggctgatcacgcaccataacttcaccatgctcgcgctggaagcagactggcccgacacggaggcgctggatcgctacgtccgccaacgaccaggtcacagaggtaagatcggggagacaaagggcgacgccgattatgaagacgagggcgaggcattcgagcgatttccaacgtggatgtggcggaacaaggagatgcaagatctcgtcgagtggatacgggatcataacgcctctttacctgctgagaagaaagtgggaatttacgggatggatctttactcgctcgggagctccatgaaagcaattatctcctatctggataaagttgatccggctatggcgaaggaagcccgaaggcgctacggctgtctgaatccgtacacggaggagccgcaggaatacggactcgacgccctacgcggcttcaaagactgcgagaagggtgtcgtggcgatgcttcgcgacttgcttgaaagacgcctcaagtacgcagcacatccgggcgacggggaggagttcacagcagcgagcaaaacgcgtacgttgttcgcgatgcggagaggtactacaaggccatgtactacagcagtgcgggaagctggacgctgcgcgatagccatatggttgacacgctaaaacggctgattaagcataagcctgatgggaaggtcgtggtgtgggcgcataactctcactgtggcgatgcgaggcacacggctatggggactcggcggagggaggtgaatatcggccagctatgccgagaggtctttggcgagcagaacgtggcgctaatcggctgtggaacgcatacggggactgtcgctgcggcgagcgagtggggtgaagacatgcagatcatggatgtgaagccgagtagtcgtgactcgtgggaacggattgcgcatgatacgggggttgaatcctttctcctggatctgcgagaggacagaatgtctagggaggtcagggaggcactggcgaaggaacatcgacggttgcagcggtttatcggcgtgatctatcggccggacacagaacggatctctcattattctgcggcagatctggtcaatcaattcgatgggtatgtctggtttgatacgacgagcgctgtgaggccgctggaggttgt

SEQ ID NO: 20182 - DNA, 1944 bp, Emericella nidulans
gcgtctgtgtgtgcgatcaaggatggaaaatccatcgatacttcgtatgtgtccagaccaactattcattcgtttattcattcatgcatgcaccccttgcgtcctatatcccgggaaagaagccagccattcaagcatagcgatcatgatactgacattcctgcttagaatgggattaacacccctagccgggctaccaggcgccacacgcagcggcgatatcgatccatcgtgagtgtctcagttggaccctggccttggggtcttaagaaagccggatctgatctgatctgatctgatcgactgcgatccgtgcacctccttgctggatgcgagctaattcccggttttccaggcttgttttccactataccaacgaggcggggaagctcagccctgcaagtaccaaggagatgcatatcagcacggtaagcactctacctgcacgtagcagtccagacaacgctaacgactgtccacaggcggaagaaatcctgaacaagaaatccggttggaaggtcctgacaggcacaacagacttctctcagatcgcagtcgaagacccgccaagtgagcaacacaaactcgccttcgacatccttgtcgaccgaatcgtcggctatattggcaactactacgtcaagctggacgggcaggtcgaagggattgtattcgccggtggaattggcgagaagagcgcgctgctgaggaaggctgttatagagcagactcgatgtcttggctttgcggttgatccggagaagaatcagcatgggcctggagacgacgagaccgtagtggatatcaccgccagcgggagatcggatgtaaagagggtgtttatctgccaaacggatgagcaggtgagttttctcctttgcggaatgtcgtgacgttgctaatgttggctttgcagttcgagatggcgtacaactgcaccaagacgcaaggtctcgataagcagtaggaaaatagccgatctactgtcaatacaccaaataaccagttcgacttttgaccgtcgtagtatcggccttaaccttggaactcaggacatgtccgcagcctcggtagcaaaacaaatatatctccaacacccaaacacgcaatatacagaaaacaccggacctctcatagcacacatatacccaaaacaaaacaaaatgaaggtctagaacttcattaacttacctgtctattccatcccattccatcaacccaattcccagacagaaccagccagctcaacagccaacagcctattattctaactaggctattcagcgttccagatcagagtcaaccagtcaagcgccggcaagccacagaacaaagagaacttcaaactgagattaaagtgccggaacgcctctgatcttcccgcggcatcctggtacctttgctaagttgaccagtcgttgttcctgacttttttcctatgtccttcattcgacagttatgcgagtaagcaaacatgggcgctctacgccgtagcctatagtctactgatccaaaatacttcgtacggtagtatcgcattaccatcacctcatcgacgtctgccatccagtcttactgtatcgactcaacgccacgagcagaaacaaagctggcggcaacgacccagatacatccactggcgtataacatagtgtgaagatcgcccgtctctttgaccttcagccgggataaacgtggactttactggtctgaatgtcgacttagttggaatgtctgggatgcccgctcgacagactctgacggattaccgaggattactttgtgctccgtacagcacattgagatcacctgacaaggatggatcacagataatcgcggtgatccctctgatccatcaccgaccagtgaccactggtccatccgacggtggggcggagttggagaggcatacctcttgcttcttcagtcaggtatctgcgtgtg

SEQ ID NO: 20183 - DNA, 1947 bp, Emericella nidulans
tgacagatcaggggccctaatagactagaagatctagataatttatttctattgaagaagttattatttctactcctattttctagaaacctgctaggataagaattattctattattttattagttgttattaaaactaagtaaattagtaattattttatcttagttttatcatattaagtagagaagattagctatagtatgttaattctaataaaaataatcattagtacctcctgcagccctaataatactaatataatattaaatatatagattctataatttctgaatctaaagttgaaactatacttttatattctagtaggcctagattagtaatatattactctactaagatattttttaaggactaatttcctctaatatatttagatagctattattattaggtttaaacttctaattattattattattagatctagaaaataattatattattttagtaactaagattaatattagataatcttctttcagttagtctagaaagtgtttaaaagcgtccttaactaataattattaggctaataatgattaagctgataataatttaactaataataataatctcaatattaacaatgatttaatagataatgatattttataaatagatatttacctacttgttaggttgtttaggaaggaatatagtgtaacaggcataggcagtattattttcaactggatgtcctgtacaaacaagtatcataagcttaaagaaagaaacaaaaaatagaagcgcagatatcttcctcctccctttatcaacctttctgacttcccagacctgtatgccgacggatcccttttcaaaagttatgaggacggatctcctttcctaagcttcgaggccgcaatttccgaagctgtacactgatgttgcagagaccttatttagaaccaggttgaatccatggccgacaaccaagatccaggccatagcctgtgacaaaggcaaaggcaaggaggcattggaggctcttatttctagatggccatggctcacatgttactatgaagtttcttaactactgtgaagcaaataagatcctcctggctacataccctccttattcaacatatacattgcaacctcttgatgttgggatcttttcgcctctgtctaaagcctatagtgacgaacaagaagcatttctgtatgcttctcaaggtctcagtgctattacgaaacaagacctcttcaggcagttctgaaaggcctggaataaggctgtatctccagctcatatcaagaactcatggagagcaactggattagtgccctgggatcctgaggtcatcctgtcttattttcaggaggatacagcatagcagccttcctctagtaatcttcacggtctatactgcaagcagaggactggagaaagattgagaggcttcttaaaaaggtggtaatggatttgaatgacaaaaataccaagaagttaagcttgacaatgcatcacctctctacagagaatatcctgcttaaggcacgctgtgaaggcctcgaggaggcactagttaatgaaaggaagagacggaagcgtggaaagcctcttatatttcagttgcaggcaccagaggcaggcaatgcagtcttttattctcctaggaggatccagcaagcacgcgacctccagaaagagaaagatgaggcgatacagcaagctaaagctgctaaaaaagaggccaaactataccggcagcaggagaaggaagagaagcagcggaatactgagaaaagaagaagaatcaaggctctagaacggcaaattcgattacaggaagcagagaagaagaagcttgaaaaagagcaacagaaagaggaggctcgtatagccaaggaggctgtgatacagcttcaaaataatatcagaactgctagacagagcaagtctaagcttccggcaact

SEQ ID NO: 20184 - DNA, 1947 bp, Emericella nidulans
  unsure (1)..(1947): unsure at all n locations
ttatctcttgatcgtctgaagccaacctcattgatatttgggccctcgcatacttgctaaactagatccctctggctatgttatagcgatagactcgagcttgtcactttcctgctcttttcattgcgcgtcttgttcgagtagttactctcttcatgtcgattttctggacagtcaagctaggtatctagtgctgcagctgtaatcatatacatcaatcagaggttcaagtcgccagattgccatcgggaacaggcacatatcatgatgggatcgaagtaggtggaaatagatctgtcaaaatggaccctgtgagcccaccgcattccagaccgccctatggtactatgctcgttaccgaaaggggaaggagcgagcccgctccaacaacaggccttcgaattcaccccactattgatacctcgggatgatatctggcacttagccctaccacgcctggcctcttttgagtaagttgattgcctcagatgaaagagaaatttagccgtctccaatatacttcgtcctttgaaatggagtatagtgactaacgcacactacagatggacttgtacctatctagtcagtaaataaggtagtaaaacttcgcagatatacatagaagcaagcaaacgcgagatgtcacccagacttaatctgcctgatcccttcgccacaattccacgggtaagcctgctctacccgttctcttcgccaatccaccccctgcaaagcctgtctggtttagcttctgccccggccccagcctcagcctcagcctcagcatcaacaacacactcagcaccaggcagcactcggtctcaaggggcacgcacagagggcatccacgtctccctctacgccaagcgcgaggaccattcttccccgctcgcatgtgcggggaacaagtaccgaaaattggagtacatcgtgccagatatcctatcttccagtccaagatatggcgctggcattgcggctgatgtacccacaccaatacacgggaaaggaaaagttacaactctcgtcacagagggcgcaatccagagtaaccacacggtccaggtggcctccgtggcttcgaggataggcctagaatctgtggtcctcctgcacaagggcacggggggcggcttagccagtgcgaaggacaaagcagcttttttgagaacgggaaatgtccagattgtgaagttgcttggtgcagaagtgaggatgtttgagaagcctgtggccccaaagacacaagatgatattgtcgaggaggttctgaataatctcagagcagagggaaaggttccctattggatcccgtctggtgcgagcctgcatccgctgngggggttgggatatgcaaggtgtgcgtttgaaattgcggcgcaggagaaggacattctgggatcaccgaatgatcgtggtagtggtggttacggtatcaaacagccgcgtttcgattacatcttcgtcgcatgtgggagtgggagtacagtcggcggactgattgcgggcttcaaactactcgagaagatggagaactcacaaccgcacgagcaaacacgaggagaaagaaagcgccgtgttatagggattcttacctccccgacgatgcgaaagagatatcatgaagaacgcatcttgcgctttgcgcgaggcgcggggaaattgatcggattgaatccccagactgatattacaatggacgatgtagtcctggatgaccggttcgcgggagagagatatggtgtgctagatgcaaagaccaatgacatgctctctctgatggcagaaaaggaagaagtcatacttgatcctgtgtatacggcgaaagtggcgaggggtatgatgcattgggttgccgaaggggagatagagaaagatttactagctagtcccgctacttataggggtcaagatggggaacaggttaatgtcttgtttatccacaca

SEQ ID NO: 20185 - DNA, 1949 bp, Emericella nidulans
ccttcctcatcaatcaacataacagcactcgaaaacgtgccatgtcctcccagccttcagcaactcgcacgcgcgccctggtagactgggcaagcgccttgcagttcaccgacctaccacccgccgtcattgcccgcacaaaagactttttcgtggatactatagcctgcgccgtcgcaggtcgcgagcacatcgccgtaaaatccatgctcgagtactccaagataatgggcccagccgatggaaagtgcgagcttatcggctttccggatgtcaagacaaccccggtctttgcggcgctggtgaacggtggcgcggcgcacgttgttgagcaggatgatttacataatagtagtatgatgcacccggtgggttaccttctggctgagtagatacttgaatgtatattgatcgcggagccaggcgacgatcatctatcccaccgcactagccgtagcgcaggatgtcggcgccactggtagggacttcatcactgcctgtgtggtgggatacgaattcgcctgtcgggcaggtgagtacctcggcaaagcccactacgaggtacgtatacgccttatcttcctttcagttccttcgccattaacaactgagtgctagaaattccacacaacagcgacaacaggcgtgctgggcgccgctgcaacaaccgcctacctcctccgtctggacagcgatcaatttctctcctccatcggcaccgctggaacccaagcagccgggctctggcagttcctccttgatgcaacgcattcaaaacaagtacataccgcgcaaccatgtgcggccggtgtattctccgcctacacttccgcgtccggacttctagggacatccgatatcctcgagggcgaaagaggaatgggcgctacactggggaatctaaccaccacccctgaagcaatcgacagggatctcggacggaaatggtctgtgttagagagcagcttcaaatggcacgcttcttgtcgccacacacatccgagcgccgatgcactgattgcgctcatgcacgacgagaacgtcaaatataccgatatcgaatccgtcacagcatacacgtataaagcggcgctggacgtgcttggacttagcggggagggaaagacggtgcaccagagtaaattcagtatgggtttcgtgttggcagtcgcggcgaagaaaggcacggcgggattgactgattttacggaggaggcgctgaaagatcctgaacttcgggagctgcagggccgggtgaaaatggtacttgacgaggagatcgacgctgcgtttccggagaaatggctggggcgtgttgtggtgcagacgaaggacgggaggacgttgagtaggacagtggacgttgtgaagggggatccgggtggacgttgacaaggtacgtagcctcttatactaccttttgaggcgagggtcctaacatttggcagggaggagatcgagtcaaaggctttggcgctggcggagtatggacgtgtgaaggatctgaatgcgttcaaggatgcgattcagagaatatgaagactcgaggagcaggataagataaaccgattctccttttcgtgagattgctcagaacgaatccatctccagctatgtatcggccactgtacacaacggcctcgcttttcccaggacctggctcagaccgttttagtaatccgtattctgccaaaaaacgtgctcagagggaggctcccgctgctaactttatagttgaaagtgatttgagtgttttggccaattttctcaatttgcgcgattcgataatgcgtcattcaagggggggggtctgtcaggacctttctagggcaacatcgagcacgtgcggtgggcatcatcttatatatcaaagaaggagggatagcatgcggtgttaagctcatcccaaactccactgattctcgactcatgatttaccatcaagggcc

SEQ ID NO: 20186 - DNA, 1956 bp, Emericella nidulans
aatactgtgagcagccgggaactagagacaataaacattttgcggctttgggtgcttggttgcggtggtctttgcagttgggctccggctcgagctccagcttggatggtggcctatcttagggagtgcagaggccatactctgtagcttgcatgcagaatggaactgaactgatgtgctgctgctgctgctgctgctgtagaccgaatgcagagataatgtccatgtcagaggcggtttaagcaggttgggccgtggattttggtggcactccagatgcagaatcttgggggaaacgcggcccccaccagcggcatgaacttctgtgtcatttgacaaggccgagtggctagccaaggtagttaatagccttcttcgtcgtacaggctgggtcctgctagcagctagaagccggtttataagccttgttgccgaggatcaatgctttgcgtattcttaagaccctcccagtgtaagcaacagcaggccaaccgaggtccgtaagaccttagagtaagagacgatatacataatggagataacctggtccgcttatgtacgatgagattgcaattgcgattgcgacagtgactgcggggtacagtatactttggatctggccttgtcgtctctggtacccacccagcctatatattctcggttatctgcactgccgagccgagatcactgcttccctctggcgaccacctgcactgtcttttattactttgttcatcagtctactcaatatttctaccatggatttctctgagtacaccggccccagcgacgagtgggttgcccttgagcgcgatctgcccgctgacgtccctgatctcgaccccaaccagctcaaggacgccgtcaacaaaacccgcgaggagggcgcagcccgtgagctgatcgagcagggtgagctcttgtacactcggacggtagacgtaattaacacacgtaggcctctcttccaaggtaacactgcgcgaccacaccatccccacccgcgacggctacagcctggaggcacgcagctacaggcccgcaaatgtaagcccgtctgagcctctgcctatctacattcacctgcatggaggcggttttttgttcggcacgctctcatccgaggatgcaacctgcgcgcggattgtcgcctcactccacgagcaaaacacgcccgtcgtcgtcgtgaacgtcaactaccgccacaccccagaacacatttacccgactgcctggaacgacactgaagacgcctttcactggattcacgaccacctttcagaaatcggtggcgatggagagcgcctcgtcatgggcggtatctccgccggcgcatggctgactgcatcgacgacgatcgctcaggcaacaggcagaaacaaagaccttgcgcaacgccctaagatcaaaggacaggttcttatgattcctccgctggcacattataactgctatgacccgcagctggcgcagatccgggaccccagcgtgtcgagctacgtggaaaaccgcgatgcgccggttctgccattcaagagaatggagctctttacgtcattgctcaaggttaccggcgggaaggaggttgagaaggatctgaggctcaacccagggaatgcgagcaaggaagatgtcaagggactgccgccatcgacgttcggggtcgctgggatggatgtcctcagggatgaggggctgttatatgcgaagctgctcgctgagaatgggtatgtctctttccctgtctaataacctgtgctgataatttgttatgcagggttcctacacaaacgaatgtcttcaagggtgtcccgcatggctttagacggtatggagatcggctgtcggtgtgcaagaagtgggacgaggtcatggcaggggggatcaagtgggcactggatgatcctgctccaggtccttttgagatccatgctttctgagctgctgtactcatag

SEQ ID NO: 20187 - DNA, 1959 bp, Emericella nidulans
ggcgcgcctgttttgcttgtcagcgggcgcatctaacgtgcggtacgctcctgccctgctcaggtacccgtgtcctgggcgcgccaactaacagagtgtgtaggtgatgagagaccatgtcaacgctgcatcaagcgcgggctccaagatgcctgccatgatggggttcgcaagaaggccaagtacctgcatgacgcgccagacggcgctctgatgcctgggatcggcggcaataatttctacaacaacaattcaatgtcgaacggtgtcccatcgggtggcataaatatgaatggcgcgaataccgtcaattcagcggcgagtacgcagaattcgagcgcaaacttctatcctactccgcagtcgaactacagcttataccaggagaatccgatcaaccaccaaaactctttcccatcgcaatcgccggtgtccccgacctttagcttgaagaccaacccaacccctcgcaataccgcacctaacaacaacaataataatgccttaacgtcttcgatgccccaacccgcgaccactggtgtgtcgaatgcacccaaccagagccagaatccgttcgccggcccgttcttcgaccccagtgatccggctcttttcaactttgatctgtcgagtatgaattttgaaaaccgatatggtgcgctggagttcggtatgcttggacacatggctactggggctggcgactctccagactctggcacccacagaggatcgatgggccgcagcggttcgacgcagtttgcgtctacgcctattggaggaactacgacgttcggcgagagcccgcagaatcagcagccattcatgttcggggatccgctattgaacgagtggccgagtggacagacctcgggccaaccgcacgtgaatgtcggcgtatatccgcagtctagccagggcaacgtgataccgggacatctgtctaagcctgatgcgcctcacgctttcgcaattgaaagtggaccgaacaacttcactagcccgggcgcggcgacgagcccgcagatcaacagcggcggatatgaagatgcgaacgcgtttaacaatgttgtgacgaagtctaatggactatctgtgaacggacagcaacgtcctccgaccatttctacaccgagtttgaagcaccaaagcctgcagatgaacaaacgacgtcaccgcaatccatcggcagtctacgaaagcgtcaaggagccgtacgcgtataccagtcgcttccatagcctaacggcgtttattcaacggcgcttctcgccgcagaagacactgcagattgccaaagccctggcatctattcgaccttcatttattgcaacaaccaaaacactaaaccgggatgatcttatctttatggagaagtgctttcagcggacactctgggagtatgaggatttcatcaacgcttgcggcacaccgaccattgtttgccggcgcactggcgaggttgcagctgttgggaaagaatttagcatcttgacgggatggaagaaagaggtattactaggaaaggagccgaattataatgtcaacacaggtggttcatcggccgcaaattcccgaaacatcacgccacgtagctccgttgaaagcactggccgtcctcatccggtgtttctggcggaactgttggacgatgacagcgtggtagaattttacgaagactttgcgcgattagcattcggggattcgcgcggcagcgtgacaacgcgctgcaaattgctcaaatacaaaacaaaagaggacatggaagcggcacagtccgatgacaacgggcagcggtggaacaaccacctgcgtaaggggggaattgcgaacgaggccgggatgaaccagttaggattcaaagatggcaaagtcgagtgcgcctactgctggacagtcaagcgcgacgtgttcgacatccctatgttaatagtgatgaacgtgcgtcttcctcttccc

SEQ ID NO: 20188 - DNA, 1960 bp, Emericella nidulans
tgcgcaaattgcttcaggttcggacgcagattgacgtgggattatcacatgactggcccagacagattgaatactgtggtgattggcagcagcttttcagagccaaaccattattccgccgggattcgcaaaacggaacactcggtagtacagcagcagaatatgtactcaaccgtctgcgtccagcatactggttctctgctcatttacacgtgaagtttgcggcttccgtccagcatggcccgcaggaagttgttcccaaccgtcagtatgggctggatggcgcgtctctcacctctatgttgagtgaaacagaagaggcaagccggcaaactggatacagccaggccgaggcagagcccaacgcgcacgccgtttctgaaacaggaacaactgaagcacattacccatcaaccactgaagcttttacgcaggccatgaacgagaatagacccgtacctactgcacatgactctgagacggctgagtctgtgccggctcaaacccgcgagtccttatcggcatggaaaaatttccaccaagtagctgcgaataacgaggcggcagagaactccctctttcccgcaggacaagagaagcacgctggcacctctgctcttaacactcaatctcacaacgtcacttggaagaaaatctacactgacgaggacggacttgagcggaaattagggggcattgaaaagagcgcaccgcgcgaggccaagaagcagaaggtcgagcacgagccgccacttgtgaagaactctgacgaaataaacctcgacttagaaagtgattctgacttggatgcgggggctgtatcagcgagatcctctgcagagacggtcactgcgacaaaatcggtcagtggcttccaaggaaccgctctaccgcaggagccatctacaagtcgctactctgaggtgtcagacgacgtccgaagtcagttgccggctagtttctttacctcacatgagtcccctccatctacatcagataccaccctccccttccctgcagagataaccaacaaaaccacgaacttccttgctctagataaatgcctcccgaaccgggagttcctccaacttctggagttagactcactgtacgggaaaactgaccaggctcagtctcaacgcccttttcgcctccaatacgacaaagaatggttggcaatcacgcgcgttttcgctggagagcttcgccttagtggtggtccagacgatagaacaccggccaacagaggtgaagcagtctatagaccactgattgaggaagaagaaaaatgggttgaggagcacatcgttaagcctggcaagctcgatgttcctgcaaactttacgccaactgcaccggtctatgaccccgaggttcctgttaacacagatcagcagccccctgaatacaataatcctcaaacagctgcgttctgtgatcttgttgggattgagaacaagttcgttctgacagatgaggagcgccagaaacgtatgaacgctggtcctcgcccttcgagtcggtctggtgggaattttcgtcctcgtggaggattcagggctcgtggagggcgaggggcccgccgaggcggccatggacgtcgctactgagcgagtccatctattatttggtgtaatagcagtaccctggctttctcaatctggcttcctatctctgcatgtaatctaggatgtgttacgaatctattacgaaatatcatgcgtgctgccgactaccaattcaaggcgtaagtgaatatgcaaaaagcttgctatagcaggtgtgttaagagacaaaattcacatcttcgcactattcaatctcttcaatcttcggcctctccgcatgaccaccccttccagccatagggttaatcctcaacccagcaattttatcacctaactctaatctcggctggtcttcttcactcccattcccagcgtactgcccaacgccccac

SEQ ID NO: 20189 - DNA, 1971 bp, Emericella nidulans
gcattggtacgtattgagcgcactggctcgcaccgttcttgtaatgtttctgactgccgatttaggtggtggaagcttcggacgggtgtataaagggtatgacacttgacctccacgcttccaaagtacattcttgatacgaacagcatactacagcgtcgataaacgcaatgggaaatcagtggcgatcaagataattgacgttgaaaacgccgaggatgaagtcgaagatatcatccaggagattgccatcctgtcggaactcaactcgccatacgtgaccaggtaccatggatcatatttgaaagggtcgagtctatggattgtaatggaattctgttccggaggcagttgctctgatctaatgcgcccggggcctattccagaggaatacattgttatcatcattcgagaactgcttaaaggattggactatctgcacagcgacaaaaagctgcatcgcgacgtcaaaggtgcgcaatcacccgttactattgggaatatggttcaatactcacgattaatagctgcaaacatcctcctaacgtcgggcggccaagtaaaactggcagactttggcgtctccagtcagctatctgctacaatgaccaagaaaaacaccttcgtaggaactccgttttggatggccccagaagtgatcaagcagtcaggatatgattacaaggccgatatctggtcactcggtataaccgcgattgagcttgccaatggggagccaccgtactcggatatacatcccatgaaagtcctttttctaatacccaaaaatccaccccctacactgcaaggtgcatacagcaaagcattcaagaactttgtcgagctctgtctacgaagagacccgcgagagcgaccaacggccaaggagctccttgagcatccctttatcaagcgagcaaagaagaccaattacctaacggagctaattgagcgctatgagcgttggcaggcagttagcggaaatcagaaggctgacgaagatgacgagctggatcaggagcctgcagctgcgccgaagaccaccgaggaagaggatgacctttgggattttggcactgttcgccctgtgggccgagggcacgctttaaatccgatgagagtgacagatctcaacgccaggggctatggcacgaaagatcgggattccaaactcgaaccgcgaatcgaagcaacgagatcgaataatcctatgacaccatcatttgctcaacctaagagcacacctacctctccgaaacaatcctctccatcgaagattccactacctccctccccggtgaaagcgacgcatatggacaactgtcccagaacgccttcgtatctgaccccacagaaaccaaaggaaagtcctgggagtgaatatgacagagctttacagcaatctttagcgcaagacctgagtttcctgcagcttgaccgctcgccaggaagctctatggcaactatgatagacagggaaagcccactctcaacacctttaccccaccagccatggtcatccacggcagcggaagcaccgacactgcaggcatcaccttctcgacaccccgcggaacaacaagtcaggccagatatggagccgtcccgcgctcagcctccattattttctcaaccgcaaactcagccgcagcccccttcaccaatacccccaccaacaccgaagcatgcctctcctccgccgcaacctaaacaacaaaagtatgtacatgcaccgttgcagaatcttccatcaagtcatgtcaacccaaacagcccttcatacaataagcccgccaactcgaacgcacaagacatgaaacagtcacgaacgcctcacgaaatcactgccctgaacagcgtcattcttcctgccttgaaggaagctgtccaacgtcgagctcgccgtgtagatattgctacccggtcgactatagcccatgatggagagagtctgaaagcggcattggagct

SEQ ID NO: 20190 - DNA, 1975 bp, Emericella nidulans
tgttcctgtttgttttacattttatcaacctcctctgcatcactcgagtcgactgcagaatcaagcgtggatcaacgctgaaggagaaccgtctatctcgataccgccaggcggccttttacatgtcgtgccttcgagggactcagaccaagcaccagatcgccagaatacctcctgcgccagcatgcttgagaaagagcaccaggtggggttttatcgggtatcaaatgtgtgtgctattgtggcaattactggttataagcctcgtttctgatataatgagctgcataccccagtctattcgtgaccaatacttcggtcaaggcgcggaacttcacgtcttcacccttgatcgtgccaactggttcgccagacttatagtgacccttgtcccgacatttctctatgcctatctctgcatcgacatcgcgtaccacttcctatcaatcttttgtgtgctgcttgggttgaccagcgcggaggcctggccaccgttattcgggagcattcatgatgcgtatactgtgcgcggtttttgggggtaagggttttggatgatttccggttccttggtgctaatgcttaaactcatcgaaacagcaagacatggcaccaaaacgtccgttggccactaacaagctgcagcaccttcattacgctgcgcgttttctgccttcgccgtccatctatcctcgagcgatatgtgcacctaggtctcacattcaccctgtccggcttgatacacgccatcggcgcatttatcgagtcagataaccaggaagcattgagtacgctcttcttctttgcgtccaacgcagcgataatcataattgaggacgcactccagcatctgtgcacgaaactaggcccagactcgcggcgcaaatatacgaccccatatacgacccagccacctagcgtctttaaattgatattgcaatatggctgggttctgagctggctcactcttgtaggtccgctttgggattatcgcatgctccgtgtgcactggacgaagttatggccagcggtttctgcgcctgttagtcaacacgctgtagtccccatcgccgctaaggggtgttttgtcctaatttcggggcttttcatgaaggttatttttaggattagcttgtgaaatgcgccatataacagaactgcaagcttcactcagagcaccgttatttagtgctgttatgagtatataggttgtaatgggtactagtctggcgacagaattttgatgttataaacttgattcgacactgaaagataatatattccccactagggggaagctccatgtatcaacataaatcttcaaattattaggctgtacatcctgagtcaataaatcacaaaaacgttaaaaaatcagcactgtattgctctgggcccttccagctaggcgttaatggagtggctacatgagactacgatccaaccatgaggtgcttgccctggataaggtccctagtccacaagcttgagacactctctcagcgctcccatttccatcagtacgctagttgccatctctttacggtttgtttatctgtagccttattaatgtccttatgtactgtaacaccgtctcctggagaagagaaactagccactcattccctgatccgagcctacagtcgtgcccctacccatcgacttcaaccaaacgcccaaatcaaactttctttcactcaaatcattcatatttccaactactgaaacacatacccctgtcctcagtaggtctgcctttagttcatcagcggggctgtcaggataaaccatccgacaagctcctggccggtaatttcccgtttcgtactccgcgagacgctcggcgtgcttcaacacgatagacaaatcccttaacgacacagtccgagtccgctccatgctgactctcgtccacaggtataacggcaggatactgttcccatagctttaccttgtagccgaagatccgggatgg

SEQ ID NO: 20191 - DNA, 1977 bp, Emericella nidulans
tccgccatcaaacattccaactgtccaaaataacccatcgaaggtccagttaagccgtatcgcgcatgtttattttgagcacagtgatctggacgctttgacagatttgccaaagacttcggatttgttgatttagcgcgcaaggggacgacaatctactaccgtggctatggcaaagacccctacatatacgtcacctcttagagcctcaattcaaaatcccggttcaacggtgcagccttcattgcaaaggaccaggaaaatttcgacaaggccgcaaaattacccggggctatccgcaaagccctagatgatgctcccggagggggagagatgatcacgtttgcgcgtcccaacggaaccttcctgtacgtggtacacggccaagccatgcgggagatagacagtaagagagaaccaccaacggcaacacatgaaacggaaggtccgttcaactaaccctttgacaagcctcgtaaagggccagttctaacgctaccgcgaaggccctgtcctgatacacaaactcggacactacggctacgtgtgcaaaggattttcaaaccgagttggagttctcctctgggaacttcaactttgtcctttctgatatcttatacctgccccagtttcctgacaaggaagtcatgaccttcataaatttggagcggcgaagagtataccgatcaccatacgttttcttgcagcaggctccggcgacggtgcgcaagacctatgtccatcatacaccgtttgaggtggccgactttgatacgcagctaatggggcaccatttatcttgcgaagaaggaatggaagagcgtgttgggagcttagtggcatatcttaggagccagatcttcgattactagaatgatagttccaagttcaagatcgagcattatgccgatggagatgtggtgaatcgggataatccgacgacgagagaacttgttcgcccattgtctgtttggggtcgtgagttacctagtgatcttggggacaataaggtgaaatgacggctctgccttctgctatcccctgttactgtactgctttaaggtacgtaggtgagctcattcaacgtgacgggtaattcgttattactcttctttagtaatctgctgaaatatatgtgctatatataacagttttatgctatatcaaatctcatgaagccctattttgtgttcatttgtggcgtctgcagaccgaaacagattgactaccagaaactcagacctacatttcccgggtatttgcttgtatgatttcacaaagccctcggttgtaggctgcaccttatgcaagagtgatgtctgatcatttcttcctcggtaatcgcattttgcttcatgtgtatgaggcaacggatcgccatgggtaaccggcgccggaggaactaggaatgtagcggcaatttgtaggatcagtcgttgttcctcagcggatctgtacaaggacacatgttaccaccaacgtcaagcactttattagttccacttgtggggcgaaaccaactttagtgactagatgtaattgctggaaactagttcgagccttcaacctagtactactaagagctactaatctttgcgcgataagcgctttactagttttggaattactggagcggcccaaggccgcatgccggggctcagcgggcttctgccatttggattcgaggcttacccatgccaatgttttaagtattaaagagacttttcggcccatttcgcttctgtcggctcatctttgctctgcagtgacccggtctagcttagatctcttcggtatcagcttttgaatatacgcccaaagccaagcttggtccccgttcaaacaccatattcataatttctgttctttctctccatagcacaacagctcggtctactcatgttcgctctaatcaccggctgcagcagcggaattgggaaggacctcgcaattgcttttgcagccaaaggcgtcacc

SEQ ID NO: 20192 - DNA, 1981 bp, Emericella nidulans
ctgggtcgccaccatggacagagccttcatgatgctgattggctgatctggacggtttccagcgtcccatatgcgggccagccggctcaactcagaaccccgacccgcaccggagttgtgcttcccttgctgcatggtaggagtagtcgtcggcgaaagtagttgtaacagtataaacccctaacagtcgccttgcttcgataatcgtcctcgcttgctcaaacggtgcagggcttctccctttttcctactgatcagcctcctattgaggaagccaggacggacggtgacgctcgcagtcgtgcatcccatcccctacagaattcattgaatcataccttacgccaccgggaaccgactcttatcaggtcccgaaccacgttcgtttctgatcttattccgttcgatttcgttcgtttctcaccctcccaataatggctgaggcagcagaaaagatgcccgcggtcgactcagccaaggaggaacaaggttcttcggtggaagtgcctgtgaatgcgtccggccaccgtcaagagctccaacgcaattacggtctgctgagtatctgtgctcttgccatcacgactggaaacacatggattgcccagggaggaagtatagcgactgctctttctaatggaggcccgtctggagttatttacgaatttatcgccgtctcggtctgctactggatggtggctgcatcaattgctgaactggcgtcaggaatgccgtctgctggtggtggtatgattcctcgctccgctgcgttctttcgctttggctgatttgcttatctagtctatcactgggcttctattactgctgggaagtatggtcgcgtctgcgggttcttcgcgggctggtggaactgcttggcttgggtgcttggtggcgcttctgtatccgccattcttggccagcagacggtctcgatgtatgcgctgatgcaccccggattcgagatgaaggcatggcacgtctttgtcagcttcatcatctgtacatggctctgctgctcgatcgtcctatttttgaaccggttcctcccgcagttgaataacctgggcggattctttattctctctggtgtgctcattgtcatcattgtcgccgcctgcatgccccatgttaatggcgtgccgtatgccacgaatgaggatgtctggcggacctggacgaactcgaccggatactctagcaatggcttcgttttcgtcgccggtatgctgaacggtgcttacgctgtcggtacacccgactgctcgacccatctcgccgaagagatccctaaacccagcagaaacatccccaaggctgtccttgctcagatgagtatcggcttcatctctgccttgctttacatgatcacgcttttttacgccgtcaacgatctcgagtctgttctggccgcgcctttccctctcgctgagctctaccgccaggcgaccggatccaagggcggcggtcttggtctcctgatcatcaccttcctccctaccgtcatcaactgcgccggttgctacatcactgcgggccgtaccctctggtctcttgcccgcgaccgagcgactcccttccccaactggactggccgtatcaactcgactatgcacaaccccttcaatgccaccctcgtttgcggcggcgttatcacaatcctggcgtgtatttatgttggttccaccacagccttcaatgctttcgttggctgcttcgtccagctctcttctctttcatacttcgccgccatcttcccccatgttctcactcgccgctcgtcctttgtccgtggctacttctggatgggcaatattggatacgtcatcaatgtccttagctgcatttacattctcgccttcgtggttatcttctgtttccccttcgctctgcccaccgatgcggcttccatgaactacgctagcttgatgaccggcggtctgactatcttcgtggccatcaactggttcttcagaatggg

SEQ ID NO: 20193 - DNA, 1991 bp, Emericella nidulans
cacattcagcctattattttctgggcgtcattgactgggagtaccgagaggtacgctcaggttctgctggaggatttgcgggcagccgcgcagagccaggccgaccccgagaaccgcgaacgcgggcttctaccccctcagatccatgacttggctgaagttgactacgatgactacttcacgacagcacctaaacctccaccaacttcgcctggcacccgctatgtgtactgcttcctgattcccagctataacatcgacactatcctggatactttcttgggccacctcgatgagacacaccatgacttccgtattgatacaggatctctgtcgactctcgctggatacgctgttttcggattcggagataaggaaggatggccgaccgaagaggaaggattttgctcgcaggccaaagaacttgaccgatggatggctaagctcacaaacaagaaaagagcatatcctctcggctttggtgatgtgaagagcaacgccgacgcttctctcaaagaatggtctgccggactccaagatattctcagtgatatcgtcaagaatggcggcctgggtgaaggagtcccggaagtggcgatcgcttgagagcgacgaagaactctctgacgacgaagactctggctcaggcaaatcaaaggctcgtagaaagcctcagtccgtggtcgacttggaggacatcaagatgggttccaacggtcaagctgtcggttcacccatcccggttgacttcacaacctcaggtgcatcccgggatgttcagcctactgaaaaggaaatggtgcctaaaacttctcctacttacgcttctctcacaaagcaaggatacacgatcgttggctcgcattccggcgtgaagatctgccgctggaccaaatccgcgttcgcggacgaggatcatgctacaagttctcattctacggcattcggtcgcacctgtgtatggaggcgacaccgtctctgtcttgtagtaacaaatgtatcttctgctggagacacggtaccaatccggtcgggactacctggcgctggaaggtcgattcgcccgagctcatcttcaacggcgccaaagaaggtcactacaaaaagatcaagatgatgcgcggcgttccaggcgtccccgccgagcgcttcgccgaagcgatgcgcatcagacattgcgccctcagtcttgtcggtgagcctatcttctatccgcacatcaaccgctttctcgatctcctccacaccgaacacatctccagcttccttgtctgcaacgcccaacaccccgaccaactacaagctctcaaccgtgtaacccagttgtacgtctccattgacgctagcaaccgcgacagcctgcgcaaaatcgaccgccctctccaccgcgacttctgggaacgcttccaacgctgcctcgatatcctgcgagaaaagcgccacgttcaacgcactgtcttccgtctcactctcgtcaagggattcaacatcgatgacgaggtcatcggctacgctaacctcgtcgaaaagccctgccctgctttattgaggtcaagggtgtcacatactgcggcacaagcaccagtgcaggcgctgggttgacgatgaagaacgtccctttctacgaggaaatcgccgaattcgtggtgcagctcaacgccgaactcgagcgccgcggtcttgactatggtatcgccgctgaacacgcgcacagctgctgtgtgcttatcgcttcatcccgcttccgagttaatggcaagtggcactcgcgtatcgattacccgcggttctttgaactgctggagaaggagaaggctgatggtacttcgtttcgtcctgaagattacatgaaggagacggaggaatgggcgctctgggggaatggcggatttgatccgaatgatgagcgagtctttaagaagggaaaggctgcgaagaaggcactgaaggagaaagaagagaaggaagctgcagaaagggcagcagcagca

SEQ ID NO: 20194 - DNA, 1996 bp, Emericella nidulans
gatggttgcacgcaagcctgagtaaggcactaatgtacaatgaccagcatttctttcgtgcaggcggtctatcatatttaataatcgtctcagtatcttcttgttgctttcctttgtttcattgtaccgcccgatgatttgtcctacgaaccggagcatgcgctatggttatgatgtatatctagattaatagatcaaaacttctttttcccttcaggtgcgcttgtctaatccgtacggggcgtactgaggacccgacaggaccgcgactcgtcggctttcctgtttagttaggaagcccacagtctaaccaagtatacagcggagactaaccagcctagggccttggactcttggttcagcggggagctgagagacttgcccatttgggcaaaatggccaactggaaatcagatctccaagctataaagtcgggctctgtttctgcttcttcaacgttagattatcttggtctacagcctagttgaaatggcagcaagcgcagagatacagccccaaccacaaccacaaccactgtcacaattacacccacctcacgatgccagagacgccgagaaggccgtgccctcgcagcccgatttgcggggaagtgatagcaatatatttggacatgaccgccaagtagaacgttggaactatcctcgttcgaacgttgtcaagacggtcgcaaccttctgggcgtttctggtaatgggcgcgaatgatgcagcatatggcgtgagatcttctttttctattctcgatgaactatactaacaacctcagcctcttctcccatatgtgagtgtaccggtgttgactcaccgcattcgtcgatttctaacaatgtccagctcgaagaatactacaacctctcctacacgacggtatctctcgtatttctctccccaataggcgggtacacactagcggccgtcacaaacaacacactccaccggcatcttggccagcgcggcatcgcatggctctcaccaggctgccacctgctcgcttacattgtcaactgcgtgcatcctccataccccgtcctcgtggtctcattcatattcgctggactggggaatggactggcagattcggcctggaacgcctggctagggaacatggcggactcgaaccaaatattagggctcctgcatggactctatggactcggcgcggtgatggcgccgcttgttgcgacgagtctgattaccgaggccggtgtgggctggttttatttttattatatcatggtgagcaatgctatcagaatgtctatcgacgagcgcactgatggatactgccaggttgcatgcgccgctatcgagttagcctcctgcctctgggccttctgggattcggacgccgccgcctttagagcagaaaccgaacgttcccaatcggtcgaaacatcagacgaacaaggcggcgtgcggcgcgcactctttgtccccaaatacgcaagggtaacctggctcctttcattcttccttctcgggtacgtcggcgccgaagtcgcgattggcggatgggtggtcacttttctcatgcgcgtgcgagacggcgcagagttcgcgagcgggatgggctcaacggggtactggctcgggatcacagtcggccgcgtcgtcctggggttcgtaacgcccaggattggcgagaaattcggcatcgccatatacttagtcatctctatcgccttcgcgctggtcttctacctcgtaccgaacttttacgcctcgattatcgccgtctccttccaagggttctggctgggcccgatgtttcctggtgcggtcgtggtggctacgcgtctcctgcctcgtgcgctgcacgttagtgcaattggctttgctgcggcgtttggggccagcggtgctgccgttctgcccttcgctgttggcgccgtcgcgcaagcgaaaggggtcgaggtgcttccgccatttgcaattgccttgtctgggggcattctgctgctctggtgtgcgctgcc

SEQ ID NO: 20195 - DNA, 1999 bp, Emericella nidulans
cagctccggcggttggcatagcagagaatgttagccagaacatctgagaattcccctaattgtaattgatatggtcacccgactgtgtcgaggcaggcctcgaagaatccaggcagctttccggattcccttggaaatcgtaacttgcgatagcgaatcgatggacatgtacgaatacgccggaaatctgcgattcaaaacaagctgagctgcaaggacgccacgctcggcatcgctggtagttgtcaaaatgtcctcatcgagtttactgatattgatatttgggttgtcagaatgggccacgccctttccaaatgtcaatggacgagagacgcacctgctaagttatcatcactgagctgtctcccaaaagacctttccagatgccctctagtaaaacaagagaagtagatattcaaatattaacgttctagggcgcccaatatttctttagaccattgattgtctaagctggtcatggactgacttcaattcattgtttgccccacgcccttatcgataagaactgccccgcttctgagaaagttagctgaagtattttcctccaactcacttgaactcctgctctgctgctctgacggtcaaatcactataaataacctgaaaaacctgagtatgaagacagaactggacgaagtatggtatctcattgcataagcttatccctaactaacttgttcctgcgtttccagttggttgaatttctccatcatggaaacactcagatcagacagattggtaaatgcagcttagaaacacagtctgaattgatgataacactatccagcctgcgcaacattagttggatattcggtgtcgaggccggaaatcttcaaacgtcaccagcttttgcctatccaagacttaaaacttcttgttcgagactatacagtcagtgagcatgccctttttgaattgaacatatgggatttcattctgccccttcttcatggaactgacctgctggatagcctattgcgagcgatgcgttaacaattctcgtcaacctttctggtgataaggagatcctagataaacttgctactgatgatgcttttatggaaacactcctcaacaaagtgactgtaggtttctgcaacatttggttcgaccaaggctatcccattcactctctctgttacctcggttattttgatctttactcactgcatcggtccactaacaagccagttggcagaataacaaagagggaaatgccgatgggatctgtatgctgtttgccaatcttggaaaatccgagaatataaaagagctattgacgcttaaacgtcgaacggccaatcctgtctcaaactccgagtatgcaattgaccagttgatggattgtttcgtgaaaggcgccgacggcgcactcaaccaacacgcgaactacgactatctatcttatctatttgccgacttgtcgaagctagaggagggccgcaaatatttcacaacgagacaggattatgatggagtcgtgcctgtgacaaaactcaccgttttcacggagcatgagagcacggtccggaggaggggtgttgcatcgaccataaagaatgttgcatttgaaataccatttcatccgaccctcttctctgaagacgaggcgaatcttctgccttacatacttctgccaattatggggccggaagagtatagtgaagaggatactgcaaatatgctcccagacctccagttgctgccccccgacaagaagagagaaagcgataatggaattatcgttactcatcttgagacgcttttattgttgacaactacccgggaaggacgcgataaactaagggcagtgaacgtctatcccgttatccgagaatgtcacctccgtgttgacgacgacggcgttcgtgaggcctgtgatagatgggtccaggtcattatgcgagacgaagaggatgaaggaaactcatcggcagggcagaatcaggatgatgatagaaaggtcgtggaattgttc

SEQ ID NO: 20196 - DNA, 2005 bp, Emericella nidulans
gtcgacgcgctgaggaggctagacggaatcaagcaacgaagccggttgagaaggaatacgcaactccactttggcaccagatcaagactgtttgtaagcggacgaatatcgtcttctggcgctctcacaagtatggcttcactcggctcttcacccacttcaacatttctctgatcaccggtcttgcgttcctgcaactcgacgactcccgagcttcgctgcagtaccgcatcttcgtcctgttcaacgtcacagttatcccaattatcatcattcaaatggtcgagcctcgatacgagatgtcgcggttagtattttatcgagaagccgcgtcaaagacatacaaggacttcgcctttgccgtgtctatggtcgtcgccgaaatcccatactgcatcatgtgcgggattatcttcttcgtcttcctttactatatccccgagttttcactgcgcctccgactcgggcgggcgtaccagttcttcatgatcatgatcacgcaattgttcgccgtgacattgggtcaaatgattcaagcccttactcccaacagcatgatcgcatcccagtgcaacccgccactcatgatcttgttcagtttattctgcggcgtcatgatcccgaaacctcagatgccgaagttctggcgagtctggttctacgaactcgacccgttcacgcgcatcatcagcgggatggtcacgacggaactgcacgaacgccctgttgtctgtactccaggcgagtacaaccggttccaggctcccgccggccagacttgcggcgagtacatgcagtcattcttcgaccgaggtgggattggatacctggccaacaatgcgactcagaattgcgagtactgtgcttatcgagttggagacgagtattaccaggccttcgagatgagctttgaccaccggtggagggatttgggcatttatgcggcttttgtcgggtctaacctgataattttgttcatggctgtaagactttctgatttgcaggctctcccttctggtgattggcttacttactaacgctggcaggctcgttatttgaactttaaccggcggtaagacagaatgaaaatgtgaggtggctggaaccatgcggtgtggaggtgtaatcgcaaaagccgtttagcagaagtggatagaataaaagtctgtcaacatatacctacctaatccatagtacgcatcctacttttcatgtaaccccagattatccccgcaaatgagagtggaggtttggaaccccacgctctacccccacaccattatcggccattgcagctctttgccgtttcctcatcctttgttcatcctcacctccttattctgctgctcttcgtgttttcccacctatcattccttttatcttcccaatgtgctcggcgtacgtccgacatcgcctgatcctccgtacgggttttgactcggtctctgtcctcagactaccgtcagagctgcagaaactggttggcaactaatgatatacccgcgcagatatgccgagcccaagcttcgagcaccgtcacgccgtcaaagcggggtgcatggggtatagctggtggtctccgcaatccgtcctattccgctgcagatagccagtggatctctcactcagggtttccctaatcttgacgtatggcggaataaccccgagtaattcatctttctaccagctcacactctctgattacctgatcaatctaagcggggaagtctgttggagaaggagcagggtaatggactaatcgctgtgatgtccgaaatcatgctcgcgtctattcccggatccagcgacagtatataaaacgcgccgctccacgctgcttcacgtctgcctgccccgtcttcgtctctggtactttggcttagatttaaagaacgatattaggagaaaaagatggccataacatctcgtttccagtcgcacggcggctcggacattacgaaggataacaacgcagccaccacaaatcacgccgaagaagtcccga

SEQ ID NO: 20197 - DNA, 2009 bp, Emericella nidulans
tcggtcaggagcagccggtattctacgccacaacttcccttcaggacatagggatcatcggcgtttcggtaaccttcgcacacgacgtctgtagaaccaagcttgaactcaccggggagtgatgccgtgcaggtccactggacgtcctcctcgtcgtaaccgtagccgtcgttgatgcatctcattgaatctatctcgtacatattgcatatgcgcttggacggaccgacgcatttcagttgggggatgggcgacacgcgccgagctctagtgagtctgccgccaccacgcagcgtgagggagtggactcgggagaggaggatggcatctttgcctggaggttctttctttgagtagcttgcggagagagatgaggagggaaggctgataaggaacagtaagagctgcagaattgttgatcgcatagctgcgatttatatagtgtgtgtttggaggttagatggaaagggtctaggaggaggtaagaatatagatcgtgagacggttgaatcaaagctgcagtctaggcttagactacaatcagctgaagtggccatatgaaatagtgtttggaaagatccagatcgagctttaagacacttggaggctgttctttggatcgtcgtctagcttgccgcgagaaccccgtccgctccgaccttggcgtcattcattgttcgaactcggctgctcccacactcggaagtcttcacaccctcttcccttgtctgatctgttcgcctactgcgcacataagagatatgggcagacggtgacttcatacagcggctgacaatggcttttcagcaaggtacccccggtcctcccgtcgaactctgctctacattcactgaccatgacgaaaccgtctctaggtgaagccgcgcctgtatcgacccagtcctcgttcgtgcacctcttctcgacgtctcaatagtctgctaattgtgtatcgcagtctatcttttacgcaagggttcctgctgggtcagctatcagttgtgctgctgattggtgccttcatcaagttctttatttttggcgaacaccaccaccaccgtctcgcggtcttcgagcttccacgcatcgacgctccaattcgatcttttcacaagatgcgcctcctcccagatcattgagagaaaagccctctacttcgaatgtccttcgtcccgtcccgtcgtccgcgactaacacaaggtcgattttgcggaaaacctactatagcgcaatccctccgaacccgtcgtcgaaacaccgaattcatcactcctcacatcaaccagagtcgttggattggttcaatgtcctgatcgcacagacaatagcacagtataggcagacagcctatcttttgaaagactcccccacatcgtcgatcctccattcgttgacggcagctttgaataatcccgagaagaaaccgtccttcatcgataaaatcacggtcacagacatatcgctcggtgaagagtttccgatttttagcaattgccgtatcattgccgttgatgaccctatgtccgacggtggcaggcttcaagccttgctggacgttgacatgagcgacgacaacctctccatcgctgtcgaaacctcactagtcctcaactaccctaagccatgctccgcgattctacctgttgcgttgtcaatatccgtcgtaagattttcggggacactctgcatctcgcttgtccccgcatccaccccgcctcttcatactccgtcacctatgccgtcgccaccgacagcaggagcgcagccagccgccggggcacaacccactgacggcggtgatatcccaccgaaatcttcatcgaaaagcaacatcgcgttttcattcttaccagactaccgactcgacctgtcagtgcgatcgctgattggctcccgaagtagactccaagatgtgcccaaggttgcgcagctggtagaagcacgggttcatgcgtggtttgaagagagggttgtcgagccccgagtacaagtcgtggggctaccggacc

SEQ ID NO: 20198 - DNA, 2024 bp, Emericella nidulans
cgaccccgatcctatgcaattcaagacgattgtactaaacccgcgatgatttcagttcctggattgccctgagttcaagtgttatcctgttcaacaagcacatccttgactatgctcagttccgtgagtccactttgctccgcaagctgcaggctgtcaattgaagcgaacgaggctgacttcgattcggttcaggattccctatcatccttacaacatggcatctggcgttcgcgactttcatgacgcaggttctcgctcgcactacaaccctccttgacggccgcaagaccgtcaagatgactggtcgtgtctacctccgcgccattgtccctatcggtctcttcttcagtctgagtttgatctgcggtaacgttacatacttgtacctaagtgttgcatttatccaaatgctcaaggtacggacggacctctgtttgggattcgatgtggcataaactaataaccgctatttaggccaccactcctgttgctgttctgcttgccacttggggtatgggcatggcacccgtcaacctcaaggttcttacaaacgtcagcgtcattgtcttcggtgtcatcatcggctctttcggtgagatcaagtttgtcttcatcggtttcctcttccagattgccggtatcatcttcgaggccacccgattggtcatggtgcagcgcctgctcagctccgcggagtacaagatggaccctcttgtctccctttactatttcgctccggtctgcgctgtcatgaacggtgtcactgctctgttccttgaggttcctaccctgactatggaccacatctacaacgtcggcgtctggactctcctggccaacgccatggtcgccttcatgctgaacgtctctgttgtcttcctggtaggtaatctccattttgagtactctactgttgcctaacagtcaattatagatcggaaagacttcttctttggtcatgaccctttgcggtgtccttaaggatatccttcttgttgtcgcctccatggtcatctggaacactcctgtcaccgccctccagttcttcggttactcgattgccctcattggtctcgtctactacaagctcggtggcgacaagatcaaggaatacaccagccaggctaaccgtgcctgggctgaatacggtgccactcaccccgctcagcgccgctttgtgatcattggtgctgctctccttagcttcttcttgctcgttggctccatggcacccagctacgctcccgattccgttgccaacgtcaagggcatgcttgacggtgccagtactggcaatgcttaaatcaaccttcgtgagcagttttggtgttttccacttctccaagttatgacctgggattgactgggaacatcaaggcaacgctgtcggtgtatgcgttggcgaagttgagatgttgaacgacaaaatttcctttcttattctcgaactttcacttctgcggccttcatagaatatcaggtcacgattttacctatttcaaaaataatgtcgctcggccgagacggtctctaggaggaacaaacgaagcgcgcctagatacggcctcatgcaggaaatgcagcctggatctagtcaacgcacgttgctcaccttctgcccagtgttaactgggcacgaggctccagacgggacttctttttccctaaattttttttttctttttttcccatttgtctactttgtactacctttcactcaccttggttatgcggttgaattgaagggtgtattgtgttgtctgatttgggtcgatgaacatttgtcatgttaactagcacgagggtccggagtcggcttttgcttgtatcgtctggcggtcctccatactacatttctttctttgttaggtagtctatgtaccagcaaaatagagtctttgatgttcaatctctgagcttccacaattccatggttacgtaaggacctcaggcaccctttttacagcgcagccactcaagcctccagcaatcctgagttgttgctcggacagccagtgaga

SEQ ID NO: 20199 - DNA, 2025 bp, Emericella nidulans
gtcttgcaggtattttcgccttcacaatctgttatttgctgtagctgatctgggttgaaggcgttgagatcatttcgaactcatccggcagtcaccatgagctgaagaagcttgatacgcgcgtcaacctcatcacacaagccacaaaactggtaagcagctcagtcaacacacatgagcagtacttactgttgccagagcggtggtatctacctgtatgcaaaccagcaaggttgtgatggtgacaggctctactacgatggatgtgctatgattgtcataaatgggaatatcgtagctcaaggatcgcagttctcactaaacgatgtggaggttgtcactgcaaccgtggacattgaagaagtacgtctattagttcaacttcgattggccatgtactaagagagacaggtgcgcacataccgtgcctcaacaagcagaaatatgcaagccagcagacagcccccttttgtccgtcttgaccttgacacgcgattgtctcgttcggacgaagacgctgaccctggcattgcgccgtctgagacgctcataccccgctaccacgcgccagaagaggagattgcccttggacctgcttgctggctgtgggattaccttcggagaagtggtgccgctggatttttccttcctctgagtggtgggattgacagttgcgctactgcagtaattgtccactctatgtgcagggaggttatcaaagcagtacaacaaggaaatgagcaagtgatcaaagatgtccgcaggctctgcgcagagcctgctggctcaacctggctccccacaacaagccaagaagtctgcaagtatgtctgcaacatactgcaaacactcacgttcagggatagctgacttctgtagccgtattttccacaccagcttcatgggcacgcagaactctagtaaagagacaagagaccgagcaaaggagctggctgcggagatagggtcgtaccatatcgacttcaacttcgacaccgttgtgaccgctttgatgaatctatttaccgtcgtcacaaactttcagccaagatttaaggtccacggtggtagccgcgcggaaaaccaggcgctgcagaacattcaagctcgtctgagaatggtcctctcttacttattcgcgtcgttactgcccacagttcgccagcgcccaggcggcggtggccttctcgttctggcgtcgtccaatgtagatggtttgtgcccttttttcctgaagtaaaacgtcatgctgacattgactagaatggtatatctgcccatcctaatacaactacaacataatcaagatacttacatttcatctagtttacgaggctacctgactaaatacgacgcgagcagcgccgatgtatgtcatacctcgctacctcatatgtctttccccggccaggcaagcaaaactaactttgtctccagctaaaccccatcggttccatttctaaagtcgacctcaagaaattcattggccattgcgcaacctccttcgacatgcctatcctaacctcattcctcaatgccacgcccacagccgagctcgagcccatcacagcaacgtacgtgcagtccgacgaagcagacatgggcgtgacctacgccgaacttggcacgttcggttacctgcgcaaagtgtccaagttgggcccttggagcatgtacgagcgcctgctgcacatgtggggtaatgagtattctccccgagagatctatgagaaaacacgacacttcttctataattatgcgattaaccgtcataagatgactgttatcacgccaagttatcatgctgagcagtatagccctgatgacaataggcacgatttaaggcagttcctttgtgagtcctcctcatccttcacactgcgtttggtgcttggtatagtcttctggggccgtaaaactaacgtatacggtgcttagatcctcctttcacttgggcatacaagaaaatggaagaaagcgtcaagtactgggaagaaaggggctggacgacaggaaaagcgcaga

SEQ ID NO: 20200 - DNA, 2026 bp, Emericella nidulans
cggtgccatctgggtctgaatcgagagaacaattggaagacgaaatcagcgcggtcgaggagaagattgggctgatgaccgatctcctgcgctcggtgcgtcacggagcggcatccaagatcgaggggctgactgatggcgatactggtttctggattcctagagcctacggtatcctgggacgggaggagaacatgaccagcttttggaaggagtggctgaaggcggtagttgttcccatgaccgacaatagtgtccaacgcgttcccccagcatcgccccgcatgggttcctggcagcctctggaacgatatgtgatgaacttgtgcacggaggcgttcgcacccaacacctccaaaacccaagtggagctggctgtgcgcgaattacgcttgttcgcccgcaaggaagctaccaatgagctgcccggatcgcgaaacactgatttatacgccctgttccggacactgtcactggctaacatcataatactctttgagtatgctttgaccgaatcccgaatcatctttttgtcctcgcacacgtccatgttgtaccttgctactcgggctttggtagaccttttattccccattccttggtcgggtgtgctaattcctatcctccctgcacgactcatccaagcactggaagcgccttgcccgtacattgtcggtattgagcggcggtacgagaaggttgaacttccatctgatgattttgttctggtcgaccttgaccaagatatcatcgagagcacggtaaagccaaccccactcccccgccaccagcgaaggaaactccattcgctgcttcagctcgccgctcctcatcacagccggtacggggtgcccgtcggccctcctgcctacgccatcgagactttcccgtttgatgctttcatgtctgaaaactcctccatatacacatccaaggcgcagtccacgcaactgtccaagtacgtcagtctcaactcgaatgcttttggtcagggttctgtttccctcacctcacatccgccacttattttcaatgctttcctgcacgcgcgcaatgaacaaacagcgtcgcgtgggtattcttctaagagctcggatcgaccgggcactgggtcaactttcaaacctggatcagccgccatccccgagagatagttctcccatctctggccatttcccgccgccgccggcgaccccgcgcaacgactcggggatggcgcttcaagcatcccttcgcgagaagcgatccggtcactttgacgctgcctctcgtcgaagctcgtccttcgggatggacatgcgccaggttcccaggcggcccagtgcacctttccttggccacgctccaaacctatctgtcagcacgttgaacactgatttccagtccacatatgccccttcggtctatgcgcagtctactgtggctgcctccaccatcgttccccagcctgctatccagccaattcacaacaatgacggcacgtcctgggtggagggtcattgcctgcagctccaaccatgggacgacaaggctgtatgcacagtctgcgacgaacgcgcggacgagaatatgtataaatgtgtatcgtgtaagacgcaagtccacaaccgatgcgcccaccagatctgcatcgtttgcccagcggcattttaccccgagcaggttcgggctgcgttcgtccgatgctttgccagcctgttctatacatacaaaaaatatcttaaaccagctagtggcgacaagaagaaggcaggccttacatacagctttgacatggatgctttctgcaaaagcttgcctagtgaacatgctgaatatatcggtgttctatcacagactcagggtaagtcgctctaagctgagttccggagaccgtgctaaccaaaccaggtttcaacgagtttatcagtgatagggaacgggtgaatcccaaggcgagggacccaaggattactctgttcgacgagattgtgctgtcgaaacggaaccgaggccggtcgtccatattctccggccgatcgacgac

SEQ ID NO: 20201 - DNA, 2028 bp, Emericella nidulans
cgggccccctagggtcaaaaataaggctcctgcacctgtccagatctcagcggagcagctgctccgtgaggctgttgaccggcaggagccctcactacaggcgcctacgcaacggttcgcggatctagaggaattacacgaataccagggtcgcaagaggaaggaatttgaagactatgtacgacggaacaggattaacatgaacaattggatgcgttatgccgcatgggagttggaacaaaaagaattccgccgggcacgatcgatcttcgaacgagcgctggacgtcgactcgacctctgtgccactatggatccgatatatcgaatccgaaatgcgaaatcgaaatattaatcatgcgaggaacttgcttgaccgcgcggtcacgattctgccgcgtgtggataagctctggtacaagtatgtctatatggaagagactctggggaacattcctggtacacggcaggtcttcgagcgctggatgtcgtgggaaccggatgagggtgcatggagtgcgtatatcaagttggagaagaggtacaatgagtttgagcgggcaagggcgatcttccagcggttcacgattgtgcacccagaaccgagaaactggattaaatgggctcgctttgaggaggagtatggtactagcgacttggtaagagaggtatatgggttagctgtggagacgctgggtgaggacttcatggacgagaaactgttcatcgcctacgccaggttcgaaacgaagctaaaggagtatgagcgcgcgagagctatttacaagtacgctcttgaccggttacctcgctcgaaatcgattactctccacaaggcgtacaccacgtttgagaaacaattcggtgatcgcgagggtgtggagaatgtcattctcgcgaagcgtagggtccagtacgaggagcagctcaaggaaaacctgcgcaattatgatgtctggttcgactttgcgcgcttggaagaacaatcaggggacccagaacgagtgcgcgacgtgtacgagcgggcaatagcgcaaattcctccttcccaggagaaacgacactggcgacgatatatctatctatggatcttctatgccctgtgggaggaaatggaggccaaagacatcgaccgcgctcgtcaagtctatacagaatgcctgaaactgattccccacaagaagttcacatttgccaaagtgtggcttatgaaagcgcagtttgaagtgcggcagctgaacctccaagctgcgcgtaagactctgggccaagcaattggtatgtgcccaaaagacaaactgttccgtggttacatcgacctggaacggcaactattcgaatttgtacggtgccggacgctgtacgaaaagcaaatcgagtggaatccgtccaacagtcaatcttggatacagtacgcggaattggaacgcggcctagatgataccgagcgtgcgcgagccatctacgagcttggcatcgaccagccaaccctcgacatgccggagcttgtctggaaagcctacatcgacttcgaagacgatgaaggtgaatacgagcgcgagcggcaactctacgagcgccttctgcagaaaacagatcacgtcaaggtctggatcaactacgcacgctttgagatcaacgttccagacgaagaggaagaagaggaagaggaagagcgcccaatcagtgacgaggccaagcggcgtgcccgagctgtctttgagcgtgcacacagggtcttcaaggagaaggagctcaaggaagaagtaagtcatcctcatctcgctgtacatgagaataggacgctaatatgtattcagcgagtggaactgctcaacgcgtggcgggcgtttgaacatacacacgggtcaccagaagatatcgacaagatcgagaaacagatgccccggcgggtcaagaagcggcgcaagctggatgacgaccggtacgaagagtacatggattatgtgttcccagcggacgaccagtcggcagcaaacctctcaaagctgttgcggatggcgcatca

SEQ ID NO: 20202 - DNA, 2042 bp, Emericella nidulans
acattacctgaagcgcgaattctactttgatgttcaccctccgttggggaaaatgcttgtcggcttgtcgggccttcttgccggttataacggatcattcgagttcaaatctggcgaaacatacccggaagaccttaactacacatttatgcgcctattcaacgctgcctttggcgtggtgtgcgttccgcttgcctacctaacggcacgcgagcttggttttcgtagaggtactgtttggcttgtgagcctcatggtgcttttcgagaattcatatgccactatttcaagattcatattgcttgactctatgctcctttgcttcacattcacgaccacattttgttgggcaaaatttcatcgtctccagcatgcgagtttctctattgagtggttcacctggctatttctgaccggcgtgagtattggctgcgtttgtagtgtcaaatgggttggccttttctgcactgcacttgttggcctctacaccattgaagacctgtggaataaatttggtgatttgaagatgtctggggttctcactcttttcgaaaagtccttgactctgcctgatgctaataatgattacaggcaacgttagctaaacattttgcggtacgcgtggtgggcttgattctaataccagctctggtatatatcttttcgttctacatccacttcctgattttagagaacagtggcccaggcgatgcgcagatgagctcgttgtttcaagcgaatctcaaaggtacccaggtgggcaaagacagcccgctggaaattgcattcggctcaagggtcactttgaagaatatgggttacggcggcgggctacttcattctcatgtccagacgtatcctgaaggttcgtcccagcaacaggttacttgctatcaccacaaggacgcgaacaacgactggtttatctatcctaatcgcaaggagccccagtacgatgcagaggcacctcttaggtttgtcggtgacggtgatgtcattcgtctgatccacggccagacaggccgtaaccttcattcccacaacatccccgcaccaataaccaagaaccaccatgaagtttcctgctatggcaatttgactattggagatgataaggaccattggaaggttgaggttgtcgatgatgttgcttcaagagacaggagtaggatcagaactctgacaactgcgttccgtttgcgacatgcggttttgggttgttatctacgcgccgggaacactaatcttcctcagtggggtttcaagcaaattgaaacaacttgtgtgaaggaaaacaaaccccgtgacgtttatacgcactggaatattgaaacccataccaacgaccgacgtatgacaccgcgcagtctgttataatttgagctatactgacataatttgcagttccccccggtgatcctggatcgtacaagtctcctttcttcaaagactttgtacatttgaacgttgcgatgatgacgtcgaacaatgctttggtgcctgatcctgacaagcaggacgatcttgcgtcgaaaccttggcaatggcccattcttaatgtcggtctacgcatgtgctcttgggacgaaaaagtcgtcaaatactatctacttggaaaccctgttgtctactggggtagtaccttgagtttggctgtctttggactgctgaccttgtggtaccttgtgcgatggcagcgcggctacaacgagcttagccaggcagatattgaccacattcactatgccggcttgtaccccgttctcggttggtttctgcattatgtgcctttcatcgctatggcgcgagttacctatgtccaccactattaccccgcgctatactacgctatcctgacattcgggttctgtgttgattggcttaccaaaactttgaacaccaaggttcgattcttggtgtatgggctactctatgctttggtcgctggggttttcgtctacttcagggtgattgtgttcggcattgaaggtccaagccaacagtggcgtcacttgaactggttgagcggttggcgaatcgct

SEQ ID NO: 20203 - DNA, 2042 bp, Emericella nidulans
gccgccggtcaaagcagagttgcaacagcagttgcagaatgccgggcaatctgggctttccgctagttggttggcagaaatgctgaagttggctagctcttattctcaaattacatccgaagaagagggtctctgggatattgatgtcaatcttttcctttcagaggaaacctccgtcacagcaaactacacccctcgcacctgcagcggggatctggtcattaagctaggagagtggctcaaagatgctaccactcaaagtctcctcgcttgtctgaacgatgtcttctccgatgcttcgtctacatggaagagccgtgaatcgtccctgttcatccttaatgcgctccttagagatttccacgaggtctcacgcgatattgcgccggagttagccagcggttttggcaactttatccaattcgcgatacagcaggaacaggaacttctacgagcccgaggctaccttgtggcgggaagcttggccaaggtgtccaatgttggcgaagcttaccttgagccaactctaaaagcagtctccgaggacccgtcagaagttgtgaaggtggcttgcatccgcgcactgcaggacctgctgccttcgctttctaccaacacaactatcccgcttcagcagactgtaatttccgctgtgtccgatttcgtttccgctcacgatcttcgcgattcttccgacactgatgacctcaaagttactctggccgaaactctccgtgatacggtcatggtcgacccaagcgtcgtgcttacatccactgcacttgacgtactgttcaatattgccagcaacggtgctacaaacttccagttgaccatgactgtgacggaggcctttgaggatatagtcgaacatatttcagagcaaggggctgatgcctttgtccgcctctgcgaaaaggtgcttccttcaataatgggtgcggtcgacgtcggcaacttgactcaggatatctcgctaaccatttttgccgcggatctactgcgtgctctgacggagcgagcccttgagccactgcctgcaggctttgtcgagactgtcatgccgaaagtgaaccggctccttctcgattcgcaagacgcagagctcattcgacctgccacggaggcagtgagacatatccttgctcacgattttaatcagttcgtcgcctggcgtgaccccgaaagcggcaaagaagcaactgaagttgtcctggtgattatcgaccgtcttctgggtcccacagttgatgaccatgctgcaaccgaagtcggccaacttgctgccgagctggttgagagagcgggatcggaacggcttggcccgtatctaccgcagcttctgcaggctgtagcccggcgccttgccactgccgaaaaggctcaatttatccagagtctgattctcgtgttcgctcggctgacgctaattagtgcgcgggaggtcgttgacttcctcgcgcaggtcgacatcggcggacagagcggcttacccatcgtgatgagcaagtggctggaaaactcggtcaactttgccggatacgatgagatcaagcaaaatatcatcgcgctggcgacgctgtacaaccttgaagaccctcgactggcgcaggtgcaggtcaagggagaccttattgtgcaggacaccggacgaattaagacgcgatctcaggctcgtaataatcctgaccgctacacgaccgtgacagcgcctttgaagattatcaaggttcttgtagaggagttggcggcggcgtctggcaacaaagagatcgacgcagccacggcagccgcgctggaggaagaaggcagcgatgatgacgacgaatgggaggacgtgcccgacaacaccctcgatctcagcctcggagtcaccaaacaagagctgatggcgttcggcgagggcggcaccgaaggagtgtttggcgtgcgcaagcgggatgacgagacgcaggcatttttgctggatttcttccgcaacgcttctacgaaaggcgaattccagcagctctttgcagctttaacgccggacgagcaggaga

SEQ ID NO: 20204 - DNA, 2044 bp, Emericella nidulans
cctgccaatccattcgctatttcggagttcatacatcgatacagctatttagccaacaaagaatttgtagattttgatcaagtcaccgtaaccggtatgttctggcctgcgatggcttcgatatggacccttgtacttagatcaattaggtagggttcgtacgtatagattagctgggagcggcttgatatttttcgacatctatcaagatggccataaagttcagatcctctgcaatttgagtcgcctggaacgggtaggggtctcaaagcagatattcaagagattctatcgtatgattcgccgcggcgatgccttttgtatgttccccatcgcaactcttgaccgtccacagactgaaccagaacgcaacagctataacgggtaaaccgcaccgtacagaacggggtgagctctcgattgtggccacagacctgcctcaactcctctctccgtgtctgcatgatatcccgctcgatgcgcatggacacgaaaactctccatatccacgccatgttcagatgcttggtgacccggctacggtgaaagtcatcaagtccagatctctcattactcaacatatccgccagttcctactggataaatcatttatggaagtcagcactccaatactgaacgggattcctggcggtgcaagcgctcgtcctttttatacgtctgccaccgaattcccagatcggcagcttgcccttagaattgctcctgagctctggctgaaacgcctggtcgtgggcggtttcgatcgggtctttgagatcggcccgtcgttccggaatgaaggtgagcggtccctcataggttcattgagttccagaatttaacctgacttatgatgacaggcctagacaaaacccacaacccggagttcacaacctgcgagttctaccaggcatactccaacctggaagagctgatgaacacaacagaagagctcctatgcgggctagcgcaggtcttcatcgcagagttcaacaaacgaaaggaaccgcccccaacagccatagatttcaccattccattccaccgtatcgattttataaccggaattgaactaggcattgaccgtcagttgcccgaccttacagcacctgactccttggaacaggtcacccaaatttttacggacctcaaactccaattacccgaacaccctaccctccctcgtctcctggatgagctctgcagcatctacgtcgagccacaatgcgttcagcccacatttatcatcaacccgcctgagtgtctctctccattatcgaagagtttcgttcaccctgataacaaccagcgcgttgtgcgcgtgcagaactcttcatcgaaggcaaagaaattgcgaacatgtatgaagaggaaaactcaccgtgggagcagcgtcgcaaattcgaggatcagctgaagtacagcaaggatgctaatgaacccggagaaattgatgaggagtatctcagggcgttggaatggggtttgccgcctacgggcggttgagggtgtggtatcgatcgtctggtcatgctgtttactaaggtgaagaagattgcagaggttttgccttttgggaatttgaggcatgtgacgagacgttgaacttattgtgctttatttgtctctgttgtgacaaatgggggtaaggcggatgatcgagcttgtactatgaatcttgtactatagtgggatatattctagtgataccatgtttcaatctgcagagggcgaacaaaaggacttcagtgtcattaccagggagtaaatagggtatagagagcgatttgagtccgagatgttggatattcaagtagctaaggagggcgtcatgccatggagtcgtgatactacctgggcataaacctagggtagcatcaaacttggcgggagtcggagccggccgcgaagcgggaaaagaggggaattggggaagacagtggctcagaattatatataatctcttctctcgttatcagaaatctttaaaggtccattatcgacttcaaaaatggcgtcgaaacctatcaaacaggctcaggcc

SEQ ID NO: 20205 - DNA, 2052 bp, Emericella nidulans
tcgcacaacagcagggagctgtagggccgatatataagccaccgcgcaaaagaaaaccatttcccagacccattagaaaatcaatcacttagacaatagcaagcttggtagcagcaatgtcgagagcgtcaacatcaggggtaagacgagcaaaggccttcttcagtccatcgggcctgtattctagttagatgctgctttttctttcgtataagatcttccggagcgtacctaacgagagtgttgaccttgacagtctcaacatcgtatagcttcttgagggcggccttaatctgtcgcttgttggccttgacgtccacgatgaacacaagggtgttgttctcctcaatcttcttcatagcactctcggtgttcaaggggtagagaatgatcttggcggcatcgaggcgaggaaggtgagggacggacacgcgcgggtacttgggagaccgggacagctggagggtcttggggcggtggaaggtggtggaggtgcggatcttgcgagtcttgtgcgcctgaatatgtcgagtaacattttagccatagggttctgtgataattcataattgaggacgttttagacgtacgcctgcacccttcaagactgccttggcggcagcaccagccttgtcgctgggcttcgacttgcctgttcagaaaaaggaatgtgagtgatttattttagaattgaattttcgagtcggtatgcagtatagttgtcggagggaatcttggaatcaaacaaaagcataaccgagtcgatacgtggttctttcagttccttcatcctggaatagattgcgcgggacgaatatgaagaattcctgtataacacgactccatgctctcgaacatatcccaaaatcgacaacagatatcgagaataaaaggtctggatcgctcaagcttgcatacctgtcttcttctgaacgggggccatggctgtcgtttggcgctgttgtcgtgattgtcgcagtgtcgaaagtcgaattgttcggaatgtcttcgcttagcaaaaaccctcgcggcttcctctgtgggtcacctgaccagccctcctagaatcttggcgtgattcgttttttaccgcctttcaccacaggcagaaaagagaagaaaaaaaaagcggtctgctatccgaagccatacattaccttactatgacaatgtacatcttgcaattgaaacatgcattatggctacgaaaaaatcggagaacagacgtcccgcgctactttctcgcactcgcccaccaacagttcagaagaaaaatgcagccttatcagcaaaggcaacgcgaactctcatacgctctcatcacacacttttaaaacagcgagcgcaacgactaaaatcaggcgaccaggatttagtgcgcaagctcgaggcggatatacgagcaaacggtggactaaaaagttatcagatagcaagcaagcttggtcaatctctagaccgcggcggcgactcaagcagagtccttgtcaactggatcagccctagtttgaacgtattgagaagcacgtctctgaagctccgggtcctcgagatcggtgcgctcagtaccaagaatgcatgctctcagcacaaacacctcgatgtcacgagaattgatttagactctcaggaacccgggatcttgaagcaggatttcatggaacgaccgcttcccctaagtaatgacgaacggtttcacatcatatcactctccctagtgctgaattacgtccctgatccagtcgatcgaggagaaatgttgaagcgttgtgttactttcttgaccaaggaaccaccgcagggctcctctataactattgtgccaaggttgttccttgtgctccctgctccctgcgtcacaaactcgcgataccttactcagcagagactgcacgacattctgacaagtattggtttttctctggcagaggacaagcaaacgacaaaattaatataccagctttgggagtacgacggaatatgccagcccaagcagttcaagaaggagcttctaaatccagggaaaacgaggaataattttgctattgttat

SEQ ID NO: 20206 - DNA, 2057 bp, Emericella nidulans
ctgatattcatttctcatttctcatttctcatctttcatctctcattactcatacttcatacttcatttctcttttctattttctctctcttcgtggtctcctaccgctgcttcttcccgccttgcttgactattctggggtctgatgttcccatgtcgtatatgaaaggtatggttcatttggttccagcacgtttcctgtgctctgccgctccagccgtcgcaccggtcactttccaccgtcctcgttgagcttcactttctcctcttttgtgctttgtctggtgtgacaggcgctgtgtcgtggtacctggtcttctcagctgcctgcctatcgtggtctcccagaatccctccactgcgccttcctgtttcgtctggaccaccggaccttgctgctccattgaagcttcaacgcaacgctcacctccgtggatgcgtacagtgctttactgcttcgcttctgttgtctgaacttgcgtggacatctgtgagcctttgcaaccatcgccactgtccgttgtttcgtgcaacccacgtcctgctggatcatcggctaacctaagtaccagactttatttacagacacatcgcctggcttcaattgacctcttgattacttcatctttctccaacgaagcaagcttctcatctcgtatccagacccttttgtcgtcagccgctgcttgtgttcctctgcacaagaccggccggatgccatacactgcgccgttgaagacgtcgccttctacgctgcatattgaacattctgacctgagcacccctccatctccaagctcacccaacgtggccgacccggatgcagacaacctaaacctccccccatcttactcttccgcctcctatgtccgtcggcaccggcggtctccatctaacagcaagtcatttgtttttccggcacctgacaacagcttcgaacaaagccggaacacagatgtctttgctagccttaggcagtcgccttcgcctgtgaacgaggggccaatcccccctggagctctcctgtcgcctccggagtctggccagaactctagtgatgaagagtcgagtagcccagcgagggatgtgttgaagctggaggagttggaggcggctgtgcggtcaatagagcaaaggcgaagtgtatctcctgaaagaaaaccttcagaggatatacttccggcaagaagtgaggaacaggcgggaacttccccagcgagacctcgccgtccttctctgacccacgataaccgccttatctctcgctctcggtcattcgtcgaaaagtcagcccaccggaacccagaagaggcggtcaccagttctccagaggacagtgatcgtgatgttgaccctgaaccaagattaccaatggtgcgcaagaaatctggcgagcttgttaggcctgcgttacgcccatcatctcgtcgacggccgtctagcatgcccgggactcccacatattccaaggcggtccactttgatgctcagttggagcatatccgccatttcttgcagcttgacaagccccaagccgtcagtgccggttcatcaccggtggaggatttggaagcagactccgaataccctttccattccgactcgtcgagctatcctgcttttgaatggggacttcggctatctaactttccccataaaccaccatctcacccacacccacgtgttcgccttgagcgcctgtttctttcgacagacaagcactctctggttggccaagtggtggtcgctaacctcgcttatcagaaacatgttgcagcccgcttcacgtttgataactggagaaccacttcggaagtaacggcggagtacagccatgatgctcgacgaaagcagctacacgatggttacgatcgattcatgtttcatattaggcttgatgaacagacaaacctggataagaaagacatgtttgtctgtatccggtataatgtaaatggccaggagttttgggacaacaatgagacgaggaactatcaggtcaatttcaccaagatccccaagccgaaggctcaaacccaagatatgcctcgcgcacg

SEQ ID NO: 20207 - DNA, 2060 bp, Emericella nidulans
gtccgctgcgcgggttgtagggaacatcactcggatcgcggcgtaccctatcattgcgaaattgggagatgcaagtctgcgatccccacttaggcgtaccggagctgactcgttttgtttttttgtaaaggtgtttggtcgagcggagatgttcatcctctcgattgtgttccaggctgttgggtatgcgatctatgcggggtgtaagaacgtgggacagtatatcgtgagtcacagcgcatatgtgacatagattttcgctgcgcatagcggttgacgtgctcatatcacaggctggcggaatcttcgaggcaatcgggttagtacactctttttatacctgatctcatcaccctgacgtgcatacgcagctcaactggcttcggcttaacccaacaagtcttcgtagctgatgtcacgaacctcatcaaccgcgccgtatggtctactcttccggactctctaaccgttattccagccctgtacctcgggaccgagattgcagaagctgtgctcgagaagaacgaatggcgctgggggttcgggatgtgggctatcatagagcccgtgtgttccgtccttctggtcgggactatgctctactatcaaaagcgtgcgcggaaggacccatccccggcagagttcgcatcggagccgacggagagaaatgtggatgatggctggtggaagcggatttataacctcgtttgggtgcaattggacgcgtttggcgcaatcctccttctgttgggtctgtcgctcttcctggttccgctgtcgctaacaggctcggggaacagcgatgactggcataggggctcgttcatcgcgatgcttgtcctgggcgtcgtgatttttgtagcgttccttgcttgggacacgtggtgtgcgaagaaaccgtttatcccgtataggatgatcaagaaccgtactgttgctgcagcttgtttactgggaatcctcgacttctttcattattcggtcttttctgttttctttacgagctatcttcaggtcgcggcgcatcatggggccggaccggcaacgaggattgagtacgtgccatcgagcctagccctattttccggcataagacgctgaccaatttttcatcacacagcaactccctccgagtcgccttccaagttgccgggatatttgcagcgtatttcatgaaatttaccaaacggtcgcaggtttgggtgttcaccggcgtacccctctgtgtcctaggcatgggcgtcctgctctacctggtcgacatgggcgagggccgcgtaggcaacgaagcggcatttgtaacagcgaaatccctcattggtatcggacgaggcttctaccagacggcttcgcaggtttcggtccaagcgaaggtatcgcggggcgaggtctcagtcgttaccgctgttttctttgctgctatgagtatcggcggggctatcgggactaggtgcgtaaacagcatggccggcctctaacttttgttttcttttggttcttgatcggccatggtatatatttaagaagtgtatatgctgattatatgcagtgttgctggcgcaatctggcgcagtaccctacccccaaagctagctcagcatctccccgctgaacttaaggaccaagcgcaggccatcttcggtagcatcgttgtcgcgcagaaatacgaggttggaacgccagcacgagacgcaatcgatatgtgctatcgacaatcgcagcggatgttggctattgcagcgttggcagcgttggcgcccatgctgattattatgttcttcctagagaacgtacctttgactgatgaaactacgttgatcgagctgcatgggaatagagaggctgttaagaagaaccatagtggaggggaaggaaaggaggcgaggtcatgaacgcttcgaatgtgctagtaaatgttgggccaggaatttcgatgtatagaagctattattaatgaactaaaaacttggattgatattgatacggaaatatgaggccacgtgatctctggtagattgaccggacatcgcctgtttctagaaggttcctaccctctatat

SEQ ID NO: 20208 - DNA, 2068 bp, Emericella nidulans
cctccgccacctgcaagagccagtcgccgtcaccctaaggctggcgaactaagcgattaagcatcgcgatccagctgcacctgcaccttgactacaaccgtcttcgcatacttccacagccgtggtaatttgtaataatcgctgcgttggagagtggaaagactcgttcgcgaccataattacgcgtcgatccttccgttatttttctcttctcttatccgccatccgcccccccggcatcaacgtgcagctttgttgattgttcgctaccatacctcctcttttccactaaagtacgtgccaacaagaggaagtctcaagcctttctcgactcggggtcacactaagaccttgccccaatccaatcctctttcccctccccgtacttcctctcaccctgtcctttcttctccgtccacaagcttattgtgtcgttcgacgcgtgttatcaacaggcacgcgagactatattagcttggaaggatcgtcagggatatcttttcccggtagcgaccgcctctcttgtattatatggacaacaggcctgcttccgagtacgcgcagtcaggttcgctctcaccgtttccaacatctgccgcgacacattctgaatttacagctgcagaccaggcttctgctgctgcccctgctcaatacacccctcagcccgagtcgcgcccgaaccctcagtacacaccgcaacctgaggtccgacccggcacttcctccaacacgccgcagtctgactacagtctgaaccagcctcctccagccgcgcgctcgcccgcatacccggagtacctggcccgcccgcctcaataccaccacgcgccgaactctcagcccggaggtgcgccaggtatggctcaagcaacaagtccgtccatgaactctctgaacgatgggcatccaaatggccatcgcaatcagtcgaacgtgaagtctgacggagacgttcctatagatccctcgattgcggcctccagcccaacctatcctcctccttactcgccttatacggctcaaggccacgacatggccgctcagtatcagggccacccgccgcctccgccgcctccacagatgtatgcgcgtccggaatggtcgcatggctatccgcaacatcagcacggtcttcctggaccctacagctctcctgccacaacggttggtcccgcctcccctgctacgaccgcagggccgcgccctggccaggtatgtttttgatgattctggcatccgtttccaaaggctgcgcaattggtttgattgttgtcttgggacgctcccgatgtcggggctgcggtcgggctctcttcaggatgtggagatgcgggcgctttatttcatcattttcctgattcgggtcatttgctgacagacggaatccacaggtttactcgttcgttccgattcccggtgcacaacagcataagcgacctcgtcgccggtatgaagaaatcgagcgcatgtacaagtgtgggtggaatggctgtgaaaaggcatacggcacacttaaccatctgaatgctcatgttaccatgcaatctcatggtcaaaagcgaactccagaaggtgagtgagcattttcactttgtttggctgcacctgtgatagcccagttagcgcggcttgcggcacgcgctagtcaggttacaccgctttagcgttgcggatcgcagtagcgcgccaacttgccgagcaatcggtgatattcctgcatctcactcgttcagctgctgactggttaccagaattcaaagaaatccgtaaggagtggaagcagcggaagaaggaggaggaagctcaacgcaaggttgccgaagagcgcgagcgtgccgcagctgccgcagctgttcagagccagattgatgcttcgggcgcgccagacctttcacagggcggccagcctcctcagtatcctggcggtgtccgacctcaattacctccgattggataccagcctgctgatggccaggctcctggtcaatacggcgctggtgcaggtggcatgccttaccaaggcaacgggcaagtgggataccctccgaactacccgcactcgccg

SEQ ID NO: 20209 - DNA, 2069 bp, Emericella nidulans
  unsure (1)..(2069): unsure at all n locations
tcgcccccacctgaacttcggctacaatgaacgtgccttcaaccctgcggccgcaaacaaccgcgcgtatcccaccacgccctccgcatttcctcagccgatctaccagagccagagcccccaggactacatggacgctcagaatggtgtttatggtcagggatatttcatgccgaacaactaccctgcgcaggctgcctatgcccagccccattacggccaacccaatctccagtctcctcagcccgcctatcagtctcgaatgggatacaatgtcagccccaacgatggaacaaatggtttgatacagcagttctcgaatcaggatttaaactcgaaccgaacgggtttcttcaanntgtcccgttcgcctgctcaaagaccccgtactgcaggcaatacagcccccggacagcagcagcaacctggacacttggcccctccagtgcctccgagccctcggctgccccccgagaacgaagaacttcaacgctacccagagcgcttctctgaaaatgttcacaaacgtggaaaagctgcgaaggagttggtcaacgtattctttcacgagaatatcgagcgtgcgcgtgatcgcaacatgcggtgggtttttgctactgagcgccgtatttctctaaaaagaattttgctaactggagttataactgtacagttcggcggagctcgacaagatgatgcgcgaccccaacatttcacaagatgcaaaggtgaaggaggcggaaatggttggaaagaaagagtcgacattccttcgcttccttcggacaccagaaactcctgccaacttccaaaccatcaagattattggaaagggtgcttttggtgaagttaagctggtgcagaggaagtctgataacaagatctatgcgcttaagtcgctgatcaaatcagagatgtttaagaaagatcagctcgcccacgttcgtgctgaacgtgatattctagctgactcgaaggacaacccttggcttgtcaagctccatgcttcattccaggatcccgcatacctatacctcctgatggagttcttacctggaggtgatttgatgaccatgcttattaagtacgaaatattctctgaagatatcacacgcttctacatggcggaaattgtgatggcgattgaggcggttcacaagctgggtttccttcaccggtgagaataacaatcctggtctctcgtaccatatacagcgtgctaatatacttgtactatagagatattaaacctgacaacatccttctcgatcgtggcggtcacgtcaagctgaccgatttcggtctctcaactggaggcaagaaaactcacgacaactcatactatcagaacctgttgaagaattcaacatccaaggataagaaccgaaactctggatacttcaacgatgctatcaacttgacagtatcgaaccgtgggcagatcaacacctggagaaaatctcgcagggctatggcttactccactgtcggaacacctgactacattgcacccgaaatttttaatggtcaaggatacacctatctttgcgactggtggtccgtcggtgccatcatgtttgaatgtctcgtgggctggcctccattctgcgccgaggatacgaccgacacctatcgcaagattgtgaactggagggaatgcctatatttccccgaagaattgacactgtctcgtgaatcggagggtctgattcgaaggtatgttatgtcagcaatccatttgagctgcttgtctaaccggagatcagcttcctatgtgacgcagaacaccgcatcggcaacgaaggtggccaatacggaggtgctacacagatcaaaaatcacccattcttccgcggggtagtatgggatcaactgcgcaaaatccgggcaccgttcgaacccagactgacgtcaaatatcgacgtatcatatttcccgattgacgagattcctcaggaggataccagcgccattcaccgcgcccaggcacgtgccatgccggatgagcagaatgctgagatgagcctgccttttatcggatacacatacaaagcattcaacgccttcca

SEQ ID NO: 20210 - DNA, 2080 bp, Emericella nidulans
tgccaaagagtgagagtgggaaagtgttgaagaaggatttgaaggccatgaactaaacccatcccgtaggaggaatatctatactttttaatcttaattgggtagatacatgctcactaaatgaatgataaagattatatctaaggactgcctgtcgtgctctatggtacagcttttatggagccagcgtagcctagtggaatgctgaactggttaacttcggctagctcagaatctccgccgatagcggttgttcactgttcgtagtttacatagtgctaagagtatatgtcaagtagatgagagcacgatatggacttacctgtttgctagtggactaggttatctacctccaagtgatgtttgcagggtcgctttgatgcacatacaggtccatttcctaaggtcaatgccctatgctcgcaacatgcagtaagaatatatctatccaaaagatgacgagacgagcttgctcaaaggtaatcaccagccggggtccgaaattgcgcgtggtccggatggaaagcctagaaaggaaggatatttaacaaagaggggtaaaaattttggtggctggaaagcgcgctacttcgttttacatggtcccgaactcaagtatttcgaagccccaggaggcgctcatcttggaaccattaagatcgccaacgcacagatcgggaaacagtcgcaacaggcgcaaggtccttcgcgagccgacgacgatgattctgataatcaataccgtcatgccttccttattttggagcccaaaaagaaagactcttccgccctcgtgcgccatgtcttgtgcgctgaaagcgatgatgagagagatacgtgggttgaagcgctcttggaatatgttgaaggagctccagcaaatgatagcgctcaagcccagacggctcctaataatgcaacgaacacctcttcaaaaaacaagttgttctccaacggtagcaaaaaaggcaaagggacggacagcccagatattgagccatctgacaccgtccagggcttcagttttgaagatgctgttcccgccgaaccgcctgttattggctcttctgatccgcggacaccaagatcgccaatgttcccaacggtccctttccaagaaccaagcgacaacaaccagcccgaccatggccagctctcatcaaaagtgatatctgcacccactaatggcgcagtgatacaagacgctggcgcttggggaaataagacctcaagcactaaagagaagaagcgcagtatctggggatttcgtacaaggtcatccatcgatcttgcttcccatcttcaagctgtctccgagggtcctcctatccagcttcatggtacaggcaatgagaaaagggaattgataaaaccagtatttgggatgccgctggtagaagcagtgcgagattgcgcgccgtttgacgttgatgtcgaattacctgctgtggtttatcgctgcctcgaatatctcagagccaagaaggcggaattggaagaaggcatatttcgtttgagtggatcgaacgtcgttgtgaaggcgctgagggaacgattcaatactgaaggagatgtcgatttcctcgccggagaacaatattatgacgtacatgctgtggcctcacttttcaaacaataccttcgggagctaccatcgaccgtactcacgcgcgaactacatatagaattcttgcgtgtccttggtaagcacattatctgatactatgcaatgttgatgttcatactaattgtccgcttcagatatcaacgagaagcagaagaaagttgtcgccttcaactcattggttcgcagactcccgaagccaaatctggccttgctgcgagcattggttcaatttttgattgtcattgtcaacaattccgacgttaacaaaatgactgtcaggaatgtgggcattgtctttgctcctactcttaatataccagctcccgttttctcgttgttccttactgaatacgatgaaattttcaatgatgcgcaagaacctgccgtgaacacagtggatctggttgttgataatccgttgacaccagaagacattcggtctcctcggcgtca

SEQ ID NO: 20211 - DNA, 2081 bp, Emericella nidulans
cgctttctgaaatcagtgggttcatccagctgactaggagccaggttaaccaaaagatcctgttaatatatggccaaatcggggacccaaggcaacatccgctggacggtagtatagtggttaaccatcaccaagatagctttccccaggtctcctggcccgtcaattcgtcccatttcaaagccctcgtgcatcttgttccgggtccgaatcgtctccgtcttgactttgtctcaaccaagtcatcgtctggcaacctccatcatgctactcattcctcttggatcaacatcaactacctcccgttgactaactcgccgccgctacacctcgtgatactgctcggaaaggattcaaaagggacgtttgatgccgtgccggaaaaggcgaatcgcgagggtaatgatatagaaactgcgatcaagaagtaccgaatggctgcatacctttggcaggcattcaccggtgaacagatgttccgcaacaatcttggacgacggtgcttccgttttgaggaggaatggcagccgggcaccgtcagtaatcgagatgcagcgagtgggcaaatgcgaaacgaggcgaaaattcatattgttcggaccgaaaagactgtcgcagagctccgggacctgcagcttgcccagcaatatggcccggctacgaggaaggatgagcttttccgcatcgcccaagaggccgtgaagaaacatttccacctaaagccgggccagaaacagtacgtctccgtcttactcctagactcccattgggatacagagtcgcaaaccattaccgggcatgccgccttgggctcgagcaatggcgacctgaaaatggcaatgttcgggtctcactgtcttcagagttatccgtcctgtctagaggaggtggttgatgcattctccgactgcacccgaacaaacacagattacgtcgccaacgattgcgggcaggctggttctagctgggaatctgcaaatattggtatcggcgcccatcttcacgaagtcggccaccttttcggctgccctcatcaggaatcgggcgtcatgctcagagactacgtccgccttaaccgctccttcgtgactcgagagccattctcgacccgaacaaagacacagggcctgcatccatgcctgccacaggacgaatgcacatggcatcgtctggatactttgcgcttccggttccacccttgcttccgtcttcctaatgatgctcctatgagctcagacgacagcgttcaagtctggcctgtggaaaacggcaggatcctgctgactgcgaccactgggattgcgtttattgaactgtacggtgaaggcgaccaggtgtgccatcatttccttgagtatctcaacacagaatcgaccagcaatgggcttccgaaacaagtcacagtgactgagagtgagctgcggcaacgagtgttcggtaccgacaaagaaaagaagaaacaggtcaaaatctctatattttccggtactctcggttcgtttaccgtcgagtccatcagcagcttgaagtccaaaaactcccaggtgaagctgcccaagggcgtcggttatcgaggatgtaaactggggatctctcaattagccgaaagccaaccggagcagcttctcctggactgtgctttccaatataagaaactcctaacttccattagagtctatcataatggcaagctgcatgggatggaattcttgtatgaggatgcgacgagccaattgtttgggaaccgggacggaatgtccgacgattttgtgctaggtaagtctgtacctgacccagtatctgcgtaccacgggcgtctaatatgtggttgcagacacgcgacgcggagaaatactcctaggcttttatgtccgagcaggacactggatcgacggtattgagatattgaccagcttaggcagaaaatctgggctctttggcaatgccagcggaggctcagggtatgtgttaagccttttttttactcaagagacttcgtgctgacaatcgtcctaggtacaacttaattcctcccttgggctataagattgccggtcttacaggaagctgcggagcttgga

SEQ ID NO: 20212 - DNA, 2082 bp, Emericella nidulans
cagggcagcacatggggaagatcgtagtccggatgccggataatatcagcgagcttccaacgagggatacgcgcgctcatatttccttctccccagacaccgcgtatctgctatgcggtggtctgggtggattgggccgtgcactctcgaactggatggtagagaggggcgctcgttgtttgctatacctctcacccagtgccggtgtaggtgacgaccatcaggagtttgcagaagaactggaatgtcaaggctgcgaagtagtctatgtcaaaggcaccgcctcagacgcatctgacgtgtcgagggcaatatcccaaagcccaaagccgattaagggcgttgtccagcttgcattaacgctaaaggtatacaggtcacacctttcgcttgagcatattcagtgctaaccctacttcataggacgcaagcctgcaacgaatgacatttgaagactggacaacccccttgacagccaaagtccacggcacctggaatttgcaccaagccttccaggatacaccccttgacttcttcctcatgttcgggtccatcgcaggcatcaccggaatggccggacagtgcaattactcagccgcaaacagcttcattcacgccctttctcgttatcgccattctcttaatgaaccggcgtcagttctagacctaggcccggtcgcagatataggctacgtaagccgtaacccggagctcatgaagaccttcagcggccgctatgaatggcgcttcattaaggagcaggaggtcctcgacgcggttgaggcattaatccaccactcaaccttcccaaataccacaccgttcacacaggggaacagatacgaccccaaccatatcatccttggtctgatccccatagctccctggggccgacgacggggcgacacccggtttgcaattctctcaaatgtagctcaacgagatcaaagcggtgcggccgaagcagacgacatcgttgacttcatggcgcaggtcgagtcagaccctgagatgctgaaccgtccttcaacagaagaattcctgatcctcaaggttgggaccatgataaaatcgcctagcgcaaaaacaaggacgaaggacagcatagcggccaagcatgacctgcaagtattggcgaatattcagatcgactcgctgatcgcaattgaggcaagggcatgggcgaggaggagactgggtgtacagattagtctgtctgaaatcacggcagcgggaaatgtgaagggcttggtcggactggcgatccaagagatgaaaaagaggtattctattgcttgatttgagtttctctggttgtaaagttgtacgttgttggattggcagactgacagactgattgtgttttttgcccattgtttgaatatctaatttacgagtctccctaatgcggtttatgtcactactcctatccttgcaccgtatatcactcctaagcgaagtcggaggagtttaattacgagaataatggctcccaatcccaaaaaggcgaagctgcatcttgaccactagtagaagtctgccgattacgacgtcgaaagaagatacaattcatgaaattcatggggctagtcttgctttctactgcatgcagaaggtcacaggtaccttgctgaaaatttgcctagccaatttcacccaaaatagggcattggggtcatagcatggtcgatctctctctgagcagatggccgtaccacttgacaccataccaccataaccagcagggaagcataaggtgtgaaggaaccttagagccgttgctacttcgctaaatgatcgtcaatactcggagcacttgagttggggctgaacggctggaggggagtatcttttgttcgaagctggtggtcaatgaagtttgcgtgttcgtgcacgcgccaggtgggttttcgtgatgcttgaaccaggatatctaatcctcatttcttagaagaccgtccttattgcagaaccgtggctggggcttttcgatagagtttttggcgtacagggagacttagggttagtgcgatgccacagcgtaccaaggtctaccacgaggtggaatcttgaagacaaaaa

SEQ ID NO: 20213 - DNA, 2084 bp, Emericella nidulans
gaagaggaggagctggatgaggcggtatagagctagtctgtatcctctaactgggtcgcctcaggctaacttgtgaggccagggttttaaatcagtgagagatgctgtcctttttgccattgaagttagcgattcgatgcttcagccccgtccgtctgcagacccaaaagacagagttatgagtcgcccgccacggctgcgttgaagtgcgcataccatcttatgcagcagaggattatctccaacccccgggacatgataggagtactgctatatggaacaaaacaatctaaattctatgacgaggacgagaatagtcgcggtgacttaacataccctaattgttacctcttcacggatcttaatatcccctcagcgcacgaggttctggaacttcggtcgctggttcaggatgaagaaaatgcgaagaaaatactcgaaccgtcaaatgagcctgtttctatggccaatctactgttctgtgtcaatcagatattcaccttaaaagcgcccaacttcttatcgcgacgactgttcatagttactgataacgacaaccctcacggagacaacaaatctttccgttctgcggcaactgtgagagcgaaagatttgtacgatcttggcgttacaattgagctgtttccaatctctcagatagagcatgaatttgacacctccaaattctatgacgtgagtacagttcctgcacgttcggagcactaaaactcacaacggataggatattatatacaaagcctcgcccaacgaccctgacgcccctgcctatctaaaacctgatgcgaagatgaatgatgcccaagatggtatctcattactcaacggtctcctgtcaagcatcaactctagatctgtgccgcgccgtgcgcagttctcaaacatgtccctcgagctcggaccaaacttcaaaatctcagtatcgggttatattctcttcaaacgtcaagagtcggcgagaagttgttatgtgtggctcggcggagaaaaaccacagattgcaaagggggttactacacagattgcggatgattcggctaggacaattgagaaatgggagattaaaaaggcatacaaattcggcggggaccaggtttgcttcacccctgaagaacaaaagtcattgaaagactttggcgaaccggtaatccgaattattggcttcaagcccttgtctacccttcctttctgggccaacatcaaacacccgttatttatttacccaacagaggaagactatgtgggttccacacgagtattctcggctttgtatcagaagctcttgagagatcagaaagttgcgcttgtctggtacattgcacgcaaagctgctagtccagttcttggtgcaatgatggctggtgaggagaaggttgacgagaatggcattcagaaaatacccccgggcatgtggattataccgctcccctttgcggatgatgttcgacagaaccctgaaaccgcccttcaggttgcgccagagccacttatcgatcagatgcgaacagtcatccagcagttgcaacttccaaagggcgtctatgaccctcagaaatatccgaatccatgtacgtgctgaatcaaagtcagaccgttcgcgaccctactaatcaccaaatagcacttcaatggcattaccgcatcctacaagcgctggcgctggacgaagatgtccctgagaagcccgatgataaaacaatacctaaatatcgacaaatcgacaaggtgagctttcttacccaacatattgatcatataagaactaacacttttttcagcgcgctggcggctacgtcttggactgggctgatgaattagaaaagcaatacgcgaagataaccgccgatcaacccaagagtaccacgcttgcgaaacgacctgcaaaagcagataacccagataaagccgctccgccggcgaagaaagtcaaggctgaagctgggtctggcaacatacaggatgaagtccagaaacattttgagcagcacacattgtccaagctcactgtggctaccctcagagatttccttgcatctcagggccgtgccactgcgggtaaaaaggca

SEQ ID NO: 20214 - DNA, 2084 bp, Emericella nidulans
caaaatgccatcagtatacacccatattacactcgatatcaccgaccagattggagtcatcaaggtacgttacaccaccccaggcgcgtagtcgcattctaacacaagagcactccagctaaacagaccgtcggtcttgaattcctggaacgaggccatgctcggggagatgatctctgcgttccgcgagctagatcagcatgaacgaacagtgtttactgtgctgaccggcgaagggaggttcttttccgctggggctgatattcgacgtatgtgcacagttgccggctattttcaaaataacgaaaggcttaacctgaagtagaagacattccaaaagcaccggaaaatgcaaccgccgcagagaagaaactgttctatatgcgcaagttctcacgcggtatgtgtatgcatacccttaaccctatcaaccagaagccgtacactaaccactgtacggtgtaagaaattgagctcttccgctctctcatagaccacaccaagatcctcgtcttagcactcaacggccctggcgtcggcggtggtgcagcctggttcactgggctagcagatattatcctcgccgtctctggcgcatacctgcaagttccgttcaacagccttggactggtaccagagttcggtgcagcgcagacctttgcacagagcattggtgtgcgccgcgcaaatgatcttcttatatttgggcggaagtgttctgtcgaggagctggaaaactggggacttatcaacagggtttttcccgcacagggattcgtggatcaagtgttggcttatttacagggacaattagaggctaatgatgggggaagtatgcttgagacgaagaggttgacgaatggtcctttgagggccgaacgaatgctgggaatgattgatgcggcgaatgcgctggcggagaggtttgtggaaggggttccatttgagaggtttgcaaggagaaatgaagaactaaagatgggtatgtccttttcttcttcttccccgtcttctcagatctgaatatgtgctgaaattgtgatagcgagaaaggcccgcagcggcaaggagaaggcgtctctttgacgggcccgatagggtcaaagacagcttacactacgcggggggcagcattaatgcagggtcactatattacgtaacggataaaaatgctggacttagttgacacgtttacgcgtggcaggttgccctgtcactgaagttacctgatccaacactgacttgcagaacctgttaagtatcttggctttataaggtctatagatccagagctgcagactcttgatcgtacggccataatttctgatcctgcttggctcgtaagacctggactcaatagatgattctgtttttttaccctaaattccggatgtggacgaaatccatattgtacctcaatggcacgtagcttggagttgcttgtcaacagtcatatataacgtttctgcacacgatatgcatgacttagaaactctaaagcatcttccatgcctgtaatctgcacgcggatgatccatcaaaagagagactgtgctttcagtactcatgatctgcaaataaatgtcttctagatacacccaccgcctagtctgacacaacgctccatgtcaaacgatagtgttgagttcaagctgacgcaacatggcctcaacatcagccgcagtccacctttcaccgtattcaaaagtagttttttgcgtggcccgatcaaggccttttggctcgtaatcgtttttctctttcctggaggatgtgaacgcgtccagaagtgggcgcctattttcaccgtaaagccgtctgctcttctccaattcctctacttccattaacagcgcacaggccgaaacaacctggaaactttcgagccgatcccatccctgccgtcgatgaccgagacctttttccgtctcaccagcaacatggaagcaagctagacaacgctgcaatgaatcgtattcacttacgtaacctgttatgaggcctgaagggcgcatttgcgataatatgaaggaagctattctctcgaattcatcattgagtttgatagaccgttcgcgctgtcg

SEQ ID NO: 20215 - DNA, 2084 bp, Emericella nidulans
gcggtcgggccggtctaatcagcacaaagtacatgaagaaccggaaattcaacaagggtctgaagaacctagctatctgggggtattttgagaatgcgggaagctacggagaaggaacacctgctgtgggaggtcctttctttcctcgccttgaaggtaagaagattctgcagctttcttcatcaggtctgggttgagtccaactgacaacttcaaagatgggagcggctgggcctggttcattcctctccacaatggaaccacctctgtcggaatcgtgatggagcagagtagttttacgactaagaaaaaggccatgacgaatccgagcactcgtggctttctcatcgagcacataaaatacgccccaggaatttcagatttactctcaaaagcgactctcgtttccgaagtcaaatccgcaacggattggtcctacagcgcttcgacttatgctgctccttatattcggattgtcggagacgctgggtgcttcattgacccactgttttcgtctggcgtgcatcttgcgcttacgggcgctctatccgctgcagcgagtatctgtgctgtgctcaggggggactgtgatgaggatattgctgccggatggacagccagaagatccgcgagacttacacgaggtttttgctagttgttacaagtgcgtatgcgcagatccgtgggcaagagcggcctgtgctaaatgagtatgacgagaagactttcgatcgggcattcagtttcttccggcctagtgagtagccacttacctctccatatgtgagtttcggccgactgattctctccagtcatccagggaaccgttgaagttggaggtacgaggttgacgagagaagaggtcgctcagtcagtaggcttttgcatgcaggttattcgcaaggtcaatggagcaattgacggtgaaacgcccgatgtggaagaccagtacggtgagcagacctgtgatcggatcaagaaggccgagctcaaggctggtctggataagtttagcgcagatgctgtgctgggaatgacggtgaatctgcagcggggcgctctagggctggtgaaggtcggctaagtgatttgagagatgccttgctgcttggttagcatgctgggtagttgatcgtagaaaggtgttcatgacgtagatatgggcggttttctctgacagttcccattcagcgtctaatatgttcgttacaaaatctaatcattggggaggtctactttgaagagctgaaacggttcaactcatactaccaaagataggttttgttttatgtatgtactggacttttcttgagaatgggtcctgtgtgtagtacttcctcgacgtcttcctgaaccctgaatcagggctctatgccaccctaccagggtagcactgtcgagactcgatcaatgctggccaatacaaagattccagtccttcaattgggacatcaagtagccctttgcttaaagtagcagacctgagccatctagttcctctgctatccacagggcatagcggagctcaagacgatgtcaagcatctcactaccccataagaccgaatattgaggaatcaacatcgaacccaaatcgggctagacctgttccagccactgcacgatcaattgcgtaagcctaagaatactcactagaggcttagtgtctgctgcgcaaactgtacttattcggataccgcccacctgttctactgcgttacgtgatattttcttggagacagatgtcgtcatgctattaatccttattattatccaaactgatggtgtgtcagtgctctggattactgtatcgcagctgtaatcagtgtggctggcggctgtaatcaaaatcaaacagcgatcttgataagagccctaagccacacccataaacagaaacggacctgctccatgccttagctcacgcacccaatgctagcactactgcacgctctgtggcgccatgcaactagtctcgagatggttggacgagcaagcatttcagcgtaaggcttcgacttgggcccagtcctagcgctaaacgcgaacaggggtacagacagggattccgcactgcctcgccag

SEQ ID NO: 20216 - DNA, 2085 bp, Emericella nidulans
ccgcgcggagtcaaggattctaccctatgaaggaggtgctaagagcgctgggtgattacaacatctgcacggtgcaagccttggggtcgatgttgtcagatatgatgacgatcacagaatcaactacgttatcgccaagtcatgcagaggagtttagcgtcttattacctcagatgagggagaagaaggtaaaaagaggggtaaggtcttgatacaagcatatatagaactaattggtcgcttcctgtgatgttgtgctatagagttcttgggaaggctatctagcatatcagataattgcaccatgtcgactacactcaccaaagaagaaaccacccccgccgtcgtcagggcttttgacgatacggcacacagtgaggtaatatatggattgccgatctatctgtctatcacctcgttactgaaggatagctgcagtatgcatactccgcgtacctccccgtctacgacactaccacaactttcccacccaccgaacctttcgaccaccaagatcggggtctaagtgcagacaaatccaagccgcacctctttcaaaccggggacccaagcgtgtccatcacgaagctaacaccccgtgttggctccgaagtacgtggcctccagctctcgcagctctcagacgtccagaaagacgaactcgccctccttattgcagagagaggcgtcgtggtctttcgagaccaagactttaaggatattggacccgggaagcaaaaggagtttgctggttattttggaaggttgcatgtgcacgtacgtcctcacctctctatcttcggcactacttcatcagattgaatatggctaacgaaagtggatgatgacagcccgtcggtgcacacgtcaaagatcatatcgagttccacaacatctatctcggcgctgacaacctctaccgtctgcagacgcggtcaacaaagctcaccacaacgggataccactcggacgtgtcctacgagcaccagccccctggcgtgacattgttgactctactcagcgtgccatcttcaggtggtgatacagcctgggtatcccaggttgcggcgtatgagcgattgtccgatccgatcaagaaactgcttgaggggctgcgggctgaacatagtggattcccgcaggcagagagggcaagggctgacgggaagtttgtgagacgcgagccagtgaagtcggaacatccggtcgttcgggtccacccggtatgcctatagtcctattcatacacgtggaatagaagaggagaggggctgacgattgttgtaggtcaccggcgagaaagcgctcttcgtcaactccggcttcacgaagaggattattggcttgaaggatgaggaatcggatgcaatcctgcagctattattcaaggtttgcccttctgcccctttataccaagtattactttttttaggagactttgaaggctgatacaaatgtatgtagcacatctctctctcccaagacattcaagtccgcgtcaagtgggacgacaggactgtctcgctgtgggataatcgggtcactgcgcatacggccatctcggactatgacacctcaactgatggcctacgacatggaattagattgactacattaggagagaagccagttgggctagatggtttggagacagtgtggtagttgcacttagggtttgctcattgggaagtcaatatttcaatatttctagtcgtgtatagcctcgtacaaattttgtgaacataaacttgaacttagacaatgtctaggattacaatgttgcgaagctcataatgggatcagcattcctattttcaagccctaactgctattgctgggcatcacttcccctgtgtatcaacaaccacattgacgctctcttccgtctgactcccaacgctcccctcagactcgactgcgccacccctatatcacataattagcctagtcccatctcatcgtttcatttagcaagggtatgcaacatacctcctcgtctttcgattctccctcgtctgcaagctgcgtattgagagcgtgaaaattatcaggaggacactcatcaccgtccccgtaatgaacccc

SEQ ID NO: 20217 - DNA, 2091 bp, Emericella nidulans
tgccccgagttcgcgttagttcaagccaaaattgccatgagaaggaaggtcggctcctactagctgtacaggctataaaaaaaaggagattatattaatacgcgaggcagcacatcactttaatatgcctgaatctatactacatacgcgacaacgcgggactacaaatcgcgcggaatctcgcgcaaatagccataaattgactgagattaaagaggaagtacttaagcagtagattctttctttagatctatgcagagcagctcctacaaaagctcatgtataagaaatggctaatattctgcttgcaaagcatggttccaccccaatccagactgtcggccagaaataggtatataattaaactcaacgccacctggagcttgagtcttgcttgttaaggcaatacaactgccagcaagcaaagcaagagaacccaaaggttatttaagcatggtttaatactatacaagccacaattgaacaatacaggatcctaccagatgatatctacaactttgataagactggctttgcaatgggcctttgtgcacatcagaaagtgattaccaagtcagaattatgtggccaaagaccagttctacagccaggaaactgtgaataggttactgcaattaagtcaatcagtacttctagataggtacttctactaatacttatctttaagggcaagtagtataaccaagcatggtttacaggccttctgcctgactggtgatttgaaattagtacaaatagatagacaactaattagacttgttaaaccacgggttggggcgggttttcaggcctagctgatccgcctatgtgggttttggggtgggttaccttcacagtaaaccgcccatgggtttagcaaataattctaacccaacctaaataacccaaaataacctagttatgcatatcattactctaataagcagtgatctacatagttaataaaatactgtatttaaatactgtattataactatctaagtaagaaaatataatctaaatatagtaatatacctattcagatatcttggcaacccagcgggttgctccgccgggctttggggcagccaaaaatatccaaaacccaatagataattagaaggtctaacccaacccatttcttggcaggttggggcgggttggggcgggttttgtgggttgggtttaacaagtctacaactaataaaactagcctttgctggctttagaagcagtttatcctgtcaacagagcattgtatatatagaagatatcaacttctagttcttgatagccatggaagccattatacaccagaatttaatcaaatctatacagatcataatattatactactctgcatgccagcatattcctcctatcttgtacaactacttgatattggatattttgcagttttgaagtacttgtatgccagcttggttttcagaaaatatagcttggtatcagctatattaacaaacttgatttccttgcagcctatctacaagctcgaatcagcatatttaagctggatacaatcagaaatagttttcgagcagcaggactagtgccattgaatcctgaaccagtactttcaaagcttagtattcaggcttgtatacctacaccccctggaagccgtgcagccaggcaagtacgttttgcctacatacaccagcaaatgttggtgagcttctacagcaagcttctttactcagagattttctcaaacagcactcaaaaagtccaccatcaccgccccataatagcctaaaccagctaattaaaggctgtcaaatggcaatgcaaaagggcatactattggagcaagagaatagggcactacgtgctgaaaatgctatacaaaggcaaaagcgagctcgtacacatagatggatagctcatgataatggtctgtctgtacaagaggctacagagctcgaggaagctcataatgcgtcttttcaggcaatacctggtccatgcgggcaaccagcagagggtgcacaaacaccaaaggcgcgggcattacctacatgtagtacctgccatagaattgggcatagaagaaatgcttgtccaaataaa

SEQ ID NO: 20218 - DNA, 2103 bp, Emericella nidulans
gcagggggtgcccatccaacgccagcgccgaacgagggagatgcgcccacggtggccgagctccaacatggttcaaatgaccgggtcgacgacggcacaagtggctctggtactgtatcaggctggaaactcgccgctgttctcattggattatcactggcggtgttctgcatgtccctagtacgtcctggaaccaaccacattctccgcatcaaggatgtactctaacagatcaatgtccaggacagcacagtgctatcaactgcaatccccaagatcactgctgaattcaactcgctacacgacatggcctggtacgtgagtgcatacaacctgacgataagcagcttcagcctcgtctacggcaagatctacagcttgtacagagtgaaatgggtatacctgacaacgctatttttgtttgaagccggctcactagtctgcggcgccgcacccagttcccttgccctcatcatcggccgcgccattgccggcgttggtggcgcaggggtattcctcggctccatgcttattgtccacgaaatcatgccgctccatcaagtgccactgtttatcgcccttattagcggtctgtacggtatcgctagcgtcgtgggtccccttcttggtggcgtattcaccgactacgtcagctggcgctggtgcttctatatcaatttgcccattggagggttgacagcgtttatcattgttctgttcgtcaggccgcgggtccgcgaaaaggctacagtaaagaaaaccccctgggcgcagttgcttgatcttgatcccctcggtattattctcatccttcccgccgtcatgtgcatgttgctcgtacttcaatggggtggggcaaaatacgcctggagcaactggcgcatcatcgtgcttttggtcatggcgggctctctggcgttgacctttactgctgtgcaactgtggcagggcgagagggctacgattccgccacgaatagtccggaatcgcagtgtctggggtgcaatagccttttcggtttgcatttacggctccttcacggtctttacgtattatgtgagaacacccccttgctactgaatccggatgctaacatggatatgtgcttgccagctccccatttggttccaggccatcaaatctgtctccgcaacgcgctcgggggtgatgaatcttcccatgatcctcggcgtagttgtatgttcgatgctctctggctggggcgtcagccgggttggctactacgtgccgtttatgtacatggcaccggtggtcggatctattggcgcgggactgctcacgacactgcacgtcttttccggaccggctgcctggatcacataccagctgttattgggcgtcggcatcggatccggcatggcgctcccccttgtcgctgtacagactgctctccctaccgacgacgtctcgacgcgtccgccatcatcacatttactcagtctctttcgggcgcgttatttaactttgtggcccaaagtgtcttccagagtcgccttgtgcataacctgaatgcggcgcttccaggagtggatacggcgagggtggctgatgtttctccgagggagatacgcaatgcaattgagcccgagtacctccctcaaactctggaagcatacagtctagcaattacacaggtgttttatgccggcactgcgctatgcaccctagcactgtttggggtgctgccgatcaagtgcctgtccgtcaagggatcgagaatcccgcccatggcgcatgcttgaacaagggctatatggactttgagacttgtctcgtggctttttcgttgctggtattgttttctatgctcttgcatatccatcttgtacaatatgtaatgatctccattttaggtggcacattggcattcagagtgccagaatacacgttatcaataatgatataggaatacaaggccacgttatctctggtggcttgactatacatcgcgtagttctagaaggtatagtggggggaaagaaaggacgacaggatgaagaatacagggaggaggaagagatctatcgtcaacaaggcagagaatcgatcgtcatatggcgtccgattcttagtaggctacgt

SEQ ID NO: 20219 - DNA, 2107 bp, Emericella nidulans
ggttgcggagaagctggcacagaatgaggagtacgcggctaaggagcttgagcggttgaagaaggtgctttctaagggtggctctgccccggagaagctggacgatatggtctcgcgcagcaatgtattgcgtaaattcttggaagtggaggagaaggtggaggacgtcgtgaaggacgagctctagattatccgactctgggctaatctgtatatggaatgggttgatgtataggtacttgccactgcagatgcagtcttcaggaaaacgtattagattcctcactgaccatcgatgaaagaatgaacattatatgattgacgtcttccaaattctcattgcgcggactcacagcagtacgggtaatcaaggatagggtatctctcagtaaaaataacaatctccgcagcagaaacagcaggcatatgtatatatacacatcacttcgcggcaggagtcgtcgccgtggctgcccctgtcgccgcgtcctctgcagccctcagtgaagcctccagttcatcaagccgtcttgccatgtcgtcaactgccatgaaattcaattgaagtcagatatagccaacccgcaaactggcagaataggacaactcacacttcccaaacatttcccgagacacggtatcgaatttatgctgcaactggtcgagcagttcatctacggctgccgtgaattggccttgaacgtctgtactctgtagttgggcgaggtatcagtctgatcagctccatacgtagcatgtcagagaacttcaaaccggttgttgagttggggctgaaggagagagatctgttgtccccgtaggtgtagaatcttggtttgcagacattgattcggggttgcggccggcagttaatgttactgtagataggggatctcgcacgattaagacctggaatatactgaacagcgtgcaatacctagtgcagctccagggaccgctccgttatcgataaagctgccggaggaataatcttccttgaatcaccataccgcatcggtgctagttcatgtgcagctcaaaaaaattagtggattgatacttcggctctcatacaaacatacaatcaagcgccgccttactctattttgcgcctttaggaattaggttgaaaatgccgaaaagaagtaaattgctccaggctctcgatgagcacaagggaagggactatgacgccgagaagcagaagaagttactcaaggcctgcaaaaagaggaagggcttgaccgggaaggaagaagagaaggtttgttgttctcccacattttaggatttaaatcttcgagtagttgctgattaaattatcagttaaaggaggagtcggtcaaagacaagaagactgaggaatctgcatctgaatctgaggaggaagaggacaaggaagagagcacaaacgccgccgagggcgaaacctcacaaaatgacgctgctgatgacgccgaagacgatgaagaggctgaggacgaagatgaagaggaggaagaggaagaagacatccctctctcagacctttctgacgacgaacgcgaagacgtaatcccgcaccaacgcctcacaatcaacaactcgaccgccatcctcgcctcaacaaaacgcatctctttcattagccatttaacgcccttctccgaacacaactctttgatcagcaaggctgaagacgagatggatattccagacgcgaacgacgacttgaatcgcgagctgtcgttctacaagactgcgcagacagcggcctacacggcgcggaaactcctgaaaaaggagggtgtcccgttcacaaggcctggcgattactttgcagaaatggtcaagagcgacgagcatatgggcaagattaagaagaagctttatgatgaggccgcaagcaagaaggctgctgcggaggcaaggaagcagcgcgatttgaagaagttcggaaagcaggtgcaggttgctaaattgcagcagcgcgctaaggaaaagaaggaggccattgagaggattaatgatttgaagaagagtgcgtcctacgttcttaggattcttaagatggctgtgctaatgacttccacagagcgaaagaatgatacatccggccaagacggcg

SEQ ID NO: 20220 - DNA, 2109 bp, Emericella nidulans
cgctgtggcgacataaacaccaaatcctatctgctgctctcaactggttcaaacatccgccccggtaagatccccacctcccagaatagggcttctatctggaccatgctgaacgaatcagatggtcctttggaggtaatcggctgcagttaaaggcggaagataaaattctcagcgatgttgtaaccgctttgacaaaagtgtctggtgtgggttgcaacacccgatggccttacacttcacttcaggcgcaacaagatcttctccaagttcttttggaaaacgagaggacaaggctcagggtttggttgtatccgctggaacctgaccgaaagcataaccctactcaattcagcaagcatctcacggagggtggtttctttcccttccccttcgtagccacgttctaagaattcctctaggagaatatgctgccggctgcttgggctgagagcccaggtttagcaatccagcttgcgacacgtttcccgtctggaaagctcagcaatgaaatccggagactacttcttagctttcctgagaaggccattgatgagcctagtagtcttgagattatgtttggatcagcgctaccagccgacgtttcctctcaacttaaggttagtcatatggatacctcctgggtgtttgaactgacaaccataagtatctgctgtactgggcccccgtcaatcctatcgaaggcttaacttatttcctgccccgtacggcaaccatccgttcatcttgcaatatgcgatgaaggccttggagagtcattcccttgacgttcgattctacttcgtcccacagcttgttcaggctctccgatatgatgccctaggttatgtcgagcggtacatcctcgaaacggcgaagcagtctcaattgtttgcacatcaagtgatttggaacatgaaggcgaattcctataaagatgaggattctcagatagtaagtgacaacagcaactaatgacggaaatagactgacacgaacagccggaccccctcaagccaaccctggatcgattcatggacaccttgattacaagtttcagtgacgatgagcgcgacttctatcaaagagaattctctttcttcaacgagattactggtatctctggaaaacttcgcccatacatcaagaagagcaagcctgaaaagaaggaaaagattgaggaagagcttcgtaaaatcaaagttgaagttggcgtttatcttcccagcaacccagacggcgttgtggttggaatcgatcgcaagtcagggaagcctctacaaagccacgcaaaggcgccttatttggcaactttcagaattcagaagacgcgaaccacaagcctgccatcgaacgagctggtccaatcctcgcatcatcatcaatcggacgcgcaccaggaaacctacgaggtctggcagtcggccatctttaaagtcggagacgactgccgtcaagatatgctagctttgcaaatgatagccgccttccgaagtatatttgccagcattggtctcgacgtctgggtattcccataccgggtgacttcaacagcaccaggatgtggggtcattgatgtgctgccaaactctatttcacgggatatgctgggccgcgaagcagtcaacgggctatatgactactttgtttccaagtatgggggagaagattcaatccagttccaggaagcccgaacaaacttcgtcaaaagcatggccgcgtattctgtcatttcctacttgatgcagttcaaggatcggcacaatggcaacatcatgtttgatgatgctggccacattattcatatcgatttcgggttctgctttgatatcgcgcccggcggtgtacgcttcgaacgtgcgccattcaaactcacatcggaaatggtggccgtgatgagtggcactccacattcctctagcagtggaagtcacaatcccacacagactcagccatatcgatggttcgagtctttggtcgtaaaggcgtttttagcgtctaggccgtatagcaccaaactgtcgcacattgtgtcgttgatgttagacagcggcctaccatgcttcaaacctgagacgctgaaacacttccgtgatcgattcgtcctcg

SEQ ID NO: 20221 - DNA, 2113 bp, Emericella nidulans
ttacactttgttggaaaatatttaggctgcgttgctgatgttttcgcagtacctctaaagcatttgtgaagaagaaggctgctcttaccctccttcgcttatatcgaaaatatcctagcattgtgcagaatcagtgggcggagcgcataatatctttgatggacgatccagacatgggcgttacactctcagttacgtcgttggtcatggccctggcacaagataggccagaggaataccgagggagctatgtcaaagctgcccaacgcttaaagaggatcgtcgttgataacgacattgcgccggactatctttactatcgagtaccctgcccgtggcttcaggttaaactgctacggctgttacagtattatcctccatcgggtaaatcaacttctttcgcgccttgatgatgcgagctaatgcaacgcaggggatagccatgtccgtgatattattcgtgaatcactgcagcagataatgcagattgcgatggacacgccgaagaacgtgcagcagaacaatgcccagaatgctgtgctctttgaggcgatcaatctcctcatccaccttgacactgaacacaccctgatgatgcaaatctcctcgcgacttgggaaatatatccaatcccgcgagacaaacgtacgctatcttgggctagaagctatgacgcactttgcagccagggccgaaacccttgatccgatcaagaagcatcaaaacattatcctgggttcactacgagacagggatatcagcgtgcgtcgaaaaggtcttgacctggtctacagcatgtgcgacagcacaaacgccgcgcctattgtgaacgaactgatgcgataccttcagtccgctgactatgcgatacgtgaagaaatggtcctgaaagtcgctattcttactgagaagtatgccactgatgcccagtggtatatcgatgtcacgctgaagctgttgtctcttgctggtgaccatgttaacgacgaagtatggcagcgagtgattcaaatcgtgacgaacaacgaggaactgcaggcgtacgccgcccagacgcttcttacctatttgaagagtgactgtcacgagagtctggtcaagattggctgttatgttcttggagaattcggacatctaatagctgataatcaaggctcaagcccgatcgaacaattcctcgccctgcaagctaaaatgatgacgagtacagacaacacacgtgccatgatactgtcttcctttgtcaaattcgtcaacctgttcccggaaatcaaaccacagcttctacacatcttccgactgtatagccactcaccagatccagaactacagcaacgcgcattcgaatatctgtcgctggcgacacttccaactgacgatcttctgcgaacggtatgtgatgaaatgcctccgttctctgagagagcttcgatattattgtctcgtctccatcagaagacggccggcacaacggataaaaagacctgggttgtgggaggcaaggacgcgaattcggacggagcggaaattttgatggcacaaaacacaggtctcaagcggtcattcactacgattgttcacggtacatcaacaggaaccaacggaactgctacttcaagcgcgacaggcgacttggccggactagacctgagtgcgccgacaccaccgccaccttctacgaacatggctagcgcggcaaacctgtctcccgattgggaaattggatacaacaggctgtacttctcggacgaaggcgtactgtttcaggatgcacaaatccaagtcggcttgcggtcggaattccggggtcatttgggtgtgctgaagctctacataagcaacagatcttctttccccatcggatcgctgacgacgactgtgacaacccatccgccccgcatctcaggatcgattcgaagagccttccggagccttcagttccggcgtctggtcaaacacagcagaccctgttcttcgaggccaaagggccgttctctaaggcgcctacaatccgtatttcgtatcttgcaggcgcattgcaggcttacacattgcaactcccgatcctgatgcatcgctacttagagccctccactctcacgcctgaagattt

SEQ ID NO: 20222 - DNA, 2114 bp, Emericella nidulans
actatgcagtacactccatttgcctcagatatagagctgccgttctatattgccctggcttctctcaagataaatcatgacaagctcgatgattccgcgcgcaaagttctgggcctgtacgagttacgcccgtcagacgctcccaacgcctcgtgcaggattcaaatacatgggaatgccctcactagcgacgagtgagcccaagaccctcttatagcatagtatctagacgtttgcctgacctagctactttacagagttccgtctacttattaccgagcggaaggcatgataaaaaatgttaatactattgaggagtacgcgaaggccgataaaatgggcatgctccaacagtctggagaaacggtcagtctagtggcggtcaaaaacgtcctcaccgtataataacgctgcggttctagatatggaatgctatcaacaacggcactatctactcatgtccatctctgctgtccgccttcgtcatcctctcttacgctgacctcaaaaaatacaagttccattactggttcgcattccctgcacttcactcagacccgtcttggaccccactggaggagggatgcgagggagcgcaagcacatcgacttcccagtgtagagagttctgcactcgcccgttcggtacaagagtgggctcgcgttgtagatgcgccgcaacgaggttttttcctagcacgaagggtaaggatgcgggatgatgatactgtctcctggaaaatcgcatccctgtcaagctacgaggacgggtttttcaaacacgcggaatttgcggattgctttacctgttttgtcgatccctcaaactatgaagaggcccctggctggatgctccgaaatctgctcgttctcgtgaagcgaagatggggacttacaaaggttcagatattacgctaccgggatggaccatccccgcgtgactgcgggcggagtattgtggtgactctacgactgaagacatcacagcttcccgatgggggggttaaggatgaccgtatgcctaaggtgacgggatgggagcgtaacccgtctggtaaactgacgggaagaattgttgatctcacggaacagctagatcccaagaggtacaattacaccggacagtttacttcggcacaatgctgactctactattactaagactagctgaccagtctgttgacctcaacctcaaactcatgaaatggcggatcagcccgaatcttgatctcgagaaaatcaaaggcacgaaatgccttctacttggagctggaacccttggaagttacgttgctcgaaatttgatggtgcgaatttcaatcgaactcgcatttgcgtgctttgctaatatcgttaggcttggggggtaaggaagataacattcgtagataatgggtccgtgtctttttcaaacccggtgaggcagcctctcttcaactttgcggactgtctagacggcggcgcgaagaaagcctaccgagcgtcccaggctctgtcggagatctacccaggcgtggaatccgtcggccatgtactagccgtccctatggcaggtcaccctgtattggacgcggaaaaaacaaaggcggatttcgaggtcctaaaagggcttatagatgctcatgacgttatcattcttttgatggatacgcgcgaatcacgttggctaccaactgtgatgggtaaagcggcaggtaaaatcgttatgaatgcagcattgggattcgacaccttcgttgtaatgcgccatggcgtcacaaacaacgaacaccctgaggaggagcttgggtgttatttttgcaacgatgttgtggcccccatgaatgtgagtttttgcttggggcttcgtgacaccccttgctaatttggcataaagtcccagaaagaccagacgctcgaccagcagtgcactgtcactcgacctggagtagctgccattgcatcggctttattggtcgaattgctagtctcgcttcttcagcacccgcttggggctgccgcaggtgccccccaaaccccgaataacactcaaaatgatcatcctctcggggtcatcccgcatcaaatcagagggttcctatccacatttgaaaacgtctctgtggtaggtcgaag

SEQ ID NO: 20223 - DNA, 2114 bp, Emericella nidulans
gcaaacctggatttgcaccgagagctaggtcttcgtgccatcaaaggctgcggtctctaccctcagttcctggaggtccagagtgcatgcaccgagcaaaccaggatcctagacataaccggcaccgtactctctgacactacaggcgacggagaacggccggagatatcgcggaacgcgctcattcagcttcttctcgagtctatcccggaggagcgcatccggtggaacaccaaggtgctcgacatcacaccagcaaattgcagcaggagtaaaggaaaagagtgtctccggttcactgacacgagcattgccaccaccccgatatcagaagagatatacgatctgatcgttggcgcagacggtgcctggtcacggattcgcgctgcgattccaaacgcccccaagccaatctacagtggcgtctgctatatgacaatgtatctccgtatctcgcgagagcagtatccggacatggacaatatgataggcagtggcacgtttgccgtggttggggacaacaagctgcttcttgcgcagcgggcaatccacggtaccttgcgggtctgtctgtttctgcattccaaatgcctggctgcagtacgaaaggagctactagcgtccatgcacaaccataacactggaccgtgtcctctcctcaacccggacgacctgataaattctctcccatccaatcccaaaacgctacaagagctcctcttgacgcacgacgatttctttgcaagctggtcagaagatatcaagcgcctgttgaggatagcctttgagtcccaggtggcggacgccgaaatcatcacaaggccaatgtacatgctgcctctggtgccgtatccgtacgcacatcacggcgggatcgcgcacgtcggagacgcggccagtctgatgaccccgtttgccggtagaggcgtcaatgtggccatggcagatagcctggaccttgctgaggaactggaacgtctccacttggtgactgtgtcttcatctgcgtcgacgcctgcagcgatattcgccgataaactggagggcgccttgagtgcttatgagcggacggcatatacgcgcgcaaaggacgcaatggagctgacgtggcgcaatctctgcctctcgtttagtgagaaggcgtcggacctatttgctgcagtgatggctagctaactatggcagtacccctgcatgaggtctgcatgcaggtctgatataggagatggttacagcgttttattggggagaaaatgacaacaatgaagctagcctgtagcatttgctcagttgctcaattctgacagtagaacaaagatgtgatggaaagtatttactacagatcttcctgcctaacaatgctgcacggacccgacgcacgggcagttcgtcccactcactgtccaccacacttggtgttccccagaatccacggctttttttggatgcatttcacctcggcagatcccgctgccgaccctgcagtattttcctgaattggttactcccaactgcaaaggagaagaggggagggaggttacgagagcgagaaaaataattaaatgattaatactgctaatcagaaaatattataattgaattgattgttaacatttatagataggtgtgggttgccagtgcatgaaacaacctttaaataagggaatatcatgtcttgatgaatacagtgtaatcattttgcagccttgccctgagctgtcctgagctatcacagaggttgacgttttgggtatagccaaaactatactggtctagtagagggaaagagagcaaccacacaagccaaggagcatctgatctagacgatatttctatgaacatatttatcttagcatatgtttgtaggacgtcttgctgttacacttggtaaagcgggggttggggcgggtttctgaccatgcctaaactgcccgctgcttaaaatatgtaataccaatccaacccgaataaatcggtcaaccccaatatgtagatatagcctgttgaagcagggacttacaccttatagtcacacagcaacattttcagctggataatgcatgtctagaaggtgcaaaaacagtcagtaggtgcgcatgattggctatttttga

SEQ ID NO: 20224 - DNA, 2115 bp, Emericella nidulans
tgtcgttgtcctcgcggtgctcttggcgggtagcattgcctacttcaccaagggcaccttctgggctgtcgctaaagatccctatgcgtcttccggaccggccatgaacggcgtggccaaggctggcaagtctcgcaacataattgagaaaatggacgaaactggcaaaaactgtgttatcttttacggatcccaaactggaacggcagaggactatgcctcgagattggcaaaggaaggatctcagcgattcggcctcaagacaatggtggccgacatcgaagagtacgactacgagaatctggaccagtttcccgaagacaaggttgcgttttttgttctggctacttatggagagggtgagcctaccgataacgctgtcgaattctatcagttcatcactggcgacgacgtgagtttcgagggtggtggctccgctgaggataagccgctgtcctccctcaagtatgtcgctttcggtctgggtaataacacgtatgagcactacaacgccatggttcgccaagtggacgctgccttgactaaactcggtgcgcaacgaattggctccgctggagagggtgatgatggcgctggtacaatggaagaagacttcttggcatggaaggaacctatgtgggctgcgctttctgaggctatgaacttgcaggagcgcgaggcctcttatgaaccggttttctgtgttacggaagacgaatcattgaccccagaggacaactccgtttacctcggtgagcctaccaagggacatcttgaaggccaaccaaacggtccttactctgcgcacaacccctacatcgcacccattgttgaatctcgtgagctgttcaccgtcaaagaccgcaactgcttgcacatggaaattagcatcgctggaaccaacctcacttatcaaactggagaccatattgccatttggcccaccaacgcaggcgcagaggtggatcggttcctgaatgtctttggtcttgaggagaagcgtcactcggtcatcaatattaagggaatcgatgttaccgccaaagttcctatccctacgcctaccacctatgatgccgccgtccgttactacatggaagtctgtgctcctgtttctcgtcagttcgtctcgactctggctgcttttgcccccgatgaggagactaagacggaaattgtacgcctgggtagcgataaggattacttccatgaaaagatcaccaatcagtgtttcaacatcgctcaggctctgcagagcatcacctctaagcctttctccaatgtcccgttctccctgctcattgagggtttgaacaagatccagcctcgttattactcgatctcctcgtcttctctcgtccaaaaggacaagattagcatcaccgcagttgtggagtctacccgcttgcccggggctacccatattgttaaaggcgtgactacgaactatctccttgcactgaagcagaagcaaaacggtgacccttcgcctgaccctcatggccagacgtatgcgattaacggcccgcgcaacaagtacgatggtattcatgttcccgttcatgtcagacattccaacttcaagctgccttctgatccttcgcgtcctatcatcatgattggtcccggtactggcgtcgctcctttccgtggtttcattcaagaacgagctgctctggctgcccgtggtgagaaggttggtccaactgtcttgttctttggctgccgcaagcgcgacgaagatttcctatacaaggatgaatggaaggtatgtaatcttgaaacgaggaattttttccttgagccgttctaacaacgatgtttgctataggttttccaggaccaacttggtgacagcctgaagattatcactgccttctcccgcgaatcggagaagaaggtttacgtccagcaccggcttaaggaacatgccgagcttgtcagtgatctgctcaagcaaaaggcgacattctatgtttgcggtgacgctgcgaacatggctcgcgaggttaaccttgtgctaggtcaaattatcgcggctcagcgtggtctgcccgccgagaagggagaggagatggtgaagcatatgcgtagcagtggcagctaccaggagga

SEQ ID NO: 20225 - DNA, 2117 bp, Emericella nidulans
tccgatagcgacgaaagcgatcaacagtccggacagccgtacaatgaattgcttcaattgctgcaagcgaaaacggacagcaaaggcccggcgcgcaagaagcggaaaacaagccatcaaaataaagagggtaccgaggaggctgaaaatgttgctgaaatgaccgcggttgaagaaggcgaggaaaccctggacgccgagctgcagcagcaggaaccggacgaagaaggtgacttggaagacggcgatgtggatgcacaagaagacagtgacgacgaggagagtggtaagtgaaactcttgtgtctagtggaccaacttctaacttggcaggaaatgaacctttcgagtcgcacttctctagcccagatgagagcgaactgtctcagaagatcaaggctgcatcagagaataagtggaaaaatgcaaagaaggagcttcctgggggattgaaaatctggcgtgcaattccagactgcgggcaagatgacgtgcctttgctcgcagcgatgaaaagcatgtcaagtgtgaaggtgagtatttcaaccattgtctgttcgtcttagctgacacaagtcaggtcaagaggaagctcaagtcagctgtgaccgaacgtattccaagcctcagcggaaatgtccaacaggtatctccctacatcttcgactaccaggatgtcttatacggcgctcgaacaacgtcagaatctgccgacatgagagacatgctagcggtgcacgctacgaaccatgtactcaagacgcgggatcgtgtgctcaagaacaatgctcgtgtggcgaaggaacaagatggcgacctcgaactacgcgatcaaggcttcaccaggccgaaagttctgtacctcctgccgacgaggcaggcctgtgttcgggtagtcgaatctattacgcggttcttccagccagaacagcaagagaacaagaaacggttcattgacgccttttctgcatcagatgacccgtcctgggaggataaaccgcaggatttccgtgagctttttggcgggaacgatgacgatatgttccgaatcggtctcaagtttacacggaagacgctcaagttctttactcaattctatacctcggacttgattcttgccagtccgctgggcctgcgaaccatcatggatcaggcagagtacgtctcctagtacaggtattcagctggttactgacatttgcagtgtcaaaaaacgagaccacgacttcttatcctccgtcgaagtggttatcgttgaccatactgatgcactacttatgcaaaactgggaccatgtttcctacattttgaagcacctcaatcttcagccgaaggaagctcacggctgcgacttcagtcgcgttcgaacatggtacttggacaacaatgctcgatatgtccgacagctgatcctactctcctccttcattacccccgagatcaactccgtcttctcgacacacatgcacaatgtctttggaaaggttaaattgaaccctatctataacggagccattgcagagctgccgctccctgttcccgtgaagcagaccttcacccgcttcgactgcctctcaccaaccaaagacccagatgctcgattcaagcacttcaccaccaccattctatccactttagtacgcaacatcactaccagccgcaacagagccagcgcagggggcactcttatctttattccgtcctacctcgatttcgtccgcctgcgcaactactttgccacatcccagcaaacgaccaacgtctcctttggagcgatatccgaatacaccgaaccccgggaaatcagccgcgcacggtcttatttcatgactggccggcagtcggtgttgctctacaccgaacgactgcatcatttccgacgtttccggattcgtggggtcaagcggatcattatgtacggtatgcccgataacccgatcttctggggcgagattgtgggtttcctaggcctggacccggccggcgttgttgaggctgctgagggaggagttcgcgcgttgttctccaagtacgatgcgttgaagctggagcgcattgttgggacgaagagggtggggaatatgttgcgcgagaagggtggtgatacatttactttca

SEQ ID NO: 20226 - DNA, 2118 bp, Emericella nidulans
ggcaactatgcagtacactccatttgcctcagatatagagctgccgttctatattgccctggcttctctcaagataaatcatgacaagctcgatgattccgcgcgcaaagttctgggcctgtacgagttacgcccgtcagacgctcccaacgcctcgtgcaggattcaaatacatgggaatgccctcactagcgacgagtgagcccaagaccctcttatagcatagtatctagacgtttgcctgacctagctactttacagagttccgtctacttattaccgagcggaaggcatgataaaaaatgttaatactattgaggagtacgcgaaggccgataaaatgggcatgctccaacagtctggagaaacggtcagtctagtggcggtcaaaaacgtcctcaccgtataataacgctgcggttctagatatggaatgctatcaacaacggcactatctactcatgtccatctctgctgtccgccttcgtcatcctctcttacgctgacctcaaaaaatacaagttccattactggttcgcattccctgcacttcactcagacccgtcttggaccccactggaggagggatgcgagggagcgcaagcacatcgacttcccagtgtagagagttctgcactcgcccgttcggtacaagagtgggctcgcgttgtagatgcgccgcaacgaggttttttcctagcacgaagggtaaggatgcgggatgatgatactgtctcctggaaaatcgcatccctgtcaagctacgaggacgggtttttcaaacacgcggaatttgcggattgctttacctgttttgtcgatccctcaaactatgaagaggcccctggctggatgctccgaaatctgctcgttctcgtgaagcgaagatggggacttacaaaggttcagatattacgctaccgggatggaccatccccgcgtgactgcgggcggagtattgtggtgactctacgactgaagacatcacagcttcccgatgggggggttaaggatgaccgtatgcctaaggtgacgggatgggagcgtaacccgtctggtaaactgacgggaagaattgttgatctcacggaacagctagatcccaagaggtacaattacaccggacagtttacttcggcacaatgctgactctactattactaagactagctgaccagtctgttgacctcaacctcaaactcatgaaatggcggatcagcccgaatcttgatctcgagaaaatcaaaggcacgaaatgccttctacttggagctggaacccttggaagttacgttgctcgaaatttgatggtgcgaatttcaatcgaactcgcatttgcgtgctttgctaatatcgttaggcttggggggtaaggaagataacattcgtagataatgggtccgtgtctttttcaaacccggtgaggcagcctctcttcaactttgcggactgtctagacggcggcgcgaagaaagcctaccgagcgtcccaggctctgtcggagatctacccaggcgtggaatccgtcggccatgtactagccgtccctatggcaggtcaccctgtattggacgcggaaaaaacaaaggcggatttcgaggtcctaaaagggcttatagatgctcatgacgttatcattcttttgatggatacgcgcgaatcacgttggctaccaactgtgatgggtaaagcggcaggtaaaatcgttatgaatgcagcattgggattcgacaccttcgttgtaatgcgccatggcgtcacaaacaacgaacaccctgaggaggagcttgggtgttatttttgcaacgatgttgtggcccccatgaatgtgagtttttgcttggggcttcgtgacaccccttgctaatttggcataaagtcccagaaagaccagacgctcgaccagcagtgcactgtcactcgacctggagtagctgccattgcatcggctttattggtcgaattgctagtctcgcttcttcagcacccgcttggggctgccgcaggtgccccccaaaccccgaataacactcaaaatgatcatcctctcggggtcatcccgcatcaaatcagagggttcctatccacatttgaaaacgtctctgtggtaggtcgaag

SEQ ID NO: 20227 - DNA, 2135 bp, Emericella nidulans
gccgaagccttgcagcctcaccttaacacaacaatccaggcttggtaccgggtgcagaacttagtcaaatacggggaaattgagattgatggcaataggctagatatacccggcgtggtagcagtggcctggtcagtggagcaaatttctcagatcttcttcaagctcatgttcatagtcataattgcatacccaagatcaccgaggacccagctgtcttagagaacattgatgccagtataaggttactaaaagaccgcctcaatcaaggctatagcgtctatggtgtgtgtattcttgcatagttaggccatatacttaccggtatacaggagtcaataccggtttcggtgggagcgcagactcaaggacagacaaaatgaccgctcttcaatctgcactgttgcagctgacgcaggccggcgtcctcttagagtcagataaaagtggcaaccaaaacaagctgctggagtcacacgccatgcctgcttcttgggtccggggtacaatgctggcccgttgcaactcaaatctccgtggacattccgccgtcaaactttctatactgcaatcgattgttaaactgctacagcatcggatcactccaattgttcctctccgaggctctatatctgcgtcgggagatttgatgccgttatcatacattgcgggagcgatagaggggaacccagacgtgtacgttcaagttgacggcctcgacatgcctcggatcatgaagtctatcgaagggctacagtacgcgggcttggaagctcagaagctcggcccgaaagaagggctaggtctgataaatggaacttcaacgtcggcagcagtggctagtttagtactgtatgaaaccaatcagttgtctgtactcgtgcaagcgctatcagcgatgggccttgaagccctcacggcacagcagaaagctaccacccttttatttcggctgtccggcctcacgatgggcaggttgagtgcgcaaataacttactttccttgctccgaggctcaaagctggtacagggtctagatggccagaagtttcaggaccgcccaggcctcattcaggaccggtacgccctacgctgtgtaccccagtgggtcgggcctcagctggaagatctccttctcgcccatcgacaagttaccactgagctcaattcgacatgcgacaatccgctcgtggatgtaaagtctaagtcaatctattctggtggcaattttcaggcagtctcgataacttcagccatggagaaaacaaggcagtgcttgcagatgtttggcagacttattttctcccaagcgacggaaatgattgatcccagtatcaataacggccttcccactaatctcgtcgccgatgatccaagcttatcatttaccatgaaaggggtggatatcagcatggcttcatacatggccgagctgggctatttgtcgaatcccgtgagctcgcatgtccagtcagcggagatgcgcaaccaagctataaactccatggcgttggtatcagctcggtacagtatgcaagccgtggaagtgctgtccctgatgtgcgcttgcgacgtgtatatctgctgtcaagctcttgacctccgcgtccttcataatactttcttggagaaagcgataccccagctgcactctgttacagagagagttctgtcgccgtttctgccccagccagcgcttgaggacttgaacagatctcttgaccagcatctgacccagacctggccgatgacgaatcgcctcagtcctgctgatcgagtgcacacggtaattgagaaagccatacctgttctcctggaaaacctcaaaagccaccgtggtcccagcttgggcgacttggaaacgtggaaatcacaggcacgcaacttactcaacgttgtataccaggaaattgccgagtcattcttcgtgaaaccacacaccgctgattacctcggcgagggggctaaggccttatatgtgatggtccgacaagaacttggtatcccgtttcaccagggcttcattgaacatcctactgttgaaaacgaaatcttgaacggccgtcctaagaaaacaactggatcgtggatatcgatcatatacgaggcgattcgtgacagccgccttatgggccc

SEQ ID NO: 20228 - DNA, 2137 bp, Emericella nidulans
ggtttgcacccgcccatctgtatatcacgtgattgttacgctttgaggcaacatctgggcaattgagtttatgacctcaacttctctcgttcaatatcaaccctggagaagggaaagccctagactcctgaactcctttgcctgggagtcgtcctgttttggtcagctactagtcggaacattgttcacctgctggacatcagcactattaccagaaatggataaactcatcacgaactcaacttgaatcgagcaattaggtgcctcttggaagaattcaagccccaatatctgcagcggccaatttgctgccgttgaatgtttggaatctgcgcagtgtgcacatgctgaagagatcaatcgccctctcgaggcatgggcactatgcaactgcactcgcagcaaccgaagcaaggggctctccccaggggctgcaccttttgattgcccggcgcaaccgctttattgaatcgaagcatcgtgacgctatcccagtgtttcctctaggggtctccctcttgattcgcgctctttctgcatgtctcattgcttctgtgatgacgatatgcagagaccctgagatgcacatcgcccacgtttctatgcagctctttgcccaatgggctgagatcatctgccaattactcaatcccacctttctctggaatgcaaggacagtggagagttgcccttcacggttcactcatgttccaaaattcctttggaagggggcgttgagcatgcctgatgtttggcgttctgtcagcacaaggccgtcagggactcaagggatttttgctaatatcgaccgtttcgtagtataaggtctcttcggtcgcatctacgttcgttgacccgaaatttctctacttcgggtttcgtctctatcttacgcacttactgttcgagcatttaactgaccttatatacttaatatcattgacttgcgttgaattcgccatgtcctcaatggactacgaaatagccaacccacataccaggccttattatggccatcagcgtcatcatactgtgaatgctagcccagtcccggcatatgtaaacagaagtgttccaacctatagtctcatgaaccaggagcagatgcctcagcctaatagcctagcttctccacgacactcacccaatattcagccttggaagcggcacagccacaaagctctctttcattcatcccttcgacatctccgcgctttgaacaatccgaatatacaatgtcacagtccagacgcccattggaccgcggcaccgcttgtatctcgcccttccgttccgtgcgcaaaatgaaagagcctttccaacttcgtctgccagcatcaccatctgttgataacagttcactcgctcctggcgagtctcgagtgacttctcgccctactgaaacccggacgttgcgaccatggcggtcagagcagaatctcgttgcgtctggcctagacacattcgggcttctcccaagcccgccgctatctgactcgcaaccgtctcaagcatcacctgcatcgacctacttctcttccaaatcggcatctgaaaccgaggccgaccgagaaacggactgcagctgccttccacaagcagtatcatgcaaccactgcacccctcaaactcccgcgaccgaagtatccgttcagagccgcaagtttgaagcgactaatgtacacatggcgcactcaacatttgtcaggcaatgtgagttagtgaacgggcaaatcactgcttcagcgatggcttccggatgcatgtcaccacctacgacctgctcagatgtagactcgctagggaagaggaacttctccggttcatctgcagcaacgcaaaggagtagatctggcacagtatccagtgagggcagttgggttccaagcagcctttcatattgtgaaacatggcttcaaggcgcgcctatggattctgcagaagatgaagccggcaaatctacaatctcgaatcggagaaagtttcaaattgtccagaaaagcccgctggttccagattggaagcgtgcacataatgacgcggtatgtctatttgccgttcgttaacatcatgctgtattaaccctctataaggtccttgcggtgaaaagtaagatgaagccgaagctggttgatat

SEQ ID NO: 20229 - DNA, 2137 bp, Emericella nidulans
ttactggaaattcacaatgaggacaaaacagccaatcagatcgattccattattatgatgaggatcttggccctgatctgcaggctggcttcaagcttctctagtgatatagtggcatgactccgtgtgtgcattaaaagggcaagtccgtacttatatctcatccctgcaggcaactgcagttttcttacccctccttttgtctctcttttttcacatgactgcctaaaagattagtctaccacattgtagcttgatgaaggagagttgatatcttcaccccttaattagctgacctttctacctgcagaagattaaagttcaaacatacctcttccttcctcacaaaatgccactagccactttacgtgaacccgctatcccgctgtctgcggcctcttagccctctacgttttaagggtgatcatgacgtatgcgcagctgatgcgctttcagagtgaccagcctggacgggcatctccaactggcctcatagtatagccatgcttcggggcagttgccacgagttttatgcccaggctaatgaaaaatatggtacaaggacctggcaaccgtgtctcccgatactgacagttctgaatcgggccaggcccaatcgcccgagtcgcccctcgagtgctcatcacctcgtctccggaggtttggatgcacgtcaacaacaagcctggctacaagcgctccgattggtactacaatgccgcgcgtattgaataccggaaagacaatgtcttcagccagacggataacgcgaagcatgagtataggaggaagcagatggctccaggggtattttccacactcactccgcgtagacgcctgctgactcggtctttggtgcgaagtattcgggcagggagaatactgaccttgaattttctgtggataagcaactgcagaacctcctggacctcatccgcgccaaatatgtctcctcctgcgagcaggctgtgccgatgaatctagcaaagaaggtccagtactttacgctcgacgtcatcagtagcgtcggcctcggcaaggcattcggtatgctggaagctgaccgcgacgtcgatcaatacctccaatcgagcgatgaaggtctcgcaatcggcaatgctgccctcgcgctgggcttcagcaacatcaatcaagcgcccttcatcggcaaattctttgcaccctcgcccaaggacaataacggatttgggaggttgatgaccacatgcttccgctttgtcgacgagcgcgccgcgagcgctaccgataaacggtccgacatgctggcctctttcatacgccacggcttgtcaggcgaggaactgcgtactgaggcgttagagcagatactcgcgggctccgacaccactgccggcgccattcgtggcacgctgctgcacctcatgacaaatccccgggtttacgtcaagttgcaacgggagatcgatgatgccgtgcaccggggccttgctccgtctgctggacaaggcctcattaccgccgcgcaggctaaacagcttccatatctccaagctgttatccgcgaggcgctacgggtctggccacctgtgtcgaacatcttcccgcgcgatgtgcccaaagacggcgacacagtcgtcgtcaatggccagtccatatttctccctggtggtgtctgcatcgggtactcggcatatgccatgcaccgcagcgagaagatatacggtaaggacgcaaaggcttttcggccggagcggtggcttcttgaaccaaaccctaccaagttggctctcatggttcggaccaacgaccttatcttcgggcacgggaagttccagtgcttaggaaaaccagtggcccaggttgagattgggaagatgatatttgaggtgagctgaaacaggtcttagtgcgggcttgctgccttctggatgatacgctgactgtcgtagctcctgcgcaatttcgacttggcgcttctcaacccgactcatccctgggacgcgcggaataatctgggtctttttaccatctctaatatgtgggtgcaagtgacggaacgaacggctggtttgctgtgacctttaatactgaaccccgcgaacgcaaaggaactattggcgagaagctgccatgttacactgtaggggaatgtttt

SEQ ID NO: 20230 - DNA, 2137 bp, Emericella nidulans
gatgcgggacggtaaggaacatcattattgagtaacccctggaggtgctgagagagcacacatccctttctgcaaacccattatacacacctcaagtaaacagcgcagtgatatcagcttggtgcagcattttgcaggcgataaagatgtactgctgcaaggatgtgatcaaggccggaatcaaccttggaagcccagcccctttcctatatatcacgtgagctcactcccttatcgataagctgttggtgtcccgcatcctccgagccctccgccaccttcgagcaacattcaacttcttcaacatggaagagaggactgtgctgcgcaaagaccaattggagatcagcttgcacaacgagaagaagctgattcaagaaggaacgatagtcgatgacaaccctctcgacctgagcgagccgtttcgggaactttgcgaacgttgtcgcaagggggatcttaaagtttgtcaagagaagattactgagggagtcaatatcaatgcacgggatccttatgactatactcccttgattttggtgggtgataccctgtctgcttttctaataataaaatctcgccggggtagctggaggcgtaactgacgattcaggcgagtctgtgcgggcactacgaagtcgcccagctgcttctggagtctggggctctatgtgaaagagatacatttcagggagaaaggtatgtttgcttttacctgtgcctgaatcgccgccaagtaatcactttcaaagatgtctgtataatgctttgaacgaccgtatacgaaatctgctcctcgaatatgactattcgaaatcgaccgaccctctccagcctcttgctgcccatatagcttcacttcttgtgcgagatcaacccaaaacgtctgatatagaggtggatgcgggcgatgagactttgtatctgcataaatttgtgctcgctgctcgatcaccttactttcgtcaaaaactgaaggctgctcctgagactacagcatggaagcttcccagtagcataccaccacaggcttttggaaccgcgatcaagtacctgtatctcggagagcctccgagagatttgaagagcggtccagggacagggtttactgagtctgaggttttcgccggaatcaacaagatcgccaaatatctagaaattggcactcttgtggagagtatcatcgacagcggtgacaggaggctggcccgacagagaaggacgacggaaattgcgcgaggacgagaccagctcgaggaatggtttcgagacaatgttttgcgaaataagatacagaccaatacagccaatgtcaacgatgtaaagtgggatcataataatcctatctttgcggatgtcatactccaagctgatgagcttcctgaggacgaccttgacggagaagatattggctctactggccttccaatcggtcccatagtatcttcggaaccagccaagcctccacagaagtctgtccttttcccctgtcatcgagcaatgttgctgcggtctgagtttttccagaccatgttcaattctcccttccgcgaagctcacatgaaggaacatcttcacatcattcctgtgaactgctcgccggatgtcttggagattatcctgacgttcctgtataccgaaagggcagagtttccgctatacgtcgctgttgacgtgctgtttgcggcagatatgctcttcattgaaaaactcaagacaaaggctgcggtggttatcagcactctcggcagcggtagcatgtcacaggcggaagccgcgaaaactacgcaagaaagcgcagaggatgatatcgatatctacgccatcattcgtgcagcgtggatgacacgagtccagcggcttgaggaattcgctgctcggtaccttgcctatcgtcttgaggcttatatagactcgcccgagtttgcagagttgatacaggagtcagcgtctcgtattcaaaaacgacaagaaaccgattctatcgagttactagatgacatcaggttctacctcaacgaacgattcagactacgttttgacgacgcaggcatcgaagagatgatggaggagacggcccagcagcagctcgcagaccagatcgctgctgacgaaggcattgaaaaggtcaccggcg

SEQ ID NO: 20231 - DNA, 2152 bp, Emericella nidulans
cccatcccctcgccatcctctctgaggatgaaattaaccttgctcgcgacatcgtgattgcgcagcaccccaacaccgttatcgacttccgtgagatctaccttcaggaacccccaaaaggccagctgcttgagttccttgctcttgaacatgccggtcgtctgagcccaacaacgcctcgtcctccgcggttggctctgtgccagtacgatgttatcggagcggatcgagtgccctcgtacgaagagtcactcgtagatgttgtggcatccaagtgtgttaagcatacggtcgttggaaaacagcatcatgctgctctgactctgtaagccaatcctccagggacatgtgacctgccccgctaacaggttcataggagcgaattcgatgtgcttgtggaacgttgttttcgtcgccactgtttaaggaagccctcgccgagttcgacctaccgccgggcttcgaggtcgttattgaaccctggccgtacggtggcctggatctagctgagccaaacagacggttcttccaaggattgtgcttcgcccaagatgctacgaagaagaaccccgacgccaacttctactcctaccctctaccgctcattcccgtcatggacgcgcatacacaagagatcatccgagtcgaccgtccggctacgggtggtaaaggagacgggttgcgggaacagaccttcaaacgtgacattatcggacattgcaaggggtcggactatgtgcctgaactgcttcctgaaggcactcggaaggatctcaagccactgaacgtcgttcagcccgagggtccctcattccgcatcacagatgagtcgctagtcgagtggcagaagtggcgtttccgcgttgccttcaatcctagggaaggcgcgactatccatgacgtgtggtacgacggccgcagtgtgatgcaccgcttgagtattagtgagatggtgagtcgcttcgacagaccataagaacgagctaattgctcggttgcctagactgttccatatcgcgatcctcggcccccctaccaccgtaagcaggctttcgacttcggtgacggcggcggcggtaacatggcaaacaatttgtctatcgggtgtgactgtcttggagtcatcaagtatttcgacgccatcatcacaggtgccgacggtactgccaagaaactccctaatgccatttgtctgcacgagcaagataatggcattggctggaagcattctaactggaggacgggtcgtgccgtggttacaagacatcgtgagttggtggttcagtttatcattactcttgcaaactacgagtacgtattcgcctacaagttcgaccagtccgccggcatcaccgtggaggcgcgcgcgacgggaattttgaacgtcgtcaacattgacgctgggaaggtcagcgactacggtaatgtggtcagtggaggtgtcctggcccagaaccaccagcacatcttctgtgttcgcatagacccggccattgatggagcgaagaactcggtccagattgaagaatcgcacccagtcccgatgaatgaggctactaatcccaacggaaacttttacaaagtcgacaccaagaccgtggaaagagcgtgctactttgatgccgctccagatctgaaccgaaccgtcaagatgatcaaccctcacaagattaaccctatcagccagaagcctattgggtacaagttcatccctctggccactcagaagctgttggcagaccccaattccacccaggccaaacgagcgcaattcgcgcagcaccacgtctgggtgacgcagcaccgggatggcgagctgtatgcaggcggtcgctacacgcttcagagtcagagcgaggttgatggtgtatcagacgccgtcaagcgtggtgatgtggtcgtcgacacggatgtagtcgtctggagtacgtttggcataactcacaaccctcgcatcgaggattggcccgtcatgtaagcattccccttctagtacggagttcagcgctgacaataggttaggcctgtggaaatcttccagctcatgatcaaaccggctgacttcttcacggcgaatccgtcattggatgtgccctcattgaagaacgaggcgtcaaggactgtaggtaaatccgagtgctgtcgaactgcc

SEQ ID NO: 20232 - DNA, 2155 bp, Emericella nidulans
cacgccgatattgaatccgacgattccagagcaaagtcgccgattttggaagctctccgatccaaggaccgctttgacgcccttgtaagagaccgagattcgttgcgcgccgaggtgaccgatatgcggaagtccttggaagagatacaatcgaagcaccgtacagatatgcaggctttacagagcaaactggatgatgccgagagtaaaaaggagcacgcggagtctcagtaccgtggcttactcgaaagggtgaataccattaaagcgcagcttggcgagcgtctcaaggaagatgctgtacgtatactgctggaccgaatccttgatacttgcgctaatataacataggaggagatttcccaggcgaggtcgaggatagaggaattggaggaacagaattcaagcacgaaagaagaatatgaggctaagatctcggagctgtcggaggaaaaccagcgcatggctaaagagctttcggaactacgcgaacgaacgaacctctcgcaacaaaactggcttagggaaaaagatgaccttttagagcaggagtcgtacctccagtctgaattcgagcaagcaaaggaggctatgcataattgggaagtgctcgccatggaggaacgttcgatcagagagaatcttggggaaaaggttatagacctagaggaacagttgactactctgaaggacgcgtatgaaagaacttctgctgagcgagattctcaagcagcggctgtggatgggttacagcgcgctcttcaagaaatccaggccggtgggtgcttaaccgtcatagtccgcgagtctataaaccgctaatctgttgcagcacgaaaacaagagcttcgtgaactagtcgaaagctctgatgctcagctcgagggactaaagcagtcacttaatgaggccaaatcgaaagagtcagaggcaatgaagtctctacaagacctccaacaagagcttgagagggtccggccattcgaaaaagaagtcagggagaagaacctcctgatcggcaaactccgacacgaagctgtcactctgaatgaccacttgacaaaagcgctgcggttcctcaagaaggggaagcccgaagataatgttgaccggtgagcatgaatatttgaattacctcttgtgttagtattttgctgtcaaatctaatggtgcacgaacaggcatattgtcacaaatcatttactccacttcctggcgcttgaccggtcggatccaaaaaagtttcagattctacaactcatcgcggcgttgttggggtggtcagatggtatgccccaccaagctttaaacaagagcgacattgacatcgttcagaacagcgtgagcaggcagggttggctcgtccaggagcgtctggagcctcggctaggctccgggttcctggctcacccatgcatcgtacgcctagtacgccaagtttagcgactgaatttcgggataatggggcagcaagcaaggaatcacttgcagaattgtggtccaattttctcgaacaagaatcacaagcctcttcccatgataatagtccattgacgaagtgaagctggagatatacagcaactcctaccatgtcccttcaacgaacttagacaacatcataatataacaacacccatagctcccattggttgtacgaacatccacgcttttccttatctgtgctgaaagcggtcagattcacttaccgcctcaatcaacttagatatgtgcaaaagaagtcatagcagaaccgcaacgtctctttaatataccagtatatgcataccttttcgaaaatttgtggaacattgtcagcacctgtcaagcgcccagcaatcttattccacttccaaagatatacaatggctactagtgcaggtaatctcaggaccctatcttcatttccttcaatttacaaacatccatattaatatgaacggacaatctagtacaaaaattccgccccgtagtagtgtcgggtccctctggaactggcaaatcaaccctactcaagaggcttttcgccgagtatcccgacaccttcggattctctgtttctcgtctgtaaaccccgctttcgcccaataactggagttctcatgaaggcagcgtttctgacatactgtcagacacgactagagcccctcggcctggc

SEQ ID NO: 20233 - DNA, 2155 bp, Emericella nidulans
ggggcttcctcaggcccgtacgaccggactttatctaggtcgactcggctgttcacccctcggtacttggtatatttagcaacacaaacttcttttgccttttccacctccctcatccgtagaactcgcccttccttttacccttgtcatcctcattacccttcaacctaccaacaaatgtctacagccaaatctcgcctctccagccttctcggccactttcaacagccccttgatgctaacagcacagcgactcccgctccggtaaacagctttaaaaatgtcaatttccacacattgtctcctacgttctttctgccgagggcggcggcgatagagccagatgtgggttctgtccattccaagatctaaagggtagcatttattaattttggttgtcatgcgcaaggccgaggcgatataccacattacagcaaataaccaagtgctacgaagaacctaccaagagactgcggatcgggctagagggctcgcctattttctcaagaagcatgggtataagagagtcgggatcctgtgcccaaacacaccggcttttctggagtcgattttcggtattgccgctgcgggggccgtgaatgtttgtaaggctttgattctttgttcttccaattaggtatatattcgctaatatgcatattatagccgtgaattatcgacttaaggaggacgatatcgcttatatatttactcattctgacgccgaaattatcatcgctgacaaggaatacttgccgctgctgtcggcctatagagcagcgaagccgcatgttcgtgtcattttggatacagatacagatgcaacagagggccaacttgcgggtccatttgacgaggctattctcgaggggttgaattatgaccgggatacaggcagaaagggctggagtgctcttgagagccaagccgcgtctgaagatgatgttattgcgctggcatataccagtgggacaacggcgcgcccgaagggagtggaatacactcatcgtggttgttatcttgctgctatgggcaatatcattgagtctgggctcaactttcaaggacggcgctgtaaatacttgtggaccttgcctatgtttcatgctatgggtaggttttgacagtgagatttgttttcacttgcctctgactaatgctcgatttctaggttggactttcccttgggccgttactgcagtgcgcgggactcactactgcctgcgcaaaatcgactatccgcagatctggaaacttctcaagcaagagggcgtcacccactttaatgcggctccaacggtgaatacgttgctttgcagctctcctgaagctgagccgcttcctgaaccagtccatgttacagtcgcagcgagcccgccaacacctcatttgttcgaacagatgacgggcttaaatttgcatccagttcacgtttacggtatgacggagacttatggacctatcactaaagggtactatatgacggcctgggaaaacctccctcgcaaggagaaatttgcgcgaatggcacggcaagggcatggtttcctgaccagtcttccagtacgggtcatccagacagaggtgcctgagggcaccatcattgatgtcaagcaggacggcaagaagattggtgagattgtgtttgtcgggaatatctgtgccaggggctactataaagaccccgaggctacgcggaaattgtttgctggcggagtcctccattcaggagacttggctgtctggcatccagatggggccattcagattcttgacagagccaaggatattatcattagtggtaggtcgcaccgccgcttttttttccccgccgcattgttatactgatactagtgtaggaggtgagaacatctcgtccgttgcactcgagtcgatgctggtcacccatccggatattctagaggccggtgttgtcgccgttcccgacagccattggggtgaacggcccaaagcttttgtgactgtcaaaccagggaggcagctgaagggtaaagatgtcgtcgactgggccaggaacactagcggaatcagcaagttcatggttccacgggaagtggaggttgtcgcagagcttcccaagaccagcactggcaagttgaggaagaacgttcttcgtgagtgggcaaaggatgga

SEQ ID NO: 20234 - DNA, 2161 bp, Emericella nidulans
tcccaaccaccttttccccctctttccttgcatattgtacttgtgcactgctcttttccttcctcaccaggccctttgcactcatccttgctaacacataatcatactgccgtataaaacatgctaacgtcatctctagctacgggcgacttgttcgatgtgatatccctgcaccacggactccttccagccgcttgtatgccttatccagatagcgtcacctggccttcccaatattgacatctattccaggtttgcatttgtggagtacgaaagccgtcgtgatgcagatgacgcataccacgagatgcacaacaaacggattggtcgcgatgatctattaaagattgaggtgagttacttgatggaggtgttttgttactgttctaattctaatttcatatctagtgggctaggactcccccttctgcttcctggcgctttgactctggtcgcgaccgccgccgggaccgtactcctccacgccgtggccgctctccttctcctcgtcgtgctcgtggggagtactcgccgcgtagagacgacaggtacgatcgtgactatgacagacacgaccgtgattatgaacgacgtgaccgagactatgatcgccgggaccgtgactatgatcgccgggaccgtgaccgctctcgagaccgatcccgcagccctgacgatagggatcgtgacgtgaaggaagatcgagaaagacgggatgacgagcgcgagaggcgtgacgatgagcgtgagaatgggcccaatggcgaagatagaaagggtgagtctaacctggacccccacgtcagaacgtctactgaataggacagttccgttagagcccttgacgtctgctcacgatgagcttgatactgctgagtagatcctctgccacgaaagtataaatgcttaatttcattacctgccgagtttacgcgggagccggtggtacactgacatcttaacatcaagcatggaatcccccctccttttttggaagatggaccggcacttagcgtaaagtctgttcttatccgtctcctcgctattgccgcgtcctttctctgttctgtttcattcaattcgtctcatattttcttccgtttgttggtcattattgtcttcgtgcgtttgttctcaaaatcccgttgccacacggacaaggtgaaacgaaggttcgaatatcgggtaggagaaagggtgttggtaaagatatgacggctaagtgttcattacctgtgaaaagggctttactattgctttacgtggtattcagaattcgcatagcagcgggaacgagtgccgaactcacgccgaacggtctattttattttaccattcccacctccgccgaatcctgtcgtccttgcgttaatctcgattaagccgtccgttcttcgccttccgttcgcagatttaaatttagacgattttaatcccagatcctcgtccttgccgttccggtcgtgattccctgtggccgttttaagactgttccgattgttgtctatagtagccgtaggattttactgtatccagagtctcggacgaggcccatatattataggtaggtgcagaggaagtgaattagctggaatcttgattagtatgaggctcagctgcccttgctcgctaagacttgacaggctgggtcatttggaacagggccgttgccatccttgacagggtgaagtgctcgatgagtttcgcctacgcctatggacattctaggtacaagacaaagctacggagcactttcggaggtagactaaacacctcatgtcttcaggcgtgttgagcaatacatactatcggcctactacttatcgtgctcttataactcgtcctctgatgcgtcgggaaccaatcaccggtgttcacctgggcccctgctggctgagggagttttctcattggagtgttagtctaggctgcattgctaagcgttgatatcgacgtatgaaattacagacatgcggcggagcacaatgctgcagaacccctccctaatagttcacaggctgcagccgtgaagcattacattttttcgtacgtagccattagagagcctagaaaatactatttagagaaacaggtccataccagtgcaggtactagggcaacacttaccaataaatgtagtcaccaggcgagaccggacctg

SEQ ID NO: 20235 - DNA, 2164 bp, Emericella nidulans
  unsure (1)..(2164): unsure at all n locations
tttcggcccgggtgaagtccagggctggttggtgcttggtcattccagcattggcaacgaagccgtggacggcgccactggcggacaccacagcgtcgattgccgagctgatgctttcctcggatgtgacgtcgcagtggatgtattggaggcgactcggattcgctgactttttttgcacagcggtgaattcctcgccaggctcgaaaaggtctaggctgtaaacagctgcggcttcgttggccagacagacctcggcgatggccagaccgatgcccctgtttgcgccggtgatgacaataaccttatccttcagggtgattcgccagtcatggttcgggccgggctgagtactgaggaaggccggcgtgccgttgtttgttccgttttcctgaggcatattgagaaagccgtttgtgaatgatgaactgatggttgaattgttctccttttgggttgaggtctcctcgagtgccttatatcctaatccgtgatgcagtgttttacgagccggagcacgcatcgagggcgccaggactaccgcgtcttacccagtcggaatagagaagatgtcgagtgcgcgccttcgaggcgagcacggatccaccgcatcccatggatatgagatggcctcgcatcgaggccctatcgtgagtggagatttacgggggatgtctcctcgcttcgcgcagtgataggcttgcactgcactcaacactcgcggggtaaccccatggggatgcacctaaaggtttagttatatgtctcgttgatgccgtactacaacaaaatcacacctatctcaaacattccccagaatatcatttccaatatggatgccaaggatcttgacgagtatcacaatggcgagtctaatcacatcgaggccagtcaagagatcttctggacggaagaggaggaggagaagctcgtccgcaagatcgacctcttcctgttaccgaatatctggatcatgtacttgctctcttacatggacaggaccaatattggaaatgccaaagttgcaggcatgtctgatgatctgggtctcacgtcttctcagtatagcatcgtcctcgttgttttctttagtaagtctcttgcctacccgtcaggcagcaactaacaagaagcagttggctatgtcgtcttcgagccgccgtccaatatgattcttgttcgatctcgaccgtccctctatctcccagcaatcatgtgcctctggggcattctgacatgcgtcatgtcggtcgtccagcactaccatcatcttatcgttctccgggtcttcatcggtatagtggaagccggcttcgcccctggtattctactgatcatttcctcctggtacaaacggaaggaacagtccaggcgctttgccgtattcatatcggcggctattctctccggagcatttggcgggctcatcgcaggggggatcactgacggtctcgagggtgtccacggaattcgcggttggcggtggctgttcatcgtcgagggcgcnagtactgcagggtgggcgatcatttcgaaattcctgcttctcgattacccaggaacctcgaaaaggctgacggagcgggaaaaagccattgctgctgcccggctgcaggaaggcgtcattgccaggggcgctgatgagcgtatcggaaagctacagggattttgtatggcctgcaaagactggagaacgtggggattcactatcggctacatggtgagttctcctagcctttcatctgcagtaatctgacttccataagtcatcgtaggatcttcaaccgtatcctacttctactcgaccatggtctctggcctcggatacatctggccggatggcgcattacatgactgtaagtgactcagccatgacaaaaagccccgggcgagtaaatcacaaaccacagcctaaccacaataggtcccaatttacgccgttgcctttgcctgcacaatgatcacgagtgtcattagcgacaaactaccgacataccgtggcctcatcatagccaactggctgaccgtctccatggtgacctccatcatcgtctgcgccgtctacgatttcacaacgcggtatgccctcctcgtcattatggctgcaggactatgggtgtccaacgcaacctcgctaagttttgcctcctcgtcattcggctcc

SEQ ID NO: 20236 - DNA, 2165 bp, Emericella nidulans
cctgcataaccctccagagccagagatctcagttcgctccgagaaaatcttcgacaaatgcgcaaacaaccctgttggattgcttgtcgatctggatctcacgggttcaccaccgttccgacttcgatacactatagagacatctaaaggtgtggaaaccaagcaccaaatcattgatgggttacgcgcgcagtcagatttcaccccattagaagccggccactaccggtatcgctttttggatatttctgatagtgtatacgggcctcgacctttggagaacaaagtggcagtactggaacaagacgtgaaacctcccgcctctgcaaatttcgttggtacacccgaagtacgcaaggcctgctttggtgaacctatatctgtcgacgtcgcttttcatggagaggcgccctggaccttgcagtacgagcttgttcataacggcaagaaaacaagacacgttcttgaatccgaaactgcgagatccacaatcattacagataatctcgtcagtggtggcgggtacaacctcgtattaacaagcgtgaaagatcgctccaaatgcaaacgaaaccttaatgaaatcctcaaggttgacgccagatccaagccccctcacgtttcttttggtcttgtagagaagagcagaaaatactcggcgctgcaaggctccaaagtcgacatacccatcagactcagcggtgaacgcccttggaccctacaatacaagaatctggatgcagatgcatcaatatccacgaaaaccttctggcatgaaaatagtttcttgactgtgagccaagaaggacgttacgagctgttgggagtaacggatagctcgtgtcctgggtccgttgatgacgcagcgaaagttttcgagatatcttggattccaagacctcaaatcactgccgtagataatacgcccgtcggaccggatggtctagtcgcgaagaatgatatttgtcagggccaaggtgatagtcttgagcttcgcttgacgggcaatccaccctacacgatccaatgtgagcaacaaagaaaaggatctcgaggttctactgccgtgcgaatacggagcctcaaaacagcactgcattctctttctatggagctggaaacatcagagccgggcgactatacctatcgattcaaggaggttggtgataatctctacaacaatgacccgagaggcaaccaggtcgtggtcacccagaaagtcaacccacttccttccgcccgctttgacgctccaggtcgcatctatggtttttgcagagaagacgatagtggagatgagcttatccccctcactatggaaggtgtgccaccgtttttcctcgaaatctcaatcaaacactacgcgaaggcgaaaccagagattgtgtccattccaaatattaaatcaaatcggcataaccttccaattcctaggcgccatctcgacctaggtcagcatgtagttagcatccataaagtgagagatgcgcgaggttgcgagaaaacctaccacacagacccggcatcagtcagagttgccgtctcggacgtacctacgattgtgccgcttgaatcaaagactgactactgtgttggcgagcgtctttccttctcattatcaggccattctccgtttgaggtgttttacacattcaatggcgtcgcccgaagggcttcttcccagaccaaccatttccgtcgcatcgcagagaaacccggcgtcttcacgataactgccgtcagcgatggcgcaagcgggaagtgcaaggcccacaaagatattgttaaaaccattcacccgatgccgagcgttaggatcagcaatggtcaagtctctattgtagacatccatgagggtggtgaggcgaagctagagtttgagttctggggcacgccaccgttcgagttcacgtatgtgacctttcttttcctaccctcttttttttgggccccgaatcggctgatctaacccaaaaaccactaggtacatccgaagcacgaatgcacgcaaaggaaagaaggccgaaataattgacataaaacatgacatttcttacgaacatcataagatcatcaagacatctgacgagggtacctatgaggtagtggcgatcaaggacaaatactgttcattttctactcagccctcaatggagaagaacgag

SEQ ID NO: 20237 - DNA, 2178 bp, Emericella nidulans
ctaaccattggaatatattctaggatttatgaggaggaggacatacttgctgccgttgatgcgcgtacagagtcactacagaacctaagggaattgggccctccagacttggtgtacttgatcaagcagccaaagactggttcaacacgtcaggtatctctctcttctatttatttcatcatttgagtccagggatgattggaagtagctaacgggttttctgatgtctagactggcgtttatcaccatgtcaccggtattgatgcatcttcctccgcaagcttggctgcctacgtgaacaccctagtggcatcccccctcgataaggcgaataaagtggtatcaggaatctactggttagctttccatctggtgtattagtgatgggctgagttaacttgtgcagttgctacaatgcgttctcccatttggacatgcgagtcgaagtgaagatccctggaagcctcgaaagctactgtatcgacgaacgcggagataaacgtgttgcgaccgatgcattatggctggaaacttttctttgcggagtcttgcgagcatattcatatgcggacgacggcagcggcgatgctattaggaagattgtcggggttcgtcgtttcaaccccgttacgaacaccgaaatggagcatagattcttagatgctgccgagaaattattcttcttaggtacaactattcgacttcactctttgacttcgggatggatttagctgacaaacctgtaggaagacaactcagttccgaccccgaaacccaagttccgaacacagtgagcaaccacctcacggccggtcttctcaagtacattcagaccacgggccggtatgcttctggtatcaacttattcgagaaactgcgcacaagggacgtggaggtctcgtctttgctcgctcaagttttcaggatggcggatgaagaggttcaagcagtgcggcttatgtacgacgctctgcaagatgttcccatggactacgcgttacttgactgccagtctgccttctgcgctagcaaaggagaaggcgaaatggcgttggagtgtgctaagcgcgccgtaaccgctgcccccagcgaattcagcacctgggctcggttggctgaggtttacgtgtgcctagagaaatgggatttggctcttttgacgctgaactcctgcccgatgttcacctaccaggacaaagacacaccacgcatgccccagccgtctcggatcatgctgcccattctagcagagagcatgttagacgagatcgacgaaggtcagccgaaacagggagaccctcatgattatgtacatccgtcgttgcggagactgcatgcggccacataccagggaacatttctgaaagcctacaacctgctgaccaagattgccgccgcgatcggctgggaccagctccttaaggtgcgcagcgaggttttcgtcatgagaagaggaatatcgctcagagcgccagcactccacaaagccatcaatccattcgcatggtgatagccccgcagagtcagcagagtcaacagagcccgcggaaaccgcgagacaaatggtagtcgcgagcaggaaaatggagacggtcgcccagtggaatctgtcacggagattgtcaatggcgacgaccacacacaaggcgagaactcaatcgagaggcccgagcagacaatggcatcggaagttgttaagtctggcaatgacgatgtaagtaccggctcttcacgagagaaggcattactgactttacagcccgacccgtcacacgcatcatatacacagttcaagaataaacgactatgcgaaagatggctggataatctctttatggtcttatatgaggatctccgcatatatacaatctggcgtacggaggtagcccagtaccggcaacaagcgatggagtacaagaaatcagctactgaatgggagattcttggtgagctggcagagcggctgcaccactttgatgaggccatcgaagcctaccaagcctgtttgtcaatccgtttctcgccaaaagccatgcgtggcattctcaagctacatgaaaagcagaatgacaccagggggatgctcagtgctttgattcgcctcatcgcctggcagtaccgatggtactctgaggttcgtttccctcttcgctgatgtttgaatacatgctaacggcc

SEQ ID NO: 20238 - DNA, 2178 bp, Emericella nidulans
gggcggtttctaggtggttcaaacttccaatcagcccgcttcattctatttaagcaaactgttgctctgacttgagggcttctgaattgacatagtattcgccaagatttttttgaatttttttttacagatttaatgtcagtcgtcaatattacatatcaattaatcaatgccaggaaaatgagtctctaatttcttagatattaatcatattgaatagtagtgaaaccatgtgacaacacttgattaaaacctgaagatccactaacccaatgcagtctagttaacaatgaattgaaccacatgagtcctgacaaaaaaaacaccagaaaccgagctctgttgtgatgtctggctttcccaagctcgtgatctccagatttcgattcgccgaccccctctatctctcttgcacttggctctcctatttactttttggcgtcccactatcaagcttatggcaactgacatgctggttgacctcacgatagactctgatccagaggagcaaccccgggtaagtcacgttaacttagcttggagttagtttcgcgtcttccttttatctctgaataccacaataaccaagaacttatcggtttatcgtgctccctggacgatgggtcagtgctgaccgttttcagattcctaaccctcttatcaaaagtcttgggcggcagacacttgcacaccgcactctttctccctctcctcacaccaagaactctacaattcctttcaagagaaagtcagatgcagactccgccgagtccggctcagagtcttcatacgcaagtgcagttgcgtaccctcaaaaagcaaagaccagaaccaccaatgtttcctctcgaaacccagttggccatgatagcctgtccgggccctttaagagagttggtgccggccctggtactggtgctgcgcgtcaggcacgccaaatcccagcatcagctccatctctagcttcaagttcaggcacagactcagccgcaggccattatgccccaagcccagcgccggagaccctgagagtagtcattccatctccatcagtacagctaaagaaagagattgattctgccgagcggctcccggatgcagaagtcaagactcccgagattacgggtatgtcggagaaatactacccaacagatgctcttgaaaggcgcgcaatgaggggtgcatatccagctgctaggaaaaccaatcgcgctggtgtccctttagtcattggcacaccaggcccctttttaactgagaagaatagacgccccgtgatagacttgctctgcaagaatctccagaagaaactagcctccatcaaaggtccagcagtgactgtggccaaagcggacgagaagcgtctcgccaaagctaccacaggcttcgagttcatcaacgagtacaagctccgagagggcgtacaccgtatcagcaaggaattccaatccggctgtagctgcgagactatctgcctaccagatagatgccagtgtcttgcacaagaagaggactcggaagaacgtatcattgcatacaagcgtgcccgagacaatccgcgcttcatggtccttcggcctgagttcatgaagcgcacatccatgatcttcgaatgcaattctctgtgcgggtgtgaggagaaatgctggaatcgcgtcgtccagttgggacgcactatccgcctggagattttccacactggagcgcgtggctttggtatgcaccctgctattgcaaaattggaccaaaaaaggactgatctactaaccaagcaaacaggcctccgttcgcttgataccatccgcgctggccaattcatagatctatatcttggtgaagtaatcacaacctccaaggccgaccagcgcgaaaaaatcgccaacacgcgtaacgccccttcctatctctttagtctcgacttccttgttgatgacgaaagcagttacgttgttgacggggcgaactatggtgccgccacccgcttcatcaaccactcctgcaaccccaactgccgtatgtttcccgtctcccgtacccacggcgatgactacctttatgatttggcgttcttcgcattaagagaaatcaaacccggcacagaattgaccttcgactataaccccggaatggagagggttgataagctggatccgaatgcggtgccttgtctttgcggcg

SEQ ID NO: 20239 - DNA, 2181 bp, Emericella nidulans
cataaccggggccaggaccaggattactcgcgattgagcctcaggagaagcgacagacggttcacaattagaggtggctgggccctgtgaatagcttctcgtagagttgacgtactcggcttagcgtttcaacctactttcattagtccgacgcgagctcgcgtacgcgatcgttatctatcatggaaggctacccagtaatatataacacttcaaacatgtctggagccaataacagctcgcatagctcagttggtagagcgcgtgactagtataatgtgaatttcagaaatctgaaattcgtcgttgaaatcacgaggtcagcggttcaagtccgcttgtgagcattactttttttatgaaacaattcatctgcataaactcggtacataatatcgtcattctatctatgcattctatgcattcgaaactcttatctgcgtaactccatggatacctcggtaagtctcacattcagtgtcttggcaaaaaaggaatatatcaagcttctgtagttccgccaccgtcaaactctcttccaagtatattccggaaaatcactttccaggtatcacctctcccctaattttgggcttgcacagtagctgattgattttttttttttggcaggtagccggcttctttgttacaagtgtgaagccttgccatggctgatacacaggcttccagtctttatagctcattgcctgtatcaaccctcgtaggcctggtgattgcaatgggacttctctcctgggctcggcccagtgggcgagtatccttttttagctccaaagagaacaatcttttcctcaataggagaaatgggaaagccggttccaagcagaccacgctaaaagaactctgccgcactgctacaccagcaagatgtgatctcaaccctctcttgttcaacggccacttgcagacctgctggactacagtgaaatttgatgacgttcctgtttactacaagcgccggatattcgaggccgacagcgaggcgtataaggggcatttcgccgttgactttgtcgttgagccttacaaagcacccaaatccgctgaagcaactgatgcggagagaaagtataccctgccatcaggtctcccagaacggacggcaatgttctccgaggatgaattcgccgctctaccttcagaagactcaaagcctatgctcgtggttctgcatggtttaagcggtggttcccatgagctttatttacgccatgtagtccacccgctgattgcggatcgaggctgggaggcttgcgttatcaactctagaggttgtgcccagacaaagatctctacggggattctttacaacgctcgcgctacttgggatgttcggcaagttgtgaagtggttaagagcagctttccctaaccgacctctcttcggaattggcttctctctcggtgcaaacattcttacgaacgtaagtcttttgctttcacaattggaaaacaggctaatatattcagtatttgggcgaggaaggagacgcctgccagctgaaagcagctgttctctgcgcaaatccccgccctcttgaagtcagttcggtggccatgcaaagtaactttatgggcctcaaagtctatagcaaggtaatgggcgccaacatgaagaagctttttgaacagtacgtggcttgctgatggattttccaaaccctttgggatttactgacatagtacaggcatgccgacgaagtcgtgaaaaaccctagggtagatgcagaagcaatcaggaatatcacgtatctgcacgaattcgacaggtatggaccggcttgcctatctcttgcgcttttcatgctaacgttcaatttaggaccctgcagtgcgccctatgggggtatcctacggaaggcgcatactaccgtgacgcatcctctatcgactctttactctctatccgaattcctttctttgtggtgcaggccgaagatgatccagtaaggtcgaagacgatgccagaatcccatatactgacgggatacagatcgttaccgtaaaagcggttcctttccaggagatcgctcaaacaccttatggtgtcatgatgaccacctcatggggtggacacctcggttggtttgagtttggcggcgggagatggtttgtgaaaccagtgagtgctatcattctgttgcagcggtgtatgctaatt

SEQ ID NO: 20240 - DNA, 2181 bp, Emericella nidulans
tgccagtcgtcaaaggaggtgtctggtaagtcaagatgcaattcaggcattctagagtttacgcctaactcactcctaggacgaacattgaggacgaggttcttcgggcagcagtaagtcggactttacgcaatctccgctaggattttggttcctgaccacgcgacgtaactaatattttccttacggttaggtctcgaagtatggcctcaatcaatgggcacgtgtatcttcgcttctggcgaggaaaactccgaaacaatgtaaagcgcgctgggtagagtggcttgatcctggcattaggaaagtggaatggtctcgggaggaggatgagaagctgttgcatctggctaagttgatgccaacgcaatggcggacaattgcaccgatcgtgggccgaacggcaacccaatgcttagaacggtaccagaaacttttggatgaagctgaggcccgtgagaatgatgagctcggtttagggggtccgggtacagaggcctccgctccgagtgcggacgacgtcagacggctgcggtaggaatctataatcgcggtttaggctctgactttgctgattatctgtagacctggtgaacttgatcctgaccctgaatcaaaacctgcccggccggatactatcgatcttgacgaagatgagaaggagatgttgagcgaggctcgagctcgtctagcgaatacgcagggtaagaaggcaaagcgcaaggccagggaacggcaactcgaggaatcgcgacggcttgctgtgctccaaaagcgccgtgagctcaaaaatgctggtattaacattaagattgtcacccggaaaccgggtgagatggattataatgcagatattccgttcgaaaagccagctgcacctggattttacgatactacagaggaagaagcacgcaatgaaagacagcgagagatgttcgatccccggaaacagcagctagcgaacaagcgcaagggagatcaagacgaagaagcggaacgaaagaaacgaaagaatgataagaacagcaactccgcagctttcgcggctgctgctcgagctggacagatgcagaagatccgagaggccgaacagagcagcaaacggagagcgcttgttctccccactcctcaggttagcgagagcgaaatggaagacatcatcaaaatgggtatggcaggagataaagccagcaagatggtgggagatgaggaaggaaccaaaggtttactcggaaactactccgccatggttggggggacacctattcggactcccagagctcccccggaggaggatcacattgcgaatgagattcggaatataagagccctcacagagactcagtcttcactccttggcggggaaaatacgccgctacatgatggtggatcttctactggttttgatggcattgctcctcgccgccaacagatcgtcacgccaaatcccatggccacgccctttcggcaaggaacgcagtcagcgcaacgcccgttccaggaggtgctggccccggtgcaactccgctgcgaactcctcgtgaccacttctcgctgaacaaagaaatcagcggtgggcttcctattggaagtacaccgcgagagataaagatgcgggaaaatctcgcgcggcagagcattcgcggcaggcttgcagcacttcccaagcccaaggaaaccgagtgggagctcgagcagctgccgtcagaatctgcagagccagctggggcgacggagtaccctgaagaagactctgcagtgcgagatgcgcgggaaaaggaaatccggaagcgagctgccgaggctgaacataaacgtcagacgcaggtttatcaacgttcgttgccccggcctgttgtgctcgatattgatgctctgatggagcgggcgtcgcgtgttatggacccaatcaccggtctaattgctaaagaggccgccctgttggttgctaatgatgcatgcaagttcgctactcccggtgccaagatcgaaggcaagccacggaagttggagaggcttgatgataagtatttagaagaagctcgtgccgcaatagcgtctgaagcttcctcggggaagttggaggagtggtcgaacgagttcgatgccaagtggtcatcaagccgtcaggatactctacctgggctttccaactacctcgacgacgacgaagaggacgcg

SEQ ID NO: 20241 - DNA, 2203 bp, Emericella nidulans
tgtttttatctattcttttcatcagctactacatcctcccacgagcttatacggaatagtcgctcaggatatattggaatgattttaaatgaaggccatctctgaacatatagaactgtagttgcgatggtgtaaaattgcgatagcaatagggaattggaaagacttttaggacttataccagatgctgttcctggcctatatatccatacatgctgtgggtaggtggtggaccggcttatccattttctgcctagtttttaagcccgcgattttgtgtactaacctaagtaggatcaaagctctcagtcatctccgtgcggacgatatatcctcctctacaacagccctcttgttacgggcagccatatgaggtctttttctttttggtaggtttgccaccatgttgcaatgctattaagccttttgtcgatgtgatcgtcctcagatgtacaggatatcagatttctgtttgatgactgaaaagaatcgtttgcggaactgttaccagttgacatctcaggctcaaagacaaagttgatggtattttcactgatccaatgattcgatccgacttgcatagacttcccatttcctccaaagcaggatcgtaatcacgaagcctagcctctcgatcggaacaacctcattacccgccaccgttcgaacgcgaaaggatattattctacacaacgcgaaatctatcagggattaccgcccccagaacaggatcccagcggcaccctaaatccacggcaatggagtctcctcgcgatccacaaagctccaggcctgttcatacttcggcaggaaaactggagagtggcggttcacccacagcagctgcgaatggtcagaatggttctcctgtcgacaataagcgtagattaggagagaaagaggatacatcaaaagctgctgaagaccgctccggtcccaaacgcaggcgagttcaagaacgacatcaaaagcgacgaccggaccgatcgccgcactctgtctattcccggcggaacgcagatgaaatcgcacattccccaaatcggaacgagcagtcgcgtagatcgccatctcccctacctccgcgtcgttcacctacaccggaagcacaggcgcggcagcggaaacgaccgggcggtggcgcacgtcggggcctcgtggatcctgaaactatccgcaggagacaagaagaacgcgaacgcgctcaggaaaatgatgctatgcgctactccttgagtcgaggcgttacagatatcgttcgccaacattacaatgccgtgcctcagcgcggcagggaatggcgcaaaaccgagagtaaaatcaaggggctgcgcagctataacaattgggtcaagagtacccttattcaaaagtactcgccagatgaggagtttgtctctcggactgttgataccaaggactgggctaatgatgctgcactgccacccgtggatgagaaacgactgctggtaatcgacttaggttgtggtaaaggcggggacttgggcaaatggcagttggcgccacagcctatcgatctctacgttggccttgaccctgccgagatctctattgaccaggcacgggaccgctacgcccaaatgagaactggacgtggacctcgtcaacgtcgtggtcccattttccatgcagaattcgcaccgaaagattgctttggtgaatggctgggggatgttcccattgtgcagcaggtaggaatcgaagccaacgtaggccctggcggttctctcatggcctcgcgatggggtggtggtggattcgatgttgtcgcatccatgttcacgatccattatgctttcgaaagtgaggtcaaggcaagacagatgctacgtaatgttgctggatgtttgaagaagggcgggcgtttcctcggagtctgtccgaactcggatgtcatcagcgcaaaagtcgccgagttccacgcaaagcggaaggagagtgaggctgaaaagaagaaagaagctgcagagcctgaagacggagaagttgaagaagacatcaagaaggcggaatgggggaaccccatataccgtgtgcgcttccttgaggctactcctgaagatggagttttccggccgccttttgggtggaagtacaattacttcatggaagaagctgtcgaagagatcccagagtatgtcgtaccatgggaagctttccgagcgtaagtgcctgcaccgca

SEQ ID NO: 20242 - DNA, 2211 bp, Emericella nidulans
accatgggagacgccccaaacaagatctcaattactatctgcggggacggtggatgcggtatgttgtgcgacattctcacgttcccagtctcatctgatgactgattgtggagaacgatatatctgaaaacagtcagcgcatggcattgaccgacaataggaaagtcttccatcaccctgcggctggttcgcagcgaatgggtccacgagtaagccaaatccaagcattatttgatcgcgtgctgaccttatcctgttcatagatatgaccctaccataggtaaataacgcaaacccaatcgctccgacaagcaataatactcatcacccggccagaggactcgtattctgtttcgcgtaccatcgatggagaacaatatttcttgtctattaccgatactgctggccaggaggaatatcgaggattgtgggcagcgtccaacctaaaatcggatgcgtttcttctcgtttacgacatcactagcaagtcctccttaagcgccctagattatttcatggatatgatcgagatggaagccgatcaacgtgcggaggacaacttgcggttgatgagagaactaggcgatagtgcacgaggggtagaatttggtatggctgccccagtgaagattgtcgcggggaataaatgcgatctgaaggacagccgggtcatcagcgcgaaagacggcctggaatatgcccggaaacacaacagcggatttatggaaacaagtgctcgggaaatggttaatatcgaagaaacatttgctcgtgcggatccttcccgattctcgaaatgcgcgatctgacattctttagttttggttcgacgagtcgtagaagctcgtcgagaacaccatcaatataatcaggagctgacaaagcccacccgtcatgtgggattctcactaaggaaaacacctactggcggtgtgtcgaagaaggagtccgaagcaaccctttccaaaaagacaaaccaacgccagagcatattccaaggcctgctgaaaggccgacgcgcaaacactggccaggagcaggttaagaaatatccagaaaggacaccagagacggacacgtcagaaggcgagactcccagccgatggaaacgactctgctgttaaacatcgtctccagcatgtcattgcatagcccctataccctttcgtttgtcgcgcttggtggacatgcatgtataatagtaccaactttctgcaattgtctaattaccttcttgtatagtcaatttcaaaagaaccaggacacacttgagcgaagcatgaagtcatattatataggtccagctgttgcagcctatctcatacgagctccaggcctactctgcgatgattcgatatcgagagcgagtccgcaagcagatgccgaccgaattcattcgttacaacttcaaagtccatagtagtattgcaaggtatgaaggacgggtacgcgcatctttatgacgtgaacttgcagagtgggccgaagtctctagaacatgatatccaccgctgcacccacgctgctgagctatcatgatctagaaccttgatttcagtattcagaaagagagctttcagttgttcgggctataaacgtatcacgatcagtatcaaagccgcttagtgtcactgactcggtacggtgatacatgaattctgatttatataaacccaacactttgtcactgccgcgagatcattttgaaccgcactagtttaaaccattttagccacgcagagtgtaaagcctaagtgctccgtctccctcaattgatgtgacgataagatactgtagctgaaagagcaagaattggccacggtcggtgatcgagtggcgcaagaatgaagtcaaagcacttttcttgatagtctacgctactattagctagtagcgctgtcacaggtacagtgcacgtcatgaacttttatgccgtgaagtaacctgtgtctatctttgtactctgagtaggtcggtctgcggagagtattcttgagtctcaaggcaagataaccgaaggccgaaatggcaactttcaactgccaagccacagggtcaacttgtcgataatgccaagctttcaggcatcatcaggagactcattgaattatccaggattgtataatacagaaccggttgtggtgggttttatgccgccgttgaacgaataatcgtcattcaacattgagtattcgctgctcagtgttgttg

SEQ ID NO: 20243 - DNA, 2213 bp, Emericella nidulans
ttccgacaggtggtccgacactacgagaacaagcagtacaaaaagggtgagtcgttgccaatgccatgccgagtttaccacgctggtcgtcgatgtttcatgcgggcggacgtaaaagggctgactgtcatactttgcttttctcgagggaattacaggcatcaaaacagccgatcaggttctccggaaaaacccaaaccatggcgatacgttagcgatgaaggctctgatcatgagcaatcaaggtgaacagcaggaggccttcgccttggccaaggaagctcttaagaatgacatgaagtcgcatatctgctggcacgtgtacggcttgctctatcgcgcggagaagaattacgaggaggctattaaggcataccggtttgctttgcggatcgaaccggactcccagcccattcagcgcgatctcgccctcctccagatgcagatgcgggactaccagggctacatacagagtagaagcactatgctgcaggctcgacccggcttccgacaaaactggaccgctctcgctatcgcacaccacctctccggcgacctagaggaggctgaaaaggtgctgacgacatatgaggagacgctgaagaccccaccacctctgtcagatatggaacattccgaggcgacactgtacaaaaacatgattattgcggagtcaggaaatatccagaaggcgttggaacacctcgagtctgtaggacaccgctgctcagatgtgctcgctgtgatggagatgaaggcggactaccttctacgcctggacaagaaggaagaagccgctgcagcctacactgctcttctggaacgcaactcggagaactctctctactacgatggcttgattaaggccaagggtatctccagcgacgaccacaaagccctcaaggccttgtatgactcctgggcggagaagtacccccgcggtgatgcgcctcgcagaattcccttggacttccttgaaggcgatgattttaagcaggctgccgatgcctatctgcagcgcatgctcaagaaaggcgtgccatcgctctttgcgaacattaagcttttgtacaccaactctagcaagcgtgacacagtacaagagttggtcgaaggttacgtctcaaaccccccagcgaacggtgcggctgacggttccgaaaacaccgaattcctctcctccgcatattacttcctcgcacagcactacaattatcaccttagccgcgatctatccaaggctctccagaacgttgacaaggcccttgaattgtcccccaaggcggtagagtaccagatgaccaaggctaggatatggaagcattatggcaaccttgagaaggcagcagaggagatggagaacgccagaaagatggatgagaaggatcgtcacatcaactccaaggccgccaaataccagcttcgcaacaacaacaacgacaaggcgcttgacaaaatgagcaagtttacgcgcaatgagaccgttggcggtgcccttggcgacctccatgaaatgcaatgtgtgtggtatctgacggaagatggcgaggcttacctgcggcagaagaagctcgggctcgccctcaagcgttttcacgccgtctacaatatctttgacgtgtggcatgaggaccagtttgatttccacagtttctctctgcggaagggtatgattcgagcctacgttgacatggttcgctgggaggatcgtctgcgcgaacatcctttctacacccgagctgcgctttccgcgatcaaggcctatatacttctccatgaccaaccggatctagctcatgggcctcttcctgagattaacggtgctgatggggacgatgctgagcgcaagaaggctctgaaaaaggctaagaaggagcagcagcggctcgagaaactcgagcaagagaaacgggaggctgctagaaaggctgccgctaaccccaagagcctagacggagaggtcaagaaagaggaccccgaccccctcggcaacaagcttgcgcagacacaagaaccgctaaaggaagcactaaaattcctcacacccttgctggagcactctcccaagaatatcgaggctcaatgccttgggttcgaggtacaccttcgaaggggtatgtttcaagagttccgcaaaatgcgcgtgtacataagactgactactcttctaggcaaatatgcacttgcgctcaagtgtctcgcagcggcccatt

SEQ ID NO: 20244 - DNA, 2216 bp, Emericella nidulans
gttccgcgacgactcccaccaaattttggagcttcgagggatattccatgtggtgcgacaattcaccccagtgtgtacgagatgttagagtccggcattctggacgattttcctgtgcccaagccaggtggcgataacccaaacctgcctcctaatcttgtcgatgatgaccggcggcatatgcagaagagaagcgacggaacatgttcaccatgaatgtctacctgtcgccggcttctttatatgtcatttcgaagtcatatgtgtataattgggtttgatagtccatctgagagagcgcgtagtaactgtttctatacaaggcccaaccagctagttgacttttaggtcctcaaccctaagaaagatcaacccgacgaggctattataataaaacacaatacagtaatgcccagatataaatggcccgagtcgataagggagcttcggctactggcgggccgtgacgtttaaccctccgacgccaaccgcttctccgcactctcccagggcctcagtctggggaattcaatcgtacaaaaaaacctcccattcccactccttttcttttgaggactcaaatcatttaaagaacacagccatgactcctctaatatatctaccgggccgagtacggtcagcgcacgccgtgcgctgttcccttctcaaatctccgcttcaacatccctttcggtcctcatacccactctccctccacaagcgatggagcacatccctctcccagcgtccggggtcagatcggtaagtccccaccttctacaatatagagtaggtcgagaaagctaatcaactatcatgcaatgtgtagagtccgatttcccggcgcagtcaacagcaaattcacaacggagatggccttcatcaacccaatggataaacctgggattccaacgtaccgcgttatggattccgacggtgtgctgatcgataaaagtcgtagcgagctcagtgtttcgaatgaagaggcgttggcgtggtataggaatatgttaacgggtgggttttgggtgtacattcctataagtctattttcagcattaatgggtatgcgatatacagtgagcattatggacgtgatcatgttcgaggcacaacggcaggggagattaagcttttatatggtacgagacctcttcctagccttagaagggcagtttttgctgatgagatacattctcgaaaggtctcagccggtgaagaaggcatcagcgttggctccgcagcagctctaacaccggacgatgtcgtctttgcacagtatcgcgaaaccggcgtttttcagcagcgaggctttgcgctaaagaacttcatgagccagctcttcgccaatgcgaatgataacggtcgaggaaggaatatgcctgttcactacgggtgcgagtatccgaaaaccgtacttctatccctcctccctttgatgaagttcacactgacaaattgacccagcatacaatctcctccaccctagcgacccagataccacaggcctcaggcgctgctacgcactgaaactccaagctctacagaatcccgacacgccaccacgcattgtcgcatgctattttggtgaaggcgccgccagtgaaggcgacttccacgctggtctcaatatcgccgctacaagatcctgcccagtggtcttcatctgtcgaaataacgggtacgccatttctacgcccacattagagcagtatcggggagacggaattgccagccgcggggtgggctatgggatcgacacgatccgcgtcgacggaaatgatatcttcgctgtttacgaggctatgaaggctgctcgaactctggccctttctcaaggaggaaaaccggtacttattgaggcgatgtcttaccgtgtctcgcaccatagcacgtccgacgatagctttgcgtaccgtgcgcgcgtagaagttgaggattggaagagaagagataatccaatcatcaggctccggaagtggcttgaaaatgaggggatttggaatgaggatatggagcggcaggctagggagagtattcgaaaggaagtactgagagagtttggggaggcggagagggcgaagaagccggctattcgatttgcgtttgaggatgtatatgatgaggttacggaggaggcgagggagcagatgaaggagttgaggagaattctggaggagtatccggaagagtatgaccttcgctcgtttgaagga

SEQ ID NO: 20245 - DNA, 2220 bp, Emericella nidulans
gtgggggaaggctggggagaaacggtgtcttaaatccactgcaccctgctgaccccagacgaccccggccggcccgtaatcggattgccgttaatttggcgctagacaggaacctgctaactccaagctacttggcttgtagcgcaagggccggccttgcttcccatcctgtaaccagcggggtagagctagtatagtagggggtggcgcccacccacaaggtttagggttccattcaggtcttcgtatcagctgcggcgtttgcccgactttccgctgtgcctgtcatttcagctcctgaggtggagagtgtgatattacagctgtcactctggcttcttacaattacttgctttagggagcgtcctctagggtgccggctctaggtgctcgctttaaggtgctaggtatgttacctatatagccagtggcctttccacgaatggctcggtgctcaccatagtattcgagagcaaattatacatcaaggcccactagccgcgcaaatatggcggttgagaagcccgctgagcacgccaatatcgaggccctcacccgggccgactcagctgatgcgccggtcgattctagggctaaatcagccctcgcgagcgacaatatcttcgagcatgagcagactgtcttgcaggttcttcggggtcatccagtccttatttggtgggcgttttttttcagcgtcagtgcgatcggatggtaaatgcttatctacaaaatctgtgcgctgcttattctctgctgacccggcggctcgccagggggtttgacgctcaggtcaacggggcagtgctctccattccttctttccggcgtgattttggcgagcactttgaaggagacttcgtagttcctgccccatggttgagcgcctttaattcgatctcatctgtcggacagttctttggcggttttctctgcagcgccgttgccgaccgagtcggccgaaggctggctttggcggttggagtgatgatctcttgcggaggcatctttggggaattattctcaaccgctagggttgcatttcttattagcaagctgattctaggagttggcctgggcttctacctaaccatcgggccgctgtactcttccgaggtgagctcgacgatcaggaaatgcgtcacaaacgccagtcactgacaaacgaaaggtctcgccagtcgttctgcgaggtattacaactgcaggggtgaatctgggcatcgtgatcggccagttactctccaacgcggccatcaagggctttggcgagcgaggcgaccggtgggcgtacaggggcccgttcgccatccaattcttcttcgtgggtatgtctatttccaacgtctaatgtctgatagagcaggctcaccaaacttgaccgcagtgttcttgggcctagggcttccattttccgtcgaatccccgtggtacctcgtccgtcataacaggatcgatgacgcgagaaatgccctgcagcgactctacggcgccggcacaaacgtcgacacgaaactcgtggctatacgaatgacagtggcccaggacctcgcagcgagagaatccaaatggtcgtatgctatccgtggcccgaatctccttcggacaaccatatcctgcggcgtctttgtttgccagcacttggtcggcatcattttcgtgctcggcttctctgcatatttcttccagctagcaggtctgcctactgagcggtcctttgaccttggagtcggcgtcactgcctgcggtgttgtgggcaccataatctcgtggttaatcgtcaatcgcctgggtcgccgcctcatcttcaactctgggatggccatcctcagcacgatcaatctcctcattgggattcttgacgtcgttccgacgagcggggctagttggacacaggctgcgctcacagtcgtctgggccttcttctaccaagtcagcattggcgccgttgcctttgtccttctcggcgaaacctcgtccccgtcgctgcgagctaagacgaccgccatggccacggcgacccaggccgtatttgggatcgtcatgaacatcgttattccctacatggtgaatcccgatgaaggcaacatgcagggcaaagtcgggtttgtctttggagggctgggcgtggttgcgacggtgctctgttacttgtatattccggatctgaaggatcggaccttcgaggaaatcgacctcatgtttgagacccgcgtggcg

SEQ ID NO: 20246 - DNA, 2225 bp, Emericella nidulans
tccgcacttttctccggagtcttgatctcgagcagtcaaacccgttggaacatatcgctggtttactgagagttactctgaggtgtttttagccatgcgtctctctcctgcgtggtaccaggtatgcttgctatctcgggcagactatttagatcattatacttacggtgatgctagttcctcgtaggcgtcttcgcctccctcggatcattcctctacggatgtgcgtgtattccctcattctcagagcccgtcaatggcgcgctggatgttagtccactaaccggattcttcaactgcagatgatctgggtgttattgcggaagtgatcgcctgtgaatcgtttaagacgaccttcaaagagccagacagcacgcaaacgtaagtgctccgtaacctggcgggagagcctcaagtggaagatcctggcattgactcgtgcctcagaggtttggtcgtttcaatgttcacagtaggcgctttctgcggtgctgcatttgcaggtcctactggtgattatctgggtagacgttggactatcataatcggttgtatcgtcttctgtctgggtggtggtctgcaaaccggcgcccagactattgagtacctatacagtggacgtttctttgccggcgttgggtaagttgtgttgaaactttggccgccgagtacacttgctaaactgacttagggttggtttccttaccatgatcgtgcccctatatcaggccgagatctgccacccgaatatccgaggtcgtgtcactgccttgcagcagttcatgctgggtgtcggagctctctgcgccgcatggatttcgtacggaacatacgtcggcttcgatgatacgaacgatgctcagtggcaagtctctcttggtctgcaaatcgtcccagccgtcttcctggggctgctgatcatgcttttccctgaggtaagatacgagcccaagccagtcatactgctgctaacgtgcatgcacctagtcccctcgttggcttatcgaccatggccgccaagaagagggcctgaagaccctggcgaggcttcacgcctacggtgatgtgaatgacgcctgggtccgtgcggaatacactcagatccaggaatttatcctccgtgaacacgaggaggaggccaaatcctacttggaactcttccagtcgcgctcgtcgttccgtcgtcttttcctctgctgtgcactccaagcctccgtgcagatgactggagtttccgcgattcagtaagtactctttggcccttacctcttctctgtatggtgagttattaacggcctgtctcgtacaggtattactccgtcacgatttacgcgcagatcggtatctctggcgatgaaaccctacgctaccaggcaattaactccatcatcgctctaatcgcccagttcttgtgtatgatgcttatcgatcgtttcggtcgccgctggagtttgatcagcggaaacttgggcaactgccttacatttatcatcgcctgcattctgctagccagattccctccagaggtcaacaacaccggagctcactggggctttattattatgacttggctctacaacttctctttctcgtgcacttgcggtcccctgtcttggatcatcccagccgaggtcttcgatactcgtactcgttcgaagggtgtctcgcttgcgaccatgacctcctacgccttcaacaccatgatcggccaggtaacgccactcgcaatggaagacgttggctacagatattactatctgtttatcatctgcaattttaccaatgccgtgttcttctggttgctcctgcccgagactaagaagttgccgctcgaggagatgaactatttattctcaaacgctccttggattattccaggcacaaagaaggaggactacgtccgcacgacctggagcgtagggtggtggagcaggaggaaaagcagcatgcgtatgcgtcgcatgaggagaagaaatagatgcagaaagaagacggacacgttgatgctcgatgatactgtgtactttacaataatcggatatgtaaccatgtgtagggtccactaatggtccctgggaattgcagatggagttgtgccaggtaccgtcttgagagcctgaagcttatcatgagacctctttgtaataggcccgagacactacgtagatcgacatatgcacttatcttccggtcagtttaatctcaatagtgcaacatatggcgtc

SEQ ID NO: 20247 - DNA, 2254 bp, Emericella nidulans
  unsure (1)..(2254): unsure at all n locations
cccggctggttcgaccttgaagagtccgttcgccggaccattcactggatcaacgaggccggccggaatcgctgcaaactgattgccttccctgagctctggatccccggttatccctattggatgtggaaagtcaactaccaggaatctctcccgctattgaaaaagtatcgcgagaacagccttctctccgactcggaggagatgcgacgtatcagagaagccgcgcgggccaacaagatctacgtgtctctcggctactccgaggtcgatctcgcgagcctgtacaccactcaggtgctcatctcaccggctgggaatatcctcaaccaccgccgcaagatccgcgccacgcacgttgagcgtctcgtgtttggagacggcaccggcgatactactgagtctgttgtccagactgagatcggccgggtcggacacctcaactgctgggagaacatgaacccgttcatgaagagctacgcggcctcgcttggtgagcaggtgcacgttgccgcgtggccgttgtatcccggcaaggagacgctgaagtaccctgacccctatactaatgtcgccgaggcgaactgcgatgtatgtgtccccccaaccaacaagctgctgcctgacctttgcaggcgcttgctaatgagttgccccagcttgtcacacccgcctacgcgatcgagactggcacctacacccttgccccatggcaaactattactgaggagggcatcaagctcaacacgcccccaggcaagccgctcgaggatcccaacatctacaacggacacggccggatatttgccccggacggccggaatctcgttcctcaccctgccaaagactttcagggtcttctctacgtggatgtacgcctataaacctgattcacccttctctcactgagacatttcatgctaacaagtccagatcgatcttgacgaaattcaccttaccaagtcccttgctgactttgtacgtgcctccaaatcttcaccctactacgaatacaaatggaaattaatgaataatgcagggcgggcactacatgcgccccgacctcatccgcctcctcgttgacggtaaccgcaaggaccttgttgtctctgaggaccgcataaacggaggtatcaaatataccagcaccatggaccgcgttggtctcaccaagcctttggaggcgccgaagcctactgaccagaaagagtaagaggatagacgcctacggatcagaagttagactggcattttaggaggatgcgtgtaatcttaggacatggcgaactctccactaatcaaaaatggattctctcgccttgcgtgtcctgccttcttcttgctgtcttactggccggctttggtttaaccttgatcatgacactaatgagtttgatctttgctttctttaggagaaagatctcactctgatattgataaaaaccttggagatgcttatagtcatgtgttcatgcgcgctaagcttaatcgtccgacaattgcatggctaacatgacaaaatcccgtctcaagagcctgcagaacgcggaatttactgagttctactggctggcaatataacaatggtacctgggtagcaatggcactatgancgccggctgctagacgaagcttgaagtctagcgctcgataaatctagcctctaagcatgcagcaaggaggctgagaatctgatatctttctagaaacaattcgcgaaccctccagctatatacattcgctcagccctgcagcgtattcggggcttcttagccgaatacgcttacgcttacgctgacccgcctggcactgcctcatacaggattgcgttgcgatctggagccagcgtaggtctggattggatacaagcactatttgtgtgagtataggtgattttgatatttggaacctttgtgctgcgccttcactgcgccgtgatttgtgacagcttagggaatcccagtaaagcatataaccggggacgccccggagcaatcaagagtaaagaatattttaatccagagtcaatataacaacctcccactcccccgcaatgtctttctactattcaacctcttagacgtctcggctcgcccaagtcaagtcaccaatggcatccctcctcctcatcggtgcaatcctcattgccgtcaagtacgccgacgagcacgaaaaggcaaagcagcgggataaatcccagtttacagatgcagaagcaggtacagagcccgttaccacagagcctgcgtctgca

SEQ ID NO: 20248 - DNA, 2267 bp, Emericella nidulans
tttaaaggatgacattttgacaccatgcagatgagcgatggattgctacgggtattttggccatacgacctcccccggtcgtcggcgccaggtgtaattgttggatggaggaattcggagctcgatttatttgtgcttgccgtgttagaggatgttgaggtacgcgcggttggcgagtgtttgagaaaaggttgctaactctctcgcctgcagccgcggaatgtcgacaatgctctccgcgcgggtatcttatttcgcaacagtcctcacccagttccgcgcatttttagtctgtgcggtcggtcgtcaatgcatgtattgggatcgacgaatatgcgagatccgccgacggcgttcaatgcctcgcatttgattgttactactcgtccctcgtgcaaggtcccgaagatatactgtccgcccgagacaggcctctcgattcaggttattatgtttcaccgaccggatccaaccaggatggagtatatgtcgctgaaccccatttcgcttgctttggaggacaagatgcttgctgcggataagtcggacggggtattggatacgatagaaaccgaggagggagcgcagaaggctcgcgcgcaacgattagtggataagctcaggctccatacggttgtcaagcatcttccatcacacaaagagttggcgcttccattcatcatcaaccagatcaattgcgcatacgaaatggggaagctgatagaaaagaacagcagccttattgggatccgcgtgaagaggagcatgagtgtttcggagcgggtggttgagtcggctacgacggtgtgggacttgttcgttctcggagtgtcctatgtcttttggcagtggatatggccggtcattacccggatattcgttatagggctggtcttcccccgcgttatagcagactttgttctgcaggtgttggagtggcgagctcggccagagcccgcggcgttgaaggatatctctgcgacggcacagcaggtggacattcgccttcagcagttctgctactggcctacgcagtatgtcaagttgcggcagagaaaggatgactgggaaagtgtgacaacctatcatgcccactatatccggttctacaacagtctgtggcttgtggcaaacgatgttattatcgggatcgctctagggtcgtacattattgataatgccaactgggtggcttaccaaatcaattatatcctcagtggttggactgttgagggtctccagcggacgatttcctggctgatggactggccagctgggctgaagctgaataatgagcttgcggcatttctgggtgatcttttcttgtgggttatcgagaactgggcaggtaagattgattctctctcaagtgtgtctggtgctaactggtcagcgtgcatcgcgaatctccaaccctatcttcctcatatcatatacgttatcggctgcgcaagcttcgcaggtgccagcatgcccatcgcccttttctcggatctcatttccatcctgacagtgcacatatactctttctacattgcatcagcgcggatcttcaattggcaacttacgatcatcatttcgctcttccacctcttccgcgggaagaagcggaacgtcctccgcaaccgtatagattcttgtgactatgaccttgaccagctcctcctcgggaccattctttttactgttctctttttcctcctccctacagtcattgtattctatctcgcgttcacgtccgcgcggatgttaataatctccttgaaagcagcacttgacacttggctggctttcttgaatcattttcctctctttgcgctgatgttgcgcgtcaaggattcgaggagactaccaggttagtacactttatggggggtggtatcttcatattaactgatcatccgcaggcggcatccgctttgaactccgcgaagagcacgatactctacctaattcagtagactcaacgatacagtacatccaccttgaggtaagcccggtctctctcttcttcaaaatctggactaagttaattgtataaacaagtccatccccctaactctccgtgccatgttcgaccaatacttccaacttgcccaccgcctccggaaacactacctctctccgcaagtcatcttctgcctctttaccggccgcttcgtgccccctatccatcgtcgcagtctctatagtatgcaatacagtatgcttcctgatgtccggccctcgctcgcgcaagtatggagcgaattgactcagccggcgcg

SEQ ID NO: 20249 - DNA, 2268 bp, Emericella nidulans
cgccctctttgtcgtctccgtctacttcttccgcgtacgcctgcgcctgagccacatccctggcccgttcctcgcttctctgacaaacattaaccgtcgacaatgggtgacgactggtagagcccacacgattcacaccgagttgcatcgccagtatggcaaggtcgtgcgcgctggcccaaataccgtctttgtatccgacccggctgctataccagccatctatcggttcaacgagccataccagaaggttttcttccttacacatattacctttcgacgcaaatcaaacaggaggctggtgctaatattcatttatcattgttctcgatgcagtccgagttctacgacgctctgatgccctatgttcgcggcaagagcatccccgacgtcttcgccaccagagacgagcatatccatcggacaatgaagcaacccattgcagccatctactccatgtcaaacctcgtctcgtttgagccgtatgtcaaatcaacgatcgagtatttcttctcgcggcttgacagtcttttcgtcgagactggcaaggtctgtaatttcggcctctggctgcatcttttcgcgtcggatgtgatgggcgagatcacattctccagacgactcggtttcctggagaccgggggcgatatggagaacgtcatggcgaacaactggaaattcttcgttcaggccgctccggtacgcccgataagtctcttgatcattttgtatcggagggaacgctgactgaaggctgtggtgtcctaggcgacgcagatgccctggctcgactacttctggaaacggaaccccctgcttccaggcagtgtcaaaccgaacaaggtcattgagtttggcgtcgcacggattcaagaacgacttcacttgtcggaaaagcatccagatcatgtgaacagcagggattttctctcgcggttcattgcagccaaggagaagaacagccagatcgggccggagtaagttctaacttcttccctactgaccactgaagtataataaaagcaaaaatgcaagattatattgaaacgtctggcagtgctatcatgacctgggccaactctaacatccaagccgggagcgacacaaccgccattctcctcagcgcactcgttttcacactcctcaagaaaccaacgagtctggcggcactgtgcactgagatcgacgccgccgccaagaggggctgtttatcctccattctgacgtggaaagaaacgcgcgatctgccgtacctcgatgcctgcgtgaaagaagcggccagactacacccacccatcagtctccccctcgagcgagttatcccggaatccgggactgtaatcggcggattcaagatccctggtgggacgagggtcgcgatgaatccgtgggctgtgcatcgtgaccgtgacgtattcggtgcagacgcagatacctggagaccagaacgatggctagagggggaggagaaggccaagacgctgtacaactcgttgctgacggttagtctttcaactcggtcgaggaatagtcactaagaggtctttgctatagttcggcggaggccaccgctcctgcctagggaagaacatctcctaccttgaaatttacaagctggtgccgtcgatattgctgcgctatgaggtaagaattcctagccattatctataaagatctagtagtgacggctgcagattggactggctgagccggagaaggagtggcacttggagaaccggtggtttgtgatgccttcaaggttctacgttaggctgaaggcaagaaacggggtgactaaactatgagaaagggagggctgatctgtaggtcgggggtggggtgaaatagaatagatcagagggtgtctgctatatttcagtgggtgtatatggctattcaatcgatttcggcgctcgtcattatagaaatgtctcaacaatattggtttgacattatgaataggttgatgaagtagtctgagaagccttttgggctcgctgaacttcagaggtagttgcactaatgcaccatctggttctactatagggtttgattttgtctcggcctcgaccatgagcataggagggttcaccttttcaggccctagaacgctatactcgttgtactttgttggccgctctgttgttctttaacatgatgagttttggagctgctggacgaagctgggtacgattcggctggtgagccggttcttgggagtacatgttcctccccaagatcttacctttacccggccatacgacggca

SEQ ID NO: 20250 - DNA, 2277 bp, Emericella nidulans
gccgctaccccaccgtagccattatcggcaccgggccagcaggcatctcagccctaagagcgttgcacgacgagaaagtgtttgacagaatccgagttttcgagagaagagatcgccctggcggaacctggaattacgatgtgacgccctagcggttcccagggacatacccgagcacggctagtccggtgcagggacagaaaccgtccacattcccgcagaggacaacgccggcgttccctcagacgacacaatgccgacggcgatgtatggctggctagacacgaatgtgcctgcagatttgatggcgtttactcacactccacttccagaggagaattcccctatatccgtggagaggtatggggacgggaatgcgacgaggccgtggtatactgttgcgcaatatctccttgaattggttgagtggcttcaggggtctatctcgtttgagaccacggttgtatcagtggagaaaacatggtctggtaaatggaggttgacgctgaggcggccggaagccgtggaaggggggaaaagggatttatggtggcaggaggagtttgatgcggtgatagttgctacgggacaatatagcgagccgtttctcccgaagattcctggattggatcgggtggtaaatactcatccggagacactggagcatgtgaatgcagtccggtcgcgggagcagtacgccagcaagagagtggtgattgtcggagggagcttctcggcgagtgatgctgtgggggatatatacatgctcgtgcgcggtccactatatgtctcccgaagctcacatagtccgtatataacggagatatggaacttgtcgaatgtcgaagtgaggccacaatcggtcagatcgaaggccaggatcgtacgaaactcaagctcacgttttccgacggctccaagctgggcgatgttgacaaacttatatttgcgactgcataccggttctcggtcccgttcttatctcaccagcctgttataaaggccgacagagtaccaggaacatatcagcatgttttcagaatcggcgatccatccttggctttttctcgggcttgttagggcgcctttgctttccggatgatggagtaagaagctgtcgcggtggcccgatatcacgccggacatggaggcgagctacctagtaaaggagaccaagagagctgggaggcggacgaggtgagctcaaaggggatacatataagttccacgatgtcacaaccgagatgagggaacatatggacttcttgcgtgacctagccggtcccccagctgctggaaccgatgcatacgagctaccccaggttcctgatgagtggctggagaattctttctcagtgtttcggctcaagaacgagtttgggggagggtgaagcgggaagcagaggctcataggttagagtagaataatataacctaacaagtgggagcgatgatctcgcagaaccgatttcgacacccagccatctcagcatcagtggtctgcctctcaaattccggctccttttcagcccgtatcatggccagccatttcccataccgcgcgtgctgagacctgaccggatttaaccgtagatcctcgatacgattgtacacaacgttgacccgtctcaacgacggtagacgagcgacctgggcgcacaacacagcccatgacagctgatcgcccagagggccattttgcacatatagcggtgcggggtagagccgcaagtactgtatacttttgggggccagggtggaaaagccatccaggggggagggtaagagaagtcggattagatgcaaagccgattccaccaccggagaaaaggactgggaccgcttcgtggtatatctgatggtttgttaccagcagggcgacgggaaggtgtagggcagggctccgggtgtacttcaaattcagcttttggtgcggggacggtttataggctgcgcggcggggagctgaagggcctcgttcgactgtgacttgaacaagctcagaccattctgacgacgatgaaaaggcgtactggtagatgaggaaacggatctctgccgggagagagaggaatcctgacggagttctgggagcgaaatgggctactgtgcggcagctggtctcagagattgtttccgactcagtatccgagaggcaaacggtctcagactcgttgctgtataaggagagagtatcggactcgtggtagagttttcggcgctttggctccatgatgaggtggatgttggggggtagtggacgatgaggctgcgagg

SEQ ID NO: 20251 - DNA, 2278 bp, Emericella nidulans
cactccccgcaccatcccaccaaggcgccacgacttgagaccgcttccaatgtcattctcattgacaactacgactctttcacctggaatgtctatcaatacttggtcctagagggagcaaccgtcactgtcatccgcaacgatgagatctctctggaggagctgattgcgaaaaagccgacgcagctggtggttagtcctggccctggccaccctaagtctgacgcgggtatcagcaacgctgctattcagtattttgctggaaagatacctatttttggagtgtgcatgggccagcaatgcatcatccactcgttcggcggtaaagtcgatgttaccggagagattctgcatggtaagacgtcagtcctgaaacacgacggaagaggtgcctacgaaggtcttcccccttcggttatcattaccagatatcactctctggcaggaacgcactctaccatacccgagtgcctggaagtgagctcttttgctcaattgggtgaggatgccgacaagactgtcattatgggcgtgcgacacaagcagtttgcggtggaaggcgttcagtttcaccctgagagtattctgacagaacatggtcaaacgatgtttagaaacttccttaagcttactgccggcacctgggaaggcaatggaaaggatgttgctcagggaggcaatttcaccgccgccgctcccaaccctccgaaggctactaagaaggtgtcaatcttggagaaaatttatgatcaccggagagcggctgttgctaagcagaaaactattccgtctcagcgcccatctgatcttcaggctgcctatgaactcagcgttgctccgcctcaaatatcgtttcctgatcgccttagacaatcagcgtatcctttgtctttaatggccgaaataaagcgcgcgtctccatcaaagggcctgatagcagagcatgcatgtgctcctgcacaagcccggcaatatgctaaggctggtgccagtgttatctccgtgcttactgagcccgaatggttcaagggcagtatcgacgacctacgtgcggtgcgtgcaagtctagagggactgactaacagacctgctatcctgcgaaaggaattcattttcgatgaatatcagattttggaagctcgtctggcgggcgcagataccgtcctactaattgtgaaaatgcttgacactgagcttctcacaagactttatctttattcccagagccttgggatggaaccccttgttgaggtcaatacaccggatgagatgaagatcgcagtggaccttggcgctcaagtgattggcgtcaacaacagagacctaacaagctttgaagttgatcttggcactaccagccggctcatggaccaggtacccgagagcactattgtttgtgcacttagcggtatttctggacccaaggatgtagaagcctacaagaaggatggtgtgaaagctattctcgtcggagaggcccttatgcgtgcgccagacactgcagcattcgtcgctgagcttctgggaggacaatccaagaagcttcctctgcagtcacgaaattcacctctggtcaagatctgtggtacaaggactgaagaaggggcgcgcgcggctattgaagcaggcgcggatttaattggcattattctcgtcgaaggccgaaagcgcactgttcccgatgatgttgcgttgcaaatctcgaaagttgtaaagtccaccccgaggcccactccttatccaactgaggtgccacaaggagatacggacgctacctctgttgactatttcgaccattccgccacgactttgcggcaccccactcgtgctttgttggtgggtgtattcctcaatcagcccctatcgtatgtcctagcccagcagcaaaagctgggccttgacgtggttcaattgcacggttccgaaccgcttgaatggtctaggttaataccggttcccgttatccgcaaatttgggcttgatgagttcggcatccgccgaagggcatatcacgtacgtgccgctgctggattccggagctggcggctctggagaactcttggatcagatgcgcgttaagcagattctaaagtctgatgacggattgcgggtcattttagctggtggcctggatccacttaacgttactgaaatcatcaaacagcttgacgaatctggatataagatcgttggtgtcgatgtcagctccggagttgagacaaatggtgttcaggatctcgataagatacgttcatttgtccaagcagcaaagagtgcc

SEQ ID NO: 20252 - DNA, 2281 bp, Emericella nidulans
gggggcaaaagcagcgaattgctattgctcgtgcccttattaaggaccccgatattctgattcttgacgaagcaacttccgccctcgacgcagaatcagagacattagtcaatagtgctcttgctgcacttcttcgcggaaacaacaccactatcagcattgcccacagactctctactataaagcggtccgactcgattgttgtcctcggtaatgacggaacggtcgccgaacaaggaacttacgaagaactaagcgcacgccctgatggtgccttcacaaaactcatggaatggcagctaagtggtggtgactccaagccaccagtcagcccttctctagatcctgagacggaagaaaagccttgggtagaacagcccgaggaatatggtgacgctgaagccaacgacaaagctgagcaacaacgataatcattatcgggagttggattaacgcctagtgactgctgttttttcctttcgttttctcttattcacagtttagactgtttgcttacctttgcgagctcgagcgcttgctgtgatgatatactttgtacatgacgcgtatttggagtgtacataggtttcacgggtttggacctaaacactcactgtaatcagtatgatagataatagatgaaaactcttctctatccgtaactcgttagtaagtagttagcctttgtcatattcttctcccatgagctgctagatgtagaacgtgacccaaaggttgtcttggcagcggctggcctcagtgctgcgttaccgttaacgtcactcaaacaacatcccacttgaaacttgagagcaccggtgtccaggccctaatcggcacttttgataatgggcctagctctgttacactcctaattacaattcgaattcacagtgacctggatttggctctgattggtataatatggaccgcttccgaagatggatcgctcctaccgcagattatgagcctatccaagagcctacagtctacggcgatgatctagatacacagcccagacaaacccagtccggtccacctttctcaaggcctgtatattgggtgttctttatattgggagtatcaatgttatgggcatggtacgtgttcgaatccgtcctctgtgtaggggatccctgcttaccatcagtctcaacataggaatatgttgctcgctgccgcaccgttctttcatcagcgattccaacaggatgaatgggcgatatctcactaccaatcatccatattgtctgtatcgaccgtcaccaacctgggttccgtcttcgtgctcgcaaagctacaggaatcagcgtcatatccgagacggattatcgtatcgttaatgatcaacattggtatatttacattgcttgctttctcgacgcttgtgctcaagaacgccccggtgttggtgtacttctggttcgtcatggtcatggtgtttggggctagcatggccacgggaatcaaccagaacggagtcttcgcgtacgtctcgggtttcgggagagaggaatatacccaagcaattatgagcggccaaggggtggcgggtgtattaccttgtctagctcagatgatgtccggccttgcagtttcagaacgtggaaagcagcaggcaccggaggcgtcctggaaatcagccttcggatgctttataaccgcaacagtcgtctcatgtctgacactggtctcatttgtctggctcacaaagcgacaatccctgcacatcatagacgacgaatctggatcgacaaacaccgacgaccaaacaccaatgaaaacagtgagcctaaggactctcttctcgaagctgcgcctctccgccatctcaatttatctctgcttcgtaataacaatgatttttcccgtttatacttccaaaatcgagtccgtcaacgacggctcatcctcttcgcgcctctttcacccggccgccttcatccctctagcattcttcttctggaacgcaggcgacctactcggcagaacgctagtaatcaagccccgctactcactagctcatcgtccctgggctctctttatactcgccatcgctcgatctggcttcattccactctacctgctctgcaatgtcagcggtcggggagccatagtctcaagcgatttcttctacctcttcattgttcaaggtctgtttggcataacgaatgggtatttgtcgagttgctgcatgatgggagccggttacttcgtctcggcagaagaacgtgaacctgctggcgggtttatgagtctcatgcttgttgccggtctggca

SEQ ID NO: 20253 - DNA, 2288 bp, Emericella nidulans
aatatgcgcgctaagatcaagaaagttttgaagaaggccgaggctgcgcatcaagcccagacagcttgcaacgatgccgtggaagcgtttttatctgctttaggtgatgcatctacctccaatgcgaacgcaattcagccagcactagaccactattttgagaagatttcgcggcagatattgaattacgagcgactcaatgctttacagctccaaaagctggtgatagaaccgcttttgaaactctatactaatgacatcaagcaagcggaggcgaagaagaaggaatttgaagaagaaagccgtgactattatgcttacgtcggtcgatacctcggacagcgacaggactcactgaaggaaaagaagcgagcagaaagtgactctaagtaccaagcgaaacgtcgaaattttgaactgagacggttcgattattcttcgttcatgcaggaccttcacggtggccgcaaggagcaggaggtcctttctcatctaactaaatatgcggatacccaggcgaagaccttcctcgccgcggctaaacaggtggatgacatggtgccgcagcttgatgcccttatccatgaggtcaatcaagcagataaggaatttcaatttcagaggacggagagggaagagaaacggagagccctggagaaaagcagcaacacgtaccttgagcctgatgctcccgtcagctcaagcgcagcgtccacgttacttactagcggtaatgggaatcagaaaccagagggagacttgggccgcgccgatagcaccgggtcacaattgcggagtgtcactagcagcaattcaaccacatcaatccagacatccgcggctcccaatccgtccgccggttcctctgccatgacctcagccataaactcaagctgtacgttctccgaagtactagtgaataacctcttcagtattacaggacgctaactcttgccacaggtcagcaaaggaaagaagggctgctttgggcgttatctcgaccaggatctcatattgaccccaaaggaatcaacaagcaggcttggcataagtaagaccatattatcgtgattattgaggagatactgataccatcattcttcgtcagattttggattgtcctcgaccagggtaaactgtcagaatacagcaactggaaacaaaagcttgacttacacatggatcctatcgacctgcggatggcctcagtaagagaggctcggaacgcagaacggcggttttgcttcgaggtaatcaccccgcaattcaagcgcatctaccaagcaacttcagaggaagatatgggcaactggattagggcaatcaacaacgctttacagagcgctgttgaaggacgtagcatgtatccacctccactctcgtcggaggcggacaagccatctatgggccgagacattggctctgtattgacggggaaaagctcttcagtttcccaccactctcaccattcatccgcctcgagcaatgtgacccgtcgcacgacagttggggcgcggcctagctatgttcgcggcgactcacagggtttcgaggataatccctcaaagctattacaagcagttcgcgacgcagatcaaggcaaccactggtgtgcggactgtaactctacctccaaggttgagtgggtttcgataaacctagggatcgtcttgtgtatagagtgcagtggcattcaccgatctctcgggacacatatttctaaaatccgatcactcacactcgacgtccattctttttcgaacgatattgtggaaatccttcttcaaatcggaaaccgcgtcagcaacatgatctgggaggctactctagatcaggctcagaagccggtagcctcatccactcgagaacatcggctgaggttcatcaccgccaaatatgcggataaagcgttcgttcaaccactgccctctccattgtcgcgattcccgacggcagacgaaacgcttctcgcctcaatcaagagaaatgacattcaaggtgtcctttacggcatcgcccttcgcgccaacgtgaacgtcgccgatcgctcccgtagcactcacgccgtcttcctcgcattagctgccgcggacccggcacaccccggtcaaatgacgtcgagtatatcctctcgacctagcacatctaccaaggtgatccctttccccgtcgctgaactccttgtccagaacggagccgagattccgtctcagcctcctccaatccctctttcccctgccgctcaattataccttaaccagcgaactgcacgactctctaatttcaac

SEQ ID NO: 20254 - DNA, 2288 bp, Emericella nidulans
accatgaacgaataactaaaatgcggttgtcagctgagatccgtcatgctgtgcgctctctctctagggcagccaaccagcgccgcttgcaatggtgtcgcaattccgtccggaacgttcatactcagggtgtccaatcaggcactgttggatattcaaactatcgatctagcttgtggtcctatgcggtacttgaagctggcatgacaggccttggactgatatcctggccactcggaccacggacgtcagtccagagtgaggagcagccgatcaagtacgccgacagaacaactatgctcgaggtaagcaggttaacccagtactctgcaataagtgctaatcactttcttgaattgctgctagggtgttcaagctatagcggacgttctcgggccagacgcagtgaccatggacgaagacgacattgatatgcattcatacacagaggtttcgacatcccattgcgcaacaagaccagtggcggttgtgaggcccaaaaacactgaggaagtctccagcattgcacgtatatgctcagagtataagatcccgatgagtatgcctccgcgagagcgattttataacaggcaggaattgacaagcactgcaatgcatagttccatttggcggcggatccagcgtcgagggccatttcacggctccgtattccggactaagtatcgatttctcccagatgaatcagatagttgccttccacgaggacgagtacggcatcctagagatggattgtacgcttgctgatacttgatagcatggatgtggtcgtccagccgggcgtaaactggatggatctcaatagagagatcaaggacagtggcctattcctgcctatggatccgagtccaacggtaagctcgcttacctttcattgtgagtattactcacatggctccaggcacttattggaggcatggttgctacgaactgcaggtatcttttaccgccagagctaaaggaaacccagatcagagctgataccatgtccgtagtggaaccaacgcagtccgatacggtacaatgaaggactgggtaatcaacctaacagtggtcctggccgatggctctatcatcaaaactcgccaccgagcccggtatgtagcccagatcccttgactttgttcaccatgaacggaactgtttatctaataagcccagaaaatcatccgctggctacaacctcaccggcctgttcaccggttcagaaggtacattggggatgatcacagagataacactcaaactggcaccaattcctgagaagcagagtgttgctgtagctaccttccagtctattcgggaggcggtagcctgcgcttcaaagatcatacgccagggtatccccattgccgccttggaacttatggacgaagtacaaatgcaagttttgaatcggaatggtggtgctggtggtagaatgtggcgggaggagcccacattattgttgaagtaggtacatttctgcaattccctcgtcacagcgaactcctataactcactttgtatgattagatttgcaggcaccagtcaatctatagacgcagacatcggacgagttcagagaataatcccggaggaaggggggaagagctttgaatttgcgcggacggaagcagaaaaaggtaatctctgggctgctcgcaaagaagctgtttgggcgatgttggcgcaaagacccgaaggtacgcagctatggtctactgatgttgctgtgccgttgtcgaggacgccggagattattggtaggtggcaagtccttgcctacctcagtggttctatgctgtactaagacctgagttcctgagttcagatctatcaaagaaagagtgcgagggtcttgggctattctctagtattttgggacatgtccgcgatgggaactttcatcaagctgtcgtgtatgaccctagtagcccgactcagacccagatagtgcaggaatgtgttaggaaaatggtgcataaggcggtagagatggaggggacggtttcggtttgtcccctcgaagtactatactagcggatcactaatttagctggcgtatcccagggcgaacatggaattgggctaggcaagaaggagtgtctgcttgaagaactcggcctagaaacagttgctttaatgcggacgttcaaacgaagtgtagatcccaagtgagttacttgtaccaggatcacaggggctacaactgatgatgtctagttgtcttatgaacccggggaaaatatttgagccttgagacgaaccacgcctttatttacttgggg

SEQ ID NO: 20255 - DNA, 2296 bp, Emericella nidulans
cagggggagcggcttcggtaacatactaggtcgacgagggccttgaatgccgccctgggctctgccgaacggctgcgagtcattcccaccgtcgtcataataggccattgcgataagaggttgggttagcagacaaaacgatggacgaagtctgcgaccatggcagggtggaggcggagagcttgacgggccgacgggtcacggacgcactgataaggcgaggtcggtctagtcagctttggcagccaagattaatttcgaatagcaacgtcgtcaaatgtagctaggatgcttggaataatgctagaacagttgcagcgatttgagacgcgagaccaggccgcaagaatgattgggtcgggacacagctgcctccgacgctaagccgcgttggccacgacggcccaaggcctcgaaagtccccggccaaatgtgccaactctcagtcgctggaagactggatccagaggtccaggcatgcagatggaacaacggctcttctctcccctgtctctttagtctcgccccttgaggcctatgctcgaactttacgacagtattatgagaagcctagataaccccgccgtactcaagttcttctcctcttctcattgtccaactctgctctcctgctgtaaacttgcgcgccaaaccatctcctattgtcaattgacctatcgtggtctgtcaatctgaatcgtgatatctatccgatgcttcgtcatccccactttatccgcagggctgagtagatgccacagcacgttctcgcatttgatattcggtcgcatctattcatcatttatctttatccttactgtctcgtatattcaacctgcatcgttaacacgtttatagagggagatggccgtcgagggttcgtcgcctgtggccgtgtccaccaacggcactggcactgctaataataccaatcatcttaatggccattcctctaatgggtcaaagaaaatggctaccagaaagacagccatttatcgacatgctgtggctgttcactcgcaagtccagcactcatgcctcagcagggactcgaccaaggctacgagttttattggattccggaacctgatggtggtcgtgttgggtgaggatatcgtcgtcttgactacattgatactatgctgactctcgatagtggccatgaatcttcgcctagtgattgaaaacttccttaaggtgagcttcttgcatatgacgcaatggttgggctcgtttaacaagccgtagtatggtgttttgatttgcatcagatgtcatgactatcgcaaacaagacgttgtgatcggagcgattctcttcgccctggtcccttgccagttgctatgttcgtacttcatcgagttggctgcttctaggcatgctcaacgcgttatcggtcgagcaaagaaacaggacaaggacaggatcctgaacgagtctaaaaggacttggttcgccattgcgctgctgcattctattatcagcttctttggtctggctgcaacaagctatgtcatcttctactacgtcaaccaccccgggatcggcactgtctgtgaagtccaggtgatcatcgtgtcgctaaagtcgtactcgtacgcactgacgaatcgcgacctacgtcgcgctatgctcggctctccgtcggcggactctgatatcccagaactctaccggtcttgtccatatccgcggaacatcaccctgggcaatctagcatatttcctttgggccccaacgctcgtataccagccggtctatccccgaacgcctcgcattcgctggtcttttgttggaaagcgtttattcgagtttgtttgtctctcagtggttatgtggctactttccgcgcaatatgctgcccccctcctgcgcaacgcgacccagaaaattgccacattagacattgcatctattttggagagaggactgaagctctccactatctctctcgtgatctggcttgctgggttctatgccctcttccagtcactgctgaacggactggctgagatcatgcggtttggagaccgcgagttctacacggactggtggaacagcccaagttttggcgtgtactggcgatcctggaatcgccctgtgtatatattcatgaagcggcatgtttacatgccagtcgttacccggggctggaacccaacgttggcaggtaccgtcgtcttcgcggtttccgccgtgctgcacgagatcctggtaggagtccctacacataatctgattggtatgtttcctcggacacaatcctaaggctcttgctgacgatgttaggtgtcgc

SEQ ID NO: 20256 - DNA, 2302 bp, Emericella nidulans
aatcccccgtctcctctaaacttactcttggctaatcgcaccacaggataccgtctatgagaagatgtcggtggaagactatgccagggccatccggccgaaagtacaaggtagctggaacctgcatgaggtgttgtccgacgtggatctggaatatttcatcatgctatcctcactgaatggaataaccggcaacgtgagccaagcgaactatgccgcgggtaataccttccaggatgcgattgcccgtcatcgcagcgcacgaggactgccagcggttgccattgacttgggaatggtccgcggggtgggatatgtcgctgaaacggacggagtggccaaccgacttgagcgcatgggcttccgcgcggtggatgaagaagaggtcctgcacctcatccaggacgcgattttgcacccaatccgccatgccactgactcgcagatccttaccgggtttaattcccatcccggggccggtaacacgaatgtattctgggccaaggacccgatactgggcggcgtcctacgcgcaacgggcatcaagtcgaaaacacgatcaaaccgggttcatgatgcgatggacctccgcgaacagctggcgaatgtgccactcccagacgatcgattggttgtgcttcagactgccattgtgcgtaagctagccgcgatgttcttcgtcgacgacgaaaccattcaagtgggcgaatctctcgctagatatggagttgattcgctggtggcagtggagttgcgtaactggcttgtcgtccagctggcaatagaggtgtccattttcgacatcatgcaaagcgcgtctgtgaagcagttggctagcagtcttgcggccaaatgggctgctgtgccgcctaagcctcgaatagcattcgctctgaaaactatcttgtcatgtttttgatagatgctcgttcaggagttagtccggtaaaagaaaatcaaactcgcttgctaagacgacgatactgttaggttagtagttagtagttgttagccatagtctctcaagtcatcggagtgcgtccaaacttaatttcgatatagtaaggccagagaagaatactacgatagcattccgttgtattgggtgtgcatggtttacaggtgctacagctcgatatattaaccaagggactgcttgggccggattattggtgatatgtcagttgcggaagtccttagctatatcccgcccatgcaccctgatatattctttcatagtggataatcgacacttgatgcagccctgaggataccatggtgctcataattctgcgagatttattcgaacagcgggagttccaacccaatattccaatcgatttccttacgtagtcgcgtacggcagtattaactgatgcatgtaccagaggaattcctagcaccacgaccactatactattggcatctgctaaggcatctacttggtagttactaggggatccaagtgcgcatggacgagtgatttgttgagagtctaaaatcgtatgaggtgcgaaacatctacagtaatactcaataagcattggcgcgacgactacctactactacgagtatccaaacaccaggctggaattgcgattttggacccaacagaccatgctttccatcgccctctgccctttgcccgtcaaccactcatacgcctaaaggtttccgtcttttcgtcgtcgcaccagcacctccaccgtttcatccggcatattctgcagctcgaatgtatagttagcgggccgctcagtccgacctccagcaaattggaaatcatagttgagcaagaaataggccatgatcagctttatttcgttggccgcgaagaagcgcccagagcatgcgtgcttcccgtacccccagctcagacttgacgatgcgttggtggtgacaaacccggccgtcttctctccaggagctgaggggacaaatcgaaacggtgaaaatgtcgagggggatgggtagaaatccccatcttgcgagatcgcgtgggcgggcacgccgatgatcgtgccctttggaatcactagtccgtcatggaggatgcggtctgactggatgactcggccaaaagtgactatatatgattatgtcgtccactgtcagtgaccggatggcttttgtcaaaaaaatggacggagggcaattgacgggactcacggagagagagaggattgaaccgttgagattccttcataaagctgtccagcttgagcagtttattcagagccgccttggtgaaaatactcccttcctcgcgaagcactgattcgatctcttctcgcagcggcgc

SEQ ID NO: 20257 - DNA, 2310 bp, Emericella nidulans
agcttctcaaaattaacacttgaacatactgcatacttctccaaggcagcttaaagcgagagttggagacacagcttctgtactccaaccgattatcgggaagttatcccttccgcgaggacctgccggattgggatctgacggtttccttcggtgtcagagcgtcacatgacctggatagtgcttgaaggccatagtagagatctttgagttataccatctattctcagtctttcgagacgcttcagtctttaaaaaactcatcttcaataggaaaaatcatcgaattcattggataaacgtcagtcccccggatttctgttggtagtggacccggccgaggcgcttatctgcgggtcttatcgctccaactgtccgcctccgcgccccctccgcatcggtataaaaggcaccaccgcaacattggccgcccctctttcaatatcactcttcgttacaccgtcggagaacgatgcttccaccatttgattacttcacctatcggcgtgtccggtaagttacctggagtcacgggcacaaaaagaatgtcgtttcttgttttggttgctgacccacgtaggaccatcaagcgccaggaacgagctgcgcggttcgcttctctgcctccagactatcatgcgccctttacatcagcggacaaaaggatagtttcggagcccattgaagagctcgtacagacggtccaggagggcacgctctcccctgtcgatgtcctccggacgtacggcaaggttgcgtgataagcacaagagaagacgaactgcattacagaacttctacttcccgaggcggaaacctgggctcagactgaggtcaacctcaagggcccgttggctggagtgcccgtctcgttgaaagactcaatccaggtcaaagggttcgacatctcactcgggtactcccgtctggcggggaaaccgtatgcagaggatggcccgctggtgaaactgttgaaagatgcaggtttgtaccctggccctgtatgtttggccctgtatgttagggaggctgaccattgcaggcgcggtaccgtatgcgaaaacagcactccctgtgacgcttctgtcgttcgaatcggccaacgcgctctggggaccctgcctcaaccctcacgtaccccagtattctcccggcggatcaacaggcggagagggtgctttgctcgctctgggtgcccgcatcggtattggctcggacgtcgcgggttctgtccgtgttcccgctgcatggagcggtatctactctctccgttgcagtaccggtcgctggccaaagaatggtgtcaacaccagcatggcggggcaggagggggtgccgagcgttttcagtccaatggctcgtacgttaaatgacttgacgtactttacccgatcaatcatcagcatgaagccgtggaagtacgattacaccgttcatccaatcacctggcggagtgaggaagagagcgaggcaaagagcaagtctctgagagtcggattgatggcaactgatggtatgtcccaagtcgcctaagtagtatcatactaattgaacaggcgtcattcctcccactccggctattcaacgcgctgtgactaccacggcggctgccctttctgctgcaggacaccaagtcgtcgagatcacacccccagcgactgcggacccgtttaccggccttcaccttgcctcgcagctcttgaattcagacggctgcgagactttcaactcgcacttttacagcttcgagccgtccgatccgggtgctgcgcaactgtccctgattgcaaacctgccccgtcctcttcggtacctctactacctctatgtgcggtatatccgccgcgatgagaaatgggcaactttgatccagagcttcggttccaagagcgcagcccagcaatggaagctcgtcgcaaagcgcgaggcttccggtcaacctggcatgcctggtgggacgctgagtcacagcagtacgactttatcctgtgcccggtcaacgcgacacccgcgcttccacacaaggccatgaaggacgctgtctcgtcttgcggatacacctttctctggaacctgctcgactacaccaccggtgtgctgccggtgtcgcacgtcgacccgaagaaggatgctctgacggctccgtataaaacggttttgaagcagctgggggccaaccatgctctcgcgcagggtgcctggaagcactacgatgcgtctaaaatggcaggcctgcccacggctgtgcaggtggtcggtaggaggtggcaggaagagaaggtgctcgggtacatggcggccgttgagagc

SEQ ID NO: 20258 - DNA, 2312 bp, Emericella nidulans
tctcacctggttggggaactggaaacaggctcagcctggaccgccgccgctcgtcccagtcaacctgactatcttgcgcgatggcgggaataagtcgagtccgctactacatgggatcatgttcgaggtacctacccccaccgacaattgttacaccccgtgagagctctgcaggctgtagacgtagctttgacttacgctggacaccaggaaatggaccattcaggtttggcacccatccacctgtcttctgatatgccacctttcttttagctgcccggactcggcatgatagtgacggccaacaggcgacggcggcctccatggaaacctccttataaacaacggttttcaaggcgacgacccggggctgactggctataaagccattgggagtgtccaaatcaaacaaagccctagcatgcccttgtcggcggcgataaagtcgtctctgtctgtctccgtgcgtgcggacgcaaaggggctcgtcgggttcgcaaacactgggtacaacgggatcaccgtgctgaagcagacgtactggaccagtttctacatgaagggcgagtacagcgggaccgttttactgaggcttacggggacagacagcggaactgtgtacgggagtcggaatctctcggtgaaaagtaccggtgggaaatggacgcagtatgagacgaccttcgaggcaaacgaaagctatgtcgcggagaatgagtggcagttgctgtttgatgcggccactgcaaagggacatcctttgcattttgggctcgtgcagttgtttccgccgacgtataagaacaggttggttcatttctctaggaatgaagaatgcaaaatagggataactgatatgatctaaactaggactaacggactgcgaaacgacattgcgcggccaatcgcagacctcaagccaaagttcttacgctttccgggaggcaataatatgtgcgcggcgagtctgttaagaacgtatggatcaggctaatgatgcagtgagggactcgatatcgactcacgctggaagtggaacgagaccatagggccactgatcaaccggccaggacgagagagtcagtatatgacccaatccttggtctcctgtgagaaccagacaagctgaccggccaggcgactggcactacccaaacaccgacgccctcggtctggacgagtatctctggtggtgcgaagacatggatatggttcccgtgctgagcgtctgggacggcaagtcttacggggggatcgtctcaggcgaggagctgcagccttatctcgatgatataaaggacgaactcgaggtaacccttccccttactcttctttctcaccctctccgagcctatctaacccccaatactaatgagcagtacctcctcgggcccccatcaacgcccttcggcgccttgcgggcacgcaacggccacccagacccctggccgatccagtatattgagattggcaacgaagacgactacagcggtggttgtgacacctacccagaccgtctcgtccagatctacgacacgatccacgcgtcgtacccaaacctcaccttaatcgcaaacaacatggacgagaactgtctaccagagatccctctgccgggactctggcacgactaccactactaccggtctgctgacgacctcgtcgccatgttcaattactgggataaccacgaccgcggggacagagtattggtgggtgagtacgggtgtcgcaatgacagcaaccccgacggcgtgttttggagcttcatgcaagggtcttgtgcagaggcggtgcatatgattgggctggaaaggaacagcgatgttgttatgatggctgcttatgcgcccttactgcagcatttcggatatacacagtggtcggtgtgtactccctctgcctccctagcctatctagggatacaccctgctgatcgtggtgaggaacagccaacactattcggctttgaatcgcgccccaacagcctaaccctgtcaacaagctactacgtcaaccgcatgttcagcacgaatcaaggctcgaccgtgcacaaggtgcactcaacagccgggtttgggcctctatactgggtcgccacgtccaacgagactgcctatcaggtcaaattggccaactacggcgccgcaaaccagaccgtcaatatccgggttcccggcgtggggaggggagtgctggagatgatctctggtcctaaggatgcgagtaatctgccgggggatatcaagattgtgccggtctcgagaaacattagagctgggaaggaggggtatacggtgcatatgccaccc

SEQ ID NO: 20259 - DNA, 2317 bp, Emericella nidulans
ttttctcctgacgcctgctcttttactgatcaagttgacaaaggatgactgtcaagctttagcattcgtgcaggatgctatgcgctttttattacgacattaccacactttgtcacactggccactgcaaatctacagctctgccatcattttcagtcctgaatcaagtgttgtgaaaggcgaaaaccttcacaaagttcctgtatggctgggaagagctcctcctatggaggatagttggacgcctatgatacagacactaacaggtcattcagaggctgtctggagagtcgctttctcacctgacggcaagcaaatagcatcaggctctgacagtggtttgattaagctctgggatactactacaggtagcctccagaagacactatcagggagccacccgaaaaggcgatatcaaatacagcaggagcaagtcaaggcaatggcgttcttaccagatagcaagctgattatatcgggctattatgatggctctgttatgctctgggataccaccacaggtgaccgtcaagagatagccgaccacttcggcatatcaaaggtcaattatacctacttgcagccacctgaacagggcgggtacggcctccacgcaggggctttctcggcggattgcaaacagattgcagcattcggttggtcgcgtgatagtacatgtatcatgctctttgatactgctacaggggacctccagaagatcctaaaaggccactcacatgaatgctcaactatggccttttcgtcagacagcaggcagcttgtaacaggctctgtagactgcactgtccggctctggaacactaccacaggtgaccttgaaaagacgttcgttggtcacacaggaacggttttgagtgtggccatttcatcagatggtaggcagattgtgtcaggctctattgaggccgtcaagttgtgggatgctgcaacaggggacctgctcaagacactggcaagcggttttgccgggagtgtggccttttcacccgacagtaggcagatcgcagcaggctttaaagatggcaaaatctttatttgggatgctgcgggcactcttcagaagacgctagagcgccatccaggggcaattatgtctatcgccttctcaccagacgtcaagcagcttgttacatgctctactgattcgacaatcaagcgttgggatattaccataggtggcgttcaggaagctgtaggccactcaaagcatgttacaactatggtcctttcaccagacggcaaggtgattgcgtcaggctctgctgacaagactatcaagctttgggatgctgcaacgggcgatctccagaaaaccctaacagggcatctagacacagtagagaaggtggtcttttcactagacaacaggcagatcgtctcctgctcctccgaggcagtcaaaatctgggatgctgccacaggtaaggtccagaactcatttgagagcgatgacgtgttcacaattgtggctgtctcacctgacggcaagcacatcgcatcaggccattgtaacggcaggattaagctctgggatatggccacaggcagtctcctaaagacaatggcgggctacagaagcaaatttgattccctggtgacaacagaggttttcgatatccaactccaagaagcgatcttcaatacccaaatcacggggctggttttctctcctgatgccaagctaattttatcaacgtccactgatagagccattaagctgtgggatgctgcaacaggagacctccagaagagactaccatgccattcagacagcatcattactgatgctttttcacgcagctcaggctatccaaactggatcttttcagtggccttttcatcagacggtcagcatatcgcggcagcctctgctgataaaaccatccgggtctggagcatcgaaaaatccctcaaagcctcaaaatatctgggccgcgctgtcggtagtcatatcaaatcgtcccggccatggaaggagattaagccatccgctcaggtgtatgacgtgatatttagcccaggcaaccaataccttgcaacagacattggaccaataccactagagagcaccccgacaaaaggagaaggggagcggccagtgaggtcggattcggattcggattcggattcattgcagagcctgtgccaccgagatcagtggttatgctatggggcaatgcccttccttcggctgtcgccggacttctatgttactcgttgggatgcgcacggtgatcgagtggttgtcggatacgacaatggtcaagtctcaagctttaatatcgatcgacggagc

SEQ ID NO: 20260 - DNA, 2323 bp, Emericella nidulans
caaagcccggctctcgctaccgatactcccgttacaactggtcctgtggctggacaggataaagttgtcggccagtctgagaaagcccttactgacactcccgacggggaagaaccgaacgaccacgagaacaagactctgcgtcatgttgccgaaaaccttccactttccgcttggctagttgctattgtcgagctgtgtgagcgtttcacatactatggcatgtctggattattccaaaactacgttcagcgtccctataacggtggtgcgcaaccccctggtgcgctcggtatggggcaccagggagctaccggattggttaccttcttccagttctggtgttacggttcgtcttccggcccggctcgagcttaggaacgaattaacgttgggatctagtgacacctatcattggtgcgatcattgccgaccagtatctcggcaaatacaagaccatcgtcctcttttgcggcgtctacctcgttggtctgctgatcctcgtctgcacgtcgattccaaccgcccttgaacatggagctgggcttggaggctttatcgttgccattctcattatcggtttgggcaccggtggaatcaagagtaacgttgctccattggtaagtcagcctacaggtttctctaaccggttcaccgctgattcccctaagattgcggaccagtacaagcgcaagaaaatggctgtctcaactaccaaaaagggcgaaaaagtcatcatcgacccggcgcttacgattcaacgcatttacatgatcttctacggctgcatcaacatcggttcgctttcgctgctggctaccccttacatggaaaagtacacgggattctggtcggcttacctgctgtgcctttgcatgttcgccgttggcacggccgttatcgtcttgggacgcaagtactatgttgtccgtcctccacaagggtctgtcattaccgacgcattcaaagctctctggatcatggttgtcaaccgcaacatggatgcacccaagcctacatggcaggctgcaaacggtggaggcagaaccaacctgccctgggacgatcactttgtcgacgagctgaagcgcgcccttgtcgcttgccgcgtcttcgccttctatccgatctactgggtcgtctatggtcagttctcgagcaactttgtcagtcaggctgctcagatgcaggggcacggcatccctaacgacttgatgcaaaactttgatccgatttccatcattgtgttcatccccgttctggaatccctggtataccccgttctacgtcgcatgcgcatccggttccgcccaatctcccgtatctcgctcggcttcgttgttgcttccctggccatgatgtacgctgctatcgttcagcatttaatctactcggctggcccctgttacgagcagcctctttgtgatgcttccattggttccgatggttcgacctcaggcaacaacgtccacattgctatccagacgcccgcctacttcttcatcggtatttctgagatcttcgcgtcggtttctggtctggagtacgcatacacaaaggcgccgccatccatgaagtctttcgtgcagtctatgtacctcttgactaatgcctttgctctgcccttgccgaggccttgacgcccgctgcatttgaccctgctattatgtggatgttcgttgggttggccatcgcatcgtttgttaccggtattctcttctacatcatctaccacccgcttaatgcccaagaagatgctatgaacgctcttgatgccgacgaccccgatgttccggttccgcgtatctccgatgagaagaagaaggaagaaaactagtcatggagtttaatttgatttcgaaatgaagatgatttgacgctctacgagcggtctatgcataatgctaatccgcgatatgttgcatagcggtcgctgctgagcagacgacggttcaggtgtaaatagttaatttttctctcgagaatctccacatatccagatctccattcactgacccgcgctccgtattcgtagagctttcgaacgaaatctcacacaaaccatcccgtgagtcaccgattttccagatctctcaccggacaaaccattcaatcttgtccctggagccgccgctcaactccgctcgacttgccctacactgaagaaaataggtgaatccctattaaaaataaatatacggtgataggataacgaattgaaagttaagaattcaaatttcgaagctggtgtgaatcttgactaaatctcatttaacactatccgacaggagaggcagcctcaatttgacgtccggcgaatcgg

SEQ ID NO: 20261 - DNA, 2332 bp, Emericella nidulans
ccgataacaccgaagagcctggtgatagtctgactgcagcaatcaacctgattccctccttctgctgccagcgaagttattttgtagggctgtgcctctcattctagttccaacttcccaacaccatttacgtttggaagctctattgtttacacgcctcgcgctcgcccatgccgctcagcctctagaacctcgccaatcgccaactcgttcaatccaggtaggcactggcaatggagaattacctgcgtgtctggcgacagcaggcgaaagttcgtggccagtatgatgccgccgtattcattggagacaaagtccttgcgttgacaagtgagctcttctcgcgtttgcaccccggcaaccgattaacttcgatgcatagacagtgacgaagatgccctttggctggccgaagtacatttttcgaacaacaactacacgcgagctcttgccatcctctcccgtcaagacctcatatcgcggagcaccgcctgccgctatcttgccgcgcattgctacatcaaacaaggccagtacgagcaggccctgaccgtgctaggcgaccagaacccaacccatctaatccgcagcaacaaaagccgccgcaaaattcagcacctcaatgggcatagtcgaataacactccgcaatgccaagtcacgctatgaagatcgagaccgtgaagatgctgggaacattcgatatgaggcgggcatgtgctaccttcgagggctctgtttcgccaagcagaatgcattcgatagagcgcgcgactgctacaaggatgcggtgcggattgatgtgcagtgtttcgaagcttttgaccagctcatgaaaaactcgctcatgtcgcctgcggaagaacttgaatttcttgagtcgctggactttgactccataacaggtgccgacgcgccaatctcgcaagaagcggccgactttacgagaatgctgtacaccactcgtttatcgaaatactcctctccagcggtgcttaccgatgccactgaaacgttatccactcactacaaactggccgagaatccggacattctcctgtctcgggcggaagctctatatacccagtgtcggtttgcggaagcgctagagttaacttcatcgattctttccacgtcccgttcctccttatcagcccagacgaccgcaggccaaaaccacctcggtcactcccccactgtatatcctctacatttggcctgtctatatgaaacgggggcaacaaatgcactgtttctcctgtctcatacgttggcagatcactcacctgaggaatcatatacctacttagccattggggtttactacctatcagtcgcaaaaattgcagaagcacggcgtttcttttccaaagcgtctttgctggatccacattccgcacccgcctggatcgggtttgctcacacttttgcagcggaaggagaacatgatcaggccattgccgcatacagtacggctgcgcgactattccaaggcagccatttgcctcagttgtttcttggcatgcagcaccttgcgttgaacaatatgtctcttgcccaagagtatctgtgtgctgcgtatgcgatgtccacgggaacagccaccggcacagttccgtcaataccctcgttgccgtcgtccgagatgtcgcccctgggcggagatccgctggtgttgaacgagctcggtgttgtgctctaccaccagaatcacttggagggcgcggtggatttattccgccaggcgctcggccttgcgacatctcttcgatgcgagccaggcgcctgggttgcgacccgatctaatctcggtcatgcattgcgtcgtttaggtcgatactctgcggcattggatgaatttgacgagtgcctacgaatcgggtctagtggtgcaagtcttgggtatagcccgttccttggtggaagcggaggcaatgcctctggagtggcgtcagccggcgtaagtggctacgaggaacgtgggctgattgggtcattgtatactgcacgagggcttgttcttttggagatgaaccgcactcttgacgctgtcacaaccctccacgaggcggtgcgtgtgttgggggccagtgggggtggtgacgctgctggtggggcgggcgtcgctgggaccctcctttcacgggcgttggagatctgggccttggaaactcgcgaaacagaagccgggctgtcagaagacggcaatcgggccgctaaaagctcgacgcgatcgcgcgacaagggcaaaagccgggctgctcgacggcgaatagccgcggacgactcatacgcagaacagtggattgacgaggtaacgggtggcgtcccaa

SEQ ID NO: 20262 - DNA, 2342 bp, Emericella nidulans
cggtgaacgacttcttggcagtcccattatggcttgtcgcctactgttgtaagtctgaagaaaatactcatctttcactgcttaggtgacctggcactctcgtcccattaatataggagctccggcaaaataggtaagcaaatgcatggatcagccattagagagtcgacctagcgaatagcacagtatcactcgactcaatgaatagcgaaatccatcataatgaccagaatttgaaacctctgctggtttgcgctataaggctgtgtttcttttttcttctcaccggcttcacaccctccccaaagcggaaacttaccacctgcgcccggccaacttgattgcaatcaaacaacccgggtattgccatcaaacaccgccatcttgcttgccgatgaacgcacactcaacatgccaggatgaccccgcccgcagttaataagaatagtcgcccgcccgatcctgcgcgccgcataacggtctcggggttggaagtgaccgtacaaaactccaccgctaaccagtttctcgcgggggccgctcggaaagcgaggtacgcgtggatgaattctcctctcgttcagcgcgacgaccagactcagacgacagcactcccaaccccggagccggcagcttcagctcgtgcttttgctgctcgtgctcctcctgctccagcgtctccagcttctccagctcctccgatgccagatctcccgccctcacaccagaatctcgcctcattccgcagtaatcaaagtgctatcgcctcgcctacgcccacaattccccgaaatgcagccactcgtctccagacttcaccctcttcgactacaataccgcagcagaagcagagtcaggaaagtctggagacacagaagcagggctgtctggaacagcagtcggtctcctcacttccatcgccggaccccaccattccccccagatcgcataccagtccgatagctgccggcgagagaaatggggcccccattgccagtccctccatgactgctttcccgtcgcctccgctgcagcaacatgcttcaaatcaacggcgtccgcaaccaaatggttctactgtaggaacatttccggcctctattccgtgtgtggatcgatttctgtctgcgctgctgtcttccactcgggaggcgtatacggaggcagtgacttgaggtctgctcgccgtcgaggtccaggtcaaggtcggtccaggtcgcggattgagagtgcgtgcggtagtgcggtatgtagtattgtgaagaaacaaggggcttgtgagcgagcaagaatgtgattatccagggataatgatgatatctttgaagactcgggagtttcacaacattcaacatgaacggccgcgagcgccgcaggtggtctatatactgcctggacagaggtacttctggcacgagcgtgcctgtaaatcattctattttctgcctagaacaaaacccccctattcttcctaggttttgggtctcctgggacggaaatgacctcgacttgacggcatccactcgctgattgctgggtgtcatgttaatgacttttccggcggttgtcttgcaggtctcttgggtagtagtaatctaattgtacactgtacgtggtaccgtgacttgtgcgagttggaactcttgcgtcctcacggtacatgcccgacccaacctcaaacctcagcctactcagatgagatccgatgccatcttccccaacccgcgccatggcctcgatcttagcctctgttggtcctcgatgactcgttagcacctctcgttctcattttccggtgctattttagcaacctccttttgcgagtgcgtgatggggcggtgctagttccttcctcagggggggggctctatctttgccactccttgactgctctggagcctttcatttctccgtaggcactcaactcattatctactttggctgagactccgaccagcgccgcctcctgattcaggttcttgttcaaggcgcccctgcaaacgcctgcttgccggacctggcctcgcgggaggttccatctatcaattcccaagtttcaactttccagcagagtgagcgcttcgaggaattcccagagactgtcggggatccgcaggtgggggtatgatgttccagattgacttcttcttctccctgaaaaggagctcatacccacccgagctccatgctcttctcttcgaaccccgttttcccgaatagcttatttgcattaccgctagcagcctacggagcccgtcggcgacctctgccagtcataataatattatttacggagtttcggagcataccaatcaagagtcgagtcggatgccttgttttgg

SEQ ID NO: 20263 - DNA, 2342 bp, Emericella nidulans
catggtcgacggttgcgatcatagaggttggtgatccaaacatgccgacgaagttggggtctttgttgcattttcgtgccgaggtgtagatttcatcgtagaaatgggggtctttgacgtgtatctcccaaggagttattcgcacaataggcccttccagcgagtcaacacagccatgatcagtttggtggatggagcaagtaccgtaaacttggtgcatttgctcaatctcccacaggaactttccccctcgaacgacatcgtggtaaaattcgtacagaccggttgctgctgtgatttttgggccggggaatctcgtaagaggatggaagaaaaggcgatagactgttctggtgagatagaaagatatgatgagcaacaatggcacctcccatcgcatccactgggcaacagtcatttcgggcatatgctgactgcgtagaaaggggaccgggtagtgttagaagtctgatgataatcttattatataacctccaagaagatttgctttctgctcaagacccttcagaccacctggtatcgccctatcacaagtctatttgataaagtctaaccataccagcgggatctagggcacagttatataattactcagtggtcgcgcaaccctactaaagttacatgtctaataagaacccatatggtgcaggttcaaatactacaggcaaggcagattgtgttaactgaaccagaatcattggagcccttctagcggatatagttggctcaacagctgagcaattaacttcgatctagagctctattctgatctggaatgaacacgttatcaccaacgtcgtcgctatcagagctttattggttctgggtttaaattcagtttgtcagaggctcctaattggctttggctatctcaattccgtttcaagccatgggccagcgagtgggatggtaatttgtcggcacatttcatttcagcatgagggtgacgctctatgccgccgatacgcataaaagtccaacacctaactagcgccgctaaccctggctaggagcgcatcatggacaaaatctcggttcaagatctagccaacatcctggtcgactttctcaaacggttcaactacaatgataccgcccgcctcccctggaagagctgaagcctttgtatgacttcgtccttccgtacattcccacaatgagaaaatcgtccgagagctggccgaatacgcccactgcacgttcccgttccttccgctcgaggtgcgccaagccgtggccctttatgacacgttccagatgtcggtcgacgacctgccagtcgagcaatacgacagtctccatgacctctgtgtccagctctcaagcggagaaacagtaaaacacccggtttggaatggatttttcaactctcttccaatccttctccaatattacggtccgtacgcgcagacgaccctttttcgcggggcgctggaattcatccaggccacttgtctcgagaggacgctgttccgcggatttcccgggtcgtcgtaccctagctatgtccggcgcatgagcggccaaggtcccgtccaggcagccgtctgcttccccgaggccgagttcccgcaggaacaatatttgccattaattgcgtcgctggaggcggagctggaatactgtcgactagaaaatatgactgtctaagactaatttggaagtcatgacgcctttttggcttagcggtatattttaccgatagttatgagcccggttctccactaccagtgaaaattcctcataccacacccaaggatcaagcgttcgaatccagtttgtggcattgtacctagtataagtcggtgttagaagatatgaccgcattgggtagtgtccagaaaacatccaagatagctgaatgctataaagaaatgatacagtttgggtgtctgtaatataaggatcatgtgtaatacaagggtatcatttgtattactttcagtatggaaatacaagtctttcatactgagggggtgtgtcgactagaaaatatgactgtctaagactaatttggaagtcatgacgcctttttggcttagcggtatattttaccgataaatactttgtaggaccggtaaacgacctcttttcattttataaggaaagcggtacgcattcgaacggatcaattacccactcaaggaggcgacctgcactggacagtccgttctggacattctgaccgatttggtcaacaccgcgacggggtcgtgggtcagagtaaggaagatcctggaggcagtgggggacaagaggctgtctgatcgcgtcggcgaattcttccaaggatatgtccggcaccacctttactgcagccg

SEQ ID NO: 20264 - DNA, 2347 bp, Emericella nidulans
cgcccaaggagaaggccaagattatcaaggatgtgactcaactcgtgctgtcccgccggacgcggatgtgcaatttccttgagtacaaaggtaggctaaggtcatcatcggagccggggcctacaactccccgcgccggccacgatgactcaagagtcaactctaactacttgcctcctgcagacaccaaagtcgtctaccgccgatatgcctctctcttcttcatcgccggatgcgcctcgactgataacgagctgatcacccttgaaatcgtgcaccgatacgtcgagcagatggacaagtattacggcaacgtatgcgagctggacatcatttttaatttccagaaggcgtacttcatcctggatgaactgttgctggcgggcgagatgcaggagagcagcaagaagaacgtgctgaggtgtattagccagcaggacagtttggaggatatggaggtgagtccataatgcagttgttatttcacccgtgcacttcccagcgagggttatcgtggtggcgatatgtatgtcgttgcgtgtcggcctcttcatcgtcttcagtcgtcaccatcttctctacatttctcggatagtccactcgtacccccagaccccatggcagcattgtctgtatcggcttctcgatttcagaccttccccattttaatcacacaacgcacgattgattatcctgctatgaaaccacgtgttgctgcgcatggccgtaacgtctcttcacctcaggttgaggaagatgtggttacgaagatcatgtaggagcgtcatcagtgatacgcttctgtttctataattggtttgcttcgtgggcttgcaaggactttttattggcgttcggacgtatataggcgttgatcttcactactaccacccagtgactaataatactacattgactccaatcaggaatccaagcaagtgatggacaacctctcgcagcatggcctcctgtgacaccgaaattcggctatcgccttctgcagttctctggttaccgttcggacccgtgaagtgggtgagtgatatcactggttgatcgctccttccacgtgactagccccctcgatcgcaacgcgcaacggctcaacctcaccagcgatcgcattagcatcatcataccattacccccctcttcactcctctttcacctcctccatcctcccagtgccctaattgcgacagctgcggttattgcttaacaactgtcccatttccttcttaactatcgactatcacactagccgttgtcctttgccggttctatctgcgaccgtggctcagctaagacaacagggatcacttaccctcagttgtgaaacaccttgttacttcattatttggagatttctcttgaagagttgtgcaagcctttagtcttgcgatacatatattattttcgtcttatcctgcctatgttgtattgagcggtgaacctccatcaagcccaagatgaaggtgagatacatgcaggccccaaaccgtggcctgaactgacacgactttcaatagtttctccctctacccgaatttgaagacgtgacgagctccctgaatttcgacacggccgactgccacattgttgggggttgcgaactgtatataaccaaagccccccggtccgatcgcaagctttacaagaacattgaacaatcactggaagcacagtatgagtctgtccttcgtttatctgcgtcactgtcacccccaactgcatcggatgcagccgcgtctctgaacctgtcccgatcaagcccattcggacccctgagtgaccattcaagtcgacggacgtttgcgtacctcatcgcgactctgaacgccagccacccagattacgatttttcacatgttttgcgaccttcggacttccaccgtgagaagaatttgaagagggtaatgaacacaatcgactctacgctgtttaatcttcgcccacgcgaaacacttgatcttacgcccccatccccgtccgcagtatctggatcatacaactctgaagcttctgccagatggggtcggagaatgtggaagatcttggatgaacagttatctcttaaggagtgcaacatctactcatattcgccggacgaggatccgtcggatgcggacgacggggccatctggagccttcactatttcttcttcaaccgtattcgcaagcgtgtttgttacctttacgtcaaggcaatccccatcttgagtcacacacccagcgagggtcttgctactcccgtgtcaaaaaggacattcgatgatggtatcctcacgcccaatcttagcacgagcaagcgtgctaaatactggttcggtgaaaatgtcgaaattga

SEQ ID NO: 20265 - DNA, 2350 bp, Emericella nidulans
cgacgccggattcggatcattgttattggtgccggcatctcgggcatcgcgttcgcatacaaagtacgcgagttggaaaatgtcgagtaccagatctacgagaagaacgaggacgtcggcgggacgtggttcgagtcgcggtatcccggatgctcgtgcgatatccccgcacactcgtatacgtatccatgggcggggaatccagaatggtcgcgagtgtaaggccttcaaacttagaattcctctcgtttgtgtttgctaatagctaggaacagatatgctggcgctgaggagatctggagattttatcgcgacagagcggaggaatatggagtgtacagaacaacaaagttccgccaccaggtagtgggcgccacatggaatgaggcgcagggcagatggacagtgaagattgaggatctggccagcggccaggtctttgaggactcggcggaggtggtgatcaactgtgccggggtgttgaagtgagtggtgcagccttagaatgtccgcagacattttgctaacaggataaacgttacatagtaagtggaaatggcctgatatcccgggtctgcactccttcaacggcaccctcgtccatacagcccggtatccgcaagacctggatttgacagataagagagtcgcggtcatcggcgccgggtcctctgcaatccaggtggtgcctacgattcagcctggtaaggacagtttgacttctttattcaacgttaagaatcattgctcacactgcgcttgctagtggtcaagtccctcatcagcttcaaccgctcccctacctggattgcgccccagttcgccggccatctcgcctctgcaggccgagcaacagcatacaccgaagaggaaaaggagaaatttcgcaacgaccccgactacctgcggcaataccgcaagcagatcgaccaggcgctcaattcgcggttcccaaacttctacaagggctcgcaggagcagaaggcgtcgaggcagatagtggaaacgggcaatgcgtgagaggctctccaagatggaccctgatctcaggaagaagcttatcccagacttcgacgtgggttgtcgtcggtatgtagcagcactgacagtgaaaggaaggctcgaagctgatcatagaacttgtagagtgacccctggtgacggctacctcgaagcattgcaggagccgaacgtggaggttgtccgaactcgaatccaggaagtcactcctgagggggtcgtcacagccgatgggaaactgtatgctgcggatgtgatcatcgcagccacaggctatgacacctcctacgtgcctccattcccgctcatcggacgcaatggggtggatttgggaaagagatgggctcagacgggtgccgaggcgtatctgacctgcgctgttcctgatatgccaaactatttcagtgcgttttactctcctactctgttcaactgatattgactagtgtcagtggtggttggtccaaacacgcccatctccaacggctcgctaatgcccgcaatcgaaaaccaacttcaattcgccctcacgtttgccaggaagatccagagcgagggggtcaaagctgttgtggtcagccagcaagcgacgactgagttcaacgagcacaaggacgccgtcatgaaactgctgaccttctccggtagctgcaacagctggtaagctggcctcctaaccctgaagcgtgtcgctgtccttgtctcgagagataagctaaccaccatgaattacaggtacaaaggtggaacctcagacggcaggatcgttgggccatggtgtggctcgctgaatcatttcttggagagcatcgcagagcctcgactacaggacttcgagtttacatacgagacccagaaccgtttcgcttatctgggaaggggcttgtcacttcgcgatgtccagaagaaggacctggcgtggtatattcggtagcctggagtatatatgataatgttaatgctattttgttgtcgctcctgaaagaagtatgatacgatagtcttttctgatctgtcccagcaacagaatgaataccatttctcagttgtgatggtgattcttcactagctagtgaatacatatgatgactagagaatgctgtccatagacgaaatgtgggaagcttagccaaagtccggttcatacggcttacgctactagtacgatagttccctgtggagttgtaaatatcagactcatcaagcatattctaaacctagatatctgatcgctaaccgcagaaacttccagagaggccgcctgtcctgcaggaaagggcacaaacagagcacagcacctggataacaacttattgccttaataattttt

SEQ ID NO: 20266 - DNA, 2353 bp, Emericella nidulans
actatcagaatcaagagtcctgggatgttagtgaaggcagtatggttgctgaccggtgaacatggcaactgcaataaccgtcacgataaacggcttcgaagaccgccaggaaacgccccagggctctttatgggtcattgtaggcagggcgagcttagacagaaaaaactgcttgaaggaccagaaggatgcaactctcttacatgggacaaatatctagcactgatgctggggctgccggaatcacgccggcctcatgatatctcacaagcgatcattcgcaaagacatatcgtcgaggtttctacctcaaccaatcgttgccacgtaatcatagcatgcttgatagctcaaattcggggaacaagcaaatacaagtttactacacgtcttgattacgcagcggaacgaatatgctttttgtagtcagatttaccgaatgtacgcaccacccagggcagagtattggtaacttccatgggtgtggcctcatgcagtagggagatcttttccgccgacgcaatatagacctatcgccagcctgctccagggcagggaaggccagcttcattcagctgagccaccgccgtaatgcgacgagggtaaacgttctagacgatctagagatttcggcagatattgaagatatatgcaggacagcagagacgagatgtagtgccaattgcaaacaatacgcagctaagagtattttatttttatatagacactcgatgtaactgcacggtctcatagacagcccagccgtgctagagaggagcgccccgggtcgacttcgccggcagacgatgctagatggtttcacagcatcgccaaactgtccgtctcttcattctattcgttgtagaccccgcttttagtagttagctaggagcagctatcgtcgtacggaagcaattgaatttgggaagatcgcgttcccctcaccgtgtaaacaagccggctctgggctgttgttgcgcatctggatgcaggccctagcctctacagactagtatatctgtatgttctgggccaagttagagctctcacagttcgagtcagatcatcatcataaggtagactgttaaaatgcatgtctccagagactaccgcccctggtctgcagtatgtcctccccagcgcccccgttgatgacatattctatcttttgaaacgtgacggcgccgtggtcatccggaatttgatttcccacgaagacctggatcagacatacgaagaaattgaagacacgctgaacgcggacctagaatgggacggcgagttctttccaagtctgttctgtccgaccacctccctccagccctaggtctagctgtctatccactgacatccgccagaggaaactaaacgggccaatggcctcataggcattagcccaacctacgtccgcacgcagttaatgcatccgctctttcaagcgaccagcgcccatttcctgaccacacgaagcacatactggtggggcaacaagcgcaaagagtccgtctccaggccgtacgtgcaggcggcattggctatacaggtcgggcccggtgcaaaggcccagccgttacattgtgactcctatatcaatcatcgggtcgtagacgagatagccgagtggaacgatgagcgcgatgcgaaccgcgagacctcgcttgggatgtttgttgcgggatgcgaggtcacaaaagagaatggggggacccaagttatactgggaagtcatctatggcaagtagtgaatgcatccgaggagctcctggctcactctaatgggaaaataacaggtcttcctgccccgatactccacctcctgaatccgctatcattgtgcccagactgtcaaaaggtgacgcattcatgatgctctcgtcccttcggcatggtgggggcaacaataccacgtccgatcagcacagactcatctactgcagttttgcgacgcgcgggttcctgcgtcaggaggagaaccagtatctcgctgttccgggggatgtggtgaagagctatgacagggctacgcagcagttcatcgggtactatatcagcgaaccagcttgcggacaagtaaaccagcgggaccccatctatgtgctttatccggaggatgcggcaaagccgagtgatttttgatctatattttacacttctgaggcgatgatgtggactttgagagaactacatatggaaaggcaagaactgggtagggcctaccctgagaaaaaaaaaattaaaggtatcatttaagacaagcttgttagctgctgcaaacaacgagcagaatgaatagagggatctgtagccagacttatgtaggagtatatggagagttcctccgcatagggagcgca

SEQ ID NO: 20267 - DNA, 2356 bp, Emericella nidulans
tttttcccaaatcttcttctttggtggtcaaccatcatggcatacaccacgctctggaggcgcttgtcgcctcgccagctcaatgtcgccgtccaggtcttctcgctcatctgcatcttcttcgagggttacgaccaaggtgttatgggcggcgttaacgccgcgccgtactatgtcaccgaagtcggaatcggcaagccggatggcactgtgactgacactacccatcaaggaggcattgtcagtatctactaccttggctgtatctttggctgtttcgctggaggctggctggctgatcgcattgggcgtatcaatggactgtttatcggtgccgtcttcgcggtcattggaggtgctctccaggcagcgattcaaagctcagatttcatgctcgtcgccagagtcgtgacgggcgttggcactggaggtacgtatctcatctctccctacgcactgctagttatgggcctgtgctgatcgaacagcgctgactggcattacgccggttctggtatcagaaacctcgtctgccgaccaccgtggcggattcttgggctatgttttcattgccaactgtatgttcctcgcctgaatttccccttgttctcgacgcaccgcatactgatcctgcagacctgggaatctcggttgcgtactggctatcgttcggcttggccttcatcaataacggatactctgatatcaggtggcggttcctgcttgccttccagtgcgttccagcgatcttgctggtcttcttcatcaagatgctccctgattctccgcgatactatgcctctgttggtcgtaatgaggaggcccgtgatatgttgacaaggctgcgaagccacaaagcaagtcaggccgagatcgagcaggagtacatggagattgtagccgtggcccaagacagcaagcccagttcgccgatccagtttatcaagatcttgataggcaagagcgggcggccgggaagcaatctcagccgacgggcctggttgtgtgtgtggcttcagattatggcttcgtggaccggtatcacggtatgagaatcctacccggtcgtatcgttctagctaaaccgcgtcaggctgtcacggcatactcgcccactctcctcagtcaagctggatacagcagcctgacccaaaacggcctcgcaggaggtctcaacacgattggtattgttggaaccatcatcagcgcgcagatcgtggaccgaatcggtcgaagaatgtgcttgatgctcggtgctctgagtctcttcatcgttgaagttatcgtaagtttgccccttttatcagaatagacccttactgatccgctaaggccggctctgtctatgaagcctcccttcacaacccagaaaaagcggctgactacgcgcccgctgcagtcgcaatgctcttcctgttcaaccttgcctatgcctcgacttggggcaccgtggcattcctcgttccaaccgagatattcccgtctgacctccgtgcccagggcaacgggttcggcattaccgggtgggccattggcgtcgggatgaccaccttggtgaacccgatcatgtttgccagcctgaaaagccgaagctacttccttttggccgggttcaatctcctgtggattccgatcgtgtatctgttctaccctgagacccgtaaccggtcgctcgagtccattgacgctttgttctcgacgccaagtccgttctattgggaaatggagcgcgcgtatcgtttgcacagcgatgttcttgccgagagaggcgctaccacgtttaaggacgacggtcccaaggtggaggatgcccagtccggctcgacacaagagtaggtggagccgagggtatggtattgtacggatttcgatataattggttattctgggaggcatagtgtatttactactgggatttagttatgagggaacgcggggttagttaggacacacactatgctggcaaatcccgggagctaatatctagcggagctgtagctaattttcctttttttttttttctcttttgccacttgtgctagtgcctaacacgctatgccatcggtctggtagcccgtaaattgtcccacatccacactatccacactatactaaggggcgctatagccgccgacacagccccaagacggtagccaacactgtaagaatgcgatatgaatccctcgagccggagtcagatgatattagcctgtatcataaacaatcggcgtcgcgcatccgtagtttgacgttccgatattttcgaacaccttcataagagtgtaccccatatcagtcagggcaactactaccatagggttgaccgttgagcggatgtacgccacagtttggggcg

SEQ ID NO: 20268 - DNA, 2363 bp, Emericella nidulans
ccgacgccggtcctgtttcagtacccgtaattctgactgtgtaactccacgtatcagttcaacagcggcagaaatagtccgctcacgtcatgatgtcctgccatggcctaccgctttgagctgctttcttccgaaaggcggtgagggcttggggagcttgggaaggcgattaatgaacttcattatttcctcggcatgccttacaggcattttttgagggattgaacagaaacgccttatgatttatacttcaagatactatcagctttgcggaaaggtagtgcgggacatcatttgttctgaagctcaagttggggtcttaattgagcgacttgacataagtcactatcccgaacgggtacgaccatgtcttcttcaagaggtcggggtcctaatcaaaggagtccgcatgtcttggtaaattaccccattctgatcactcgctttgtctttcaggaagccactgttgatacttatggttatatctttaggtgactgactctcgagaacaacattcgtccgcgcaaccccgtcgccgccgttccccagctgccacccgcttcatcacggtcgataacgtcctccaatatgcctccgacattccctcaatgcaacagcggaacccacctgatgcagcacgattacgacagcgaccccgtctgccttccgcaacaggcggtttgatcggctcgggcgcaggcggcgcaagtagaaatgccaccagcagcgccaatgcatccagcacagcagccgcaataggacgtctagcggctcaagcgcacctgccgcctcgtacaacaaaagttagtgagaagcttgtgctacttcccgaggaaggggttgagccgcaacctgaagatgaggacgaggaagaagaggagcaagggttgggtgatgagatagtggacgaagaattggtgcaacggattgcaagggacaagaacattgaccccgactctgtgagacatacgttgctggcacagaagaagaagctcaggggcgatttcagtgtcgataacgacgttgcgccgttgctggcggaggaggaccggacgcgcaagagggcgattgcaccagagagagccaagagttatgcagagcgactgccgaaggcccgtcgtgctgagaaattggctcgtgtcacggcatattgtaccgcgcaggcttacaagatgagttctctttcatcattcgtgaaggatacgcatggtggaagaaccaaactttatgatgactgtctatatacggcgtatcatctgccgttgttgcctgggcacgagggttacagagtgcggagcagtccgttggtgaagaagcctggtggaaagtcattgttagatgaggagattgaacgaaacgagctgcgagatcacgacgaggattatatcgagtcagaagagcactctatcttggagggtcgaccggacgagcacgaaaaccaagagcggaatgggcggccaagctccagtaagggaactgctaatgatggccactcgcaaatattgtcccccggctccacgcctgcaagacttccatacgacgtagccgagatgttcgtattcagctacggcgttgttgtcttctggaacttcacagcgaaacaagaaagagatatcctcgctgacctggcattcgcaacctcctctgcaacagggtcaccaataaccctcgcaactctaccgctacaggaagaagactttgagactgaagaattccactttgagtactccaccgaaatctcccgtccgcgcgtctacaacgatatgatcactctccgaagtggcgaccatatgatcaagctagccatcagccatggcatagcccaaagcacgaaactatgcttctttgaggaagtcatggcccgtcagatggcggaggcaaaggacgtcccccgccgtctcgccatgacagggaaactaggtctaaaacgagaagaggtctttcgcatcctaggcaagctattcaagagtcgagtggaagttaatctctgtacgtcatctcttaaagagcacatggttgggcgttcgttaacagatcaattgcagcttctaatgtccttgacgtccccaacttcttctgggaaagcgaaccaacgctttacccactctacattgccgtccgcgaatacctcgaaatcaagcctcgtatccaggttctcaacgagcgatgccgtgtctttctcgacctcgctgagatactttcagacagtatcgcagatagcaacacttcccgtgcgtgttccctcttaccccataacctccctactaattctcagatagatcaaacgtggatcatcatagtcctaatcgtcatctccatcctcgttacaacatccgaagtcttccttcgattcggcctcctca

SEQ ID NO: 20269 - DNA, 2367 bp, Emericella nidulans
acaaaacttcaacgggcagaacaaggagcagaatatctaccacaacttagacgctaatggtgtgtcccgcaatgttggcggcatgtccactcagtgagtgccccaagccctcacaagaggagatttagcattctactgacccattccagctggacgtgcgccacgcccagacagcacgaactagaacggtcaaaaattttcgatgacgctacctgggacaggttgtacaagagagctgaggagctaattggcactcggactgatgtactcgaccaatcaatccgacaacggttggtcttggatattctacggaaaaaatttaagaatcgcgacgcaaaagccctgccacttgccgctgaaaaagtcgagggcaaaaacctgattaagtggtcgtcttcttctactgtgctcggaaatctccttgaagatgaaaaattcactctactcgatcagcaccactgcgaaaaactggaattcaacgatgaaaccaacaaagtcagttttgcaatcatcaagaatctcgcaaagccccaaacttcaaaagaagatgaagacagactgagaataaaggcaaagtatgtgattgtgtgtggaggaccgattcttactccacagctcttgttcaagtctggattccgttacgatgaggaggatgctgaagattctgaaggaaataaatcatccctctatatcccagcattggtagggaaacacctcctccctgcccatcatgacgagccttagaggaagaagctgacgactaacttgattttcagggtcggaacttgaccgagcaaacaatgtgcttctgtcagattgtactgaaggataaatgggtagaggagctccagaaaaataactggggtcccgaatgtgaggaacaccgaagaaaatatgacgaagaggacgacctcctgcgaatccccttcgacgatctggacccccaagttaccctccccttcactgagaatacgccgtggcatacgcagatccaccgtgatgctttttcatacggcgcagtacccccggccattgacaaacgcaccatcgtcgaccttcgctatttcggtcgagccgagacgcagtggagaaatcgcgtcacattttccaagaaactcacggacgcgtacggcatgccgcaaccaacatttgacttcaagctctcgacgaaagaccgccttgaatcgcacagaatgatgcaggatatggaaaaggttgctggggaactcggggggtatctccccggttctgagccccagttccttgctcccgggctggcgctccacgtatgcgggacgactgcagcgcttcgcaaaggctgcaggtcagaagacgagatgaagagaatttccgtctgcgatgagaactccaaggtctggggggttgagaaccttcacctcggtggcctcaatgttattccagggcctaggtcaaatgcgtctaacccaacattgactgccatgtgtttcgccatcaagggtgcggaggagatacggcgcaagctgggcaaaaagggttctcacagtggtaatcgcgatgacggagatgtagacactgatacggacgatgacgcttgagggcggccacttggtccccgcgagtccatgaggatggtcttgaacagaacaccagttaccacagttggaaatgccagaacaccccattgtgattggattcctgaatatcaatattactttgtgggtggatatacaaattgcactgtaaacacacaaaagtacactcttgctttatattctttattgaatgagtggtcgctatgtagcttttaaatacaaaactagccttgtcggaccatttggagtttttctcttcgtccacttctgtacaacatccttggaagcaatatagtacgatgtcgagcttggaggctagaaacgttttatggcaatgctctaccaattgggtacaacacattacccacacatcgcgcagttatgtctagtcgaaaattgtggttgatatcacaagcagatctcttatggagatgtgtttcaagcagtcccaagtttatatttggcctatataagtaaaatataaaatcaacaagtccatatcaatctgtgtcccttcaagtgcataaaggattatctgggcccagactgtctggtctactagctattgatgcggctggcagagaactgcagcttataaatgtactgctgtaacgggcgtaggcagtattattttcaactggctgtcctgtataaacgagtatcacaagcttagagaaagaaacaaaagatagaagcgcagatatcttcctccccgctttatcaaccattctgacttcccggacctgtatgccgacggatccctttcccgaagttatgaggacggatctccttt

SEQ ID NO: 20270 - DNA, 2371 bp, Emericella nidulans
cgctctggaccgcccgtctcggtccctggagccacagcttacgcaacgctcgtagatcgaccgactcatgcttcgagcttgtgaatgtttctctgttctacctgatgcagtcccatcccctattgctggccagactcggccatcaagccacagtctcagagcggctgccacactaacaccatgccagggacagctccgttcggcatgccaactggaatccgggtctgatatggtagcagaagccgtttcacttcattcgtccatcaacagctccagctcctgggaggcgactagaagtggaatcagtgccgatctttttagagatgacactgcactgaccttggatcccttcgagagatcggcctgtttctccatcccccttgggcccttgatagactgaggacttcccagatgaagtttcacttgcaacctgggaattctttcttctcacaaatttccaaccgaaccaaggttgaaactgcgctggcattagcatgccgcagtacgctcgttcatgttgctgattgatcaagaattgatctggctcaagctgtacacagctatcccttcctttcaatgcaattgacgtctataatcatcctgccaccgttccctgcatcatgctcctgataaagaaaagatatgctttaccgaccttcattcttacatttcttatctatctcgtttttactactctaccgccaggcgcggagaaaacttacattgaacattactcacaaccagcccacgacataaccgagatcgccaaagacaaccgtatccactggactaagcacgccgagcagtatccgattgccgattatatctctctgccaactgcctctccagctccgattcccaagatccaatacgacttccccgccgaatcatggtttgctcgtatatggcggaagaggaagcagggcgcggtgaaggaggctttcaagcatgcgtggaagggctacaaaagcaatgcctggttgcgggatgaactgtcgcctttaagcggtggatacagaacttcctttgctggctgggcagccacactggtggatgccctggatacattgataatcatggatcttacagacgaattcgaggaggcgctggaagcactcgagcatattgatttttcaaccaccgattcaatccagatcaacgtgtttgagacaaatatcagatacctcggaggtcttcttggtgcacacgaccttacagagggcagatatcctattcttctgaagaaggcgactgagatagccgattttctctacgggtcgtttgatacgaggaataggatgcctcagtctcggtgggagtggacaaggtgagaatgcattctggttactgcttggacaggccagcttcggccctcaaaatgattatttcatcatattgatagtagttagatccgcatcgggccagaccattcatcctagtgggaacactattctcgcggagctgggttctctgaacctggaattcacccggatgtcccagttgacgggagaccagaagtactttgacgcgattcaacggatctcagaccacttagaatcagctcagaaagaaaccctggtgcccggtttatggccaatgatggttgacgccgagagcatgcggttttccgatcctcggtacacaattggtggtatggcggattccgcatatgaatacctccctaaagagcatatgcttcttgagggtcggacgcaacagtatcaacgaatgtacgaatccgcaattccagcgatcaaggagaggatgctgttccgcccgatgaccaagggtggagaagatatcctattttcaggtaacatttacgctggtacaaaggccagtcggaaaaaggtagaggcacaggcggaacacctcaagtgttatcttgggggcacgattggcatcggggccaaagtgttcaatcggcctgaagagctgtcaatcgctcgcaagctaaccgacggctgcatctgggcgtacgatatcatgccctctgggatcatgccagaagtcatgtatctcagcccttgcgacgacttggaaaactgtccatgggacgagcaaaagtggtatcgagacgtgcgcgcgcggccaccgcctcatgcgaacattgcggatactgaggaagcggcgaaattgcttatcgagaaattcgacctggtcccaggtgtcgccgaaatcgccgatgcacgctatatgttgcggtaagcgctgaaacagctaacgtgagcgaagtttgctgaatgtttggtaggccggaagcaatcgagtccgtatttatcatgtaccgcatcacgggcgacaagaaatatcaggatgctgcgtggcggatgttcaacagcattgagaaggccactcggactaagtatgc

SEQ ID NO: 20271 - DNA, 2373 bp, Emericella nidulans
aaaatgacaaaatagtactcaaactatgacgctatctgcaccgtttctggccggactagcacccatcctacagcgggaacgtgagggatgcgagtggggaaggcaatgactctgatggccaaagccgctttgctccgcccatttaatgttcatgcctcacctctctttgttccaggtagatgagaagtcttcagtctctcgacacttcctcagtgctacgtctgggtcccctcaccgttagagtcttatactgtcgttattcttccgcagttgaccttcttttctccgtctttatctacgccagtcctcgccgccaccgccgagtacatcctcccgacctccgtgtatagcggatcactccactcaccccatcgcctcatcagacaacatttcctgcctcactcagtctcaggctctcccgctgcgatggtggttctctttatgagactctcctgcctcctcattccccgctgacaatgcccatctttcaagattccgaaagccggcagttctacgacctctggtctgatgacccgcgaatgactcaggacgactctcacctcaaacccagctggccggattcccatgatgtttacgcaggatcatcagatcagaggaccagcgtcttctacggacgtcatccaagaagccccagcccgacgagactgaatgcgcatgatcgagaggaattgatacattatataaaagctgcggaaactacaaaatggtcgcagtattgctcggtcagttcacccgcaagacttttgaacttactctgtgcttcctattctctgtctagcgagcccgcgtgtttctcgatggttcatgctaacgtcagttcttgtatagttaggagaccgggttggtcaccacgtgcttcattctcacgaggttccggtgacgagggaacagagtaccggaaacagcctatatcaagatttccgggaccacgattcggagcttgcgtcaccagcggaaatagagcgtcctcgttcggccctccactccggcgactttcgggagggaacgcctcaactagagcggcagcagcattcaccgcaatcaccaatacctgaccggggcattaacaatgggctacccttcttctcctcgtctcctacatctccgtggttcgccgctccctcctttccgccgcgcacccaaacggccccgctacaagcactcgaagcgagagtaaccgaggcgaatcgtacacctgcgccgtcgcttgcgccgttctcatccagctatgtcctgaaggcgccgacaagccctctagtccatcaggcgaataacacagacttggacttctctactcggacagattccaataatcgactaaccttgtttgacaagacgaaccgtcggcggacccttccgccggactcattcagagacctgcagacagactctgcagattccggggcgaattgtccgatacgctgggactccttgtccagcaactcacagtgctctcgtcggtctttggcttcctcgtacagccttcagcttgcctcatcagttcagggccattatacgaagtctcggaggccgtcgatatcggccgagttgatttccaggactcatgccccgatggttgggtcgtatgaggagtctatcctccgtgggaggatgtcaacttgcccgtccaaacccctggatttcaccgcacaaattggtgttttgggcaagggcaagaccaagggaagcctcaaatgtcctccgcacgttacggttcggttccctgcggtcttctacagctaccctacgtctggaaatgggcgcacgatctctgatgatagtcccagcccttatgtgggaatgatcgaccttgagaactcgctgccgaaggatacttcgtgccacagtcggcgccgtaggcgccatcaagatccagtcgagatttcaagctctcacaataatgacgaatcgatgcggaccaagcacaatgatcgggaagctatacgccgaagagataagaggcacagaagggcagagtccccgaaagctcctgcaggtggttgctatcggatcccgcagcagggccaattgcaggtcatgatcaagaacccgaacaagactgccgttaagctattccttgttccgtacgatttgagcgatatggaacccgggacaaagacattcatccgacaaaggagttactcggctggtccgattatagacatgccattgtctgctcgatcaaattacggtactgatcgtcctgaggcatcgttgacgaactccgacgacccgaatgaaaaaccggtcttgcgatatttaatccatctcaatatttgttgcccatcaagaggccgttactatcttcactctagcatccgtgttgtattcgctaaccgggtgcccgatggc

SEQ ID NO: 20272 - DNA, 2385 bp, Emericella nidulans
gaaagctcccttagatttttggcttctgatatacgaagcgtaatctggcggctggcaactttgatatcggtggtagccctactacgaacagcttgggtcgttatatatcgaatctatttccatcccctcgccaaagtccctggaccactacttgccaggataacttggctctactcattctggtacaatattgtcaccaagcgtttctaccttcgcgttcaagaactgcatgagcaatatggtacaatctgcacccgccggtgggccccctgctgagatttactaattgtcccaggcccggtaatccgcatccccccggatgaaatccacctaagcgatcccgagaacctagaaaaaatctactttgttgggtcacgatatcccaaggatgctgcattttacggtgcatttggcgcggacagatccgtgttcacggctccaagtccagacgtccaccgcgtgaaaagagccgccttgaacccgttcttctcgcggaagaaggtccttgaattggaggatatcgtgcaggataaggcggagaagctggttggacgcatgaagaaggctttcaattccactggtgctattgaccttcatcatggtttccgcgcgatatcggtcgacgttattacggactatgcatttggcgactcgtacaactttctcgaccgagacgactttggaatagacttcttcaatgggttcagagatacggggcccgcactgtggaccttccagcagttccctgtcatccagcgagtagcgaagaaaatgcccttttggctggcagagcgccttagtgccccgttggcattgaggaggtctcaacacatggtatttaaatgtctggaattatccagttactttactgatgttgcctagagttcgcgagcccaagttctcaaggtgaaggctgccgtggaaagagacgaaaaggtctctcgcactaccatattccacgaactattacgtcctgatgcagctgaagggtacgcagtgccaaatgtggacgagctctcaagtgaggcacagaatattcttggtgctgcatcagatactacagggaacgtgagtattgcgtataaatctgatgctgaattaatgacgatgatgcctgcaaatcgcctttacgagatgctgaccttcatggtttagaccttgacgattgcagcgtacaatgtcgttcgtaaccctgacatatacgcccgattgtctgccgaactcaaggaggcattcccaaaccccgagggccgtttggagtttgttgctttagagaagctcccatacttggtgagtcacttgcatttacagccgtccagaaatatatgtgctaatcagatagactgccgtaatcaaagaaggactccggtaagccccgctgaacgagtactatcatcttatatcaacagaagcagattgtcctttggcgtccctggccggcttcctcgtgtagtcccaccccctggagccgaatttaatggctaccacgttccacctggagtatgtttcattgttcccgctatctacgtaaactgacataggcctttcaagaccgtggtgagcatgagctcctggataatacaccataacgaaaacatatacgccaatgcggatagattcaacccagatcgctggctggatccttcaagggcaaaagtgctcgaacgatacctgttttcgttcggaaaagggacgcgaggatgtattggcatgccgtatgtgtctctagccatatccaatttctgatagtattaacctagacagcagactcgcctattgcgagctctacgtgacccttggccgaatgttccgcgagtttgataacctgaaaacgccggcaaagagtagcgaggagttaattgtggacgatggcttttcagcgtatcacccagagaagaacaataagtttgtatttagcctgtcttaggtctttggctgttatacttgatttggctccttgtcctatgttcaatagtgctgtgctatgttctcttttcttcaatggccattgtttagcttcaccttagttcaaaagcgtatcaatggcgaggtaaatagcgcgttttcccagtgttattctcttctcttttattcacactctcaggcagctgtgaagccactcatgttcttcaacatttgtctccctcttcatacaattcccgccagcatctccccgagtgcgtctttattagacttgaattaattgaccgctttctttctccttccatcatagcagcttcactcctaacactgttgacttgatttacatccacatctgcctcataccatctcatcctcacaaactagaacacagcaaatcatcgactcatcagcatcgcaccatcacttcaagatgcctatgaactggaacgcacaggcagatgc

SEQ ID NO: 20273 - DNA, 2389 bp, Emericella nidulans
tcatcatctgcggcggaggcagctcgggatgcgtccctgccggccgtctcgccaacctcgaccataacctgtctgtgctattgattgaggctggcgagagtaatctgaataacccatggtaggagtgctcttcactcgaggctccgtgtgaagatgagctcattactgacaagcccagggtctaccgtcccggtatctaccccgtcaacatgaagctcgactccaagacggcctcattctactactcccggccatctgagcatctggacgggcgtcaggctgttgttccctgcgcgaacatcttgggtggtggtagctccattaatttcatggtattaccagcccatattgccctaaatgatagtgcccccgctaacgtatcagatgtacacccgagcttcagcctctgactacgacgacttccaggccaaaggctggacgaccgaggagctgctgcctctaatgaaaaaacatgagacctaccagcgggcctgtaataacccagagatccatggctttgagggatcccatcaaggtttcattcggcaactatacctacccgatagcgcaggacttcctgcgcgccgctgagtcccagggcattcctgttaccgacgacctccaggatctgaagactgggtatgtgatctcattacaggtgccgtaccatactgatagcatgatagccacggagcggagcactggctgaagtggatcaaccgcgataccggtacgtctggtgttaattccaatctaccctttatcatactaacaccagttaggaagacgcagcgatgcagcccacgcctatgtgcacagcacgcgtgccaaatactccaacttgcatttgcaatgcaacaccaaagtcgacaaggtcatcatcgaagacggccgtgccgtcggagtcgtcaccgttccaaccaagcccctcgacggcaaagagccaccgcgtcgcatcttccgagcgcgcaagcagattatcgtcagcggcggtaccctttcttcacccttgatcctgcaacgatccggaattggggactcggagaagctccgccgcgcgggagtcaagcccatcgtgcacctgcccggcgttggccgcaacttccaggaccactaccttacgttctccacatacagagccaagccagatgtcgagacgtttgatgacttccttcgcggagacccgaaggtccagaagagagtgttccaggagtggaacatcaaaggaaccggaccgttatccacgaacggtatcgaggctggtgtgaagattcgaccaactcagaaagagctcgaggagttcaagaaatggccgacccctgattttgtcgatggctgggagacatactttaagaataagccggataagcctgttatgcactactctgttatttctgggtatgcagcccttcttgcagttccattctcatatttcctgcactgctaacaacgtactctgaaacagctggttcggtgaccacatgctcatgccccccggcaagtttttcactatgttccatttcctcgagtatcccttctcccggggcagcacacacatcacaagcccagacccctacgcggccccagacttcgacgccggcttcatgaacgacaagcgtgacatggccgccatggtctgggggtacatcaagtcgcgcgagacagcacggcgcatgtcctcgtatgccggcgaggtgacaagcatgcacccgcactttgcgtacgattcaaaggcgcgcgcggaggacatggatctcgcgacgacgaaggcatatgcgggaccgaatcatctttctgcgggcattcagcacggtacgctttatctcctttcttttatttccctctctcggagtccgtgggtatgctaacgaatgcatcaccggcaggctcctggtctcacccactaacccccggtaaacaacccagcccaacaaccctcagctccaaccgattcgaggcccgcagcgaactcgagtattctaaagaagacattgcacatatcgagaaatggggtacgcaatcgtccactattccttctattcctcatactaacattgacgtcccggttgttccagttcaacgccacgtcgaaacaacctggcactctctgggcacatgcagcatggccccgcgcgagggaaacaacattgcgccccacgacggcgtcgtcgacgagcggctgaacgtgcatggcgttaaaggactgaaggtctgcgacttgtctatctgccccgataacgtgggctgcaatacatttagcacggcgctacttattggagagaaatgcgctgtcctcactgctgaggatctagggtatagtggggatgcactgaagatggaggttccagagtaccatgctcctggagagtttttgaatcttgctaggttg

SEQ ID NO: 20274 - DNA, 2390 bp, Emericella nidulans
attgaattgaataaaataagactgttgataagagcatgcattaaggtagaatcaatccaaggctttggaatgatggatctacataggtcgacggctatcatgtacaaaaagggtatcgtttggtgaaaatcaataagacggcgtttaataaccacgtttgaccaatcacagagctggtatatagcaagcattgtctggccgatgatacatccagtgcgagatgaagctgcacgagcaagcagtattatggccaggagtgccgtgaggtgacgacaagagtagttgataggggaatatggcagtagaggcttctgaaggattagaccagatgtagagtagatcgagtgtcggtaaagagaagtattggaaaatagagcacttcctgacgtcgcagcggatcgcacctatcagagacgacaacggatttcttagaagagcagtagatgctgccaagtaacttgtgaaaaactaccgccggctacttttgccaaactgttcagataatttaatcttgttgaaagagaagaaattatactctcttatccgagaccaacttttccgggtatcgtagcccatgcatgcacacccaaccgaaaacctcaaacgccagacaggagaaggtctaaacctcatcttggtgcaaagaaaaggagaagatttatagtacagtaatccacaaccaccaacacaactgatacccagatagtcagtccagcaaagagcagaaaagcaaagaaactccgaaaaacaccatcacccataagatgcgagatttaacagtatgcatttgctcttctctctcgagtcagggcggcgacctccttgcgtagccgctcattcatttcctgcagctcctgcatgtacgtgattgcattgctcagaatctcggactttttcagcgacgccgaggacttgacgccattgctacttgaatttgtcgacgagacggccttcgacacaccggacgtcttgacagacatggccttttccagagcaacgaacttggcgttcatgtttgtgcggtagcgcttctcgatgatgttgtgagcggcgcgcttagcggcgttgcggccacgggcggtgttctcatcaccgtttgtcgcgtttgcggctcgggactgcggccggtcgttgttgtttgtcgaggtggtggagagggctgctgtggtgagagtcgggaacaggagaaggtcctcgaaaggctctgaatgagtgcgcgatgcgcctctgacttgtcggggcacaggacggggatctgcagtgaatacgaggtagggttacagccatcgcatccttagcgggccgtttatgactctgtaagatttaaagccgggggccaggggggtccagatcgtttgcgatgtggttaggatgaagttgacccagagtctaggtagggccattgaaccttggaataagtattgagctgacttggcaagggaatgtgacgaagccactgtctgatgagactgcgattgctcttcaaaagaactggacagatgaagctggtgagtcaccactctttattacgggacggtctactgacgtaacatagactggcacacaatccctgtcaagaagaccgtcctcgatatcgtcgcccagttatcgtccaaggtcttcctaggtgaccaaatctgccgcaaccccgagtggctccggatcacggtggcctatacggtggactcgtttctagccgcacaagcattgcgcatgtggccaaccttcatgcgacgcctcgtcgccccatttatccctggtgtccagaagatccgcgcggagctcgaggaggcccgtcgtatcattctccctgtattggaaaagcgcaaggcagaaaaacaaactgctattgcggctggcaagaccccagctcggtacaacgacgcgatggaatggatggaacagtgtgctaaggggcgtccgtatgatgcggcggtgtcgcagctttctctctcactgggcgctatccataccacatccgacatgctgacccaggttctctacgacatttgcggacacagcgatctggtcgatgagctcaggcaggaggttctcaccgtcattgcggcggaaggatggcagaagacgactctgtacaaactgaagttgatggatagcgttctcaaggaaagccaaagggtaaaacccatcgggatcggtacgtacgctcctcacacaggtacaacgtctgctaacgagtcagcaacgatgcaccgcttggctgaaaaaacagtcaagctttctgacggcactgttatccccaaaaacgccaacctgatcgtttcctcgcagcggatgtgggatgagagcatctacccctccccagacaaattcgacccttaccgcttccttagattgcgagagacgcctggtcatgagacttcggccca

SEQ ID NO: 20275 - DNA, 2391 bp, Emericella nidulans
tcgccaaccattaaccgtgccaatgtctacgttggtttccaggtgcaactggatctcacgggtatcttcttgcacggaaagattcccactctcaaaatctcgttgattcaaatcttccgtgctcacttgtggcaaaagatccacgagtccgtagtcatggatttgtgtcaagtctttgaccaggaacttgagcagcttggcatcgaagcagtccagaaggaaaccattcacccgcgtaagtcatacaagatgaacagttcgtgtgcagatatcttgttgttcgccacgaacaagtggaacgtaacccggccttccatcctcttcgacactaaggatgtgtacgagcctaccacgacaaacaaattctggcttgatgtgcaactccgctacggtgactacgactctcacgacattgaaagatacgttcgcgctaaatacctggactacacaaccgacagcatgagtatctatccgtctgcaacgggtctgatgatcgcaattgaccttgcttacaacctgtactcggcatacgggcagtatttccctggcctgaaaacgttaattcagcaagcgatggccaagattatgaaggccaaccctgccctctatgtgttgagagaacgtattcgaaaaggtctacagctgtacgcttctgagagcaatcaggagttcctgaactctcagaactattcggaactcttcagtcctcagatacagctgttcatcgacgataccaatgtctaccgtgtcactattcacaagaccttcgaaggtaaccttacgaccaagcccatcaacggtgctatattcatctttaatccccgcactggacagctgttcctgaagattatccacaccagtgtttgggcgggacaaaagcgtcttggtcagcttgccaagtggaagaccgcagaagaagtcgcggctcttattcggtccttgccagtcgaagaacagcccaagcagcttattgttacccgaaaaggtcttcttgacccgcttgaagttcaccttctcgatttccctaatatctccatccgtgcttctgaactccagctgcctttccaggcagctatgaaggttgagaagcttgcagacatgattttgcgcgcgacagagcctcagatggttctgtttaacctttatgatgagtggctcaagactatttcaccatacaccgcgttctccagattaatcttgattttgcgtgcccttcacgtcaacatcgacaaggcgaagatcatccttcggcctgataagagcgttatcaccttggagcaccacatctggccctcgctttctgatgaagactggatgaaggttgaagtgcaattgcgcgacttgattctgaacgactatggcaagaagaacaatgtcaacgtccagagtctgacaagcagtgaagtccgagatatcattctcggtatggaaattagcgcgccctccttgcagcgacagcaagcagcggagattgagaagcaacaggaggaggccaagcaactcacagctgtgacaacaaagacgcagaacgttcgcggcgaagacatcattgtcactaccacatctcagtacgagcagcagtcgtttgcgtccaagactgagtggcgtactcgtgcgattgccacgtccaacctccgcactagggcaaacaatatatatgtctcgtcagacgatatccgcgatgagggttatacgtacatcatgccgaagaacattctcaagcggttcatcatgattgccgatcttcgcgtgcaggtagccggatttctctatggtagctcgcctccagacaacgaccaagtgaaggaaattcggaccatcgtcatggtcccgcaggtgggtaacactcgcgaggttcaacttcctcagcagctaccgcaacacgattatctcaacagcctagagcccctcggagtaatccacaccatctccggcaatgagccgccatacatgactgcacaggacgtgactcagcattctcgcctgatgaatgcccattcatcctgggacaagaagacagtgacgatgaccgtatcgttcacaccgggttcggtctcccttgcagcatggggtcttactccccagggttacaagtggggagccgagaaccgggatacaacttccgatcagccgcagggattctcgaccagcatgggcgagaagtgccagttgttgttgagtgacaagattcgcggatacttcctcgtgcccgaggacaacgtctggaactacagcttcatgggaagctcgtacggaagtgtcgagaaacgcccggtatatgtcaagattgacaccccgcttcggttttacgacgaccagcatcgcccactgcacttccagaacttcgcagagctggaggatatttgggttgaccgatctgataactttgct

SEQ ID NO: 20276 - DNA, 2392 bp, Emericella nidulans
tccgaggcaagattccctggtttactccccctcctttcacacctggtgaggagggtgagaagattgaaggccgcgaaggcagactcggtgagatgggcagaaagcgcaagattgaggagacatctcaggatgcgagtgagggtcaagaaggccaagatcagtccgcttctgactccgaggaagagtttgggggattcgatgacgagcaggatgatagcgataatgattctattgcaaatcttgaagtcagcgatgaggaaagcggggaggagtgaatgtcattgtcgcgcggcaacctctaacaccttacaacccacacaagcagcgtcagtttccacaagtaaaatacttggccctgctatttgacgccaggacgtcgcagaacgtcctgcatacttagctgtcgctttctgcttggctgttcggctggcgggccatttgacagctgtacagccccgaggcgcaacgtggaatccgtggcgctgttcatctcaacctcgaataacgataggcagtacggagcacccacagcgtcgttccaatctgtctgggctgttgactgtcgtacatatgcccaaagatgcttccggtggaagaacgtatagtcgagtccatcgatgacatcattcatttagatacccatgtctctaccgaatctatagcaatattctggattcttatgataggtaaataaaatgtataggaggcaagcagtaagacgaattggctggacactagctcaccgccgtcacgtggggcagtcattttcataaatccccaccgagcggcgttaccagccattcgttcatatcatgggcaactgcctcactttgtggaggacggatcacctcccttcactttaaacgaccataaatctctcatggttacgggcttttaccctcttgccttattgggagatatgccgccttgattgataatggcggaggcggacggcgccattgttccttactcctcatctaacgatgttgttttgtaagcttcagcttctcaaccgctattcaagcgtaaatcctaattgaactcgttccagacgccatgatggatcggttgtcgtttatgatccggtttcgagacaactagtccttcaagatgcagccgaggctgagaagcacgacaatgatccgcagtgtccatactgccgcaggccgttgcgagacgaggcctctggtcaagacaactaccattccaggacgcagccagaatttgtcaatcccgaatatttccgcatgctccataacagtcttccacctgcctcagtagattcagctacagcccagccgcaatctcgacgtctagttcagcctgtactcgccgatagtccttcaagcggatcgggccagtccagggtacctaacggacatggtatctcatcggctgcatttactccagactacttcaaaaggttctttgtggaagaatcggtgctagaaaaaggcgggaaaggtgttgtgttgttggtgaagcatgtcctagacggcgtgtctttgggtcattatgcctgcaagcgcgtgcctgttggggatgatcacgagtggctcgaaaaggttttgattgaagtgcaaacactccagcacctctcacatcagaaccttgtctcctaccgacatgtttggctcgagaacgcgaaaattacgacatttgggccaagcgtcccatgcgcgtttatcctccagcagtactgcaatgcgggggatcttcataactacatttgtggctccatgcagacatctacgacgcctcaggaattgaaagagcgcattagacgaaggtctagaggaggccccgaggctcctcttggtctccatgaacctcgcaagctacattttgatgagatttactctttcttcaaggacattacttcgggtcttcgatatctccatgcaagcggctatattcaccgtgatcttaagcccaacaactgtctgctgcacaagactaacgatggcatacgagtcttggtcagcgatttcggcgaggttcagccccaggatgcaatacggaggtctacgggggcgacaggaactgtgtcgtactgtgctccagaggtgttacggcgggagtaccctaatggccccttcgccaatttcaccttcaaaagtgatatcttctctctcggaatgattctttattttctgtgcttagcgcagcttccgtatcgaaatgctgatctcatcaatgaggagaaggaggatcttgagaaactccgtgaagagataatggactggcctggttttgaccaaggaagaatgcgccctgatttacccgaacaactatatactttcctctggcgtttgctgtcagttgaccccgatttacggccatctgcgaacgaggtacttagtggcctcgaggtcggggccaatgctaatga

SEQ ID NO: 20277 - DNA, 2412 bp, Emericella nidulans
gcttgctccgcctgctggtcttctagctgtaattcttcaacgttttccttgctcttcttggaaagcggtataccctcctcttcgattggctcagcaatcggctccattgactttatagtcggtgaaattctctcgcccaccaattccctcgagtagtctgtcttgggctcttctatcatttctggcccaagtgtagaccctgggatcgagacctttcctttcaagacttccacaggttctgccagcatttgctcatcttcttttccctcaggaacctgcaccacagcctgcgggaccgagaattcatccttgactgcgtccatcgtctgaactgggtcttccctctcttgcttctcagcttgtttcttcagcttcttcttctccttcttggacattttccttgtcaaaggagcaggcgcagactcaggctcaatggcacaactctcttccgcagtagccgccatcctttccgtttttgcgacacgttcaaccgaatctgtctgtaactctagctctggcacccgtttttctcgcaaagcctcctttccagattcgactgtcattttctcccggatatcctcccgcggtacatctagctccttttcagtatcttctggaactccctcccgctcctccctgataacttcgcactgaaccggcttttctggtgccctatccgtttcttcatcccctttcgctggatcatttgtcggttcattagttgatccatgatgtagctcgacactctcaacaggttctaccgcagagaattcagcttcaacggcatcggctgccttaacgtctttcgcaacgttcgtttttgcaatagcagaagcagtgacctccctttctaactgctcttgcttcttggcctgtttttttgccttcttatttttctttttagactccttccgggtcaaagctgactcgtcgagagcagcaggaggctcctcgcgagacttatctcgggaaagatctccgagcgatgttttaggttgctcattctcccttgtcgcttcaaggagaattgactctggagcttcaacttgaggagccttttcctccacttgaggaacgacttccagctgctcctcaaactcgcctttttccataggcgctggcactggaccttcgagttgaggtagccccattttaatggcagtatcggtttttcgctgccccttttgttcggctggctctaaaggagtagactctggtgcttgattctttgaagattcacctgtcctctcggtctggatagcgggctctgtagcactcacaggattccctttagaggagtagatctcttcaggggcaggagatgtacttatatcgtggactgggcctgggggtgcagaaacgacgggttgcgcatcaaattcgggtagctccgcgtcgagcttgctttcgtcgacactgacccatgaagactctggtctagcagtctcctcaagcactaaggctgtgtcttggacagcttctggaaaggcaggctcgacaagctcgtggtctgtggtgtcgaagtctaggggctcaagagtatctctggtagtggcctccgcagctgcctcctgcagagtaggctcttcagtaatcttgatgtcgctttcggccccgtcaaagactgaactatcgaccttggtctcgtttttcgtagctaaatcgggggggcccgaagcctcctccgtagacgccgtctcctcctgcacctgcgaagcagcagccttgtctgcttgtcgttgtttcttcctctgcttcttgctcagttttcttgaaggaacagctggctcagtcgcagactctacgctgacgacattttccgtggactgagtgggttcggcttctttagcagcctcagcttccgttatttgttccgggattgcttcctccaaacgctcttcgacagccccaagtgcttcgaaagtactatgtttgagttctttttgatccgcctcttcaagtttatcagttgcatcatctgaattttcttttctgcctcactttcattctgtacttcctctcccagacccgtgaccacctcaatctgactgacgtcttgcccttcaagcatagcatcgtcccacgtttcaaagccagcgtcctgttgactctcttctaccacttcaggatcggcagtagtaggcgcaggctcgacctcgatagcccccttgtcgacttcggtactttcagattcactctcggggataagaaccgggaaggctatgtgttgcttctctttctctacctgcgaagacacatcgttatcagtccaagtcaattctttatcggtgccgccgcgggattcggtgtcgtgggactgattatctttaccgtcttcttctgcaggcgagaatgccgtctcagcgggtacgtcaatcttcatttcacttgtgccaggtgcaacttcgttgg

SEQ ID NO: 20278 - DNA, 2412 bp, Emericella nidulans
cgagagatccaggagtcattgtagggttatctccgacactcagcgggctaatcttcttagctttgcgatcatagtacttcttgcagagagccgtgagcttcgccgcatattccttttcaatcgcgctccgttctcgatagaactgttgcacctcctccatccaagcaatgccattggaaacctagatattgcatttagcaccggcgctaatgtactgcatcgcgtttgttgtatcttgccgtaggcatcgtacatgcggggaaataacatcgaggaccgtacccaattgttgactggcttgaaggcatcctagcccagcagaacgttagacaatacctcataggcagcactttattaaggagacttaccttcaactctgctccaaaatgaggagcggcctcagcggctgccattgttctaacaactgtaccagtgactttggcacatgcgacctgcgggtcccaggcagcagcggaaaggagcggacaaacaaccacgtgcagtagagtgtttggctcagataggcgatttacaggtagaatgtgttcggggcgagcctcctaccaactaaccgacaacacgccagtgcctgaggacagctattgcttctccgatctgaacgagtaatgcgggagagcggggaagagtcaaggcactgggcgagtagatagcgaatgctggtgacaataccgaacagcccttgtctggccacgttggtgtcttatggtggattaattacgatatacgtcatagcgatacgggtgacttcgtcacgcctgctccttccatggctgagcggttgtgcccaatcgagattggtggcttggcaacttgaggtcagtcctactctgttttttgtcactgctctctaggtctcattgacgctattcctattaaccgcgctagttgtgagtacgactgattattcaatcattcctacagactgcatatccctcttcttcagagcggtgtcctttcctttgattcgtggttgtccaacgtctttgtcggctccgaccccgccaaagcacgctccttacccccgccattgaacacaactccgccgtatttcttcatcccatttcataatggcatctgacgcgccaactggcggctctctcgccgaccgcatctcgaaccccgcaggtacgcgcgctgtccccttccagttcgactcgactggccggtttttggccccttcgcattcagcactcgctaatgaccggcacgaacagagaccactgaacccgtcgccgacaaggcccaactggatggtgctgcatctaaccagggtggctcggatctcgcagagccggagtacaatgtcgaggttaagctcagcgatcttcaagccgaccccaacaaccccctctattcagtgaagaatttcgaagatctgggactgtgagtcgtgcagcgccaattcattccggcaatgtccgaactaatacatctcacatagagatccgcgcatacttcaaggactgtccgctatgaacttccgcaaaccttccaaaatccaagagcgagccctacctctgttgatgggcaaccctcctaagaaccttgtcggtcaatctcagtccgggactggtaaaacagctgcatttgtcctaaacatcctcagccgcttggacctgagctccgaacaggctcagaagacgccgcagtactgatccttgcgccaacgcgagaattggcccgtcagattgttggtgttatacaggtcatgggaaagttcctggatgggctacacattggcaccgctgttccggctgatacgaatgcgcgcccaactcggatggaagcttcggtcgttgtgggcacacctggaaccgtcatggatatgatcaaaaagcgtatcatggtggccgcgaaactcaaggtcattgtcttggacgaggcagataacatgctcgaccagcaagggttgggtgaccagtgcattcgggtgaaagcgtgagttcttgcttttccatgccagaggcgctactaaactcttgaacagcctgttgcccagggacatccaagtcgttcttttctccgctacgttccctgcccacgtacaccagtatgcttctaaattcgcccctgcggccaacgaacttactctgcagcacgaggagttgacggtggagggtatcaaacaactgtatcttgactgcgctagcgaggaggacaagtatagaactcttgtgcaactctacgggttacttaccgtcggctcgtcaatcattttcgtcaaggtgtgtttatacgccctagttatcagtcccaactaacagctttagacacgtgcatccgccgtggagattgagaggcggatggtcgccgagggccacactgtcgcttctttgaccggtggtattgagggttcacagcgtgaccagattatcgaccaattccgcgccg

SEQ ID NO: 20279 - DNA, 2453 bp, Emericella nidulans
ccttacaataaatattcgtttgaagagctccgactgggagattacaaccaaggtcgccgatacggaaatggaagtgggcaggcaggagcttttggcacctcagctttcggggggggatccggttttggcacacagcagcagtccactggcttcggtagtacgtcgactccctttggtgcagctgccaccagcgcgccctcggcttttggttcgactcagacgacaggtgggtttggctctggaacctccaatcctttgtttggagcctccaagccagcaacctctctatttggtggaggtgcctcttctggcaccactcaacctagcctgttcggaaccacgacgaacaacactagcactggcttcggatccagcactggtggcggctttggatctggtggttcgttattcggaaacaacaccaacaaccaacagcaaaacaagtccatatttggcgcaagtactggaactaccggtacaggtaccggttttggtggttcggcacacagactactagcacctctacaccatttggtgcacagctgctacttcgtcaccgtttggtgggcaacagcagcagaccggtacgggtggttttggtggatttggacagaacacaaaccagacccagaatcaaactcaaaacaaagggctattcggtggatttggcagcaacactcagcaatcctccactggtggtagtctttttggaggtggagcaaccaacacgggaacatctctgttcggacagaacaaccaacagaatcagcagcagactggtagctcgctcttcggtggaagtaaccagcaatctggtaccggtctctttggcggtgctcagaaccagcaacaacagaagccgagcctgtttggcggttccacaaacactggcagctcactcttcggcggcaacacacagcagactggaactggtctctttggtggcgctcagaaccagcagcaacagaagccaagcttgttcggcggctccacaaccaccggcggctccttgtttggcggcaatgcaggaacgcagaacacgggttcatcgctttttggtaacactcagaatcagcagcaacaacagagtggaggactgggaacctcaagcctatttggcggttcccagcaacaacagccgcaaccaatgcagcaatctcagcctgcgcctggtagccttcaggcgtccctccttgagggcaacccatatggcaaccagtcaattttctccggtctgcctgcgccgaacaccgccagccctggtccattggccaccccgctttcgtctgcgaacaagcagaagcaacgtgctcctctgccaatctataaaattacgcccaatgctgccaaccgcctcatcactccgcctaagccccggggttacggattctcttactctacttacggttctccctctagtggtggtggaactccaaaccttggtggaagccttcttggaacaagtatgcgcggcagcttcaacggcagcttgggtcgtagtacattcagcaagagcttttctacaagcagtttgcgcaagtcatttgatccagactccgacagtattttgtctcctggagcgcttggctctgggagctcacgctactcaagcagtaacctcaaacgcctgacaatcgatcggagtctgagaaacgatctattcactcgctctgccagctcgcccactgccaatatcaatggagacgacgctggtcagtccgcaagcaaggtcagaaagaaggtcagctttgagtcgactgctgacaacgcgtctggtggtgaaattgtacccgtggagtctcaaagctcggaacctacaccagaagaacttggtttcttgcgctcaatccgtaagaacggcactcccaacggtgtcaatggagttaaaccggcgtctgaaaactccgccaacgctgagatggagtcggtttcagacaagagacttcttacttcggttcctgaagacaatggacgtgtttcctctgcgtccccgggtgagaatgcgtcacgtctgtcattcagccctagtggcgatccccaaccaggcgagtactggatgaaaccaacacgcgctgagcttagcaaactgagccgtgatcaactcaagcggttcacaggtttgacggttggtcgcgagcgctgcggttcggttacgtttgatgaccctgtcgacttgaccaccattgacctggataatattcttggcggtcttgtggacattggtgtccgcaaaatcacagtgtatcctgacgagtcaataaagcctgctaggggcaagggcctgaacgttccctccacgctgcgcatcgagaactcttggccccgtgggcgtgacaagaagggcccttcgccagtcactagcggcccgctctttgagaaacatattgaccgcctgatgaaggttcacaataccgaattcgtcaactacgagaccgagaccggcacatgggtgt

SEQ ID NO: 20280 - DNA, 2453 bp, Emericella nidulans; identical to SEQ ID NO: 20279

SEQ ID NO: 20281 - DNA, 2466 bp, Emericella nidulans
taaaagtctgcctggtagtgatagaggatcaccatgcgcgaagtcagaacgggttgaaaatgggagctgtccgaatacgccagtgagggctgacgggctctacttcagcgctaacgtccaggatgatcacttgtacctggacaaggcgacgaccgagggttcagtaacgagtatccctaaccgcactcactttcctctgaatttatcgtctgttgcgatgtcgagtcacaagatctacagtactcccagttgccgctatccatgtctaaacccggtcgttccgctcctgcagggaacaatgacagcagaagatgcatgcaaactccttgacatatactttgcggatccagagacgggaggttcaatttctggctgtccgtacgtgctttcaccaatcattcgagtgcagtcgctcctgcgggagacaaacccgcgcccggtttcacctgctctcctgatgataatcctttggtgcgcctctcatacggcccatctgggcatcttttcagattcgagtacacgtctacgggtcacgcaacgtttgtattttctctcgatgaagcttctgcgggccagagactgcgagacctggcatcaagcagctggtaagtctccagcttgccgtataacttcctcctctcagaaacagccccaagatggatatggctgaccgttcctccggtaggcgagtgcgtaccactgtctgatatgcccttatatggcacgagcgtcgacactggtccctctgctgtttgtgacgggaaggtcgagcaaggtgtggatgacgtgctgagctacgtcctgttaacatgcgtagtctcagtcaccgagttcaaagacgaggctctaacatggtggaacaaagctgtgcgcctggtgaagaggctggggttccattccgaagcacgaatagcggagaatacaccttcctggcagcagatgtccttgactgcgcgcgaggaacaggaagaacgaaggagggctttttggctggtttattctctcgatcgacacctagccctgtcctataacgaaccactgcacatacttgatcgggagtgtcaggtgctatgtccattgcctgaacgagtctggcaaaatcttgacaagataccgttggaggatatcccaccacgcgtctttgggcctccgacttgtataacaggcaccactttcttcgaatacttctccgacaagctcagtcgcagaaaacaataccgaatggtggcttggaagcgtggctgagtgtcgttggggttttctgtgttttcgttaattcctggtaggtatgtcacgacgtctagcaatcgtgcacgcaatctaacagcggctcaggggcttgatcagtacatatggcgccttccaagagttctaccaaacggtacttctccccgatcaatccccctcctccatttcctgggtaggaagcctccaagccacgctcgtggtcatggttggagttgtatctggaccattggtcgatcttgggtaccttcgccctctcattatctcggggagcttccttgttgtatttggcatgatgatgactagtctggctacccaatactatcaagtgatccttgcccagggattttgtgtcggcattggtggcggcattgcatacattccagcactggtcgtgatttcgatgtatttcactacgaagcgtccgattgccattggctgtgcatcaatcggatccagcgtaggcagtgtggttttcccaatcatgtttcgccagctccagccgaagatcggcttcccgtggacggttcgctgcatcgctttcatcaatatgttcctcgctgtcattacctgcacgatgctatgccgccgcccgggcgaaaaggtcggagcccgcagcctgatcgactggaaagctctcaaagatatcccgtttatgttgctatcggtatcgatgttgctcgtcatgctcggctattggatcccgctattctacgtcccgtcttacgcccgaactgtgctgaatacaacaaccagcctttctttctacgtggtatccattattaacggcgcgtcggcgttcggacgaaccgttccatatttattgggatcgcgagtgaaacccattggcattctcattagctgcgtggcgggttcggcaattgccatgttcacatggattgcggcgaccaatatccctggcttcatcgtttggtcttgctactggggtttcttgacgggggtgctagtgactgcgccaacatcgattgtttcgcatccttccctttgcccggatttgaagatgctcgggactcggatggggatgatgtgggggatcagctcgctcgggtcgttggctgggacacccattgccggagccttagtagatctcactgaagcccaatttctgcgcgctcaggtattcgcaggctgcatgatggtgggcgctgttgttctacaattatggccaacatttgtggtcgttcggcacgatggcaagcc

SEQ ID NO: 20282 - DNA, 2470 bp, Emericella nidulans
tggtggcagcgatgaggacattccctctgcaacaaaagatgactcccgattgaattcgcccgcatcagaagacgacgaggatgcacatagcctcgtcctaggccactacaccacatccacatccgaattaggcatcaacctcagcgacagccactatgtctccctctccggatcgttcatcagtcatctcattgaccaatacccgcgggggaaaatctttcacattgaagaggatgggtccatatcccttagctacgagggcttggccgatgagatgcaacaccccggggaaggcggccggggtgcgccgaccagcgacccggacgtaatcaacgtcaagcaggagacttcagacatccagcagctcatgaaagtcctgccagacgctcggtgcgtagccatctatcctatctgggactttcagcgcggcaggtacttcacaatcaatctggtgtgggccaatgaccccggccgggtgctatcggagccaaaagacctgacgtacctggctgccttcagcaacaccgtcatggctgaggtatcccgattagatctggaggcagcggatcgcgcaaaaggggactttatctcctccatctcgcatgaattgcggtcaccactgcatgggctcttagggaccgtagagctcctgcaggagatggtgagcggctacgctcaacattcactaattgagactgtatacagctgcggccggaccctgctagatacattgaaccatctcctcgattacgccaaaatcaacacccttagccaacccaagcaattggaaaatctcgggcaaaaagctctctctgaagcgcggcccgccgtgcctgggtcgctgcaagatgaggatctaggcgttttggtgcaggaggtggtggaaggcatcctcgcaggtgttgagtaccagcgccgcggagttgatggcggcagtggtggacgacgaggaccatatggcaatgccaactccaggcttattacgatcgtggatattgaatggaatgatagctggcgttacagcgtgtatgctggcgcctggaggcgtgttgtcatgaaccttttcgggaacgccctcaagtacactcagaccggctacatccgactctttatgaggaacgacacattaaagcgcgacggacagaacgccgatccggcaataagaatgacctttagtgattcaggacggggcatgtccaaggacttcattgccaaccacctctacactgctttccaccaggaagacacaacttcgcctggcctgggcgtgggactacatctcgtccaccagatcgtcaaatccctaaacgggacaattgattttgccagcgagcttgggaagggaacagacgtcgacgtcgtcctcccaatcaacccaccagaagatccagcgcctgcagcgcccctctatgactcactgaaagagaaattacaaggcaagacaatttccctattcacgcagagctcaaagctgggcaatctaggtatggatactagggtcttcaacaacatgctcatcagcctcggccgcatgacgacgggctggtttggcttgcgggtcctcactctggaagaatatgaccgcggggaggcggactttgcaatcgtcacggagcacgagtataaaacctactaccacaaggggtcaagcatgccgaaagaacaagggtccggtgaaatccagccaatgtacccgcttattgtgctcagtgagcgggcgagcagctggagaacgattggcgagagcatggacgaggtaatcttcctgacgcagccgtaagtttggtccttcaacacaagagaaaggaaaaaagaacgcagctgataagcctagggtgagcccgaaaacactggcgacggcgttcgagcactgcctggctgcctctaccactgcactcgatcgcgctgaagattcggatcttatgcccatgccggagaagcgcaagcagtcttcgcctgttgtggatggcgatagtccgaacaagaagacggttactgagacaatggtcgatggagagacggatatcaaaacggggcctgctactgacggaaaaatagccggcgcaacagcgggagcagtgaacggagcatcatgcgccaacgataaccccgccagacaccgaattcttcttgtggaagacaaccaagtaaacctgaaagtgatcgaaatgtgcgttaaaaccgcagggttcacttacgaaaccgccacgaacggcctcgaagctctcgagaggttcaaggacacgcagttcgatgttgtgatcatggacgtttccatgcccgtgatggacggactcactgccacgcgcgagatgcgcaagtttgagcgccgctgccggagtaactgcgagcagaaccaggatcgcaagcgtgctacaatcattgcgctcacggctgtgctttccgcgtcaacgcagcatgaggcgacagttagcggggttgatttgtttctcaccaagcctgcgccgtt

SEQ ID NO: 20283 - DNA, 2480 bp, Emericella nidulans
gcgtcctcggttcgatagtctcgtatttcgttggagaacgactgggacgacggaccatgttgatagctggtggaggaatcatggtcattgggacagtgattctggcaagctcggacacagtggcacagttgatcgtcggttcgtacagtccataagcttcaaagtctcccgggaccctaggcttgcccctttcgacggatgtctaataagttgaactcgtaggacgcattgtgaccggcgtcgggaacggcatgaactcgtcaacggctccagtgtaccagtctgaatgcgcaccggctgcataccgtggagccctcctgactctacaaggaacggtgacaatcctcggggtcgtgatcgcatactggtacgggctcagggctcaggaatgggctatatttcactgaagctgacagctcacaggatggattacggaccaagcttcacggaatcctcgttacaatggcgcttcccacttgcattccaggccgtcttcgccattttccttgttctgcaagttatcggtctccctgagacgccgcgctggctggtccagcacgaccgccacgaagatgcccgcgaagtagtcgccgctatcaccgaccgggacgtgaacgacccacaagtggtccggacagtcctcgatatccaggtcggcctggaagaagagcaaaagggcgggccgtttaaattcaaagagctcttcgcgtggggggaggagcaaaatcttcggcggctgctcgtcattatcagcgttgagctggggcagcagttcactggctcgaatatgatcaattactacggccctgtcatgttccagacgacaatgaacatggggcggaacctctccatgatcctcggcggtgcgatccaatgtacatacctcgtcggctcggcgatcccagtcctgctaatggaccggttcggccgacgaacgttgctgatagtgtgctctgttggactctgcttctgttttgtcatggtgtctattctgctttcgctggggagcacgaatgccgcatatggcgccaccgcgtttatcttcatcttccaaatcttttatggcattgggtggctacccgtcccctggttctatccgagtgagatatcaacgacccgcacaaggacacggatgcaggctattgcatcggcttggaactggatggccgtctttgcggtcgtgaaaatcacgccgcttgcgttccgtatgtgcttcaaccctctccttccagaataaccagagctgacggaatagaaaacattggctggcgtacattcgtcatctttgccgtgctcaacgcggcgtttatccccatggtatacttcttctatccggaaacgaaaggcttggaattggaggatatcccgctgctcttcagcaagggcgggttcacgggcggggtgttttcgtccaaaggtgggcggaccgtcacgcctgggcagcatgcaatgcagacgaacgttgaccgcaaggttgagcggatgggaattgagctggagcaggttgaaactgttgcttgagcggctacagtaatacataggtatactgtgtgactaggtggcatccgtgaatgggacagtatataagcaagcttgcgcgctctagccgattcagagcatttgagtccaataaaagcacctccagaagccaatacagcaccctttcagaaaagccgtctatgacatcaaatcgaaacaaaggcctctcctcctaaccgccctccaccggttcgtagccctaaataacttcgtacaccccacaacaacccagttctagcgtcttaagaacgtctctgtaacctcccacccgtcagcaccccacggatcttcccagataatgctccccgtttcgcgattctcggcccttcggtccgccgacagaatagcgtcccatacccgcacataatccgatacagcaggacatcatcatagccacgtccctcaccgaccccagcttcggcgaggataagattaccacgcatctgtgggaacaccggcaggtcaagccgggggtgatgcgggaccgttaactggactgcggtcggttgcagagacgcgggtaaaagggcaatgcctgtccgacgtaacgagggctttactggcccagcggtcccaaactgcgacagcgcctcgtcatgtatctcggctgcagagtagcccagcacttcgatgttggtatgtagcgcgcgcaaagagttgacgcgtgtcaagccaagaagcaggtctgttcggagcgagtcggcggcgtattccgcgtagaaaagggactccagatggcggaggatgtactttgatttttcggcctgtgggccgagaatagataatctgtcgaggacggggaagaaggtctggatttgtttgtgagttcgaccttgatcttggccctgtaaggtgtgcttgaccacagcgccctggctcgctgagtttacggcgaagcctgcggctgatgcctctttagtgcgtattgcagcatttgtgag

SEQ ID NO: 20284 - DNA, 2485 bp, Emericella nidulans
tggaagcacttcaagtattgcgaggctctcaacaatagtcccagcagatgttgcgagacaggtggaagtggtacttggcatcctccccggatcaaggttcttctttcttgataaaaatttgtggctttgttctgttttccttaagagttcggttacggaagataccatcgagcgtcattactttttgccacgcgactggacaacgacagaatatttccaacagtgtttgctgttggagaatggtacgcttctttgccctagggaggatgaggtggctgtgattaaaagcgaactgagccgctcgtactgacagttttcaatgtgccctgacggcccatcactgtacggctctaatcaggctgccgcctcttttgacattagttgttgcattggagtagctaatcaccatctcttgcacctaggatgcgccagtggatgctccaaaaaagtaaatatataatccttgttaagcctgaggtagccgtggcacctgtcaggtcgttctatactggagggtttccattcaggcccgttcgaagctctgtatagggagtattgaattacgagctgtggtgtgaaagtctgtaatcctcatttcgcataaagcatgtattgcgatatcactatcccctcttgttgcattgaatctcgaaagattatgaatcagtagttgttctggtggctatacacgcgccttaagctaaatcggccagctgattcgcttgtttaggagttgtaaagcaaagccctgttttctgttttaccccgcctgctttgctgcgacttacagattgctcgtccgccagctctcatctggaaacgcccccttttctgctcatctactcttggaaaatccagattgtcacgagcaacagctgttttgttcccttgtgagataaaataaatacagaatatgtcctcggcaaacccttctactgatatggcacccgctgcgaatactcctaacaatatcttggaagcacgagagactcccgtgtcagctacgagaccgtacacttcattcacatctcgtagcacgatgttcattgttatcattgcgggttttgcaaccatcacatctcctcttaccgcaacagtctacttcccactactgcctacactagaggggcaattcagggtatcacctcaggcaatcaacatgacgttgacaatatatgtcatttttcaagccatatctcctgcagtgtttgggccactttccgacaccgttggcagacgacctatcttccttcttacacttgctatctatgctttggctaatcttggcatggcattgaacaagcataactatggatttcttctgctgcttcgagcgcttcagagcttgggtgccagtgctgcattcgctataagctatgggattgttgccgatgtctgcgtatcaagcgagagaggaaagacgatggcttgggttagtatagccctgaacatgggaacgtgtctgggtcccataataggcggcctagttgcatatctcagcggagatattgagtgggtcttctgggcgctattcatcgttggacttcttctattactaattgtcggaatgttcttgcccgagaccgctcgcaatctcgttgggaatggaggtgaccaaacggaggggactctatggcaacagtgctgctggagttatattcgaactgtgcgattgctcaacaaagaagagaatgagcaagaccatcgagaatacgaagctgcagttagagctgaaccaggaacgctcaaccggctgataacgagaatttctgcccctttcagtattcgaatgttcgccgctcccttgcgaattatcttctttccagacgccttttggtgcttgtggataaatggatcgttctacgcagtcgactatatccttgccgctacggttcccaatattttcacagacatatatcaattcaatacgctactaacaggtctagcctaccttccaagagggataggtatcattgtcggcagctactgcaacggtaggatgatggactataactacaaagtcacggcccgcaagcataatcagcctatcaaccgtgtctccggtgataacatacaacagttcccaattgaactggcacgctcccgcggtacttattatctcctagttatatcgacatgcacactgcttgcttacggctggacggcgaattataaaaagcacttttcagttctgttgattctgcagtttattcaggggttctggagcacttgcttctacacgatctataacacattgttgatagatgttttcccagataaccctagcaccgcagcagcaagtgcaagtataacaagatgtgcattggccgcgataggagtcactactcttcaaccatttgtggacgcagcaggattagggtggtattttacggctcttggactctttagtgcagtatgtggtattgtggccgtcagtttcgttagaaaatatggtatgcggtggagacagcagaggtatatgaac

SEQ ID NO: 20285 - DNA, 2504 bp, Emericella nidulans
ggccttccaacagggaaaagacacggtgctactcctactagatataaaaggggcatttgatgctgtaatataccaacagctcctttcttacttatgcctgtaaagatagcataaaggcttactccagctacttaaggactagcttactagccactctgtatctgttcatatcaaagaaggcactgccacagcactaattaaagaaggactctcctaggaatccctcctatccccaatactcttcctactatatacagcaagaatagtctctaccttagagagctccttctgctatgcagatgatataggtatattattaactaggaataccctggaagagagctcacaataactagtaggggcctataagcaaattactgccctagggacagagacaggcctccctttcttaatagagaaaacagagatacaatacttctctagaaagcagcagcagtatctccccacagttactctacctagtataggggagattatactatctctatatacatgttggttaggagtttttctggatacaaagcttacttttaaagcctatattaatttagtcttcagccgcaggaaacaactcgcccagcacctaaagagacttagcaatacccagcatagctgcctagtagcctccatgcaggcagtagttatatagtatattctcccaacagctctgtatggtgcagaagtcttctatacaggcaaaagacaaaaaggggtagttaactccctactttctctcttccgcacagcagccctggctattatcccagcctacaagactacccctactatagtacttctctgcaaagcagacctactactttggccctatcctagtaactaagggacatggccccgcgggccccaggacagaggtctataatgcagaaatcatgggtgctgtagaaggcctacacgcagccctgggacaactatgtgtgggttactctatacagctagttatcctcctagacaacctagcagcagcctccctgctagcaagctataggcccactccgcataggcatagactgtcagagtcctttggccagcttgctacccagtggttggaagctccctcaatcctaaccaggccacggaagccccttcaagtctgctagatcccaggccattctgggattgctgggaacaagctggcagacaagcttgcaaagcttaggtcctctatatacagccctaatatccccccatcccctgcatacctatgacgggagacaaaacagtggctttgtacagagatatatacagcatatactagtaaggcaccacaagcctacaagaccctggatatcagaccccatacaaaggaaagccgcacccgcgagcacaagcttccctgttgggtacttggccaactcgtcgctgcctgtacaggccacggagactttacagcataccaccagcgcttcaaccactcagactacctggagagctgctcttgtggtaggaccaagaccctagtatacttcttcttctgcccatataccagaaagcgctggaaagatagatggagatatataagggacagcccgtcaaaaataatagactggctcttaagtacagctaccagggctgaagaattcagccacattatacaagaatcatccttcttcaaggatatatgcccgaactgggcccgccggagtgcttgatagtgcaacagtccacacatctacctggataaagggtccagcccctccccccaatctataggtagtcaaaacaggcatctgccctcaaagacctggccagggcagtaccaggtgcttcttctgcttgtttccaatatatattgtccatagttgctgcttcaaacctgtatctagctagctcctaggcagttctgtttaggtagcacgtccagatgccccctaggaggccgcagatcacgtgggccccgtgatccgccgagtgacgttaaataataaaaacaaaacaaacaaaaccaaaccaaaccaaaccaaacgacacatgtaggtcaccacgtgacgagcatacctgcatacagtcacgtgcaaacctccggcttggcaccaatttcgtccgcagattcttgagatttgccagtcgcgacattgttttaatcttagcattgtgtagcaacgattgaaagcctgtgccgtggctccatactatcattttctgcatcagcaacttcacatttcgccatgaaaatgatttgtcaacgctgccggtcgagcatcctgacccgactccagccccagactttcacaaccccgttgagcatcagtcaacgagtccagtttcgcagctacagcgatggaaggcctacggtatcggctacacctccacctccaaagccccgacagcctattggcgacgacattaccatcccgtccgcaatctcctcagcaacccctggcgtctcgcagcccttgagcaccccggagggcgtccatattgatgtgaaccccacaaaagctaccaagccagtcgagcgtccc

SEQ ID NO: 20286 - DNA, 2533 bp, Emericella nidulans
cgacgccgacggctgataccccaggctcggcgcttctcctgcatttcccagggaaacgttatcttttcggccaaattgcagaggggttccaacgagcatgtacggaacgagggacaaagttgacggacgtgtctgatgttttcctgtcgggtcggatgggatgggacacaactggaggcttgattggcatgattcttacgaaggccgatgctcgcgccagttcaaaggaggctctggaagccctcgagcgcgaaaaggaggcgaatcgacagaagcgagggtggaccaagaaagatacgaaacaaacgccggccaacgcagagctcgaagatccgcagcacgacttgactgtccacggttcaaagaatcttgctcataccctggctactgcgcggaggtttgtcttcagacaaggtttgcccgtgcatacgaaggagtacgacgcggaaagtgttgcaaagaggctgcgcactgatcaaagcgacccctttgaagtgccgactttctcggatgaaaacatcaaggtctggaccatgcctatcagcccgtcttctactacaccacgttcgcaaagccctaaaaagaggagtcttgacgaatttcgcgaagatgtgcggggtttagtggaggtggaccagcaatccaaggatcaattggtgcggcagtctgttgtgtctcatatgtttgactcaacttggactctggatgcattggaggaaacccgtcttgccgacgtcaaaatgccagcgcaaatctttgtacgaaatccggagaccaaggacctggacaagtacacaggcccgcttcctggaggagatgaggaggttcctgagatgaccgttcttgtccgtaaaccctggcccggcgcgtcgatcagcaagatcccaacaaccacaccatgcgttgagagtctatgttacatcatcaagaaccacgacctccgcggaaagtttgatgctaagaaggcaatcgctctgaatgtcaagcctggccctgactttggtgctctgacaaggggtgaaactgtcaaggctactgatggaacgatggtgacacctgaaatggtgttggagcctacaaagcctggcaaaggactggcagtaatggacctcccgacttcggattatgtcgagagcctgctaaaccggcccgaatggaagtccccctcagttgcaagcaatttggcagctttcttttggatcctgggtcctggtgtcggggaacaccctcggcttcgggaattcgtcgcttcaatgccgaactgcaaacacatcgtctcgagcacggattattgcccgaacgatctgaccatgcagagtgttgccgggtcggcattcgcatggcccggataaggcctgataattacctagtccctatacacgacaacaacagtgttccacaaacgcaatccagtctggaagatcgcatggccgtggatagccaaaaccattcattcgaacgagccgagcccggactcatcgttagtatggagcccgagttcaagataaactcagatgaagtaccgcgacgactgaacgcaggtagcatcctgacaaagatgccgcagtctgctgtaaggcgggctcgactagttaccaagaggctgcaacatccgctacgccaggagaagattcagcaatttgtgagcgacattcctggtgccgatgcggagatcatcacgctcggaacgggatcttctgcaccttcaaaatatcgggaatgtttccagcaccctggttcatgttccaggtcgggatattatctatttgattgtggcgagggcacgcttggtcagcttaagcgcatgttcagccctgagcagctgcgtgaagttcttcaaaacctgcggctaatctggattagccatctccatgcggaccaccaccttggtacagtctctgttataaaggcttggtaccaggaaaactatcccagcggagttgcacagctgagcgagcctgaaaaagacatagggaagatcctggaggagaagcgtttgtttgtcgtatctgatctcatgatgattgagtggttggaggaatatgctggtgttgaagattttggtttcgccaagtcacgcctctatctgcctatctatacaggactggcgacgaggggatgaaatggtcattcaaataccgccactgccgtgccgacggctcttatcgtgggcgggaagttgaacacataaaaccggaacaaagtgaactgaaatttaactgcaaaggatcaccaggagaggagctaagcgccaagcttcgcaaagccacgggtctgtccgatattctaacggcatacgtctcccattgccgtggtgcaatggcagtctcactcatcttccctgatggcttcaaagtctccttctcaggtgactgccggccatcgcctacgtttgtgactattggacaggactctaccgtccttatccacgaagccacatttagcgatgacatggtcggctccgctctcgcaaaaaaacattccaccgcccaagaagctattgaagtaggccgcaaaatgcgcgctcgcacta

SEQ ID NO: 20287 - DNA, 2535 bp, Emericella nidulans
tcgctatcattggcagcggttggttcttttaacctttcagtcgctatatatgaaactaacaacatattaggcatctttgcccgtgagcaacatctcgtacgtcaccttacaatgcaccagctgaatgggctgtcattctcacgaattgaccagcgcattgacttggtactgaatactaacgatttcgaatccagccagcaattaaagaagcgccgatgttctcgctgaaagccatatactcgcgctcgctcaaatccgcgcagggtctggcagaaggccttgagggtgttgatctgtattcggatgactcaggcgcagggaagagttaccaagatctccttgcaagacaagatatcggagctgttattttggcgtgcgtataacctgttgtcccaggctctaacgcccaagtcatagcctagattgtccctaagggtctacgatgttgaaatgctgacccaggagggtcttatatctgggttagaggaagcgctgactttgtctgacgttggtagcctccccatcgtcgcgcaaccggcatatatcaaggaagccctggctgctaagaagcacgttttgtccgaaaaaccgatcgccaaggaccttgctaccgcgcaggacctgatggcatggtacaatgacaacgccaacgttgacaagtccaagacgttttggggtgtcgcggaaaacttccgcttcattcggaagtggctgaagacagcagaggaggtgcagaaattggggggcgtgaagactttccgagtcgttgtgcgaaataaggttgggacggaggggaagtattttagtaggtcccattctctgtcgcagctacagtctacaatgacattcgtcgaggcgacacgctaacaggtatagacacaccctggcgtaaaatcccagaatatcaaggtggatttctcctcgatggcggcatccatactgtggctggtgttcggctcatccttggtcgcggaaagaacagtcttaaaagtctgaccgcgcagacaagccaactacaggaacacctgccgcctatagatacggtcgacgcgctgctgacgacggcatccggcgccgcgggtgtattcagcctttcatttggatctgaattcaagagctttgtgctggagtttacgtgtgagaagggtgtggtgtcgctggttgatgatcaattgaccgttaacggtgttgcaaccgaaatcccttttgaaggggtcggtgtcaaagaggaagtcaaagcatttggagagtcgatcgttaatggagagttgaacaagaaattagtgccggacgaggcgttggcggatctggaggttctggagatgatgtttagaagtggcgaggatggtggacggaagactttgaagttgcaagactgaacatgatcttcatgacggggatcgaaagtatagttctataaaaggctaggctagttaaaatgaatgatctaagtcaaaataagaaagtcgtagggcagggcccagtaaccctatcacgtgcccacaggtctttccgctcgcttagcaaagggcactaacggggtcactggcagtctcgggcggccaaccctcagcgcgaaatttcgagaccgatttcgaccgttcgacaactccagcgccaacgggacaaacgacaaggtatattcattgcttgactctgctctttcaagaggttcattgatgctaacaattgcgtgaagatggtcctcgctaagaagcacgtccctatcgtcaagaagcgtatgtcaccaccacctatcacccgctgccctgccttgagagtggaagaggaggattgcaaaatagcacaagacgaaaagaggaggcttactggaaaaacttgatcgcccgatcagttttgtttgaaaatggaatggaggatataattgacgagcgactcgggtcaaccacacgtttatatgatcaagtctgactgatcatctatataggcaccaagcgcttcacccgccaccagtccgaccgcttcaagtgcgtgccggagtcatggcgcaagcctaagggtatcgacaaccgtgtccgcagacgcttcaagtcgaacattcccatgccctctgtgcgtcccccgccacaagacgctttcgagttcgattcaaatcgaaacatgaaaaagatgaacagcgagactaattgatacctgaatagatcggttacggtagcaacaagaagaccaagcacatgatgccctccggccacaaggctttcctcgttcacaacgttaaggacgtcgagctcctcctcatgcacaaccgcacctacgctgctgagtgcgtcccgcaatcctaaacctatgaatttgatcaactcgattggaggactaatatgctcttctctaggatcgcctccgccgtctcttcccgcaagcgcgtcgacatcatcgccaaggccaaggccctcggtgtcaaggtcaccaacccccgtggccgtgtcactactgaggcttaaatggtttgcgttgcgattgactgaaacgaaaaaaagcgaaaatgattctgggaatgaattgataaagcgcggg

SEQ ID NO: 20288 - DNA, 2542 bp, Emericella nidulans
cgaccggtgtgaccgtgctctccaacattgccccagcatatctcctctacgcctccgccaaagcagccgtcgagcagatggcccgcgtgatggccaaggacctcgcacgcaatgggatcctcgtcaattgcgtcgcaccaggccctacgactacagggctcttcctgaacggcaagtcagaccagatgctcaagatggtcgcgggattcagcccgttcaaccgcatcggtgagccggaagagattgcaaatgcggtatacttcctctgtagtaaagacagcagctgggtttcgggacagaccctcagggtcaacgggggaatggcatagaggacgctggtcttttggcccgcttatgattagcaagaatttcatttccaaaatttcctcccaagtttccttccaattgaaagcctcgattgaaaacctcctactaaaaactccaattaaaatcctcacagctgaagatatacaaatattccggctgttcatcttcgtactctgacccctaggattcaccgtacgacgcatgggtactctgtactcgatgggtcgtatccgggtccgctcgaccattggctaagtccagggacccctttggtagcgcaagagcatccacataataaatggtccaaggccaggaccggtgtgttgcattggtaccgagtcagcttcctgttttctaaaagagaatattatcatggcaatccttgtacgcctcttcttcgccctctttgtcgtctccgtctacttcttccgcgtacgcctgcgcctgagccacatccctggcccgttcctcgcttctctgacaaacattaaccgtcgacaatgggtgacgactggtagagcccacacgattcacaccgagttgcatcgccagtatggcaaggtcgtgcgcgctggcccaaataccgtctttgtatccgacccggctgctataccagccatctatcggttcaacgagccataccagaaggttttcttccttacacatattacctttcgacgcaaatcaaacaggaggctggtgctaatattcatttatcattgttctcgatgcagtccgagttctacgacgctctgatgccctatgttcgcggcaagagcatccccgacgtcttcgccaccagagacgagcatatccatcggacaatgaagcaacccattgcagccatctactccatgtcaaacctcgtctcgtttgagccgtatgtcaaatcaacgatcgagtatttcttctcgcggcttgacagtcttttcgtcgagactggcaaggtctgtaatttcggcctctggctgcatcttttcgcgtcggatgtgatgggcgagatcacattctccagacgactcggtttcctggagaccgggggcgatatggagaacgtcatggcgaacaactggaaattcttcgttcaggccgctccggtacgcccgataagtctcttgatcattttgtatcggagggaacgctgactgaaggctgtggtgtcctaggcgacgcagatgccctggctcgactacttctggaaacggaaccccctgcttccaggcagtgtcaaaccgaacaaggtcattgagtttggcgtcgcacggattcaagaacgacttcacttgtcggaaaagcatccagatcatgtgaacagcagggattttctctcgcggttcattgcagccaaggagaagaacagccagatcgggccggagtaagttctaacttcttccctactgaccactgaagtataataaaagcaaaaatgcaagattatattgaaacgtctggcagtgctatcatgacctgggccaactctaacatccaagccgggagcgacacaaccgccattctcctcagcgcactcgttttcacactcctcaagaaaccaacgagtctggcggcactgtgcactgagatcgacgccgccgccaagaggggctgtttatcctccattctgacgtggaaagaaacgcgcgatctgccgtacctcgatgcctgcgtgaaagaagcggccagactacacccacccatcagtctccccctcgagcgagttatcccggaatccgggactgtaatcggcggattcaagatccctggtgggacgagggtcgcgatgaatccgtgggctgtgcatcgtgaccgtgacgtattcggtgcagacgcagatacctggagaccagaacgatggctagagggggaggagaaggccaagacgctgtacaactcgttgctgacggttagtctttcaactcggtcgaggaatagtcactaagaggtctttgctatagttcggcggaggccaccgctcctgcctagggaagaacatctcctaccttgaaatttacaagctggtgccgtcgatattgctgcgctatgaggtaagaattcctagccattatctataaagatctagtagtgacggctgcagattggactggctgagccggagaaggagtggcacttggagaaccggtggtttgtgatgccttcaaggttctacgttaggctgaaggcaagaaacggggtgactaaactatgagaaagggagggc

SEQ ID NO: 20289 - DNA, 2572 bp, Emericella nidulans
cgacgaagtgactcaccatcagtagttgagttaaatatccatcgcagtgagattccagaccctgtagcaagggaccgaaggaggcgaaaacgagaccaaacagttgcgcaactgatagacaatgaggtaagtcagtaataagtatatatgccatcgtacttacgtccctataggaaacgctgtatttctgcaacctaactgttggaactccagggcagagtttgcgattaattcttgatactggtagcagcgatttatggtgcaacgccgcgaattcaacactctgttcttctccgaaagatccatgtcgcatatctggatcatttgacccaagctcgtcatcatcttattcttatatatcttctgatttcaacattacctacgcagacggaactggagccgccggggactatgccactgacacagtcagtattggtggtgcaacaattaaagacttccagtttggaatcggctacacatccagttcagcaggtatgttgagaaaatgttttgttgtatcagtagctgtaatattgatagctctcagagggcgtcttaggaatcggttatccatcaaatgaagtccaggttgctcgatacggagacgatgcttatcccaatcttcctcggttcctgatgcaaaatggatttgttcagtcgagcgcttatagcctctggctaaatgaccttgaagcgaataccggctcaatcctgtttggaggggttgatacagagaagtatcgtggcgacctgcaaactctccccattcagaccgtcaatggagagtattctgagctgataatagctctcactggcgtctcgctggatactgaagccaggaagcatacagtgtcttcaaacgcgctaccagcagctgtgctcctagactccggcagctctctatcatatctacctgactcaattgccgaaaaaatatacgatgaccttcgcatttcctatgagccgtccactggtgcaggatacgcgccatgcagtttggcccggcaaaatattaatgtgacctttacgttctcttcacccgaaatcgcggttggcattgatgaactcattatagatgccggagatcttcgtttttctaacggtgaacgcgcttgcatattcggccttgttcctgctggagataataccgctgtactaggggatacctttctgcgcagcgcatatgttgtctatgatttgacaaacaacgagatttctatcgccaaaaccaatttcaactcgacaaagagtaacatcctagaaattggaaccggtagtgacgccgttcctggagctacaaaggtatcgcatcctgtcacttcagtagtggctgatgggtctgggtctagaattggtgcgccaacgaacactgaagatattgtgccatcggcgagtacaggcgcagcggttgtgctagggagatcgacaatatctccggtgctcgttggcgctgcagcattggggtatatgtttgctttttgaaattttcgtacagataaagctgatttctaggtagatgaatatcaatataagaccctttgaacatgatgtacgtgcgtataagagaggctcggggaatcaaaatcagaaatactttaactagctagctcagatcggttctagagtaagatgtgcgggcagatggtgagcaagtaccacacttgtaggcgcccggagataactacttggtgtacacttatgatcgacgtgctcgaggtgtaaacagcctagtttggttatcatctatcccgtggtgggtctcccacctcttgtaccctactttcagtactagtgctttgaacatgttctgcagaccgcgcactatccggggccgtctcggacaatccgccgagcttaaaccacagccacaccaccctgtggtccagcttgcaactttttgaaagttgtctcggtagggctgacttcggaaggcggccgaatcaccacctgagtacagactaattatgctgagtataaaatctagtcagtcccatttgcgctgatcccgcacaagacgatccaaatgccccggctcacaacaagggctatcctcgaagcaaacaaatacgaccgcctacttcctcttctcttaaaagagtgtcgctcactcagctctgcggtaaatgagtttcgatggcttcaggaacgagcacagcgtgtcgtatctctgaagtcgatgcacgacaggaatggctggaaacaagccccgtctggcaggagaaggctcctgaaatcaatgtgtctggcacgatccaggggtgtgcccctccagtatatacttggtgatcagccctttggtgaacttgacatcaaatgtacgaaaggtgttttaattccgaggtaacatttcctggccaattttacatttaagcagatccgaatctctcctaatctcccagcatatcaggcatgaaacggaagctataactatccacaccgcgaacgtgatacaggatcgcatgacctgtgtggaaagggatggagcagcacccctacgcatcttggatctgtgtacgggcacggggtgtatatcactacttctgcacagcctgctttcgccctgttttccgcg

SEQ ID NO: 20290 - DNA, 2581 bp, Emericella nidulans
ttcagaccctggccagaccacccgaccggaaaggtgcgtatcggagatgagatgcggagaggagcctggggagagcttcaggcccttaatgttcaaacccttgattgtttcttgctgaattttctccgataggatgccgtgactttcagcttccccaacagatgaccaaggaaaatatcacacgatcaatagcagcagaacagggtggaagtcgatgcggacctggattgcggtgaggtcattgagtaacgcggggcagttcgagtcaagtctcgtctcgagaggaaaggggcaagagcatcaacctttctcccctcgaggttatataacaaacaggagctaatatttcagccgcggcgccggacatccagtttctaggctgcagaatcaatccgagaatcgtcaataattgatgttcagcgctgggtcggctcttccagatgcccgcctgactgcccggggcgaatcgggtgaagccggtactaattgaacagacacgatagtgtcgaatttggtcgggacttgacctgtactaataggggcataagtcacgagacctcacctcactattacctgtgaccgttggaaaccgcctacattccactattgtcgcctatggagcaccgaacaccctcccaccccgtatttctcagtcaagataaaccagaactgggtcctcgcggtctggacaaggaacagcatcatgtctagccacaagactttcgctagtgtaactctactgtggtagtcaagtgaatcacagactacctctacagttcaggtgatgcgataagagccagcatatcaagccacgaacgatcaaaaagctattatcaagcgcagagatcgaatgaactacaggcagatatcagaggtatcatgacggagttggaagcaaccgcaacctctacgctacatcatgattagttgacgcgctgagatcaccggactaataaagcccggctcatggcccgccataaaaccgactggctacacacctcaaacaactcaacttaccaagatgacgaccgtcttcaaaaacgctcgcgtatactcgccggagtcagggctgggggacgccgcttttggctcttgcatggtgattgaaaagaatcaaatcgtgcacgttggatcgctcgaggatgccaccatacccagcgatgccagaattatcgacctccatgatcggattatcatgcccggcttcatcgacgcccatgttcatattctccagtacgggctctcgctgcgcaaagtcgacttgaccggctgtaccactctgattcaaatccgaaatgccatcaagtcctacgctgattcgcatctctccgtccctcgcatcctatgccgcggttggaatcagtcatgtttcgatgaagaaccgctggcaagtatgatagacgaccttgaaccccgtcccatctacattgaagcggcggatctccactcgatctggtgcaactcggcggctctcgacgagatgtgcgcgcataccgcaccagatcctccaggtggtgcaatccaccgtgacgagactggccgagcaataggcctactgagtgaaggggccgtgatgaactttgcctggccatttcttgacaaagtcacgccaaaagcggagaaacttgatgctctggaagcagctatcaaatcatactctgctacaggatatacaggcacaatagacatggccatgtgtgaggatcactgggaaatcctgaacctctaccgtgcccataaaaaaatcccattccacatcgctgcccactggctcgtccccttctcagatgaccagcaagtcaatttcagctacgtcgaccgcgcccttgaaatccgccgtcaatacaatgatcctacttttaccatcgcaggaatcaagttgatgtgcgacggtgtcgtcgatggatgcaccgccgccctcaggcacccctatggcggcaacccagatccagtacagccaatctggccagaggaccttatgtccgccgtcattcaacgcgcagacgacgcaggcctccaagttgccattcatgccataggcgatcaagccgtccaccaatccataaatattctctcatccctcgtcaatacccagtcccaaagtttgcaagaacctcaacgcgaccggagacacaggatcgaacatttggaactaacatcccccgccgacgctgcccgtcttggccaatttggcataacagcctctatccaacccgtccactccgacccagcccacttcaccgcctggccttcgttgataggctcacaccgctgcaaacgagccttcgcatacaaggactttctcgccggcggtgctgttatcgctttgggaacagacgcgcccacagcgccacactttccctttcaaaacctctaccatgcaacaactagacgctctgctattgagcgggaaagcctgcagcgcctgaacccggaatttagtttgacgctgttacaggctgttgcaggtgcgacaaatggggcggcatattcgcggtttgcggaagggtggacagggagattagaagtgggattgaacgcggattttgttgttgttgacatgttctggaaagaagagaag

SEQ ID NO: 20291 - DNA, 2583 bp, Emericella nidulans
cacgccgttctcccccagacgccgctgtcgccgcgggctgcggccgcaaggccgacatacacccaccgtgaatccggaaatgtccccatgtcctcgacctcccaccctgataaccccgtgccggaagaacctcgagtgcgctccctgtccgttacaaacaagagcttcggcggctcttcggtctcttcacaagaaacagagaacacagattcagagtcaccgtcaacaccacccacagaacaatcagatgaagagtttgcggagaaacaacccaaggatgatgctggacgtcaacggcgggcttccactgttctgatctcgcagggtcccgatgacatgcggcggatcttagaaaatgttggaacaggggggacacagaaactccagcccatgtgctgtggtggcggttgctgccgtcttcaaccgctgaaccgagctcccgggcctgtttcggtgatcaaccccgtcacaccaccagataacaaggcgtaccagagtctaaagcttaacgtcgacctccttacgctcgacagcgagctcaccaacatcgctcctctgccagagaagaaggtatcattctcggcagtcccaccttctgctgtgaatatgaaccttgggcccgcggatcatccacctccttttgtgcaacctcaccctccgtacaatgtgtaccgagcccctgtttaccacgcacgagaactcacgagcgctggcgctgagaagcggacataccatttcgatatagacgtaactgattatccggccgagagtggaatggtcgacttcgttgtaggtggtgccatcggagtttgcccgatgaacaaggaggaggaagttgaggatattttcaaccaacttggtattcccaagtctattcgggacaagaaggtcactgtccggactacccacggcaggtggccaacgatctggggtaaagaggaagcgcgcgagttgatcactacccgacgcgagctcctgaaatggtgctccgacattcagagctatgccccgaccaagggcctcttccggctgctcgccgagtatgccagcgacccgagcgaaaagaagattcttttgttcctcgcatcagctcaaggccaaggcgccttctgcgatctccgcaccagttcacacatcaccgtctctcaactgctccacgcattcccctcatcacatcccccgctcgaccacctcctatccaccctcaaccaactgatgccacgattctactctctttcgcaagaccctcttatctcccgcaaacgcaaaggtgatcagtaccgccgtctagttgaaatcgccgtcacagtcgccgaatcagaagactggaagggcggtagtagaacaggcgtgggctcgggttttatggaacgtctcgcaaggcaggccgtcgaagctcaagcgcaaggtcgtgaaccaggcgatctcgatctgcacgttcccatgttccgcggccttatggccaaccctctcgctaagcgctttgcttcagacggacctatgctcctcatcggtgctggtgttggaatcgcgcctttccgcggctttgtccagcgtcgcttgcagtcagcgaactgcgcgaacaaagtctgggtgttgcagggggttcgcgattctctgctcgacgagctttaccgcggcgagtggggtgtcgaggaggacaaagtgcgcaaggttgtgcagagtcggcggggcgagagcaagtacgtccaggaagaagtccgcaatcaagcagaccttgtttggttcgtgatcaactcgctcgacggccgagtcttcgtctgcggaagcggcaaaggtatgggcgagggcgttgaggctgcactagttgatgttgccatggcaaagggaaatctgaatagggaagaggcggagcttttctgggaaaataagaaggaggcagggcaatatatagcggtaagtcgtcgaattatcctcgtgttgttaaaaaagactaacgaaaatcaggagacgtggtgagacatatgtaagatagactcggactcgggttcggactcggagatactagagcgatctgcgtgacttatcccgagttcctggagaactcggagaaaagaggcccttctactttagcgctgttctttatcactgctgtcgcggtagatggttgttaaaccaggataggtatattggattcaactaggagtatgtatgatttataatcaagtttatatcattcactaaagttaccgattttgtcctttaccttgtaatcgacattctgagtgggatattatatacactgcgatactgccgcaaatatagcaaagttgacagcgataattcgagatatactagtaaaggaagggcaatataattacgatatcctgtgatcagcatagccggtgctttactgtcctgaggccctccatggtctatcacgaccaaattggtctcagctaaccttgcaattatctcatgttggtgagctccgccttatatacaagacgaatcaggtctaactcagttcgtcaagtgtccaccactccaatgaggagcattagttggctagctataatcattcaagggcatctaccttttgaaacaaagcagcaacttgga

SEQ ID NO: 20292 - DNA, 2584 bp, Emericella nidulans
atcgccggcagcctcatcaccctccgtcccttattccgctggttcctcgacgggagctcctcgtacaaacaccaacacacgccccaacagaagacgaacaagaagtacgtcctgtcaacgttgactgcgaacgcctccatgcctggcatcgaggacccaaaatactggcgacccgatctcggggaagatccacacaccgtagtgacctcaatcatggcgccgctgggacggagcatggatgacaatagcacggtggctctgagccctatactgccgccgccgaggaagatctcggtttgcgtgcaccagacgttcgccgtgtataaagacccgtcgagtccggttgcttcgagctttgggtgcccaggccagtgcagtccagccccggttccagcatcaattcaatcagcaactccatcattgattccaaccccggccccagcacaggcaccgcggttagataatggacggcggtataataggggttatggtgcgggctatgcgggctatacgtacgagttctgacgtcagcgtgatgctagccaggcctttgtttatataatcctcttcttccctcttcatagccaggaaaaaaatttaggtctatatagtacattcattatgccttctcatagctctaacacacaccgctatcaccggtatgctgatctctcttctataccaaagccaaaataactgacaaggcgtagagtgggccattggatgccctcgggctatgacgatcaccacaagtggctcggcggcgttattgcccacgttgacagtaaacaggacaaggaattgcatccagttctgaaggagtttcaacatctaattgaaacaaacacccgcgtctacatgctgatctccgccatgttcgccgaggtcccaaagaaccgccactactgcaaggatccgacaggctgctcacagatccgagactatcatcacatgctgcaagtcttgaatcaccttatcacgacggcgccttcgtggaatgatttttctctcgaagtcggccttgtcgggctgccgatcaatgcggtcctcgactggtcgatgggcacgccgagcgggtacgcggcttatcttgatcccgacatcaacgccatgttgaagaaggtcttgaacgcctggggcgagtacctgacctcagaggactcggccaaggttcttggggatgacgaatacgggtggtttggcgagacgggcaagaacaacctcatgcacgtcgccaacctccctcttggaacagaccacgaattcgacaagctgtttgtttgcgacccgtccgccaaataccatgggtacaagtcctgggacgacttctttactcgtacgttccggccgggagttcggtctgtggcctcgcctgacgacgacacggtcatcgttaacgcctgcgagtcccagccgtacaaggttgcccgaggagtcaaggcaagggatacgttctggatcaaaggccagccatattcggtcgctgatatgctctcgcacgaccctgtcactccgcagtttgaagggggcactgtttatcaagcgtttttgagcgcactcagctatcatcggtggcatgcacccgtcagcggcaagatcgtcagagcgtatgtggtcgatgggacctactactctgagccgctattcgaggggctatgggatgaagaagagaacaagccaaaggagcagggaatcgacccaggcggcgaagttacgacgcaggagtatctcacttgcgtcgcgacacgggccattatcctgatcgaatgcgataacccggccatcgggcttatggcgttccttggggttggaatgtgcgaagtctcgacgtgcgatatcacagtcaaggaaggcgagcacgttagaaagggcgatcagctggggatgttccacttcggggggtcgacgcactgtcttcttttcaggaagggcgttgatgttgagggtctgccgtcgccggatctggggaggaatgttgctgtcaatagccagctaggagttgtgaaggcctagcgattgcttatatagttgtctgcattaagagagcgaatacagcatagactgcttaatctgggaaattctttgctgtatcctagtagcttgctttatctacgatcagagcatgactgctgtttgcgtaccagaccgctaatgatctgattgcataaaaggataatgaaaccgaagtaggcttgttgctggcaaacgaacactttggggagacagtgaaataaaggcgaggagccggcccatatcagcgttgaatccttggtaggatgaatgccgagacaggtggatgaggaacggtagatagctgatgagtctcgttgatatgcttgggagtgattttcaagtacctgtaggactcaatagcatggcttcttacctgccagtcttatgtggtggacccaacgtagtctatcttcctgcaacggtgagcaacccataccagtactactgagcgatctgatatactaaggataatcctcattcagtgctctttctgaatggaatgggaaaacccgcttgtgtcgtcttcttttcctaccgacgtacttactatatccatccctacgaaagagca

SEQ ID NO: 20293 - DNA, 2589 bp, Emericella nidulans
tgtcggtctacctagacgccactatgcatcctctgcttaaagaggaagactttaggcaggaaggatggcgtttgggacctgaggatccccgtgcaatccaaactcaggagggaaatctgaagcctgaagacattctgtttaagggtgttgtgtacaacgaaatgaagggtcagatgtcagatgcgaactacttatattggattaggttccaggaaagcatctttccggccatcaataactccggaggagacccccaacatatcacggatctgacgcacaagcaactcgtggagttttccaagaagaactacaatcccagtaatgctaagatcatcacttacggcgacatgcctttggccgatcatctgaagcaggtcggtggcgtcctaaacgacttttcgaaaggggctgtcgacacaacggtgaagttgcccattgagctccgaggccccataaatgtgactgtcccgggaccaatcgacactttcgtaagtgaagacagacaattcaaaacatccacttcttggtacatgggcgatatcacggatactgtcgagaccttttcggccggcatcctctcgtcccttttgttagatggttatgggtctcccatgtacaaagctctgattgaaagtggcttgggctcctcgttcactcctaacacgggactcgacacttctggtaaaatccctattttttcgattggagttacaggtgtgagcgaggagcaagctcctcgggtcaaagaagagattcagcgagtccttcaggaaactcttcagaggggcttcaacgatgaaaaggtccaaggatttctccaccagctggagcttgctctgcgtcataagacagcgaactttggcctcggtgttattcagaaaaccttcacctcttggttcaacggctccgatcctatgaaggagcttgcatggaacgaggttatcaatgccttcaaaagtaggtacgaaaaaggaggctacttagaggcgttgatgcaaaagtacctcatcaacgataactgcctgacttttacgatggttggtaccccttcatttaacaaggaattggatgataaggaaatggcgcggaaggagaaaaagtttgagcaattaactcagcaacatggttctgttgagaaggctgtgactgagcttgctaaagcagagctgcagctgcttgaagttcaggaaaaggcccagcatgctgacctgagctgtttgccgtctttgcgtgtggaggatatttcacggcagaaagagcacaagccagtccgcgaatctaaggtcgaaggcacagatattgtttggcgcgaactccaaccaatggactgacctattttcaagctgtgaatgccttcgccgatcttcctgatgatctccgcctgctcctgccacttttcaacgatgcaatcatgcggcttggaacaccaactaggaccatggagcagtgggaagacctgataaaactcaaaacgggtggtgtctcgacctcgaatttccatactacatcgccaacagagatgggcaaatacactgagggacttcaattttctggtttcgctctggacaaaaatgtccccgacatgttggaaattctcacagctctcgttactgagacagacttcaccagcccttctgctccggccatgatccaggagcttttgcggctgactaccaacggggcattggatgctgttgcaggaactggtcaccgatacgctctaaacgcagctgctgccggtctttctcgtagcttctgggcacaagagcagacctcaggtctagcacagctgcaagctacggcgaatctcctgcgtgatgccgaaacttctccagaacgcctagccgagctgatcgaaaagcttcgtctcattcaatcattcgctatctcgaagacatctggtcttcgtgttcgcctcgtctgcgaaccggccagctcgacccagaatgaatctgttctgcaaaggtgggttactggactgcctaaggtcccgtcgcccacgtcccaacctcaaaggtttgacttgagcacaccttccaagaaggcgttctatgatctaccttacaaggtttactattctggtctggctttgcctaccgtgccatttacacactcatccagcgcgactctgagcgtcctttctcagcttctgacgcacaattacctccatcctgagatcagagagaaaggtggcgcctatggtgcaggagcaagcaacggtccggtcaagggattattcgcattcaccagctaccgcgaccccaaccctgccaacaccctcaaggtcttcaagaacagtggggtcttcgcgcgtgaccgggcttggtcagaccgtgaaatcaacgaggctaagcttggtatcttccaaggactcgatgcccccgttagcgttgatgaggaaggatctagatacttcctgaatggtatcacgcatgagatggaccagcgctggagagaacaggtcctagacgtcaccgccaaggacgtcaacgaggttgcgcagaccttcctggtagatggcacccggcggtctgtctgtctcctcggtgagaagaaggactgggccgaatctgagggctgggaggtccg

SEQ ID NO: 20294 - DNA, 2602 bp, Emericella nidulans
cgggcctttacacaggaagatttagagaagcgcgtcatcctccatctatagaacagaaagtgcagaaaaaagaaggtctcatcaagatgggagctacagaagagaatcaaaatgtgtttgcctcagcggccggcgaggaaatggccttggaacatctgggctacaaacagggtacgattattgacaagacgattttttgagtgaggctgatgagacagagcttcgacggtcctttagaatggtagacatgattgggttcagcttcagtatcgtcacttggtaagttgtcgtgaggatcctagatcagtacacaagctgacctttcaatcatcagctggacagcccttagcggagtcttcatcatcggggtcaaagccggcggaccccctgtcatggtatttggctggattggcgtctgcgtcgtcaccttgaccgtcgccttgtccatggccgagatgtgctcgcggtggcccgtcgctggaggccagtactcctgggttgccctcctcgcaccttccaaagtctcccgtcagctctcctacatcacaggctatggtttatgcttaccggcatcttggctatgggcgccgtcaacaactccgtcgcatccaacttcatccttgggcaagcgaacctggtcttccccagcttcaccattgagcgctggcaaaccgtcctcgtcacgtacgccgtggctttcagcgctctcctcgtcaatatcttcgcaccccatctcctcaatcggctatcgcgcatgatcctgatctggaacatctgctccttcatcgtcatcactattaccctcctagctactaacaggcataagctgtcggcctcttttgtttttcaggactttcagaatttcaccggcttcggccaggcaatggccaccattatcggtatcctgcaaagcctttttggtatgtgctgctacgacgcaccaagccatatgactgaggaaatgacacatccatcacgagacgccccgaaggccatgattatgtcagtgggactcggtgccgttactggcttcgtcttcttactcacattgtgcttttgcattggcgatgttgaaacaactgcggcgtctaccaccggtgttcccgtcatccagctacgattcaacgactagcagagttggagcttgctttatggcaagtatgatgacactaatagtcctcatttgctcagttagtttgattgctgaggagtcaagatcccttttcgccttcgctagagaccgtggtcttcttttttccactactctgtccaaagtaaccggcaaatgacacatccctctgacgctatcattgcaacgacactagtgcagatggccttcaactccatctacttcggcacggtaacaggctttaataccatcatctctatagccaccaccggattctgtaagctcatccccattgacggtactaaacgcagaatacccccgtactaattcgcattctttcaaagacatatcctacgcccttcccctcttggcccgcctgctcggctacgtaacctcgcacaaaatctcctcaacgcacttcaaaggccccttctcgctgtctctcccgctgtcattatccctaaacgcactaggtctcctcttcctcctctttgcgtttgtcacctttaatttcccatctgaggcgccggtggatgacgaaaatatgaactacactagtgcagcgattggcgttattgcgctggttggtgtggtaacgtgggtcacgacagcgagtaagatgtttacggggccggttgaagtgaatggggtgagtgaaattacgatttctgagttaaagggtggaactgaaggccggcattctgggcatggctttgccttgaacagcgataaagcgaaggctgaaccaggtgtgaggtagttttgctattcggtatttgagggggtttgtagtttcccatataagtggatttgctcgacacccaggaattgtaattatataatgactgttatagagtgataaccaacaacgccagtagtaatattatattacatgcgttcgatagtgggccgcttctagtgagtgcgcaccactatcttaatcaatatatatatatgtgaatcgtgtaagtcgcagctcgctcttaggcaggtgtcctgtacactcaggtgcgtatgtggtaaagctcaatataagctgctagttcccgattgatatatttgacacagctctagccctatgaatcaactctccggcagcaaccaagcaggatcaggttcgtcatcttcagtctccgagttggcatcgccgggagaatggctgttcatatcttgcaacaggtcagctggaggctcgggattatccactccaagaggatcgccatgtgaatcgccgtctgagctcttgcgcggctttccagggtctccgtaggcggtaggcggattaacatcgtctgtattgtcgaatatgctcaagagcatcactcgagcctcgtgaagtgcttcaaattctgccgaaatgcagcaaacaaggagcttccaatctttgtttgcgcatgacccaggttttgctctacgagatctgtcgtctgttccaggtcttccataatggcctggaccaagttacctttgttg

SEQ ID NO: 20295 - DNA, 2616 bp, Emericella nidulans
cacgcacagcccagcgaatcgcctggacctggcttaaagactccgataccacatcttctgcgagggaccctgcgagagtatcagcattttggtttagactggctagcgggtctttattcgaatcatatcaacggcattctcgcggatgagatgggtctgggaaagactattcaaaccattgccctgcttgctcacctggcagtagaacatggagtttggggtccgcatcttgtcgtggttcccaccagtgtcattcttaactgggaaatggagttcaaaaaatggtgcccggggttcaaaatcatgacgtactatggcaaccaagaagaacgccggcaaaaacgcaggggttggatggatgacaacagttggaacgttctgatcacatcataccaattagtcctacaagatcagcaggttctcaagcgaagaagttggcattacatgattcttgacgaggcgcacaacatcaagaactttcgctcccagagatggcaagctctgctcacgtttcgcaccagagcgcgactcttgcttactggaaccccccttcaaaataatcttaccgagctgtggtcccttctcttctttttgatgccaaccgatggtgacgaggctggtattgaaggctttgccgacttgaggaacttctcagaatggtttcggcgtcccgtagagcagatcttggagcatggccgggaaacaatggacgacgaggcgaaacaagtagtgacaaagttgcatactgtcctgcgaccgtatattttgcgtcgtctaaaagctgacgtcgagaaacaaatgcccggcaagtacgagcatgtcgtgtattgcagactatcaaagcgacaaagatacttgtacgatggcttcatgtctagggcacagaccaaggagacgcttgcatccgggaactatctgtcgatcatcaactgcttgatgcagctacgcaaagtctgtaatcaccccgatctcttcgagacacggccgatctcaacctcatttgcgatgccacgttccgtcgcaacggagtttgagacaagcgaagccctagttcggcggcgtctgctttaccaacatcccttggaaaagctcgatttggatttcctcaacctggtgcccatctcaagggaggacatatcgcgaaggctggcggatgatagcgccaggattatggcttatgctccctttaacacactccgcgagcgtcagtaccaccggacaaactgggagatgaaatttaatggatcaaccgtacagtctacattggaggcattggagaacgactgcaggaagaggagaatggccgaactggaaagatctctgtattttgagtccaagcgccatggtcggcgtcccgtgtatggaagcagccttattgagttccttacggcagacagcaaacagcggccgactgcccatggtcccttacggaaacgctcgtacgcggattggttatccagccaatcctctgtattggcctcgatgatgatgtctctggaggaaagatctcaagcgatggatggatatatccaacgctttgcctgcgttactccggcagcggttgctgcaggggttacagaagccgctttgacacccatctcaacgcgacaccttacgaacaaggagagatttccgccacatgatcccttccacgaggctcagatgcgcctatctatcgctttcccagacaaaaggcttctgcagtatgactgtgaaaaactacagagactggacaagctgctacgcgatcttaaagccggcggtcaccgagcgttgatttttactcagatgactaaaatgctagacgtgctagagcagttccttaacatccacgggcaccgttatcttcgtctggatggtacgaccaaagttgagcagcggcagatcctcacggatcggttcaataatgacaatcgcatcctggcattcatcctgtccagtcgttctggaggtctaggtatcaacttgacaggcgccgacacggtgatattctatgacttagactggaatccagctatggacaaacagtgccaggaccgctgccatcgtattgggcaaacccgcgacgtgcacatctatcgcttcgtctcagagtacacaatcgaatccaacatcctccgcaaggcgaaccaaaagcgcatgctggacgacgttgtcatccaagaaggcgagttcacaactgattatttcacgaagctcgacgtgcgcgatatgattggcaatgacgaggctcttaaagacgaggccagtgctgccatggaccgcgtcctcgagaaccgagtcaccaacacttcgcgcgtattcgagcaggccgaggacaaagaagatatcgacgccgctaagaacgcgcagaaagaactcgaacacgctgatgacggcgatttcgatgatcgtgccaatgctaatgccagcggcgtcaccgctgcctcggcttctgcctccggcgccggccagactccaacgcaagcaggcacacccctaccagacgaggcgcagcagtccctaaacgcaaacaatgccgaggtcgccgaagacacagcggactctgatccgtccgttggccatatcgacgactacctgctgaggttcatggaatggaatatgaaagacgagccg

SEQ ID NO: 20296 - DNA, 2654 bp, Emericella nidulans
tccccgagtccattactcagcctgaaattctccaagagatcagccaggccaacaatgacccctcagtacacggcatcctcgtccagttaccccttccccagcacctttccgagcatgcggtcacctccgctgtagccgacgagaaggatgtcgatggtttcggagcgattaatattggagagctcgccaagcgtggtggtcgcccgctttttgttccttgcacaccgaaggccgtaatggtccttctcaaggccagtggtgtcgacccagcgggcaaagaggcagttgtccttggccgcagcgacattgttggaagccctgttagctaccttctcaagaatgcagacgcgaccgtcactgtgtgccattcgaagacccccgatattgctagcgctgtaaaaaaggcggatattgttgtcgcggcgattggtaagacagagttcgtcaagggcgactggatcaagccaggcgccgtcgttatcgacgttggtatcaactacaagcctgattccacgaagaagtcaggacagcgtttggtcggtgacgtcgagtacgagtcggcctcccaagtggcttcaaagatcacgcctgtccccggtggtgttgggcccatgacagtagctatgcttctggagaatgttgttgcttcggccaaagcatactttgagaaacagaaggagcgacatatcaccccgctcccgctcaagctggccaccccggttccctcagacatcgccatctcccgctcgcagtaccctaagcctattactcaagtcgcgtccgagatcggtatcgcatctcacgaacttgagccgtacggtcatactaaggccaaagtgagccttgaagtacttaatcgtttgagccaccgccgtaatggccgctacatcctggtctgtggtatcactcccactcctctaggagagggcaagtcgacaactacgttgggtctcagccaggccctaggtgcacacttgaaccgtgtcgcttttgccaacgtccgccagccgagccagggtcctacgttcggtatcaaaggtggagccgccggtggaggctacagtcaggtcattcccatggatgagttcaatctgcatttgactggtgatattcacgccatcactgccgctaacaacctccttgccgctgcaatcgagacacgtatgttccacgaggctacccagaaggacgccgcgctgtacaagcgtctcgtcccagagaagaagggcaagcgcgagttcaagcctatcatgttcaagcggctaaagaagctgggaatcaacaagaccgaccccaacgagcttactgaagaagaaatcaatcggtttgcccgccttgacattgacccttcgaccatcacttggcgccgtgttctggacgtcaacgatcgacaccttcgcggaatcaccgttggacaggcgccaacggagaaggactaacacgtgaaactgggttgacatctcggttgccagtgaatgtatggcaattctggccctgagcagtgatctcgcagatatgcgggagagacttggtcgtatggttgttgctacctcgaaacggggagagccggtcacttgcgacgatatcggtgctgggggacggcttgcggcgctgatgaaggacgcgatcaagcccaacttgatgcagagtttggaaggtacgcctgttctagttcacgccggtcccttcgccaacatcagtatcggagccagttcggtccttgcggaccgggtagcactgaagctggcgggtaccgagcccgaggaggaccatgaagccaagactggtttcgttgttacagaggctggtttcgacttcaccatgggcggagagcgcttcttcaacattaagtgtcggtcgtctggtctttctcctgacactgtagtcattgttgctactgtgcgtgccctgaaagttcacggtggtggtcctgagatcagccctggagctccactacacgaggtctaccgcacagagaacaccgagattctccgcaagggctgtgttaaccttaagaaacacattgaaaatgcccggcagtacggagtccccgtcgtggtagctatcaaccgcttcgagaccgacaccgaggcggagatcgctatcattcgcgaggaggccatctcggcgggtgcggaggacgcagtctccgccaaccactgggccgagggcggagccggcgccgtcgacctggccaaggctgtcatcattgctagctccaagccaaaggactttaagctgctctacgatctcaacggcagtatccaggagcgcattgagcggatcggtaaggccatgtacggtgcggagaaggtggagttcagcgaactcgctcagaagaaggtcgacacatacactgcccaaggcttctctaacctcccgatctgtatcgccaaaacacagtactctctcagtcacgaccccagcgctgaagggcgctccgactgggtgtaccgttcccatccgcgatgtacgattggctgtgggcggtggatacctgtaagtcctgtccctaagttttgtcacatagtttcgactcaccgatcattactaggtacgcgctcgcagcggacatccagacgatccccgggctgccgaccgctcctgggtacctgaacgtggacattgaccccgagaccggggagatcgacggg

SEQ ID NO: 20297 - DNA, 2663 bp, Emericella nidulans
ccggggacgagtctggactgatgctattgcatcagagttttggcaccccagtcaccaggtgagactacggagtcctgaagccagaaacacgccaccggtcccgaatttgctgatgtccgcctgctccgcaccccaaaacggtaattctccgcctctccgcctatctgggttccccgtgctagtctggacgatctagccgaggaatggaaggtgggtcagggctaggtcgagagacgcgtaggcaaaaacagggtgaaggaaactctggaaacccgatccgatcccactccacatagtatgagggacgagcttagaatagttgctgtgtatgtgtatctgaattggaccataggtgcctggatatgtctatcatcccatgatccctatacatcgtgatatctgtcaataaacgcctaaccgccactttattcccgcaaacgggcaaatgtaaaggagtaccgggattccgtacgtataatcggaggccaatatacggtacagatggccgacccgactctgggcacccctggtccggggcaagggctggtcgggacggcgccggactgagactttggttgacagctcgactgctgcagtcttttcctatcttctttctccattattctccattctccgcatgatggccctcgaaccccagaccctctcagaggatcatctgcccgtgacagtttgagtctagcctcctgacaggtgccgccgatatggtattaaaagtcctagacacagccaaattgtctcagaatttctattcagagaaccgtctcatctcctgattcttctcaatcatcaccgtcttcttcgtctctgtcaattccttcgtttttttctcttcttgtttatcccatccaggtctttgtgatgaagggtgaaaagaagacggccgagggtgtcgctgccccggcctcggaacaggttgtgagtcccaagccagccgttatgtcgatcctggtcatagaggctccgctaatcagttaatccttgcggtaacaggagaatacgacagttcatacggtgaccggcagcgaagcgttcaatcaggcccttatccaggaaaaaccacacctcctgagtccaaccaacctgctgctgtgcgcctgtttgatggtcggattctgctgccagacaatgaacggctacgacggctccctgttcagtggattgctcgccaataccatcttcctcgatcacttcaacggtcgagacgctggcatctgggccggtctggtttctgccatgtaccagatcggcggcgtcagtgcgcttccgttcgttggtccggccatcgacacctggggccgtcggtttggaatgttcctgggcagtttcatgatcgttcttggagcggtcgtgtccgggaccacgatcgcgaatgcaagtgtgggccaattcatgggcggccgcttcttgcttgggtttggcgtctctatcgccgctgccgctgggcctatttatgtcgttgaaaccacacatccagcgtggcgtggtatggtgactggctattgcaacaccttctggttcatcgggtctatccttgcgtctggcgctgtccggggttctatcacccttgacaataaccagtcctggctgatcccgctctggttgcagctagtcttctcaggtatcatcatctgtacttgctggatgatccctgagtcgccgcggtggctgtatgtccacggcaagcaagagaaggccgtcgaggttctgactaaatggcacggccttggcaaccgcgattctctctgggtcaaattgcagatttctgagtacgacgctcacttgaacatggacggttcggtaagtgtccaaagactggacctcgcctgatcgggccggctaacacaagctcgacttataggacaagaaattctgggactaccgcagcttattcaaccgccggagcagtatctaccgtctctgctgcaactgcttctttgccatattcgcccaatgggctggaaatggcgtgctgacctactatctagttcccgccctccgcggcgccggcttcacatccgacgtcacccaggcaaatatcaaccttgggtacgcctgcttccaattcttctgggcccttgtcggtgctgcctttgttgactcgctcggccgtcgtcctatgatgctcttgggtatggctgggtgctgtgttgtttggattgccattctatctgcgtccagtcaggtaaataactcggacggcacactcaacagcgccgcatccaacgctactctcggctttatattcatttttggcgctgccttctccttcttcattacccccctgcaggccttataccccgttgaggtcctatcatatgaaatgcgtgccaagggcatggctttctcctcgcttgcggtcaacgcagcaggactgctcaaccagttcgcatggccggtgtccttggacaacattggatggaaaacttacattgtgttcgtcgtctgggacgccatccagacagtgatcatgtacttcttcttccctgagacaaaggatcgcacggtaagtcttgttatttctgctctctttccgtccgtctacaatgtcagcttactaacgtgctatacagctggaagaactcgatcagattttcgaggctcgcaatcctgtgaaggcttcgactaggaagacagctattgcg

SEQ ID NO: 20298 - DNA, 2683 bp, Emericella nidulans
gtccgccctcggaagctcctgatgattgccgtcggtatgtttcccgtattccttgttctgtgggatctttgattaatccaacgattctatcgcagatggtgttgccccccgcgcaaagatgaaccaacagcgagcacgtcgattcaggtccgctcaagaagctagagaacaagacgagaagaaacaggagttccagagaatgcttgcgaaacagaacggggacaaagaacaaatgctccaggaagaagtcatccagaagacatgggacagcaacgttatcactcccggaacaccgttcatggacatccttgcagcgtccctgcggtactggatagcttacaagctcaacactgatcctgcctgggaaaaggttagttttctgtcagtatttgagtgttgaggttctcatcgaaatagttgaaaatcatcatctccgatgccacagtgcccggtgaaggtgaacataagatcatggaattcatccgctcgcagcgcgcttcgcctgaacatgacccaaatgctcgtcatgttatttacggattggtatgtcccctccagcctaaattcaaacatgagctgatgtaagatcatgataggacgcagacttaattatgttaggtctggctactcacgagccccactttagagtgttgcgagaggatgtgttcttccaggaatccaaacagcggacatgtcatctctgcggtcagcctggccataaagcggaggagtgcagaggtcaagccaaagagaagaacggagagttcgacgaaaaaggaaaaggtgcaacactcaagccgtttatctggggccatgtttcaatccttcgagaatatcttgcggcggaactttacgtcccgcaccaaccgttcccgtttgatcttgagagggcgctagatgactgggttttcatgtgtttttttgtaggaaacgatttcctcccgcacttgccgtctttggacattcgtgaggatggtatcgacactttgattgcaatctggcgtgataacatccccctaatgggtggatatctgactcaggatgggcgcgtggacctaaagaaagctcagcttattctccaaggtctcgctaagcaagaagatgctatctttcgccgtcgtaggcaggcagaagagaggaagcttgccaacgagaagagacgcaagcaagaagaaaaggcacgcaatgaggagcgcgccaggaaaagaaggcgaagctctccctcttacgatgcgattgaatcacccactcatgctaagccgcgcagtgctggtgcagctgcagcgccgccagctggccttgagctgatcacccctgccagaggtgaactggcccgtcagacccgagagctgactcatagtatggtggtcaatcgcggcaacgtctatcgggccaatatggctaacaagagcgcggccgctgtcttgaaaagcaaactactgggagggcaggatggccagccctctgacgatggagagtcaaccgctgagtcggacgcacaacttgacgctgcaggacctgttctcggcaaacgaaaggcagatgaggcagaggtcggacagctcggtacttagataccagacaagccggaacccgcgaaggcggatgagctgccgccagacacagtccgtctgtgggaagaaggatacgcagaccgatattatgaacaaaagtttggcgttgacccacaggacaaggagttccgtcacaaggttgcgagggcgtacgccgaaggcctcgcttgggttctgttatattatttccaagggtgcccgtcctggacttggtactacccgtaccattacgcgcctttcgctgcagactttgtggatattggtgacatggagttatcgtttgagaaaggtactccatttaagccttacgagcagcttatggggcgttctccctgcgtcctcgaatcatgctataccaaaggtgttccactcattaatgaccgagcccgatagcgagattatcgacttctaccccgaggatttcccggtcgacctgaacggcaagaagtttgcctggcaaggtgtggtcttgctgcccttcattgacgaaaagcgacttctggctgccatgtccaagaaatatccccttttaactgaggatgaaaaagctcgcaacaccgtgggtcgggatgtgctgctattatcagaaagccacccgctttatcaagatctcgtctcaaatttctactctaagaagcaaggcgctccaaagtacaaactcaacatgcgggtgagcgatggacttgcaggcaaggttgaaaagaacgaggcgtacattccgcacagctccctcgtgtcatctctggaggagtatggtatgccatcattggaggatgaccgttcgataatgtaagttgcttctcttggtgattgttgccactggctaacgtgacttagggtcaattacgagataccgaaatccaccaacattcataagtccatgcttctacggggagtgaaattcggtcctccagccttggacaatgcagatatccaggctactaaatctagagcccagcactccggacgctcgtacggcggagcgcctttccgtggcggacgaggaggacgtatgaattatgccggtgacagacaaagccatggcaacgatagaccaaacccgtttgcggcacaccttgatcccaagtttatgcctggagccaaccccg

SEQ ID NO: 20299 - DNA, 2688 bp, Emericella nidulans
gcttgcgctaatcaaaaccgacgaaaaacgcttctaccttttcttcaacgagtttcgtctcgagacgcatgttaggagagagcaggatgagtcgataaatgaccggaatgaccgagctgtgaggaccgtcgcaaaatggtacatggatcatttgcgcgcagttaccaaaagcaagaaggagaagtccattccggctattgtggttataactgatgataaagagaacttgcgcaaggccaaagaggaaagtgtgacggccttgtcgttagagaactacgttagtggattggaagatgcggacaggttgctcgacatgatcaatgagtctcgggaagcgagggaggcgaaagaagcccgcggagaactctactatccagagtactattctatgtcgaagatcatgacaggattacgggccggaaatcttcaccaaggcgttttcaatgtctcgccatataattatctagagggacaagtcaaagtcgcggcatttgataaaccacttatcattatgggccgtcataacagtaaccgagccatatctggagatgtcgtcgtggttgaaatcttacccaaagatcagtggaagtcgccttcaacaaagatcgtcgacgaagaagccgtgacaaagaatgataatcctgagggcgaggacaacgaaactgtcatcactgagaaggagcggagagctttacaagaagaggttaggcaagcgcatggaaagaaccacgaggggcggccgcaaccgacggcgaaggttgtgggcgtcgtgaaacggaattggcgccaatacgtcggaaccgttgatccaacatccaccggctctcaaaccactggccgacgacagcacgttgttttcgtcctcccgatggaaaagaaggtccccaagatccgggttcgaacacgacaggctacggaactgttaggtcaaaggatcctggtcaccatcgatgcttggaaccgcgactctcgataccctaccggacacttcatccggtcactgggcgaattagagacgaagctcgctgagacggaggctttgttactagaatgggacgtacaatacaagcccttcccgaaggctgtgttggagtgtcttccccctgaaggacacgattggcgtgtccggcaagcaaagatgatattggctggcgagggcgaagggatctacgggatcttcttatctgtagtattgatcctccaggttgtcaggatatcgacgatgctcttcacgcgcggaagttgccgaacggcaacttcgaagtcggtgttcacatcgcagatgtctctcatttcgtgaagcccaataatgctatggaccttgaggctagcgttcgtggaacaacagtttacctagtggacaagcgtattgatatgcttccccaccttctgggcacagatctctgttcccttaagccatatgtggagcgttatgccttctcagtactgtgggaaatgacgccagacgcagaggttgtgtctgccgacttcacgaaatctgtgattcgatcgcgtgaagccttcagttatgaacaagcccagctacgtatcgatgacccatcgaagacagatgagctgacagaaagcatgcgtaccctacttcatctctctaaaatcctgcgccagaagcgcatggatgccggtgcactgaacttagcatcaccagaggtccgcatcgaagcagacaacgacgaggtcggcgaccccttggcggacgttaagacaaaagcgatgcttgcaacaaacagtctcgttgaagaatttatgctccacgccaacatcaccgtcgcggctaaaatctacagcaccttcccgcaaaccgccatgctccgacgacatgcgacacccccgccccaaaacttcgaagaactgatcaaccaactcaccaagaagcgcgacatgcgccttgacgtctccagctctcgcgccctcgccgactcgctcgaccgctgcacagacgctgaaaacccgttcttcaacaccctcgtccgcattcttgccacccgctgcatgacttccgcagagtatttctgcgccggcgcgcacgcggagtctgaattccgtcactatggcctcgcctcacccatttacacacacttcacgtccccgatccgccggtacgccgatctccttgtgcaccgtcaactcgcagcggcaatcaattacgagggcgaagacggccgcgccacgatcgagggctccattacgcgtaaccgcctcgaggatatctgccgcaacatcaactaccgtcaccgcaacgcacagcacgccggccgcgccagcatcgagtactatgttggtcaagctctcaaagcacgtagcgagaagctcgccacaaacggcgtagacatcggcatcgaagaggacggatacgtcatgcgcgtctttgaaaacggtgttgtggtctttgtgcctcgatttggtattgagggcgtagtcagacttgaggatttcgttctgcctagtgatgaggcgctgcggtctgttgaggataggagggagcttgttaccaggcgcgagagtgagtttgatccagaggaatatacccttaaggtctcgaataaggggcaccaagaacggtcggtggccgtggagcttttccagagggttaaagttaacattagctctgtgaaggaggagactggacggggtgttgggaagaggagggtgaggatattgattctgaat

SEQ ID NO: 20300 - DNA, 2702 bp, Emericella nidulans
cggcctggtcgctgactcggaagtctgtcacggaagtgataccagtgcgcgaggcgaggaacgagccttcggccatagtcaaggcgcttcgcacttcattcgcctcgggcatcgacagaagccagatggtctgtccatgagacccaatgacatcgatggaggagatatccaccttgtagtctgcacagaactgcttgaccgcggcggcgaatgtctctcctaggatgacattgacctcagatagctctgagggcgaagtcttgttgtgcaggatgatgttcatcacccgcttcttgatcgtctgctcaagcgggatttctccatactgcgcgcgtgagtgtcctttcacgtagagtatactagcattgtacataccttgagcagctcaaagtgcatgggagactctggagtctcctgccggaagcgacacagagcacagtcgatgccatcctgtccaagttagggttgccgcgcatcttttaaagagcagaacaaactcaccatcgaggtgccgctgttcaagcccagcaccgtgatgtcgagagcatggtttttgggagtttcgttggccattgcgaatgcgatgggagtctgcggtcgtatgatgtgccgagcataatcggacagctggaacggctcaatcatatatcggaggcagactcgggcgccttatcggcaacacgcttgaatcgaggagccggcgctgggcccagaacgccggaacaggagccgatcagctctgttggatgtgtaaatgggtaaacgcctaaatggctaaattcttccaaggattactgggtgggcagggggagtgctccaccaatgcggaacagaatcctcagtttctgcaccacacttctggagttcgggcgtttctgtggaggcggagcacttatgggctagtaattgcctcatgaacgcttccccgggttttatagagtgcaacaaccccgggctttggcctgtcttttttcccaaatcttcttctttggtggtcaaccatcatggcatacaccacgctctggaggcgcttgtcgcctcgccagctcaatgtcgccgtccaggtcttctcgctcatctgcatcttcttcgagggttacgaccaaggtgttatgggcggcgttaacgccgcgccgtactatgtcaccgaagtcggaatcggcaagccggatggcactgtgactgacactacccatcaaggaggcattgtcagtatctactaccttggctgtatctttggctgtttcgctggaggctggctggctgatcgcattgggcgtatcaatggactgtttatcggtgccgtcttcgcggtcattggaggtgctctccaggcagcgattcaaagctcagatttcatgctcgtcgccagagtcgtgacgggcgttggcactggaggtacgtatctcatctctccctacgcactgctagttatgggcctgtgctgatcgaacagcgctgactggcattacgccggttctggtatcagaaacctcgtctgccgaccaccgtggcggattcttgggctatgttttcattgccaactgtatgttcctcgcctgaatttccccttgttctcgacgcaccgcatactgatcctgcagacctgggaatctcggttgcgtactggctatcgttcggcttggccttcatcaataacggatactctgatatcaggtggcggttcctgcttgccttccagtgcgttccagcgatcttgctggtcttcttcatcaagatgctccctgattctccgcgatactatgcctctgttggtcgtaatgaggaggcccgtgatatgttgacaaggctgcgaagccacaaagcaagtcaggccgagatcgagcaggagtacatggagattgtagccgtggcccaagacagcaagcccagttcgccgatccagtttatcaagatcttgataggcaagagcgggcggccgggaagcaatctcagccgacgggcctggttgtgtgtgtggcttcagattatggcttcgtggaccggtatcacggtatgagaatcctacccggtcgtatcgttctagctaaaccgcgtcaggctgtcacggcatactcgcccactctcctcagtcaagctggatacagcagcctgacccaaaacggcctcgcaggaggtctcaacacgattggtattgttggaaccatcatcagcgcgcagatcgtggaccgaatcggtcgaagaatgtgcttgatgctcggtgctctgagtctcttcatcgttgaagttatcgtaagtttgccccttttatcagaatagacccttactgatccgctaaggccggctctgtctatgaagcctcccttcacaacccagaaaaagcggctgactacgcgcccgctgcagtcgcaatgctcttcctgttcaaccttgcctatgcctcgacttggggcaccgtggcattcctcgttccaaccgagatattcccgtctgacctccgtgcccagggcaacgggttcggcattaccgggtgggccattggcgtcgggatgaccaccttggtgaacccgatcatgtttgccagcctgaaaagccgaagctacttccttttggccgggttcaatctcctgtggattccgatcgtgtatctgttctaccctgagacccgtaaccggtcgctcgagtccattgacgctttgttctcgacgccaagtccgttctattgggaaatggagcgcgcg

SEQ ID NO: 20301 - DNA, 2714 bp, Emericella nidulans
tcctcctcccagccgtatgcaagtacaacgcaaaatacaacgccaacaacgaccgccaatcccggctgcgcgagttcctcctggagcagtcgatagtcgcggatgtaataaagtcgcgcggtctgcaaaaggaaagtcttgacctgggagacgtgctagatgctctgtttcgggaactcggcatgccgcggtcactgggtgaagttggcgttgcccaggataagctggacggcctcgcggcaaactctctgcatgaccggtggtgtcgatcgaatccggttcctttgaacgagaaggagcaggtactggagattttggagcaggtaatttgatcgacgtatgtacctttagatctagaaatgcatatacatctgatggactgcatatccctgatgattatggccaaccctacacgtatcggcgaacgtgcaaccatcccaatatcccattctcaacaaagccaataaaaagctagtaacgagggacagaagatgtaacgcaacagaaacgcgactctagactccaactatcatctgtttcagtacaaagactctgacaatggatgcctcgtcattcaacacgaaactcgggcaaagaacaaacacctacctgacttcgaattatataacttcttcaggccacattcacacaggctacggagaaatctagtttcctgggtctttaggttattattaagaggaacagaggtaggatagagaaacccatagctacggtacgcaagccaacagccacacgatgttggtattctcacgtacgattgaataactgtgggaggcacattttgtgtctggaagtggccaccagctgctctaacctctcaatggtcttatgcgattgtcccgccttcttctctctgcagacttgtcaaatcgaggtgggaatatcataattacacaccatgaaagccggagtgtgctctccaggtactgccgtgctttatcatttgtcgcccatctacacgtgacgccgagatttgtatacaccgactttttgattgcagataagccatgagcgcaacaaatatggcttcaatggagtcggcactggcagcaatcgaatccataaagcctggagaacggtttagctatgctaaaatcgctgagcagtatggtgtaagccgtacgacgttgtctagaagacatcggggtgttcagggctcaaaaaaggcacaatatgcaaaacagcagctgctcaacccccaacaggaggatgagcttataaaatacatcgacaagcagtccgagaaaggcctagcggcatccaggcagatgatcgagaactttgctcgagagagtgctcaaaaagagccaggagcaaactgggtttcgcgctttcaaagaagacatcagagcaagtttatgagtgtctgtacaaccggcagtgattcttcacacagggaggacgagactacctttaagtactcacaatattttgctttattaaggcggaaattggatgaatacaaagtccaaccagaggatacctacaacgtggatgagaaggagtttcttattggaatcggctctaaaaacaagagaatcttctccaaggagagccatgaaatcgggagcttcaaaaagcatcttcacgatggtgactgtgaaaggataactgcaattccctgtatttgcgcagacggaagcaagctgcctcctggcctggtctatcagtctgcttcaagcaaaatacaagatacatggcttcaagacttcaatcctgagtatcacaattgcttctttacatcctccccttctggatggaccaatgacgatgtgtgtttggcatggcttcgggatgttttcgacagggagacgaagccaaaggcaaggggccgctggaggctcttgttgctagatggttatggttcatttgtcacaatgaagttccttgactactgtgaagagaataagattctcctggctacatatcctcctcattcaacacatacattgcagcctcttgatgttggcatcatctctcctttatccgaggcgtatgatgatgaagtagaggcatttctgcatgcatctcaaggcctcaatgctgttacagaacgagaattcttcggactgttctgtaaggcctggaataaggctgtatctcaagccaatgttgagaactcatggagagcaactggattagtgccctggaatcctgatgttgttctggctcgttttaaggagaatgcagcacaaaaaacttcacctagtgagtctacacgagctatattgcgaggggaagactggagaaatattgagaggcttctcaagcaggcgaatgttgacgttcagaatgaaaatactgagaagttgagccttacaatccatcacctttctacggagaaaatcatgctgaaggcgcgctgcaaagaccttgaggatgcgctagcaaatgagaaaaagaaacagaaacgaggagagtctcctatattccagtcacaggccgcagagagtggtaatacagtcttctattctcctaggaagacccagcaggcgcgtaacctgcaaaaggagaaagataaggctatacagcaagctgaagctgcaaaagagaaagccaagctacgaggacagcaagacaaagaagagaagcagcaaaatgctaagaagaggaggaggaggaggaggatcaaagcctcaggaaaacagattcgattgcaagaagaagaggagaaaaagcgccagagaaaacac

SEQ ID NO: 20302 - DNA, 2734 bp, Emericella nidulans
ctcgtggctctggcatctgctgaagctccctcttcaggcttagcgtgtccgattccttttccttccatcgaccaataatcattctgcaaagtcccacttgggtctgggtcgccaccatggacagagccttcatgatgctgattggctgatctggacggtttccagcgtcccatatgcgggccagccggctcaactcagaaccccgacccgcaccggagttgtgcttcccttgctgcatggtaggagtagtcgtcggcgaaagtagttgtaacagtataaacccctaacagtcgccttgcttcgataatcgtcctcgcttgctcaaacggtgcagggcttctccctttttcctactgatcagcctcctattgaggaagccaggacggacggtgacgctcgcagtcgtgcatcccatcccctacagaattcattgaatcataccttacgccaccgggaaccgactcttatcaggtcccgaaccacgttcgtttctgatcttattccgttcgatttcgttcgtttctcaccctcccaataatggctgaggcagcagaaaagatgcccgcggtcgactcagccaaggaggaacaaggttcttcggtggaagtgcctgtgaatgcgtccggccaccgtcaagagctccaacgcaattacggtctgctgagtatctgtgctcttgccatcacgactggaaacacatggattgcccagggaggaagtatagcgactgctctttctaatggaggcccgtctggagttatttacgaatttatcgccgtctcggtctgctactggatggtggctgcatcaattgctgaactggcgtcaggaatgccgtctgctggtggtggtatgattcctcgctccgctgcgttctttcgctttggctgatttgcttatctagtctatcactgggcttctattactgctgggaagtatggtcgcgtctgcgggttcttcgcgggctggtggaactgcttggcttgggtgcttggtggcgcttctgtatccgccattcttggccagcagacggtctcgatgtatgcgctgatgcaccccggattcgagatgaaggcatggcacgtctttgtcagcttcatcatctgtacatggctctgctgctcgatcgtcctatttttgaaccggttcctcccgcagttgaataacctgggcggattctttattctctctggtgtgctcattgtcatcattgtcgccgcctgcatgccccatgttaatggcgtgccgtatgccacgaatgaggatgtctggcggacctggacgaactcgaccggatactctagcaatggcttcgttttcgtcgccggtatgctgaacggtgcttacgctgtcggtacacccgactgctcgacccatctcgccgaagagatccctaaacccagcagaaacatccccaaggctgtccttgctcagatgagtatcggcttcatctctgccttgctttacatgatcacgcttttttacgccgtcaacgatctcgagtctgttctggccgcgcctttccctctcgctgagctctaccgccaggcgaccggatccaagggcggcggtcttggtctcctgatcatcaccttcctccctaccgtcatcaactgcgccggttgctacatcactgcgggccgtaccctctggtctcttgcccgcgaccgagcgactcccttccccaactggactggccgtatcaactcgactatgcacaaccccttcaatgccaccctcgtttgcggcggcgttatcacaatcctggcgtgtatttatgttggttccaccacagccttcaatgctttcgttggctgcttcgtccagctctcttctctttcatacttcgccgccatcttcccccatgttctcactcgccgctcgtcctttgtccgtggctacttctggatgggcaatattggatacgtcatcaatgtccttagctgcatttacattctcgccttcgtggttatcttctgtttccccttcgctctgcccaccgatgcggcttccatgaactacgctagcttgatgaccggcggtctgactatcttcgtggccatcaactggttcttcagaatgggttcatacgagggccccaagtttgtcccgttgactgacagggctctggcggaggacgccaaatagaaaaagaaaaaccaaaacaaaaatcggatacaaatcgcgcaggaagagtgaatgtaccaatagttactgcacatggcgctttagatgaagtctggaatttagcggattataagatccttataatgtcaatcgttatgattcttgtatatatgcgataactataccatctatcttcgatcaactgactcttaatgagattcatcaattatccagtatttagcaggaaaatcgtatgcatacgaaattggagtcacgtgaacacgcgttcccatggcgcctgacgcgagtctcttccacttgaactttcaacaaggcttatgctacgtcaacatttcaaagaccatttctcgtcatggtctttaagcccttcaagccgctctcgataaggaagccacctcagcctgccgatccaacccaaaaaccatccataaagcctctcgaaaccgatgacggcccgcctgcaaagcggccacgactgttttcccaggatacaagcaacactgagaacacgcgtactacgttagcgaaccagaggaaacctttgattcaggtcactaatgttagcgaggcgtctgcccttactagc

SEQ ID NO: 20303 - DNA, 2784 bp, Emericella nidulans
cagtctatccatcttactgaagccctcagctggtctgcgaggccttccacacagaagtacagtagcagtcatggcttcctacaaccatatatcccaagagcccgactccaacactttatccgactcccgtccttccaacagtagtcaatcgttacgaatacaccttgattacctccgcatttactacctcgcagccgtcgtctgtgccggcggtctgctctttggctatgactctggtgtaattggtttagtctctcttttctcagctctaccatgtttaatgcggtccgttaataagcccgttaggaggcgtcctcacgttcccttccttcgcagacttcttctaccccagcgccagcaccaaccaaagtgagacagatatcagcgcactcgccgtagccacccagcaagctggcgcactcctaggctgtctggtcatttggccggtgacaaactctgtcggccgccgaaaagcactagccctctgctccctcaccttctgcatcggcgtgcttttcgaaatcctcaccctccattcccttgcgctcttctacaccggccgtatcatcgccggcctcggcgtcggcggttccacgaccgtcgcgccaatatacctcgccgagatgagtcctcctcatctccggggcagactgggcagtgggtaccagtttacctttacaatcggtatcttcgcgagctactggatagattatgcgtttcggctgctggtggatgacgcgaactcggcgcagtggcgggttccacttgccctgcagcttgttcctggtgttctgatgggtgcaggcgtactgagtctcccggagagcgtgcggtggctccttggtcgaggagaaacacatacgcatgaggcatggaacagtcttgtttgggttcgaggcagtgatcaaggaggccgcgtgggtgacgaattcgccgacatgaaacgcgctgtgcaccgcgatacagaagaatcagccgactttcacccgcgcgagcttctcctccgtccgaaccgccatcgcatcttcctcgctgtgtccctgtttatcgcgcagcaggccacaggcgcaacggcaatggcgtactttggacctcagtttttcagcattttagttaacccaaaccctcagccctccgaagcagcatcagcatcatccaattccttaactctcctcttaacaggaatctttggcgcccttaaggtcctcagctgcctatcatttatcctttttattgcagaccgcttcggccgccgaccacttctcatatttggggctctgggaatggcattctgcatgattgcaacttctgttcttgtacattcaatgcctattcaggaccaaaaatccctcatccaccatatcagcaaagtccctaacaacaatcctcctaatatacctctttattgtgatctacaacacatcctggggtccgcttccctggccgctcgtcgcagagctcttcccgacccggacacgctcaagcggagtggccctcgcagttgcaagccagtgggcgagtaacctcgtatggtcatttgcgaccccgtttatactgagggatgtgggtgcaaatacttttttgctgtttggaggcgtctgtgtgggggctgcgggattcgttagactttgtgtgccggaaacgagggggttaagccttgaggaggtgcaagggttgttcgaagaggttggtgggggggttgaggttgcgcatagagatgggggaagagatgatggggccgagtgggagcgtcttgtcgacgggagtgagggtggtgggactgattatcatggggagggttctttaggtgtgaacgatgaggacgggaaatgagtagatatggcccgaacgcgctagtaaataggtttgtgcatatattacttcctggtacatatttcagacgatatagttcactgagatgctagactaaatacatggcataggccgaacaaaagctaagtattcgtgctcgtgattgaaaataaactgcaaatccttcatccctgactccaaactccagaacgaaaataaaagtacacacccgcttgctaagcgaacccgccaatatgtcactgagccggtcgattcccaacgcttttttacgaccagcggccaaactccggtgtaagtaagctcattattcgtcaattggtcctccagggcaccaatgtagtaacacaccgtcaaatgcagacgaaaagcacgatatcatgccgtcggtgggtggacatcaaagccaaatccactaggctttcgctccgagtggcatccgtactgtgccggggctgtcccaaaatcgaattgctcatgctgaatggagatgttcttcgccatgttttggatgtacgctttgatggattcgtggccacattcggagtgtgcaagaagctgatccttggccaccacgatagcgtccctcaacgagttcacagtgcgagtgagctcctcgttcttcatcttctcctgctcgtacctggtctccaacatatggttctgctccttcttcttctgtcggcacttgctggccgcaagtcggttccgtgctctagtcttctcttgtttatcatcaccgggcgacgtaggctcgaccgaggttgaggcccgagtgctgcctcgactgccactcatgttgctagaaccgctccttctgcgctttggcggggactcagatgagccttcaatggtggacgggagatatgctgacttagagtcgtgggaaggaacggagtagacggtgctgggagaatggtctgaaggaggggtgacttgaccatggcggacccg

SEQ ID NO: 20304 - DNA, 2786 bp, Emericella nidulans
cccaagcgatacgcatttgtggatgacgatacaaccgttgctcttgaggtacttgagaataggctcagggtttccggcggtctcgatgatcttgatgccctcttggacggcagccttagcataggccaggtagtcgggggcgttaatggcgggaagcatggtgatgttgacgccgaactagggaccccgggtcagcctgcaataggtaaatatcctcgagtggcttaacgataccggtttatcagtcatgcttcgacagcgacggatttctgctcggagggcgtctggcgaaggttgggtgagggctgtctgtccgtctcgtcagaggatgttcgtcgtcaagggactggctacccagcatactaagaacccgagacctccagcatttgcaacggctgatgtcatttctttgggcgtcaggtagcggagattaggacattgagttggcactcaccggcgcgaccaacccacatcatccctgggggattagtatggtctttcgaacgattacggtaaggagcttacctccttgcacgatggggaccttgatccccagggtttctgttaaccacgtcttgaacggcattgtgaaaacgttcgctgatatcgaaaatagccagagactaggcgtgccagctggaggccggccgggtatttaagccttagcaggagccgacaagccgcggctcagacagcgatcgcgtcttgtcattgtagattgagcaagtcagaaatattctaaccgacaactactcattagggaggctatcaaattgcactgccttatatatgtttgattcactaactcgccatcatacggctctatctcgttatctatggaatggatttaccccaatctctgcctaccccacacttcacctgtcactttactaatggaacttcctctccaactctctcacttcctcttcctcccttcaactctcacagcaatactgagctgtcaagaccggcagtatgcggtctccatttacccctctagcaatcggctttggcttcctatccaacgctggggccttgacaatcccttcttttccgcagcagctccttggggcttcggctgcagaagagatttgccctcttcctgcaaaggtcactttcgacgacagcaatctcttcccatctgttcaatacttccaaaatgaaaccatcctccagcgtcaagttgatcgtctttccagagctgttcaaatcccgactcagatcactgattacatgactgatcccaatgacgacgcatttgcgccctttgttgacttccacaagcttcttgctgggctctttcctcttgtgtgagctcacctacccttttcctccttacttcaatgaccctcgcgtcacccgcgtatccttcccagctcaggatctctcttcccaaaactaacctgagacagctactccaaagccaagatcgagcacgtcaaccgcttcaatcttataataacacttgaacctccctcggaaactgtagaaaagagaaagccccttctctttacggctcatcaagatgtggtccctattaacgatgcctcagactggacgcatcctcccttctcagggtattttgatggcgagtttctctggggacgaggaagcagcgactgcaaaaacggccttatcggtcttctctctgtagccgaggatctcctatctcagaactggacgccatctcgaccgattgtcctggcgtttggattcgacgaggaggcacaagggtatattggtgctgcgcgaatcgctccggttctggaggaaagatatgggaaagatggagtagaattcatccttgacgaaggaggtggcggtatcaccacccttcgctcatcgttatcttccgctggagaggaatttgaggacgagagtgtgatttacgcgctcccggatgttggcgagaaaggcgccgtcacgatcgtccttaccctcgctgtccctggtggccatagttccgttccgcccagacataccggggtcggcataatgtcggaaattatttacaagctagagaatactgagcttgacattttcacgcccattttagggtctaatcacccttctcgccgagtgtttgagtgccaggtccgccattctcctgaatatgtggaggactggcttgcttctgcgcttgactcggatgatcaggcagcaacggccgaagcaattgctaggtctcgtggagaaagcgttcgattcactctccagtcgtcccaggcagcggatatattcaatggaggcataaagagcaacgcgcttccggaaaagatcaccgctgtcgtgaattatcgcatcgcattgcaccaaaccccgaagatgctccaagaccgagcggagaagatcatagagcccattgtagagaagttcaatttgacctggtccagattcttggataccaacaaggacgagatcagcagtgaagtggcaagcagtggtcatctcacgctctcgaccctaaattctcctctcgagccagcccccgttagccctactgatatcgatacaagtcccgtttgggcacggtttgccggtgtcgcccgctcggtcttcgagtctgttccaagtctgaaaggcaaaactgtcgttgttggtggggacatcaccaccggcaacacggataccaggctttactggaacctatcgccaaacatttcccgctggagtcccgcgcgcgagggccgtgcgttgaatatccacactgtggatgaaagagttggcattgatgctcacctcgaggcgatgatgctgtattatggtaggtcttcttcatcgttgca

SEQ ID NO: 20305 - DNA, 2789 bp, Emericella nidulans
ggaggaatggcatcagcgcctatcccatgtccatctacgagccatattgaaaatggcacaacagaaaatcatcaaaatcaaaggcccaaaaaccttggctttctgcgatatctgtcgacaggctaaggagaggagaaagagctccaaggagccagcctcgcgcgccacaaagatcctggcgcgaatccatattgatattgcaggaggaggagcaacattggactgcaaggatgaacaagcccctcccggcattagaaatattcgatatttcttgttgattactgatgatgcaactcgatatcgatgggtttataccctccgaaccagagatgaggctattcccaccttccagggatggcttgagcatatcaaaaaccaaggatacagcccaccagctttcgtacgaagtgatcgcgaatttctaactgaacacgtcaagaagctctgccaaacctatggcctaatttgggagccaaccgctgcagactccccatggcaagatggcgtcagtgagcgcggaatacagacggttttacaatatacaagggcaatgttatatgactccagattaccacgatggctatggccacaggctctacaaacagctgtctatcacatgaaccggttacctacaagaattcccttgtacaatgatcgacggcctatggcaccaaccagcgatccggaaatccagccatgtgcccattttacgccctattccgcctggaccaatggtgacactgatatcaagcatcttgtcaaatttgggtcacctgcttggatgcacctacatggagcatcaaaatatgctggcaagccaaccagtaagattgacccaaaagccaagaaggtccatgtcgttgggtatagaggccgccatatctatgttatttgggaccctgaaatcaaccaactacgcgataccagtgatatctccatcaaggaggagtttaacccgccacagagcaagccgtacgaagctgccaaagctcccgaagctgctaaagctctcgaaactgtcaaacctgccgaaactgtcaaaacggctgacactgtcaaaactgccgaagctgtcaaacctggcgaaactgccgaagctgcagaaccaaaaaccaataaagaccttcttatacaggatatatcagatattacctccagagaagagctataccgacctgccaaaggatttgctatccaaaaatctgtcgaatcacctctacctgagcccaaatcgtacaatgaggctatcaaaggccctgaatcagctcaatggcatgcagcaatgcaagaagagattaataccttgaaacggaaacaatgttgggatttgatccgaaaatctgacatgcctgctcgcacgcgccataccaggaagatgggtttataaaaagaagcttaatcctgacaactccatccgttacaaagcatgatgggtaatcagggggaatcttcttgataaatcggaatttgaaggagcaacgtacgccccagttgtcgacctgattacttcacgaatcttgtttggtgtcagcgcccaaaaaggctggcatattattcaggcagatgcagttctagcgtttctaaatgcaaagttaaaaggccaaccgatttatatgcatcaaccacttggattcgctgaaggggagccagggaccctagtttgcctgctccgccaatcactatatggcctaaccccgtccgcgcgcctatggtacgatgatctacgagcatatcttgaatctataggatttaaggtttccccgcatgacccaggcctattcgtacatgttacagaaaagctctatatcaccacccatgttgatgacttcatgattgttggtgaaaaggcccaaaacgccgtacaagcgctcgaaagcttgaaatcccgatttgaaattaaagaagcgccggaattcaagcgatatctaggcatgaatatcaaaacaacgcctacaggcatccacctgtcacaggaggatcaaattgatgacattatcaactcttttgggcttcatgatgcccatcctaccaaatcaccccttgatcctggaacagttatcgatgatgctccagatctaaaaatcaatatcaaagaataccagcgcggtactggcagcttgcagtatctagctacaaaaactaggccagatatcagccgagccgcctgctttcttgctgaatttaatacagcgcctacagccaaatgctgggcagctcttatgcatgttatcaaatacctaaaaggcacccgcagtctaggaatcagatattaacatgatcctgcagccaatatcgagccccctaaagcctttagtgattctgattggggtggacctcatacaaaagcacgtcggtcagttggcggatatgttttcaaacttgccggaggaccaattgcttggcaatcaaagcgccaaacctgcgtagcaaccagctctaatgaagctgaatatattgctgcatccgaagcctcgcgcgaagcctattggatacgcgaaattatgaaggatcttcgattatttgatgaccaacatgcacctggtatcccattacatatggacaacaaaggagctattgatcttacaatgtccgacatacaaaccaaaagatcaaagcacattgacatccgctaccattacacccgtgatatggtcgaccaaggcatcatccatatcaagcagatccctaccgccgaaatggttgcagatggctgtacgaagcctctgggatctgaagctcactcccatttcattcgtttattaggtctccgcaacgatgattaatatttt

SEQ ID NO: 20306 - DNA, 2792 bp, Emericella nidulans
ccatcagctcgctgggcagtcttgatttcctgtcggtctttgtatgccttcctatgtgactctggctaatggcgacaggcttttcggttatgaccaaggcgtcacaggcggtctcctcgagctgccatccttctacaagtacttcccggaaatcactgcagacatgtgcccggaagacgaaaacctcagctcctgcaggtcgcagcgtagcaccaaccagggcatcgctgtcgccgcatacaacctcggctgctttctcggagctatcttgaccgtgttcatcggtaacgcaatcggccgtcgcaggaccattttctgcggctgcgtgactatgactactggcgctatcctgcaatgcactgcttacagcctccctcattggatcgttggacgaatcgtgactggaatcggtaacggcatgaacaccagtacggttccaacctggcagtcagagtctgcgaaagcgcacgatcgtggtaaactggtgatgatcgagggtatgttgatcaccggcggaatttgtctcagctactggatcaactatggtacgtcgatttccttcctggtctgttttgtactggcgcgcagtaatcactgacgctcccttgcaggtttcgccttccttcccgaccacgaggtctcatggcgcttcccaatcgcctttcagattattttcgccgttactatcttcatatcaattatgaacctccccgagtcccctcgttggctggttatgaaaggtcgggacgacgaagcggttgagattcttgaactcctgaacgagaagccgcgcgacgacccttacatccagaacgaactgctgtcaatcaaggaaactgtgatggaaatgaacaagggatcattccgcagcctgttcaagatgagcgagtaccgtgaattccaccgtgtcgcgctcgcctacgtcaatcagatgttccagcagatttccggcatcaacctcatcacttactatgtgagcacatgttctgccttgaaacgcgttcattgctgatatgtctaggctcccaatatctacacggacattggtctcggtggcggtaacaccgcgaagctcatggccgccgccaacggcaccgagtacctcctcgccgcgttcattcccattttcattatcgagaaagtcggccgtcgcccgttgatgctctttggcgtacgttccctccctattcacttctttgctagaatctgacaaagccaggctgctggaatgtctatctccatggccattctcgcgggtacacactaccgccgcgaaacctacgacgacaccaaggccggtgtggcccaggcagtcttcctctttgttttcaacaccttcttcgccatcggttggctcggcatgacctggctgtatcccgccgagatcgtcccgctccgtatccgtgcgcctaccaatgcgctgtcgacttcggcgaactggatcttcaacttcatggtggtcatgatcacccctgttgcctttgagaacatcaaacataacacgtacacaatctttgcggtcatgtgagcttcccttttcttcagttcagctggctcttgtaccagggcacgtgctaatatcatcttcagtaatgcttttatgttccccgtcgtctacttctgcttccccgaaacccgttaccgttcgctcgaagagatggacgcaatcttcaaaaagtcggacggaatctggagcgctgtgcagcattctatcaaggagccgtaccgctatgataaacacggtcagcttaagcctgagtacctcgaggaggcgatcaggcgagaaagtgtgcgtcatgtggagggcaagttcgagagtgaggacagcaccaatgagagtcaggaggcgaaggggacggagacgagactggagtaaatcattccgagcaatggggagtgccgagataaccgggggtgattgacgatggtaggatttatacccgtcgtgtgaggttttgttcagcctacacgatatcgatttgtttacgctttggtggattagatggatggtcctataatgtattatgctgttgataactgcagcaaagctctagaggggtttattccaatgattagatgcctagctcgtatgagctttcagttgatctctgcacctgcactcaaccaagtatcctctctcatattcactagcaatggcatctcagtatgtttactgcatatcatcccccgtttaagagaacaagtcccgcagcatcacagcttccctgcgcctgacagccggtgacacgcattaaatctccaagccacgaggacgtggtcctgttgatcctagcggctctcttgtcaatcacatctcatccacagtgtaaatgtggctcaagtacatagccatcgccatcttcagaatacacaatgttacaatcacaagcccaggcgcagaactggctttcagaccgcacaagatctaacctgacgtcactttcagatgccctgccgagaatagattacaatctcggcccagtgtgccccgagctctgagctttgatccctcggcattatgtgcggcgcacggcgcacggatgtttatttttgacatctttttatttattactagccggcctcttcatctaacaaattcatttacataatttattccgcagatcggcggcgcaggtaagcactttgggggccgatgtggctttcatggcctggccttgctgtatttaagagctgcatgtctacaactggcctgtgacggcgccgccaatggaaagggaatcgaacagtttcagtcgcacaatattctgccttcgatgcggcagataccggcg

SEQ ID NO: 20307 - DNA, 2806 bp, Emericella nidulans
cctgatcgctaggataatccccagcttaccaacggtcagacggcagagctatggactcggatagttgttcatgggcggcagaggccggcgttccccatcatgaggaccccttcatccagcgttttatcgctggtcgtcattccttgattcagcgagagaaatcacaacgtcatggtgagaatcgtgtgctatgtgcttggtcttgatatactgttaaccatcgttgttcagatgcaaacctgcataacgcgttgcctcccgtagcgaaaaaagcatgccagatcgtttctcgagtatgcgctcaggaactggccaaactccagcaagatggttaccagtcagacggcatcccgcatccgagccgcatgtccaacagagacagggtgcgggttgaaagctctgacctttggagtattgtacgacgtctgccgaaagggtccctcctgcatggtcatctgccggcgatggtcgatatggactttcttatcgatcaggcgttcgctacgccagggatccacgtatctgcgcctcggccactactaacgcagggcgatttccaagacgcgccgttcgcgttccgatattgttctcgctccgatgggggccatacagataagcgctcactatgggcagatagctatgagccgtcgactatgattgacttgcaaagtgctgcggcttcctttccggacaagaaatcgggctttcgtcaatggctcaagagccggtgtactctggcctctgatcaatcacatcagattccacgtggcagcagggcgatctccgacatcttcgatcgccgtttgcctattatcaactctatcctgcaatatgaacctatcttgcgaaaatgtctacggcacatattctcacaattggccgcagataggataaggtatgttgagttcagagtagccttcaacttcgaatacaccctggaaggtagtgataagaccgaggaggattatactggctggttccagattttccaagaagaggtcgaaaagttcaggggtactgaagaaggaaaagagttctatggcgcgcgagtcatatgggcgaccatgcgcggtctatcaaacaaagacattggtcttagcatggagcagtgccttctcgcaaaaaagatgttccctgaattcatttgcggattcgaccttcttgggccagaggctaacgagaagccgctcaacgatttattaccaatactattttggttccgtgggcgctgcgctgatgagggagtggaaatcccctttatgttccatgctggctacagtcttggtgatggtgatcaaacagacgataacctattcgacgcagttttgctgggcacccgaagaattagccaagctctttcactatataaacatccgctgctcattgatgttctcaagtcaaagaacattttgatagaatgttcaccgagttcagctgcatgtctcgggcttagcaactctttccagtcacaccctcttccagctcttctgtctcgtggagtttccgtcgccctcagtaatgactcgccaggcatatatgggctcggaccaaatggtctgtcatccgagttctaccaggctctacttgcatttcacagcatgggtctctccggcctcacgatgatggtggagaattccatccgttggaactgctacgaagacaaatcagtaaatgattggaacacagatatccaagaagccattcttggtgaaggccttaaagccgcccgtctgcacgaattctacgccgattttgagaagttttgcgattgggtagtcctggctttcgaagagaagtgtaacttcgaataggggcggtctctgatcatagtcagattgtgcgctggctaagccggcacatataaccccatctccctggcatgcatttatcataacccatgccctccgcgtcctaataatcatcgggcaccttcctgcccaaactcacgtgataggtagacgctttctatgcacctggatagattagtcatagtttacatgaaacttcttatgttgacgttcaagagcttatcgctccgctttagataaaataatacatagcatatcgagaccctggctccgatagtgtcctctatataactcgtagaaaactctctggccgaattagtatctgcagggccctatgtacatggtatttccatgcccatcaatgattgcgtgtcagacggatttggctctgttccgcctgatcgctatcagctcactagcgcctgggaccctcaaacgtcattcaaacaggcacttagccttcacaacccgacatctctctagggaccgcagtccgtaccggctctgccacttttccttgctctcttcctatctgtctttctcctattcgtgtttgttctcagttctgttcttttccgatgacttctaatgtcttctaagtgagccccggtcggctccttatcgcccataatgacctactttctaccttcgtttttccagaagcgtttgctcaaatacgctctgtctcgtcttgagttcatcgatactgaagctttagatcctgacagtctcggtattcgctggggtcagcgaagcaccgtcgagctccgtgatatcgggttacgactcgaagtaagtagctgtgatcgatcttccccgcatttgatgctattcaccgccgatatcccatgctaaccggcgatgccttctgatagaaactagccacgcttcttcatcttccggcctcaagcaaactgctcgcagcccgaattcgacttttaagacttaccgttccggccgatatctacagtagcggaataatctgcgaggccagcgga

SEQ ID NO: 20308 - DNA, 2830 bp, Emericella nidulans
  unsure (1)..(2830): unsure at all n locations
tgctgaagcatttcgacgtcactgaacgatctggtttatctagcgcccaggtctctcactcaagacagaaatatggtccaaatggtgagttttttgctctctgcgtaaagtaagaggctcagcttcgaatgctaacctgtcttttccagctcgtagcgctcgcggaagaaccaccaactcctctatgggagcttgtgctcgaacagtttaaggaccagctcgttcttatacttttaggctcagcagctgtttcattcgtactggctcttttcgaagagagtgacgactggactgtcttcgtcgaccctgcggtggtacgtactaggacccgaagagatcatctactccagcatccttctaacatagtttgcgctgttgcagatcttgaccatcctcatcctcaatgcgattgtcggcgtgacccaggaaagcagcgctgagaaggcaattgccgctctgcaggaatactccgcgaacgaggccaaagtggtccgggatggtgtggttcagcgcatcaaggcggaggatctggtacctgnagatatcgttcatgttgcggttggggaccgagtccccgctgattgcagactcctcgccatccacagcaacagctttcgggtagaccaagctatccttacgggcgaaagcgagagtgtagccaaagacactcgtgcggtcagtgataggcaggctgttaagcaggaccaaaccaacatcctcttctcgggtaccaccgttgttaatggaaatgccacagcggtggtggttttgactggttcatcgactgcgattggtgatattcatgaaagcatcacatcccagatttcagagccgacgccgctaaagcagaagttgaacgacttcggtgatatgctggccaaagtcattacggtgatctgcattctggtttgggtcatcaatatcgaacacttcagcgacccttctcatggcggttgggccaaaggcgccatctattacctcaagatcgcagtctcccgtggagtggccgctatcccggaggggttggccgtcgtcatcaccacatgtctcgctctctgggactcgtaaaatggcccagaaaaatgccgtggtccgctcgttgccttctgttgaaactctcggaagctgcagtgtgatttgctctgataagacggggactctcaccaccaatcagatgagtgtcggaaagatcgtctacttgagccagttgggaaccggcgttgaggtcatcgatgttgaaggcacaacttttgcgcctgaaggcagcctttcatacaacggccaggtcgttacgaacctggcggcctcttcttcgaccatacgacagatggctgaggttatggctcgttgcaacgctgctgcgatcgcctatgatgagaagactggtacattctcgtgcattggcgagcccaccgagggagccttacgtgtcctcgtcgagaagattggcactgacgatgctgctatgaatgataagcttctcagcttgcccgcttcgcaaaagcttcacgtttcaagcgcctattatgaatctcgtctgcctctgcaggctacttatgagttttcccgggaccgaaaaagcatgtccgttttggtaggtactggaagtaaccggagacttcttgtcaaaggtgctcctgaatctatcctcgagcgttgcttttacgccctccttggtccgaacggtgcccgcgtgtccctgactaaagcccaccttgatcttttgtcgtctgaggtcgtggaatacgcaagccgtggtcttcgtgtgatcgccctggcaagcgtcgatgacgtcggcgcgaacccccttattcacaaggctagcacgtctgaagagtacgcgcagctagaacagaacatgaccctcattggccttgtcgccatgcttgacccgcctcgcgtggaggttgccgattcaatcaagaaatgtgcagaagccggtatccgtgtgattgtcattactggtgataaccagaacaccgcagagtccatttgtcgtgagattggtgtttttggcaaagacgaagatcttaaaggcaagagttttactgggagggagttcgacagcctctctcataatgaacaactcgaggccgtcaagagcgcatcgcttttttcacgtactgagccctctcacaaatctaagctcgttgatctcttgcaatctcttggccatgtggtcgcgatgactggtgatggcgttaacgatgcccctgctctgaagaagtccgatattgggtcgccatgggactggcactgacgtgcaaagctcgcggctgatatggttcttgtggatgacaactttgcaactatcaccactgccgttgaagagggacgatcgatctacagcaatacccagcaattcattcgataccttatctcgtccaacatcggtgaggttgtgtctatcttcctgactgccgctctcggtatgcctgaagctcttgtccctgtgcagcttctatgggtcaacctggtgaccgatggcttgcctgccactgccctgtcattcaatcccgccgaccatgatgtgatgcgacgacccccgagaaagcgcgatgagccgcttgttggcggctggctgctctttagatatctagtgatcggtacctatgtcggtgcagctacggtatttggctacgtctggtggttcctctacaacccagaaggccctcaaatttctttctggcaattggtaagccctaactacgtttttgtttgcggtcttccgctaactcggtaatagtctcacttccataaatgttccaccgagttcccagagattggctgtgaaatgttctcgaatgatatgtcgcgctctgcatccacg

SEQ ID NO: 20309 - DNA, 2833 bp, Emericella nidulans
cgcaggcccgatcgctgttcgccactatcaaatatcatagaccgccaaatggctccatcaccctcagccccccgtcgttctatatactccgtgttgtggttgaggtcgaagattatacaaatggaggccgtcacgtgcgggcaccgaaccgacattcttccaggttactcgaccctcatcgcgagcatcaccatatgccttatctggcgataatatgtcgctaaatctgcaattgtcccatcagaatacgccatccaggatcgccgatgtcgacatttgatggagtcatccaaggtatttgcctcagagtaccttcattgcagctcgaacattgacagctccaactcgcagagttccctttcattactagtgcgtccgagctattataccagggatggtctcactaagttgactaaattgtgtctctagtcgattacttccgaagaaacccagaacggccaccccctctggcctgcttcctcagccatgctcacagtgaccatctccaaggactcgagtcctttagagcccctttcatatactgctcatcagctaccagagaggtaatggctgcagcaaggtgcctgagtccattgactaatatcttgtagattcttttgcgaatcgagaaatatccccatcgaatgaatttcaatagtggaatcctcgagtctcgaaaactgcactacaagcacttgtcgaagcttttggtaagcatttttataacatacggggtggcacttgctaacctgggggcagaggccgattccactaaacacgccgacggagattgatcttactccgaagctatctatcagagttacccttctggatgcgaaccactgcactggcgctgtgatgttccttattgaaggtgatggaaaggccattctttatacaggagatatacgtggtacgcgctagccatccccacttggtcatttctctgacgggcaacagcggaatcgtggtggatcgatagcctcatccgacacccaattcttatcccatataccttggggatcaagcgattagataaaatatacctagatacaacgttcgtccacacatcgcatattccccatacctttccaacaaaagcggagggcatagctgagctcctacgcaaactggaaccgtaccctgaagacactaacttctactttcgggcatggacattcgggtatgaagaggtctggatggcgctcgccgctgcctttgataccaaggcaagtatatgtacaggcctcttttcgtctagcttacatatgtaggtccacgtggatcgttatcagattggcctgtacagatccgtcacacagagcggtacagttgaagcagcttcgctctgtgggttcagattgggaaatagagttgtctcaggctgtctaagtgaagatgagcggtctcgtatccacagttgtgagccaggcgtccactgctctgccgcatcatcaaaaaacacggtccacataatccccataataagccggacggacaagggcgccgatattcccgaactcggggctggcggtggcctaggtgatctatatcagatccatgaactggaggttccggaccaatactcactagatcaactggaacagctctgcagcgagaagatacctgatcatgaagctctctccaaggcaaaagaagctctctcagcagcattcaggtctaacaccaaagtcctgtctctggacagctacggaatgaaggacgcccacgagatgcctttagaagagcttgtgaatatcctcagccgcggtcctctgagcgaggaacgtatgttgctggaggatttgcctaaatcaatcgataaactagatagatcaggcgaacctcttccaaggactatagtaaatataaactgtcccactcgcatgaattataatcagtctactgacaacatgcacagcgattcccgtattcccgccattcttcctacgccgagctgtgcgagttgataaaagctttcaaacctcgcgatattcacccttgcacagtggatcctctagattgggatgaagacgtctctatggaaagtctctttggccatctctgttccgataacaagttcgtccacgaccagtacatgcgtgagatgaccgcgttggagaacggcgaacgccccagaaagagaagacgacgtaatcctgagtccccatcgcaatcaacccaacagttaaccgtaaccgagaacagcactacttcacaggcctcgcaaatgtcacagatttctatgcggactggccgtgagataaatggtgctgttccaacaatggggggccatagttcttcgctctcattagatccgcctcctataaggccaacaattgcctcatcgtcccctccttctccaccacctgcgactatggcacaaccactagaacatacctaccgcactacaaacaatgcatcagataatggctcgaactcggattccctccccattcccaccttaagcccggagaccgcgaaagcgagacgatatactatccaacaagcatggcattacctcaacgacgcccagaaatctcagagcaataagtttcaacttgtctcccttccatcttcatggtccacaaacggggagatttctgggcctcgcctatctatttctgaagaacacgatgtaagagagcttgtcggggggttttcgtcttcccagccaacggcgatttacgagccaatagccagtactgtacgacaagggaagccacctttgccgacttcaaccggtgttgggatcaatgtcgatgaagctattgacaatacagaaccggatttgtatcacaatatcatccttgaaaccgacaacgacaacggc

SEQ ID NO: 20310 - DNA, 2838 bp, Emericella nidulans
ccccacccgtggaccaaacaccctagaccttgtcttctctaacctaccactaagggccctagtagaagaccatctaaagactccaagtgaccatgcaacaattggaataatactggaacaagaagagcccccgcctatatacaagcttggatccaccaactgggagaaagccagagccctggcaagcccgcctgacccaaccctaccaattgacctactagccaaacaactggtccagacatcccagcttgcaatacaaggcgtatcaagatacaatactcgcagactccccaggaccctatggtggactccagaactaacagacatactacaccaaacaagacagcaacaaaaccccgactataaacagctccggaaggccattgtacgggcaaaggctgaatactggaagcagcgaattgaacaagccacagcacctatagatgtattcaaacttgctaaatggatacaacatccagaccagctcgctgctcctcccctgaatatacaaggggcacaggttactaccccacagggcaaggcagacgccttccttaatcacctcttagagaagggggccctgcttccaaatcagacagaagagggacccccaaacaagcccctcggctcactacacctgccaacaaaagagcactgctgggctgctctctgtgccccacccccgtcggcccccggggaggacggacttgccaccactgcttggagggagctctggcccgtactaggggatacaatcacacaactgtactacaggtgtatggaggaaggctgctttccactgagcctgaagtcagcaaaggtaataatgttaccgaaaccaggaaagagggactatacccaactcaatgcctggcggccaattagcctcctctctaccctaggtaaaggcctagagcgcctcctagcacagcagatagctgtaagagcaattcaggcagatgtgctagccccctgccacttcggggccctgccaggacgctctgccattgacctggtccaggttcttgttcacagggtagaggaggcctttcaacagggaaaagatgcttcactactcctactagatgtgaaaggggcatttgacgctgtaatacaccaacggctcctttctcacttacgcctgcaaggatggcataaaggcttactccagctacttaaggactggcttactggccgctctgtatctgttcatatcaaagaaggcactgccacagcaccaattaaaggcggactcccccagggatcccccctatccccaatactcttcctgctatatgcggcaagaatagtctctaccttagagggctccttctgctatgcagatgatatgggcatattattaactgggaataccctggaagagagctcacaacaactggtagaggcctacaagcaaattactgctctagggacagagacaggcctccctttctcaatagagaaaacagagatacaacacttctctagaaagcagcagcagcatctccccacagttactctacctggtataggggagattacaccatccctatatacacggtggttaggagttcttctggatacaaagcttacttttaaagcccacattaatttggtctttagccgcgggaaacgactcgcccagcacctaaagagacttagcaatacccagcgcggctgcccagtggcctccatgcgggcagcagttatacagtgtgttcttccaacagctctgtacagggcagaagtcttctatacaggcaaacgacaaaaaggggtagttaactccctgctttctctcttccacacagcagccctggctattatcccagcctacaagaccacccctactgcagcactcttccgcgaagcagacctaccagacccagaagctctactcaacagcatcctccggagggcagcagtgagatacatgagccttgatactaaacacccaattgcccaaatagccgcagagactaccgcgggcaggcccaaaaccaggcttaaaaggatcctacagctcctcctcagccccctgccagagcgcgctataatagagctgcctctccctccattatgcatgctcccaacagacaacaaaggctacagccctgcccctttacagatttcagtgtactcagatggctcacggaccagccagggggcagggtatggctatgcaatctactttggccctatcctcgtgtccaagggacatggtcccgcgggccccaggacagaagtctatgatgcagaaatcatgggtgctgtggaaggcctacgcgcagccctgggacaaccatgcgttggctactccacccagctagttatcctcctagataacctagctgcagcctccctgctagcaagctataggccaacccctcacagacatggtctgtcagagacctttagccaactagccgcccagtggatggaaagcccttcaatcctaaccatgcaacggaagccccttcaggtccgctggattccaggccactctggaattgctgggaatgagctggcagacaagctcgctaagctagggtcttctatatacagccccgacatccccccctccccagcatacctacgacgggaggcaaaacagtggctccgtacagagacatatacagcatatgctaataaggcgcctgaaacctacaaagccctgaatatcagaccccatacaaaagaaagccgctcccgcgagcacaagctgccccggtgggtacttggccgactcgtcgccgctcgtacaggccacggagactttacggcataccaccagcgttttgaccacacagactacctggagagctgcacctgcggcaa

SEQ ID NO: 20311 - DNA, 2852 bp, Emericella nidulans
tgccaccccagcctttctccgcccggccacgttccctgtactatatctggtctgagctgatgctcttcctcctgccagtctttcgcttgctgctcgctctaattgtattattccgtcttttcctcgcttgtatctcgttattagagtcagctgtggccttgcccggaggcccgccacagtcatgtttcaggtacagttcgccagcctagccggttatttacctttttaattgcctactgcttctccgcatcgaagacgctttacgggcgctgaggctgacacgtgtgtgattgaacagcgtctacgtgaggctatagattcgcgcatcgccgaggagcaggctagacaacgttcatctcaggagtcgctagcccgctccaactccgctcgtcgcccgccgggtcgcaacctctctccgagtagacggccctcacgcccccggcgaaataccggaacccctgtacgcggaccagatcccaccgagtttgagcaggaattcgctatcggtgacgatgatacgtcaagcaggtcagccactccccggccggagtcgacaggcatacctgagaatacaccgggagagggtgccggacaggcggagggcacagcaagcgcagcacccgagaaggatagcatgccgggaacggaaacaaatcagcctccggagctaccgtctgaggtgaaagcgaaactgcgacggctgaacaagatggaatcgcgttaccagggtatgttttgtatcggctatatacgcctacgacattgctaacatttgcgtcgcatagagctgttgaaagcatatcgagcggcccattctcgcgttttatcgattgaaccttttgaagccgccttgcgggagaacacgccattgacctcaattgcggatcccaaggcgctgaccgaatacttcaaccagatttctctcaaaggagacctagtagcggaggagctcaagcgggtcacaactgaaagggacgagttcaagaacaaattggaaacagctgtgaaatccgagaaggccgcgcgggaagagctggatcgtctcaaacaaaccgctagtggcgaagagcaatcaaatgatagcaaagatgccacttcaaaaccagagcagtctcacaaggaaatcaaacaggaggccgaggagttcttttcctttgacaacgagattcctcggctggagtccgagttgaaggagaagcaggaagaagttgagagtctcaaagcccagaccgaaaccttgaagcgggatttatcagttgcacgtgagtcgactgagggtatggttcataacctcgaatctgccacccgagagcttgcagagttgcgtgacttcaaggataaacaagaagcggagatgaaaaatctcaagatctcaaagcaaagtgagattgacgaaatcaaatccaagcttgaagcgtcagaaaccgccgtggccgagaccaatgcagaagtagagaagcttagcgcggagctgaagcagaaggcagctgaaattgaacagctacaggcacaagccagtaaaccggaagatgctgaccagcaggcagagttggcgataaaattagagcaagttaagcaggaaaaggaggccaatgagaagcggcttggggtactacaaggtctagtggatactcttcgaacccagctcaaagaaactcaggatacgatgtcgggtcttaaggcaaatatggaccagaaaactgaagattttgagaagctgaagaaggtcattgacttccttgacgggaacttggaggataatgtgaaatggcaggaatccaaggaaaaggtcgctaacggtcaggaagttaatttcgaagaactacaacagacactggccccagcatatggctcagaggcagcaaacgagaagcttgaaaccacaccgcagcctgccaacgccactgctgccacgggagctggaaaaaagaagagcaagaagaagaagaagggcggcaaagctggggaggacaacagtaagctcacagaaactgctactccggaaaccgctccggcagtgtctcagccagccgagtcgagttcagccctagctgagcttgagaagaaaattgcggaccttgagcaacaactcagggagaaggaacaagccatcgaacgacttgattccaggctgaagggcgaagaagatttgaaggaggaaatagagtctttgcgtgatgacctccttaatatcggccaggaacatgtcgaagccaaagacaaaatcaaggagcttgtggcggaaaaggcagctttagaagggaccatttccaaactggaggcagagattacggatcttcgctcgaataacgccgcaaagtcggcggattctgagaaagctcataatgatttgaaggatgaatacgagagtctcaaagtaaaattcacgacaatcgaaacagaactctctgctgcacagcaactggctactacaaggttcaaagatataacagatttgcgcgagtccatccaaaagatccaaccggaactcaagaagttgaggggcgaaagcgcggaactcaggtcaactaaagatgagctgaagagcaagactgctgagctgagaactttggaaagcaagcatgacgatttgcaagcggaagtcaaggcactgaagacttcgatctccgatcgcgaaacggaagtgaagactctcaatcaaaagatcaagcaagagctggatagccgattgaaagcggaagaaagcctgacggttgctcagtccgatctccgctatattgagagcaggaagcaagaagccatcgagggtaaacagaaggtcttgtcggaactctcaaacgttcaagacgagctgaaaacagcgcgggcacgactacgagaatacgagcagc

SEQ ID NO: 20312 - DNA, 2863 bp, Emericella nidulans
ctatatccgatctctcctcccagttcttccttcaaccacaagacgttgcaagccacgtgccgaagttaccgccccgagagtcgctgagttgaactcttatgtcccggtcacaatccacgaaggcagcagtctggtagagaacttggagcagctgaagcgctaccaggcgattgtccttaccctcaccccgctgaaggagcaactggtgattgcggacttctgccacaagaatggcatctacctcacaatagcagatacttcggtcttttcggatatcttttcaacgattttgggaagaacttcactgttggcgactctacgggagaagatcctgtaggtggaattgtggctgacatctctgaagatggcctcgtttcagcgctcgacgagactcgccacggtttggaagacggcgatttcgtcacgttcaccgaagtcaagggcatggagggattaaacaacagcgcgccaagaaaagtcaccgttaagggtccctactcgtttactattggagacgtatccggcctcggtacgtatcagggtggcggtttgttcacacaggtcaagatgcccaagtttatcgacttcgaaccactttccgagcagatcaagaagccggaattcctgatttccgattttgccaaatttgatcgtcctcagcagcttcatatcggggttcaagccctccacaagtttgcagaaaccaagggacacttcccgcgtccccaccatgagagcgatgcccaagaattactacaaattgcaaatggcctagcatccagtcaagaagaaaaggtcgaactagacgagaagcttctcaaggagctgagttaccaggccctaggtgacctcaaccctttggctgctttcttcggaggcattgtggcgcaggaggttctcaaggcagtatcaggaaaattcggaccagtgcatcaatggctttatttcgactccttagagtcgctgcctacttcggtcactcgttccgaggagacctgtaagcctcttgggacgcgttatgatggccagatcgccgtttttggtaaagagttccaggataagattgccaacctgacccagttccttgttggtgcaggcgctattgggtgcgagactctgaagaactgggccatgatgggtcttggaactggccccaagggtaaaatctatgtcacagatatggaccagatcgaaaagagcaatttgaaccggcagttcctcttccgcagcaaggatgtcggcaagctcaagagtgaatgtgcctctgctgcagctgtggcaatgaaccctgagctggaaggtaaaattgttacactcaaggaccgcgtgggaccggacaccgagcacatcttcaacgaggaattctgggagggtcttgatggagtcacaaatgctctggataatgttgaggcccgaacctacgttgaccgtcgttgcgtcttcttcagaaagccactgcttgagagtggcaccctgggaaccaaaggcaatactcaggtcgtccttcctcgcatcaccgaatcttattctagctctcaggatcctcctgagaagtcgtttcccatgtgtaccctcaagagtttccccaaccggattgagcatactatcgcttgggctagggacctcttccaaacatatttcgttggacctccagaggccgtcaacatgtatctgtcccagccgaactatatcgagcaaacgctcaagcaggctgggaatgagaagcagactttggagcacctgcgcgactttttagtgaccgagaaacctgcaaacttcgacgattgtatcgtctgggcgcgtaaccagtttgaagcccagtacaacaacgccatccaacagctgctctataacttcccccgagactcaactacctcaacaggccaaccgttctggtccgggcccaagcgcgctcccacgccactcaagtttgatagcaccaaccctacgcatctcggtttcatcattgcaggcgcgaatctccatgcttacaactacggaatcaagaaccctggcgttgataaaggatactacagaaagattgtggataacatgatcatccccgaatttacgcccaaatctggtgttaagatccaggccagtgacaatgacccggatccaaatgccgaggcttccgggtcttcattcgatgacaatgacgagatcaagcgtcttgttgagatcctgccttctcccaagtcgcttgagggcttccgtctgaaccccgttgagttcgagaaagatgacgacacaaaccaccacatcgatttcatcactgccgctagtaatctacgcgctgagaactacgagattactcctgctgatcgccataagactaaattcattgctggaaagattattcctgccattgccacaaccaccgccctagttacaggtttagttgctctggagctgctaaagatcattgacggcaaggatgacattgagcaatacaagaacggattcgtcaaccttgcgctgccattcttcggtttcagcgagcctattgcaagcccaaaaacaaagtaccaaggcaagcagggtgaagtgactattgaccagatctgggaccgctttgaagtggacgatattcccttgcaggacttcctcaagcacttttcagacttaggcttagagatcagcatggtaagctctggtgtgagcctactatatgccagcttctacggcccctcgaaggtgaaggaccgccttcctatgaagtaagtgccatcttgtaagaatcaaaacacctcgttactaatgttcatttgcaccaggatgagcgagttggtggaacatatcagcaaaaagccaatccccgatcatcaaaagaatgttatcttcgaggtgaccgctgaggacc

SEQ ID NO: 20313 - DNA, 2883 bp, Emericella nidulans
atgatatataaagtcctgcctcgtgctcaacgtcctggtcctcctcacattcccaacggaaaaccatggcggaagtagcaaggccgagccctctggggacaagttccagccaggacacctcagataaacaggtgcacccaaccctacaagaaaccgatcatggagcggaaacagacctccgccgcaccctgtccacccggcatctgaccatgatcgcccttggctcgtccattggcatgggcctgtggcttggaagcggtacttccttgcgcaatggcggccctgccgccctcttcatcgggtacatcctcgcggggacgatgatctggtctgtggctcatgctattggcgagatggccgttctgtatccgctgccgtctgccttcgtgcaatggagcagtatatttatcagcaaagagcttggcttcgccgtcggctgggcttactggttcagcgcgttcatcacgattgccaacgagctacaggtacggtcgcgtgtactttaatcagatgagaaactgacggcaaagggctgtgttacggtggtgagtttctggacggacgcagtcccaaccgctgcgtggatcagcatcttctggttggttatcatcttcatcaatgcgtgggccgtcaggttctttggcgaggtagaagtcgtctcctcgaccattaaattctcgtggatctttgtcgttatcatctcactcataggttggcaaccctccatacctgacgttctttgcacattgccaactcaatccaacgccagttgtctctgccggaggggcaccaaaccatgaagcagtcggctttcgctattggaatgcagagccattcaccaacggcttcaagggctttctgagcgtgatgccaacctgcatctttgcgatgtccggctccgagaatagtgcattggtcgcagccgaaacgcagaatcctcgtcggtctgttccccgggccgttggcacaatctggttgcgtctttctttgttctaccttcttggagcggtcgtcgtgaccatcaccgtttccccagaggaccctaacctgttcggcgcctcgggagctaatgcatcgccctttgtcattgcatacacgaatgccggtataccggtcttagcccatatgatgaacgccgtcatcttcatctccgtcgtctccacaggctccatctctgggtttggaggctcgcgtctgttgatggggttatcccatctcggccttgcaccgaaggtaagcagcacttccatcgcaaggatcagccaaatactgaggagcagatctttggccgcgccgacaggaaaggccgtccggttgcaggactggtagtcacgctcctcctcggtggtggattttcctatcttaatgtcagccaaagcggcgcagacgtcttttcatggttgtcgaacctcacctccctcttcaccctgttcggctggggctccatctgcgcatcccatctgcgcatgcggtacgcgtggaaaaaccagggccgatctgaagctgatctgccctggaagacgtggacttatccctatgcctcatggtggggactctcctggtgtatcctgctcatcatcgccgagttttacttgagtgtctggccgcttcatacgaaccccaacgtaacagacttttttgccaactatgtgagcatcattgttgttcttgttgtgtatctcggtgcgaggctctggtaccaaggtccgtggtgggtggatgccgcgagcattgatctggatgcgccgaggaggttttacgccccagacgatgcagagggaaagaaagtgaatgtcttggagaagtcggtggggtggatttttaaataagagcctttctctctctgtctttctattaccaactcgtttaacaggactttttgtccaatggtgtactgtgaggtccaaatgtatattgtgccttaatgtgccagttacaaggacctagccagtacgcaataactttgaccagatgaaaatagaattattaatacaaagtctcagaggacatttcccatcagtagcattccgcctactgactgtagcatcttggaaacaagggcggaagcaattttccacttatcagcacaaactctctgacacgactcctagatagcagcatgcccatgagtctcaaacggcaatccaaagcatagaaccccgacgccgacccaaagcgccgcactagcatagataggtgctgtcgtgaaccccgtctccgacgcaatcaagctcgcgaccagcccgccgaatcgaagtagcgatgccgctgtccctgatgctgtgccgcgatgaggagcaggaaaggactccggcgtgaaggcatacattatggcgtactctgacaactgattagctgaaggaaaggaggccagtggtgtgaggagtggcggctggcgtaccaaaattcgctaacaaccctgtgacacacgaaaacgcgagactcgacattggagtcttgacgccgacgtacgcgaagagaaagacaccagttacgatcgaggaaatgcccatcatccagcgccggccgaggaaggtattcacgaggaccgctgcagataacggaccaacgaccccgacggctgactggatgcagtagttgcggtaggtcaggtcgagcgaggaatcttgcgtgaatctggtggcaagataagaagggagaaagttgaaatacagcgggtatgcgatgcctaacatattgttagtctacgggtgttgttcgaagatattgtgctcggtctggagggaacagttagggggataccaatgatcaaccagacagcccagatcaatgccgtatgctgggaaagctttcgtgtcgcgaagagagcttggtaatgttctcctcgaaactcctgcatgttctctttgaggatatccttcg

SEQ ID NO: 20314 - DNA, 2932 bp, Emericella nidulans
agcctttctttccacccgtccttctctctatctttacgagttctggtcgcatcgcctcgtaccaccatgggcttttttggcaaggagcatgcgcatggcagcaatataactggacatggaaatgacgcgcaaaatcatgctgcaaaaaatgacgccattccagacatggatctcttagatcccgaaaagcaaccagctgataatacgaataacgattcacatactgcgctgccccaggtgcattccccacgtataagtattgaccctgtgcttgaggctcgtgtggtacgcaaactggatttgcgggtaccgactcttcttggctttttgtgtaagcctccattctagtgggagtatatttctcaatgtggggttgtctgactcggacctctatagacctgctcgcgctcctggacaggagcaacatcgggttagtcttcctggcactccccatactaaagtagacgctgactcctcatagaaatgcgcgaatcgcagggatggaagaggacatgtcccttcatgggaacaaatatccatggcttctgacgatattctacatatcgtacaccctgtttgagcctcttgcattaatgtggaaaatcatgcctccgcatagatgggcagccattactgccatgacttggtgagcttgcagactaagagtgcgccctctcaattatcttgacctaactggtatttaggggtattgcggcaacatgccaggccgctgctcagaactggtctgggttgatggctttgcgctttatcctaggcgcacgagaggcaggttttggtccgggttctccctacctgctgtctttcttctacggccggcgagacttggcttgcgctgcggattgttcgtctccgctgcgcctttggccaatacgtttgccggtgcgcttgcatacggtatcacgtcaggacatgccctactagcaaactggaggctattattcctagttgagggagctccatcactggcggcggcatttcttgcctggtactttttgccggaccatccctcttcagcctggtttctgacagaggaggagaaagacgttgcgcgacgccggtcgcttcgacgtagcggtgaaggtgagcgtgttggaggcgtggatctgaaagagatttttcagactttattcgatgtgaaaccgtggattacggcggtacgtacagttgatttgtttctgttcgatactggcctaactaacggcctggcctccgcagttgatgtacttcagttgcaacgtgagcttttcctcgctgccggtattcctcccgacaattctagaagacatgggttttgagtcgatcaatgcccaaggcttgactgcgccgccattcttcgtctcgtttatcttcagtatcttgactacttggcttgctgatcgatttcaacaacgcggcctgacgattgtcttcttttcattggtgggagcagtgggctacgttcttcttgcagcttgcacatccgtcgcagtgcgctatttcggcgtattcctggcagctgctggggtattcccatgcattgcaaacattcttccatgggttctgagtatgctccctttctggagttgaggttcctaacttgctaacgtgcgagctacagataaccaaggttctgatagccgtcgcgggatgggtatcgtcattctcaatataatcggacaatgcggccctttcctaggaacaaatgtctttcccagcagtgatggccctcgctatattcgtgggcagtccatttgcgcggcatttatgttcttcaacgccattcttgctctcagtctgcgattcctcctcgcgtgggagaacaaacgcttagaaaagaaatacggacctcaaagccaggctacgaatgcgcagaaaggacaggttattggggaggaaaattacggttctagtttcagatatgtgctgtagctgttagagcattcaaatgcacaaattacgtatagcttatacatctccggagttcatgactaatgccttcagactaactaactagcggacacaacaattacgtacaaggcttatcctgctgcctctcgacaggctgcccaactaagacgccgtgacatatactcatctcgtagctcgttaatcgctttacctgggcagtatcagctgcaaagactaccccacctttagccttccaccttccttctgtcttggagcttatcggtaatccaaaatctactgccccaaacataaccgcctctaatcccagtctactatacctaaaaccgccatcctacaaatcaagagtacaaagtataatagatcatgatacaagccggggaaaatagctacctctacggggttgttgatattggaaggtatgctgattgtatctatcgttcagcaattctagattcgtttttatgaaagagctgtatattaatgatcttctagcaatggaattcgcttctctattaccgacacatcgcctccaacagctcgaaccatgcctacactgtaccaggaccgggctggaatatcgctatacgacgcccaattctcgaagcccaaaaccaagagcaacaacagtgtcagtagggaacggcgcccgattccaccggaggttgtcgaacaagtcgtggacagactagttcggttccaaggcgtgtgcgaagatttccaagtaccgtctgagaacatccacgttctcgcgacagaggcaacccgtacagcaccaaactccaaggcattcatatcacggattaaagagcgcactgggtgggaagtgcggcttttgtctaaagaagatgagggccggattggggcgttagggatcgcgagcagttcacgcgctgttgcgggactggcgatggatctggggggtgggagtacacagattacctgggtagttgctagggatgggatcgtgcacacttgtcccaagggttcatttagttttccgtac

SEQ ID NO: 20315 - DNA, 2936 bp, Emericella nidulans
cgacgcctgtgctcgagaatgtacgacgttgacacggtaaagcgggaaagtttctgaggctctccggggaacgtcggggaactcttcggcaagactcaataaggaacccgcgtcgaacagaggacagtcgagtgtataaagagggacaggaagatttgcaggagaaaaattggcgtgaaggaggctgacgcagagccgacggttgtaaacctaggctgtttgctggagcagcacagcggggtactgttgccaaataggcgggggagtatggcatcaattactcctttcgggttcctcgcgccggataactggaaggcagatagggaaaccagtcgatcaggcggagtcaatttgagatgccaatgagcaaatccagaatggtactgttaagtagaagagaaaagcagaaggaaccacaaacactacaacgttgtcttaatctcaattgaacagcctttccgagtgtatacagacattctcagcagttcaattgcttttcaagcctgcgacctcgggcgatgggcttgacttttattggtacaggtcaaagagagagctcatgtcagcaagccgcggctggcgtgtcgatcacgctagtcctttttagatcctgcccgagggctgctgctgtcacatgattttatattacagtaccgggaaatcttgccctccgatacactcaggagctaagtcggctaaacgcccgccaacggccccagtcgtccgtactgcggacgactgcatccggccgcaccacagggttcgggaatactccggaaacctgtcaggcaatggcagttgtgcattccccatggggagaaagcgttagtcgattcactgctccatacgagggagcgtggtgggctccacttatcgaggtcgagtcaggccaggccgcctcccctgggcgtcctggtttcttggttgagcgagtgtctgctgattatgctgtcatttgagttgaggagggatttctgatactaaactacctaacctacctgattgatgactggtcgtcactttgatcttcaccttttttatgcttttttaaccggaggctagagtttgttcccatgcatgtatataaacgcgagtcctccgcgcgtgccataccatattgccccgactaccggcgctttttatctcgctacagaagccttaaacagcagtcttgattctggtcctgttattcggcatgaaagaccaagatattgtcggcaaggcgcttgcctccgtcctgcctcagcatgatagaacctggctgcgaatcccccatctgctgaaactgaatctcatccttctgatcccgctgctctcgtctgcagtagcaggttatgatggtagcctaccttatctacctctataccgccatcaatattaaatagctaatactgagactaggctccctgatgaacggtcttcaatccatttcttcatggaaaacctatttcgataaccccacgggctcgatcctcggcgttgtcaacgcagcccagtcgattgggagcgtgatttcactccccgtggtcggaatactctctgacagaatcggccgccggtggacactcctatccggggcaatcgtcatcatcatagcgtccattatccaggcggcaagtgtccagtacggcatgttcgtcttcagccgtgttctcgtcgggatagggagtatgctcgtcgtgcaaccgagcccgatgctgatcacagaattggcgtacccgacacaccgtggcaagtatacctgtgctttctggacgatgtactatctgggggcgatcttggcaagttggacctgctacggaacacagaaacatctctcaaatgactggacgtggcgcgtgcccagcatcatacaggccgggtttcccctcgtgcaggttgggttgtggtgggttgtgcctgagtcaccgaggtaaaccactgagcaattttccctcttttcttttattttgtcctgatctgtttctaatcttttattccttactgttttcttttcccttaccttttttcgtttttatttgtggaggaaaaatagcagaaattctaacgtttctagatggcttgttgccaaaggccgtactgaagaagcaaaaggattgctcgccaaataccacacagctggagacgctttccacccgctaattgagttcgaaatggctgagatcgtgcgcactatagagctggataatcaagctgctgagatgggctggtctgcacttgtgcagacgccgggaaaccggaaacggacctttattgcagtatgcattggtgcctttgcgcagtggaatgtacgttttgccgtcgagtacacccgagacttcctactactctttactgtgtttattgaccagtgcagggagtggccgtggtctcatactatctgaccctcgtcctcgacaccgtcggcgtcaccgacacagacacgcagacgctcatcaatggcctgctgcaaatcttcaattttatcgcggccctgagcgcggccttattcgtcgatcgactcggtcgacgaaccctcttcctctggtcggcagtgggcatgctcgtctccttcataatctggactgcatgctccgccgtctttgacagcagccaggcctctgccctcggccggactgtcatcgcattcgtcttcatcttctacttccactacgacatcgcctatacccccttgctactcgggtatccgaccgagatattcacatactcgacaaggtccaagggactcacggcggagctgttgtctgtctacgggagtctgatcatcctagcctttgtgaatccggtagcactggacaatatcggctggcggtattacatcttcttctgctgcttcgatgtcctcgttcttgcggtaacatattttgtctttcccgaaaccaaggggtattccctcgaagagatcgcaaaggtctttgacgggccggctgctgtat

SEQ ID NO: 20316 - DNA, 2939 bp, Emericella nidulans
gacacgctcggcgacctcctgcacacgaaagaagcactcaagaagcaagacgagatcttgtcggtgctgaaatccgaaaaggtcttcgacaagtcgcgcaaccatgtccttggacgtactgagaagatccagcttgcgttggcgcggggaaagagactgcagcagttgaagaaagcacacaattggtcagacgaggatgtgcatgttgcgaatgatttggtgtctgaaccaacgccttacggtttgcatgcgtcgatgttcttggtatgttacccttggtaaccgcagttgggcggtgggagaatcccagttggctaatagttggctcgctggttaggtgacacttcgcgaacaaggaacaccggaacaacataagctgttttacgagagggcgagaaactacgagattattggatgctatgcacagacggaactgggacacggatcgaacgtgcgtgggctggagacaacggctacctgggatccttcggatcagacattcatcatccattcgccgaccctgacggcgtccaagtggtggatcgggtcgctgggacggacggcgaaccatgcggtggtgatggcgcagctgtacattgggggcaagaactacgggccacacccgtttgttgttcagatccgggatatggagacgcatcagccgctggagaatgtctatgtcggtgatattgggccaaagtttggttataagtgagtgttctgggttctctggtgggatgttgctgactggtgccagtaccatggacaacgggttccttcttttcaacaagttgaagatcccccatgtcaacatgttagcgcggtttgcgcaggttgacaaagccacgaacaagtacatccgccccgcctcgccatcacttatgtacggaaccatgacctgggtgcgctcgaatattgtcctgcaagctggcggtgtcctcgctcgcggcgtgaccattgctgtccgctactgcgctgttcggagacagttccaagaccgtgacgccaaggccaatgccgaagagaaccaagtcctgaattacaagatggtccagatccgacttcttccgttgctcgccgctatgtatgctctgcacttcactggccgcggcatgatgcgcttgtacgaggagaaccaggaacgaatgacaggtgccgctcaggcagaccaagagaagcggggtgcgggcccagagcagctccgcgcgggctctgatctccttgccgacttgcacgccacatcgtgtggtctcaaggccctggctagtacaaccgccggtgaaggtctcgaagtctgccgtcgtgcctgcggtggccacggctacagcaactacagcggtattggcccgtggtacgcagattacctgccgaccctgacttgggagggcgacaactacatgctcactcagcaggttgcgcgatatgtacgtcccccttccaccaccacttatctcattactaatatttcgtagctcctcaaatccgctcgcgccgtcctcgctggcaaaggcaccgccaacgacacctcgcgcattctgcaagcgtaccttgcccgccgcgacaagggcgcctcgttcgacattcttggcaacgacgccgacattgtcgcggccttcgcttggcggacggcccacctcacattcgagactctcaagtaccgagacgttgagaagcgctcgtggaacagtctgcttatcaacttctggcgtctttccaccgctctatcacagtacctcgtcgtgaagaacttttacgaagccgtcaactcgcccgaaatcagatcctcccttgacaaggacacagcatctaccctccgatctctcttccgcctccacgccctgcacactctcgaccgcgaagcctccgagttcttctcctccgctgccgtgacggtacggcagatcggcctcactcagacaagtgaggttccgaagctccttgatgagattcggccgcatgcggtgagactcgttgattcttggaagattcccgattggcagctcgacagcgcgctcggacgcagcgacggcgacgtctatcccgatctgttcaagagggcgagcatgcagaacccggttaacgatctggtgtttgatccatatccatggaatgagaatgtgctgaagaacgcgggggagattaagagcaagctgtgaggtactatattctttctttttgaactattgcatagagatttttagttagagtactagactgtcctgatacaggtggaatatagaatagaacgatgattactcttctgccaaccttatttgctcaagggccctggttgctcgaatagaagattgacacttgctctaactagctattcccttactaacctccccgagccaaaaacaatgagtaagcatgagaccaagcatccaaaacttggcacggccgagacatggccgagcgagtagcatggctgcgctggtggcgatcgctccggcgccgttgcggcagaggacgatcttattcgctgcctcacagacaaggcgacaagacttcccaaacgagctagacccggagacattcttcggggattgtgccgacagtcagatctttaatccttcaggatcggtgtttgttcctggcttacggcaaatgctagcatgctttgaatagtgcaatatggcgtgaaaaacatcctttccttctcagattcgggatcctgaataactctctctgtcgtcttgacggtgcgtgtacctgaatgttgacaatggcgtacgtatgtggcgatgactaatgtatacaagacaggcgctaaaaaaacatccccaccacgatttcaaagcaagtggacctcaactgtccttccactcgattctgtagaccatatctgctatataaggagcgtactgtccctgccgaagatgtcgtccatcactctctatacccctgcagtcctccacaatggctctccctgacgtcga

SEQ ID NO: 20317 - DNA, 2940 bp, Emericella nidulans
tgcctggttatcgcccacgtttacagtcgctatgggtgaaatagtgcaggagcatacatttcacctgcggttatggcaagagtcgagaggcacgcaatgtaataaaggaaatcaagctgctgctattaagttcagagattctcgattgtgagtcgcggtgcaaatacagtcataaacaagagatattagggctagggatgttgagattccaaacaaggaaagaccgtatcgtgtagtctaactcgtataatacgatgccccggttgatcatgtgctaaattagtaagtctgaggtcggcatcccagttcgatactaggcagggtgcctacatatggtaccgattaccgagtacctgaaaatgcttcgtcgtacggggtacttggcttaaagaggttagccaactgtcatgcggagaccccgacaccccgccgaaggaacacccttgcttttccctgattccttccagacttttccatccaactcagcctgttcttatacgcttcacgtcgaaaatctcgtccgtttacttgccaatgccgtcctgaaatggcatcctcccaccaggggaacgggacagtccccaactctcagaccgacgcacccccggattcctccacaaagcgccgatggaggcgcaaccgtatagcttgtgactcttgtcatgctcgccgcgttcgatgcgaccgccagtttccgtgctcgcgctgcctccgtagcgagatcacctgcgaattcacgcgcgagcgtcgtaagcgaggccgtatcgcacgatccaagctggccgaaatggcaaagaacaaaatggagaccagtgagacgccggctccgctaagaccatgaatggtataccggcgcccgctggtacagagatcccagggcatgtctcccccgcatcgactttccaccatcgatcgccgccggcaaatgctcctactgtttctgctccaagtgttgatggccgacggtctcagactgacccacaacttcccgtccggagaccagaaatcggcgggaatgttactgaggaatggctcgccgggacgcatgtatcaccaggatcatacgagttcttgaatggaccagcttttggagaaggactaggaccgtttcctcacatgttcgatgtatggaacggtgtcgacctggccgcctacagcgctgggacttcgcaagggtcgaaagcgaccaacgcgccgtcaacctctacagcaccgttgaagtacccggttctacagcccttgatgccgttcgtggaggcgactctgcctcgaaaactggtctttgacctgcttgatctatatttcaccagcgcgttttcaactcacatgcaccccgtatgccatcatattcattgctatgtgctgcggaaggtttccttcctcagcaaagatgcgccacgacccagcagtccggcactgctttcgagtatgctctgggtagctgctctggatgatagggcgttttcgttgccgatttcgcctccgcagcggaaaaggatctgccaatttctctgcgctctcactatccgcttgttgcgaccgttgattcatgtttccttcaaagatcagggcggcgcgcagcagcggttgcagcagcggccgcggcggccaccgaataacccagcgttcgccggcgtcggccaggatctaccgcccactactgtgcaccatccgtttgaaggaggaggagacgatagaggcctggtagggcggcagcgtcgcttgacgatgtgattacctacatccatgtagcttctatcatctcgtccagtgagcagaaggcagccagtatgcgatggtggcatgcggccttcaccctagcgcgagagctcaagctaaatcaagagatcgaggtgatgccgaatgcgactcccaagtggaagggtcaagtccgccgttcggatactctctacccggctgggatggggctgacccgggccccgtctttaattactcaaacccaactcggtccagtctcaattgcgtctgtgatcgccaggaccagaacaccatcaccgaagagcaccgcgaagaacggcggcggacatggtggcttctgtacatcatggaccgccatctcgcactgtgctacaaccggccgttggcttgctggatgccgaaagcgaagacttactactaccgctggacgaggcatcctggcagtcagggatcatacacagtaacagcccgaagtcggatgggccgcaatgcctactctctgccgacaagaacaagcgtcgcctgtttccgaacttcatctgccatgatcattctgtgtttggctttttccttcccctcatgacgatcaccggcgaactcattgacctgaaccaagcgaggaaccatccgatgcttggcatgcgactaaacggcaaggacgcgtggaatgtccatgtaagcgaagttctacgccagctcgagatctacaaggctagcttaaccacgttcgccgctactacatccgatccggaagcgccgctgtccgcttatgcgcacgcccaatccgaacatctaccagccgagccatccctctcgcaagcatacgcatggcacacgcaaactgtcatatcgtatgcatcatacctggtccacgtgctccacatcctgttggtgggcaaatgggatcccgtatccctgatcgaggacaaagatttctggacctcctcccccgcattcgcatcgaccatctcgcatgcgctggacgcagccgactcggtcgatcagattctccgatacgacccagacattagtttcatgccctatttctttggcattcagttgctgcaaggcagttttcttctcctgctgatcgttgagaggctgcagaaggaagcgggcgaaggaatccttaatgcatgcgaggtgatgatccgagctacggaatcttgtgtggtgactctgaacaccgaataccagcgaaatttccggcaggtcatgcgc

SEQ ID NO: 20318 - DNA, 2970 bp, Emericella nidulans
gcggtctgaacggcgctctctacttcacctcgatggacgcagatggcggcttgagcaagtacgatagcaacaccgccggcgccaagtatggaactggctactgcgactctcaatgccctcgtgatatcaagttcatcaacggattggtgagttttctagattccatgacatttgaggaatagattagctaacgcttgctcagggcaacgttgagggatgggaaccctccgacagcgacgccaacgcgggcgttggtggaatgggtacttgctgccctgagatggatatctgggaagccaacagcatctccaccgcctacaccccccacccttgcgacagtgtcgagcagaccatgtgcgagggcgattcttgtggcggtacatactccgacgaccgctacggcggtacctgcgaccctgacggttgcgacttcaactcctaccgtatgggcaacaccagcttctacggccccggcgccattatcgacacctcctcgaaattcactgtcgtgacccagttcactcgcgacggcggttccctttccgagatcaagcgcttctatgtccagaacggcgaggtgatccccaactctgagtccaacatctccggcgtcgaaggcaactccatcacctcggaattctgcactgcccagaaaacagcgttcggcgacgaggacatctttgctcagcacggcggcctcagcgccatgggcgatgccgcatccgccatggttctcatcctcagtatctgggatgaccaccactccagcatgatgtggcttgacagctcttaccccaccgatgctgacccaagccagcctggtgttgcccgtggcacttgcgagcagggtgctggtgaccctgatgttgttgagtctgagcacgccgatgcctctgtgaccttctccaacatcaagttcggtccgatcggctccaccttttaagcgtgacgcttagtgccattgtactttgagtatatggtatcaccggaaagacatttgagaacgttcttgtacatagtggctctagattctgccgggttatcaggttgttctccttttgtctcagtatatggttaaacaactggaccacttttttgagcagcgccagcacttgattttgctttgtactttcggttctcctgttacttcttcaaaatttcgaatggaatatcttgacatacaatactttcttgagtcccaacaattctctcagaaacaccttcaataatcatgtagtcgagtgtcttcctcaatcaccaaagcagtggtaaagaaaggtagactcatggcgccgctaaatcacatgatatcagaggacagcctctgctctcaggcgggagttaacaggagtgtatgaacaataaagatcagaatagctgcactggttaacatgtttggaacatcagccttggctcggtacaactaagaatgaggctagacttagcaagccggacgtgagtcaatagatcgtttttgaaggcagagagagtaaggaaaaagcaaggaacgatgaagcacgtggcataaactagtgatatcagggataatgctctggcttgggtggagagttggaaatgcacatattgcatgagaatggtcaatgctgctgtgttcctgcagctgagttctgaaaccaggctggtaattgctattcggtagtgccattgaagctgatatcgacttaagactgaaatggtcctaatatatacaattgtaggacatatcgtctttttcatgttagccgagagcggccatcactcttgtcaatctgaccaaaggtaagagatgatgcacactattgtctgtgctagttagacattttcaatatggtttgattgtgagatataatacaactggggtattgcggatagtgtatagaacgcgccatgatgtcaaggttctctgctgactgtttccagacaggtggaaatgaaaccattagtgcgcttgtagcagtcttttcagcatcaattttacaggtccttcctgtagtagagtcggtggaacatcccatctctgcaagagtactattgataggcggagtattctcggcccgcacttacaaacaaaacaaattatcccaggaaagcttgaagctccattccaaaaatccgacaatccccaagggcagcttctgaattgcattctacaaaatccagacaactagacgtgtcttgccacaatgttcgacacagtctgcacccttccgctaagcgcagacctcttcgcgcaagcaattcacccctccgaacctatcatctcagtcggcctatcaacagggcatgtccagacgttccgactccccactgaagaagaggaggagcatagtgatgacgagcaggcgtcggtctctagctcgcgcaatggcaagggtcatattgatacaatgtggcggacaaggcggcataaggggagttgtcgcacgttgacgtttgggatcgatggagagatgctgtattctgcgggtacggatgggctggttaaagctgcgaaggccgagacgggggttgttgaaaacaagatcttgatcccgacggcgaaagatgggtgtgtgccatcttgattatactcaatggcttgtcattggcttcgaatgctgacaatttttctactgcttgacaggtcggtcgatgcgcccaccgttgttcatgcactctccccgcagacgttactactcgctacagactcgagcaaactgcacttatatgacctgcgtgtcccttactcgaaggtcgcggctccgccccagcagacgcatcgccctcacgatgactacgtttcgtccctgacaccgctcccggcgtcagataccagtacttccgggttcagcaagcagtgggtgacgaccggagggacaacgctggcagttacggatctgcgccgtggcgtgctcatgcgcagcgaagaccaggaggaagagctcgtcagttcgacgtacatcggcggcctatcagccagcgggacaagcc

SEQ ID NO: 20319 - DNA, 2974 bp, Emericella nidulans
ttcaacgagctctcaaccatgtgcagcagtatatctgcgttgccaatatcaagtagcaattggtccaggaactttccgccattaggcgatccgtcacccagcctgtagtgcgacagtagctacaagcgttcgtgtgagggtctgctagagttgagtagtgagtgacccattatctgacaggaagcgacgtaattgcccaatccgctagttgtggtttgcgttcaaacgctctagaaaacttgcacctaaagccttctatctggatagcattgataagttagtattggataacacttcgtcggcatcatttagaagctttctaaaaagaagaatgccgtgatggtactctttgtttagtctgcattcaatgttcggacaacgtggaacgagtcatggatgatatcttgactattcacttgagcgatctggaagatcaatcaaaaaattaagacgatctgtggaccagggattggccaagcaagtttatcattatattttgtataaggagggagagtgaggatatgttattcggatgcgcggggagctattaaaataagtacgtcatgtgttcctgttatgcgacaaaatcctgtatagattatgtcagatgattaagtgcctcaccgccctgacataaatgcacgtgatcataaacgataagctaccacttcagataaggagattttattcttcagcagaggaatcgtctgctaccatattcatgtcatcatggctttcagggcacggtcaaggacgatgtttcggtggggtgctagtgttagatctcggttattaggtggttttcgcggattggcttccgtgtctgattctacgcggtatgagaaaatcttgaatcaacattcatctataacttactgatttcgtttcttccagaccctacgatgtggtcgttatcggaggtggtcatgctggatcggaagcgtgcgctgcagcggctcgctcaggcgcccgcacggcgttgataacaccctcgctctccaatatcggagtatgttcgtgtaatccgagtttcggcggaattggcaaaggcacgatgatccgggaaattgatgccatggacggagtcgcgggccgaattgttgataaggcgggactcatgtttatggtcctcaaccgatccaaaggtccggccgtttggggtcctcgcgcgcagatcgaccgggagctatacaagatttacatgcgtgaagaactgctcgcgacagaaaatctgagcattgtggagggtaaagtggcagatatcgttatctcgaaggaagatgttgggacgggtcctgctgcgccggctgggaaaatagttggggtccggttggaaacaggcgaagtgataccgacgagccgggttgtgattaccacaggtactttcttgggaggtgaaattcatatcggactcaaggcctatccgtctgggagaattggtgaggctgcaacattcgggctgagcaagtcgctacgcgaagcaggcttccagctgggtcggttgaagaccggaacgccgccgcggctggataaaaagacgatcgacttttcagcgctgcaggtccagaaaggtgacatgccgcctatgccgttttcttatcttaatgaacgagttcaggtggacgaggacgctcagcttaacagctttctaacctataccaacaatgcctcccatgatatcgttcgcgccaatctggataaatccgtgcatattcgagaaaccgtgaagggtccgagatattgcccatcgttagaatccaaggttatacgcttcaaggacaagacgcagcaccttatttggttggaaccggaaggctttgcgccgaacgaggtcatctaccctaacgggatctcaatgactatacctgaggatgctcagttcgaactactgaagacgatccgcggtctcgaaaacgtacggatgctccagcccggttacggcgtagaatatgactacatcgatccgcgcaatctgtggccaacgcttgagacaaaactgatcagcggtctctacctagccggacagattaacggcaccacaggctatgaagaagccgccggacaagggataatcgccggcgccaacgctggcctgtcagcgcagggccgagaacctctcaccctcacccgttccgacggctacatcggaatcatgattgacgacctcattaccaagggtgtttccgagccttatcgaatgtttaccgcacgcagcgagttccgcctttccgcacgatctgacaacgctgatcttcgtcttactcgccttgcccacaaagccggcatcgtaggcaagaagcgctggtcccacttcagcgacacagaagcccaaatcaaagaactgcaatcgctcctctccaacacaaagctacccctcgcagcatgggcccggaaggggttaacggttcgcaatgacggcactgtccgctctgcacacgagcttcttgcccacagagccgtcgggctcgacgacctgatcccacatattgaatccccatcaggcaccgcatacacagcgtcctcgttcgcgccggaaatccgcaaccgcgttatagtggaagctcgctacgcgccttacgtgttgaaacaggacaaagcggccgctagagtccgtagatacgaggattttcccatcccgcttgacctggattacaatgctattcatgggatcagcacggaggagcggcaggctctagagcgcgttcggccggcgaatatcggcatggccaggcggattgaaggcgtcactccagctgggtctttgcagcttcttcttcatctgggacgtctagggcggaggcaagagaatgctaggcggattccggcagacatcgaggctgacaccgacatgtcagggctggaaaagacgcctgatgatatctcgacttgatcgatgtgcttcaatcaaggagctttcgtgaatggaggaggtgtacgagtatgcgaatatgcattggccatttacctacatttt

SEQ ID NO: 20320 - DNA, 2976 bp, Emericella nidulans
ccgtcagattccgccgacgaaatcacaggaaaacttaacgaagtcttcccgtcgtcgatggatacttcttcctcaccgtcttccggtcccccggtagcatctctcaaaggcaagctgcatgtcaagatttcggaggggaagggcctccaaccggggttcgacccatatgtggtctgtgttttcgagtggaacgaggtaatttcgaagagcgttcaggacgaggagcaagaatccttgaaacgacaacagaaggaactagagcaatcggccctcgattctggacgaccaatggctattccgatgaaccgacagagtagccataacaatactctcgagagcacagaccacagaggacatgctcctatcacagatccacactggaaccatgaagcggtcttgtaagattatcttcttatccctatactttttgtcttcaaatgttgcagtttcctgatctttgttgctatctagtgatgttttcggtgaccagtctgaaattgacgtctccgtgtatgaccgcaatgactcggaagccttcctaggccatgtgcgactctgcgtgaatcttaaggaagataacagtcgcttggacgggtggtttcccttgaaaggtcgggcagcaggggactcccgagtttccggagagattcatatggaaatgaggtttgagaagacggagaagaagcaggtcggaccaaatgactttcaaatcctgaagctgatcggcaagggaacctttggccaagtctaccaggttaagaagaaggatacacggcgaatttatgcgatgaaggtgctctcgaagaaagttatcattcagaagaaggaggttgcgcacaccgttggagaaagaaatatcctggttcgaacagctatggctgcttctccgtttatcgtcgggctcaagttctctttccaaacacccacggatctctacctggtcacggattacatgtctggaggtgagctattctggcatctccagaaagagggacggttccaggagccccgcgccaagttttacattgccgagctcatcatggctttgcaacatctacacgaccatgatatcgtataccgtgacctcaaaccggagaatattctgcttgatgccaatggtcacatcgcgctttgtgatttcggtctgtcaaaggcgaatcttacgcagaacgatacaacgaatacgttttgcggcacaacagaatatcttgccccggaggtactactcgatgaacaagggtatacgaaaatggttgatttttggtcactgggtgtcctcgtctttgagatgtgttgtggctggagtccgttctacgcggaggacacgcagcagatgtacaaaaacattgccttcggcaaggtccggttccctcgtgatgctttaagcacggaaggacgcaactttgtgaaaggcctgctcaaccggaatcccaagcaccgcctgggagcccagaatgacgcgaaagaactcatggcgcacccctttttccatgacattgactgggaggcactgggcagaaaagaggtcatcccaccgttcaaacccaagctcaagtccgacacagatacgtccaactttgacccagagtttaccaacgctcttgaaaacagtaactcgctaaatgaccgagctgcagctcttgccaatgggtttatggccgcgtcgacgccgctctctccagggatgcaagctaatttccaagggtttacctttgtgaatgagagctcgatcgatcaccatttcaagaacgaagtaggggatcgtatggatgaggattacgagccaatgcatcggtcccatcgatctgggaattctatagatcaccgcatggctggcgttcagaagactggagatgcgggtgagattttcaatgttgacgacaattttgacatgtgattatggctttcgatgcatgctagtggagttgtgatgtctgcatatatcttgtctttttcctgcgctgtacatgttttcctcctgaataggggctcaggatgagtctccgattttgtcctcgtttaacataccccagaagatttattctgtatctcctttcattcatcccgcatcagctggatgtaatgacttcttggccattgttcttattttcttttctgatttgcaccattgttgctcatattccgatatcaataacggaggatgttcatactctacgtcccggtctatttggagagaccggcccatcgcgacatgcatattactgctccttcggttcttcttgatccttgattctgtgatatcccgcattgattgctcttccactaggctaacatgcctctttcctcggtttttctcacgcttcgaaatttggcccacgcgtctcgagtcattgtttccggctaacgttaggggtttgcatatctggatactagggtaacaggaagcggtccggtataggtaaatgattgatgtagtggcgttgtatggcagcatcggcgcaggtgatagttccactgctctttaccgttgagagctgaataaacctacaatttgcttctcttctgtctcctccaatccaaaaacaggacctttggctagattagctcggctgcactttggtctcaagcagacgacaagaaaaatggtgtgaggcaaaggctcgatcttactatcttgatctgtataaacgtctgacgccaaattggatgaattcgccttttccgaccatctaggcaggtttacgcggatttgtctatgaactgtccactgcctctaatcttcaagtcatctttagatcatttccagatcattttgaaccctaagatcaaatgccgagatggtatatgatagttgtacagggttatatcagtcacgtggctttcaccagtcttattcaatacaaaacgtaaactcgccacatactttgtatgtattgcccttgcggcataataaaggccaaagacatattaaataataaaatccgtggacaaacccccaccagtcagtccacccgc

SEQ ID NO: 20321 - DNA, 2986 bp, Emericella nidulans
acggcctttcagatatcatctatcaaaatgcacactacagtatagatgctgacgttccggatcgccctcgtgactacgcaggaaaggagtttcagctgggcggtatcggcatacgctacctccccgattttgatccttctggtcgtttacctgcaatgctagcggaggagaatataggccaaaaagagaaacgtgactggcaagaactggaccatcaattgcgggttgggtccacggccagattctgggagtttactcctgtccctccgagccgctcagaggtcatcacatggtataacggcgaacagcagaaatctttggcagcaacaacgaaaacagaagagcaatacgaggagaaagagtatcgaggaaaggtactttctcagattgagggtcctacacaaaagaatgaacatggcttcaaatactcacaacataaaaagtccacaagtgtcgagcatcagactcagtatatgagcactatgagcttggaggttcatgtgaatacccgcggtgtgctattgccaaatccagaggaagatgaaatagccgcgttcttttggtgtgttaactccgaagatgaacctcaggaggaagatgattctttatcagttgtcaatatgggggtcgtattccaaggagaagaagagtacccggagtcgaaaatctcaaaggcgctgaggtttgagtgcgagcatgaatcgacagaattagacctgatcaaccgtctagtcgatatcgttcgactccacgaccctgatattataaccggatacgaagtgcataatagttcttggggcttcatcatcgagagagccaggaagaagtacgacttcgatctatgtgacgagttatcgcgagtgaaatcgcacgctcatggacgatttggcaaagaagctgataaatggggcttcgaccacacatcatccattcgaattactgggcggcacataatcaacatatggcgcgccatgagaagtgagatgaatttgctccagtataccatggaaaacgttgtcttccatctcctgcaccggcgaataccacattattcgttccgcgacctcacggcatggtaccaaagtgataaaccgcgagacttcatgaaagtcattaactactatacgtcacgcgtccaaatgaacatcgagattctaaatgcgaacgaattaataccaaggaccagtgaacaggcaaggctgcttggcattgatttttactctgtgttctctcgaggctctcagtttaaggttgagtctctgatgtttcgaattgcaaagccggagaactttatactcgtttcgccaagcagaaagcaggttggtcaacagaatgccctggagtgccttcccttggttatggaaccccagagtgatttctacaccagtcctcttattgtgctggatttccaatctttataccctagcatcatgatcgcctacaactattgttattctacctttcttgggagagtccagtcatggaggggacgcaataaaatgggtttcttggactataaccggccgcctagcatgcttgagctactcaaagatcatatcaacattgcgcctaacggcatgatctacgcactgatccgaagtgcgaaagtcgctccttgcgaaaatgcttacggagatattggagacccgcgtaatggtaaagactggaatgaaagttgacaaagatgaccgagcattgcagcgcttgctcaacaaccgacagcttgcactgaaactaatcgcgaatgtgacttacggatatacctcggcctctttttctgggagaatgccttgctctgaaatcgccgacagcatcgttcaatcgggccgggaaactttggaaaaagcgatcgccttcattcattcggttgagcgatggggtgctgaagtggtttacggagacacggacagtttgttcgtctatctcaaaggacggactcgagaccaggcctttgacattggcgaggaaatcgctcaagctgttaccaacatgaacccccatccggtaaagctcaaattcgaaaaagtatatcacccatgtgtgctgctcgcaaagaaacgatacgtcggttttaagtacgaacacagaaaccagaaggaacccgaattcgacgcgaagggcattgaaacagtccgtcgcgatggtacccctgctgagcagaagattgaagagaaagccctcaagctgctcttcagaacagcagatctgagccaagtgaagagctattttcagagccaatgcacgaagatcatgcaaggacgggtgtccgttcaagacttctgctttgctcgagcagtaaagctcggaacatacagcgagaacggaacgctccccgccggagctctcattagcacaaagaagatgctagaggaccctcgcgcagaaccccagtatggagagcgcgtcccttatgtcgttgtcacaggtgcgccagggtcacgattgatcgaccgctgtgtaccccccgaaacccttctccaggatgcgcaacttgaccttgacgccgagtactatatcactaaaaacatcattcctcctctagagcgtatcttcaacctagtcggagctaatgtgcgtcagtggtatgacgagatgccgaaagttcatcgcattcgccgtgtagaagggacatcttctctggctggtggaaaaagcagcatccggaccctcgaatcatacatgaaagcttcatcctgcgtcgtatgtaaggcaaagctctatgatgccgaaatccctgtctgctcggattgcgtacggcagccccatgtctccttgcttgagcttgtctcccgccagcgtcatgccgagcagagagttgctactctcgagcgtatctgccggtcctgcatggatgtaccgtttggtgatgaagtgaaatgcgacagccttgactgcccagttttctatgcaagaacgagaggtcttgcccattggagacatacaaattccgtgctcggccctgttattaaacttttacaggacaatt

SEQ ID NO: 20322 - DNA, 2990 bp, Emericella nidulans
ccacgcgcacatgaccgtctttcctccttccttccttgggcccgagaggacaggctcagccaacaacagataagcctcgttcctgtccaatcacgcacaggcttggcgtgagtttgacctgagtaagcgtctccagaaagtcttctttgactctccgccaagaaaacctctccccccagactttcctaaaactctgcccacgcagtgttgatcggcatcccacatatctctctccggaataccccgctacgatgatcgcacggtgacatctaggtgcgtctgactctgggcattggacagataggagatcggacagtcgccgaatttgagtcatgccatgatgcaacccgtcattctccggctctcgaatcccagcctggcccagtccggggatatttctgccaacgcacaagccgcatggggctatcgtcaagggtctgttgcctgactggcctatcgaggcccgacggcctagccaattctccgaaattcgctcggttttcgataatgcaccctcatccttcggggggctctttcgtggcagctgagctgccgagctgagctgccgtgccttctattcttggcaactggtcctcttagcaccgtccttccgcgagaacgcaggtaggacccgtcattttaacatttcaagggacttggtaccttcagtgatgccgtgcttaaaaggtttctcgggcttcggcaatccttcctctgccttggctcacggcattccctttgtcttgttttttgccattccaccgccacggcagaaatttgtgttagctagcgtgcctcggcgtggacgttgaatccactcattcccccggatccagccagggatggctgtgcgcggcgcctcgcgtgcaaccccggattgcttaggcccttggcaagggcttggctcacgcggattcaggccgtcgtggagctggtcgtgaatgcaatggcagccatgaggggcctgtggagggaccggcttcgagggaaatgccggcgtggggggtagtaatagagaaatggggaaacgcgggatttggggattttggggtaatcatatttgcggtttgctgctgttgcacatcctccgcagcaaatgcgacaccgatgccggcggatggaggggcagacggcagacggcagacggtataaagtcgggcaaagccaccgggccgctcgagaggtgcagccgcttttgctttaatcgtggacattgcttagagcccgaagcgaaatcgttctatctcatttcaagcttcgagcatgccttcgcaaaacgagcccgctgagcctatccctgacgggatcttcgccgtcgcgaagcagtcctggggcgacctcttccgatggaagcagcgtgttatcattgagaacgagcagggcgagtcgtatgcggaatggcaagaccccgagccgttcaagaacccaatcagtcttctcatgctgctgagtgcccgtgactggctcttcttcctcgtcggccttgccgcgtggaccgcagatgcgtttgacttccatgcgctctctatccagcaagtcaagctggccgattactacggcaaaacgaagactgacatctccacggcaatcactctcaccttgctctgcgcagtgtcggtgccgcctttttcggtctcgcgggcgaccgcttcggccgtaagtggcctatggtcattaacatgattgtgcttggagtgctgcagattgcaaccatctacagcagcaccttccagcagttcctggccgtgcggagtctgtttggcctcttcatgggtggcgtgtatggaaacgctatcgccatggctttggagcactgcccgtatgaattccatctaactgaaactccagaaccgttccaggctgattgctcgcagtgtcagcgcccgtggcctcatgtctggaatcctccagcagggttactctctcggctacgttttcgccgcgtgcgccaatctcggcgtgggaggcgggaccgagacctacaagaccgtcttctggattgccggtgcgctctacaacccttcccagccacagagatatgctaacatataccagccggaatctccatcggcattggtctcatccgagtcctcttccccgaatccaaacaattcctcgaggcaaaagcagccggcaagcgctctgttagcgccggtgaattctggagagaaaccaaagtgatggtcggccaggaatggaagatctgcgtctactgcatcttcttaatgacctgggtatgtctttcccatctccctctgtgagaagagccttgctaatgaatgccataccagttcaactattactctcacacgtcgcaagactcctacacaacgttcatgttgacgcagaaagaactcgagaactcaggtgcctcgcgtgcctcgattcttatgaagacaggcgcctgtgtcggcggcacaatcatcggctacctctcccagtttgttgggcgccgccgcgcaatcattatctcggctttcgtctccggtctgataatccccgcctggatccttcccacgacggagcgctcgctcagtgcaacgggcttcttcatgcagttctttgtccaaggtgcttggggtgttattccgattcatctgaatgagctctcgccgcctgcgttccggtctcttttcccaggtatgcctatccatctcacctcggcagaagatacgtgctaacaaaaagcaggtctaacttaccaactcggtaacatgatctcctcaccgtccgcacagatcatcaacgccatcgccgagaagacattcatcaagggtccgtccgggaaccccgtagaggcgtacgggcctaccatgggcgtcgcacggctattattgcaacgggcatcatggtcacaacagcgtttggaccggagaagcgtggtcgtcgctttgagactgttgttgtgggtatgcaggagcagaatcggacggataagcagctggatcttgaggccgattctaagcctggggaggagaccgttgagcggg

SEQ ID NO: 20323 - DNA, 2999 bp, Emericella nidulans
tataacgctcttaaaacgtgtgctgtctttgctcagatctgggcatcaggcaatcgaaccaagccaagaaacagtggacagtagcgggcaaaacaacggggacggcgatatcctcgccgatggccatacccaacatgtgcggcatcagttcatgtcccagttgcctcgctctcattcaaggtctcctgttcaaagcccaatccatgatgcggtgctcaactcgggtaagttgttggaacgtttagagcagacgcgatcctcaaatgatcgacagccgagtcgggatatatctttagatgcgcagcaattacaaccaatatatgggcctaatgcagtaagacaacgaaatacacatcatatgtctacaagcaatgtgagtcacgtgcaccctgaaaagcaaggagcagcagaaggagacagaggaacaccgacaagtgttagttccgaaccatttataactcaggctataaatcgtccatgctccgaaaaggcaaccagacaaaacttttcgccgcaaaaagcagagcggcagtcaccaagaggggcagttgagaggtcaggatactcaaactcgcctgaaaggcaaccacagtctcagcttcaatcttgtgaagatggcattcctctgccggctagccctgataagaatgcgaaggcaaaaattgccgatccgtgggaaggtatgacaggaatcagcagcgttgatgttacagtgcctgccgatcagaaagagcttttggactccaacccaacgccgtggtatccgcctccggatggatgtcaactagcgtcaggaaacgtgccaagggcgctgctggctgagtggaatgagttggcttcccgacggaatcaaattgaagacaataagccaaaaactgtggatgatactcgtcctagcacgccggttagtgagacgtcttctgagtcgcttgcagattcttgggttgaaacgcccaatcgaacacccagccgtggcgtgctgctgccgagggatagtagtccgctcagagataactccgtgcgtcctcagagggcgcagagctcaggggaccaacatagccttgaaaacaacacagactcgcatatgcagatggtcgaggaggaaccagtgtccgagcttgatagaaatacagacccgatatccaaagcctcggtagctgctatggctgagccaaatgcgaaagccattgcgccagatatggtttgcgatgatggcggccatgttttagaggacacccagtcaaactcgaggatggcatctgatgacagcaattcgaactcaaagataaacaatgcgccaggcgccaggcctatcgccccaggcataggccacgatgacgggcattataccaatgtcaattctgaatcacagaaggaccctgcggtagatgccgggccaattgccaaggcccaggttgacaagggttatcaatcggacggcagttctaattctgacgattccgagaaaaacgaagctccagacgttgaaatctctaatccagaccctgctcttgggggcgagcaggaatctgaaagtagttctgattcagaaatgagcgtggcaattccccggccgctaagtggtagcacgcaacaagagacatccacccaaacagtatcaagcccagagccgtctctttctgaattcgcggggcaaaatgttcaggtggtggaaaccccagcggttctcagcaaatcgcgtcccgtactgtcgggccaggatgcttcaagaacagacctcactgaaagccagtctcaaccagacaaatcctcccaatcacgcattctcaacacctacgccagtcatgaaggagacagcaatggagggacatcacaatggaactccatgtctctcccagcaagtgcgccagactctttaagttgtgtacatgtaatgggcaccccgttgagcagccaagtctcaccaacgcaaccaactccacggtcaccatcgaattctatccatacatcgtcggggccgaatgttgtcgagggtagtgtacctgctgcttctttataccaaacccagtcgtccaaggcttcctcatcccatcacgaaccgcattcgtcatccatgttgtctatagacgatctcctcaatccaagcatacaaagctctgtccaaggcagctcttttagacccgaccgcacgtctccactgaaacgccttgcatctgaaactgacagcgatcgcggctcacccttgaaacgaagcaaattagatattaagcctacggtagtcaaagcagaaggcggacttgacgagactattatcgcccgccaccagaactacatcatcaactcagcacagtccgtcgaagcagcagggatttatgaaaaattccgcggcgactacccgaattatgccggtaattatgaacactttataaaattgtgttccaggttgcggtcatttcgggaaaggggtagtctacaaaggtcatttctgtgggatgacttcatcatcaaaaatcttgatacttatccttcctaccttgcggagtgccactacaaccacatcaagcccttggaatacgaagagtatttcgcagagaccttctcaaagccaacttataaaagacgcagcctcgacattccaggaatcaacgcgtgcgcggcgcaggttgtcaccatcgatgagtctgtcgagtcacgggagccggacgacgcaaaaacgtcattcacagcaagtctcagggagcagctttcgaaactccatactcattcctttgcggtgcaagacccaacgtctcggaatgcagtatctgaagatggtcaaaacgccgcagagtcagattccacatcgcaatacagcattcccgacagcgagcccgctcgcgctgcggcccgggaacatgacgatgattacatgaacatcgaccacctacaggagacagatgacctgcatactgtatgggaaaacagcgacgaagacatggaaaacaccggcatggacgttgatgtcgatgatacgggccacgaaacggcgagcgttgagc

SEQ ID NO: 20324 - DNA, 944 bp, Emericella nidulans
ccctcgatgggcctgctcaacagcctgggcacattgcacgcatggacaagcagctaccaattgaccgattactccgagtctgagattggttggatatatggcgcctatgccttctttctctacgttgcgggcgctcaaaccgggcctatctttgactgctacgggccgttatatgttgtcgtgccgggatcaatagggatggttgcgtctctcctctgtttcagcttcagtactggtgcgtcctctacttccgacttgaatatttggcatgaggcagttgctgatcccgtctcagagtactaccaaatcttcctctccttcagcgtccttgggggcctctcagcttgtaccctcttcaacccggccatctcagtgatcggacactggttcaatattcgccgtggcctagcgaccggcatcgcctgcaccgctggcggcctaggaggcgttgcattcccactgatcatcatgtacgcggccccgaagatcgggttcgggtgggcgatccgcatcatcgccatattgtcggcagtcctcctaatggtcgcctgccttctgatgcgcactcgtctccctcgacctagcggaaagtcggctgcgattgacttcagggccctcagggacgccagatatgccagcacaaccgccgccgtcttcctggtcgaattcgccgtcttcgtcccgattacatacatcagcagctatgcgctgcatgcgggcatcgataccacgctatcctacgctcttattccgctcctgaatgccggtgctgtgcccggtcggttcctgcccggcctcgtagccgacagactgggccggttcaatgtgatgatcgccacatcccttctctgctcgatcctcaccctcgcgctctggatccctgtcgacgccagtccggccggagtaatctgctacgcgatcctgtttggcttttcaagcggcgc

SEQ ID NO: 20325 - DNA, 945 bp, Emericella nidulans
ccgacggtggtaccagcttatggtagacaatgccgaagatctggcaacacttattacgtgggagaacggaaagccgctcgcagacgccaaaggagaagtgaattacgccgctagcttcttcgaatggttcagcgaggaggctcctcgcacctacggcgacactatcccggcttctgtacctggtaaccgcgtaatcaccgttaaacagcctgtcggcgtttgcggtctgattacgccctggaacttcccagctgccatgatcacacgcaagattggacctgctcttgctgccggctgcactgtagtcacaaagtcaccgggagagactcccttcactgccaacgctctcgcagaactggcaaaccgcgctggtatccccaagggagttgtcaatatcgttacagccatgaagaacacccccgaagtgggcgagatgatcaccacacacccagacatccgcaaggtctctttcactggctcaacaaacgttggcagactcttgatgaaacaatcatcctcaactatcaagaaggtctcctgggaactcggcggcaacgcccccttcatcgtcttcgacgacgtcgaggacctcgatgccgctgttaccggagcaattgcctccaaattcagaagctccggtcaaacttgcgtttgcgctaaccgaatctatgtgcaaaagggcatttacgacgaattcgtccagaagtttgtcgagaaggtcagaaacttcaaagtcggtgctggcttcgaagatggtgttacccacggcccggttattcatgatcgtgcagtcgacaaggttgaccagcacgttcaggacgccatctcaaagggtgccaagcttattgctggtggccagagacgttctgacttgggtcccaacttctatgaccttacagtccttgcgaacatgaccaaggatatgaagattgcctcggaggagac

SEQ ID NO: 20326 - DNA, 946 bp, Emericella nidulans
cggtcattgtttcgaccgaggatctgcgaagaagaagcttgacttcttcttgaagttctttcaagtaagcttgcttatgcttgatgagtgaagcttaggctaattgtttagtactacatttgtaccaaagacccactgccgatggacatcgacttccttgtccaagacacgtactctctcacccgcccgcaatggaccctagttacggaactagacgaagctagccgtatcttcggcgaggctgttgcccagaatttcaagccacaagaggagaagcctgaacccgaggaagaatcggaggatagtggatcagatgaggatctggaagaagacgcatttccagaggccgacgaggaaggagagtcgagtgatgaggccgatgtaagtgaaccagcatactctgctgatcaatgctaacaaggcaggtctctccaaacgctgagcgcaacgacgacagcgagtctgaggaagaacaaatattcgtcacccgtcaagaagaggaacgagaccccgaggccgaagccgagtttgatcgtgaattcgagaaaatgatggcggaaagcgttgagtccagaaaattcgagcgcaaggctgtgtttgatattcctttaccgatgagacgcgctgcccgtgatcccactgcggaagtcacagccgcgaattcaaccccagctcccgtttcctcgcctgctcagtcgtccggtacaatggcgttctctttgatgaccaagaaaggcaataagcagcagactcgtactatcgatttgccatccgactccacttttgccgttgccatgagaagccagcagcaggccgatagggaggagcagcagcggatcaagaacctggtattgaactatgaaatgttcaacgagacggacagtaccgaaggtgggtttactttcgcttatcgcatgaattccaaggagcagggggaaaagcgaca

SEQ ID NO: 20327 - DNA, 946 bp, Emericella nidulans
tgccgtagcgaagactggctcaatactgtgctagactacacatataatttgggcacaatcatctttcttctccgtccgctgcctcgttttcttcgccccttggttgcaggtcttcttccccaagtccgccacgcaagaaagatccttgatcacgtcaagaatgatatcatcgtccctatgatccttgagcgccgtcaaaaagaagccaacgattccaactaccggaagccggacgatttcatgcagtggatgatggatactgcagacaatgactatgataagcagcctggaaacatcgcacaaggtctcatgattatcatggctcttgctgttatccacacctcaactatcaccatcacgcaaagtctctacgatcttctcattcgtcccgaatacgtccagccccttcgtcaagagatcatcgatacactcaagcatggatgggcaaacgctaccagggcagactttgctactcaggtccgcctcgatagctttcttcgcgagtctcagcgcctcaaccctacccatgaagtcaacgtccagcgcatcgccaaagaaactctcgtctttaaagatggattcgttgttcccaagggcacgcacatctgtttcgcagctgggcccctttctcgcgatccagagctcatcgatgaccccgaaacctttgacggtttccgctggtgcaaggatagacagtacaacaagaaaggtcacaacaacagccttgtcgccctcagcaagctgaacctgcactttggatatggacgtcaggcctgccccggtcgattctttgctgaaaacacatccaaggcgatcctcagccgtcttcttgtcgagtacgatctcaagttcccagagggtaaggagggaaggaggccttggaacatccgcaatggggagcagattgtgccgaacgtctataccaaggtgctgatcaggaagcgcc

SEQ ID NO: 20328 - DNA, 950 bp, Emericella nidulans
tgtacgtcaacccaaatgcacgagtttagatgaagtagcagacagctgacacagccctgcaacaggccccagactcgtgagcacttgctgcttgcccgccaagtcggtgtccagaagattgttgttttcgtcaacaaggtcgatgccgtcgatgaccctgagatgttggagctcgttgagctggagatgcgtgagcttcttaacacttacggcttcgagggtgaagagacccctatcatcttcggctccgccttgtgcgctctcgaggaccgccgtcccgaaattggtactgagcaaattgacaaacttctggaggctgttgacacttggatccctactccccagcgtgacttggataagcccttcctgatgtccgtcgaggaagtcttctccattcctggacgtggtaccgtcgcctccggccgtgtcgagcgtggtcttctcaagaaggatagcgaaattgagatccacggtggcggtgaagtccagaagaccaaggtcaccgacatcgagactttcaagaagtcctgtgacgagtcccgtgccggtgacaactccggtctccttctccgtggtacacgccgtgaggatgtcaagcgcggtatggtcatcgctgctcctggctctatcaaggcccacaagaagttcttggtctccatgtatgtcctgaccgaggctgagggtggccgccgcagcggattcggttccaactaccgcccccaggcctacatccgcactgccggtaagtctttctcgaacaatttgaatgccatcttcgggcatcatcgtcgttctaaccaatgtttagacgaggcttgtgatctcaccttccccgatggcgacctaagccgtcgtgtcatgccgggtgacaacgtcgaaatgattttgaaccttaaccgccctgtcgccgccgaggctggtcagcgcttcaacatccgtgagggtggccg

SEQ ID NO: 20329 - DNA, 952 bp, Emericella nidulans
tcgccatccacgtttctaggtgacttctcaattggaaacgaaggcgaggacgacaatcaaaacgacgaggaagaagaagaccctatatacagcatgagtgcgctggacctcagcgagggtgtgcacgatcagccaatgaaactatcagccacattatcgaacccatctttagagaaacccggcaatataccaagtcagtcgttcacattcttgagcattgacggtgcgcaaagagaagcaagcggtatggacttgctggggcggataccgttgacaaaggtggtatggcggcaactgatggaaatcccggatgaggattttgccaacgagttgacccgcattgattggataatgttcaacactttccgaccgcgagatcttgtgcgacatgtgagtatatctggaccggacaaggataagatccagagtttgaagcatgtcaaccgcatgatcaagcaatttaatcatgtggcattcttcgtggcaagtgtaattttgttgcgggataagccaaagcaccgagcacgggcattagagaagtttatgaatattgctcaggtaagtccgccatttcactgttacctgacctggctaattcatcctagaaactacgccgcctgaataattataattcattgggtgcggtcattgctgggattaatgggacaccggtacatcggcttaatcaaacccgcgagcttgtcccgccgcaggttcacaaagacttcatgagactggtaattcttatgggtactcagaagagccatttcgcctaccgactggcatgggacaactccttctccgagcgcattccgtttttaccactccaccgccgcgacctcgtctcagccgaagagggtaacaggacttttatcggcgacaaccgcaaccggattaactggaagaagtttgaggtcatgggcgaagttgtgcttggcattcaacgcagcca

SEQ ID NO: 20330 - DNA, 956 bp, Emericella nidulans
ttgcgcccttgcccaacattcgcaggctagtaatggccataatgtcgaagcaagtatgtcaaggcgcaagagtgatgacagtacattccaagagcagttctatgtcaccggcttgaaccgcagctcaacatatgtgggcatattagcgatgggcaacacgactgagttcgggaacggaatagtcggtggaggaggaaaagtttggaaggcgaagaagttctcaacgaaatcaggtagatatccacttctatggcgatttataagtattcagctaacaggaaaaagacggcaactgcgacgtgatctacgaccttgacttttgctcagatgtcgctcactcagtaccctctaacccttcaatgaacatgtccgaggttcgcgccaaatatgacaactatgccgcaaatctttacagaaacttcaatttctcccttcaacaaatccaatgtaatacctccaacgaaacaatttactcaatggcagtcagctgcgacgactgcgcggccgcttacaaatcctggctctgcgccgtcaccattcctcgctgcgacgactactccagcacatccaataggactgctgtcatggtgcgtaatgcggcgcaacctttccctaatggcaccgagatcacaaaccagaccctccgcgatagcccgatcaccaatcgtcctagaaacagcgggctgattgatacggaaatcaaccccggtccatataaggaagtgcttcccaatgtcagtttctgccataacctcgtgcgaagctgtcctatgtcacttgggttctcatgtccaagcggaaagtacctgacttattcttatgataccagcgctgctccaagtggacgaatatcaaatcctttgtgggctgttataatggtttattttacaattgtgatggtgttttagtccttttcaaactcgtcttccaatctgttacgcgctacgccctatgca

SEQ ID NO: 20331 - DNA, 959 bp, Emericella nidulans
caggctgcgcgaagaagggatcagctccatcaagatctacatgacttaccaagcgctgcagctgagggacggcgacatcttatcggtcctcttagccgcgcgcaaaaacaagatcctgaccatgatccacgctgagaacggcgaggtcctcgactggctgacgcaccagctcgaagcggccgaactgttcgctcctaagtaccactcgaactcaaggccgccgatcctcgaggccgaagcgaccaaccgcgcgatagcgtcctcgctaatcgcagacactcccatcctccttgtccacgttagcgacgtcggggcgacaacacgcatccgcgaggcacaaacccttggccaaccaattctagctgaaacgtgcccgcaatacctcttcctcacccggcacgacctcgacaagccgggcttcgaaggagcaaagtgcgtctgctccccgccgccgcgggacaaaaacgaccaggaagcgatctggacgggtctcgacaacggcacgtttgccatcctcagctcggatcattgtccattccggtatgatgacgccgagtccggcaagaagacatgtatcacggccgagcaccccgtggggcagttcaagtacatccccaacggcctgccgggcgtggaaacgcggatgccccttgccatgtcggcgggaaagcttgagctcacaaagctcgtccaggttttctcaaccaatgcggcgaaactgtacggtctatacccccgaaagggcgcgctgattcctggtgtttcagacgcggatttgacaatctggtatcctggcaaactggacctgacggtgacgaacgatatgctacatcataatacggactacactccgtacgaggggcgtaaagtcaccaactggccgagatacactgttctacgcggccaggttgtctgggatcgcgataacggaggggttgtaggccggaaggggtatgggc

SEQ ID NO: 20332 - DNA, 964 bp, Emericella nidulans
aagtcattggaacaagaagcaacgtttttctggaaaaagaaatagctcaacataggctgcttgggcttcgtgaagtgaactttgatctcttaaataatgctcaatactccagatgtcaatttgacaaaacgatgaaggaatggtattgagatggtcgaagcgcaagtacaagagcgtgttcaccaatcagagccgtctccgcggagcaacaatttttatcttatcccctcacctggcagcttaacttgatctttaacaacacactaaacactgcgcaacatttgatcacccttacaaactcacaatgggtaaacgcaagcaaatcaaagatggtgacgtctccatgggcggtactgaccctgcgaccggcgactcctccgacgaagacatcgacatggttaacgtcgacttcgaatggttcgaccctcaggagattgactttcacggaatcaagcacctcattcggcagctcttcgatgttgatgcgcaggacctcgatctttccgggttaacggatatgattctcgcccagccattgctggggtccaccgtcaagacggatgggaaggactcagatccgtatgcctttttgactgtgttgaacctgcaggaacatgctgtatgtctgacctacttgaagcgttgattataggcagcctaactaactggttttccgctcaggataaacccccgattaagtccttaacaacgtacattaagcgcaaagccagcgggacgccttccctctcccccctcgcccaactcttctcccagacgcccatcccgccaatcgggctcattttaacagaacgactcataaacatgccctccgaagtcgttcctcccatgtacgcgatgctgcaggaggaaatcacttgggcgattgaggagaaagcagcgtacaatttctcgcactacctgattgtttcgaaaacatacgaggaagtcgagtctaagttggatg

SEQ ID NO: 20333 - DNA, 964 bp, Emericella nidulans
gttcatcgactgtagatctctttgaagtcgtgagccgactgaacggcgcgcttcctgtattccatccgcaatttctcgcccagtgtatactaagcggtaagacgaacttagtgcattcgatattgatgaatctccatcggaagttgaagttctacacagagggggatgacattgatggttttctagagatggcgctggaagatttttatgtggatcatgatgtgagcaaaatctacctacatttatgacttggctaacgagcaaaaggtgccacaacaagcagtgtctaaagagttgcactcgtcctatgcggatctttcccttgaagaagagcctacagtcatggacgaagccacggcagccattcttaatgagaatctggcgcgggttgctctaccacaactaactagccaggaacaagtccggctggtcgacacaattgaatgtgttgccactgttgaaaaacaccggcgctcgatggatgacaatgctgctcgctatcttctgtttttccgacagcatatgctgcgcaggacacaaggtatcgcgaataatgacacagtatcttggcgagagattgtttgggctttccatagcggcagtcaagacatacttattgacctcgtatcgaggcagtttggtggaaagttgtcatggaaagcagctcgggaaagtgggatattcatgtggttgtcgaattctgcaacaattgtaagtcaacgcctctcccatgagaaacatgggctaaatattcgcagcgcgagcaattggaggtagttgctcgaaatgagtacaccaagactgaagaaaggaatcccattgactgctctttgtactaccttgccctcagaaagaagaatatccttcagggtctttggaggatggcgcactggaaccgagaacagtccgcaacacagaaattgctagcaaacgatttccgggaatctcgttggcagacagccgc

SEQ ID NO: 20334 - DNA, 966 bp, Emericella nidulans
ctcgcgagtgctgcgagtgcgtttgatatcggtggtcgcggaacggacgaagatcttactgcagctttggagaatctcggattagatgatgacgacaactcttcctcttattcaaagccagccccagacgccgttgcctacgagtcatcattggccaatgcctgtggagtcaacttaaacactcgtatcctcgccttcaagccgccgcctcctgagtcatcgaagccgattgatctgcgtgctcagtacaaccgtcccctcaagtccaccaagtctaactcggctcagttccgccgaagagtccagaccgctccagaacgtgttttggacgctcctggccttcttgacgactactacctcaatctcttggattggagctctggaaaccaagttgctatcggcctagagcgaaatgtctacgtctggtctgctgattctgggtccgttagctgcttgttagagacttctcccgatacatacatcagtagtgtcaagtggagtggggacggcgcctacgttggcgttggcctcggtacaggtgaagtccaaatctgggatgtcgaagagggcaccaacgttcgcagtatgttcggacatgaatcaagggttggcgtaatgggctggtccaaacacaccttatcaactggtgctcgcagcggtcttgttttcaaccacgatgttcgcattgctcagcacaaggtcgccgagctggtctcgcacacatccgaagtctgcggtctggagtggaggtcggatggtgctcagcttgccacaggcggcaacgacaacttggtcaacatctgggatgctcgatcattgagtgcccccaagttcactaagacaaaccaccgcacggcgggcaaggctcttagctggtgtccctggcaactcaaccttctcgccacgggtggtggttcctacgaccggcacattcacttttggaacaccaccactggagctcgcacc

SEQ ID NO: 20335 - DNA, 975 bp, Emericella nidulans
agtggtgtgagtgtttgtgctgagaaagactactgtgcagattccaacatcaatgtcatagtcctcgccttcctgatgactatcaatggacccggcggtgcaccggaaatcgacttctcaatatcatctcaagggtgcacgacgttcaacgggacgaacttgaaaaactgtcctgagatcgggtatagctttatccccaatcccatttgatacaaggcggctaacctccccagcgaggacataacgaaatgtcaagccgccggcaagacaatcctcctctccatcggcggcgcaacctatagtgagggcgggttcgactctgcaaccgcggccaacgcaggggcggaccttctctgggcgacgttcggcccagaccagaatgatacgaaaattcatcggcccttcggaagtgccgtcatcgacgggttcgattttgactttgaagctgcagtcacaaacactggggtgttcgcaacgagactgcgcgccctcgcggacgcggacacttcgaagaaatactatctaaccgcggcaccgcaatgtccctaccctgatgctgcaggcaaagacattctgaacacaaacagttctgccgcgattgacgcggtttttgtacaattctataacaactactgcggcgtaaacgcctacactcccgctcgaaacacgcctgctggcgcccgatccaaagccggatacaagcttagggctcgagaagatcggtacggccgtccgcatcgcaactcaggctcgggtaaccaagctgcggcgagtaactttaacttcgacgtgtgggacaattgggctcttacgcagagcaagaacaaaaacgtgcgcgtgttcctgggcgtgccggctaatacgggcgcagcaagcacggggtacctgcccattgcgagtctggagccggtaattagctacagtaaggggtttgagagtttcggaggggtcatgatgtgggatgtttcgcaggcg

SEQ ID NO: 20336 - DNA, 977 bp, Emericella nidulans
tccgtcagagctcggccatctggtaaagcagtgtccgtggatcttggtggtttgtaaatgggcgccgaaagctcttgttagggctttgctgccgggggttgcgttgttgtttcaaatacaagaggtaccttttccccttaacagtaaaattaagaggagattgatgctaacgatggatagagaatgagcgcccagattcaaccgcttgttgatcgagccgccgccgttgacaagccagctgaccctttgaccgtcttcgacttcctcctctcgagtaccctcccacagcacgaaaagacagtggaccgactcaagggcgaagggcagacgctcatcggcgcggggacattaacgaccgggaatgcattgaagacgataatcttccacgtcctcaatgatcccgacatctttcggaaacttcgagcagaggtcgacggtgctctagaaaatatggatattctgtccatgtctgatacggcctacctcgaacgcctcccgtacctgtcagcgtgcataaaggaaggtctacggatttcctacggcgtcacgcatagactccaactgatcgccgaagagcccctaatatactcaggagtgaccatcccagcaggaacaccagttggaatgacatcgatcttcatgcacgacaatccagtagtattccctcagccgcgggaattccgtccagagcgctggttcgaggcagattttgagactgtgcaggcaatgaatcgccacttcgtccccttcagcaagggcagccgcatgtgtctgggaatgaacctggcgtatgcggagatttacttggtgctggcagtactttttcgacggtatgagatttctctgagcggggtgacgagggaggatattgagatggcacatgattttttcgatcctgcgccaaaggagggggcaagaggattgatcgttcaactgcaaaagagggggtgagatcagagtaaagaattctatgatac

SEQ ID NO: 20337 - DNA, 985 bp, Emericella nidulans
gccccggcactcaggaaggcgtctttatgggccctctccagagcagcatgcagtacgaaaaggtcaaagggttctttgccgatctcacaaaggaacagctcagcctcactcacacaggcggcaaggcctttgacgacaagccgggctatttcatcaagccaacgatcatcgaccgaccagcggaggacagccgcattgcgacggaagagcagttcggtccgatcgtgcctctcctcacctggaacgatgagagcgaggtcattgcccgcgcgaacaacacccgcatgggtctcggtgcgtcggtctggtcgagtgacttggacgaagccgcgcggatcgcggccaagctacaggcaggcagtgtctgggttaacacgcactttgagagtgacccccgggcgccgtttggcggacacaaggagagcggaattggcacagagaacggtttgcatgggctgaggcagtggtgtaacttgcagactctgtacctgaagaagtgagcgtctctacctcgtggactgtaatgtgtataatgtcttgtccgtaatcatgatcaggagtaaatcctctgccaaaaaagtattgtgcatgcgcattaggcaagtaggaaactttgcaccaagggcgggtgtataagttattggataggcagacctgttggtactgagccgaggggatgcggccctggtcagccctaggttgatggtacggtctcgccgtgatctcgaggacccgggccatactcaagggaggcgttgtttttaagtgcaatgctaagacaataagttgtgcccttgcatgtgaagcaattcgatcaagactgaagatgtgatcaagagctctacactagtgaagagtctagacacaaaacaagagtacttgatatgttaattatatcaccagcatgacctcgtggataacacttttagcctactcaagtcctaactagatcattatcaacttcactcggtgctggtaccacagc

SEQ ID NO: 20338 - DNA, 988 bp, Emericella nidulans
cccggaagctccgcaggaccatcgactaaccaagccagcgaatgagtttcatccgacggcgcatgcaagaacaaggcatgtcagtcgatgaagcgcccgaggatgatgatataagatatacatacaacttcgcaccggggaacgtcggtgccatttatcgtgctgacatcccagaccacaacaagggtgccgagcctcaccccgaccaggaacagacggagtcaactgaacccgccttatcggagacagatagtagccctccagtcaattacaagcttcagggtatgaaatggagccttgtcccattctggacgaagcggctgctggattatgggacactcatgcggactatcaattgccgagatgactcgctggtcgatgatcgcggaatgtggacatctatgaagcggaagaagcgctgtgttgttgtttgtcaagggtactatgagtggctgaagaaggggcctggagggaaggataggatccgcattataccggcgcaaggacggagatttgatgtatttcgctggactctgggactgcgttacgtatgagggtgagtacaagtttggtccagggatgaattcgggttgacaaaggcaggatccgaggagaagctttatacgttcaccatcatcacgacctcagcacgtccatcgctgagctggcttcatgacagaatgccggtgatactggacccaaaaactgaggcctgggatgcttggttagatcctaaacggacgagttggtcaaaggagctgcaggcggtccttaagccttacgaaggagagttggactgctatcaggttccgaaagaggttggaaaagttgggaacaactcgccgaatttcatagtaccagtcgacagtaaagaaaataagagcaacattgcgaatttttttctgaatgcgaagagcaagaccgaactgacgaaggatgaaggcgagggagtccctgccgagaaaaaagatgatccgcgcattctgtc

SEQ ID NO: 20339 - DNA, 991 bp, Emericella nidulans
gattcagaggaggacccggcatctgaaggtccatacctgccttgagcgaggggcctacggtgtttgtggccccccagtcgctgattaccagaccattccaattccattcacggcgaaaaatatcaaacagtatctcgctggatgcattcaaagtgacatgcctcctctgcaagaagctcgcccatcccctggagaatataaatgtcccatgttgctgctaaactaacacctaacggtaaacgcagctggcacccattcaccaaagatctcaccccgagctccagatggaccatcaataaccttcaaagttagtaccaggctacgtcgtaatatcagaatggacagttgctccacgaaccttgatgttgggtattgcaagacggcttattcctccgacgaacccaacgtatccgcagattatccgggcgagatgattacagagcacgctctgagctcgaagcagaaaaaacgcacatgagagcccggttatacggctcactcgtcgttccttggaagctcaacttcctcgacccctccattgcctttaccagtttttgttgcggtcttgtatacgccatattttactcatttttcgagctctttccgctcgtctatgggtcgacttacaatatgactctgggcaaaataggcctctttttcatatcagtcatcattgctgtttgcctcgccgggataacttgcgctctggtcgcgtcgatcctcgtgccttcgggcttgttcatatttgcctggactgcgcgaccagatatccactggatcgagccaacgataggaacgatgttggtctcccggaaacgtggtgattatcatccagcgtatcgttgtctatatcacgatggcgtatcctcagtacacggcgtcgctgtttagcgggaatgggttcgtcaggtgctcggtgcattcgcgggagttttgtgccgcagccattgtactataatcttggcgtcgaatgggaaatgaaactcatgga

SEQ ID NO: 20340 - DNA, 991 bp, Emericella nidulans; identical to SEQ ID NO: 20339

SEQ ID NO: 20341 - DNA, 1000 bp, Emericella nidulans
acggtgcgtccacccacttgctctggggtcctgctgcttacatatagtagaaaaggtaattgagagaaacaaggcgtactatgccaagtttccggaagacgtctatcgggtgaaaaaggtcgtcgaccatttgaagcagaacaaggttagcgtaccatctgggacgcttattcctgaacgcatccagcaactgggaatcatgtttggcatgcatggtatggccaatccatgacctgtttaataattcagaactagccgctaacaggaagtaggtgggcttgatagcgttcatggtatttaagcctcaaagacatagacggtccctctgctgaacctaagtagatcttatattgcgcgccgccagcgatctggaggttttcggcttcctcacccatcctactctggtggctattgatagctttggcggcttcgacagcaatatcatctatgctatcctccacgagtccatctactgccaggggtattacaactctgactgccctgcatcaatatcgctaatatcgctaactgaaacagagaggcctccaactggtccgcagacagactccggtcatcgaacccagtcttcagccttgacacaaatgcaccagaagtccttttcacgggagagatggtgcgtacacatatcaaacccgttccatcaaggccaaactaaacatcaaactaaccccagacttgaatagatatacaaagacatgtttgactcttacaccgaacttaaccaagtcagagaagcagcagagatcctcgcctcaacgaccgactggcccgccctctacgacgaggcgcagctagcgaagaacgaagtccccgtgtacgcagcgacatacatagaagatatgtacgtacactacgatcactcgcaaaccaccgctgcgaagatcacaggtattaagcagttcatcacgaatgcgatgtaccataatgcgattcggagtaaatcagctgagctcttcaagcagcttattgtgctgaggga

SEQ ID NO: 20342 - DNA, 1003 bp, Emericella nidulans
ccgaaaatatatacagacgtgcccatgccgattatcatcaatcccccatcacaagccttatggatgcctcaacccaatccgtacgccggatagtctctaccagatacttaccatggactttatggtgagcttgccaactaccaacaagggaaatgaccagatcttagtagttgtcgacaaattctccaaacaaataggcttagtaccgggctcgtcgagatgggatgctgcacaatggggagaggaactgatattatttatgcagaccgccgattggggcttaccaatccgaatcatctctgatcaggatccccggtttgttgctgggttatggagagggatgtttcaagctctaggggtcttatggctctattccactgcatggcatccccaaacagatggtcagacagagcgatcaattcaggtggtcgagactgatgcgccatcagctcgtactggaaccgaagttgcagggctgttgggagcgtctactgctgcctatccaagcagcattaaacagctcaaaaaagacttcaaccgggttatcaccgcatgaattaatgtacggccaacctctccgacaaccctggaacttgctccgccggatgtcggattgaacctttgctctccgccaggatgctcaggaagctctagcctatgccgccatttgcatgaaagagcaatatgataagcattatcaacctatgcattttgaacagggcgaaaaggtcctgttacggcttcataaaggatataacatacccgccaacaagcgccttagccggaagctaggacagcagtttgccggaccttttaaagtactacaacgcgttggtaaggttgcctataagctggactttccttcgaagcttcaaatacaccccgtcgtgtcaatctcacagctcgaacctttcatggaggatccttacggacgatggcccgataagcctggcccaacgatcgatgagaactttccggatgacgatgatcgatatgaggtcga

SEQ ID NO: 20343 - DNA, 1005 bp, Emericella nidulans
aacgtccgggtggagggagcgaccatgatctcgtctaccaaagcggcgggaatcaaaacgtacccgagtggcggggatcatggcctcagcactgtgacgaacgtgacctggaaggatatcactattcaaaactgcgactacgcgatccagatccagagctgctatggcgaggacgaggagtactgcgagaccaatccgggggacgcagtgttttccggaattgcctttgaaggattcagcggcacgacaagcagtaaatatgacccagtaacaggaaaccttaactgcggggaagacggcaagtgcgatgtctccgttgttgactattctgtaaaagccccttcggggggtggtaaggtcctttgtgcgaatacgccgtctagtcttgggatcagctgctcgtctggagcgtcgggatgaggttatattgatcctgtagatggctgtctcggtgagagtgctacaaggttgagcaaagttcagggcagatcagagtatgctaatgccattcactcgatttgaatctcacccatagctgccgaaaacctcactgtcaccacctacaagaacagatgtctctgccaggcacgcagtgtctaaatgtcctcagtattgtcaatgccgtcatttcaccttacatgctcaatccacgttggaaactagaggggcaaactaagactttctgggcccggtacaggttcctttgcctgactcgggtattcttagagtggcggaatctaaaggatgcatgtacaccgagctggatgtcctattgagaagcgccttgaagcgaggaagcttacagcactcctgctgaggtgttctccgttaatcagcattatcacgaaaaggaagagcagtgaccacggcgaaaggaaaccgttggccatagagtgatgaatctgttctaagcagaacgcaggcctcgaacagtcgccatacccttctgatggggtttgaaacgcactgaattgttatatttcaggcgttaaatcatcgggtttg

SEQ ID NO: 20344 - DNA, 1011 bp, Emericella nidulans
tcgctacctgcgaggcgatgaaaatcgctgctcctgctggcttagtctataccgtccgcctactcggaactccagcagaggagtctggcggcggaaagatccgtctactggacagcggtgcatacaaaggcgtcaacgcctgtttaatggtccatcctgcggcactgccaccgggtcaagctaacctcctgagcgtagcgaagccgcccgaaggcgggttcctggcaaacgacaaagtccgcgtaaccttcaccgggaaaccagcgcatgctgccgcggcgccttgggaaggggtcaatgccctcgatgctgttgtagcagcctatgtaaacatctctcttctccggcagcagattctaccctctcagcgggtacatgggattatcgtcaatggcggggacagaccgaatatcatcccctggtcagcgagcgtggactactatatccgctccccgactttggcaacgctgaaaccactgaccgagaaggttgtgaaatgttttgaggccgcggcgactgctacggggtgtaaggtggaattccagtggtaggtgtttcgctggggtcttattcggtatcgcaatctcggactcaccgtctggtataggggtccctcatacgctgacgtcaaatccaacgagcatatctgcgagagctacgtctccgtcatgcgagccatgggccaacatgtcctcctcaatagcccccagggagcagggggcagtgcgtcgacagacatgggtacgtcacattacctacaatccagagtagcaactacctccaacaacagtttctcctaacatgacctcctgaaggaaacgtatcctacgcaatccccggcttccacgggatattcttcatttcggccaaaagcggcaaccatactccgcagtttactgatggggcgggatctcccaatgcgtatagacgagcgcttgattgtgcggccggcatggctgttaccgcttgctattttttggatgatgatgatttcgccaggcaggttgagga

SEQ ID NO: 20345 - DNA, 1012 bp, Emericella nidulans
cgggtgcagctgcttcaaaaagtgtcgaaaaccaggtgcctacaaacagcaactacattaccccttggcccatctatgctgttgactggtgcaagtggccgatttcaggaaatcctggttcctttggcggaaaaatcgctctgggaagctatctagaagaccatcataattatgtaagatttattcataatggtggttaatacgcttgtcacctatttctaaccaccgatctagatacaaatcctggacactcacctggcatatcccgaccctgatactcctgatgccagtgccggggagcttaagctggaatacgtgaaatccgctgaggccacccactcatatcctgttacacgcattctttgggaaccgccgtcgtcccagaagcaatccactgaccttctagccacttctggagatcatctccggttatggtcattaccaaactcgcagcctcaacacagctctaactctatcacacgtccgtcaggtcagagagatatgcctgcagctaaactctcgcctctggcgttgctttccaattcgaaatcgcccgagcataccgctcctattacatctctggactggaatacgatatctcccagcctgattatcacttccagcatcgacacaacttgcactatctgggatatacccacattgacggcaaagacgcagctcattgcacacgacaaggaagtgtacgacgtgcgtttctgcgccaacagcgttgacgttttcgtcagctgtggcgctgatggaagtgtgcgcatgtttgatctccggagcctggaacacagcacgatcatatacgagccgacggagaagaacgagaaatgtaagccctatacatgacaatgcttcttgatttttgacgctgagaccatgccattagtgatgagccctggcaatggaagtccctccgcaccaactaccacttggcccccgccactgctgcgcatttccggtaagccccagaactcccaaagcactttgaacactatactcataa

SEQ ID NO: 20346 - DNA, 1012 bp, Emericella nidulans
cgggcagcgagccctcatcggccgcgtctgcatggataatccagccttttgtccggactactaccgtgatgaatccgcagaggcgtctattgagcttacaaaagagacgatagcacatatccattctcttccagatagtgataaggaaagtgagagactagtcaagccgattatcacaccacgcttcgccccaacctgttccacctcagcacttacctcgctcggccagctcgctgcatcccacactccacccctgcacatccaaacacacatctccgagaacccgaacgaagtcagtctcgtccagtccttgttcccagaacacccgtcctacgccgctgtctacgacgcgtgttcccttctaacccatcgcacgatcctcgcgcacgcggtccatctcacccagcccgaaaaagaactcattgcgtcgcgaaacgccaaaatcagccactgcccggcttctaactctgcccttggatctgggttagcgccagtaagggacctgattgataatggaatcaccgtaggcctgggtacggatgtttcgggcgggtatagcccaagtatccttgaggctgtgaggcaagcttgtctcgttagtaggctgctcaggcacagcacggcatcgacgtcgtcctcgggaaatagcacccaaaacgagacagaagggagggaggtcctctccgtcgaggaggcgctgtaccttgcaacgcgcggcggggccgcagttatcgacatgcccaatgagctaggaggattcgaggtgggaatgttctgggatgtgcagcttatccgacttggagcaacagtccaggaaacgccgcagactggttctcattccgactcccgctccgttgttgatatcttcggctgggagtcctgggctgagaaggttcataagtgggtttggaccgggaatgatcggaacgtgaggcgggtatgggtggggggtgcggttgttcatgatcttgatgatggtagctgcgttggtgaggagaccatgcttggacgc

SEQ ID NO: 20347 - DNA, 1014 bp, Emericella nidulans
ccctcaaatatacaagtatcgcggctctggtttcaatggcctatttggtgattctggtcgtttaccatttcatcattggggacacaaaagagggccggggtccgatccgtgtcattcgctgggcaggtgctgttccgacactcagcagcttcccggtgatcgtattcgcttttacgtgccatcagaatgtgtgtctcctcttggctggtggaaattgacgtgctaacccgtgcagatgttttctatcctcaacgagattagcaacaacagccactttagaacgacagcagtcgtgctcgccagtattggaagctcagctaccacctatattctcgttgctattacgggttacctgtcatttggcaacagcgtgggcggaaatatcgttggcatgtaccgccaggcgtatgggctacaattggacgtgccgctattgtcatactcgtcatgttctcctaccctctccaatgccacccttgcagggcatcagtcgatgcagtcctgcattggagacccaaacgcttcacgcgttctcgaagcgaaggctcccctcaccgccaccctctacttgccgctggtccccgaggctctcgaacaccagaaccaatgagtgaccttcgattctctgtaatcacgacgtcgatcctcattctgagctacattgtcgcgatgagcgtctcctcactcgaagccgtccttgcctatgtcggcagtaccggaagcacaagcatcagctttatcctcccgggcatgttctactacaagatctcagctccagactcagcagcgcaccagcgtctcatgaaagaagacgatgaggctgaagacggttacatctccggtgcaagcgaggaagacggcattcaatctcgttcactcactgagagcgggattctgcgccgacacacgcgcaactggcgcagggctctactcagaaaactgagtctagggcttgccatctacggggtcattgtcatgattacctgtcttgtcacgaattccgtcttccttgca

SEQ ID NO: 20348 - DNA, 1015 bp, Emericella nidulans
cctttcaaacataacggcatccagggagtcatcatctcggccggcgctttccaatatccccagctccttatggtctctggtattggacctgcggagcagctggcgaaacatgggattgaggttatatctgacttgcaagtcggacaaaatatgtgggatcaccccttctttgcgctgagctaccgggtaaatgtagaaacgcttaccagggccgccaacgacctcctctacctcggtaccaccttcctcgactatacgacgaagcatacggggcccttgacgaatcctgttgctgatttcattgcgtttgagaagattccttcgtctcaccgtacggctttctcggctgagacagagaagcatcttgcgggattcccggaggattggcctgaggttgaggtatgtggctgcatgaccaccctacaatcacatttacatcgaaccaagactgaagccatccagtacatgtccggcgcagggtacgttggatcattcactgggctcatgagcacccagccaaaggacggctaccagtacggctccatcctcggtatcctgatcacacctacctcaggcggtaatatcaccctcacttcagcagatacttccgaccccccgtcattaatcctaactggctagcaacggaagcggatcaagaggccgcaatcgccatcttcaagtgcatccgtgacatcttcgccagtgacgggatggctcccgtgattctaggcgacgagtattatccgggtaatgggacgcaagctgatgcggagatccttcggttcatccagaagaatgttatgacactttggcatccatcttgtacgaataagatggggacgaaggatgatccgtctgccgttcttgatagtaaggcgagggtgtttggggtcggggggcttagggttgcgaatgcgagttcatttccgtttctgccgccagggcacccgcagagtacagtttgtgagttaccttgccgttgtcttttggtatcggctcgggatgctgaggattg

SEQ ID NO: 20349 - DNA, 1015 bp, Emericella nidulans
gctcctgcatctgcaacctatgcagctcgatatctctctgatgcgcactgaacgagtgaacgtagaggatactttgcagccttccaatcccttgatgtttattgtcgatgtgatgacaatgtcaatgggcaatgtcaatgatgcgcctattaagctgaacgccctaatgatagagaatgcccgcgtctctttccctgtcctcgccagcaacatccgaagacactatacccaggaatttcttcgtcagattcacgttgtactcggctcagcggactttttgggcaatccagttggcttgttcaataacgtcagctctggcgtggctgcgatcttctatgaaccataccagggccttgtcatgacggatcggcctcaggagctaggctatggtatcgctaaaggctttggcagcttcgcgaagaatactgtttttggtttctcggacagcatctcaaagctgacgggtagcatgtctaaaggtctggcagctgcaacacttgacaaggaattccaggaccagcgacggatgtcaaagacccgcaaccggccgaagcatgcgttgtatggtatcacggctggaggtagagcctttggaaacagcatcgtcagtggtatcgagggcattgcgcggcatccactccatggcgcggagaaagaaggtatccaaggattcttcaagggcgtagggaaaggtttcctcggcttggcaaccaaaccagctatcggcgcctttgatctcgcttccagtgggtctatcttattgttattgttaaagggggaacatattactgactatcttttagatcttgctgaaggtgtaaaaaacaccacaacggtgttcgatgccgaagtctcgaccgcgtccggcttactcgctttgttggcatggacggcattgttcgaccatactctcagcgggaggccctcggcgagttctggcttaagacagctgatgacggaaagtacttcaacgaggattacattgccaccttgagcttccagggcgcgacatgct

SEQ ID NO: 20350 - DNA, 1016 bp, Emericella nidulans
cagggaccgggaagggcaacaactatgcctacctggtgacggacgagccgacgaagcagtcggtcatcatcgatcctgctaacccgcctgagtagaatgctctctccacatatgggatgaaatgaacagctgctgattgatcgatgcgaacagggtcgtcccagaactcgaggcccaaacaaaagcaggaaagattaatctcacggctattgtaaacacgcaccagtgcgtactcaatctcgattagatctggtcatttgattatacttacataccaatagccactgggatcatgcaggtggtaacaacgaggttttgaagacctttaaggtgcccgttattggcggaaaagactgtcagtccgtcacgaagactccagctcatggcgaggtctttaagatcggagaccggatctccgtgacggcgttgcatacgccttgccatacgcaggatagcatttgctattttatgcaggatggcgagcagaaagctgttttcacaggggatacacttttcattggcggtatggtttgcttgtcttctgttctccttgactcaacagactgagtggattaatgctgaatcctctgctgctgcaggatgcgggcggttcttcgagggtacggcgccggagatgcacaaggcgctgaatgagactctggcctcgcttccagaggatacgaaggtctatgtaagcgttcactctctcgtataaggcgcacactgatcatgaatatttagcctggacacgagtacaccaaaggcaacgtgaagttttgcctcgctgtgtcacagtccgaacccgtcaagaagctgcaagcatttgcggaggcaaaccaacagacgcagggcatgttcacaattggcgatgagaagcttcataatgtctttatgcgagtcacggcaagtcatcccaccacaaccagtagacctaaagcttatggcagcaggaccccgagattcagaagaaaacaggcaagaccgatcccgtcgaggtcatggctgctctgcgcgag

SEQ ID NO: 20351 - DNA, 1018 bp, Emericella nidulans
ctcgccgctgcccgctctattcgagacgtcctgcgccctgatgactacgtcattgtcgttgagcacgacttgtctgttctcgactacctttctgatttcatttgcgtgctgtacggtaagcctgcagtttacggtgtcgtgacattgccgtcctcggtgcgtgaaggtatcaacatcttcttggacggccacattccaaccgagaatcttcggttccgagaggaatccctcactttccgtctcgcggaagccggtgacgatttcgtgattgacaaggcgcgtgcgttcaggtacccaaccatggagaagacccttgggaacttccacctgaaaattgacgccggtgatttcaccgattcggaaattattgtaatgatgggagagaacggaaccggaaagactaccttctgcaaaatgcttgctggtgccgagaagcctgacggcaacgtttcaattccccgcatgaacatcagcatgaagccccagaagattacccccaagttccagggaaccgtccgtcagctcttcttcaagaaaattaaggccgcgttcctgtcgccccaattccagactgatgtctacaaacctctcaagatagatgacttcattgaccaggaagttcagaatttgtctggtggtgaattgcagcgtgtcgccattgtgttagcccttggaatgcccgccgatatttacctcatcgacgagcctagtgcttatctcgattccgagcagcgtatcgttgccgccaaggtcatcaagcgtttcatcatgcacaccaaaaagactgccttcatcgtcgagcacgatttcatcatggctacctaccttgctgaccgtgtcattgtgtttgatggtaagccgtctgttgacgcgcacgcaaacgctcctgaatctcttgtcaccggttgcaatagcttcttgaggagtcttgacgtgacattccgtcgtgaccccaacacgtaccgcccacgtatcaacaagtacaacagtcagatggaccaggagcagaagctgagcg

SEQ ID NO: 20352 - DNA, 1019 bp, Emericella nidulans
tgaccaacagctgcgctttcttgatggactacagccatcccaaaatctctggggacacctactacgcaacgctcgaggggaggtttgaaccaaccgaaagtggtgtatatgaattaggactcaccgtggccggcacaggattgctgtatattgacggtgaactggtcatagataacaagaccaagcaacgacatggcacatccttctttggtattggaacagtggaggagcggggagagagatacctcgaggccggaaggcaacatcacgtctttgttgagtacagcacggccccgacttctaacttgaaacatcacggtgtagtctcgtttggtccgggtggcgtacggctcggcgggtgccgaaagctagacgccgaaactgctatcaagcaggcagtacagctagcagcagagacagagcaggtcgttgtgtgcgtggggatgaatggtaactgggagagtgagggctttgaccgaccccatatggaccttcccccggggacagataatctcgttagggctgtgatagaggctcagccaaatgcggttattgtcgtgcagagtggtaccccagtcacgatgccctgggccgatcaagcaaaggccctagtccaggcctggtatggaggcagcgaggggggcaatggcattgccgatgttctctttggtgacgtgaatcctgtaagtgaaccgcagctttggggaatcatcaaactatctttccttaactgaccagcgatgcacaactagtccgccaaactccccctcaccttcccccgtgatatcgcgcacaacccttcgtatctaagctaccgctcggagcgtggaagggtcctttatagtgaggacgtctacgtgggataccgttactacgataaggtcaaacaagcgccgctcttccactttggccacgggctttcatatacaactttcaaactgtccggtctcaatgtgcaagagacagaccctcaggcatcagatatcagtaagtcatccatgagcgtcagggcttgggtg

SEQ ID NO: 20353 - DNA, 1024 bp, Emericella nidulans
ccgagtgcttttggggcttgggcaattgagttttgagggcgagctcattggagatgagctgcaagagtgaggatcctagacatgacatcatgccacttattactgacaggattagggaccatgagatactccaactgtactcacatctcctacggctgtctccgaaagaaaagaccacgcgtctccttcttgcaactctccggaatctcctttctttcaaccgcactaccctcttgcctgtcgctgtattcgtgcgcctacctgctcttctctcaaccatctcgggtcggcacctgacagacccggacctcctggaggacctcaaatacttgtcggaaatgctcgatgaatacacaaagacacaaaccacttttgatcagtacgccgcagagcttcaatccggccatctacggtggtccccgcctcataggaatcccacattctggaaggagaatgcccgccgaatcctggatgagaacagcggagcgcttcctaagaagctcaaggagataatctctaagagctgggaaaacgacaagcaggtccttgccattgcttgcaacgatgtgggacatttggttaaggaactacccgaaaggcgggggcagctggagaaactaggtttcaagacacgggtgatggaactgatggccgacaaagatgagtcggtgcgatgggagagcttgcgggcggtgggggagtggctccgttatacctttgatgattgaattgtacatcctcttcctgtcgcatgtcggataggaagtaaaccaccactgctttccctttttcttcttacaacttgtaaacattcgaagcgtgtcgcctcttcagtgtacggaggatttacgtgtgtatagcttcatagagcttcaagcaattgaaacctcgacttgagctctgaattattcagcactccgtataaatgcgctctgacaatgcacacaacacgccaagccagccattttgaaccgaattaattgagttaaaaaaaggagaccccagagacgcctagcagcagcga

SEQ ID NO: 20354 - DNA, 1031 bp, Emericella nidulans
caacacacactcaacgttggcgaagttaattgtgaggtcgaacgcagactttgcaaagatgcccgtgttactgcattccccaccatgtatttcttccgcggaacagagagagtggagtacaacggtcttcgaggtctcggcgacctagtcagtacgccaatagagctgttgagattcggaacggcattcaggatgtcgatgccgagtctttcaaggctctggaagaaacagaagatgtgattttcttgtacttttatgaccatgcaacagtgtctgaagatttcgaggccctggaacgtctcgcccttccgctcatcggtcacgcgaaattggtgaaaacagacagtgctgctctcgctgaaagattcagaatttccacgtggccacgccttctcgtctctcgaagtgggcgtgcgaactattacaatcctatcgcccctagagatatgagagatatccggcaaattctcaattggatgcagaccgtttggctccccattgtccccgaacttacggcgtctaatgcccgcgagcttatggatggcaagtttgtggtactcggtattctaagtcgcagtcgtgcaaacgagtttgtcgaagcgaagcgggagctgaagaatgcggcgcttgagtggatggataaacaagtgcagctgttccagttggaacgacaagagctacgggatgctaaacagctacggattgaagaggcagaggatcgcaatgatcagcgagcgttgcgtgcagccaagaatatgcacgtctccattcgcgaggacgataagaagcaagtgaggtttgcctgggttgatggtgatttctgggaacgctggttgagaactacctatggcatcgatgtgagcaaaggcgagcgtgtcattattaacgaccaagacaaccgccgttactgggatactgcttccagtggtgcttccataatggcttcgcgaacctccattcttgaaaccatccctctcgtcattgccaaccctcccaagctgacgcctaagtctactatcggcacttttgag

SEQ ID NO: 20355 - DNA, 1032 bp, Emericella nidulans
tggtgcttttggcgcgttcatggtctaccccattgaccttgtcaagacgcgtatgcagaaccagcgatccagccgtgttggtgagagactgtacaataactcgattgactgcgcgcgcaaggtcatccggaacgagggtttcaccggtctgtactcgggtgttattcctcagctgatcggtgttgctccggagaaggcgatcaagctcaccgtcaacgatctcgtccgtggatatttcgctggcaagcagaacggcaagctcaagacctggcaggaggttctcgctggtggttccgcgggcgcttgccaagttgtacgtatacattccttatgcttccagacttaagcgtactaactgtatccataggtcttcactaacccccttgagatcgtcaagattcgccttcaagtccaaggtgaaattgcgaaaaacgccggcgtggaaggtgctgcgcctcgccgctccgccctctggattgtcaggaacctcggtctcgtcggcctttacaagggcgccagtgcctgtctcctccgtgacgtccccttctccgccatctactttcccacctactcgcatctgaaatccgacttcttcggcgagtcccgcacacacaagctcggcgtggtgcagctgctaactgctggcgctattgctggtatgcccgccgcgtacctgacgacaccctgtgacgtaatcaagacccggctgcaggtcgaagcgcgcaagggcgaaaaggcatacaccggtctccgccatgccgctgtcacaatatttagggacgagggtttcaaggcgttcttcaagggcggaccatctcgtatcttgcgttcgtcgccgcaatttggcttcacgctcgctgcgtacgaggttctgcagaagtggctgcctatgccggggtctgaacatgatgtttcaccgacgggtcaggtggagcctggtgtgggcgttccagttgccaaggagccgctgccttatctgaggagcagaaatgcgctcaagcttattctggatctcgacgagaatattggccg

SEQ ID NO: 20356 - DNA, 1032 bp, Emericella nidulans
tggttgatcggtgcgagcagtgattagctgggtggatgcggaaatcaaatcgccgctgaacgaaggcaaagctgcgtccgagccctggcgtagacgtggatatgtctgcggtgtaccttggcccaaattccgcaaggccgtggaggactaccgtaaatggcttattgtggacagtggtggcgtacatgagatcaaacgacagcttgtgtttggccataacgacgtaggttctgaaacgggtcgtagcttaccatcgttgctaacgaacttcttgtagacacagtatggcaacttgctgcgtatggagcctagccagcagtctccccttctcctcccgcagaacgagcataaacaattggtcgtcatcgactttgagtatgcctcagcgaatactcccggtttagagttcgccaaccattttgtgagtcaaagcaacatgatcaaaattcgatctcactaactctttccatagactgagtggtgctacaactaccacgatgccgagaagccgtgggcatgcaataaccagctgtacccgacaccagagcaacagcaccaattcgtcaccgcatacctgacacacaggccagggctaggcagccgcgtctccccttcgataacacccataatgcgccccctttccgcaagcacgcccacaatgacaccgctggacctcaacgcaaccagccccgaccttgcaccccagcggccgccagataacatcgagcgcagtgcacaggacactctagaagcggagacccagttcctcatccgccaaacacgactttggcgcgttctcaactcagcgcagtgggtggcttggggtatcgttcaggccaaggtccccggaatggaagacgacggaagctcgactcctacgccgccagtagacagcgatgtcgacgagtcagatgagtttgattatctcgcgtacgcgcaggaccgagctttcttcttctgggcggatctagtcgctctaggatttgtgcagaaggaacagcttccagagtcgttggctgaggttgttgacgg

SEQ ID NO: 20357 - DNA, 1037 bp, Emericella nidulans
tcacccgcatgggtttcaagcgcatcgcctaccgcggcctggagacaaactcccgcgccatctgctcccacgtcattcgtaacggcgacattacatttgtactcacttcgcccctccgctcgctagaccaaatatcccggttcacacctgaagagcaagacctcctgagagagatccaccaccatctcgagcagcacggggacgcggtcaaggacgttgcgtttgaggtcgactctgtcgatgcggtgttcaatgcagcggtggcgaacggagccaaggttgtgaaaggcttgacaacagtggaggatgagaatgggaaagtgacgatggcaacaatccaaacgtacgggcagactacacatacgcttattgaacgaggcgcgtatagaggaactttcttgcccgggtacagagtcgaaacaagcctcgaagacccgatttcggctttgttaccgggtgtcctgttgaaccgaattgaccactgcgttggtaaccaggattggaatgagatggataagatttgtgaatagtatgtcctctccctgactaaaaaaaatatgtacagaggctaatgagagcagctacgaaaaagctcttggattccaccgattctggtccgttgacgataagcagatctgcacgtaagtcacctttaaggcaaatgtcacagccacgatgctaattcgcagcagcgagttttccgccctaaagagtattgtcatggcctcccccaatgatatcgtcaaaatgcccatcaatgagcccgccaaaggcaaaaagcaatcacagattgaagagtatgtcgatttttacaacggcgccggagtacagcacattgccctcctaacagacgacatcatccgcgacatcacgaatcttaaggcgcgcggcgtggagtttatcaaggtccctgatacatattatgaggacatcaagattagactgaagaaggctggattaactctacatgaggactttgagacaatccgggctttggatatcttgattgatttcgacgagaatgggtatttgttgca

SEQ ID NO: 20358 - DNA, 1039 bp, Emericella nidulans
tttcctcgatattgacctcaagtactacgacctggtatgtcttgaatgcttgtctcccattttcagtgcactgatcttgctttagggtcttgagtaccgtgaccagaccgatgacaaggtcaccaccgagtccgctgaggccatcaagaagtatggtgtcggtgtcaagtgcgccaccatcactcctgatgaggcccgtgttgaggagttcaagctgaagaagagtaagcattatatgctcactgcgcggaagagctgactgacaaaacaaccctagtgtggctgtctcctaacggtactatccgtaacatcctgtatgtcacctttaccttttgaaatcccttgctattgcagtgtgctgataccatcaagtggcggtactgtcttccgtgagcccattgtcattcctcgcattcctcgcctcgtccccggatggactaagcccatcatcatcggtcgtcatgctttcggtgaccagtaccgtgctaccgaccgtgtgatccctgggcctggcaagcttgagctcgtctacacccccgagggcggccagcctgaggctatcaaggtctttgatttccctggcggtggtgttacccagactcagtacaacaccgatgagtcgattcgcggcttcgccacgccagtttcaagcttgccttgactaagggccttcctctctacatgagcaccaagaacactattctgaagaagtacgatggccgcttcaaggacatcttccaagagatcttcgagtccgactacaagaaggaatttgatgccaagggcatctggtacgagcaccgtctcattgatgacatggtcgctcaaatgatcaagagcgagggtggtttcatcatggctttgaagagtgagtgcatctaaaacagttgatgctgtcgtcgactaacccctttagactacgatggtgacgttcagtccgacattgttgcccagggcttcggctccctgggtctgatgacctccacactcatcacccctgacggccaggcctttgagtctgaagctgcccacggaccgt

SEQ ID NO: 20359 - DNA, 1049 bp, Emericella nidulans
gccctggggagagcgcctattatttagcggtatgccagattcagtgggaatggttatcgttgcacgccattaacccgtaagcaggtcaaccggaacaagaagtcgattggtctctcgttcgcccacaagtccggcgtcgatattctccacaaactcgtcaaggagtgcgatgtcctagtagagaattatctccctggaagcctcaagaagtataacatggactatgagaccttacgggaaatcaatccgagcctgatctacgcgagtattacagggtacggccagaccgggccatacagcaaccgcgctgggtacgatgtgatggtggaagctgagatgggattgatgcacatcactggaagcagaggaggtgaccccgtcaaggtcggagtggccgtcacagatttgacaacggggctatacacatccaatgccatcatggctgctttgcttgcccgagtaagaacagggaagggacaacacattgacgcatgtctcagcgattgccaagttgcaacattatccaacattgcgagttctgctctgatcagtggacagaaggattcaggacggtggggtactgagcatcgtatgtgccgaatccattgccatgttcggttctcaggcacgctgacgtttttcaagcatccattgttccgtaccggagttaccaaaccctcgacggggatattctctttggcggcggtaacgacagacttttcggtgtcctgtgcgatcggctagggcaccccgagtggaaggaggacccccgatttctaaccaacagagaccgcgtaaagcaccgagccgtgatcgacggcttgatcgaagactgtgtcaagcaaaagaccacgcaacagtggttggagatcatggaaggcagtggaatgccctatgcagctgtcaatgacattcaggggacgttgaaccacgagcacggtaagtctcctagaagaagtcttgtcaacctattttcctaacaaaatcactgcacagtccgagcccgcggaatggtcaccgagattgatcatccagcatgtgggcctgtc

SEQ ID NO: 20360 - DNA, 1049 bp, Emericella nidulans
cccccgtctcacgcggaataagatcattgactccaaaattgagtcgacaattcagccactcaccagctgcggcgacgaacgagtcgagcaaaaagcgactgtattgctgcaactctggtcgactctggaaattggctatcgaattccacggatgaagcgggatcccaatgccgctactccgactgtcagccagtttcatcgacgagatgatatctcagatgagcggcagcaacgccctagatcacggtcacggtcgaggtcaattgaagctcctcgagggccagcagcgcagaaacgaggcggccagggcccaagaaatcaacaccatcagggtcctcgaacgttccgacggcggttcgaccctctcccacagggctggtttgcggccgagtccaatggccgaacatattactattcagctcgaggagacactacctggacgcggcccacgaagccagcgccgcagccgccgccaccgccgaaagagtcgagggacaaagcacttcagagtattattgacggtatcatgaacgcaaaggaacagacgcccaaggagaagagcggcacgcctaccactccgcaaccgtctaagcccacgccggagggcaaggacaggcaagaaaagtggaggagctacagcgaagagaaacagaagaagctctacgaaaacacggtaagctccttccatgaaaggtgtggttctaaattctgacgcgtatagctgtatccccacataaaatacgtcgttgacaagttcaaacacaagcttccgaaagacgaccttaagcgatacgcgaaagacgtgggtttctctatttccagttatcatacggtcactaacctgcgcataggtagcaaaaaagctagtcaattcggattttaagaacaaccgggtcacagatcctactaagatcgacgacaaacagcagaagaaggttaagaaattctgcaaagaattctttgacaaagcggttgcgaagcaccaggctcacgagaagcgaaaagcggagaaactggccaaagaaggtagctcagataacaagctggcg

SEQ ID NO: 20361 - DNA, 1056 bp, Emericella nidulans
ttccacttctacgtctgcttcagtgaggtcattttcggcgcgcaggcgcaggcagcgtcttctcgtatgcgcccggcatgtccaaggcaaaacacgccgcgggcgagctgaaagcactgtacagccgcaagcccaagatccacggccacaacgtgatgcgcgggcgctggtctggcgttgcggccagcgctgcgatgcgcaacgtcctccccctacctccccgatcgctgcaggggtcgatcgagttccgcaatgtgtacttccggtatcccacgcggatgacggtccccgtgctatcggggctcagcttctcgatccggccaggccagtttgtcgcgtttgtgggcgcaagcgggtgcggcaaatcgacgacgatcgccctcctggagcgcttctacaacccgctgccaggcagcggcgggatctacgtcgacggacgggatatcagcagtctggacctgcagagctaccggcggcagctggcgtttgtcgggcaggagccggcgctgttccaggggacgatcaaggagaatatcctgctggggatggaggagggggaggtcgatgacggccagatcatcgctgcgtgcaaagacgcgaacatctacgacttcatcatttcactcccgtgcgttcagtccctgcttctctccactctcctatactcacattgtgacaccggctgacatgcgagcaggcagggcttcaacaccgaagtcggcagcaagggcgggatgttgtctgggggccaaaaacagcgcatcgccattgcgcgcgcgctgctgcgcgagccccggatcctgctgctggacgaggcgacctcggcgctggacagcgagagcgagcaagtggtgcaggcggcgctggacacggccgcgaggggccgcacgacggtggcggtggcccaccgtctgagcacgatccagcgcgcagacgtgatctacgtgctggcgaacgggcgcattgctgaggaggggacgcacgccgagctgctgcggaggagggggcactactacgacctggtgaacctgcagagtctggcatagcctgagcgca

SEQ ID NO: 20362 - DNA, 1059 bp, Emericella nidulans
gtcctacatcgcatgaacacaactctcgacgatatactcgcgcagaccaaagatcttatcgccctcaagcctgagccattggcgcagtttatcaacacgaagctcaccgcaaaacttaatagacagctggaggagcctttgattgttgcaagcagctgtctgcctgattggagcgaagaccttgcgcgatccttcgcctttttgttccctttcgagacccggcatctattccttcaatctaccgcctttggatattcgcgggccatgatgcgatggaacaactctcagggagatgatagtcgtcatgatcagcggcgagatgatcggccaatgctgggtcgtttgcagcgacaaaaagtacggatctcaagaagtcgtattctcgagtcagccatgaaagtcatggaactttacggctcctctcccagtgtgcttgaggttgaatattttgaagaagttggaaccggcttaggtcccactcttgagttctattcgacggtctccaaggagttttcgaagaagaaactaaagatgtggcgggaaaacgactgcggtgattccgaagaatacgcgtttggtactcggggtctgttccctgcaccgctgagcgaagaacagctcgcgtcagaatttggcaaaaagcagttgcagttgttcaaaacccttgggaaatttgtcgctcgctcaatgttggattcgaggatcatagacatctcgttcaatcccgccttcttccgtatcgccgacacctcttccccagtagccccttcactcggtacagttaaagcagtggatcaagatttggccaaatctctactgttgctgaaacgcttcgctaatgccaaaaaggccttggaggcaaagaacctccctaaggccaagaagacgcaggctctgatggcgattgaggtcgatggagtccatgtcgaggactagagcctggatttcacacttcctggatatactgcaattgagctcatcaagaatggctcgaatataccgattacgattgaaaatgtcaacgcgtatgtcgacagagttgaggacatgaccttgggc

SEQ ID NO: 20363 - DNA, 1064 bp, Emericella nidulans
ggtcaaggcaatgttgcattggatgtagctaggatactactgtccggagtggatcgtctccgccagactgacatcgccgattacgccttggagacgctgtccagcagcaaaatcaagagggtccgggtagtaggccgcagaggcccgttgcaggtacgtcagtcccttggccgtacattacttttctaaccccgataggcgtcgtttactattaaagaggttcgagaactgctacagctcccctctgtatcatttgaccccattcctcgtgatcttcttcccccagaagacgtcatttcagccctcccaagggcgcagaaacgactgatccagctactctccaaaggatctaccaatgaccctaccacaaccaccaagtcgtggtctcttgacttcctcctctcgccagagtgtctcaactggtctcctgtcttcccttaccgcctgtctcatgtgcgttcgcccgcaacgaactcgaccccgcggatccgttctccgcaagcgccaaggttaggcccaagcacctttccgacggcaagccggccaaagtcaacattcccgcgaacacgttctttcgcagcgtcggctacaaaggtcttcccttgcctggactagaagaccttggagtgccattcgatgagagccgcggagtaattcccaacgacggctttggccgggtcactgtgcctctggcgtcagaggccgggactcatgatacactcccaaatgggtccctgatttcgcatctgccggggctatactgtgccgggtgggtcaagcggggaccgacgggtgtgattgccacaacaatgacagacgcgttcagcacggcggacgcgatcgcagcggatgtggcacagcatggtaacactctgctcaacccatcgaacgaaaggaccggcctcggatgggagggcgtccgtgccgaggcagagcagcgtggtgtaagagcaacgacctgggaagactgggagcgaattgaccgtgcggagcgcgagcgtggatcgctcaagagcaagccacgggagaagtttggacgagtagaggagatgctggcggctctg

SEQ ID NO: 20364 - DNA, 1066 bp, Emericella nidulans
gaccatgtctctctgacactccttcaagttctacgggacacagcatccctgctgttggcctaggtacctgggtatgcggaccagccagctataccttgaacaagtactgttaacatagctctctcagccccatggaattgaaaaaggggttgaggctgctctgcgcgctgaataccgtcacattgacgatgccacctgctatctgaatgagaacagagttctgaatagatggaggacgccccgtgtaccttgagacaagagttcgttggtggtcaccttggttacctttcaaacagcagtcaggagctgagcctgcctgaaatcacaaggttctggaattcgcagcatcaccctgaccacatcggagaggcgcttgacaaaacactgcagggcttgcagagggaatatcttgactaatgtctggtacgcttgacactcaggactccctgaccgctcgctgatgggcttcgagatttactgggccgcgctttcgagcgtatgtgaactcttaagctgatggagtctattataaagtggtcttgtttggccaatatctcgatgatgacatctggatagcgctagagagagtcgtctactcgagcaaagtcaacagcattggcgtcacgaatcatacaatcgaggaacccgagaagctactgagtatgcggagatacctatcgcagtgaacaaaattccaagcttttccatagctccagcaacaaacttacgcagtggttagagggcaagaagattttacggttgcctatagaccgctagatataacatctagcatgtacctcggtaactctctttttcgttgggggacttcgacaggtttagatagctatcgccgctattgatcatatgacggagagttcgctgatcctatcgtgcaggtaatcgctgctgggctcaataaagacccaggaattgcccgatcccgtgggcaatgcagcatattacagacgttattgccaaagggtgtcacatcatcccgcattgagggcaactttcaatgtacatatcgtttttcagtgccgtattgaaacagtgaactaatgtcgcc

SEQ ID NO: 20365 - DNA, 1067 bp, Emericella nidulans
tcccacgcctgggattctcgtcctccgtcatggccaaccctccttcgtggtatcaatttctggggccgagatcaccgtcaggtttacctcttcggaaacccattcgtctggtactcttccactttggcagttttggtttacgtgattttcaaggggatttcccttctacgctggcagcgtaactgtggtgactaccgtaatcccgcattcaaaagatttgactacgaaattggtacctcagtacttggctggggtttccactacttcccattctaccttatggcccgccagctcttcttacaccactatttccccgctctctattttgctattcttgcgctggcccaagagtttgacttcatcacgaaccgtatccgcagcttgggtctgccctctcgacctgttatcgggaaagctttggctggtgtgttcttaggactcaccatttttgccttcaccgtttactctccattgatctatgggaatccgtggactagggacgcctgcaagcaagttaagcttctgaaatcatgggactttgactgcaacactttttacaccgacgtaagcactccgattcccggtctcaatgaataatttctacgatgttgactaacgattgcataagttgaatcaatacgtgactcatttcagcagtgtgaactccgctgttccaacaacggcggcatctattccccagtcgcctgcacctgtcaaggccgagccgaagcaggaacagaaggaacaaaaggaagccaaggtggagagtcaggaaccaagcatcacatccagcagcattccaaaaattcgaggaacgcaagcgcgagtggaatatcgtgatcagcagggtaacatccttgatgaggccgtagtggattcgttacgaaaggagggcaagatatcgattgagacgagacatgagactcggactcgcctggagcatggtcatctggtggatgttgtcgatggcaaggttcgtccgcctcacccggatgttgaaggccaaaaccccgaaactcaggacaagccggaggagattgtggatgatagcccagcctccgcagctg

SEQ ID NO: 20366 - DNA, 1069 bp, Emericella nidulans
cagacatggcttctgcgatagtcaccggtgccacaggtacttttagctctcttctttcctaagcttcgctaactgtctaggcatcaccggtagtgccattgtgcaccatctccagaaagacgcttcgtataagaaaatctacgccctctctaggagtgacccaggctacaaagaccccaagctccaacatgccgcaatcgatctccaaggctccgcagacgatatggcaaagaccctctcgggaatatctgccgaatacgtttatttctgcgcatacatggcgcacgacgacccagcagaattatgccgtatcaatgggactatgatctcaaactttattcaagcactggagaagacaggcgccatcagcaagctcaagcggtttattctgacttgcggctttaagcagtatagcgtgcatctcggcaacgccaaacagccatttcacgaagaagaccctgtcctagagggcgaggttggcggcgaaacgtggccgccaaacttttacttcacccagcagcgcatcctcgccgaagccgcagcccgcagtgaaggtcaatgggactgggtcgtcactcttccgcaagacgtcctgggtttcgcccgcggaaacttcatgaacgaagcaaccgcagtggggctgtattgtacagtctccaaggtcttacctggctctgagcttccttttccaggatgcaaggcaggatactttgcattcaatacgtggacatccgcaaacctgcatgcgaaattctgcctctgggctgcaacagccaaaggcgcgggaaacaacatattcaacgtcataaacggcgacacggagtcgtggcaggacctctggccgcgcctcgctaggccgttcggctgcaagatccccaatcccatgttccctcacggagggacagcagatacgaaaggatacaagaattacgaatcatccacagttcgtatgccaaataagcatcctctaagcacccgcgtctcggacctgggcgtctcctcagacccctcgaaggaggaacccccgactctcttctgccagatcaaccctgagaaatgggctgcgcgg

SEQ ID NO: 20367 - DNA, 1071 bp, Emericella nidulans
cgccggagtcggataacatccagttaaaaccagtactattacagaagggtcgaactaagttggcgctctacggaatgagcaatgtgcgagatgagcgattattcaggacttttcgagacggaaaagtcaagttcttcagaccctctgttcagaaggaggactggtataacttaatatgcgttcatcaaaaccaccatgcgtatacggagaccgggtatctacctgaaaacttcctcccagaatttcttgaccttgtcatctggggtcatgaacatgagtgtttgatcaaccctcgtattaacccagaaatgaagtttcgcgtgatgcagccgggctcttctgtcgcgacttcgctggttcccggtgaggcagtaccgaaacatgttgccatattgagcatcaagggcaaagagatgaaatgtaagccaatcagactcaagtcagtacgtccatttgcaatgcgggagatagtgctttctgaagaaagaggtgcccagaaattggcccgcaaagagaacaaccgcacagaagtcacccgtttcctcatgacgatcgtagaagaactgatcgaagaggccaaagcggagtggctggagctacaccgtccccagaggagagagggcgaagaggaagaagaagacgacgaagagctggaggttcccctgccgctcgtaagactccgtgtggagacctcaacccccgagggtggcagctatgactgcgaaaatccccagcggttctcgaaccgattcgtcggcaaagtcgcgaacgtgaacgatgtcgtgcagttctaccggaagaagaaaaccgctacatcacggaagaaagaaaatgagctcgatgaagcagcgctttcgcgcctgtccaccctagacacagtgcaagtcgaacaactcgtgcgtgagttcctctctcagcaatctctctccatccttccgcaaaactctttcggcgacgccgtttcccaattcatcgacaaggacgacaaacacgccatggagatgtttgtgaatgagtctcttgagggccagataaagcaccttctctcgcttgaccgcgacagtgacgctg

SEQ ID NO: 20368 - DNA, 1074 bp, Emericella nidulans
cgagcccatcgctaccgtgacgacgatcctgattccccacaatgccgactacaccaaggttctctcataccaggtcgcccaggatgcggcggatcccaactgctctccatcgttcgcgatccagcagttctccgacgcaggcgagctctcgccctcgtcatgccgcagcttgagtacctcttcatgagctcagccctgaacaaagggttcgttgtcatcgtccctgaccacctcgggccccgctctgcgtttttggcgaacaccctctccggtcaagccgtgctcgacaacgtccgcgccgcgcttgcctctaccgacatcactggtatttcatcccaggccactgtcgctctctggggctactctgggggtagcttagcaagcgggttcgcagctgagctgcagccctcgtatgcgcctgagctgaagatcgccggcgccgcactcggcgggacagttcctcaaatcccacctgtcatcagagcctcgaacaaaggcatcttcactggactcatcccagccggtatccagggccttgcaaacgaatatccggccgcccagcaactcattcgcgatgccattctccccgacaaatgggccgaattcaacaagactcaggagctttgcttgactggtaacctcatcgaatatctcggcaaggacatctacacctatgtcaacgaccccaacgtcttcgagtcccctcttgcgaactccctcactgagcccaacgcgatgggacacaacacgcccaaaatcccaatccttatctacaaaggcgttaacgatcagatcagcccggtgaaagacaccgatgccttgtatgacacttactgcagcaacggggctaacgtcgagtatgtccgagatttgctggcggagcacgcactgatgacaatcacgggagcgcccgatgcattcatgtggttgacagagcggctgagtgtgtacctgtcaagaagggctgtaggcgcaagacacagcttacggggctgcaggatccaaaggccctagccgcgctgggaaccacggtcgtcaagttcttgctgagtcttctgacattcgccgtcgggc

SEQ ID NO: 20369 - DNA, 1075 bp, Emericella nidulans
cttcacaattcacatggcctaaggaaacatacctgagccatcagtggtcttagcgacagtcgtcgaactgatgaagttccatcgagatataatgaggcacaactatgagaaactcgaccgctcttacacgttagctccagatgcagccgagaaatctgatgaactaacctcctcacgagctgctgatacttcgaacgaaaatccagcattctccgctatccagggtcgatggtgcacaggtgaagatcccatgctctttaaagagagatgggagaaactctttgccgagttttgcgatacagaaaaggttgacccaagcaagctttctgagctgtatgacagtatgaaattcgatgcgctccacaatcgacaattcctcgaatgggtgttcacccctccggatgctgaagacagcgatgaggagacggcagatatgtaccgccgtggatcttctcgaaatcatgcctctgctgcggagtcaaggggcaatggctttgatgggagcggccaccagagggtcgatgagcaatactccgagagtcagactctggcacatcgtctcggtttgaagaggcggatgcatgctttcgagacatcgataccgcatctaagggcacttgacgattcatacgaccattattttaagctttacccgagttctaatccgtcaaagaccaaattagactctaggctttcgaagttgcgagagctgtacaagctagcgaaagttctcttcgattatgtgactccccaggaatatggtatcacggatacggagaagctggagattggcctgttgacttccttacctcttttgcaggagatagtgagagatctggaagaggtacaagcttcctcagacgcgaagtccgtgttttattttactaaggagtcccacatttacacgctcctgaactgtatacttgagggtggtgtccagacaaaaatagcacgctctgctattccagagttggattatctctcccagatatgcttcgaactttatgaagccagggatagcgaatcctctaccagctcttactcgatccgaatctccatcagccccggctgtcat

SEQ ID NO: 20370 - DNA, 1075 bp, Emericella nidulans
accacggcggacacgctttccctcgtcacgcggaccgtcactgttgctccgttggtacttctctccgtcgcagatcactatggacgctctgcaaagggcactcggaagcgagtggttggcgtactgctaggagaacacattggagggaatgtgcgggtgtcaaacacgttcgccggtacgatctagcgtctccgctggcctgtcaattgactaacatgcttcagtcccgttcgaggaagacgaaaaggatccatcagtgtggttcttagatcacaactttgtcgagtcgatgcgagacatgttcaagaagattaacgcccgcgagaagctgatcggatggtatcactccggcccgaaactgcgcgcttcggatctcgagatcaacgagctattcaaacgatacacaccaaaccccctgctagttattgtagatgtacaaccgaaggaggttggcgtcccaaccgatgcttactttgcggtggatgaaatcaaggacgtaggtactacggctccacaaccaaggcatacgctaacccttgtcaggacggtacgactagatccaggacgttcgtgcataccccatctacaatcgaagcagaggaagcagaggaaatcggtgtggaacaccttctccgagacatcagagacgtcgctgtgggaactctctccacccgcatcacatcgcaactgcagtccttgcaaggcttacacctccgcctccgtgatattggccaatatcttcagaaggttcttgaccacgaactacccgtgaaccacgccatcctcggtaatctccaagatgtcttcaacctccttcccaatctgtctacaccgagtaccacggcgcgggttggcggtgagcagaacaatcaacagataacgccgagttggctcgcgctatgagcatcaagacgaacgaccaattgatggccatctacctaagcagcttggtccgtgccgttacagcgtatcacgaccttattgagaacaagattcagaaccgacaacagcaggaagaagtcgagcagaagagggagcaggaggccaacagcgcgaagaatgagaaggagggcgc

SEQ ID NO: 20371 - DNA, 1075 bp, Emericella nidulans
gcccgcaagcttgttcctccaatgctggagaaatttcacaagggtaaataatcctgacaatgctgcagtgacaacctactgatctggcaataattacaggacaacagggtagagttgctgttattggaggctcgctagagtatgtcatgtcgtctccgtgggtcttgcaagcagaataagctgaacccataaagctacacaggcgcaccatacttctctgctatggcgtcacgtagactaggtatttaagcttatgcttaacctgaccttcgatgcttgattgctaataatgcgctagggtgtgatctggtacgagtgcatcaggtggtgtctaagctctactaattgtttttcgcagagtcatgttatctgcgaaagctcggctgctactgtaggctcctcaactaaacaacatctcaaatagcggcttacctcgcgcctaggtcattaaatcatactcacccaatttgatggtgcacccgatcttaccgagcagcgcttccgtcaaggaccccagctccattgatgctccgtctcttgcaagcccgatcatcgcaatgctcgggcggctccatgcacttgttattggacccggtctaggtcgggatggcgttactcttaaagtagtcacagaggtgatgaaggaggcacggtcccgctcaataccctttgtcctagatgcggatggcctgctcctggtcacagagaacccagatctggtgaaggggtacaaggactgtatcctaacgcctaacgtcaatgagttcagtcgcctagccaaggctcttaatatcgaggtcccaagtctagcccaaatctcgtcaaaagagagcggagacaaaacaagcaaggaagcggaagcctgcgagaagctctcgcaagccctgggcggcgtcaccataatccagaagggaccacacgatgtcatttcaaacggagtcacgagcattgtctctgatctaccaggaggcctgaagcgcagtggcggacagggcgatactctcactggatcgttgggcaccttattggcctggcgagcggcttaccacgatgcactttgggactcgggcgagca

SEQ ID NO: 20372 - DNA, 1077 bp, Emericella nidulans
agtcgccccgctggttgatgaagcagggtcgccgcgaggaggcaacggcgtcgctcgctttcacgcggcgcgctgatccaaacagcgacgaggtgcagcaggaactggctgagatccgggcgtctatcgaagaggagctccgctccaccgagggcgtcacctggcgcgaggtcctgctgccggggaacaggttgcgattcctcaatgcattcttgatcatgttctggcagcagttctccggcacgaacagtatcgggtactacgcgccgcagctgttccagactatcggagtggcttccaccgacaccagtcttttcaccacgggtatctatggagtcgtcaaggtcgtttccacaggtcttttccttcttatcggaattgaccggttcggtcgtaagtggtctttggtcggtggaggttgggccatggccgtctttatgttcattctgggtgcagtcctggtttcatacccccctgtgaacactgacacaatctccaatgcaagcattgcaatgatcgtaatgatctacctttacgttatcaggtatgtgattatccttttccccctgaatcgtgatcagccctaagctaactatgacatagctactccgcctcctggggtcccatcccgtgggtatacatttcggaaatcttcccaacgcgcctgcgggcctatggtgtcggcatgggctcggccacccagtggctgttcaactttgttgtaacaaagttcaccccctctgccattagcaacattggctggcgcacgttcattatgtttggtgtcttctgctttgctatgggcttgtgggtgtgcatctttatcaaagagaccaagggaaagaggcttgaggatatggacgacatctttgggggaaagaccgtcgagcagatgcagaaagatatcgagcaggcagatgttgaggagcagacagaggtggaaaagacccagacaagacatgaagagcaggtggttcgttaactgacagcttgattgctcctatgatatggttaagagtccgccctctactgactgtggttgagtgtccttgcacttgctttatcccggttccggga

SEQ ID NO: 20373 - DNA, 1077 bp, Emericella nidulans
gatccagccgctcgcatcagatatcggtgaagcaattagcgatagatggcctagtgaatcaggtaaaccatgacttccgtcgacatgcgcgaaagtgtggctgacccgtctatctaataatccccaggctggcaggaaatagttcttgggtcggtggtcgagcgtaccatagcccagggtacatcttctgtgtactgcctggacgaggcgtggcccgagtttgtggtaaagatggaaatggctctgggtatggcatcggcggcactctccgcgtggcctgtgatgctacgacggattgtggccaagtttctacctgagtgcctggagctctaccgcatcatgaaatctggccgagagctcatgagccgtgacatgcgcaggagaacggctctgcaggcatcaacaggcgaagaaccgctaaacttctttgaatggttcaaagaagcctcgcacggggaagaatatgacgagctcatacttaacctgcggattgcctttgcgtccatgcatggcctctgcgaccatctggttaagatcctcctgcgcctttctgaggatcctcagctcgtcagcgaccttcgtaaagaggtcatccaagtctacgagactcatgggtggagcaaaacggcgctgtaccacttgaaactcatggacagtgcctttaaggaagttcaacgggtagatccaatcctgtttggtatgccaaatcccttctcctggttcggacacaccctaactatcagacagcagttggcagggtcgccgtcgctgacgtaacgttgaaagacggcctcatcattcagaaaggccagtctatccgcatatctggacacacaatgtgggatgaggacaagtatcctgacgccgcgcactttgacccgtatcggttttacagactccgacaggctccagggcaggagaatacagcgcagtttacatcacctacctccgatcacctgggattcggctatggaggccgcgcctgtccaggacggttcttcgccgcagcggtgctgaagatatctctgtgccacgtgttgatgaagtatgatattaaaccggccaatggggagactg

SEQ ID NO: 20374 - DNA, 1080 bp, Emericella nidulans
gatatcctatatccaactgcgtgactcctgtagatgtccgctttgcgtcgatgtgcattctaagcagcggaactatcggctttctgacatccctccccatatcaaggccaagtcgcttgaatgggagaaggatgtcctgaaggtgacctgggaggacgatattcccgggttcgattcatctcatgtttccagatacacactgccacaactcaagctccgccatccattcccagtcacatctgcgactggcattcgaaggaagcgtatcgattggaacaaagagaaaatgacgaaactacagcactggatttcttatgacgattacatgcataatgacgagaagtttactattgccatgcgccatttagctactatggggttgatatttctaaaagatattcctgactcacgggaaatggtcgaaaagatcgccacacgcataggaccgttacggaacaccttttacggttcaacgtgggacgttcgaaaagtccccgaggccaagaacgtcgcttataccagccaatacctcggtttccacatggatcttatgtatatgaaggacccaccagcttttcagctcttacactgtcttcgcaattcatgcgatgggggcgaatcgctgttcgcggatacattcaatgtggccggctacctgtatagaaatcggcccgagatctttcaaattctggcgaagaccaaactcagatacgaataccaacataaggaccaaagctacagcaatgcatggcccgtcctcgaaaggggcccgcttgataagggtcatttcttagcacgtgttgcctactcacctcccttccaagctcctattttgaacgactcaaacgcggaccccgaatatatcgcgaaactacaaactcaactgggggcgttgaaatatttcgcgagctctctagaaagagaagataacatgttcgaattgaaactacaaccaggcgaatgtgtcatattcgagaaccgtcgtatagttcatgctcgccgccagttcaataccgctaccggcgagcgatggcttgccggggcgtatcttgacgaggatgttgtagcgtcgcgcttccg

SEQ ID NO: 20375 - DNA, 1081 bp, Emericella nidulans
tccctcccaaagcggggagttttcaggttttccttaaaggctacaaagacgctaatcttttcttgagagagcatccgtggccagatcagacgaacaccggcttccgtgctcaggacgctccgaaacgcaagaagcgcccctggaatgaggcttgtcgaccgtccgggatacaatcggacgatgaagacgagggagaagaggacgaagattatcatgctcgcacaccgtctccacaagaggaaagcagggagcgacgattctactggacggagaatctcaaacagtcctttagggaagaattggagaaactggttatcctggattatattatgcgaaacacagatcgtggtttggataactggatgatcaaaatcgactggaaaacagaggatgtctcgattgtggcggacgccaaagccgaacgagcaccagcaggatgatgacgaccatttggttcctccacgaccagtttcggtcaactctgacaaggcaacctctccgtcatacccatatcggcgacatgagacgatgcaagctgtgagtcgtacgggaactcctctgaattctcaggagcctcaagcgactatccagattggcgccattgacaacagtctgtcatggccctggaaacatcctgatgccgtgcgtcgcctattaccatcataggactgtatttatgctaacaattgtctagtggcgaagctttccctttggctggctgtttctaccagtttccctaattggacagccattttcccaaaagactcgagaccactttttaccgcttttgacctcgaccgcttggtggagcggtacgcaaatggctttacggcgggttttctcacaggatgacgacttcaaagagagtatgtttgcgaggcagatcgcggtcatgaaagggcaggcgtggaacgtggtcgaaacattgaaacaaccggatcatggtccgcttgagctcacgcgaagaacgcgcgtctgtgtttgggacgacctggtagatgttccggttgccattcctcttcgagggccgtcaacggaggcccagcgacgtaagatcagaggttatgatgatcgctacgac

SEQ ID NO: 20376 - DNA, 1081 bp, Emericella nidulans
ccgatgctgctctctctcagtggagctctgagaagcactactcattgccaccagcgaacgagccgcgctccgtacggcttgaaattactagtaccgttgatatgaacctgtcgcttagatggagtgtgcacggttctcgacaggttagcgaattgacccgcgtgggcttcggagtcagtttacaacctcagggcctaataatgtcgctttcctgggccaggcttgggcagagaataagacttccaattgccatttgcccgattgatagtgtcaatgcggactcggccactctggcagttctcctcccgtggttaacatactgcgcggttgagtttggatttatacggcccagggaacgacggaatcgccggaagctaattgctaaacgacagaagaaactcaggaaacttgttcctcagaagaggttggaaagcacacaagccatcgaactcatggcagatcaagtgcggcgacggcaggataaggagtacagtagagggggtcttgtcattaccaaagcagaatacgggcattatccttcaaagcggaatgccgacaaaggcgccaaggagcccgaggtgacagatgttactatccctgtggctgcgttggtggatcatggccagctcatcatctctaagaagacggctaaggtgcgtttttaccactttctctccagttcttgactcttgtcagaatactgactttcagacagttccagattcttggcttccatgacccggcgcctctactgccgaaaacactgaagatatggtaccaataccatgggaaagaacattatgccgaggccacggatgcagagggcgtcacttgccccatgcgctctcatctgcttgcggcttgaagcctttgggagaaattaaaccagtcttgcttgcccaagactacgcatatcggctgggtacagcgacctctgtataagatctcctctacaatacggctattaggcaaactcctctcctctttgtatcatctgcttcgattttggaccatatactcgtcactgtgggagatttgaagttttttttagatgtattagcgacctgttcttgcatagata

SEQ ID NO: 20377 - DNA, 1081 bp, Emericella nidulans
gcgacaccgccgaaggctcggaagagtctcagaaacagcggagaagaggcacaagatcaccagctgcaccgacatcgctgcgcagggtgtcggtagaagcacagaggtcgagggacagttttaagtccaaggctcaacttagggaggctgggctgttgcagacaaaggttcggcttttcacgggttccgactggcatcgctgacattcgaaccacaagacagtcactgcgtacgctgtagccgaacagtttaacattcgcaaagcgagagagattctgcaggaaaaaggttacgagcccgacccccttggaaccggtctataccctcaggttgttcacgtccaaattccgcttgattctattcgccgagtaagcaatcctagcgcggagggtctttctccggaagaaattggcgatatattcgttttcccttctggtacggtcgtgtcatgggcgcttccagaagggtttacatcattcttagcgactaggacgttactccctgcggcagagggagcgcatgttgatagcctggagactgaagatcttgagtatgttgaggatgctcagcgtgataacagtagcattcatggagacaccatcgtcttgggaaccaaacccagtgatgccgcgtggcgccacaatcttcaggtcatcagtctgtggatactgttctaaccaaggtcgccttctcttctgggctcgctcgcagcacaaaactggcggttttagaaacattgctgtccaactacttcgagtcgacgcgaactatcccaacactcatgtcgcaaggatctcgcttaccctatactcgagacttcattctccgaaagactggacagctactgagcgtccgcgcccaattgaacctctactcggagttgaccgactcactccccgacatcttctgggacagtcgacatgagcttgggctggaaggatattacgagcaggttggtagggcattggatgtgggaattcgcatcaagctactgaatgagaaaatggactatgcgcaagagattgccagtgttctccgagagaggctgagtgagaccatggactgcgtttggaatggatca

SEQ ID NO: 20378 - DNA, 1089 bp, Emericella nidulans
gctgtcgaagcagcactcaagctcgctcgtcaatacttcctcgaactgccaacaccccaacctcaacgaacacgattcatcgcccgcaagccttcctaccacggcaccactttaggagccctaggagtcggcggccatgccctccgccgccaacccttcgagccaatcctatcccaaaacgtctcgcatgtttcaccatgttatgcgtacagagggaagaacgatggcgagtcagacgcggactacgtcgcccgactcgcaggcgagcttgacgcagagttccgacgagtcggtccagatactgtctgcgcattcatcgcggagccaattgttggcgcggtacgtgcagttccctttgcatccacaaacaccccgaagatttgttgcgtacggtcgatactgacgcaaatttaggccctaggctgcgtccccgccgtaccaggctacttcgccgccatgaagaccatctgcgagaaacacggcgcccttttcatactcgatgaaatcatgtgcggtatgggtcgctgcggcactctgcatgcctgggaacaagaagacgtcaccccagatctccagacaatcggtaaagcgctgggaggaggatacgcacctgtctcgggactcctaatctcggataaggtcgtgcagactgttgacaaaggcactggggcgtttcgccatggccagacgtaccagggacatccgatatcttgtgcggctgcgttggcagtgcagacggttattgtggaagaacagttgctcgacaatgtaaagtctatgggtgagtatctggaaaagaggctgagaggtactttagaagggatgcagtatgttggggatattaggggaaagggattgttttggggggtgagtcccaccaacatataccctgcaatttttcacctaaatcatacggtgtggatactaaccgggccgtgctggcaggtcgagtttgtcaagaacaaagctacgaaggagccctttagctcagagactgcactagccttcaagatccaggagacaggtatgaaacctgaattcgggatctcgttgtatgctggcacaggcactgtaaatgggacgcgcggc

SEQ ID NO: 20379 - DNA, 1092 bp, Emericella nidulans
tggacgcggcccagttcactgacgacgtgccgtactggcaagagaataacttttactacgatttccagaaatcgatctcattctggcgatggggagggcacgatgtccgcatctttggaaggggaacgctgaatggaaacgggcagcggtggtataacgagtttgccgggcaggagatcttggtattcttcagtcttctttttctatttcgaaaccgatgaccaactaacaggttgaaggaccctgacaacacatactaccggcctatcctcttcgtagcagagaacgcaacccgtctctcggttgaaggcatcacggagctcaactcgccgtgctggacaaatttcctcgtaaatagcaaagatatctcgttcgataacgttttcatcaatgcctattccacaaatgcgtcggtatgttgttcggaactagtctcacagctgaaaccttcaattaaccatgacaggccgaaccaaaaaacacagatggattcgactcacttaacgtcaatggactgtccgtgactaatacccgtgtcgatattggagacgactgcttctcgccgaaacctaacactaccaacatctttgtgcagaatctgtggtgcaataacactcacggcgtctccatgggaagtatagggcaatacccgggtgttctagacattattgagcacgcgtatattgaaaacgtcacacttcttaatggcgaggtacgtctctttccgatatcatgctgagaagcctgtcatgcggatcgagtctgacggttgatagaacggcgcccgtctcaaagcatgggccggcgaggacgtcggctacggccgcatcaataacatcacatacaagaacatccatgttgaaaacactgattaccccatcgtcctagaccagtgctacttcaacattccggcggacgagtgcgcgagctacccgtcacaagtcaacgtcacgaacatcgtctttgagaatgtgtacggaacgtcgtctggggccgaagggaacgtcgttgctgaactcatttgttcacccaatgcgatctgtgaggatatcaagctgaagggcattaatctcacgacgcccgagggagaaa

SEQ ID NO: 20380 - DNA, 1092 bp, Emericella nidulans
aaatgactgactctagcaacgtgtcgaatctaccaaccacggacatggctgaatcggctcagaccgagggggagaagagggaagagaattctgtgcccaagcaagaggagtcgcgccccaactttccagagggtggtctcagagcttggagtgtggcgttgggcaatgctggcgtcatgttctgcactttaggctatatcaactcctgggggtacgtgaagcgttgtccatagctgctcaaaactaatgtctgcagtgtctaccaggcctattatgaagcaaaccagctccgcagcgaaaccccatcggccatttcctggattggctctctccagacgttctctatcctcagcgcctctctcgttggggggcctatgtttgaccgatacggcgcaaaagtcatctaccccccagccgttgcattcgtgttcaccatattcatgacgagtctgtgcaaggaatactaccagtttatgctagcccagggcgtacttggcggtgtcactcaaggcctcactatgacgccggccatggcagcaacgccgcagtatttcttcaaaaagcgcggtgtggcaatgggcttaggagtcgccggcgcttctgttggcggcgttatacaccctattgtattgaatcaattgcttactcgaactgaccttggctttggatggtccgttcgcatagaagcctttttgatttctgtggttctgttgatttcgtgccctgcgattcgggcccgcttgccaccgcgcaagagcaagtttcttcttccaaaggcgttcaaggaagcagggtacacatcgcttatcatcggctctgtctccacgttcatggggatgttcactccgcttttctaccttccgtcttacggtatctcgaaggggatgtcaccaacactggcattctatctcagcgccattctcaacgccgcctctttcccaggccgtatcgtgcccgcaattctctctgatcggttcggcaagctcaacgcctttgccgcagccggagtagccacaggtatactcacactatgttggcagcgtgtggagggcaatgccggggttatcgtcttcaccgcgctctttggctttg

SEQ ID NO: 20381 - DNA, 1095 bp, Emericella nidulans
tgacaacagtggacttgcaaatgatgggcacaaaatatttgcgcatggacagtgcaaaggtcatgaaggtaaatgctctatcacgtaaaatgctaatatggtgactaatggaacctagattgcagaaaatctgtacactaaaggatttataagctacccacgaacagagaccgatcagtttgacaaaggaatcgacctgaagaagcttatcgagaaacaactacctgatgagagatggggagagtacgctcgctggtgtgttgctcactctctaagctctatcaactgctaaactgcattactagtctcctcggcggcaatttcagaactcctagggctgggaggcacaatgaccaagcacatccaccaatccatcccgtctgctgggttaaccccaccacactgactgaagatgaaagaaaggtgtacgagtttgttacccgacggttcctcgcctgttgctcagacgacgcaaagggacaatcaaccgacgtcgagatacgttacggagatgagatgttccacgctcacggactcctagtcttagaaaggaactacctggacgtctacgtctacgacaagtgggagagtacccaacaactacctaactatcaagtcggcgagctattcgaacctacagaagcgaacatgttcgatggaaagacctcgccgccaaactacttaacagaacccgagcttatcggactcatggacgctaatggtattggtactgacgccacgatggccgagcatatcgaaaggataaagagtcgtgaatacattggcgaaatgacccgaggaagcggccgaaacgcggtgaaattactcattcctactcgtttgggtattgccttgatactaggctatgaagatgttttcgctgggctcgcagacagcccctccctcagcaagccttttttgcggaaacagatggagctggaaatgcgggacgtctgtgctggcacgaggttacgaacacatgttgtccagcaaaatctggatatgtaccgggagttgttcattcacactcaaaggcggatgaatatgctgaaggctgcatttcggaaatacattgtcgaaggagaggatgtgtga

SEQ ID NO: 20382 - DNA, 1106 bp, Emericella nidulans
ggcgtgtcaagtatgatacccagcaccacgtaaaaacctcaattaacctaccatctaggtacactattatcgacgaggctgacgagctgttgctctctgactgggaagaatacttcaagaaaatcatgtcaggcggaggtggttcctgtcttcccaggcgtggggctaatgctgacaagtacagacataaatgaggacgcagaccatcgttatatgatgttctcggccacattcaacaaggaatgtcgcgagcttgctcgcaaattcctcgctgacgaccatgtccgtgttcgcatcggccgcccgggctgcactcacgtcaatgtcgatcagaatgtacgtacccaggatgcccacaaaccatgcttcaaccactaagaaattcgaatatcagattatttataccgaaccgcaactgaagaaaaagtgtctttacgatctactcctggctatgcagccttcacgtactctagtgttcgtcaactcgaaagcaacagctgaccagattgacgactacctatacaatctgggattaccaagtacctcctttcacgcagatcgtactcagcgtgacgtgaggatgcattgtaagctggcaattggctccgatcctgatacacttgtgctcatgtgcttttaggcgtgcgttccgctccgcgaaatgcccgatcatggtcgccacaggcgtttccactcgtggtttagatatcaagaatgtaatgcatgttatcaattacgacctttttaatgcgttgcacggtggcatcactgactacatccacaggatcggtaagttgatttaccaatgcaagtcccgacacacgtcgtccagcaagccctaacatctgagaggacgaactgctcgtattggtaatgaaggtcttgcgacttcgttctacagcgacaaagactcagcccttgcccctgatcttgttaagatcttaatcgaggccaataaacccgtccccgacttcctctctagattcaagccccccgagggcgaaggcattgacttccacgatgacacccgacgatgagaatggtgagaacgacgagaatgcccgctctagtacttggggtggcttacaacccgcctcttccgacca

SEQ ID NO: 20383 - DNA, 1107 bp, Emericella nidulans
gggcgccgaccgacaagaagctattcgcaagcttgctgcagcattggaagagtacgaggtggccggcccagcgacgaatatcgagttcttgaaatcagtttgcaaaagtgccgacttcatctctggcaaagtcgaaacgggttacattgagaagcatcacgacgagctattcgcccaatcgccaattgagccggaagtgctggcacaagtagcactggcttgcttgcatgacgacgctcgtctcgccgcgcaaaaagcaaccaattttcaaggctccgcagtgggatttgggccaggcttccaacaacaccacatgaccttcacgaactcagcatcagcaaacaacgaggcctttgacgtcaaagttcaacaaaccggagagaacgtgttcaatgtaaagattggcgagcacactttcgagcaggtgaccagccaccctaatgcggacttccgcatcatcacctcgttcttcccgcacacccgtttggacaccactgtcatccgcgacggcgattcaatcgtcgtatttcagcgcggcaggcaataccgccttactacaccacgggcgaaatggatggaaaaagcactcggcatgaaagacgtcacaaatagtgtactcgccccaatgccctgcaaagtcctccgtgtcgaggtccaagccggcgatactgtagaaaaggaccagccacttgtggtgattgagagcatgaaaatggaaacagtcatccgcagcccacaaagagggaaaattgccaaagtcgtccatcaaaaaggagtaagtcatgcgatctttcatcaccattttacccctgctcaatgctgttgcaattctttgcttccctttgttttctcttgcctttcacttcagctcccagtactcagatttttaccaatcgagggcccagagtccttcccagacatgcaggcttaggagcttcggactccaatcagggcctgactgagtaactggccaaggcggaccatatacaggcttgttgctaagcttcgttggttttctctgtcgagtttctatttggctgtttattaatttatcgcgcaaggctaatatttattccttacaggaccaatgcaaaagcgggacaccgc

SEQ ID NO: 20384 - DNA, 1108 bp, Emericella nidulans
caatgctcgagcccattcttgctcttctcctcgtctactccttctactcctacctcgttgcaccgattataacctacatttgggaccctaagaatcttcgccgctaccctaatttccaccccctcccaggcatatccgacatcccatttctcctcgctgctcaaaaagtcttcgctctcgcaccttgcacgccctgcaccagcaccacccaattgtatgtgttggccccaacgccctctcctacggcgcaccgaccgcaatcaaagatatctacggccacgggacaacatgtgttaaggatagattctattcagaaaagtcgggctcccatgcccatctcgcaaacgtagttggtaagcaggaccatgcgcggaagaggaaggtgctggcgtctgcatacgcaatcaagaaccccgagggctgagagtacaaattgtctggtatgacggctcgactgatgagagtgtttgaaggcaaatgcacggaacctctcccttccagtgtttaggccacagaagagagagacttaacgattgactttcggtccttgacgaaccattttacagttgtggccattgccaatatcgggctgactgaggacctgggcttccacgagcagggctccgatacgaattctttggaatcaatggatgggcgagtgaaggatgtgtcgtttaaagaatgtcgcgaggcctcaggaacagtcgcataccgacttatctgggcgtatgactggttccccgtcctgaagagattgagcaaggtgctctcgccctactatcgcaaactcgggaagcttgacgctgactggaacgggatcgtgtataatcgagcaacacggcggctgaatgtctggcgaaaagctcgacgacttcttcacggccatgatggaagataagaaaggcgcagcgcacaatctggaaacgggagagatcgtggccgagatcagtatcatgatgaatgcaggatcagacaccacagcgattgctctgaggaatgtcttgtttcttctgctcaagaacccccggtgcatggcaagacaccgcgaggagattaacgtggttcttgataaagataaactggtggcaccgcacacaaaggttaaaca

SEQ ID NO: 20385 - DNA, 1108 bp, Emericella nidulans
tcaatgagactcaggagggcatcgtgactgtcgcgcaatgggtcatgtttcacaggtatgataaactttggcgtttgttgccagttcactaataatgcacttcaaatcaggcgccatgctgagcgcactgcacaattatggcttcagaaactccgcgattccccagccgcaaagcgccttaacctgatatacctcgcaaacggtgcgattatctcgaattattgcccataaacgaaactaatgcagaaaatagaggttgcgcagcagtcgagagcacggcgcaaagaggacttccttattgccttttcacctgttagtgttgattgtaccgacaatgagagcggcagctatgctaacacggcctagatcattgccgaagcggtggcaattgcgtacaaaggtgcatccaacgatattcagcagaagctcagacgtgtggtagaagtctggaggcaacgaaatatcttcgagcctccaattcaggatgccgtcgaggctcgagtggatggtaagattgtcccagcccattctgctgaactccatgctcataatacccagaaatcgataaatcgcgttccacgggcaagaaaccgttgcttggcggttcgttattttcgggaccatcgggttcaacgccgtcagagttgcaaccaatagttccgctccaggtagccctatccaaggcggcggttgcgtctggcacatctggtacgactgccaatgtggagtacgagaagttgaacgacccaaataccccgttgcctacacctcccgtgcatgcagctcgtctaagttcactcctaaaaacgctggcgaatgcggaaagctctgtgtcagaggtcatcaagtcacgccgtgcgcttattgatgggttggagaaaattcttgagaccaatcgtaccgctttatcgcaggaggaggctctggctgtgcaattgcaggaaaggagggcagagactgaagcgaagaaacgagaagtagaggatgcgattatgcgagggctttctgcagagaataccccagcagcggattccgggagtgctacggggagcggcgaacgttcctcgtccagcgatcgaaggacttacgcctcctccagttgaagcga

SEQ ID NO: 20386 - DNA, 1109 bp, Emericella nidulans
ttgaaccgcgcccatcagagcaactctccgcagtcccagaaggtgagggccacgattcctcgcagtcgccccctgacgacacaggtcatgacctaagtgatgaacccctccaggacgtacacatcccagaggagcccccatcacccgagataagccccgatcagcttgattttgatgaagctgcgtacccggaggacctgcacccgctcgtccaggacctcgtcgaggaagaagttcacaacaaccacacagtctggagcgtcattcgcacacaccaccgcgaagccctcgccgaatctctcgcagttttcatccagctcactgttggcctcgccgcagatctcagcgtcaccctcggcggaaccacaaaccccaataccacagcctgggcctggggtttcgcagccatgatggcaatctacatctctggtggcgtctccggtgcacaccttaacccaaccatcacgtgtatgctctggttttatcgcggatttcccaagcggaaaatgccagagtactttgcggcccagtttattggcgcgtttgttgccgcgcttgcagtctacgggctgtaccacgactctataaatgaatatctttccatcagcacaagcagcacaagcagtacaacaaacgtcctcaacagcttcgtcacatcccaacgcaacccttggatcaacccgcaaacggccttcttcaacgagttcctcggtacagtcgtgctcactgtgaccgtgcttgcgctgggcgacgaccagaacgcgccaccaggcgcaggaatgaacgccctggtcgtcgggctaatggtgtacacgctgagcatcacattttcctaccagactggtgctgcactaaacccatcgcgtgatttcgggccaagattagcactcctagccctaggctatggaagcgacctcttcctcaacccgtactggttctatggaccctgggcaggcagcttctgtggcgcctttattggcgcctttctttatgagtttatgatcttcactgggggtgagagtccggtgaattatccgtgggagaggactgagatggcgatgaagcggagtagggagaagtgggggaggaggttaaagaagggctttaag

SEQ ID NO: 20387 - DNA, 1110 bp, Emericella nidulans
tctgatgaggtgcgcccagatcttggtgtaatcggttaagaggatggactggctgatgtgcttccgtttcgcagggtgtcttcacctctctagtcgagaacctcggcgtcaagggcgtgcagttcgaggagctgatctcgcttgatcctgataccatacgctcactggggtgcatactcaacctacacttacttcctctccagaagactaatttcacactgcaacagaacagtttacggtgtaatctttcttttcaaatacctccgccaaacacccgacattaacacatcctcatccgccgacggcaccccaaccgacccttccacgctcccaccctccttcttcttcgctaaccaaactatccaaaacccgtgcggcacacaagcgattctctccgtcctgctaaaccacgacaccccttcgccagagaacaacaatgaccccatcaccctcggccctgagctttcctccttcaaggatttcacgacgggatttccctcggacctgcgcggcgaggcgctttcaaactctgaagcaattcgtaccgcgcataatgcgtttgcgcgcgcgagccccttcgtcgatgagacggtgcggccgcgcgacgaagacgaggaaggcgacgtgtaccactttattgcgtatacgcctgtgaacgggacgctgtatgaattggacggattgcaggcgagcccgatatcccatgggccgtgtgatgcgagcatttttccggagaaggtgattgaggttctacagaagcgaatcgcgcggtatcctgagacggaaacgaggttcaacctcatggctgttgtgaaggatttgaggatccgggctgcggagatgggggaccaggaagcacttaatacggaggagagaaagagagctggttgggcttgggagaattctttgcgcaggagtaattttgttgggtttattggagaggtgctgaagggggttactaaggtgaaggaggaggagggaagtgtggaggagtgggttaagagggctgaggcggagacggcaaggagattgaggcgttacgagctttcctctattttcagtatggacgatttggatcatggatgaatggtctttgtattatactctgca

SEQ ID NO: 20388 - DNA, 1117 bp, Emericella nidulans
gcgccagcaaagataatacgttagggcatcctctgctctgtccgcgcgagagattaagtgagatcaacaaggctgttgtggaaaagtatagagcaactttcttccgtcccgaacgcatggttgttgcctttgctggtgtgccgcatcacgaagcagtaaggctcacagagtcgttgttcggtgatatgcaaggacctagcacgaacaatggacctagcctgtcggggaccggtgttgacaccaccttgtcagattcaaagtctgaaggacaatttgcggccgctcctcagtttacaccgacctcaacggtcgcgtctgcccctgccacaaccgactcaagcattctttcgaaactcccctttctcaaaaaattcgggtccaataatccctcatcctcagagtctgcaccagtagatctgacccaagcttcccactacaccggtggatttctaactctcccccctattcctccgccagcgaatcctatgctccctcgattgagctatatccacctcgccttcgaggcgcttcccatttccgaccctgacatctacgctcttgcaaccctccaaacactccttggaggtggcggatccttctccgccggcggcccggggaagggaatgtactctcgtctgtatacaaacgtgcttaatcaacacggctgggtcgaaagttgcattgcgttcaatcacggctacacagacagcggtatcttcggtatctccgcttcatgcagtcccacccgcatcaaccaaatggtcgaagtgatgtgccgcgaacttcaaaacctcaccctcgacaccgggtacacgtctctccagccgcaggaggtcaaccgcgcgaagaaccagctgcgctcgtcacttttaatgaaccttgagtcgcgcatggttgagctcgaggatctaggccgccaggtgcaagttcacggccggaagatcggcgtcacggagatgtgcaagcacattgagtctcttaccgttgaggatctgcgagcgtcgcgcgcaaggtcttcggtggccaggtccataacaaaggacagggtactggtaagcctactgttgtgcttcaggagggtgagctggaaggattcaagttgcgtcccttcgcgtgg

SEQ ID NO: 20389 - DNA, 1118 bp, Emericella nidulans
cgatgaagctggcgacgaagccgtcgatgagtatacgttgaccgaggttttgggcgttaaggaagctgcggctaggctttcagagcattggaacacttttatcacagaggaagacttcgcgcttattgctgaggcaggtttgaattatgttagaatccccatcggttattgggcagccgcaccgcttgatggcgaaccgtatgtctccggccaactcgagcaccttgataatgccgttgcctgggcgagagctcataatctcaaagtcattgtggatcttcatggcggtaagtctctattaagccagaagcagtgcactcctatctctgacaaatcgaccagcaccgggatcgcagaacggattcgacaacagtggacgcagaggacctattgggtggcaacaaggagacaccgttgagcagacaattcttgcttttgagaccttggcccaaaggtatttagcggacgacgataccgtaacgatgattgaggccctaaatgagccccatgttcctggcggcatcaaccaggaccagctcaaggattactacgaagagaccctggcaagggtgcggaagaacagtcccgaagcgaccctgctcctgcacgatgggttcgtgcaaacggaaggctggaatggttttatgactggagagaatgttatgatggacacccaccactacgaagttttcgaaggcggccagaatgcgtggagcattgaaaagcatattgatgccgcttgccaactcggacgtcagcatctacaggctgccgacaagcctgttatagtgggcgagtggacaggagccctgtcagattgtactagatatctaaacggaaagggaattggaatccgctacgacggtacgttgggttcgaacacagcagtcggcgcttgcggaagtaagagtgagggtagcgtggctggcctgagcgcagatgagatcgcgaacacacgtcgctttatcgaggctcagctggacgcattcgagctgagaaatggctgggtgttctggacctggaaaaccgaaggagcacccggttgggatatgcaagatttgcttgcaaacggcgtcttccctcaacccttgactgacagagagtttccaaaccagtgc

SEQ ID NO: 20390 - DNA, 1121 bp, Emericella nidulans
ggaggagaagaagcggcaggagagaaagaagtcgcaacgcgtttctgttattggaccgtcggtggaccgtgaagttggccgtgtgggccttggtcctagcccaactcatatggattacaatgccttccgagagttcctcgccgcaaccgcaaaatgggctatagctgattctccaggtccctcccgaaagcaatccgactcgggcagcttccgaggactgggaagacctaccatgaacatcacaccgtcgccggccgaccatgaattcatgcagcgcttgtttcgcaagtggtcaactgacccagatgatggcttaagtctgcaggatgttgtcaacggcattgcacgtctgaaagggccgcgagatattatgaacaatatcacttatttttttgacctttatgacgacaacggggatggcaaggttgatagagagggtattcttcgaatgtcagaagcgctgctctttctctcccggcggggattcgacggaaccatcacccccagtcagagcactgaaaatttaatgccaggcaaagaagaagataaactcagcacgggcgagcggtttctgggaagtgtgagctccttcatacggcgctgctttgaatatgccgaccctaccaaaaagacattagaagctgaaaaattagccgaaacaacggacaacctcaactcgttcagtattggagatgatgaggaggatttgatagacgtgggtgacgacgaggtaaaatccgagtcaaccccaagccctgagggtgaaacgcccgggacgccttccttggagccaacagaacgcaagcgtgctcgaagcacatctgaggcggcaaatccggctctcgaccccaacaaccctctgcatatcacccttcccactttccggatggttgttctagcagacgaattactagagcagttcttcgacaattacttcccccagtccttccatctttccgagcaaggcgcggccgccgcgcaactcccgtccctgtcctcaaacctcacaacattctctaacattggagctgccaaacaacagccaacatcttctggccccacagtcgcaggcgcctccggtggcatcgtcccaccaaaccggggactccgtggcgttttgg

SEQ ID NO: 20391 - DNA, 1122 bp, Emericella nidulans
catcgcactcgccggtctggcgacatggcttcgctccgtctggaacctggtcaaccgatacgccgacacatgcatagcgacagtgtacattaacgaacatgaccctctttacaacgatgtaatccaatggatgaacgatcatatcttcaaagatcgcaacttctgctgcgttcttgcagtcaccgataatcatcatcgccctggaaaacgtcagggcctgatctcagccatcgcaggcccaatgaaccccgccgacgccagcccgccgcaagtactcgggaaaagcactttcgaactcaagccgtttaacggttcccgtatattcaccttcagagggagatgggtgctattcagccactcggcgccgagtcggacaatcaccactttgcaggatggagccgaggaacgcatacacctcaagctgcagacactgagcctctctcttgatccgctccgcgctctgatagaggaggcgaatgcgtacagcaagaaactcgccaagtcgcagattagcgtctaccgcgcgatgtctaatgtgcgggatcttgtccggtggaacaggatcactaccagaccttcccgagcgatttcgaccgtgatcttggacagttgcaagaagaaggcagtactggacgatatgcgcgagtatttacgtgaagatactcgccagtggtacgcaaaccatggtatcccttaccgtcgggttatctgttttcaggaccgccaggaacggggaagacgagtctgtcttctgcacttgccggcgtttttggactcgatatctatgttcttagtctcctggatccaaacatttccgagtcgcatttcctacgtctgttctctgaggtcccgacgcagtgtgtagtgctcctagaggacatcgacgcagccggcatgaccctaaagagggcaaatgaggaaccagtcacagcagatacaacggcatcttttgacgttatgaagaagcgggcgagaccaggcgctccagtccctacatccccgcctacaccgatctcgctctcggctctgttaaacgccattgatggcgtgtcctcgcaagaaggtcgcattctcatcatgacgaccaatgcaccccaggatcttgatcccgcgttgatccgc

SEQ ID NO: 20392 - DNA, 1126 bp, Emericella nidulans
atgagtttatctgactgtataaagtctcccaagagctccacgatgccttctcccgttcgcgtctgatacctctatcttctgtctccccgtgacaatcagccgcggagcgcctaaccccgctttcaacgctccccttctccggctttggagagaacgcgttctacgcctcactgtcacagctaacttctgtgttggagccaaagacgcctatttacctgttaatccgccggactggatctaatctgattgccttaacgtacattccctccaacgctggggtgcgtgcaaagactctcttcgcgtctacacgggcgacgctggtgagggaattgggaagcgagaagttcagtgagacaatcttcgccacagacgaggaggaagtcatcggagagaatgcatggaaggagcgggaggcagagaagaacgggacttccactggcggttatagaagggaggatctaatgggagaaaaggaaagggaattggaagctgtgcggagggcggaggaggctgcaaggagtgggactccagggagggatattgggatcggtggaacgtttgcgagaggtccttctaggatgaaaattgaaatgcaagtggacgaggatgcgaagaatgctctaggggggctgcagcagggtggacttgtgcagatggtgagtttgacaagatatattcaattgcactgtgcgttgattaaaagctaatgttgttctaataacaggccattgacgtttcaacggagacattcaagctcactgcggctgagtctggagttgacgccaattccgtccagaatcacatctctgcttcctcaccgagatacacgttctaccactatcccgactccgacaccatcatcttcatctatacctgtccatcaggctcgtcaatcaaggagcggatgctgtacgctagttcccggatgcatgcgctccaggtggcggaagaacagggtctgaagattctgaaaaaggtacggcggcttgacgaatgacagaccgggaactaacaaagaaatggcagattgaggccggggcgcccgacgaagttacaggcgaacgccttcaggaagaagtgaaccccccgcagaacaacggtctcaggcaagggttcgcaaagccca

SEQ ID NO: 20393 - DNA, 1130 bp, Emericella nidulans
tgccccgtcgatgaatgtgctaacctccataggccacgtgcctgaagtaacgggcggtgaaacgttcttctatcccaacttccacgcgcctagggatattcggaaactttctgaagaagtggcgcatgccgtttcgcgagaaaagggttatcaggcattgatgaaagtccgctgttccaatgggttgcaggtttcggcgtatcacgggaactttgtgcagcacacattcggcgcggatctcgaaatcggcgcaattgatgccgacaaagcgattgcagttcttttcagctatgacggcaagcttgacgcgaagctggatgcacacttccaagctgcgttactttatacgtcggcgaacggacagcgtcgggtacgttgtatcaacatagtggcggcggtcaacgatggcggactggagaccatgaagtttatcgaccaggatgccgtcgtgagcataatcgctaaagaaggtatgctttatcttttgttaaatggagctggtagctgacaggagtagccgctgccaagacgctggacaagaacctcaaggatatccgagcgagcattacagagaagactgtggatatctttagcggataccgtaaggtgttttctggatcgcatcctcctggccagcttgtattgccggagaatctcaaagagttctccatgttcatcctaggcctgatcaagtcacgggcctttaaaggtatagttcactaatgattcgagagaaatttgactaacttcttgtacaggcggccaggaatcatcagaccgacggatccacgacatccggatgctacggtcaataggctgtactgaattatcactgtacttgtacccaagaatcattcctatccataacatgcagccagaggacggattcccgaatgagcaaggccagctacaagttccgccttcccttcgggctagtttctccaagatcgaagaaggcggacgatatttggtcgacgacgggcaacagtgtcttctatggattcacgcacaagtatctcctaatcttttggaggacctcttcggtcccgggcagacatctttgcaagagctcagcccgcaaacttcgtccattccagtgctggagacacatctcaatgcgcaggtccgca

SEQ ID NO: 20394 - DNA, 1131 bp, Emericella nidulans
tggtggcccggttcttccagggcgtcggggcgtcgaccttctctaccatggtcggcggcgtgatcagtgatatctaccatgcgcatgagcggaacacgcccatggcgctgttcgccgcggccgcgctcttcggcacggggctggctcccctgctgacaagtgtgatagtagcgcatacctcgtggcggtggatctattggtcgcatgcaattgtctctggggtgtttgtgctcattatcttcttcttcttcaaggagaccagaggtagtgtgatcctgagccgcaaggcgggtgccctgaacacgtactacgagcagctcgaggccgcgggacacgttggagtcctgatgggaagtgaccccaaaccaagacggatcaggtggaaggtcaagagcgatgagcagcgccagtcgctcgtgcagatgatcagcatctcgctgtaccggccttttcgtatgtcttacccctcttaccccttatcggttcggtctgtaggtgagaagatcactaactaagggatgatacagacatgctcgtcaccgaacccgttgtcttcttcttctccctctgggtctccttcagctgggccgttctctacctgcagttcggctccatcccgctcgtattcaagacgaaccacgaattcaatatcgagcagaccggtgctgttttcacctgtacgtgcccaacccctgcacacccctttccaaacggcgcatgccatactgatcttgaaacttcaataaagcgatgtgcgttggttccctcttaatcaccgtgatttccatctaccaagagaaaatcgcaaaccggttcaacctgctccctgccactcccgaagcccggctctacttcgtctgcttcgaggccgtcctcatgcccattgggctcttctggtttggctggacctcctccccttccatccactggatctcgccgacgattgcgatcgggtgctcaactatggggatcttctccgtctacctggccgttttcaactacctcgccgatacgtaccaccggtacgcgagctcggcgattgcggcgcagagctgctgccgaaatctgctgggtggcgtgttccccctcgtcactaacgcaatgttcaataatctggggttccccgaagca

SEQ ID NO: 20395 - DNA, 1135 bp, Emericella nidulans
ttggcgcgattgctgcctttacatgtggcgagcggcttgggcggaagaaggctattttgctgggaacgacgatcatggcaattggaactattatcaaggcgagctcatacagtctcgcccagatgtttgttggtcggatcgtccttgggtatgctatttatgcctccctcgagttcaaaaccgtctaatactgagattctggggtccagtataggaaacggtatcaataccacgacggcccctgtctggcagaccgaaaccgcgcaccacaagtggagagggaagttggtcatcttcgagctggtaatgaacatcgccggcttctctttggtgaattggatcaactatgggctctcgttccgtggaggcgcggtggcatggcggttccctatcgccttccaatttgtcttcattgtcattctctttgcaacggtcccctggcttcccgagtcacctaggtacgcgtgtattagagtgtctgtttctttcttggaaccaaggctgacgatctttagatggctcatggaacagggccgtgaaaaagaagcagtagagatactggccgcgattgaggacaagcccgtaactgattcctatatcctgacgcagcgcaatgagattcgcttcagtgtccagtacgaacgggagaatgcgcctacctggaccgaactcttccttcgcaaaaagggaactaacgataccaaaagccttcgacggctcctcctgggcgccggcacacagttcatgcagcaattcgaaggaatcaacatcatgtcctactacatgccgctcattctcatcaacgcggtcggcttgtcggagagtatggcccggcttttatctgcgtgcaattcagtatcgtatctgctcttcacctgccttgccgtgccgttggtcgaacgctggggccgaagagggctgatgctcttctctactgccgggcagggcttttcattcctcgtcatcaccatcctgctgcggtacgcggagacaagccctgacaaagaaaagatcgcctcggcctcgattgcattcttcttcctctacttcatctcttttggaatgggtatgctaggtgttccgtggctctacccaactgagatcaattcgcttcctatgcggaataagggcgccg

SEQ ID NO: 20396 - DNA, 1137 bp, Emericella nidulans
cgaacggcctggggaactgagcttcattcccccagatggacggtttattcttgccggatatgaggtggacttgctgcctctcgaccccagtcttgatcaaccgccaagtcatatggagaagctttttcttccaacaattgttgacattcaaaagtcgctcggttctgtgggcgccgatttcgaggtgcggttaacacttaacccagactttcctggatacccgtctggaagtcgacctggagcgggccggggagggtctggcacttcaaccccgtcttttctcggtggcaacagcaataatgccggtccggttctggaggatgtagtggtgacagtgcccattcccccgtccgtacgaaacataacggacatgaaagcaagccgcggcgaggctctttttaactctggacggggcgtactagagtggagagtcccgactaaggatgcggggagcatctccggaacagctacgcttcgctgtacggctgtcggccattccactgacgagatcgaggaggatgatcctgaggctgatgcagaagctaccctgttacaaggttactacgacgactcagcggcagtatcttatcagcagaacacagaaacagaccggttaagggggaagccgaagaagaagaagaagaaggtaaagaaagtaaaaaaaccagcatcttcccgccgcgacacctcagtatctacgcctgatatcgacgccaatcgtggaggggagacactcccggcctcagacttgaatcccgaccgatcctcagaaccttcaccttctcagccttcatcgcaccctgaagtaccttccttgacaccaacaccgaaacaactatcttcgtccacccctccgccgccccgccctggatcgccgttctcaatattccatactgcgccgcgcaaaactcgcatccagctcaactccagccttatgccaaattccgcgtctgtctcgttctccgtgcgaggctggcttccgtccggcattaaggttgagagcctcaacatcgatccacgccgaagccgtggcctcggcgagggcgtgaaaccatacaagggagtgaagtatatatgtgttagtcgaaggggcatagaaaggagatgttaagtgatatggttgcatttacatggagc

SEQ ID NO: 20397 - DNA, 1140 bp, Emericella nidulans
gagcaacacatacctatctcttcgtctggtcgatggtgtcgcacaatttctcccctcgggacgcccagttcctgacctacaccaacggagtcgcgcaggcattaagtggcatggggacggggctcctcatgtatcggtaccgaacgtacaagtggatcggcgttgcgggcgctgtcatccgcatgatcgggtatggggttatggttcgcctgcgtacaaatgagagctccattgcggaattgttcgtcgtgcaacttgtccagggaattggcagcggcattatcgaaacaatcatcattgtagccgcccagatatcggtaccccatgcagaactcgcccaagtcacgtctttggttatgcttggtaccttcttggggaatggaataggatcagccgtggcgggtgcgatttatactggccagctgcgaaatcggctgcgagtgcatctaggcacaaatgtgggtgcggagcagcttacgaggctgtataactctattactgggacgttaccggactggggtactgctgagcggaccgctgtgaaccaagctgtaagttattcagtcaaggatacctgtgggcacgtgctgacttttggtagtattccgatgtcatggggtatggtacctgtacccactgtgccaataaactaaccagtgtaggtacattacaatcgcggctttggctttcgcggtcccaattgtgatactgactttgttactgcccaacagaaaactcgggtaagtctgctcccagctgtacaatacaccgctaatctcccaagcgacggacacaacctcgtacaagaagcgccctccccagattccctcgagatcaagaaacctcaaacgtagcatataaccttccataattctccacgatggctatgaaatgaacgatgatgaccattcccttatcacttcaattgcgtacatatttcccttaagtacatggtgacttactcctgattacttccccggtgatccaatcgaacaaggaaagctcctgtcaatctgatcctccagcgcgtttttgacaatattccacacattcaaatcatatgcctcgccaatatgacccacgggatcgttggggcaaaaatcctgcacccagacattctgcaccccctcttcatgcaca

SEQ ID NO: 20398 - DNA, 1143 bp, Emericella nidulans
tcaacttcatggtactttcttgcccacacctcacgtttattcaggaccacgctaacaaatgaaaaagtcccacggctcccaagacctctacccgacgctagtccagcgccagtacggcttctctcgcgacgccgtaacagtgacccaggtcgtggccaacctgggcgccctaaccggcggcacgctctgcggctggggctcccaaattttcggtcgtcgattcagtattattgtaatcagcattgtcggcggcgccctcctatacccatacacctttatttcgagccataagatcatggctcctgccttcttcgagcagttctgcgtccaaggcgcgtggggcgtgatccccatccacctgatggaactctcgccaggttctatccggacatttactgtcggcacggcatatcagttaggtaatctggtgtcttccgcgagctcgactatcgaatcgactatcggggagaggttcccgctaccgccgacggaggagggcgaagaaaggtatgactatggcaaggtgatttgtatattcatgggctgtgtctatgcgtatgtgattattgttacgtttttcgggcctgagcggctgggacgtgattttgatgtcgagaacgatgaggatgttggggaggttagggctgagaggggtgtcatcgatgacatggagaaaggtcgcaactgatatgtttactccttggagattttgagatttgaagcttgaattcttggataaatctgaatttggatgtggttacctctggtaggggagctattacttaatcgactggttgaataacgaaacgaatgaagtattaattcacttgggtagccatcaaacataatcatatcttgtatatggtttgtgaatgttcttgacagttgtctgtacattggtggcaagccaacgctttactccctttggctttttgaaccaattcttacctacttgagatagaacgaaactcagctgaaacagtcgtgaggctccatatctgtctcaatacccgtgactgcatttttgcatgtattggcttatttccgtccatagtaacattccccatgttttcagatcagaccaagagccattctggcaacgttggagtgttctaggaacagaatggaatggagcaaagtatg

SEQ ID NO: 20399 - DNA, 1144 bp, Emericella nidulans
gggtgccgctgctacatcacgccaggatggacagccgcctggtcctacaacacagcctggagtcgtggaaaatgcccagactaagaacccgaatggctccactgagaacaatgacgacgacgatgaaggtgttttggatgttgcggctattgttagcggcaacaccagcgagttccttgccgcgcgggagaaagagaagggaaataaaaaaggcgctgatcagggcgcgaaacctgttcgtcttcccaactctaagaaggagaaggccacgttccagtaccaggagttcgtcaagttagagccagagaagcatgcgcctagcggtccttcacgcttcatccgccagactagggatattgaagttggcgttgagcggttctttgctgcaacaccgaagcaagatactggagacagattgtctagcagtattcttgaggatatagcaactcagatccatcacaccatcctggccgtgccggatgcgacaaagcgcagtgagctatgggattcactgatcgttgttggtaacggtagtaaagtaaaaggttagtctttctctctcgaagcattcctcgtcccagtttatttactaaatattgcaggcttcactcaagccctcatcagcacaatcactcagaagtttgtcctctcgccgtccggcacaatctttacttcagaaattccatccaacttctccactccccttcccaccggcggaacaaatacccccgccccgggcttccctggtcaaatgcaccatcccggcggacaaggtgtaaacccccttcttgtcgccgccactcactccggcaatcctatgcctccgggaaccccttcaatggaccctctctcccatcaccgctccactggccactcgcagactccgacctctgttcgcaccgtaaaaccaccagagtacttccccgagtggaaggagcaaacagcaacccagcagcctgcccagaatcaaccaggtctcaatgggcccggcggtccggcatctagtggcagccaccgtggtatggaagaagcagttttccttggagcgcaggttgcctccaaggtggtttttgtgatcgatcagggcctcagtaagggttttatgagccgtgttgagtataatgagaatggcccgtcggcgatt

SEQ ID NO: 20400 - DNA, 1145 bp, Emericella nidulans
tgggctaccctgccagcgagttccagttcgttgagggcaagacgccgatgtcgaccttcagggagacggcaatcatgctcattgtttactacgtgacaatcttcggaggtcgcgaggtgatgagaaaccgcccggctttcaaactcaacaccctgtttatgatccacaacttcgttttgaccgccgtcagcgcgattctgttggccctctttgttgagcagcttgttcctaccatctggaaccatggcattttctactccatctgcgaccaccgcggtggatggacgcagcccctgattgtcctgtactatgtgagtgtgtcggttgcatgggaatgaagcgctactaacaagagtagctcaactacctgaacaaatacctagagttcctcgacaccgttttcctgttcctcaagaagaagcctctgactttcctccacacctaccaccacggcgccaccgctctcctttgctacactcagttgatcggcctgaccgccgtccaatgggttccaattactattaaccttttggtgcacgttgttatgtactggtattacttccagagcgctcgcggtatccgtatttggtggaagaagtacattactcgccttcagatcatccagtttgttattgacctcggtgagtctctgctgcgcttgcgtggaccaatctggacccgtggctaaccgcaactttagtcttcgtttactttgcgtcgtacacctactttgcatccacctacttcccctgggctcccaacgctggcaactgcgccggtgaggaattcgctgccttcgctggaatgggcatcctcacctcctacctcgttctgttcatttccttctacatcgtcacctacaacaaggctgctaagaccggtcgcccgcgtcgcaacactggaaagcaggcggttattgacatggccagatatgaagtggctcctccctctcctgccggtgagaagaagtcgaacggctcggccgtgaccactggccgctccaacggtcccgctacccgctctcgcaaggcgtagattcagggacgagtacgacgatactcgaaccatgtgaactagctcgtcagccagttaacccgcgtgcggagagctcggttcccctccaggcgttgcccctggacctgcat

SEQ ID NO: 20401 - DNA, 1147 bp, Emericella nidulans
gtgtatcacaccagatacgaagtcgtagggaagcttgggtatggggcatattcaaccagctggctctgccgggatctccagtgcgccaccccagttcaatcgattctaagaagagctttgacaagtcgtgagttaagagcacagaaatacgcggcaatgaaggtgtcagcctctttgccagactatccaactgcgacggatcgcgaattcaaagtctataaacacctagcaacagttgactcttctcatctgggccagtccttaatccgcgagctctatgattcattcgacctccagggtcctggaggcagcacgcatcgttgccttgtattgcagccgatgactatgacactcctcgagatgatgagaatgaacccgcggccgttcgacctgcctctgctgaaaatgaccgtcaagcggcttttactggcgcttgatttcttacacgcgaaagccggggtgattcataccggtaggacgcgcgctacttaagtgatgaatccaggactgattccgcaagatctaaagaccgataatttgatgctcagcctagatgatacctccatgctagcggattttgcaaccgcggagtctgaaaatcccagtcctcggaaggtgattgataagtcacgtattatttattgcagccgaaggtttcgaagacctacgggacgcaggaactacggccttcctgttctatgtgactttggtgaggcaaggataggcaaaacgcaggagtcggggcctttcgtccaaccgcacatataccgagcgccggaagtcatcttcgaaatgccctggggaagcgctatcgatatctggaaccttgccggccttgtaagtcaatgctacgagcattcgtgctactgccttgcttagctgacaacccatcagatctgggatctgtttgaaggacagcatctatttggagatatattcgactccagaggtggccatgacccgttcaggcatctagcgcttatggtagccttgattgggcccccgtctactgaattcgtgcggcgtagcgagacgacggtgcagtgttttgacttgaacggttagagcctgttgtcagtagacactttttgcaccgattttgagaccgattagttgcaggtgactggattgctcatcaaggagcgcc

SEQ ID NO: 20402 - DNA, 1152 bp, Emericella nidulans
gcggatggaaggagccatgctggttatctggttacaatttcactaatatagctcgcaagacagcattccactggactcgcacacagcttcctgcgcgatgtcctcccatcgggctgatttcgatagtatccctatcgtcgatctgtccaccttaaacagtcctcatattcagaacgccagaaactcgcagagtccgtcaggaaggcctgcattgaggttgggttcttctacatcaaggtttgagaaccacccacaatgaggaagcctagctcacactagcagaaccatggaatcgctggggagctaatcgttcgtaccttcgaggctgcgcataatttctttgctcttagcaaagaacagaaaatggaatgttacctggcaaagtccaaagtctgtttggagttacaagagattgatgaagtctagagtctgactgcgatagaacttccgcggttacagccccttgtacggcgaaaagcgtccaacccagagctcgagaaaccagctgagggagccctgtccgaggcattcgacattggttacgagctggcaggggatattcgaaaaggccccggtgacccgcctccccaagatgagtacgggctatacggggacaaccagtggccggatgagcgtctcctcccgggctttcgcaaaatttaccttgaatacttctcccaaactcttgagctctctcgaaagctgatcaagatgaatgccttggcccttggccaggaagagcatctcttcgattcggcagtggagtatccaggagttctctcgagaatgctgcattacccgcctcagccagtggaagggcaagagattccagggcaggcggctcatacagtaaggtcatgccccgactacgtagagaagtcactgatgggtgaaggactgggagtgcttcactatcctggcgcaggaccatgtcccagctctgcaagttcgcaataatcagggtcactgggtggcagcaccaccaattccaggaactttggttgtgaacataggggactgtctcgctacctggtcgaataatcgattcaaatcaacgattcatcgtgtggtaaacttgactggagaggaacggtactcgattccgtttttcttcggtgttgactataccaccacgattttagtcttggggga

SEQ ID NO: 20403 - DNA, 1152 bp, Emericella nidulans
catgcgcaagcgagccaactaccttatcgatcaggcggagatgccctcaaaacgatcccgggacaagaggagaacggtttcaagaggttcgtcaagaaggcgccagttggtcctgttcttcttgcaaccgcatggaatgtaagttgccccaggctttccgaagggttggaagctaaccggtcagtatccttacttgatcaccatcaacgcactcgtccccgcgctccttgccggaaacaccgtgatccttcgtccttcacctcagactcctcttgttggcgatcggctctctgaatactttgagaaagctggtcttcctaagaatgtgctgcaggtggtgcatctgggttcgtgggacgttctagatgaggtcgtcaagattccccagatcaagcttgtttctttcgtcggttctactcagggtggtctccgtctccgccaggcgaccgccggccgaatcttgccactgaacttggagcttggaggcaatgacccggcttacgtccgtgccgatgcggatctcgcgtacactgccgcgcaggttgtggacggcgcagtctttaactctggccagagctgctgctcaatcgagcggatttatgtgcatgcagatgtgcacgacgctttcgtagccgaggttcgaaaggagctagcaacgtacgtctctcaccctgaatcaagaacatcattaacgaatgtagatacaaactcggcgaccctctcgacaaggctactaccactggccccgtgatctcccatcaagctgtcaagaacattcaagcccacattgacgacgcattgtcacgcggtgctgtggactcgacccccgagaaccctactttcgcgaaaattcccagtgaaggaagcttcatcgccccacgcgtcctcactaatgtatcgcacgacatgcgcgtcatgcgcgaagagacttttggccctgttgttcctattatgaaggtgcagagcgacgatgaggcagtggcgcttatgaatgacagtgactatggtctgactgctagcgtctggaccaaggatatcaaggcaggagaggacttgattgagcgtatcgaggcgggaaccgtcttcatcaatcgttgtgattaccttctccggttcgtggcaaaaccactatgcatcgaatatgatactact

SEQ ID NO: 20404 - DNA, 1152 bp, Emericella nidulans
tcggtctccgcatccgaggtctcccacttctcatccctcgccagctcctggtgggatcctatgggcccctcacgggtcctccatttaatgaatccaatccgccatgaattcatcgcatcctgccttgccgaatcatccccagactctcttacgaaacaacccggaacccctccgaacacactccactatcttgacgtcggctgcggtggcggcatcttcgccgagtcgctcgcgcgaactattcccattccggggtctacagagtctaaatcggggaccgtcacccgggctgcctcaataacagccatcgatcccacaacgacacttatccagattgcgcgtgaccatgctcgcaaggaccccaaggttttggcacacctgaacgaagggagattccaatatgtgaactgtacgttggaagacgtcatcgcctcatcaccgaacgcgaatcagtcctcaaattcaacggacgcatcaagagccggggctggagtccgaaggaaagatggtttcgatgtgattactctctttgaggtcatcgagcacattgacacaaacgcttccatcaccccgctcacttttctaaccaactgtctgcggcttctcaaacccggcggatggctaattggttcaacgattgcacggacctttccttcctggctcgtaaaccaggttattgccgaggcgccgtggccggtcggtgtcgtgccgaaagggacgcacgagtggaaaaagttcgtcaacccagatgaattagaaagctgggcaagcgaggggttgatgcggtctgtggatctggagaggaattcggtggcgaggagtgggagtgaggcactcgatgggatgagatggaaatgcgcgggtgtggtatatttccctggccttgggtggaagtttgtacctggatcggagagttggggaaactacttttgggctataagaagaggggtgtaaattatctattatcggcgaaagtgtaacatattaacattgtatagtacaggaatctgagaatgttcctaatggtgattgaccaccaatgttattgctaagtcctcaatattctgtatattcaatactaatttagggtcaccttttcctcccttccctttcttttttgaactactcggtggatctggaacactaacagtg

SEQ ID NO: 20405 - DNA, 1152 bp, Emericella nidulans
atgtccagcaaggccgcaccaattgtggttgtcggtgccggcgtcttcggactgagcacagctatccacctcgcacaacgcggttataccaatatcaaagttcttgataaacaggcttatcacgaaacactgtactcgtatgataacggttgcgacgctgcctcggcaggtaggtcttcaatatcaaaacatggttgtgtacccaagctaaccctgactggagacaataccaaaatcatccgagctgcctacggctcccaaatcgagtaccaaagcctcgcccttggtgccatctctcgatggagagaatggaacaatgagatcaggtcgggcaaaatagtcccgcccggattcaccaccgaagacgtcctgttcgtaaacaacggcaacctgactcttacatctagcgagactctccctgagttcgagaaacagacaatcaagaacatgaccgaggcgggactggcgaatacccagatcgtccttacagatcctagcgatgtcgagcgggcaaccgccaacggctttgattttgctatcaacccgctgaaccggaagcaaaatttcggcttgctcgatacccaaggcggattcgtctatgccgataaggcctgtcgctttgccctccagaaggcacaaagcctcggagtgcggtttgttcttgggggtaccgagggcactctgtcgaagcttctgtacgacgccacgtcccgggtcattggcgttcaaaccatagacggcgagtcacatctggctgaactgacgatcatggcttgtggaggttggacaccgtctcttgtgcccaaacttgacggtttatgcgagacaactgccggtagtgtttgcatgttccagctgccacggaactcgtctcagtgggatcgttttgcacccgagcgcttccctacgtggacatacgatattcgaagtgggaagaatggcggtctctatggcttcgctcgagacagcaatggcatcgtgaaaattggataccggggagcgaaattcaccaatccccagacacagccagacggtgcagcgaggagcgttccgatcactcgatggactccccaatcaactcgccaactgccgttgtcagcggcgcaagttattcgaaaatttgttcaggagaacttgcccgacttgatagcc

SEQ ID NO: 20406 - DNA, 1159 bp, Emericella nidulans
gccctaaacatcgctccgcaagacgattacaccgaccaggtcctgcagacagcttatgaagctgcggagagaataggcgacttctcacttttcatctcattcgactatgaatccgggggcgcatggcccgtagatcgggtcatcagcacaatcaacaggtacaagggcaggccagcccagtatctttacaagggaaaaccattggtatccacctttgagggctcgaagagctcagatgactggccagccataaaacaagctacgggctgcgtgtttgttccgtcgtggacgagtctctccccttcgcgactttacactgttcacggtacaattgacggtgccttcagctgggacgcttggccggttggagcacaagagaaggatacgtcaagcgacaaggcatggatgaatgcgctttctggcaagccgtacatgatggctgtttctccgtggttctacacgaaccttccccagtggaataagaactggctgtggcgtggcgatgatttgtggcactaccgctggcaacaagtaattgacttgcagccggcaatggttcaggtaagtaaagaatcttctggacgcgaaagtgctgacaaggctgctctatgcagattcttagctggaacgactacggagaagcgcattacatcggacccatctacgagccaggaattccagaaggtgcatcatggttcgtgaaaggatgtccccacgacgcttggcgggaatttctacctcattatatcgacgcctatcgtcgacggagtgcaatgttccgcgaacgcgcgtcgaatcccgccacggtaacctcgttcgctcctagacgtcctctctcatatacggacaagatcgtgtattggtatcgacttaacccgagtcactccggaagcgctgatggcacgacggggaataacccgaatatgggccagcctggattggatccgggagaagtgtcgcaggatcgagtgtttgtcagtgtgctggtcacggagccgagccaggtgcatattcagattgggcctgcagcatctagagtcttgattgcaaaggagtccggagtaaatcactattccgtgcctttcgacggacattcagggccggtgaggattgcgattgtccgacatggtagagaagttaagaccgcaacagggcctgc

SEQ ID NO: 20407 - DNA, 1159 bp, Emericella nidulans
cgtcttcgcggtcgagtggtacggagaatccgagttctggttcgctggtctgaaaatattggccatcatcggtctgattatcctgggcgttgtgctgtttttcggtggaggcccaaatcatgaccgcttagggttccgctactggcaagaccccggtgcattcaatccgtacctggttcccggggacactggcaaattcctggggttttggactgccctgatcaagtccggtttttcgttcattttctcgcccgaattgatcaccacagccgctggagaggtcgaggcaccgcgtcggaacatccccaaagccaccaagcggttcatctaccgtgttttcaccttctatatcctgggcagtttggttattggagtcactgtggcctacaacgaccctacccttgaggctggagtcgaaagcggcgggtcaggggccggcgcgagtccattcgtcgttgccatccaaaacgctggtattggagggctcaaccatgtcgtcaatgctgccatcctgatctctgcctggtcatccggtaacgcatggtgttacgctggatcgagaacgctgtactcgctcgccggtgagggccaggccccaaagatcttcacacgcaccaaccgcaccggcgttccctatgtggctgttcttgcgacatggacaatcggactgctatccttccttaatctgtctagctccggacagacggtcttctactggttcaccaatattactaccgttggcgggttcatcaactgggttctgatcggaatcgcctatctggtatgcttccctccatctcttcatctgaacacacctgaccaaaaacagcgttccgcaaggccctgcaattccacggcatgctggacatgctaccattcaagaccccgctgcaaccatacggtacctactacgtgatgttcatcatctcgatcctgaccttgacgaacgggtacgcggtgttcttcccgggccgcttcactgcttcggacttcttggtctcgtacattgtttttgctatcttccttgcgctttatgctggacataagatctggtaccggacgccctggttgaccaaggtgtcagaggttgacatctttacgggcaaggatgagattgaccgtttgtgcgagaatgatatggagcgacagccccggaact

SEQ ID NO: 20408 - DNA, 1163 bp, Emericella nidulans
gaacagtccaattttctccacctttacctgattggaaagtaggagccattgatcgccttgggtttggagtgatgaacaaagtcatattagcgtttgaccagcccttctgggacactgaacgggatatgtttggccttttgcgcgagcccaccaacagggatagcatggctcaggaagattatgcctcgaaccggggccgcttctatctgttttggaactgtatgaaaaccacggggcttccagtattgatcgctcttatggcaggtgacgctgctcaccaggcagagcgcactcctgatgctgaaattgttgctgaagtcatgagtcagctacgtaacgtcttcaaacaggtggctgtccctgaccctttagagacaatcatcacacgctgggctagcgacaagttcaccagagggacatactcctatgttgctgcggaggcacttccaggggattacgatctcatggccaaatcggtcggaaacctctacttcgctggcgaggccacctgcggcactcatcccgctaccgtacacggggcatacatctcagggcttcgggccgcatccgagatcatcgattccatcctagggcctattcctataccgacacccctcgtcccagagaaaggcaaaaacacaaactcgggcaatactaatggcatgccctccaacactccacacatcccactagacacggacaccaataccccagaagtaccaccccaacaaccccagctgccaacatcaacatcaacagtaacatcgtcattcgaacccctctctagagctgcctatgaccaggccatgaatgccgccgtctatactgaaatcggtccaccaatccctcgccccggccgcccaggcatcaatcccttcatcctctaccaaaaagatttcatggccaaagcccgcgccgactgcgatgcagagtaccaggccataacaaaagaccccaacgcaaaggctccccgcgacaccgtccgcgctgcgctaggcctcatgtggcgccaggcgccggaggaagtgaaacgcccgtacctcgaacaggcggaggtcaatcggcagacgggcgcggagatcgcggcgaagtggaagagggataatgtggaatgggaaaggaggaaagaggcagcgaagaagaagtggcagcaggacaaccca

SEQ ID NO: 20409 - DNA, 1163 bp, Emericella nidulans
tcgtcctccgctgacgagattctaccggccctcatttatacgttggtcacttgcccgcccgagggcatcaacgtcataagcaaccttttgttcattcaaaggtttagaacaagcagcaaggttaacggcgaaaccgcatactgtcttaccaatctcgaggctgcaatcagctttcttgagaacgtggatctctccgaacttcgcgcagaggagggacaagaaggaggtgttaaggctcccagtaatgaacctgcatcacttgctgagagcattcgtcctccacaacctgcttctcaggagcccacatcatctctttctacggtaactgcatctgcggagccttcaaaacctgttggaggcgaaccgtccgagacgctgacggggttgacaccggcccagcaaggcagactgaatacgtttttgcaacctcctgcaaaggtgctcggggctgctaatgacgctgttcgtagcactgccgatcaaggactgaagaacatcagcgcaacgctagacagcagctttaatttcttgtttggccgtttaaaagagctgcagtccaaccaactgccaggcagagatggtataacgggccctgtactaccgaaaacactggcggaggctagacgtctagttacagcgcctgcatcaggtggcagtgctccggataaagaggacacgccgagggagacacctgccacagagccgtcccggctaagacgcatcgggtccaaggcggaagatactttcactgggctagttgctggacagcggactccccgtgaccggagtaccgacagcgtgcgcacacatggcagctccagagcgtcactagcgacgagcacgtcaaaagatgaaggccgaacacctagcacaaattctgcgttggcaaccccgacgctggagtccgtcagaagctttggaagcagcattaatcctttgaatcatattccggggatgatcaggggcttcagtcgtggcactcccgagtcgccggctgtatcttctcttccaactcggacgaaagcaccggcgggcgacgccagtattgatccgccaattcaacgtttcctcgatatccagactgcaaatgagcttactattggggatgtaagcgtcttgctcgatgattacaaacgtatctctgcagcgcttgtgaaacaagg

SEQ ID NO: 20410 - DNA, 1167 bp, Emericella nidulans
gcactattgtcggtgcttatcagcttgcgatcactatcggtctactcctttccgctattgtcaacaactctacaaaagaccgcaatgacaccggttgctaccgcattcccgtcgcggttcaattcgcctgggccatcatcctggttgtgggaatgatcatcctccctgaaaccccgagattcctgatcaaacaagacaaccatgaggctgctatcaagtctcttgcccgtcttcgtcgtctggacatcaacgatctcgctgttgtcgaagaacttgaagagattaaggcaaaccatgaatatgagctcagcgttggcaaagccagttaccttgagatactccgcgggtccattggtaagcgtctggcaacaggctgcgctgtccaggcacttcagcagttggctggtgtaaacttcatctgttcgtacccttatccctaaccagaaggctcgcaatgtctctaacagtcacagtttactacggaacgacattcttccaacactctggcattaacaacagctttgtcattaccttgataacgaacatcgtcaatgtagtttcaaccctacccggactttggatggtcgagaaatggggccgtcgcccgctgctactttttggcgccgtcggtatgtgcgtcagccagttcattgtggctattgtcggcacaaccaccgactccggcgtcgcaaacaaggtccttatcgctttcgtctgcgtttacatcttcttcttcgcgtcctcatggggaccggtcgcgtgggttgtcactggtgagctcttcccgctcaaggctcgcgccaagtgtctctctatcactactgctgcgaactggctgcttaactgggcgatcgcctacgccaccccatatatggtcgactctggtccgggaaatgccaacctccagtcaaaggtgtttttcatctggggaggattctgcttgattgctggaatatttgtctggacctgcatctacaagaccaagggtcttaccctttgggaggtcgatgccctttacgccaaggttcccgttgcctggcgctctaaaggctttgttccgtccgtgcattacacagacgtgcgctacgttgctgctgggcgtaagggtagtggcttggctgaattataggcggacgcccagcccaagcagatctcggagcatgtcga

SEQ ID NO: 20411 - DNA, 1168 bp, Emericella nidulans
cccttggcccgaattgttgacagtagtgggctgagcagatataggatatcggcattgatagtgagaaatcatatgttactaccagactatatacttacaacggacttccctatagccaagtatcacttctggccccagcattgggcctttctgtcccgtctacagtctggcgggtcgtgggcaaaatattcatgatattgctcctcttcaaatatcttggctcccgagtccaatgccaatgtatgccggaaggagcagcatttgaacttagcaggacaggatcccccaaaccatactgatttttccgatctgccgatacggaacaaaccgctatttctccttcgcaatgctcacttattagaaatgataatgagagcaaaggatagacgtttcacagccttttgttctctggaacgttttagacgtgcatgtctcaaactttgccatcaaccagccacagttgtagagcatcagcatcatgaacgggtcgaatctgcacttcgcgaatatcacggtgactgtggatgactctgctgccccgagcggcgagaactgggcacaaaatacgggtggattcgttaattcccttgcacgactctactttcaaaagaaaagcactaatactcagccgcagataccatggacgtcaacaacctgaccatgcacaactttacctttaccggcggagacgactgcatcgcaatcaaaccgcggtcctataacatcaacatctcggatgttatctgcaacggggtaaacgggatcgcaattgggagtctaggacagtaccttgaagacagcagcgtaaagaatgttacgatatctcatgccagagtcccatcgaccagatacggaacatacatcaagacttggatgggcgagcttgtgcctcaacccgatagctacgagtctgactacaagccacaaggaggctaataaggggtagccaggaatattgttcttgaggatattgatgtaacgggggcttagcgtgcggtgcttgttacgcaagataacggggctgagaataatagctcggccaaaggaactagcaatatggagatctctgtgatcaggttcgtcaatcgctcggggacgctgagctcaagcaaccgtcttacggtggattgcagcatagtggatccgtgctttgataatagctttgagg

SEQ ID NO: 20412 - DNA, 1175 bp, Emericella nidulans
cgattcaaaaacgcgcacgacttacgcggtaataaggaatctaatgctgcgagcagacgtcgcttaccgcaaaacatgcgtgacagtcatgaatctcgatcggcaaagagcggccgctcttcacaatatgttccaacgcctgaagatgaagaaaagcgacgctcacgtcggatagaacaccataagcctacagaagaaaaccctgaacgagtgaagcagcatgtctgggtcccacccacaattccctacaccacttcggcatccgaatttatctatggtacgacagccgtcgaagctgcgttgcgttgttgcaagcgccagctatacaaactctatctttaccagacagccggagaagaagagttgagcgctgacaagagggtgttgcggaaacttgctctgtccaagaacgtcaaagtcaagttggccttcggtgaatggaaccgactgcttgataaaatgagcgcaggaagaccccataacgggtgtgtcctcgaagtatcgccccttccccgaacgcccatccaagcactcaggcctgtccaattgggtgacggcgaattcaaagtggaactcgcaccgcaaacgcgagaggaagcgaaggtgaacgggacgaatgactgcataaaaatcaacaattcatacacccaacagcagataagatacccagtcgtcgtgctactcgaaggtgtcgttgatacgggaaacctagggtccattatccgctccgcctattacctcggggttgacgccattgtctttgccggccgacactcggcgccactgtcgcccgtcacgatcaaggcctccgccggcgccgccgagaacatgactcttcttgacgtccagaacgaagtagacttcatcaagcggtcccaagccaacggctggcgattttacgctgcagatgttcctaagacaggtgctacttaccttgaacctggcgcgctacaacctcctggctcggcggtagcgaatgaaggacaccccgacgccctcatcggacagtcgcccagcgtaattatgatgggctacgaaggatctggtcttagcaaccacatcaagggccgtgccgattccattgtcagcatccctggtgccagactccttcccggcgtaggagctgcctctgacccggctcgagttgatagtctcaatgtaagcgttgccgcggc

SEQ ID NO: 20413 - DNA, 1175 bp, Emericella nidulans
tggcgcctagacccgcagaattcgtcatacacatgtttcgccctcctaacgggtcacgcagagtctctaggagccatcagttttccacgggactcaccaccctcctgatacgccagcgtacaaggctccagtaaatcatccccctccgttcgtcatcacgggttcccaggatcgtacagtcaagcgatggaacgtcggaaagctaggccctaccattggcaataagccccatacaccgaaagcgctgttcactcgcaaggctcacgacaaggacatcaacgctctggacgtgagtccgtcatcggcattgtttgcttcagcctcacaagaccgaaccgtcaaaatctggtctgcagacgacgggtccgtcgtgggtgtcttgcgcggtcacaagagaggagtttggtcggcgcgtttttcccccaagggcacaccgatccttagtgcagatgccaaaagcagcactaacagaggcatgattgtaacgggctcaggtgacaagactgtgaagctctggagtttgtccgactatagctgtcttcttacgttcgaaggccacacgaatagcgtactcaaggtgctctggctcccaccacccgacatgtccagtaagaccgaagatgaggaagatgaggatgcagcagcatcaaagcccaactctattcagctccgacctcttgttgcttccgcagccgcagatgggctggtgaagatctggtccccctacacaggcgaactggaaacaacccttgacaaccacaccgatcgagtctgggcgctagccagccctacaccatccgggacgcgtgacgacgtcaattcctccgcaaccaaatctacctccccctacgccattgcatccggctccgcagattctacagtcaccttctggaccgacacaacctccgcaacctacactgccgccgtcaacgccaactctgcccgcatagaacaagaccagcagttacaaaattacatcgtagcaggcgcgtaccgtgaggcaatcaccctcgccctacagctcaaccaccccgcgcgcctcctgtccctcttcagcgccgccatcgacgctgcggacgatcctcacaatactgacaaccaaggcgaagatcgtgcaaacagtttcaccgggaacccgtctattgacgaggtcctccaaactcttgaccccgcca

SEQ ID NO: 20414 - DNA, 1178 bp, Emericella nidulans
gttccggcgcacgctcagacaatatatccaaaaatttcacagccatggccttgcgatgctgagctgcttggacatcacggggcggtatcagttcgaggcagtgttctcgccgatataccacttcctgcggagtctggaagtggactaccggttcgatgcgcgggtgaaggatattgggacgacaatgagagaggggcagacggtcgtggacagaatcgattacatcgcggatgggtttgagttgagacagccggtcggtgtggacgatatagtgatcctcacgctggggtcgacggtgtcagggtcgacgacgggcacgaacgccgaccctccgctcagggagccgttgcagccgggcgaggcgctggacgcgaactgggagctgtggctggaactggaggcgaggcatcccgggcttggggatccgtataacttctgcacgaagcagagagagtcgatgatcgagagtttcaccgtcacgaccgaggacctggaggtctacgcgcggctctgcacactctcgaagagccccgagggggctgggccaggggctggctcgttcatcgcgctgcaggagagtccctggcggatgaacgtttgcctaccgacgcagccggtcttctcagagcagccgcccaatgtgcgcgtcttttgggggttcgccagcttccccgaaaaccaggggaaatttgtgcgcaagccgatggtagcgtgctgcggcgccgaggtcatggaagaactgctggcgcatctacatttggacccgcgccatctgatcaagcgcacgatgacggtgccgagagtgatgccgcggatgagcgcgatcctgctgcccagggcgctgggcgatcgcccagcggtgattccgccgtgcatctcgaatctcggcctggttgggcagttttgcgagctgccgcatcagagctgcgtggatatgagctacagcgtgcggacggcgcagtgggcagtcgcagatctgacggggctggaggcagacgaaagagatgagcggcactggtgtcatttgagcttgctgttcaggatcctgttttggaagtgatccgtcaggccatagcattgcctcagtccggctagcatacctcctaccagcctaagctctactagatctaccagctctatctccattattatctcatcactatcccagcaccttattt

SEQ ID NO: 20415 - DNA, 1178 bp, Emericella nidulans
tacggaggccgacgagggtgttgatgtggtcttttcggatggggttgcggaccggtttgatctcgtggttggggctgacggggtagggtctcgaatgaggaggatgatgcttggtgttggggagggcagcgaagagaacccggggcatcattctattggagtgtacgggggctattgcactattccgcaggaggttcaggagggcgaggagtataatgccactgcatttattgcaccaggaaatcgtggtatcatgatccggcggcatgatccgcacagggtacaggcatacgtgttctgcaacccgcgatcgtcagagcgcttgctgaactcgactagaggagacattgaggaggaaaagagagctctggcagaggtattccggaacgcaggttggaagtgtgaggaaatcttgcaagcgcttgttgcatccgacgatttttattgcgaacggatggggatcgtcagattgaacgcttggtctcgcggccgtattgcactggttggagatgcagcgtactgtccgtcggcaatgactggaatggggacaccgtgtgccttgaccggcgcgtacatccttgccggagaaattgggaggcattgcggagcaattgcctccacggagaacgtcacggctgcattggaggcgtacgaccggaaattcaggccctttgtggaccaggtccagaagggactgacagacacggataattatatggacaaattcccggcttcgccccttggtgtcagtgtgatctaccttgttttctggcttgcctcgctgctgagattggatatcattgcgcaatgggtcttgcgagaaaaaacaaatagctgggagctgccggagtaccccgagatggataccttgtgagcaagcaggaccagcccatgtacataaaaccttgtcgttcagtgagattcactttgcccatttatatcgtaatcggcaattgaagagagaagtctgaaccagtaaaaccaaagtcgaacaatccgtcgaaatctgaatcgaaattaatatccagggcctgcggagaaacaccatttgtccagagcccaaggtcactgtgtgtagtggcagcggtgaccgcgtccgccctggcctggagtatattacggcatgtagaaaggctctcatgcatggctctggaaatagtctccgttgctggtgagtc

SEQ ID NO: 20416 - DNA, 1181 bp, Emericella nidulans
gttatcgacccgagtgactctgaccatgttctttatggcaccggagcgactatctgggcaactgacaacttgtccaaggtcgacaagaaccagtcccctggctggtacattcaagctcaaggcattgaagaatcggttgctttagccttagcaagcccgaacggcggcgattcgcaccttctcaccggtctgggtgatatcaacggataccggtatggagatctcgacgttccgcagccaatgttcgacttaccggtgttgtcaaacttgaatgctctcgactgggctggtcagaagccggaaattatcatccgtgccggcccttgcggacacaactatactgacggctgcggactcgcggcgtattccgcggacggtggcagttcgtggaccaagttcgcaacctgcattcctggcataaacacaagctcctcgaatcccggggtcattgcgatcgatgcttcaggcaaggatatcgtgtggtcgtcggcaatgacagcgtattggccgactctgcaggctatgacccctcgtacgaaccaatccggtccatacgtcaccactgacttaggacagacttgggtgtctccaactggcttgaatgtgcagactcccaacattagcgctgacagagtccagccacgaacattttactccttcactgatggaacatggtatctgagcagggatggcggcctctcctaccgcgcctacaaagctaaagaggtcgggctgccagcatactcgggagcgctgccaattgcgaatttcaacagagcaggcgagatatggctgggcctgggggatcatggaatctaccatacccgcaattttggcaagaaatggacaaagatcactggacgcggagtgacagcaagacagctaacaattggtgccggagcgcgtcgctcatcggaaccaacactcttcattgttggaaaagccgcgagccatggtgctctcagtaaagacggagtataccgatcagacgataatggtaagacttgggtgcgagtcaatgacgagaagcatcagtacggtggaattgcaatgatacaaggcgatccgcgcgtgtacggacgtgtctatctgggtaccggcggtcgcggtattatctatgccgatatcaaggaataaaagcacaaggactgagagtcaatttacgagacaatatgctccca

SEQ ID NO: 20417 - DNA, 1188 bp, Emericella nidulans
ggcctatctgcggccaaccctcactacggggcgggtgatatctcccaatggaccggccccggtgcaggcgattgtacgcaaagcagccctagcccccaaatcccattatctcgattacatcaattgataaagtatatacagaccgaggcccctgccccatgatgaacacacttgccaaccataattttctgccgcatgacggacgcaatatcacgcgggataaacttatccgtgccctaggggaagccctgaactttcatccaagcctggcctcgctcatgttcgacatggcaattgttgtgaaccctgaacctaatgcgacctggtttaccctgtacgtgtttagaccatgctggtgtattactacccttaactgacatcgcccagcgaccagctaaaccagcacaacattcttgagcacgacgctagcctcaggtacctgaccccagtagccctccattgccagcatattgtgtcatgctaatagagatttgaaacagccgcacagacgccttcttcggtaacaaccacatcttcaacgccagcatatttgcggaaacgacgcactactggacgaacaccaccctgactccgctcatgctcgctaacagcaagctcgcacggcagatcacctcgcgcgcattcaacccgacgtacaccttcacgaacagcacagagcaattcagcctaggcgaagttgcggcgccagtcgtggcgtttgggaacctgaatgacggaacggtggaaaaagagctggtggagtacttcttccgaaacgagcggtttccgacgcacttgggctggaagacacgcgatcaggtagtgcagcttgcggatatcacaaagctgtccaggattattggaggcatgacggacttgctcaccagtaccggtgatgctgcaactgccagccccgctagagtgaagagagctgatctgcacgctggcttcagagggtaagcgagtctggttcgttaaatgcctgtactgctcgagattggaggtgattactcgttttacatatgctgtctgaagctggatgacacaatagctgagctcgagtgaagtagcatctggctattctaatacagtacgaaagacacagttactagctactctacgcctcaatctacttccattccaccaggccatcctattcaaatacacaagaagtctcgcttgaccggc

SEQ ID NO: 20418 - DNA, 1189 bp, Emericella nidulans
  unsure (1)..(1189): unsure at all n locations
gcacacccacctgcccaaatgggaattgcttttttattttaacattcttagactgatctagtcctctatatcgacctgttcctaacattgttggcgcctttacatctgaacaggcgtcatacttgggcccgtagtctggaaaccaggtatggtaatcagaaaaacaaggctattgactggactaacagcctagcagaaacaaccccgatatcactatggaatgggacccaacgcagttcttccgcgaggatgacacgccacgacaaccatttgtccttctggtactgaaccagccgataaatgagaccgctcttgctgtcttgtggaaacatggtatgtcccggcgcttatccctgtcagcatgtcccgagcctatagtgcactatcaaacattacgggacgcatcgcaaactagccaggctaatggtatgatagcgctcataactgtctgcgcagacggtggtgcaaaccggttcttcgagtggacaaagtccaagggcagggagaatgatgatgtacgctgcttgttccacctgcgtatatattccaacccactctgatcaaaggaacgactaacaagctttagctcccaacaacaatagtcggtgacatggattcggcgcgttccgaagtccgcacccactactcaaacctaggcgtgaatatcgtccaagatggcgatcagtacacaaccgatttcaccaagagcttgcggtatatacgtaaacatgagagtgacatcctctcttcagccgggttatcttcaaatgacaaactatcgattctgatccttggcggtcttggcggccgagtggaccaggcgttctcgcaggtccatcatctgtacatgatgaatcagaatcaagccgaaacaaacagagatcttttctgatatccgaggaaagtatatcgttcgttctccaaccaggtcagaacacaatcnacgtgcctaggacaaatcggccccgttccactgaccgataccaatcgcctcctataccaacgccagacgaagagcacgggaagcatctgctagaggagaatgttggtatcattcctgtctctggcccggcaaggatcacaacctcgggtttcgagtgggacgtacagaactggcaaactgaaattggcggccaactaagcacaagtaatcacatccgggctgaaatcgtgaccgtgcagacgaacg

SEQ ID NO: 20419 - DNA, 1194 bp, Emericella nidulans
cgacacttctacaatggaggcaatagatacagacggtttgacgggccaggaagacagccgttaatagtgcacctattgcagaaagcgagaccgattcactttgtgatggtgggaggtgttattggcggcgtttatgtttataacacggatactgtggaggtgagctgtcttattcggatacaccctccgccgtctttgcgcgcgcacattgaatttgggcttctccccagcttctttggaattatgctaaagggacaaatagatgactggtcggcgacggtttaactgtgtctcccatcaacaggagctaaagatgggcgaacagagctaccgagaggtgcttcgggattgtcaaggacgcatccttccagaatatcacccgctcaccatcatggttaaccgcgttctccatcgtctggttcctatggcgcctatcgatggtgctgactggaaggtccatgttattaaagatgataacatggtgaacgctttcgtcctcccagggtaagtttgatgcttccctgcgctctaccgcactgtgacaacctctaattgcgcatagcggcaaggtttttgttttcactggtattctaccaatttgtaaggatgaagacggtctagcagctgttctcggccatgagattgctcacgtggtggcacatcataccggagaaaggatgagtaacaactttgtcaccatgggagttatcttcctcgctgctcttctctttgatatctccggaaacatcccatctttattactaaatctcatgtacagcttaccaaactctagaacgcaggaggtaagaacttgtcaatatcatagggtcgaaccaacattgctaacccaaattaggcggaggcggataatatcggcttgagtatgatttggcgttctgccttgctcttgggttactactaatcctctctctcttagtgatgatgtcgaaggcttgcttcaaccctgaagctgcggttgatttgtatgtaatccggttctgttggatctagccaacactattcctcgagcccgagaaattgctaacggttgtagctgggcacgcatgcagagagcagaaaagcaggcgcctcctcaattcatatcaactcatccttctgtgagtgtgtcgatagatacaggtcctgaactcgagctgactctggagtagaactataaccgcatggaggctattc

SEQ ID NO: 20420 - DNA, 1205 bp, Emericella nidulans
tgttcgcgcctttgatccatgagttcacgtatcagtccatggttcacgacttgctgcccataaaggaaggggacaaaattacgtataagatggttgtcaacaaaggcaccacgaatgaagaggtgaaggagatggagctcaacgatcacgatagaatctgggtagaatacaggcatatgcatatgaaggacgtgctaggtaaattgggtgaagacttcgccaggttccgagccgctaacccacagtttgcggaagagtatgcacccccctacgatcttgaatcattttactaactcgccccagtaaccaaaaggctgacgtgggcattattaaagacatgctggctggccttcgagaattccaagaaggcagagacgcgtatacccttcatctaaacatggcggaagaatgcatgaagttcttccaagatcataaacttattgaggttagctctgtagagcagtgcctcgcaaccggccttgacgagaattataaaaaggccaaggggctggcatcacagctcgtacagttacttgatgatgacactatcatccatactgacaggctcagactcttactgttctatatcatataccgcaacggacttctccctggcgacatcaggaaactcatggcacatgcccaacttccacctcaggacggaaatgtcatttctaatctcggattgctcggggccagagttgacaaaccattgaaggatgacaaaccgcccgaacagccacttttcaataggaaaccgcctgtggtagccgattcggacgaaggaatcctctcccgttacgaactcaacgtcaaaatgatgctagaagacgttattcgaggaacgttggatccgtctatattccctcacacacgtcctcagactgatgcagacgctatggcaactcagcaagacactctttcgcaagcatctctccggagtgcgaaaccgacctgggcacggacacgcacgaccggggagcagccacggcaacgcatcatcgttttcatggcaggtggtgccacatacggcgaatcccgagcatgctatgagatctctgaaactttcaagaaggacgtctttcttgctacatcccatatgctcactccggggctgtttctccgtcaagtcagcgacttgagcgcagataagcgccgtctcgatattcccgcagagcgccaaaaccaactgcgccggccatcta

SEQ ID NO: 20421 - DNA, 1212 bp, Emericella nidulans
caaaccgtacgcgttcagccaaacccggtctttcaagatcttcgttatcctgcacaatgtcttcttggctgtctattctgcatggactttcgccggaatggttcgcgcgttccgctacaccttacccgcttggcaggaaaacggcctcgtgggcattgtcgatgcgctgtgcaagtgcaacggtcctcgaggatacggaaacgcggccacctatgacacaacgataaacaaatggtctatccagaaccctgaatacagattggctgaaggtggtgtcccagattctacggacgttggccgcttgtggaaccagggattggccttcctgggctggatcttctacctctccaagttctacgaagtgctggatacagcgatcatccttgccaagggcaagaagagctcgactttgcagacttatcatcatgccggtgctatgatgtgcatgtgggccggtatccgctatgttgcgccaccgatctggatcttcactttggtgaactctgcgatccatgcgatgatggtacatataccttgaattactacttgtgggtcaattggactaacgatgaatagtacacctactacacattgacggcgctccgcgtccgcgttcccacgatcgtcaagcgctccctgactaccatgcaaatcacccagttcgttatcggatcggctatggccgcatcctacctgtttgtctactatacactcccgccagtccgcttcgtacctacaacatccgctgctccggttgttgctgccaccggtttgtcttgggttaagcaagttgccttccgcgccgcaggtgcagaaggtattgccgagaacgtgggacacgtcgaaaacaaccttggcgctcctcgtgaggttgtacaacccggaccaatggtcacttgcatggacacctccggtcagggtttcgcgatctacctcaatgttgcttatcttttgcccctgacctatctattcgcccgattctttgttcgctcctacctgtaccgtaaggaacctggtccgcaggctacgcacattcacgccgccgagaaggccggcctggatgcgcttaagggagtgagccgtgagatccagaaagccgcggaaatgagcggggaaaccagcgagaccaccgaggatgaggccattgccaagtctcggtcgactcggagccacgtacaggataccgtcgacaactcgcccattcgaacccgc

SEQ ID NO: 20422 - DNA, 1213 bp, Emericella nidulans
gtggtggcatcgggggcttaacggccgcaatcgccctccggaagcagggccatcatatccaggtctgttgtttcgatagtcactgtacattccacgggaaaccctctgacaggcacagatcttcgagcagtctcgactggctgtcgaaactggcgcggcactccatctcgctcctaatgcaaacgggattctgaagcggttgggcattgacgcgcagcaattcggggcgaatttgatggagagggtaagagtgttgtccatggccccaatgatcccaggccttgatggtgatactaagagagctgattcctttcagctagtggagtatacctcactcgggaaagtcgagcgagcaatcgacctggccgagcctaacaagagatggcagcatgtgagtaagcaagcgccgagttgagagcaattactttgtactcaccacaaatctagcaatggctgctagctcaccgtgtcgatctgcataatcagctcaagcaaattgccatgagcccagatggcgtgtacgaagccatcccctttcgaaccggaagccgcgtagtgcaggtcgaccccgcgacagccacccttactctagaggatggcagccagttccacggcgacattctggttggcgcagacggcgtccactcagttacgcgtcgtgctgttcctggaggaaatgtcaaggctgcctgttgtggtcgaagtgcctttcggtttctcgtaccgaagcaggctgccttggacgaccctgagactgcagcgttggtcgaacggcccggtgaattatgtatctggtatggaacggaccgtcgcattgtgatgtatcccacctcgcacaacaatgtcctgaatttcgtgctcatccatccctcagtggagtcgatctccgctgaagaggcagacgagggctggggtcactcaggaaatttgcagcgaatgctccagatcttctccagcttcgacttgacagtgcttaagctgctggctaaagctgaccccaagactgtccgggtttggaaactgctagacatggaggagattccgcggtggtacgaggcacggttagctctactaggcgatgcagcccaccctttcctgccacatcagggccagggagctggcgtggctattgaagacgctgcctctctggcagttgtgcttcctctagggaccccggtggaagagattccagagcgtcttcgactttatgacg

SEQ ID NO: 20423 - DNA, 1215 bp, Emericella nidulans
aaggagatatatagtgtcaacgtcttcccttcaagcgacttgcgccacttgatggctgggactcctccagaccgtgatttcagtaacgccaaacctaccaaccaggtgaacaacaacacatttctcgtttgggttgacccttatgtccggcccatgatggaggaagatatagctttcctgaaagaaaaggtctattccgcctcgagctcatgcatgcaacatctcactaattctttcagggcgatcgagttacgccatttctgatgccgaaacgagggaagagaaaatatacagaaatctgggcagaagaagacggtcttatgaatatcgaccaaacaaacggcgatcgagaacgattgcctctgaatcaaggccgaggtaatatcgatcaggtaacggatgagactatagagacagacaaagtctctgtaggcccgttagtcagccgcctttattccttgctacggtacgagcatcgtgctcccgaagaaaacaccacaaacgggagcaccaatgctgatgtatcggtgaatggtatgaacggagattcaatggatatcgaccatccgacaggagagtcagaaaacaaaccacagccatctgcaacaacgttccgcgccgcatcgcccagcggcttcaaagtccccgccgcgaagctcgaccacgcacagctagacgaacgattaaaagctgagctgcgccacgtcggcttcctcgggccagacgacaatccagactatgacgctcactatgacgacgacatcgcgcagcgcctccgcctcttgcaaagcgaactcaagaaacagatgattattaacagtgcgcggaaagcgcggctcctcgaagtcgcccgcgagcgcatggcgtaccaggagtacatgacaatacacgacgatctagattcgcaagtacagcaagcctacttgaaacgaacaaggacgctaggcaagagcaaaaaaggctcccaggcgaaacatcgacctggtggtgccggcggcggaagccacgtcgtcagcgcggctggcattagccggcccgctattggagacgtggctcggacccttatggaccgacgtaagcgctggcgcgactgtatcgggccagtcttcaaagattgcaagactactgttccaggcccgggcgagagcctgtttaccccctccgttatggcagagtacgagaaggcagaattggatgggtgggaggaggagcagg

SEQ ID NO: 20424 - DNA, 1219 bp, Emericella nidulans
catccgcatccggatctttcgctactacttcgggcatccagttcgtcattgatggggaagcaggttacttcccaggctccaatgcgtactggatcgggttcctgaagaacaacagcgacgtcgatctcgtcttcgaccacatggcctcatctggcctgcgcatcctccgcgtttggggcttcaacgatgtgaacaccgctcccactgatggaagtgtttacttccagctacatcaggacggaaagtcgaccatcaataccggcaaggacggactccagcgcctcgactatgttgttcatagtgcagaaaaacacggtatcaagctgattatcaatttcgtgaactactgggatgattatggtggcatgaacgcgtacatgcgggcttatgggggcggtgacaaggccgattggtttgagaatgagggcatccaggctgcatatcaggcgtacgtcgaggctgtggtgaaacgatacattaactcaacggcggttttcgcgtgggaactcgcgaacgagccacgctgcaccggctgtgagccgagtgtgttgcataactggattgagaagacgagcgcgtttatcaagggcttggatgagaagcatttggtttgcatcggcgacggtacacaaaccattcctctatttcccagaaacctgcatcgttccaggagacggacaagctgacgataagctctagagggatttggccttgatacaggctccgatggaagctatcccttccaatacaccgagggctctgactttgctgcggccctaaccatcgataccattgatttcgggacgttccatctctacccggatagctgtacgttcctctgtcttctcttttcaccctcaatagcttctcctatttcgacccgctaccgtgcacaaaacacaaaactaacgaagaagcagggggcacaaataacgactggggcaagctctggatcacttcgcacgccgctgcctgcgccgccgctggaaaaccgtgtctgttcgaagaatatggcgtgacgtcgaaccactgcgccattgagaaacagtggcagaatgagctctgaacgcgacgggcatcgcggccgacctttactggcagtatggggataccctgagcagcggtccctctccagacgacgggaacacgttctattacggcagtgaagagtttgagtgtcttgtcacaaaccatgtcgagacgattgagaggagtgcca

SEQ ID NO: 20425 - DNA, 1220 bp, Emericella nidulans
agatttatgagaaacaggtgaatatgatgcaacgattcaaccaacctccgccaccagtccctgcacagattgctcatctctacccacccggccccggcaatcctcactaccaaaaagctatggagagagaggcagccaagcgtggcgccaaagatgctgcgaaccagcctgaagctatccccacgattacatcgcccggtgcacaagcgctacaacaatccaatttgacccctcaacaacaacgccagcagcaagctcaacaggcagctgccggattcgccgacaagcttacctcgaccatgatggagcaggagctcgacgacaatgagcctcccactatcaaactcggagacgcctccgttgctgctccatttaccagtaaactggcgaatgtcattgccatccccaatatccttcgccaaggccgctgcaccctcgttgcgacaattcaaatgtataagattctggctttgaactgtctgatcagcgcctacagtctaagtgttatctatcttgatggtattaagttcggtgacggtcaagtcactatcagtggtatgctgatgagtgtctgcttcctctcaatttcccgtgccaaggtaatattctcctagctatcctttgtgggttattctaatgaattttgcagtctgttgagggtctgtccaaggaacgcccacagccaaacattttcaacgtctacatcattggctctgttcttggacaatttgctatccatatcgcgactttgatctacctgtccaactatgtgtacagcattgaaccgtatgtccatgtttcctgatgtagtgcgccagcgcgcaggctgactaaaaaattgcagacgggacactgatgtcgacctggagggcgagtttgaaccatcactcctcaacagtgctatctaccttcttcagctcatccagcaaatttccacattctccatcaactatcagggtcgtccgttcagagaatccattcgcgagaacaaagccatgtactggggattggttgccgcatccggtgttgcattctcttgcgcaactgaatttgttccggagctaaatgagaaactccgtctcgtccccttcagcaacgagttcaaggtcactttgacagtcttgatggctcttgactatgctggttgttgggtgattgagaacgtgctcaaaagactcttcagcgacgtccgccccaaggatatcgctgtggccgcccag

SEQ ID NO: 20426 - DNA, 1226 bp, Emericella nidulans
gccacgttgcgatattaccctcccattgctgacaaccactagcattcctgacacaatcctcttcctttcgttttggtacaagtctagagagttgccaatccgcttgagctttttctgggtctcctaccaagggaccgctattattggtgccttcctagcattcgggttccttcacatcagaagagaagatggtaccggaggttggaggtatctctttgcttacgaaggtcttatcaccggtgtcatagccatcattgccgccttctggatgcctccatcgccaacgcagacaaaaggtatcctacgtgggaaggacggatggttcagtgaacgtgaagaaaagatcctggtcaaccgaatcattcgagatgatcctagcaaggggacaatgcacaaccgccaagcagtcacaccgaagatgctatggaaagctctttgggactatgatatgtggcctatatacctgctaggactaacctggatgattccaaacactccggcgacaagttatatctccatccagctgaagtcactgggctacaacacgttccaaaccaatttgatgactataccggcttatgctctctttattgtcaaccttcttttctggacatgggtttcggaacgctttgacgtacgatttctcttgggaattgtgagtgaagtctggtgcttagtgccgcttattgcacttgccgtcctcccagacaataccagtccatgggcgttgtggattctcaacgtgatcttgattggtgccccttatgtacatgccataatcgtggccatgacttccagaaacgctgggtcggtatcaaccagaacagtcgccagcgccatctataacatgatggtgcaggtttctaatatcatcggcaacaacgtaagtgctctatattcactagccgctcctatgtctccagataaagtcatattctaacctgaaacttcagatataccgggagaatgataaaccgcattatcgtgtcggaaatcgtgttctcatagccctggcggcttggagcttggttctatttgttggtgcaagatactattatgagtggcgcaataagtatgcacttcggaacccctttaataacttatgctaacccctattccaggaagagggcagaaatctgggacagaatgtcgagtaccgagcgtgaacaatacttggcagccaatggtgataagggaaacaagcggtaggatatcaacttaacaca

SEQ ID NO: 20427 - DNA, 1230 bp, Emericella nidulans
cgagactcttctgaccgactggtatatcgtcgctttcttccccatgttcttggctagtaactggttctactcctatcacttcaacgccattaacggctcatactttgtgccccgcgccgctgctctcaacagtatcctatactgggccatgcagatgattggcgccttctgtttcggcttgattctggacttgaaatccctgaagagacccgctcgtgccaagcttgtctgggtgctcctgttcactatcaccatgggtgtctggggtggtggatatgccttccagaagacatacactcgggagactgcaggacgcagcaaggactggaaccagagcggctacattgggcccatgttcttgtacatgttctacggtttctacgatgctgcttttcagacttgtgcctactggtaagttattgtccgactttaaaacccaagcttcacgctaatcgtattacaggtttatgggatgtctatcaaacaacagccgaaaattggccaactttgccggtttctacaagggaattcagtctgcaggtgcagctataacatgggcgtaagtggcttattatccaatcaataagcaggagaaactgacacattgtctagccttgacttcaacgaaacgccatacatgaacatgttcgcttcttgctggggtattctctgtggctcccttctaatcgcctcaccaatcatcttcttcaagatcaaggatcacaccgacctggaagaagacctaaagttctctgacgagactgtcgcggacgtcactggcatcgaggtaggcgatgtcacactacgaccgcagcagcaacatacccctgaaaagcggagtccctctgatgcctgataatggtcttgatgaaccagccataggtgtctggaatcagtggtcatgttgtactttctttcggagtgtcgactcggtttgacttaggcattgcacaaatttagccagctctgacacttggatgatgagctatgttctcactcgataccacatccgtttacacggtctgtttgataccaaactctatgctgttaaacgatggccagttgttttggcctatgaagcgccttagtccatagcttctcacctcataattaatacctggtttacatagctttttttggcgagtggcgacagttccgcattcccatgttggcacgctctattgacatgctatgaaaagcagtccagaatcatatacaatcatatgtatt

SEQ ID NO: 20428 - DNA, 1241 bp, Emericella nidulans
cccgatcttgttagttgcgcattcaatgagctcgattaaacggaatacattgggaagactattctgactggaaactagagtctctgaaacaggccggcaaggagatcgccgctccgatgatgacgttctatgcccagaaccagacagaggggatcccagggaagctcaccgatacgtggtacgtggcgggtgctatgttcatgacgttgatccagtactggcaagcgtcgggcgacgaccagtataattccatcgtatcgcatgacctgatgttccaggccggccggaactacgacttcttcgattcgaactacagccggtggctcgtgcgtgactctttcttctaaaagcatggattttttcttttatatcttgcatggttgagtcgagcaccgtacttactgtgtgacaggggaacgacgaccagatgttctggggtctagcagccattaccgcttcggagaccgggttccctgagatcgagaacaagccgacttggacgacgctggctcgcgcggtctttaacatgcaggcgaaccgctgggatatgagcgcctgtaatggaggtattaactggcagatccatgcatggcagaaagggaacaagctgcgcaactccatctccaacggcggtctcttccagctcgcagcccggctgggccggtttaccgagaactcgacctattttgagtttgctgagaagatctgggactggtcggtggattcgccgttgatcacaccggaccaggactggttcgtggccgattcgacaaccggccagagcaattgcacggaaagcggaaatatgcagtggagctataactacggctcgtatctcgcgggctgcgctttcatgtacaatgccgtaagtattctctttctcccgtgaccactcccatcgactccgccgccgctgtcaatccactggattccagctaacaaggctcggcagaccggcgacgaaaagtggctcagagcaccaccggtcttcttgcacgcctcgaaacgaccttcttccccgccgagtacgaccacagtgtcatgtccgaagtgtcctgcgagaaactccatacctgcgatcgcaacatgctctgcttcaagggctggaccgctatgtggatggcacttacagcaaatctcgtcccacagacacgggcgaccatcgttccaaagctccagggatcggccgcagccatcggccgccaatgcgacggagaaagcgagaacctgtgcgggagccg

SEQ ID NO: 20429 - DNA, 1243 bp, Emericella nidulans
ggtgggcgcggctatcaatgcctgtcccaacgcgttccaagtcctggcgcagggggggttcgacttcaagagatcgcgaatggtcaccgcacgtagccatctgcgagcgtccggaatcaccctccagactaacttcaccggaacctaccctgacttcgcttcgctttacggcggtccctggctgatggctcaccgggtggacctccattcggagctgcggcgagtcgccgtcgacccggaggggatagggaagccggtagagctcgttctgcaggcggaagtcgttgattacaatgcggaaaacggatctatcacgcttagagatgaatcaatccattatgctgacctgctggtggcagccgacgcgtacatagttcggccatccgccatgttgtcggtcaccccacccctgtggtcgcgactggctgggctgtctttcgctggttgattccaaccgaagaactcgaggggaaccccgaaattgcttccttgctggaaggccctttgagtgtccaggatggtctgtcgaggtttctttccacgaacgagaatatgagacggattgtctggtactcgtgtgctgagtagggctccctgataattcctatgatctgtgctaatcaaatctttcaacatccagtaacacgatccagaactttgtcgctatacatgaagatcggcgggccaatgatgagcgagaaggtagatctttcttgaaaacctcaggattatttcgctaacaagacggatagactgggatcgttctgcagatgcagaggatgttgtagcgcagtttcaagacttccatcctaatgtagtgagaatcattaggtatcaaaattggtcccgacactgtttcattgctaacaaaagcagaaaagcaacgaatatcaaacgctggccgctcttataccgtgaccctatttcagcccttagtaaaggtcgcttggtgctcatcggtgacgcagcacatcccatgctccctcgttagtaccgtacgcaaatcttttcaacggccagatctctaaccagcccgcagatcaaggccaaggaggagcacaggcaattgaggacggcgccgccctaggcgagatattcgccggtgtacaggacccgctcacgaaagacgagatccacgatcgcctcaaggtctttgagaaggtccggttgcgacgcgtatctgcaatgcaaatcttgtcggacgcgggtcaagatcgtgtctttgaggtccgtgaacgtgccc

SEQ ID NO: 20430 - DNA, 1244 bp, Emericella nidulans
tcgtttgtgcaccccgtgtcatcttcagctaatccctgctccttgtcttctataatacgctctcttcagagtccctcttgtgatctattcgcctacggacaggtggtgatccctcctgcttcctgttgtatcttagtaaacaagcaccaccctttcctccctgacagtttttcactctcgttgtcgtctgcaaaatcttcctccgtgtttgattgtctgaataccatttacttccatctcagccatgcttgccccgcgagcctttcggcctgcatccctactcgcccgacccttccacacatctgcccctgtctttcgagcgccctccattcgggacatcacgcctgactcggctgaagagttcaatgctcgccagaaggagtttcgggagaacctggaagtagctcgcaagaagagagaacagcaagagagtcagtcagtcggtgcttctgcttccacctctgcatctgccccagcccctgttacccgtgatcgcctccgtgagtacactgacgctcctgctgcttcttccaagagcaacgcgagcgatgaaaagagccccatatttgacgccgccgatgttcttgataatcaagcattgggctcactttctacccaccgttctttaggagacgaacacttgctggaagtcaaccgatctccgaaacgcggaccactctcatctttaatttacggtacgaaagaaggccagcagcttgatagagacatcgaacgttctttctcgcaagttctcgcccgcggcaaatacgtgcactccattgttttccacgacgtgaaacccgatcgagtagacgaatatgtcgacctggttggcgaatggtaccctagaatggcggctgcggaagaaaaccgcgtgaatttggtgggaagctggcgaacgcaagtgggagacaatgacacctttggtaactatacccaagccaccaatctgttccgtttgcctgaccgaagcttcgacgctaacctcaatttcaagttcatatctgggaatatcagcggtatgaaggttaccatgcttctcttcacaatatctcgcgccacccaggattccctgccttcgacaagaaactcaagagtttgattaagagcaagaagacgtccttgatgcaggaattttcgttctggcctacaacgccgccgcgccgcctgggaggcctctttgaacttcgatcttacactcttcatcctggcaatcttcttgagtgggaaactcattggcgccg

SEQ ID NO: 20431 - DNA, 1250 bp, Emericella nidulans
cgcaacacatcccttccgcacttcacctcctacgagcgttccctcctccgcacagcctgggcactcaacgcggcgtcatcgccgagactccttcctcccctttggatcctgccgtctatgtctacacccatcgcgcacgcctagcgtagcatgcgccacgaatggcgacttattctgccgcgaatgcgctataaacgatcttcttgctcagcgaaaggaaattgcaaggctggaaaaggagcgagaggaggcgaggaagaggcttgaagaggaaagcggacgcgaacttgaggaggcgagggggagagaggttagggagttcgagatggttagcatggggtttgatgattggggcagggcgggaaataagaagaggaaggcggatggggatgctggggtcgatgacgacgaaatctgggagagggtcaagaagcgagaggttgatgttggaggaggggtgagaaagcaagtgtttgagttggacgataaaacggtagagggcgtcatgagaagggagagggagaggttgatggaggagataaggagagaaaaggtttggttttcacatcattctctaggacctggactgatgatgtcggcgcacagtcggaatcaagcaaatcagcgcttccgtcattctggattccctcgttgacgccaggtacggatcccaacgagattgccgcgaacaagactgtcaagctgagcccaatatgtcctggttcgacggaatcgaataaacacgggtattcgctgaaatcgctggtcgatgtgcatttcactgaagaggctggtgctgatggagctaccgtgcgggtgtgtccgagctgcaagaagaccttgacgaatacagtcaaggcgatgcgtatgtcattcccccgctttgcttctatttttacatagtaatggccgtgctgatgttcgccatgctgctagtgacgaaaccctgcggccatgtcatatgcaagccctgcgtagataagtttatgacgccccatgatgcgccggatccacatgcaacgaaagaggagcaggagaaaacggctgaactgcatggccgggtgctgtgctatgtgtgcgagacagaccttacgccgcgcgacccagcacgggacgagaaggctgcggcgggagagaaaaagaagaaaaagaagaaggataaggaagggattcagcctggtttggtggaactatcgtccgagggaacggggtttgcaggacgaggaggcaatgttgcgacgaaagcgggc

SEQ ID NO: 20432 - DNA, 1256 bp, Emericella nidulans
tcggtggtctgggcggacttggaaatactgcatacggaagccctgctgcggctgtaacccctggtcttctttctggtactagccggactgtataccttggcaacattcccccggagactccagcagaggaaatccttaaccatgttcggagcggtcaaattgagtctgttcgcttgcttccggacaagaactgcgccttcatctcgtttttggacagtaactcagccacccactttcactcagacgccattctcaaaaaactagccatcaagggtaacgacatcaaggttggctggggtaagccgtcgcaggttcctacctccgtcgccctggcagtccaacaatcgggagcgtcgcgtaatgtatatcttggaaatctaccggaggagacaacagaggatgagttgcgggaagagcttgggaaatttggcccaatcgataccgtgaagattgtgaaggaaaaggccattggcttcgtccatttcttgtccattacgaacgccatgaaagccgtttcccagcttcctcaggaaacgaaatggcagactccccggcgtgtcttttatggcaaggatcgatgcgcctatgtctcgaagacacagcagcaaaatgctgcacagttcctgggaatcgcgccgggatatgcgcatattctcaactcggcggaccgggacctgatcaccaacgctctagcccagcaatctgtggctgcggcggcggtggctacctccgctggcggtgtcaacaaccttggaaaccggactatctaccttggcaacatccaccctgagactaccattgaagagatttgcaacgtggtgcgaggaggcctcttacaccatattcgatacattccggacaagcatatttgctttgtcacatttattgacccgacatcagctgcttccttctacgctctcagcaacctacaggggctcatgattcacaacaggcggctgaagattggctggggtaaacactccggacctcttcctcctgcgattgcacttgccgtcagtggcggtgcatctcgcaacgtatatgtcggcaacctagatgaatcgtgggctgaagatcgtctgcgtcaagacttctcagagtacggagagatcgagttggtaaacacgcttcgagagaaaagctgtgcctttgttaattttaccaacatcgcgaacgcaataaaagccatcgagggcatgcgaaaccgggaggagtaccggcgtttcaaaatcaacttcgggaaagaccgctgtgga

SEQ ID NO: 20433 - DNA, 1262 bp, Emericella nidulans
ttaaccggtcaaataatcacgggatgttgcttaagagtctagctatattcattctcgcccttacacagggcacacacgctaccaagctgattatgtatcttacagggctagttggccatcattctgatacctgcgctctgctcaagctaacctagagtaaggcagcacaacgtggtccctgaaccatccctcgtctcagatgtgacgcacgttgccctcgctttcatgcaatcgtcaatcttcaataggaactcaacctcgagctggcctctcttcaccacagttgatgctgtccgtaccgaattctcgaacggaacatcaatcctcatctccatcggtggatggggcgacacgcagggattttccacggctgctcggacggacgagagccggaagctctttgcggagaacattaggcggatggtggacgataccggggcggatggtaagagtagtttcatcaccggtgtattcgcctactgacgatcagcaggagtagatattgactgggagtatcctgggtatgtttttcctgcctatcgcccgttatagagcggcttgatatttaacgctaaaattatacagaggcaacggcgaagactacaaacgaatccccaactcggagaaattttgggaaaccgcagcatacccccaacttctggcagagatacgagcagccatcccggacaaactgataaccgccgccgttccaggccttccacgagacatgttggctttcacaaaagagactataccctctatcagcgcctcagttgatttcctcaacgtgatgacatacgacctcatgaacagacgagacactgtaacgaaacatcacactggcgtacagctgtccctggagtcaatagatgcatatatagaggccggcatgccgcctgaaaagctcaacctcggcctcgcgtactatgttaaatggttcaagaccgtgccaggcgaacagtgcgcaaaacagccaattggatgtccgactgttttaatggaggacccggatacgggtgcggatcttggacaagcaggcgcattttcatggaatgatcgagttccccaagagctggctgcgagttttgaaaaggccaaaataagtggtgaatatgatccttttggcggcggctattacttctgggactcgaatgaaaacatcttctggtcgtgggacacagcaaatgctattaaaagaaagtttcctgctattttggagaagagaaagctcggtggcgtgtttgcttggggcttgggtgagg

SEQ ID NO: 20434 - DNA, 1264 bp, Emericella nidulans
ccttgcgtatgcgtttacttcgtcgccttatatcatcactgcattcgcaggctcagccgcgtcagagcgcttctatgcttataattggcgatgggcatatggcagctttgctattatcctccccattgttgccttgccaatgtttggcatactacagtataatcggtacaaggcgaagcagaaaggtctcttgcccaagaaggaacaccacgatagaacaattgcgcagagcattgtcttttacgctatagagctggaccgtaagctataccttacgatatactcaagtgtataacctaacctcacttttcagtcctaggagtgttcctcttagcaacaggtttagtgctcttcctcctcccattcactattgccggttcgactgtggacgagtggaaatccagctatatcatcaccatgcttatcactggtatcggctgtctggtcaccttcatcctcacagagcgtttcgtcgcgccagttcctttcctcccctgggaattactagcatcccgcacagtcctcggggcctgcctacttgggacgtcgtaccagatcgccttttactgctggaacgagtactatacctcatacctgcaagttgtctacggaacctcgatctcaaccgccggctacatcagcagcatcttcaacgtcatttccggcatttggctcctagctgtggggttcctcatcaaaaagacctcccgattccgatggctgttgttctgggctgtaccgctatacatgctcggcgtcactctgatgatctacttccgcaaacccggctggtccgtgggttacttgatcatgtgccaagttctgatcgcgtcggcgggcagtacaatgatcagctgtcagcaggttgctgtttccgcagcgtccgaccacaacaacatcgcatctgccctggcattcctaggtgtgtttgggtctatgggtggggccgtggggagtagtatctccggtgctatctggaccaacaccctacctggcgccttgaagaggctgctccctgagtctgcaaaggcagactggagggtcatctatgaatcgcttgagatccaactgagctatcctgtcggctcgccagttagacttgcaattgcttctgcttatgctgagacacagacaaaaatgctgattgcaggcaccgggatcatggcgttgtcgctgatatggatgttcctgataaaagatatccggcttagcaaggatgcacagagtaagggagttgtgctttaggggttcttctgagaaagag

SEQ ID NO: 20435 - DNA, 1264 bp, Emericella nidulans
ccacggctttcggtacgtgagccgtagtctcggctttgcgatggggtatctgtattggtacagcttgggtatcttggtcccctacgaaatcgtcgccgcctcgctagtgattgattactggccgaacggtgtgcctttggctgcttggatcactatcatgctggttgtcattgtggtcttgaattatatgcctgttggaatatacggagagaccgagttctggtttgctgggatcaagatcatcaccctcatcgggctgttactgttgagtttcatccttttctggggcggcgggccgaatcgacaacgattgggattccattactggaaggatcctggggcgatgaacacgtacctcgttacctcaaatgagaacacaggaaggttcatcgggttgttacagtgcatcgtcaagtccgccatcgcattcatctttgccccggaactcatcatcgtcacagctggagagatggagtcgccgagacggaacgtgcccaaggctgggaggagatatatttatcgactcgtgatattctatctcctcggcgccctcgcgattggcgtcatctgctcgagtcaggaccaggcactcctcacgggcgacacgaacaacgcctccgcgtccccattcgttgcagcaatccagaacgcaggcatacctgttctccgccacattgtcaacgcggcgattctgacatcagcatggtcggcaggcaactcgttcctgtacatgtccagccgtagcttgtacggtcttgctgtatcggggaacgcaccgagcatattcaagtcgtgcaacagatttggtgttccatggcttgctgtcactgtgtctgcgcttttttctctcctctcatacctcgccgtttcttccggcagctacaccgtcttcaactggcttatcaacttcaccaacacgtcaggcttcatctcctggatctgctgctgcatcgtgtactttcggtttaacgccgctatcaaggctcagggtgtggagaagccttactcgtctcgcctgcaaccctatggaatctgggtcggattatcttttgccatttttctgctactgatcaacggcttcacatgtttcttcccgcaaaattggtcagcagcgaacttcttcacagcgtacatcggcatcccggcgtttgcgctgctttatgtcggacatcgcatctggttctggagcgacccgtgggcttggaagagcaccgaggtggatttgcagaccgggctgcaggagatccttgcggctgagaagccg

SEQ ID NO: 20436 - DNA, 1267 bp, Emericella nidulans
agacgcagacccggcattggcgcgccgacaggtgacgaacaggtggctcagagcaagcagcttcggacacctttcggggtcattagtgctccgacatggctatggagcgcaaactttgcgacccttatcgtcgtcctagttgtcttttctgtgttactctctgttccgatcatggagaagccggagcagcagaattgcctggcgatgctcgtttttgtgagcttattatgggctacagaggtgatcccactctttgtgacgtctctctttattccattccttgtcgtactgctcggtatcatgaaatcagacgagaagccatataaacggttaggacctaaagaagccactagcgttcctttggcgccatgtggacccctgtgattatgctgcttctaggcggtttcactatagctgcagcactgtctaagtacgacattgctcggcgaatggcgttgtttgtattgagcaaagccggctctaaccatcgcattgtactacttaccaatatgttcgtgagcatgttccttagtatgtggattagcaatgtcgcctctccggttctctgctattcgatcatccaggttagtggttcctatttcgacggtttactgatgactggctgacgtatacagcctttgttacggaatctttcgcctgattccagctttgccaaagctttggttcttggaattgctcttgctgcaaatgtcggcggcgcagcatcgccgatcgcctccccgcagaacatcattgctcttcaaaacatgtaccccagcatcagctggggcacttggttcttcatctcacttccggtctgcataatctcgatcttgttgatttgggtgctgcttctggtcaccttccaacctggtcgagataccaccattgtacccatccggccgctaaaggataaatttaccggcattcagtactttattagtatcgtcacattgactacgattggcttgtggtgtgccagtcatcagctggagcatatattcggggacatgggtgtaattgccatcatccctattgtcctattttttggcactggaatcctaaacaaggaggacttcaacaactttctttggaccatcataattctcgccgctggtggactttgccttggaaaggctgtgacatcttctgggctgctgcataccattgcagaggacattcggtcacgggtcgagcacttcagcctatatggagtgttgattgtgttttcggcactaatcctggtgattgccacgttcatctcgca

SEQ ID NO: 20437 - DNA, 1276 bp, Emericella nidulans
tcggtcgacgcgctgtcttcttctcggcctctctctgcatcatcgccggagccatcgtccaggcctgctcgttcggctcgcaccctgtgttttacgtcggccgtgtcctgattggtctcggtgttgggcagttcactgccacctgtctgatttatatcggcgaggttgccccatcggccatcagaggtcctgccctcatgtgcttccagttcatgcaatctatttcccagctcgtcggtgcctgcgtcaaccagggcacgcagagcatccagagcgctcagtcctaccgcatccctatgtgcctcctcgtcgtcctccccggcacaatgctgctgtgcctgatcttcacacccgaaagcccggtgtggtacatgacaaaagacaagcgcgatgcggccatcaaggcgctccgcaagatcaaccgcagcaaccgcgactacgatccaactatggacatccagaccatcgaaaaccaggtccagctcgaacgtgagcaagctaaggacgccacctgggcttctctgatcacagaccctgtcgagcgccggaaactcttctacgcgtgcggcgccatgttcgtgcagcagatcaacggtatccagttttggtatacctacggcgttgtctttgcgcagtccatcggtgttgcggaccccttcaccatcaataccattatctacgtgctgcaaatcgtcacagtcgctatctccgtcctcttgggaaacaaaatcaaccgccgcacaaaccttatcgtctgctcaatcggcatcctcgtttccctgatcaccgtcggcggcctaggcaccacccgctcccccgatggctccttctcccgcggcgtcggtatcggcatcgtcgtcctcgcatatatcaacattatcttttacaacttctctatcggcacgctctcgtactccatcgcatcggagatgtccgttggtcggaacagaaacaagatcacctcgtgcgcgatgggcgtattcttcgtgaccgtctggctcatggtctttacgagtccgtatatctactatgacggcaacctaggtcccatgattggctttgtctacggcggcacaacgctgttcttgctggcttactcgtggttctgcgtgggcgagacggcggggcgcagcaacgcggacattgagcggttgttccaggatcgcgttcctgctaggcagtgggcgacatatgtcattcctgatgatgggctcagtgcaggagggcagaagaaggggacagatgaggagcagattgagatggcttagttgctgca

SEQ ID NO: 20438 - DNA, 1280 bp, Emericella nidulans
gcctccagatttccccgcagttacccacaggcgacaacttgggcgtgagtgactgctaatcctcaatttctctcggtaggcgaatgcaaaaaggctggcaaaatcctagcatcttttgttgacccgcggcaagcattcgggcctgacaaggtcatcccccctgaggtattagctggtgctaaggtacgcaaaggatactcggtgaagctgatagctgaattatggctgattgcttggcttctagggtcttgccattttgaccgtcctgaaagcagggtttttgggttccggtcgatttggttcgggtatcgtcgttgctcgactagctgatggatcatggtccgcgccgtccgcgatcgcaaccgcaggtgctggatttggaggtcagattggatttgagttgaccgatttcgtcttcatcttgaacgatgctgccgccgtccgcacattctctcaagccggaacccttacgctaggaggtaatgtttcgattgccgctgggccggttggtcgaaacgctgaagccgctggtgctgctagtacgaagggtgtggccgctgtattctcatattccaaaaccaagggacttttcgccggtgtcagcttagaaggaagcatgctggtcgaacgtagggacgccaatgagagactctacaatagccgagtatctgctcgccagctcctcagtggtactatcccgcctccacccgccgccgaacctctaatgcgtgtgctgaactcccgcgctttctacggcgtgcgcacaaacggcgactctatgtacaacgatatccccgtctacgatgatcgtcatgatgatgtggtctgggagggtcgcaggggagaggcatatggcgaggggatcagacgtgatcggacaggataccatggaccttcagatgactacgaataccacgaccggccgcgccgtgcaacgacgtgggctgacgatatatatgatcgtcctgctggaggcttgagtcgttcctccaccgcccgatttagcagccgcaacgacacctttgatacctacaatagacagcggagcaacacctatgatgatgattatgtgtactctgaccgcaaacccagtcgtcctacagcacccaagcccgttttcggacagcgcactgggcaggccgctccgttacgcgaggaccaggccattgcgctgtacacattcgacgcggatcaggacggtgacttgggtttcaagaagggggagattatcacaatcatcaaacgcaccgaaaagaaggaggattggtggactgggcgga

SEQ ID NO: 20439 - DNA, 1284 bp, Emericella nidulans
  unsure (1)..(1284): unsure at all n locations
cctcgctagcctagccctgcagttctacagcctgaaaaccagcaacttcgggatctcggaactgggcgaggttagatcaccggttcactctaactcagctgcctaggtgcagggcagtcctcagaggggctatgtggcgcttctcaaccgggacggccctggggtctgcatgttcgacccacagtgcacaaggtattatttgccaatgaagagagacaagggctgtacatcagtcacgccggtatcaccgatcctaatctaggccgccagcagcgtcatgcaggagttcctacgccaggatctcaaggaagggagtaaaggggtgggtcaatataccggagatcagcatctccggtaagcactattgagtatatgatatgacatagccactaacaaaacaagggagctttgtaccattcaatatttttggccaaaacggttacaagcagaccaagctgcatctctagcgtcaaccggaataaaaacaccgttccccacagtcagcagaaagccggactcgaatacaccggctagccatttgtccgcagcagcccgaaaaatctcgcatattcggctgcaataggggaatgtatcatgcctaatgaaatgataagagaaaagaataaatatgtaataataccccgctcaaacaagcataccatgcctcgggcatcagcccacaactcgcaggatactataaagcaggtatgcccgtcccatgcattgcctatattccctatatgacaggaagagtcgacgtcctttgcattcgtgtatatagcccattgctggccttacgnggacgttttcgcaatggacagttagccgctctatcgcggccgaccttctcccttgtcgaccatgacggacgcactttcacagacacgggaccttgggggagcatactcactaatctttttcggcttcacaaactgcgtccgcgtgtgccccccggctctgggacgactatctggcgttctggcggacctaaagatggttgctgagccggtcaaggcgtactacgtctctgtcgaccccgatcgtgacacgccagaagtcatgaaaactttccttgaagcgtacccggccttcattggtctaacagggacgcaggcccagatcgatgttgctcgcagggagtttcgtgtctttgctaaagcgaaggaagacgaaactgcgcatggcgggtatgtggtccctcatacggctattacctatctcctcaatagggacggctatatcgtagaccatttcaatgactccgttgacgcggagaccgtcacc

SEQ ID NO: 20440 - DNA, 1289 bp, Emericella nidulans
gggcatcttcatcatacttgggctcggacgttctactcacggccacagctttatattcagccgcaatcactagcagagattcagaaagtcgtcaacttggctcgccgttgtcgtcgtcggctggttgttgttggtagcggccattcgccttccgatctcacatgttcttccgcgtggatggtaaacttagataaattcaatcggatattgaacgttgaccgtgagactggaattgttacggttgaggccgggatacggttgagggatctggggaaacaactggagcaagaatatgggctgaccctctcgaatctcgggagtatcgacagccagtccattgctggcgtcatcgcgactggcacacatggaagctctttggcgcatggactgatttcagaatgcattgtttctctgacgttgatgttggccaacgggcaattagtgcgatgcagtgcggacagcaaccaggcgctttttcgagcagctcttgtctcattgggggcactgggaatagttgtggaagtcagtttccgctcggagccgtcgttcaatattgcatggaagcagacaaggcgctcgctttcgagtgtgttggatgagtggtcttctggcttgtggacgtcgcatgaattcgtccgtgtatggtggatgccatacgggaagagcgtgattcactggtatgccgacaagacggaccttccgctgaagccaccaccaaggacattctatggagagtccattggctaccatgtataccataatctgctggccctgtcaaattactttcctcggattctgccatgggtggaatggttcgttttcggtatgcagtatgggttcagagctgagaagacggtgacagaggcagtcgaaaaaggacgtactggtctcttgatgaattgcctctactctcagtttgtgaatgaatgggcactgccgctggaaaagggtccggaggcaatcacaaggttgtcggcctggctgcatggcgataccgaaacagcccgcatcccttttcccgttgacggactctgggttcattgccctgtcgaagtcagggttgcagatactacactcaacaagtatcctcgtcctttcctcgacccgagcagtgctgatgggccgacattgtatctcaatgcgacactctaccgtccctaccacaaagaccccccttgtaaggatcgttattatgaagcatttgagtggctaatgagggatatgggcgcaaaaccgcattgggccaaaaattttaagtcaatgggccaagagctgcggcagatgtacgg

SEQ ID NO: 20441 - DNA, 1290 bp, Emericella nidulans
ggcccgctttcgccatctttccctctgcttctccccacacaaacttccatccgaacattcagactgcacctcaacgcatccatcctcacctcaccactcattcatcacccctccctctcaggtaggtcaatatgcccgttcttaattcaacgagcgatcgattgcctttcagatagcaccacaaaatctggacacgacctctgatcgtggaatggacatcgtctgacgtcgtgaaattccgagtcttggcacctttcccgaatcccacacccacagcacacaacctccgtccattcgagattcctggcactgttattgacgcttcgactcttgttagatttctccggactccgaatctaccgtcaagatggatcaggcaaagttggctagaatgcaggcgagcgtgcggatcggtatgtgattctttttcttctcttctgctggagtccgaatgtgcggtgcggttgcgattctttctcggtgcgaggagcgggaaaatcatattttggatcgattgatttaagcgatgtttggcatgtgatggatttggctggaactcgcggtattggagaatcagcactggatcgtcttggtttggattggtatctgctggggttgaatgaggttgaatcgaactgcaccgcaccgcattgttttcagcgaacggacttgataaattgctaaattctctgagaaaacgtccgctaacttgcttctacagggtatgttatcctggttttccctctatctccatatccgtcgccgatactcaaagcgccccggacgtccggaactcaattagaggaacaagcatactgacatcgaatagtggaaagggtactccccgccgcaaggtcaagaaggtccacaagacctccggcgccgacgacaagaagctccaggctaccctcaagaagatgaacgtccagcccattcaggccatcgaggaggtcaacatgttcaaggaggacgggaacgtcatccactttgccgctcctaagggtatctacccctccatatccacctcttaagactccatttgcataaggcgcctggagccaaatcaaacagaagaacgcgcactaactgttggttgcgaaattaaagtccacgcttccgtcccctccaacaccttcgccctctacggcaacggcgaagagaaggaactcaccgagctcgtccccggtatcctcaaccagcttggccccgacagcctagcctctctccgcaagctcgccgagctcttacagaatatgcagaagaaccaggctggtgagaagaaggacgacg

SEQ ID NO: 20442 - DNA, 1293 bp, Emericella nidulans
tgctctttcacgttactacgcctccaagtgtacgcttatctcacatcctcatgctagtgcctagctttttctgaccaagcgcaaatctacagctttccctcctcacactatcatcagcatgcctgccctgtcgccaacaatgacggcaggaaacattggagcgtggcagaagaaagctggtgatgctttgcaacctggcgatgttctggttgagattgagaccgataaggcgcagatggactttgagttccaagaggagggtatcttggccaaggtgctgaaggaatctggcgagaaagatgtgtctgttggctctgtaggtgttcctttcctttgaccatgacaagatacgtttgctaattgtgaaatctcagcctattgctgtcctagttgaagagggcaccgacgtcgcggcttttgaatcgttcagcttggaagatgctggtggcgagggtgctggtgccgctcctccaaaagaaactcaagaaactcctaaggaagcccctaaggcttcagagccatctacgccccagcctgctgctggtgcttatgagcccgatacctccggtgagaagctccagcctagtctggaccgcgaacctgcgatcagcccggctgctaaggctttggctcttgagaagggtgtgccaatcaaggctctaaagggtaccggccggggtggccagattaccaaggaggatgttgagaagtacaagcctactgctgcggctgcggctgctgggcctgcttctgaggacattcctctcacatcaatgcgcaagacgattgctagccgcctccagcagtcttggaaccagaaccctcactttttcgtttctactactctgtccgtcaccaagcttctgaagcttcggcaggcactaaacgcctcctctgagggcaagtacaagctctccgtcaatgacttcctcatcaaggcttgcgctgccgctctccgcaaggttccccaggtgaactccagctggactgaggagaacggccaggttgttattcgccagcacaacagcgttgacatcagcgttgctgttgctacgcccgttggtctgatcactcctattgtgaagaatgcccagggtcttggtctttccagcatttctaaccaggtcaaggaccttggcaagcgtgctcgtgacaacaagctcaagcccgaagagtaccagggcggtactttcaccatcagcaacatgggcatgaaccctgctgttgagcgcttcaccgctatcatcaacccccctcaggctggtatcctcgctgttggcactacccgcaagg

SEQ ID NO: 20443 - DNA, 1295 bp, Emericella nidulans
cgcgatcaatatatcccaatcatcgattcaattttatctgcgagcgacctaaatacgatctcagagaagcgcattcgcaaaggtctccaagatgaaattggctatgatcttaccccgcaaaaggtatgcgctcttgctgcatattgttcctatactttctctatgtcaagtcaacatgctgacggggttcctctgtaggctgcggtgaagcagctcattatggagaggttcgacatctttgctgagaaaaaaggcataggtgctccgcctacaccaaacggccaaaacggccacgaacaacagcataatacggcaacgcctgtggaaccttcctcaccctcccagtcctcgacagcgcagaaacgtcaggcagatagtgctgactcggatgatcgctcaagcaagacgcccccgcccaagaaacagaaggcgaaccatgatatagatgcggatgcactctatgctgcaaagctacaggccgaggagaatatgcgagctcgtcctacacgaggcgcaagcacgcgaaaagcggcgccggtcaagaagaagaagtctacagcgaaaacggcgaagaaagtaaaggcagaggacgattcagatatcgggtcgggctcagagtcagggaagaaagtgaaccgttctggaggattccacgtaagcggaattagctgatggcggtagctggctgatgctaaaataatctagaaaccgcttaacctctcaccggcgctctcagcattgctggggggcgcggcgacggtacgtgaccaacttattctgccctgcaaatttcatgcttaaagctaatctcgttggaagctttcacggccacaaacagtcaaaaagctctgggagtacattcacgagcatgatcttcaggacccaagcgatagacgtcaaatccgctgtgatgatcctatgcgcgctgtgttcaaacaggaccgcatacacatgttcaccatgactaaaattctcagtcaaaatctgtacagccctgacgaatagcttttccgtcccggaagagactacttgcaatgacacgttcttgatagcaaatcagcttgtgacactgcatatttgctgcagtcatatacgaacctttttgtgcacgcatttggcgatcaggcgtcaatttctcggtctgcttttttctttgtttaatcttcttattgtttcgtttcaaagcatgcgtccagtccaatgcattgtgcctttctgctcgttgatgggcggacaatctcttatacttgttttctgagctgccctatgtctattaccctaaatcctctccagcg

SEQ ID NO: 20444 - DNA, 1307 bp, Emericella nidulans
tgcagtcatactttgacatcaagagggtctttctcattgcgctgtttatatttgaggtcggttcattggtttgcggcgtacgccgacatctactgcgctgattgtgggacgggctgtagccgggttgggcagtgcaggtatattcacaggtgcgctggtcacgatcgcgcatgttgtcgaattggataaacgttccctgtactttagtctgatcgggggcgtctatggactggcgtccatcattgggcctttggtgagtcttccacccctgctctaatgcagacagttctcgactaataattgctttcaataggcttggcggcgctttcacagataaggtgacctggtgctggtgtttctatatcaatctactgctgggcggcgtagcggccgtcggtctgctgcttctcaggctgaagccacagcggcaaagccaaaagacctggaggaagatattctggagccttgatcccatcagcaccgtcatcttcgttccgtccattgtctgcctcctcctcgcgcttgcgtggggtggtacaacttgcccctggtcgaatggccgcaacatcgccctctttgtcgtctttgccctaagtctaatcagtttctgcgcgctgcaattgtacttgagggaggatgcgactgtgcccgtctctatcgcccggcaacggaccattgcatgtgcctcactatttgagttctgcgtaggcgcatccttttttattttcatctacttcgttccgattttggtatgtcattcccctgcgacgccagcccatatcaaatcctagtatgaatacctactttgcaacaccagtgctgactatttctcgcgccgctgcagtttcaggcgattaaaggtaccgacgctgttacagcgggcgtggatctcctgccgcttattctgtcagaaaacgtggccattgccatctcaggtgcgctcgtcgcccaagtcggctacttcgcacccttctttatagccagtgcggtcgtcatgtctgtaggcgcggggctctgtctgctcctcgacttgcacacgtccacttcgaagtgggtgggctaccagtttctctacgggtttggcgtaggtctaggctctcaacaaggcacggtagctgccaaggcagttctccccttcagcgacgtcgccgtgggtacggccgtggtagtatttctccaagtgctaggtggctcgatctttgtccccgtggcgcagagtcaattcacctcatgactcgttgctaaccttcttgagctcaaaatccctggcatcagtccagagagtatcatccatgctggggcagcgg

SEQ ID NO: 20445 - DNA, 1308 bp, Emericella nidulans
tgcaggtcctggagacaaggaaggcagtactgggtcctgagcatccagatactctcagcagcatggcaaatctggcatcaacctactggaatcagggccgatggaacgaagctgagaagttggagttgcaggtcctggagacaagcaaggcagtactgggtcctgagcatccagataccctgaccagcatggcaaatctggcatcaacctaccggaatcagggccgatggaatgatgctgagaagcttgatgtgcaggtcctggagacaaggaaggcagtactgggtcctgagcatccagataccctgaccagcatggcaaatctggcatcaacctactggaatcagggccgatggaacgaagctgagaagcttgatgtgcaggtcctggagacaaggaaggcagtactgggtcctgagcatctacatactctcagcagcatggcaaatctggcatcaacctactggaatcagggccgatggaacgaagctgagaagttggaggtgcaggtcctggagacaaggaaggcagtactgggtcctgagcatccagatactctcagcagcatgcataatcttgcctatacataccattcgatgggtagaaacactgaagcctcagatttaatgacacagtgcgctacgcttcgtgccagaaatataggctctacccaccctgatacattgtcttccagcgatgctcttacggaatggcaaaagctggaccatcatagatcatcaaagccaggcaaaggccgaaaactaaaggccttggggcgtgttctcggttttaagtagggactattgccacgatattgtactcaactactctccaatattttgctaaaagaagcacctggaacagagtttcattaattattctccttggtcaacctgagtcatgcagttagtccacatgattccacgtcggaatctggcccttttttgacttcaacctagtggtacacacataaaatgcctgcaaaataacctgtcaatataactgagattacccggaagaagttgttccgtcccaaaatcagaagcacaggagtctgctatggtgaaaccagttcccgaaaatcctgtagaggctatgcacactgtgctcagctgtctcgcagtactaggatgggtaacagtttttggaattaagtatttttacatacaagccagtagatattgaccgtaagcgaccacctgccatacatgctaccttcctttactgatatcaacagccttcagttaccagagtctggccgagatttctgcctttatcacatactcgggggttatcgctcctggcgcc

SEQ ID NO: 20446 - DNA, 1309 bp, Emericella nidulans
ggaattcgatgaagatattgctcacgaaggagctcgtttatacacgagggcatcctctgaaaaagtattctttaactgaagaagggtgggaggttgccaaagctatcaagaagaccgcccagaagtcaattcagaatacactaccgtttgatgttcaatcagtaagtttgcctgaaatacgcgaagatcagcttactgacgccggcaggatgtaaccgcggatgaacctagaaccgcacagcgagaagaccttgcaagccagagggatttcgaacgtcagattagaccaggtctccaagctcataatagtcaacggcacaccctagattccctggagaacacattagacaactcaacgatcacgccaatccccatctccccagacaactttaccgttcaactaatccttgacacgcgcgaagttcggacatccaaagacagggactacatatccaacgaattgatccgcaaaggtattactcccgaagtccgcgccctcgaagtcggcgacacaatgtgggtagccaagttccacgatccaacctttctccgcaaatacggagaagaaggcgacgaaattatgctcgactggattgtggagcgtaaacgactagacgaccttataggctctataaaggatggccgcttccatgagcagaaatttcgcctccgccgttcgggcattaagaatgttatctacctcattgaggagttcgccgtgacacatcatgagtcaaatgccgcagctgctcagaaatatcatgacatggttgcttcggctattgcacagacgcaagttgtgaatggatattttgtcaaacgaacgaagaatctggacgatacgatacggtatcttgcgcgcatgacattcctactgagaaatatgtatagcgccccatcaccaccctcttcgcgtacctcagctagaccttcccataccctcgccctcctcccgacccggcacctcgccctctcaagctcccatatttcggctctcaacacgctccgcgccgagaacccgcacgtcacatacggcgtcacattcccgaccttctgcgctatcgcctcaaaatcagacgccctgacactccgtgacatattcttaaaaatgctcatgtgcaccaagggggttagcggggataaggcgctggagattcaaagggtctggccgacgccccaggcttttatcagggcgtttgaggagttgactgaccccaaacaaaaagagaatatggtggcagatcgcatggcgcacgttatggtagggaggaagaagattgcgaaagtgcttagtagaaagattgcagag

SEQ ID NO: 20447 - DNA, 1309 bp, Emericella nidulans; identical to SEQ ID NO: 20446

SEQ ID NO: 20448 - DNA, 1327 bp, Emericella nidulans
ggtgttcatgacatgacgccgagtaatgaacttaccatttatcaggttgttaatgctgctgggtaccatacggcactaaaactaagtctaaaacgactagagcttattgggaggccgaatgcgccccgctgcttgacaaatagagatcaccaagacgattgtaatcaccccatagaaaggccaggcttgtatcttgatggatcagctacccttctctattatgaaattggagtggacgttccatcatgtggcatgaattgtgctctaaactgtgaagggtcgaaaggtggaagaatacaaagctatagaacgctatgcagattaacaagatgtatatgcttactagattctggatttctcgctgtatcgctgtataattgttgataaacttagccagataggctctagacaagcaggctgggcttctctacgtacagcactttcccaagcggatattccagcatgattagcgatataaatcctccagcctatacgcagggcgaggtttttgtcctgagttttccagggatctactaatgcctctgtattgaaggttctattcaggagctgcttcggcattgtggaaagtggccgaagccaaaatctatgccagtaatggatactgcaattcttccaccatttggagcatagagtaaatgcgcttgcaggcatgggttagccggtaccttacctactactcagggggcttaagcattcatacgggatgattactcaatgcagcataggccagattattgcagccaaaacagtctatggctcacctactccagggttggtaaggagtgtagctggaagaggtggaattaatagacactcgtttctagccagcccctaagtcgaagtttcgttatttgtcccggatttgtcgaactatctgctctcacattccctccttccatatcacggaggatatcctctatataacctccggtgccgctgagcttgatgatgaacgcaatcgcacggtgacggcaagaagtcgtcgttgagacggtgggtcgtttgtacggttcggactcaaagtcaatgttcgaacaaccggtagcaatggatcgcttaggaaagattcttgttcggtagacttgatctcgtattcgaagggttgcctgtgtgctcaaaatatattttgaaagcgccaaaaagttgatggtactcgtgggataaggtcaaagcattaatgggactatcgatatttgaatgctcgaaaaaatggatgctttaccccaaacatcttcaagggattgttgatgtcggttacgctctaccgtcattttgaagaccctaattcaatcctctgggtggagcc

SEQ ID NO: 20449 - DNA, 1330 bp, Emericella nidulans
caccatggtcgctgtcgatgcaggtaccctgcttgctggaatcgttcacgtcatggaaaagtgcaggagcaagaacggcatcaacacgtctggcccttttgctgggttacgcctaccgtatgagaccagcggtgcaaacgcaaagcatgttttcaagaagattatcggacgggtcctgatcacacaccctcatttggaccatgtatcggctttggccatgaatatcccgattctaaccaaagaaaacggtccaaagactgttgccgcgctgccttctgttatagacgccatgaagagccacatcttcaacaacttgatttggccaaatttttccgacgaggatgaaggtattggtttgatcacatatcagcgtctcgcgaatggaggcaacccaatgctgggctctggcgatgaacaaggttacactcaagctggcgaaggattgctcgttcgaggttttagtgtcagccatgggcgatgcaaggtgaaagcaggtactgagcgtcgcctaagtatatcttcagcgaaacaagctggacggcaaccaagtgaatggtaagcggcataattgaaggtgcatcaacaactgagctaacaacgtttagggatccaattcattcccaaccgccgtcttcgagccaggagacattgtggactacggtcgaaagctccgccttcttcctccgcgaccagaaaactggaactgagatcatcatttttggcgatgttgagcctgattcggtatccttcaatccgcgtaatcggaaagtatgggaaatcgctgcaccgaaggtcgcttctggtaccttgcgagccattttcatcgaatgttcctatgttgattcgactgaggatatctatttatttggccacctctgcccgcgccatctagtcgatgaattgaccgtgctagctgcacgcgtagctgacatcaagggactaatgtggccgccgattcccaaacgcaaacgggacagtagttccgagtcgagtagtcagcggggagatagcaaagggagagctgtgtcgattcgaagcagcgtcaggaagcgtgcgtcttccggaacccgaattagacaggctaccgagacatcggactcggtacccctcgccattgagcgtcaaggtctttgccgtcagacgtgcactactagggatgctctcgaagtagaaaagcctttggctggcctttcagtgtacgtcattcatgtgaaagaacttttgcatgacggcccagatcccgcagcaaagattcttgaagagttgaatgaggtggagtcaataagaaatttgggatgtgttttccacattcccaagcgaggtgagagca

SEQ ID NO: 20450 - DNA, 1333 bp, Emericella nidulans
catgctttcgactctgggtgtgtgttctcgatgtctggtgcgccccgcgcgactagtatgcaaccagcggctgctctaccagcggagaggtctacaaactggtatacagcgtccccacggactacttccaccttattagatacatgctgacgatgcttccctttacgccagacaaactcttatcacctgctctcctgacgcgagctcgcaaccttgcagccgaacatgcaaatctttcgaatcagctgacaacctcctttgatcccaaaattgcaaggcgcgctggtgagctaggtccagttgcaaaagcctgggcagaatggagcaatgccaacgaggtcagcttcttccgccctgaccaaattggatctttgactgacgctttgtagtcaatgtcagagcttcattccatgctagaagatccagatacggaagcggagctgaggtccattgccgttgaagaattgcaaaccacggaagctaaactgactgcgatttcggataatttgaagcgcgccctcgtgccccgccatcctttcgcagacctttcatgcttgttggagatacgtccaggtgcagggggggatgaagcaagtatctttgcctttgaattactgcagatgtatgtcgcattttgtgctcatcaagggttacggtctactctcatgaagcttgaacgtgggacaaccgagcagatgctctaacggaggctgttttggaagtagaagcagagggggcgtacgatctcttacggaccgaatcgggtgtacaccgagtccagagagtcccgacaacaggagccaaaggccgcacccataccagtgcggtcagtgtgatggtcttacccagcttcccggacacaggcggcggtgacggcgcgttcaactttgacgacccaaatagcgactattacattgatccgcaagaagttcgtactgaaaaaatgcgagcaagtggcgcgggtggccaacatgtaaacaagactgaatcagccattcgtctgactcacatgcccacaggtattgtggtatcgatgcaggattcgcggtcccagcatgcaaatcgcaaaaaagcgtggcagatactgcgggcaaagctggcggaagcacgacaggaggcgcgggacaagaattagtcgagcttcgaagaggagcaatgggcggtatagggcgaatgggccgaggtgacaaggttcgcacttataattacggccaaagccgctgcacagatcatcgaagtggtttcactgtccataacctggacaacgtgttggagggaggtgagaccctagtcaaggtcatggatagcgtgcgatcctggctcatcgaccgcg

SEQ ID NO: 20451 - DNA, 1333 bp, Emericella nidulans
gaaatcccacaaccaccacccagaaatatatctggtattgaacgctttatcgttgtcataatgtcacctggcagccggcaatcaactcaaacgcatggcttagttgggaagccattgctgtgaggaaccctgctaccctggtatttctagactaggccactaataagctacagttacttcacgagtgtattcgtgtcattaggtgtcttccttttcggttatgatcagggtgtgatgtcgggaattataacgttcgtcttcccgcatgcatgctgaagtacaaattgagactatctttactgacagggagacagaggcttgtacttcaaggattacttcaaccaaccgtcgcgagcggaaattggcactgtcgtcgcaatattagaagttggggccttcatttcctcattactcgttggaaaaattggcgacttaattggtcgccgcagaaccatcctttatggatccatggtgtttttcgtaggaggcgctttccaaacctttgcgacggggctacctatgatgatgcttggccgtatagtcgccggtctgggcgttggagcgttgtccactattgtcccggtatatcagtccgagatatcggtacagttgccctcatctccctaatcaagaaggctactatggacgatgctaatttttgatcaccagccccctcacaatagaggcaaattggcatgtattgagttcacgggaaatatcttcggatatgctgctagtgtttgggtcgattacttttgcagtttcattcgcagcgacttttcctggcgtctcccgctgcttttgcagtgtatcatggggtttttacttggcctgggaagtctcatcatttgcgaatcgccgaggtaaggcctttattgattctcgaaaacgcgcaattcgtgaaattggctctaacgctcaccctaattgtaggtggttattggataatgatcatgatgaagagggtatggtagtcattgcaaacctctatggtaaaggagatcttcacaatcccgaggctcaaagagagtacagggaaatcaagatgaacgtgcttattacacgtcaagaaggggaacgatcttacgttgatatgttcaaaaggtacaacagacgtgtccttattgcaatgtccgcacaagcactcgcgcaactgaacgggatcaatgtcatctcatactacgcgccgcttgtcttcgagtccgccggttgggcgggccgtgatgccatcctcatgaccggaataaatggtctaacttacttggcgtcgacggttcctccttggtatcttgtggatggttaggaaaggcgtcccattcttctttccggtgcc

SEQ ID NO: 20452 - DNA, 1339 bp, Emericella nidulans
ccgtacgtttgccatcgtgctttctcagacaatcgctaacaggagggcaggatcatcaccggcatggtagggacattcgtcatgggcctgtccctccgggacgcatctctgatcatcctcttcttcaacatgctgtgcacaatcccaccggcgtatttcagcacattcgggtcccgaacgggcctgcgtcagatgttgcatgcccgtttcacgtttgggtattatctagtctccatcatcgttgcactcaacttgtgcacaatcgctgggtttggcgtcgtatcctctgttctgggtggatccactctcgccgccgtatcgggtgggagcatcgacgatactgcgggtatcgtggtcattgggatctgcggtatggtggtgagttttggcgggtacaagttcttgcaccaatatgagcgatactgctggctatttgcgcttgttgcaatcgtcattgccacaggtgtgggcgggagtaaattgtcgatgcaggcgcctaccgagccgccgagtgcggcgacggtgctgagcttcggaggcgtcattgcggggtttcttatcccctgggctgtaagtgtcatatactctttccggtatatcttctactaacataaccagggcatggccgctgacttcagcgtctactgcacaccttcagtctcgtccacccgcatcttcgcctacaactacctcggcctcttcctcccgacagttccgctcatggctctgggcgccgcaatcgggtcgtcgacaaactctatatcatcctggtcaacggggtacactctatatggtgttggaggagtcctcgacgccatgctctcgccagctggcggtttcggcaaattcgtctccgtcttgctctcattttcactgctaggcaatctcgccgcgtcgatgtactcgatatcccttaactttcagctactactgccatggaagctctggagaagggtcccgagattcgtatggtcgattatctatactggtgttcttatcccggtttccgttgttgctgcgaagtcattctttactaacctggagaacttcctctacgttattgcgtattggtcggcggggttcttctctgttgtgacggtggagcatttcgttttccggcagggtgcgtttgacacgtacaccgcggaccccagtggcgacgggaaaaccacctgggacaaccagtcgaagctgccaactggcctcgcggcgattggcgcgatggcgctttcgtttggcctggtcatcccgtgtatggggcaggtgtggttcactggcccacttgcaaagacaacgggggatattgggttcgagattgcgcttgtgcttgccggagcac

SEQ ID NO: 20453 - DNA, 1346 bp, Emericella nidulans
cgcgcttagagctcagtccgtgtcgagttcgcctattctccgaagttgaacctttgcgatgtcgcatgtcacgatgcgacactcttttatcccagcgtctttcgcgatccccgcaatcccggaacttctcatcaaccagaagccgaccaattctgcgcagattctgggattttcgacggaagaagcaggctgctgaaccccgccggggaccttcgttgctcgacgatacagaaaatttgagccttgcgcgagcgctagcggccaaagcctccaacgagctgcgccttcgatgcaccgagtttgatattaatggaaatgtcactttaatgaatggagagttcaaaaaaagcgaacttattgcgaaggttaggattaaggactgaatggggtgacgaaaagctaagactgtcacagtatggccttcttccgcgtgatcttcgaaaaatcgattcctcaacgctgcctcatattttcgtgcggcccagtactatcctgatcaaccttctccatctccgcgttttaatcaaagctgatcgtgtcctggtttttgacgcatatggctcgacggactcatatatgcaatctttgtttgtatatgacttggagggcaagctacggcagaagcaggctcagagcacgggtgcgggatccctgccatatgagtttcgagccctcgaagctgtcttgatcagtgtgaccactggcctagaggaagaattcaacggtgttagggagccggtcgtgcgtgttctgcgcgctttggaggaagatattgaccgggataagctccgacacttgcttatctactccaagaagctgggcacatttgaacaaaaggcacggctggtccgagatgcgattgacgatctactagaagcggacgacgacctggcttctatgtacctgactgagagagcaaacggtttccagcgcgaagagcacgatcaccaggaagttgagatgctccttgaatcgtaccacaaagtctgcgacgagatcgttcaagctagcggcaacctagtgaccagcatccgcaacacagaagaagtgtaagccgttttccacaatacattcccgtccctactaacactccttagcgttaaagctatcctcgacgcaaaccgcaactctctcatgcttcttgatctcaagtttagcattggcactctcggcctcgcaacggggactctgttctccgccctctatggcatgaacctgaagaacttcatcgaagagtccgacctcggcttcggcgccgtctccgtcacttgcttcgccatctctgctctcgtgtgcgtctacggcctcgcaaagctacgtaagctccaacgtgtccgcatgtgggg

SEQ ID NO: 20454 - DNA, 1346 bp, Emericella nidulans
tcttgatttgatccgctcccaagtgcatccaacgaagacccatacaattggccgctctggaaggtacgattgatgcaggaaagggtttggttcatcgctgacgaatgcatatgctggtagaaagtgataaacctcgtcctcgtcgcattccacgcttgcatgtcaacattcacggcctccataattcccgcatacgaggacatttccattgaccttggagtgtctatgcaaagggccagttacctgacttcactccagattgccgtcttgggtggagcgccattgttctggaagccgttatccaatcgatatggtcgtcgacctatattccttttgtcaaccatattgagtttggtctgcaatattggctgcgcaaagagcccaaattacgcctcgatggccgcatgcagagccctaactgcattcttcatctcacccgcggcagctatcgggagtgcggttgtaacagaaacattctttcgaaaagagcgtggtcgatatatgggaatctggacgttgatggttaccctaggtgtcccagttggtaagtctcgttgctgatatgaggtctgaccctccatgctgacactcgttatcccaggaccgctgatcttcggatttgtcacaaatcgtgctggataccgctgggtcttctgggtccttgccataattaacggagtgcagttcgctctatacctcttcttcggcgccgaaactcgttatatcagcagcaatcaggaccagtcatcattcatttcccacagcctgtgcctccctttccgacgcatagacccgactccgttaaagctcagcgagttttatcacccactcaccctagtaaccctcccaacagtctttatcccagcctttgcatacgcaatggtcttcctattcggcagcgtcctaatcactgtagaagtaccccaattgttgcaagagaaatttggcctcaacgcagaacaactcgggctccagtttattggggtcataatcggcactgttctcggcgagcaaattggcggctccctgtctgatatttggatgaaccgccgcacacgcaaactccaagccagaccagagccggaattccgtctgtggcttagttatccaggtgttcttttgacgattatcggcgtggtcgtgttcttagtctgcacgcaacaagcagctgagggtcattgggaggtttcacccattattggcacggcgatagcagccttcgggaatcaggttgtcaccactgtgttagtcacgtatgctgtggattcttacccccaagattccggtagtgttggggtcttcgttacgttcgtaagacagatatggggatttattgggccattctg

SEQ ID NO: 20455 - DNA, 1350 bp, Emericella nidulans
cttcccccagagccccctcctattcccgagtccgtagcagacgaggacgatgactccggatcatcaaccgagacggtgaccccttcgccagttaaacaattattcgctcggccaggagggacccgagggtacgtatacatacttcttcgattcagttttccgcttttctcctacccgaaatgacgtacattgtacgactaacgtggagagaaagcttgcaagatagggcactgaactctttacaatggaccagcttcttcgatcaggaactctacctccaacggcgagtcaatgatctagacattgtgcatcgatgtatacctcacttcgccgacgaattcgggccccgtctttgtcatgcaccacggtgcaggctcttctggcctctcttttgcaaattgtgctgcagagatccgcaagatcctgcccaatgcagggatactctctgcagacgcccgcgatcatggcagtacatccgtaaaaagagcgagtgaagatggtgaggcagatcccgaaacggctcggcttgatttgagcctggacacgctgaaccaggatctcctcttcgttatccgagaaacgcaagctaatatgggctgggagactctgccggacattgtccttgtcggccatagcttggaaggcgcggtgatcaccgatgttgcgaagaaaggcgaattaggtgggaagctgctggcttatgctgttttggacgttgtcgaaggtgggttccaacctatttctggaccaggacgcggacgctcatgcagaacattaggttcggcgatggatgccctccagagcatggagacatacctctcaactcggccatcccgctttccttcccttccttcagggatagaatggcagtatgtccatgcgtactaggcgataacagacatcttctctaacagtatttccatagcacacgctcgcgcacaatccgcaatagaacctcagcccgtgtatccgtcccatccctcctctaccacgaagatgtccctaaagacccttcaaagccatgggtttggcgcaccaatctcgccgaaacaaagcccttttgggaaggctggtttgttggtctaagccgaaagtttcttgaagcgcgtggggggaagttgctcctcttggctgggacagacaggctggataaggagttaatgattggccagatgcaaggtgagtcttcctccacttgctttcgtacctttctaaggtatggctattctaactctatattttgcagggaaatatcaattacaagtcttcccggacgcggggcattttatacaagaagatcagcctgcccggacagcacaaattcctggtcgacttttacaaacggaatga

SEQ ID NO: 20456 - DNA, 1353 bp, Emericella nidulans
ggaaaggggcggatgattgagctcgacgatgagaactgggaagctcagttcaaagagatcgagacggcagatcaggggaagctggatgacgaggccaatgcagccatagaggcggagttgaatgatcttgacaggtcagtccccaccaccagtagcaccgaagacctcagtcattttgagcgcgtatgggaaagagtccaagctgagacggcaacaaatagaaaattggcggaggattctgagtacaatattgatgataatctccatatgggtgatatggccgaatgggatgggttcgacaatctgaatactcggttcagggagcctcgattgggtgattactcgttcgagcaggagaatgtcttccgcgacatcgctaacccctttgaggagggtatgaagattatgcaagaaggcggcaatctgtccctggcagctctggcttttgaggcggcggtgcagaaagaccctcagcatgtgaaggcttggactatgctgggtactgcccaggctcaaaatgagaaggaactccctgctattcgggcactggagcaagctctcaaggtggatccgaacaatcttgacgccctcatggggcttgctgtgtcatacacgaacgaagggtacgactcaacagcttaccgtaccctcgagcgctggctttccgttaaatatcctcagatcattagtcgagatgatctatcctcggacgccgacctaggattcactgaccgccagattcttcatgaacgtgttaccgatcttttcatacaggcggctcaattgtcgccgtcgggagcgcaaatggatcctgatgttcaggttggtctgggcgtcctcttctattgcgcagaagagtacgagaaggccgtggactgctttacgacagcattggcgagcactgaatccggaaccacgaaccagagggagcaacttcatctcctttggaaccgcctgggagctacgctcgccaactctggtcgatcagaagaagctattgaggcctacgaacaagctctgaacatcaatcctaactttgtccgagcgcgctacaacctaggcgtatcgtgtatcaatattggttgttacccggaagcagcgcaacatcttctgggagccttgtccatgcatcgtgtggtcgaggaggaaggaaaggaacgagctagggagattgtaggcggcaatgatggtcgcatcaacgaggccgaactcaaccgcatgattactgcaaaccaaagtaccaacctttacgacacgttgcgacgggtatttagccaaatgggtcgacgagacctggccgatttggtggaagcgggaatggatgtcaatatattccggaaggaatttgagttt

SEQ ID NO: 20457 - DNA, 1355 bp, Emericella nidulans
ttgacgaggtcgcggcagaacatgtcgacgcggacgttgtcgtgcactacggacgttcatgcctatccccgactgctagacttccagtcatctacgttttcacgcacaaggagttgcctctcgacccagttctcaaggcgttcaaagagacctacccggacccagaaacaaaggtgatcctcgctgccgatgtaacctactctgaccatatcccggaagtatactcgcggctggtgcaggaggggtacagcagtctgtttgccacggcgttggttcacgatccgtcgtctgtcatacctaaccgcaccgttccagactcggtcaaagaggctccagagtcgctagggaattggcagctcttccacatctccgaaccgcctacagcgctgcttctgacgctagcatctcgcgtggcagcaatccacatctaccctactgatgggccggctggcacagacgtaaagcctctacccgcatcgactgcgatggtcctgcgtcgtcgctacgctatcttgacacggttaagcacggtgcctattttcggaattttggtcaacacactgagcgtaaagaactacctccatatcgtggatcatgtcagagacaagatcgcagctgcagggaagaaaagttacatgttcgtcgtgggcaagttgaacgcagccaaggtagccaacttcagcgagattggtggttgggttgtcatcgggtgctgggaaagttcgctagtcgacagcaaggatttctggaaacccgtcatcaccccgtttgagttggaagttgcactcaagggggacgaggagcgggtctggacaggggcctggcagagcgacttccagagcatccttgaccagccaccaccaagttccaattcccctggaaacagccagaaggcaaacgagggacccgaattcggggatcatgccagggacgaggacgaggatgctatgtcggaacccgaatctgcaccaccagagttcgacctccgcaccggtcggtacgtctcctactcgcgaccgatgcgcgattccgcgccccgcgtctccgcttcccaaggcgccactgcagcaatatctgcgcagacaggtgcggctgatgggccgtctgcagcacgagcgcttgctcgaagggcaaaaggcgacctggctatggtcggcaacactttctcgccaggggcggaattcttgcgatctcagcggacgtggacggggctggggagcgatttcaatagtgcggcgaatgttgagtatgatgacgaggagaatgacagtaccctggttgtgcaagggcgcaagggcattgcaaggggatatacagtgggggattcaatagacaggcactagattggccctgga

SEQ ID NO: 20458 - DNA, 1362 bp, Emericella nidulans
tgcagaagccatcgaagtcaaggatgcttcatcttgtgccttatatcttcctcgcctgggtcgcctatgtggtcagcctggtgatctatcggctatggctgtcgccgctggccaaatttcccggcccaaagctggcagccgcgacgctatggtatgagacttactatgatgcgttcaaatggggaaaatatacgtttgagatcgcgaaaatgcatgagaaatacggtatgcctctggtcgaggtaaatacgacaaagctaaccaggacaggacccattgtccgcatcagcccacacgaactgcacatcaacgaccccgattactacgaagtcctctactcgcgcgatagcccacggaataaatatgaatattttaccaaacagttccctgttgccggcagctcgatcgcgacggtggaccattaccaccaccgggtcatccggtcgaacatgaacccatacttttcgattactcgcgcgcgcaaacaagagccgctcgtccaagcgctggtgaacaaactgatcgagcgcctccaggcatacaagggcacacaaactccgatcaacctacagcatgcctttacctgtttcgcgacagatgtagtttctgactactccatgggagtgggattccattacctcgacgaaccggacttcatccctgactggagcgatacgctggcctggagcgtgaaaaacggcgtgtatctcaaggcctttccgtggtcgggcgctctcctcaactccgtgccgccgtggttactctctcgcatctatccaggcatgggtttggttttccagtttcaggaccgctgcaaccggatcgtgcagagaatcatggaagagcagaaggagcggggctatgaggaggtcaagaatcagttcgatcatccaacattcttccatgacgtccttaccagcaaccttccgaaagagctgaagactcccgaccggctggcacgcgaggttcaagctgtgattggagccggatcggaaacgacggggaagatgttgacgtggacgatgtactatcttctggagaatccggacaaaatgaacgcactcaaagaggagttgaacagattggatccggaccagacggcgactctcgtggactttgagaagatgccgtacttgacttctgttatgctcgagggacttcggtaaatactctgtatacgcaagctgtccgaaaaagctaatggatcctccagactgtcctatggttcgagctcaagattgcaacgtatcgctcctgaccgcgacctcaagttcaaggagtggtcgatcccagcaggagtaagttcagtggtatttgcaccgaaagcattggctaacgatttagaccccggtgggcatgacc

SEQ ID NO: 20459 - DNA, 1367 bp, Emericella nidulans
gtcgcggcgaatgcgtgtgctgaagagactggtctctgcggttgagtcaccaatgcagcgccggtatgtctctgcgactttgaaagctcaggtgagtgaactcttcttgcttttatgaaggctggtgtatctaacaatgtgaagggtgccgttgttactcctgaccccggtgccgactccgtctccgcagcttttgtcaacgagcgcgcgccgtaccttgtccctacctacgtccgcccggccccgatcatggttaagggacaggggtgttatttgtgggatatggagaacagacggtacctcgatctcacagcaggaattgccgtgaactccctcggtcactgcgatcccgagatctccaagatcatcgccgagcaggtgcgcacgctagtctcatactatacatacaaatatcagaagtgctgacgggttaattaggccgaaacccttctccatgcctccaacctgtatcacaatgcctgggttggcgctctcagcaaagacctcatcatccttacgcgcgagtcgggagccatgcgcgacgctgcccaagttttcatcgccaactccggcaccgaggccaacgaggccgccatcaagttcgcccgtaagaccggacgcgcccgcgatccttccggcgcaaagcacgaaatcgtttccttccacaactccttccacggccgtacaatgggcgccctctccgcgaccccgaacccgaaataccagactcccttctcacccatgctccccgggttcaaatacggcaagtacaacgatgttgcccagctgaaagatctcgtgaccgagaagacctgtggtgtgattgtcgagcccatccagggcgaaggtggtgtcaacgttgcaacacccgagttcctctctgcccttcgcaagcgctgcgacgacgtcggcgccgtcctgatcttcgacgagatccagtgtggtctttctcgcaccggcagcttctgggcccacgcccatccgtctctcgtcccgtcctccggcgaagctgcacaccctgacatcctcaccaccgccaaagccctcggcaacggcatccccatcggcgcaaccatcgtttctggaaagactgttgcggacaacatcaaggccggcgaccacggcaccacttttggcggcaaccctctcgcctgccgtgtagcccaccatatcatccaccgcctggcctcgcctgagctacagaaatccgtccaggataagtccgccatcctggtcgctggcttccaggcgctgcagcagaaataccctgatcttgtctctgaggtgcgcggccgcggcctcattcttggcctgcagctgtcgaaagacttctccgccagggctggtgagattgtcactgccgcgcg

SEQ ID NO: 20460 - DNA, 1372 bp, Emericella nidulans
gccagcgaggtcaactcaactgtaccagcatataacctcgccgcgatcgccgtctttggtatcccatggggtctagggacagttcttggactatccgccagagcacttcatcctcacacccatattcccgacatatcccgccgacatcactgagacagaggtctcaacaggtctggtgatgccatttcttgttaaagctctcatcggtgactctggcattgtcgcgtttttcgtgcttcttttcatggctttgactagcactgtatcgtcttccatgattgcggtcagcagtatcctctcgttcgacatctacaagacatatttcaatcccaaagcaacagacaggaagctgctcagagcaagccacgtcaccgtggtcattcatgcagtcttcattaccggcatctcaattgcactgaattatggcggcgccaacatgacctggcttggttacttcagacccgtcctttcctgtcctggaatcattcctctcggcctgactcttttctggagcggccagacaaaactggccgcaattctcgcgcctgtcttggggtttttcacaggactcgcaatctggctgggtaccgcgcatgctctgtacggcgaagtgaacatgataacaacagggaaccccctacctgcactctacggagctattgggtcttttttctcccctgctatctactcagttgtgatttctctctacaaaccctacaaattcgactggcggatcttcctccgcatcgaactcgctgcggaagcccaactccacagcgccgacaaatcaaaagccacagtcattgagtcagaagtgaaagaaaaatccggtaccaatacccccaagcgcgacacctcggacgcagccgcagccacaaccgcaactgcgagtcccgaacacgcagccgcccttgagaagcccaatcccgcatcaagagcaaattcaactcccgtctccgaatcaagcctagacgacattcgccaccccttcgatgaaaagacattaagagaactgtaccgctggatgaagatagcctgggtcatctttgtagtcatcgtcctggtaaccttcatcctctggccgatgccgctgtaccggaattacatcttcagcaagtcgttcttctcaggttgggtatccgtggctattgtctggcaattttttgcgttctctgctgttgtcatctatccgctatacgatggacggtatgagatcgacaagggcgctcgaggtatgtggaagtccacgaaggagtttgtggcgaagaggagttcaaagactatagactcttgagatgaaatcctcacatagaggttgatagatgggtatatacgtgtatagaatgaactgcaagcgtctagcgaatacatt

SEQ ID NO: 20461 - DNA, 1375 bp, Emericella nidulans
ccagacagcagcgaaacgcaaaaaattgagagagttgtcctaggaggcagacaggtttgtttgcagaatcccatggatagctggggatatcggcaacagcggaccattcgagaaaagctattttgaggcactagacttccagcgtccagagtacgaatggtgttgtttttggattggaattgattctaactctcattaggtcttgcttattgctcgagtataatattccccggcattaacctgcccaacgtaagctggcttgcaaaccatatttgacaaattcagcatgcaaagtacaatgatattcgacaaaacgtcggctacaagaatattatcttctctaatcgcatgttagcagaaagtcaccgagcaaggggtctatacatggttcccgaatcagagcaggaaatattcaagcaacatcgacctaacgcatattccatctggatagtgctgcatgaaatatttggtcatgggactggcaaactcctctcagagatatccccgggcaacttcaattttgatcccaacgaccctccgtcaatttacatcactggggatccagttaagaacccgggcagacctggaccgaagtatttgaagacatttcaacgactgtagacgagtgctgggctgagcttgtgagggcctattaatttgacggcccggaaattctggccgtgttcgggtacactcaacaggggcatatcaagccagatgatcgtatggcgtccctcttgattgctggtctggctactgacaagtcttagtggtctaaaatctgtatcttcgactagccactgatggactgcgtggactggagaactatgatcctgttacaaaggtacggacataccctattgctgtacatgggttatgctaacagcccgatagaaatggagtcaagcgcatagtcaggtatgccttctagcaactaatgataatatagttagtcagatatttaaagtggtgcaggcccactacgtgatattccggcatctcctccgcgacagcccaacctctatgcggttgtaagcgatgctggagcaagtacgctgcggatcaaatcaaactggctctgtcttgtactgttcatgaagggaggccttatctcggtagaatgttatcacgcttactcatatcgccgacattgccagctgccgtgacttctacgagtctctttccaacgcggacttcgaagctttaacatggacggacatagttgttgcaaagaaggatccgctctcccaggcaaatacatttactcgggggtgatgctgtcgaattacgagaatatgagccaacagcgggaggagtcattcaaagctgggcagcaagggagatccagggagatcctgttcttcgtgcgcagaga

SEQ ID NO: 20462 - DNA, 1378 bp, Emericella nidulans
cggccggttgaatacccctccactgagtccagtaccccattagttgagtctaacgatgcagatgattttccagacggtggcatccgctcatggctcgttgtgctgggctcgttcttcctcctcatggcgtcgtacggactcatgaactccgtcggcgtcatccagtcttacctcgaaacccaccaactgtcgcactactccagccgcgatgtcggttggatctccggcgttttcgtcttcacatctctcattttgggcatctttgttggccccctctttgacgcatacgggccgaaggaactcgtcgctgtggggacgggtatctatagtcttggagtgcttctgacagcgcaatgtacgcaatattggcacttcattctttgcttcggcgtaatagccggtattggagccgcagtgatcagtaatgttggcatgtcctgcatcccgcactggttctatgcgaaagcaggcatggcgattgggacggccatggcgggcgcgggcttggggggcgttgtcttcccgtatatcctgcgggagacgtggactagtatcggcttcaaatggggaatgagagtcactgcgcttctggttctcctcctctgtggttcggccactttcctcgtcaagagccggctgccccgaaacggacggccaaaggccgcgtttgatatccgctgcttcaaggacgcgaggttctcgtggctttctgctgctaccttctgtacgtattctgctaggtttagagaggcccagacgcgaactttttttctgactgtcttccacttaggcttggaactggtcgtcttcggcctgctcggtatcctgcccagttacgttgtcgcgcaagggttcagcgccgcatcgagcgtcaacctcctcgtggtgatgaatgtgtaaggcttcgaccacgcagccctcgaacgagattaaactaacatagacagctgcaattcgatcggccgcctggtgagcggccgcgttgcagacaagtacggccggctcaatgtgctcatcctcctagtcgccatggctgtgatcctcatcttcgccattctctacccgttcagtaactctctgcccgcgctttacatattctgcgcgacatatggcttcgtatcgggctcgtttatctgccttgcccctgtctgcgtccgccagatctcgccagctaaggagacggggatgcggtttgggacactgtatgggttggttgcgtttgcgtgagtgccgccgacatatcatccagagttgtcgtatcgaggactatgctaacagtggcaggacattgatctgtatccctattggcggggaaatgttggagaaaattggggcacatatggttgttgtctatctcggcgttatgctcgttgttgcc

SEQ ID NO: 20463 - DNA, 1382 bp, Emericella nidulans
tgcccatgcagaaagggtcagtaggccaattttctaaacccgacgagttatgctaacttgtttgaataggacaaacttgaacgagataagaatgataaacaaaccgcctacacccattttagagccattccagagaaaatccgtaagccgttttcttcagttctatttcttcttcaatcactgaatgtacaacaggccatcaggaagccaagaaagaggcccaagacgcttctatagctaaaatcagggcgagcattattaaaattcgccataagcaggataaactgtctgtcgagaaggctgaagctgtccttcaatacgcggtatgaaaataggcaatctcaacccacattgatgctaacaggtatagaatgctgttgagagtctccgtgaattgcacgaggaattgatcaaactatcgctgtggaagatcgaatcgttctcggactgggaagttctgaaactccgcaatagtgaatatgaggaaagacttaacgcaaagagggacgaggtaaagcagttgtctgaacaagtcaaacagaaggcattggaatgcagaagggcggagcaggaggcaaaaaagctctcagtaaaggctagagagcagcccgatttgatggaggtagcacaggaggtatcgagtaacaatcttaccccagaagcactagaaggcgaaatcgactccgagcaggcacgtcttgagctcacacacggaggtcccagcaacgtggttcaagaatatgaagagcgcgcacggcagatcaataaattgcgcaagaaactcacagagttcgatgagaagctcaagcaattcaacgacgccattgctgaagtcagaggcaaatgggagcccaagctggatgccatcgtcaagagcgtcagtgacgcattctccgactcgttcgcccgcatcggctgcgcaggtcaagtcagcctggacaagccaggcgatgagcctggacctgacggccagccaagcggcaacgacttcgacctgtggtctatccaagtccacgtcaagtttcgcgagcacgaaaatctttcactgctcgactcgcaccgccagtctggcggcgagagagccgtcagtacaatattttacctcatggccctacagtccctctccgcctctccatttcgcgtcgttgacgaaatcaatcagggaatggaccccggaatgagcgcatggtccacgggcgcctggttgagatcgcttggctcctagcagcgacggtggcggtgggcagtacttccttatcaccccgaagctgcttagtggactcgatacaaacccggtatgagggtcctttgcatcgtcagcggtgaacatatgcctgaggaccacaatctcatagatcttggtgccgcagtaaggaacaagc

SEQ ID NO: 20464 - DNA, 1384 bp, Emericella nidulans
tcgtgctctggaccttgacatcgaaaacgaaagtaatgtcatcgccatcatagcaacatgcccaactgaatgatactggttgaaactagcgtcgataaaaaatgccgctagtacagtagcatatgaaatgatgagccaataccacggcaacgaaacaggacagattccaggaaaggttcccgagtcgtggtgggaaggtgcagcgatgttcatgacgctgatccaatactggtactggactggaggtaccgtctatagcgacgtcacgagagaaggcatgctctggcaaaaaggcagagatgatttttttttccccagctacttctttggcaataacgaccagatattttggggccagctgctatgacagctgcagagctgaactttgctgagaaggaagaccagcctttgtggctttcacttgcccagggtgtctttgacgcgcaggtttcgaggtgggatgagactcgctgcggtggtgggatgcggtggcagatttggccgttccagggtgggtatatcacgaaaaatgccatctcgaatggcggattgttccagctcgccgcgagactgggccgctatactgaaaatgaaacgtacattcggtgggcggagaagatatgggactggagtgccacgacgcccctgctcaagtcggataactggactattgctgacacgacaagtatggaaaatgattgtcaggaccatggcgaccagcagtggacatataattatggcacttatagcgctggggctgcgtacatgtacaacctcgtaagtgccttcatatccaggtgagcgaaacgactgacattgtggaagaccaatggtgcccagaaatggagagctgcaatcgacggcttactcgcaacaacatgcaacaacatggagaacatttatcgccgaagatgccatgtctgaggtctggtgcgagcaaaccatgtcctgtgaccgcaacagagacatgttcaagggcttcctttcatcctggctgacatttactgccaccattgccccatacaccgctagtgacatcatccccaaaatccatcgatccgccattggagcagctagacaatgcctaggcgggcgaacgtgtggacgtcaatggaacgagggcgactgggacggtagcgcaacgatggaatccgacacgagcgccctaagtgtctattcctcatctatggtggccttttaaggacggagcgcaggccttgacccacgcaacggacgctaccagtagaagctactcggactctggcagaaggaatggtaagataccgttcactaagcgtcctgtcgcggctcgagatagactaagcgcaacgtttgcgacaattctattccttgctgcgtggtttagagggcttggctgggtgct

SEQ ID NO: 20465 - DNA, 1387 bp, Emericella nidulans
ttaaccggtcaaataatcacgggatgttgcttaagagtctagctatattcattctcgcccttacacagggcacacacgctaccaagctgattatgtatcttacagggctagttggccatcattctgatacctgcgctctgctcaagctaacctagagtaaggcagcacaacgtggtccctgaaccatccctcgtctcagatgtgacgcacgttgccctcgctttcatgcaatcgtcaatcttcaataggaactcaacctcgagctggcctctcttcaccacagttgatgctgtccgtaccgaattctcgaacggaacatcaatcctcatctccatcggtggatggggcgacacgcagggattttccacggctgctcggacggacgagagccggaagctctttgcggagaacattaggcggatggtggacgataccggggcggatggtaagagtagtttcatcaccggtgtattcgcctactgacgatcagcaggagtagatattgactgggagtatcctgggtatgtttttcctgcctatcgcccgttatagagcggcttgatatttaacgctaaaattatacagaggcaacggcgaagactacaaacgaatccccaactcggagaaattttgggaaaccgcagcatacccccaacttctggcagagatacgagcagccatcccggacaaactgataaccgccgccgttccaggccttccacgagacatgttggctttcacaaaagagactataccctctatcagcgcctcagttgatttcctcaacgtgatgacatacgacctcatgaacagacgagacactgtaacgaaacatcacactggcgtacagctgtccctggagtcaatagatgcatatatagaggccggcatgccgcctgaaaagctcaacctcggcctcgcgtactatgttaaatggttcaagaccgtgccaggcgaacagtgcgcaaaacagccaattggatgtccgactgttttaatggaggacccggatacgggtgcggatcttggacaagcaggcgcattttcatggaatgatcgagttccccaagagctggctgcgagttttgaaaaggccaaaataagtggtgaatatgatccttttggcggcggctattacttctgggactcgaatgaaaacatcttctggtcgtgggacacagcaaatgctattaaaagaaagtttcctgctattttggagaagagaaagctcggtggcgtgtttgcttggggcttgggtgaggatgctcctgagtttgcgcacctcaaggcaacgactgctggcctcggggactcttcggcagcgcccggcggcaagctaagtacaagtaggaaagatgagttatgattcctcttcaaggcgcagccc

SEQ ID NO: 20466 - DNA, 1389 bp, Emericella nidulans
cataagttactatacgccaagccaaactatggaaacccaacgaagtcgggaaagatgcaagtagttaggtcgctgctcgagctatggaaagagacgggccacaaaacacttctatttgctcaacatcgaatcatgctagatatcttggagaaattcgtcaaatctctctctggcttcaactatcgccgtatggacggcactacgcccattcagcaccggcaaacgatggttgacgagttcaacaaagaccctgatttgcatgtcttcctacttaccactaaggttggaggattaggtgtcaacctcaccggggcagaccgcgtcatcatttacgaccctgactggaatccttcgactgacgtacaggcccgagaacgtgcatggcgacttggacagaagcgtgatgtgaccatttaccgattgatgactgctgggactatcgaggaaaaaatttatcatcgtcagatatttaagcaatttctgacaaataagattctgaaagaccctaagcagcggcagactttccagctcagtgacttatatgacctctttgcactgggagaagagggtcaaggcccaacggagacaagcaagttattcaaagaagccgaagtcacttacgaggaaaacagggacaaagatgcaccaaaggaacgtgacgctagttaccagcgagacgtagaggccgaaaagcaagacatcagcaaggtaaccggagtcgctgcaatcgaacagttccaaggtgaaccggaacagcaagcgaagcaggagtcaggagaatccggcacaaactccgagtcgcgcctgatggagggtatattcgccagatcaggcgttcattcagcgctcgaacacgaccaaatcgtcaacggcaaacgcgtcgtcagagcagaccccaagataatcgaagcggaagcgaagcgagtagccgctgaagccgctgagcaactccgccgtgcaggcgaagcagccaaatctgttccaatcgggaccccaacatggacgggacagttcggtgttgccgggaaaccggaggagtcaccaatgcccatgcgaggtccgttcggcggacgaagcagcacagccagacgcgccctagccggtccctcgtcggcaagtatcatagctaatctctcttctcgtacgccctcgtctcgaagtgccaccaatagccctgccccaggaaatgagcccagcgggaaggatttcatcacgatgatccgggattttatcacaacccatggagggtcagtctacacacagaatctgattgaccattttaaccggtactgtaccacaccacaaaagtcagcagaattcaaggagatgctgaagcagattgctgttctcgataaagggggaagaaatggtaggggcaggtggcaattg

SEQ ID NO: 20467 - DNA, 1389 bp, Emericella nidulans
ctttttatactaattcaacttatcctgccacagttgctctccttcctaaataccagcttcatgatgcctcgcggcggctttcatccagtagaactccgtgtccaagttcttactttatcagctatcggatttagtacagagaagatctcaaaatctttgaatctctctcctcgtacggtccagagcatcgtaaagaaaggcagagatcgtggctaccggccggaagtaagcctgcgcgtgcagcttgaatttgttgaggatagaaagcgatctggccggcctgttgagattactgaagctactcagaatactgttattacttcagtaactgcagatcaagcagggcgcgagaaatcatcagaaattcttgcttatgaagctggtatctcccattcttctgttcttcgtatccttcattctcatggctttgttattgcaaaaccttcctggaagcctggtctgactgaagctgctcgtcttaggcgtcttgaattctgccttgcccaccaacattggacattagaagactggaaacgcgtgatctttaccgacgagactggtattattcttggccaccgccgcggagcaatacgagtgtggaggactgtgaaagattcacatacaaggaattgtgtacggaggcgctggaaggcctgctctgacttcatggtatggggttgcttctcatatgataagaagggccctttacatatctacaagccggagactgctgccatgcggaagcaggcagatatagagattgaagccatgaatcgtgagctggaacctctatgccgggaggaatgggagttggctacaggtctttctcgtgttcatttacgcccaaatcgcggccgtgttcctaaatggaattggaacaagaagaacggtaagcttatacgtaaaggtaaaggggggattgattggtggagatatcaaacagtttgttcccttatctctataattctctattatagagtagttaagcacgtgctaattacttattctactgcctaggaagtccttaaacctcttcttattccatttgcaaaagaatgcatgattgagcgcccaaatactattattttagaggatagcgcgcctgcccactgtcaccgaatccagcagcatgtctataaagcagaagacgtgcaaaagatccttgactggcctggcaattcaccggatctcaacgcaattgagccgtgctgggcttggatgaagaagcgtacaacatcccgcggtgcgccccgcgataagaagacaggagaagcagaatggaggcaggcttgggcggatctcccacaggagactatacaacactggattgagcgtctaattcgtcatattcagattgttatcgagctagaagggggtaatgaatacaag

SEQ ID NO: 20468 - DNA, 1395 bp, Emericella nidulans
cgaaaccaaaatacacaggtgaagaagaggagttgccacagcatggccagcgaggaccgcgcatagtcgggccgggccagcttgacgatacacagattgttctccgagtcagtatccgcctattgttcttgctaagttacagtgctaatacttgctgctaacagaggaccggtccgcctccgtacggcaaccgagcaggatggcgtcctcgagcgcccgaagatttcggcgacggtggcgcgttccccgagattctcgttgcgcagtaccccctagacatgggccggaagggaacgcaatcaaaatcgaatgcgcttgctgtgcaagtagacgcggaaggaaaggtcaagtatgacgctatcgcacgccgcggacacagcgacgaccggatcgtacacgcttcgttcaaggatttaatccctctccgacaacgggtggatatgggcgaggtatctctggacaggccgtcggaggaagaggttcaggcgcagatggagaagacaaaaaacgcgcttgctagcttggtgtcgggggctgtggctgcacagaagcctaagaacgtgaagggtggtagccgggcagagcccacgtttgtacgatacacgccggcaaatcaaatgggtgatacaagtcggaaaaatgatcggattatgaaaattgtcgagcgccagcaagaccctatggagcctccgaagttcaagcacaagaagatcccgcgtggaccaccgtcgcctcctccgccgattatgcactcgccgccgcgtaaactgacggcggaggatcaggaagcttggaagattccgcctcctgtgtcgaattggaagaatcctaagggttatacggtgccgttggacaagcggttggctgctgatggacgcgggctacaggatgtttcgattaatgataagtttgcgcagtttgcggaagcactatttacggctgatcgacatgcccgtgaggaggtccgactccgcgcccagatgcaacagaggttggcggagaaggagaaggcacagaaggaagagcatctccgtgctctagcccagaaggcacgcgaagagagaagcagagcgcagtctcgtgcctcacactccccaagccgcggccgtagccgtagccgcagctactccgatgcgtcatcgcgatcccgcacacccagcgaagacgaagaagccgcccgagagcgtgaacgcatccgtcgtgaacgacgtcaagacgccgaacgccagctccgtcaatcacgcatgggcaccgagcgacgtattcaagcaatggcccgcgaacaaaatcgcgacatttcagaaaaggtagccctcggtctagcaaagccaacgcagtcgtccgaaaccatgtgggattcccgcctcttcaaccagaccagcgggctgagcaccg

SEQ ID NO: 20469 - DNA, 1396 bp, Emericella nidulans
atggaagccatctaacacctcaatttgacaagctctgtgaggataatggcataatatctctttgcatgcctgctggttcatctcatctactacaaccactagatattggctgttttggtccgctcaagcgtgcatatggaggtcttattgaatcaagatcacgccttggcaaacaccatatcgacaagtttgactttgtaggggcctatccccgtgcatatcagagtatttttaatgagaagaacattcagagcagctttgctgccgcagggatagagccatatgacccagatagggttctcagcaaacttcatgtatcgctttctacaccatctcccccctggcatcaagcaggggttctagtacatttgctacaccccatacagttcgacaactgcaccgaaagactctattgcttcagaattctatagagagggcctctaaggcgcttgttgaggatactaataaccatatagagcagttgcgaaaaggctttgaagttgctttatatgacaaggaatttcttggtgattatctttataaaatctatcctgtattagaatgggatgaatatcttttatatatccttgtcttctgccaggtccatgtgaagcaaaactcttataaaaagtttagagattatcctgctaaggaggctgtctatcagttatagaatatacccagtcagaaagagttctttaaaaagatggagggtattcttgagctctttcctcataacaagctaagaagatggctggagtataaattaagcaagccctggatcctgggtggatatgtcctggccagttaaaaatagactttcaatatttggaggtagacttgttaaacccaacccacgaaacccgccccaacccgccaagaaatgggttgggtggaccttctaattatccattgggttttgaatatttttggctgccccaaagcccggcggagcaacctgctgggttgccaagatatctgaataggtatattactgtatttagattacattttcttacttagatgatttataatacagtatttaaatacagtattttattagttacgtagatcactgcttattagagtaattatatgcataactgggttattttgggttattttgggttatttgggttgggttcgaattatttgctaaacccatgggcggtttactgttcaggtaacccaccccaaaaaccgcgtgggcggatcagctaggcctgaaaaccgccccaacccgtggtttaacaagtctaggtttgccgtttgtgaagggctgaagtgagacttgaattccatctgactaggccacaacctgtgtacaaaacgtctggagacgagaaggagcgggggcaagcgcggaacaacgatagaagaagcaggccaggcggtg

SEQ ID NO: 20470 - DNA, 1406 bp, Emericella nidulans
cgcgtgtctttgcatggggtcttggattgatcttgtccagcattgccaagtttgcgggcaagaccaataaccccttctggccgatcatgcacgcagagaacggtgggtggaacaagctaggattgcttctcgctattttggctggcatccgttcattcagagtccctgccagcagtggcggggactatttcccctccaccggcaagaaaggatcttctttgcttgctggattgggattgggaagtatgatattcttgatgcattacctcttgtctgattctagtaccatgattgcctgggtttgggagggctacccagtccgtggccccatcgccgtgcctcatggagcgcttactatctttgcgatgggcgctggactcgcgtttggcttgttttaccctaacgttgctggaagctggaccgcttttggtattggctctgttggtgcagcttttcttacaggcaccagccactggagtggattctacggtgctctcacgatttctttctacctcatggccgtttcgcctgtgatgatctcttctgcggttcgtcattcgccagcgatcacgttcggactcgccttcttcgtttatgtcttcctccttctcttccatgtgtgggttgtggcctacgctttcgttcccggcggaccgctcgtcagagagcacaccgattggctcatgactgttgcgatgctttttatcggtgcaggtgtcttctctgcggcggtgtcgagatcaagtggccctaggaccaatgccatcagcccaaacggcaggagattgcgctcatactatgtctatgtgctcgttgcattgcagcttctgtctgtctctatcgcgtacctccgtttcccaacgaacgactacacgccttaccacaaagaagaaaaggctgtaaccgccggtatctggaccgtccactttggtctggataatgatatgtgggcctctgagcgacgcatgcgtgatgtaatccaggaactcgagattgacgttctcggtcttcttgagtctgacaaccagcgcatcatcatgggcaaccgtgatataacgcagttcatcgccgaagatttgggcatgtacgccgattttggcccgggtcccaacaagcatacatggggctctgcttgctttccaagttccctatcgtcaactccactcaccatctccttccttcacctgttggtgaactcgctcctgccatccacgctaccttggatatgtatggcgagctggttgatgtcgttgtcttccattcaggacaagaggaagatccagaggaccgtcgcctgcaaaccgagtacctgtcgaagctaatgggctcttccccccgtccgcttatcctcctgagctacctagtcactaaaccgctcgaaggcaactacaacacctacgttagcg

SEQ ID NO: 20471 - DNA, 1407 bp, Emericella nidulans
tgggcaacctcgcatccacatagctggaaccaaggacggttgaaggaagccgaagagctgcaggagcaggtaatcgcaacctctaaacaaaggctagggccagaccatccttctactctgaacagtatggccaacctcgcatccacatactggaatcaaggtcggtggcaggaagccgaagagctggtggtacaagtaatggcaacacagcaaggagtgctagggtcagagcatcctgacactctgaccagtatggccaaccttgcatccatatatcagatccagggacggtggaaggaaaccgaagagctggaggagcaggtaatggcaactcgaaaagaagtgctagggtcagagcatcatgaaactttggctagcatgtccaaccttgcatccatatatcagatccaaggacggtggaaggaagccgaagagctgcaggagcaggtaatagcaactcgaaaagaagtgctaggtgcagagcaccctgacactttaactagcatgttcaagctcgcatcaatatactggaaccaaggacggtggaaggaagcagaagagctgcaggagcaggtaatagcaactcgaaaagaagtgctaggtgcagagcacctgacactttaactagcatgttcaagctcgcatcaatatactggaaccaaggacggtggaaggaagcagaagagctgcaggagcaggtattggcacctctaaacaaaggctagggccagagcatccctttactctgactagcatgtgcaaccttgcatccatatacttgaatcaaggtcgattgaaggaagccgaagagctgcaggtacatgtaatggcaacacagaaagaagtgctagggtcagagcaatctgacactctaaccagtatggccaaccccgaatcaacatactggaaccaagaacagtggaaggaagccgaagagctgcaggagcagatattggcaaccttcaaacaaaggctagggccagagcatctctctactctgaccattatggctaacctcgcatccacataccggtaccaaggtcggtgggaggaagccgaggagctagaggtgcatgtacttgcaaccttcaaccaattgctagggccaaagaatccctctactctgaccattatggctaacctcgcaaccacataccgaaaccgaggtcggttgaaggaagccgaagggctagaattgcaagtattggcaactcgaaaagaagtacttggcctagaccatcatgacactctgactagcatgcacaatcttgcccacacttggaaacaactaggaaacactcagaacgctttagatctgatggaaaaatgtttacagctccgcattaaacttctgggctcagatcatcctcataccagatccgcctccaatactctcaggcgctggga

SEQ ID NO: 20472 - DNA, 1412 bp, Emericella nidulans
gcagttcagcgggaaagaacatcgaggatctcttatattacagcttatgacgaggtttgcttcctcctttatatcttcaattgacggaacttcatcggaaatatccacgaaagaattatgcggtggtgctaggatatattatatattcaactctgtcttcggcaactctcttgacacgattgatccaactcaaaatctttcaatttcagatatcaggactgctatccgtaactcaacggggccgcgtccaagtctttttgttccggagctcgcttttgatcttctcgtgaaacctcagatcaaattgcttgaaccccctagccagcggtgtgttgagctggtttacgaagaacttataaagatatgccacacttgtggctcgcaagagctgttgcgctttcctcgtctccaggccaaactcattgaagtcgtgtctgacctcctgcgcgagaggctaggtccctgctcctcttacgtggagtcgttgatatctattcaaagggcctacatcaacacgaatcatccaaatttccttggtgcagccgccgcaatgtcgtcaattatccaaagcaaacaggaccaagagaggaaagccgcgctcgcggaggaacgacgcaagcgagagaagagacgaatcaaggaactcggtggtccaaacggaaacgcaccaacacatccggaagacgaggaagagcaaccggaaaccaaaaaccttcccatcaggactcaatctagcaaagggacccgcagcatgtctcctcatattggaaaaatatcagacactggaatcacggcaactttgaacgggacgcattcgaatcctccaaccggctttggcggtgctaataccacccgcgattccttcctgaactacttctttggcaaagatggtgcccagccccaacttactacctcagcctctcccaatcaaaaccaaactaggcagtccatccatgaggtcaatgtgagctcaaacgctcgacgcaccgagatgctttctccggtggatgattataccacggtgcccgaatataacgaagcgagttctgttgtaagtatctgttcccaattgtatatgaagcactctattgacacaccacgaaattgtctagttgaaggacgattctgagccggcaatatctgagcgagagctcatggagacggaattgattcgtcggttgatctcttcatatttcaccattgtgagggagacaatcgccgaccaggttccaaaagctattatgcatcttcttgtcaaccacagtaaagatgttgtgcagaatcggcttgttagtgagctctacaaggaagagttcttcgctgagcttctatatgaggatgatggcatcaaagccgagagagagaagtgtgagaggttgttagaaacatacaaagcggcagcgaaaattgtc

SEQ ID NO: 20473 - DNA, 1417 bp, Emericella nidulans
tccactggttcccgtttattgggagcaccattagctacggcattgacccgtacaagttttttttcaactgccgcgcacaggtatgttatatctccattcgattgacaagctctatccctgactactgtggctcatatttagtatggagatattatcacgttcgtccttctgggaaagaagactaccgtttatctcggtactaagggcaatgactttatcctgaacggaaagctaaagatgtgtgtgccgaggaagtctattctcccctgacaacccctgtatttgggcgtcacgtcgtctatgattgtcccaatgcgaaactcatggagcaaaagaaggtgaatccccattcgcttgttaggtttcccgtggaatctctatctgataaatttgcagttcgtcaagtacggccttacctcagatgctctccgttcctacgtccagttgatcactgcagaagttgaagactttgctcagaaatcatcagtcttccagaacgcgaagggtgtcttcgacgtatcgagaacgattgccgagatcacgatttacactgcttcacgctcgctccagggaaaggaggtacgtgacaagtttgactcgacatttgcggagttgtatcatgatcttgatatgggctttgctcccatcaacttcatgctcccttacgcgccccttcctcacaaccggaaacgtgacgcggcccagaggaaaatggccgaaacctatatggagatcatcaaagagcgtcgcaaatctggcgagaaaaaagattctgaggacatggtttggaacctcatgtcttgcgtttacaagaacggaactccgttgtccgacgaagaaattgcccacatgatgatcgcacttctgatggctggacaacattcatcttcctctaccctttcatggattctgttgcatctcgcgaggcaccctgagattgtggaggagttgtatcaggaacaactcaaagttttgggatctgatatgcatatgacctacgacgacctccagaagctggagcttcattccaagatcattaaagagacattgcgcatacatgcacctattcactcgatcatcagggcagtcaaaagtcctatgcccgtacctggaacctcatacgttatcccaacgtcgcacaatgtcctttcctcgcctggtgtaactgctaggtccgatgagttttttccgaacccattgaaatgggatcctcaccgctgggacagcaatcctattgccaactcgaccgaggatgaggagaagatcgactatggctatggtctggtcagcaagggtaccaacagcccttatcttccatttggcgctgggagacatagatgcattggcgagcaatttgcttatgtccaattgattaccgtcaccgcagctcttgtgcggctgtttaagtttgacactg

SEQ ID NO: 20474 - DNA, 1424 bp, Emericella nidulans
gtctacatggcctattacaccattgcccatattttgcgcggtgacggttacggtaagtcgacaggtaagctcaacatcaaggcagagcaaatgatcgacgaggtttgggactatgtgttctgccgacgtgagatcagcgatgagctcatctcgaagagcggtcttagcaaggacgctctccaggctatgcgaagagaattcgaatactggtatcccatggacgtccgagtgtctggaaaggatctcattcagaaccacttgaccttcttcctttatatccacgtagctctcttcccaccgcaatactggcctcgcggtgtctgtgccaacgacacttgctcttgaacggtgataagatgagcaagagcaccggaaacttcttgaccctgaaagactccgttgacaaattcggtgctgatgctactcgcattgccttcgccgacgccggtgatggaatcgaagacgccaactttgaggagagcgttgccaacagcaacattcttcgtctctttactttgaaggagtggattgaggaggttgtcaaggatgagagtttgcgaacaggacccgcagaccacttctgggacaaggttttcgacaacgagataaacaccctggttcgtgaaggcaagaagaactaccaagagtgagtcaaccgatatcctagcctggggttccaaagctaactaatttagcaccaacttcaagctcgctcttaagtccagtctgtatgacttggttggtgcccgtgatgcctaccgtgaggcttgcatctccgcaggcatcggcatgcaccgcgatgtggtcttgcgctatatcgagctccaggcgctcatgatgtcccccattgcacctcactggtcagagtacatctggctcgaaattctgaagaaggtgcgtattcagaccttataacacagtttaatactaacctattcagcccgatactatccatcgcgctctattccctgaggttgcagagccctcacctgaactctcagcagctaccagctatgttcgcgcgaccgcctccagcatcctgtccgccgaagccaacttcgtcaaaaagctcgccaagggcaagtctgcacacttcgaccctcgcaagcccaagaagattaccatctttgctgcgaagaagttcccttcatggcaggagaagtacatcgaccttgtccgtgaagcctttgacgctgtctccctcaccattaacgacaaggagctaaacgccaaggtcggcaagcttggtgagatgaagaaggccatgccctttgttcagggtctcaagaagcgtctgatcagcaccaaggaggctcccgagatcgtctttgagcgaaaactaccgtttgacgagttcggtgtcctcaaggagatgacggttaacctgaagaagaccacaggagccaaggagattgagattgttg

SEQ ID NO: 20475 - DNA, 1435 bp, Emericella nidulans
gacgacgcccggatgtcagatgtgaacaattcgccaaatgtattccatgacgacccagatacgatcgacgagaagttgtcgatgtactggaaggcggcgaatgaaacggtagggcctggttcactcatcagccatgagagttgaccttatctcttttactccacaggtgattagagagccgtatgactacatcgctgggatcccaggcaaagagatccgccgaaagctcttggaggccttcaaccactggtacaaagttgacgaacagtcgtgccaggctattgcaaccactgttggtatggcacacaatgcatccctgctgtatgttgcatccagtctctggctcaatcgcgttttcacgagctaataagcactccacagcatcgacgatattcaagacagttccaagctccgaagaggtgttccatgcgcacatgaagtgtttggcatcgcccagaccattaactccgccaactatgtctactttctggcgcaaaaccagctgtttagactgcggacgtggccccaggcaatttcggtattcaacgaagaaatggtcaatttgcaccgcggtcaaggcatggagctattctggcgggataacctgctgcctccgtccatggatgactatctgcagatgatcgctaacaagacaggtggactgtttcggatgatagtgcggctgctccagacaagcagcagacaggtcattgacgtcgagcagttggtggatgttcttgggctttactttcagatcctcgacgactacaagaatatcagagaagagaaggttcgtcttcgtcgaaccagatcgagaactaaagaagactgactacttcgcactagatggccgcccagaaagggttcttcgaagacctgacggagggcaaattctcgttccccatttgccatgcaatcggagaaggggccaagaacagaactgctctgctccatatgttgaggctcaaaacggatgacatgaagatcaagcaagaagcagtctgcatactggacaatgctggcagtttagattacacgcgagaggtgctttacgggctggacaggaaggctcgcagtctgcttcgggagttcaagactccgaaccctttcatggaggctcttttggatgcaatgttgagcagccttcaggcatgccattgaggtttatcagactgaatatgacagtcctgcgcatttgatgagataatgacattgtttcttcttgactttatgtatctctaagggcctgtcctaaacactacatatctttccgaccatatcggatcatggactattttctagatacaagcgcagtacttatgcctatgtttaccggggacttactcgggacacttgatccggttggagctgtttctgctgcccaatgctactgtagaagactgcattgcacactactacggcgaaagggcccagc

SEQ ID NO: 20476 - DNA, 1438 bp, Emericella nidulans
tgacgccagggttagcgtcgtttctcaagtctctgaagaccaatcccatcgatacttctattgataatctgatcacgtgcgtcccgaattgtccctagcgttcgatcaatcaaaactgatgcagcaaaagacttctcaaacgaagacagatccgacactctagatcatgcgcaactgccactgcttaccttttgcgcagcgtcatatccgcgtgtaggacgagcgatgcctcaaaactcatcgagcgcgtgcagagcgtgggaagacggctgatagccgcacagcccagggagatggtagtcgggaacattgttcggcgtgtgctagggttgatccgtgacgaggcagaggatgacagagacggggattttaccttgagcgatgcgggttccgaaagccaaccgcagacacctcgtgctggagatggtaagccctctcttcaggccttgctgataaagtgaggttaatgtgaatgtcgcagaaccgtccgagttccatggctccgacagaggtgcctcaaaacctatatcttcgctagccacccatcccgtttctatgttcagtctgctctctcatccagaacccgaaacgtcactaccgggtacgccagcaaccggctcaccatccggacgcctgcccgggcacacccagaataaggatatccgcgccgaagtcctggatggtatcaacgagatcattgatgaattgggacaggtggatgatcagattgctgcctatgcgctcgaccacattcactctaacgaaatcatcctcacacatgacttcgtcgacgactgtacagaaattcctcctcaaggccgaccgaagcggaagttcaccgtcatccatgctgaatcataccctaataaccatgaagcaacccatgccactgtcagtggtgctgcctccaacgacgatgagatcctcagcaccgaatcgttccaaaagcccttgatcgctcacggcatcacggtgattctcatacctgactccgctgttttcgcccttatgtctcgtgtgaacaaggtcatcctcggtacacattccgtcctctgccaacggcggtctcgttgctgcagcaggcacccgtgtcattgcccgagcagccaaggtgcaccaaacgccatgtgtggttgttagcggtgtatacaagctcagcccggtgtaccctttcgatttcgaatctttaatcgagtacggcgactcaagcaaagtcattgactacgaagatggcgacctggtagaccagattgacgtgcaaaatccgttatatgattatgttcccgcggaaattagttgacctttatatcacgaacttgtgagtctctcatcacctttttcacatggaagtaactaattcttgtcaaggggcggacacgcgccgtcatacttataccgtatcgtgtctgaccactaccggaaggaggatatcagcttt

SEQ ID NO: 20477 - DNA, 1441 bp, Emericella nidulans
tgtacggcgagatccccaaggatatcgatggggtattctaccgggtaatgcctgatcctcagttgccccccttcattgaagacgatcccgtaagaacaaaacaccatccggcgtccgatggagaagctaacgcatgcagtggtttaatggagacggcaacgtcagcgcctttcacattcatgacggtcgtgtatcgtttcggcagcggtatgtgcaaaccgagaagtttgtacgcgagcgcgaggcccagcgcgccctgttgggtaggttcatcttcacccatctacagctatttggtgctaatagccgggctaggcaagtaccgcaacagattcaccgacgcggtcgagcttaaagttcgcagcacagctaacaccaatgtcgtcttcttcaacgggcagttgttggccctgaaggaagactcgcccccctacgccctggaccctgttacgctggacactaaagggctgtatgactttgaaggccagctgccatctctcacattcacggcgcatccgaaattcgatccagccacgggcgagatggtttgtttcggatacgaggcgcggggtgacggtacaccagacgtgtgctattacagcgtctcgccgactggaaagttcacggaggtcgtttggctggtcgcgccagtcgtggctatgattcatgatttcgcggtcactgacaactgggtatgtatatctagtccccgactagggttgcgtcgacgcttacgctgctgacaggttatcttccccatcataccccaagtatgcgaccttgaacgaatgaagcagggaggcgagcactggcaatggagcccagagaccccgttctacttgggtgtcatgccgcgtcgaggcgccaaagccgaagaagtcaaggtacggctgcatctgccgcctttttacaagctccagttgaaataatccatcacagtggtttcgatatatgaattcttttcctggccatactgccaatgcctatgagaacgagcaagggcacctagtcatcgacctgggtctaagcgagaagaacgtcttcttctggtggcccgacgcacaagggaacgcccccgaacccagctcgattgtctctcagctcgtccgattcaccatcgaccctcagaccgaggacctcactcttcgtgagcctgaagtcctgcaggagggcaactcggagttctacaggatcgacgatcggttcgccactcgcccttatcgacactgctactttgacctgatggacccccagctgggtactgattttgagcgcatcggtaccaaaattggcgggggatttcccttatacaactcactggcccacctggaccataccacaggacaggtggaggtgtactcccagggagaacccacctggttcaggagcccgtcttcataccgcggaagaactcgagtactgagggagacggcatgtctgc

SEQ ID NO: 20478 - DNA, 1445 bp, Emericella nidulans
gggactgctgctccccctcatatcgaccgtctcagcagcggacgtcgatgcctggaaatctcgcaacatctacttcgccctgacggatcgtgttgctcgtgggagcgacgatacaggtggtgatgcctgcgatgatctcagcacctactgcggcggaactttcaaagggttagagggcaagctcgactacatcaagggaatgggctttgatgcgatctggatcactcccgttgttgctagtcagttcaaacgcccacagactatttatatgtggcattaccaaactgaccacgtctatagatcatgacggcgggtatcacggatactgggcaaaggatctgtacagcatcaacgagaactatggcaccgcggacgatctcaaaagcctagtcagtgctgctcatgaaaaggtacttacccgcagttggtgttttattcgagtgcaatatactcaagaaccatgttttgaatagggcatatatattatggcagacgtggtcgctaaccacatgggaagccccatcagcgacaaccaacctgagtctctgagccaggagagcgcataccattccgcttgtacgatcgactactcaagtcaggagagcatagaaacctgccgcatcgcagatgatctgcccgatgtcaatacggagagcgaggagatccgcactctcttcaaggaatggatcacctggctcgtgaaagaatacgaatttgacggcctgcgcatcgataccgtcaagcatgtcgagaaggacttctggtccgacttctcgtccgctgctggggtctacaccattggcgaagttttcgacggcgacccagattacctcgccggatacgcaaacaccatggacggtctgcttaactacgcagtctactaccccgtgaacaacttctaccagcaggccggttctgcacaggatatcgtcgacatgcatgacaagatcgatagctccttccccgatccaagcgccctcggcacattcatagacaaccacgacaatgcacgctggctgagtaataaggacgacaagtctctcctgaagaacgcactcgcctatgtgattctcgccaggggaattcccatcgtctactacgggacagaacagggctacgcgggtggcaatgatcccgagaaccgcgaagacctctggcgcagcaacttcgataccgatgccgacctgtacaaggcaatctccctactctcagcagcccgatcagctgctggcgggctcggggacaatgaccatgtccatctgcacgttgcggaatcggcatatgcgtggagcagagcagagggaaaactcgttgttgtcacgtccaacagtggatctgggtccgagaatgagatctgcttcgactccaagacgcccaacgggtcctgggagaacatcttcggagagggaactatcagcgccgatgacagcggacagatctgtgtc

SEQ ID NO: 20479 - DNA, 1451 bp, Emericella nidulans
gtctgcacgcaatccggcacgatcttcgacttgaccagcatccttccctggattaagaagcatgggacaaaccctgttgacggaacaccgttgaagggctctgacttaatcaagctaacgattgcgaagaacgatgccggcgagtatattgatcccgttacgtacaaggttctcacggacaacacgcatgtagttgcgctgcgaaatacggggaatgtctttgcgtgggatacaattgaacggctgaatattaaaggaaagatgtggcgagatcttgtctcggacgaggaattcacgcgcaaggatattattacgctgcaggatccgcagaatatcgagtcgagggatttgagtcggtttaatcatatcaaggagggagagagtggattatcggatgagcagctgagagagagagaggatccgtcgaggaatgtaaatgtcaatgctctggggagctcggcgaagatcctcaaagcgagggaggcggttgctaaagcgcggcaagaaagggctcagaaggctgggaatgcagcttctactccagtggctaagaccgatgcgccggtgaagtcagcacagaagaccgcttcgtatcaatctggtaaacctgtgccttataatgccgcgagatacacgactggcttggcggctgcatcatttacaagcacaggaatgacgccacacacctcggctgaacttgccttactttcggatgaggactacatgttgaagagaggtcgggtaaagcaaaagggctacgctcggatatcgaccacatccggcgacatcaacctggaattacacacggagtatgcgcccaaggccgtctggaactttatcaagctcgcaaagaagggatactacaaggacgtgacatttcaccgcaatatcaaaggttttatgattcaaggaggggaccctacgggcactggccgcggcggtgagagcatctggggcaagtacttcaacgacgagttcgagggccctctaaagcatgattcacgggggacactaagcatggcgaataaaggcaagaatacgaacagcagccagttgtaagttctgacgctacgtcctttccattgagaagttactctcatactgactgaatcagcttcatcgcctaccgcgccctccctcacctcaacctcaaacacacaatattcggccacgtaatcgacgatccaaccccctcctcgccaaccctcaacaagctcgaaactcaccccgtcaacccaacaaccaacagaccaactccagacatccgcatcgtcgacgtcacaatattcgtcgacccatttgaagaattcctcaaacagaagaaacaatccgaacagtcagccgagaatgaggcaaatagaacagctgaaaatgacgaggaaggttctcgccgcgctgaagatgaccagattacttggactggaaagcgagttcgaggtcctggtgcgagc

SEQ ID NO: 20480 - DNA, 1459 bp, Emericella nidulans
ccgcttgcggcatcacacatgggtcttatttacgttaatccagaaggacccaacaagaaccccgacccggttctcgcggccaaggatatccgcatcacctttggtcgaatggccatgaatgatgaggagactgttgccctgattgctggtggacacacgttcggaaagacgcacggcgcgggccctgcaacccatctcggcaaagaaccacatggtgcgggtattgagttacaaggcctaggctgggagagcggcttcgagtctgggaccgggcgacatgctatcaccagcggtctggaggtgatctggaccaagacccctaccaagtggagcaaccagttctttgagtacctgttcaagtacgactgggagctcaccaagagtcctgctggtgcccaccagtatgtggcaaagggagtcgagcccttcatcccggatccgttcgaccccagcattaagcacccgcccaggatgctgacaactgacctgtcactccgctacgatccggagtacgagaagatctcgcgtcgtttcctcgagaacccggaccagtttgctgatgcgtttgcacgcgcctggttcaagcttactcaccgtgatgtcggtcctcgagtcctctaccaggggccagaagtaccatctgaggtcctcatttggcaggaccctgtgccgccactggaccaccccgtcatcgacaatgatgacatcgccactttgaagaaggcaatcctaaacagcgggataagccatactgatctcttttccaccgcttgggcctcagcttcgaccttccgtggaagtgacaagcgcggtggcgccaatggtgctcgcatccgtctgagcccgcaaaagaactggaaggttaacagccagccgtggctgagcgaatccctggcagcacttgaaaagattcagaagcagttcaacgacgcacagtccaccgacaagcgcgtctccttggccgatttgatcgtgcttgccggagctgcttctctggagaaggctgcccgcgatgctggccacaatgtctccgtctccttcacacccggtagaacagatgctacccaggagcagaccgatgtggactcgtttaacaacctggagcccattgccgatggcttccgcaattacggccgaggaacgcctcgtgtgctcaccgaggacttcctcattgacaaggcgcagctgctcaacctctctcctccagagctcaccgtccttatcggcggtctgcgtgtgctgaacaacaactacgaccgttgcaacctcggtgtcttcaccaaacgccccggccaactcaccaacgacttcttcgtcaacctactggacatgggtgttcagtggaagccggcagatgacaccaacgaaatattcattggcagcgaccgtaagactggccaggcaagatggaaggcttctcgggcggatctcgtgtttggttctcacgctgaactgcgtg

SEQ ID NO: 20481 - DNA, 1460 bp, Emericella nidulans
ctgctccccgccgacttcaagccgcctcaggtcttcaaaaatgtgaatttggtccgtaatacgaacctagaaaaacgtacgcccgcgaaacaatcaatgtagtgattgagaacgtggataaacaaccccagagcgagtactatctgtccttcccgtcggacatcttcgaacagatcggaggactagaggtccgcaataaaaaggaagcagacaaaggcaggtttgatgtggaagctagcgaggtcgatccattcaggtaagtctcttgtcgcagtcaacggtcaatgtagccagcgaatggtttcggactaacctgcgctgcttagtgatgttcgatacttcattgtacacctgcctgaacctctggctccttcgtcgcagcttacccttggaatttcgtactctctcctcaactccctccacccgcgcccggctgccattaagcagtcagatcgccagttcctcacatactcattctccgcatacgtgccatccgcctatcagaccgtgacgcagaaaacgaaagtcaagtttccaagcgcaaatatccctgactacacaaccacggaactcaagtctggtgcagaccccgaacgccagggtacaacctatatttacggaccttacgagactgccaatgtcgcaccaggcacctcatatcccatcacggtccgctacgagttcacgaaacccgtcatcacagtatcactgttggaaagggacctggaggtctcccactggggcggtaacttggctacggaggagcgctactgcgttcgcaacaatggctccaagctgctgacccagttctcccgcgtggactacaccgtcgccaactaccagcaatccccgtctacagccatcaaagagctcaagtatcccctgaagccaggttcagtggacccatactttaccgatgatattggaaatgtctctacgagccgctaccgccccggactgaagaaccgggaagccaatctcgagttcaaaccccggtatcccgtcttcggcggctggaactacagtttccgccttggctggaacaacaacctctcatcatttttacgtaggacagtatctaatgatgattcctacgtgctcaaggttccattccttgaaggacccaaaatgggtgaaggtatccagtacgagaaggtagttgtgcgagtcatccttcctgaaggcgcccggaatgtgcgctacgagattgttgaagggcctactagcaatggcttgccgagcgcaagccagatccaatcctccctatctactcataaaaccttcatggatacgcttggccgcaccgctttaactctaactgtggagagtctcaccgatgaagcccgtgattcccagcttgtggtaagtttgccagtggccgcctcgcatatatacaacagtcactcacttggaactaggttacctatgactacgctttctgggatggaatgcgtaagcca

SEQ ID NO: 20482 - DNA, 1461 bp, Emericella nidulans
ctgggtgggctacgctgggtaagtactgtttttattattttctctcctgcaattgttgcgagaccctggaaacaccaaccggtgatttatgcgatatgtgacatccgttcatgttattatccaaggttctatgcaaagaatccgcgtcaacaactacctgtgagcatatttgtcaatgctgtgcaatagctggatgattccatagcggtcatggagcactcatgaacttgttgagggcacaagtctttgtaaatggtttggctgggtgggggttcttaggatttgtctctcactagcattgtctacggcatcggctttgagatatgcttcttagtgctgctcaggctattcttcataataaaagtggtggcttgagagacgaagtatattggtacgatcatacagaggcttggccccgtccaactcatcgttacctacaagatgagttttccgccgttgagcccggtagaccacaagtcgatatgaaatgtgtaaagagctcatgatatcagcttagattttgcgaacatgggtctggaccaagatgatctatatgccgccgctggccatgctatcaaggattagtcctcagcacatcagtcacgtcgtgttatagcagcaatcaggacagcagaatcaccccctcccccagcccaacaggcacgctacataaacccacagaaacctcatgagttatgctcagtctttagttcaacaatgtatctccattgcagagttatggtcaccacgttcagcttgcttgcatatgtgcatggagtctgtgccatgctaacaacaagataaacagttgcatcccttgtcctgccttttgcccatgtcttgcgcccacgaaaacattatctccaccgccatatgatcatattcctcgctctcgttccccttttcatcattctcacaatctcctacgaagggctcttctacttcgccattgcttttaccctcttcagctgggtccaactcgaacagaggatccatcaacattctaggatccatcaacattctaagaaccacagtatccgcaatatcatttctaacgaaccttgtcaaccgggcaacgctaggaatgccgtagctaatgattgcgccccaaacaccgaagaggcccggaaagaggagatccagcaccgcttgcaacatccgccaaggcagcgaaacagagaggaaaggctgccttagagagaaacatatagaaatctcatcctgtcggaagttagagtctgtctgttcttccttttcctgctgcacttcgccttcttcagcaccgaaaacatcgcctcggtctccccattctcgctagacgctgtctaccggctactttctataatcgattccttcagccaggcggctcttcttatcctcaagattctggccccactcgcactggtttctgccaaccttggatttctaaccaaaagactgaacattcaaggcgggagtctg

SEQ ID NO: 20483 - DNA, 1463 bp, Emericella nidulans
  unsure (1)..(1463): unsure at all n locations
caagaccaaataataacacgcaccagaccagtctacacaacaaaatgacggcagcaacgaagccgatacgtctcgtccgcctcgcccacgtctgctacacacatgcagacctcacggcagcctcccggttcctcatagatttcggcttccaggagctgacccaaaccgtctcgccgagcaccggccagagaacaatctactaccgcggcaccaccacccagcagcccttcgtctactgcgcgcgtgaagggcccgaggacgcctttggcgcgccancgtttgtggtcgaatcacgagaagaccttgactatgcggcccagacgctaccggggtcggaggggattgtcgatctggaagcagaaggtgttcctggaggcggactctccctcacattccacgacccggttgatgggtttcctttccatctggtctggggacagcgaggacgagaagagcacggggagaatcaggggggaaacggcttgccggtgttgcagtataattttgtacgtgtctcaaatctcatacctctcttatctgccattcatcgctgcgtctggtcgacagaggcaggactgacaggatgcagcctacagagaagcaccgaccgggaaatagcactcagaggttcaaaccgggtacttactccctggcatcgcggcatcgcggcatcgcctactgtatacatactaaactgcaatcaggcccagctcccgtccacaaactcggccactttggcatgtgcgtgacggattttgcgcgcgcctacgagttctataccactcggttcaacttcaaggctagtgatgtaagtggcacatctgaaatgtgttttatatcactcactgggtgtgagaaatacgtgcatatgtgcaaactgacaaactatatatgaaataacagctcatccatgatgaagccggtaacgatgtgaccgcgttcctgcacttgagccgtggccgcgagctcgtagatcaccactgcttcttcattttcgaagggcccaagtggcatgtgcatcattcgtcatttgaaacacatgattttgatacccagttgctgggccatcattggttgagagagaagggatacacgaattgctggggagtggggaggcatatcatgggaagtcagatatttgattactggtcagtacactctttccctacttatcgtaataagggaattcttctagatattagaggtatgagccgacaaactgaccgatcttgtgccaggtttgatccgtcacgatttattctggagcattatgtggatggggatttggtggatgagacgtaccctactcatcgctcactcgcttcgccggataatttgcatgtttggggtgagtccctttattttcatgcccatacgagatactggctctggtgctgatttgtgtttctagggcctgatctgccagagggttttctagcttgaagcgccttagctaaaccgca

SEQ ID NO: 20484 - DNA, 1470 bp, Emericella nidulans
cggagctgggtccacacccaaaggcatccggaacatccaaagccctcgaagagatcgtcgtcattcgcggcacatacaaggacttcaccacctatgcgcaggtcatcgagcgcggcctcccgcttcctccaaacactctccccgagcgtgagagccagttacagaccgaagatgtctgcaatcttcagttcacgagtggctcaacggggaacccaaaggccgccatgttgacgcatcagtatgtgcccgatcatcaaccacccccggaccccaaacccaatggaaggtaactgacttgtgcgtccagcaacctagtaaacaactcgcgcttcatcggcgatcgcatgaacctcacctccttcgacatcctctgctgcccgcctcctctcttccactgcttcggcctggtcctcggcatgctggccgtcgtaacgcacgggtccaagatcatcttcccgagcgagacctttgaccccctcgcaacattgcacgccatttccgacgagaaatgcacagccctgcacggcgttcccaccatgtttgaggcgattctctcgttcgataaaccgcccaacttcgactgctccaatctccgcacgggtatcatcgccggcgcacccgtgccgcgacctctcatgaaacgcctgttcgaggagctgaatatgagacagtataccagcagctacggtatttctcccggtcatcttaaaccgtacaaagcccgactgatcaattgtacaggcctaacagaagcatcgcccacctgcttcaacgcccttacaacagacagcattgaaacgcgccttcagacagtcggaaaggtcatgccgcacgctaaagccaaaatcatcgatgcgaacggcgccattgtccccgtcggcacccgcggcgagctttgcatggccggctaccaattgacgaagggatactggaataacccagagaagaccgccgagacactggtcacggacgaagagggaacggtctggctcaagacgggcgatgaggcggttttcactcccgagggatactgtactataacggggcggttcaaggatatcatcattcggggtatgcactcctccccttcctctcccatcatcccccacccaaaccttgtattcaggggataatgctgacgatggtcgtgtctaggcggtgaaaacatctacccgcttgaaatcgaagagcggctcacggcgcatccctctatttccctttcatctgtgattgggatccaggattcaaaatacggcgaggtcgtgggcgcattcatcgcccttgcggagggcgctaagaggccgtctgacgatgagctacgggcgtggacgcgcgagaccctggggaggcataaggcgcctcagcatgtgttcgtgtttggggaggagggtgtcgacgccacggttcccgtgacggggagcgggaaagtcagaaaggtggatctgaggaagattgcggcggtggttttgg

SEQ ID NO: 20485 - DNA, 1471 bp, Emericella nidulans
tcgttgcgacgcaatcgtctgatagatccgtccacatttacagcttgaaaacgaaggatgggcaattcaccctcacctcacatgggaagttcctcaagatggatttaccggccagacggatttcgcgcagcagccctgctcctttagatctctcggttcgatctcaaccagccactagcaactccgtagctgttgcctctcctgctccttcgactccaggaacaccgatgacctcgcatctgcccatggatcccccgccagtgtcgcatagtcgccgttcctccttcagctcctcaccaaacatccgccgttccgcatcgccagcgccgtccctacccctgcctgccgtcagacctttagaagtgacgtctccgggcctaggtgggctcggtgtcaggaacgcgaacatttatgctaacgaaacatttacgtctttcttccgacggctgactttcacccctgatggaagtctgctgctcacacctgcgggacagtataaaacgtcgcaagtttcatcgacagatccgggaaagacagttgacgaagttatcaacacagtctacatatatacgcgggcagggtttaacagacccccaatttctcatcttccaggccacaaaaaaccgtctgtagcggtaaaatgttcaccaattctctatactcttcgagaggcacctgagccttccaagcatattaccttaggtactacgtctgcggaggatgcatcggctactagtactggcgaagagtctaagaacaatatcaccgctaaacccttcgagtcccctactgccaatcagcttccacctcctgttttctccctgccttatcgggtagtttacgcagtagctacccaggatgccgttttggtctacgacacccagcagcaagcaccactctgcgtggtgagcaacctgcattttgctacattcacggatttggcctggtaagtaacctgaaaaagtctgaaggatgttctaacgatatttaggtcgaatgatggattaacgttaatcatgagttcctctgacggcttttgctctacgctctctttcgcgccgggtgaactaggtcaaccatacacagcaccactatccgcgccacagacgactggtacgggaccaacgtcagcgctcatacgcccacggacccgacgaagccggctcaccttcaacacagtccgccgcacctgcaagccctgcgcgatcgaactcagtatcatctatcgcgacgcagcgcgcctctcaacaggcggagaccgttgtcaacaatcctacaccaactcttggatctgtgccgctagtcactgcgacgcactctgcccaaccaccagctaccttgccgcttaccacacctcctgaaaccccgttgtctcagagcgaagcgagcaacgctggtagtactgttttagggaagcggagtgagtccgaaaaggaagagagtcaaggtttgaccccaacagagcaggcgc

SEQ ID NO: 20486 - DNA, 1480 bp, Emericella nidulans
ggggccattgcattgccattatgcttaataccggtaggaattcacctgtcaagaaggccgagattctgtcctaacagagggttttaagcatggtctcttcaaggaaactatctctataccgttctaatggtttcttttgatgagagtaacctcagcgcaactcgaatctcgtctttgtataggtactcagtccccacgagcacagccaacctggcctcgtcgttctgcgttttattgtttaaaacttcctttttatgtttttattttgctgtgatgagctgacactcgcgtgattagctttgcctcagtcataacgggctgcatcctcggggcaatcgtcataaagatccgacgtctgaaacccttcattgttgccggaacgtttcttttcacagttgcctttggaatcctctatcgctttcggggaggccccagcggggatagttacgccgggattgtggccggggaggtggttctagggattggtgagcccatgacttgccctaaaccttacgttctctcaccagttgatcgactattactaatgtacgtcaagcgggcggaatgtttccctacccagctcaagcaagtatccagacggcgacaaagcacgagcgtaaggattcaaagactccaaccatctgactatactaacccaatcccagacctcgcaatagtaaccgccctcttcctctcctcgtacaacatcggctccgcactcggcggttctatatctggtgcgatctggtcgcaaaccctcctccccaaccttactcgccagctcggcgggaactctacgcttgcatcgcaggtgtacgccgacccgttcgcgttcgcactgagcaacccagttggaacaccagatcgcgatgccgttattgccgcgtatatggatacccagcggctgctttgcattacggggctttgcttgacagtgccccttattggatttgctctttgtatccgcaacccgcggttgaacgagaagcagagcttggaggatgcggagaaggattagacttgatgtgttgaaatatgacgtgaagggacccatcagaaccttgcaagggaaagccgacatagatggcttctagaagccaaccatggcagtcaggcctcagcgcttttcccatattgtgataggtatatacttacaataagcccataatccatgcggccatccatgagagcagtactggccattttcattctccacgtgtgaagctattgttatatctcagtacatagccggctgggcagggctagccaccgatggtcacatgatatggcaggcatggtgaacgttctacaggaaatttctctcgccggctgcttttcgcaggctgggacgccgcagtgttcttaagaggaagagaatgatctcagcattgaaaccgccgattggaaagataacgtagaaatgagtctgaaatttagagacgttcgaaatcttcatcataaaaggacttatcgccaattc

SEQ ID NO: 20487 - DNA, 1480 bp, Emericella nidulans
acagcgggacgccaggaaccaactattaacaccaatatccacgtcaatatgcatgtgcttgatgatgacaacctgtccagccagccggccgttcatggccaccagtccggcaccaaaaaggctgcagcgtcagccactgtgactgcggtgtctgagccttactgtgttacaagcacccatgggaaagtcttcatcatcagtctgacgagcatcgccatggttatcaccatgattgcaacgaacatcgtgctccccgtcctgcccatcctgcaagctgagtacggcgtgaccacgacgcagatgaacctgctcgtcaccgtcttctcgctcgtccagggcatcacgccagcgctgatgtcctcgctttctgatctccaaggacgccgcatagcgtggatgttcacgctcgcgctctatacggtggccaacatcgggctcgcggcccaggacagctacatagccctcatcgtcctccgatgcttacagagtctgggcagcagctgcgccattccattcggattcgctgttgcagcggatatctcgtctcccgcggaaagaggccgatatattggtccgttacaggggagtgttatgggcgcgtttgcatttggtccggtgatcgggggccttttggcgccgagttttgggtggaggagcatattttggttcctggccatcggcagcggtgcggctctgcttgcgtacatctttatcatccccgagactgctcgcagtatcgttgggaatggctctatcgagccagcaggctggtggaggcggactgtggtgcagaacatccagcgatctttgcaacgcggttcggattacaagcgctcaggcacacagcacggccgctcacggcctcgccgcagagacgcattggtgctgcggaggtactaagggcattcaccatccttgctgaaaaggacgccttgatcctcgtcgtattcaccagtctattctactcgggcgtcacagccatgtgggcaaccaccgggagttattatagcagtctgtacggccttgatacgctatcggtcgggttctcatatctgtaagcaacccctcgctcatttctgagaaaataaatagaacattgctgacggcattgccctaatagcccttacggaattgccggttgcattgggtcaataattggcggaaggctgctcgatatcaactaccgcaggatccagagacatcaggcccaggcactaaaggatgccgacgtacataaaccggcagacgccgactttccgtacgaagttgccaggctccaagtcgcagcgccttttgcgctcctggcttccttgtcgctaatcacatacggctggatcgtccaaacccgccagtctcttgcggccgcattggcactgcaggggctcatcggtctgagcggaactcccctgctgggaatcatatacacgctcctcattgatctctatccaactcaggctgtggcaacacagggagcggctga

SEQ ID NO: 20488 - DNA, 1481 bp, Emericella nidulans
ggaacgggtgtcgcgggtaaagaagacgttcctggagcacaagactcgagacgtcgaattccggcttgtccagcttcggaagctttactgggcgtgagttctctgaaattccccggttgtatcatgcaattgtgactgaccctgccggtagcatcaaggaccacgagcaacagatcgtcgaagccctccggagcgacctgggaaaaccgcagttcgaaacagaagtcagtgaaagcgtctggttggaaaatgacattgttttcatctcgaagaatctccacaaatgggtcaaggatgagaaggccgatgatatcgaccttacattcaaatttatgaacccgaagatccggaaggatccgctgggtaccgttctagttattgggtgcgatataccccggcgatcgtgtagtcctggtctaacagacagacagtgcctttaacttccccttccagttgactcttggacccgttctcggtgcgatcgctgctggaaacactgtggtgatcaaacctagtgagaatgcgccaaagagcgccgttgtaatgcaacagatcgttgaggctgcacttgacccgtcctgctacaccatcgtccagggagctattcctgaaactcaggctttacttgcagaacgatgggataagattttcttcactggcggtgcgactgttggacgcatcatcgccaaggcagctgccccccatttgactcccgttgtgctggagttgggtggcatcaacccggctataatctccaagtccgcaaaccctagactagtcgcccgcagactactttggggtaagcttatgaatgcaggccaggtctgcacttctcaaaactacctcctggttgacaggagcctcgtcccggctgtggtcgaagagttcaagaaggcatacaaggaattctatcctaacggagccaaggcgtctccggattatgctcgaatcgtcaacgaaggtgccttccgtcgtttgaaggggatgatcgataactcccagggcaagatcctcatgggcggcactatggacgagaaggacctctttattgaacccacgctcgtccaggtcgaatcccccgacgattccatgctcgtgcaggagagcttcggccccctgatccctattcttcccgtcgataacattgacgaggccatcaacatcgcaaacagcattcaaagcacccctctcgggctctaccccttcggctcgaaagccgacaccgaaaagagtacgtcccctacaattgccgttaaagtaaactaccaagctaactattcccagttctctcgcagacccgctccggcggtgtttccgtcaatgacgccgccctacacattcccaccctcccctttggaggcgtgggcgaaacggtctatggcgcgtaccgtggccgtgcgagctttgacgtcttcgtgcaccgccgccccatcacgagtagtacgggctggctcgagtctatcctggcgatccggtaccca

SEQ ID NO: 20489 - DNA, 1483 bp, Emericella nidulans
tcttctcgggcaacgacatattcttccctgtaatattcatgggatcatcatggcgggggggattttcaccggcgcgaaccctacctttgtcgctagagagcttgcctaccagttgcaggatagcggggcgatttatctcctctgtgcagaagatagtctagacactggtattgaggcttcgaagattgcggggttggatatggacaaggtgtttgtgttcaacaatgcactttatgatggaaagggggaggggatgaaagggtgtcgatattggggggagctggttgccagcgttgaggagggggcaggatttgcgtgggaggagctggacacaccggagaaagctaacaccacgcttgcgctgaattacagtagtgggacgacggggaggccgaagggggttgagatctcgcacaagaattatgtctcgaacatgttgcagtacaaccaccttttttacctgaacccgaactggagggagaaggcgaaacgggcaagatggctatgcttcctgccgatgtaccatgcaatggcgcagaacatcttcattgcagccgcactcaaccggggagtgcctgtgtacgtgatgccgaaattcgatttcattaagatgctggagtatacggaaaaatttcgcatctcggactatattctggtccctccggtggtggttgcactggcgaagcaccctgctgtgaagagcgggaagtacgatttgagcagtgtggaagatattggtagcggacgtgcgccgttgggtcgagaagtctgcgaagaggtcgaagccttatggccacctgggaaaatcaatatcaagcaaggctggggaatgacagagtaagtgaccttgtcttttgagcattgccggtatggttatatgccagcccactaaccgattctgctttggcagggccacatgctccatcctcggctggagtcccatggagaaatgccgttacggcatcagttggagagctcaatcccaactgcgaacgaaagattgtcgccgacgacggggtaacggaattaggcaagaatcagcgcggagagttgttggttcgcggcccgaatgtcatgaaaggatactggcggaacccgcaagcaactaaggagaccctgacagaggacggatggttgaggacgggagatatcgcctttgtcagtaatgaagggtggttccatgttgttgaccgaaagaaggtatgtcccgatccaattgttcctagctgaactgatgaatcgtgcctggactgaccatacgcactgtacaggaactcatcaaagtgaaaggcaaccaagtcgcacctgcagagctagaagccatcctactcgaacatccagccgttgccgatgcggctgtcatcggtgtgccaaagtatgacgaagatcatgttgagaagatatgtcaagacgtaacgcaggattagggacgaagatgaggccccgcgagcgtatattgccctgaagccagggaagaatgcca

SEQ ID NO: 20490 - DNA, 1489 bp, Emericella nidulans
tcgcctgtccgtccaacagccggtcgtttaaccattctcgatcattacgatcaacggggtctcagtcccccgctccatccccacgcgactcctcgaatcccgcgctgtccttcccttgcctcgacgcccaggaggccaagtccgctcttctttccgcgcgatctcttggttcaggccctgaaccctcctataccgccggccaccacgaacgattccattccgacgaaccgctgctccttgattggggcggtttgcttccagaatttgatatcgcatatgagacatggggccagctgaacgagaagaaggataatgtcattctgctgcataccggtctgtctgcatctagccatgcgcacagcaccgaagcgaacccgaagcccggctggtgggagaaattcataggtcctgggaagacgctagatacggacaagtactttgtgatctgcaccaatgtccttggagggtgctacggtagcacggggccctcgacggtggacccgtcggatgggaagaagtatgctacgcggtttcccatcctgacaattgaagatatggtgcgagcgcagttccgccttttggaccatcttggggttcggaaactctacgcgtccgtcggctccagcatgggtggtatgcagagtcttgcagccggtgttctgttcccagagcgagtgggcaagattgtgtcgattagcggttgtgctcgaagccatccgtacagcattgctatgcgccatacccagcggcaggtgttgatgatggatccaaattgggctcgaggtttctactacgattcgatcccacctcattcaggcatgaagctcgctcgcgagattgccaccgtcacgtaccgcagcggaccagaatgggagaaacgctttggtcggaaacgggctgatccgagcaaacagcctgcgctttgccccgactttctcatcgagacgtatctcgaccacgccggtgaaaaattctgcttggaatacgatgccaacagcctgctctacatctccaaggcgatggatctgtttgacctagggttgactcagcaactcgcgacgaagaagcagagggcggaggcccaggcgaagattagcagcggaacaaacactgtcaatgatgcgtcgtgcagccttacacttcctgaacagccataccaggagcagccatctgcctcgacatccgccgagcagtctgcttccgcttcagagaccgggtcggctccgaacgatcttgttgccgggcttgcgccgctgaaagaccatcaggtgctggtaatcggagtcgcaagcgacattctcttcccggcgtggcaacagcgcgagatcgcggagactctgattcaagcagggaacaagaccgtggagcatattgagctgggcaacgacgtgtctctctttggtcatgacacattcctccttgatgtcaagaacgtcggaggcgcagttcgcaagttcctggactagtcggctcgcacataatgtacaat

SEQ ID NO: 20491 - DNA, 1491 bp, Emericella nidulans
cacccctccggggtcgatctactggggtgacaatctagcagccgcgattgcagacgggtctgtccctcaagagagactcgacgatatggttacgcgaatccttgctgcttggtaccttgtcggccaagaccagggccatccgcccgttgcatttagtagctgggatggtggcgcggcaagtgtgaatgtcacaacgccggagcacggggaactcgcgcggactatcgcccgggattcgatcgtgttgctgaagaacacgaatggctccttaccgctggcgaagccggctagtcttgcggtcatcggatcagatgcgattgtcaacccagatggagcgaatgcctgcgcagatcgaggatgtaataaggggactcttgcgcaggggtggggaagtgggacagccgagtttcctgtatgatctatatttcactgggtactttgataatgctaactgctatagtacctcgtcgccccgctcgatgcaatcgaggagaaactcgccggagccgggacagctattatcaccagcacgacagatgacgcgacttccggcgctgaagctgccgctgctgctgagacggccatcgtcttcatcacctccgattctggagaggggttcgtgctctatcgtttcccttcctccttaagcttcttcagactaatattctacaaggtacataaccgtcgaaggccacgaaggtgaccgcaacaatcttgatccctggcacaatggaaatttgcttgtgcaagctgtcgcccgcacgaacactcctaccattgtcgtcctgcacagcgttggccccgtgacactggagacgatcctcgcagagcccaacgtcgtggcagtcgtctgggccggtctgccgggccaggaaagcggacatgccctgacggatgtcctcttcggtgactacgcgccaagtgggaagttgccgtttactatcgggaagtcggaagaggattatggggctgactggacgacaagtcaggttgatgactttgcggaggggttgttcattgattaccgccatttcgatcagtacggaatcgagccgagatatgagtttggctttgggctatgtatgctttccccctcaacccacctcgtgaacatctggctggcgagtgtagatcgagtgagctaatatttttgtttgtgcatagcatacacgagtttcaactattcaaccctctcaacgtctatatcaacaacacccggcccaacaacaggcgagacgatcgtcggcggtccgtctgacctctttgctccgattggaacagtcagtgcctatgtagcgaacacaggtcatgtggccggtgcggaagtcgtgcagttgtacattggatatcccgactccgctccgtcaataccaccaaagcagctccgtggttttgacaagctgcaccttgtgcctggtgaaagcggtattgcgacatttgagcttacacgccgggatatcagctactgggatgttgggctgcagaagtggg

SEQ ID NO: 20492 - DNA, 1492 bp, Emericella nidulans
ttcccactccatgacgaggagaagaatagggagtacttggcggattggagcaagaagacgtttttgtcggaggaagatttagatcagatacggggtaaattcggggagagtgtacgtgtcctactatcaccggctgaatcgtactaatggttacaggtgggcttctactttgcgttcctgcaatcctacttcaaatttctgctctttcccgcagtgttcgggttctcttgttggttgctgcttgggtcattctctattatctacaccgtggttaactgcctgtggggcgttatcttcattgaatactggaagcggcaagaggaggacctcagttgccgatggcagaccaaaggcgtgtctgttgttcgctccaagcggcgggaattcaaacctgagagagaggtatatgaccaggttacaggcgagacaaggggagtcttcccggcgactactcggctgcaacggcagcttctccaggtccctttcgctttggtggcattggtggctttgggggcaattatcgcaacttgcttcgctatcgaaatattcatctcggaagtctacactgggccgctgaagtcatacttggtaaggaagttggttgccgattctatatagtatgctgattttttaggtctttatcccgactattctgctctcagctcttatcccgaccatgagtggagtgcttgtttcgatagcaacaaaactcaacgactacgaaaattacgaaacacagactgcctacgatacagcgttgacgcagaaaatctttgttattaacttcatcacctcgtattttccgattctattaactgcctttgtctatatcccgtttgccagcttgatagtccctcatctcgacgtcttccacttgaccgttcggccgtttgtgtcgaaggaaaaagcaaccactgcgcacgaaaacttcactatcaaccctgatagactgcggaagcaggtcatctactttaccgtcaccgcccaggtggtcggttttgcgatggagaccattgtgccattcttgaagcagcggttcgctcgcgaatacaaggagtacaagaagaagaagtacggacgtgtaaactctggtttagtgagcgagacgcaaaaggaaacacaacactcgtacgatgaccatgaggacgaggtacaattcctcacgcgcgtccgcaaagaggccgacctcgatgactataacgttaccgacgacttgcgagaaatgtgcattcagttcggctacttagctctgttctcacctgtttggccactggttccggtttccttcctagtcaacaactgggtggagctccggtccgacttttttaagatcatcgtcgagtgcaagagacctactcccatacgcgtggacacaattggaccctggctggacaccctaggctttctctcctgggtaggaagcataacaagcgcggcgctggtgtacatgttcaacacaagcaccaacggtccaaacggcgagcgtcagcaa

SEQ ID NO: 20493 - DNA, 1492 bp, Emericella nidulans; identical to SEQ ID NO: 20492

SEQ ID NO: 20494 - DNA, 1496 bp, Emericella nidulans
tgatatgggtatgttcccttctgctaaattggattaataagctgagattcccagtgatttcggaagcaaagaagcttctaccggaaaatgcaattattggcattagcgcctcatctattgaagaggcgcaggcggccgttgcggcgggcgcggactaccttggtatcgggacgttattcgctacaccaacgtgagttccgtgcctagaaaatggaatatatgcttatctagcaggaaaacaaacaccaagcacatcattggcacagctggcacgcaggctatccttgactccattgccgaatctggccgcgatgtgggaactgtttgtattggtgggatcaacctctccaacgttcaacgggtactgtaccagtctgcctctccccggaagagcttgaatggtgctgctattgtcagcgctatcatggccgcagatgatcccagagcggcggcggcagagcttgcccgggccatcgcgactccgccgccatttgtacgcaaggcggacggacctttggttcgcaatgttgcagggttgctcgagaaggtaccgcatattgttcaaaaaatggttgaaatccacccgttggtccacaacatgatcaacttcgtcgtcgccaacttcgtcgccaatgtcacgttagctatgtgagttacgctagcatcgagttaatggcttactaaccagtgtagcggtgcatcgccgattatgtcgccgtatggcgacgaggccacggacttgtgccagtttgacggtgccttgcttatcaacatgggcactctgactagccagagtccttccgagtacctcaaggctattcgagcgtacaaccaacgcggcaacccggtggtgtatgatccagtaggcgccggtgcgacccagattcgacgaggggttgtcaaggagctcatggccgggggatacttcgatctcatcaaaggcaacgaaggagaaatccgccaggtcgcgggcagcactagcgttcagcaacgaggtgttgacagcggacctagtacgcttgaccaccagggtaaggcacggttggcccgtgaccttgctcggcgagaaagtatgcattcctgcacatgtctacaaatcgcccctaactttgaccagaaaacatcgttctcttgaccggcgccgtggattaccttagcgatggcgaaaggattgttgccgttgagaacggacatgaacttctcggccaggtcactggagtatgtttgcatttgccctatctgctgaaacacatatctaacttaattcagactggttgcgctgtcggcacagtggctggatgtttcatcgcggccaatccaactgacaagttccttgcggttctctcagctcttctgatgtatgagattgctgccgagaacgccgctgcaagagactccgtccgcggccctggaagctttgctacgactttcatcgacgagttgtacgctatccgtcaagcgtctctgcagggagaccacagctggtatgccggacg

SEQ ID NO: 20495 - DNA, 1501 bp, Emericella nidulans
cccttgcctgttcgtcaactcccacgccccatctccaggtacaagaagttgacctttcatctttgaatcgggatgttgaagtcttgattgctgctgctcgaactgaattcgccaataatcctcttgacccatctgttcaacaacgacttaaagcgcttctagacttgcaaggcattatgcaacgccagcaacttacccaagagcagctcaaacttgtccgtgatcaagtgtcagcgctcgctcccaagccctccatacaggcagcccagcccgctccttcccatattcctgtcacatcagccccgaccatagccactccgccagtcgcacagtcattctcgcagccacttcagcagctcttgaacccagggacactggcggaactcatcaaagccacgcgtgcgcggcagcagcctactccaccccaagttccctctgttccacaactacccgtcagtagcactccacaaataccttcttcagcaccagagaatccacttattgcagctctaagagcaaaggggctcttacctgcgtcctccgcaccaccatttggttcagttccatcacctaccgcaggtgcgttcccattcatagtgccaggacaggtgcgatatacgccacccgtgcccacaccgcaagcggtgagtactgcagaagtacaagttaatgttcaaatgaacaccgcgtccatcaaaatgtaagttgtacctagtaggttcgcgtacaagctctaatcatttcgtagacctcgtagcatgttgattgccagtctctacgaagcacgatctaatagatgcggcacttgtggccgtcggttcttcgcaactgaagaagggaaacagaagaaggcccgacatctcgattggcactttcggacaaaccaacggatggctgatgccgctcggcgcgctcagaaccgcagttggtacgttgatgaacgggtatgtaacgccaatacatctctctagttctcactaacctcaagcaggattggataaaatcacgagagctgggagacgaccaagttatcacagacgcggaagctacgagcgagaataccgctggcaacgacagcgagtcaaagaaaggaccggctaaacaatggattcgggcacccaacgatgccacgttgcgcaacacaccgtgtcccatctgtcaagagaagtttgagtctacctggtcggaagatgttcaagactggatctggcaggacgcaataaaggtcggcaatcgtgtgtaccatgccagctgctatgcggaagtgactaaagacgggccacctcgtggtcgagaaacgccatcagggcgtactggaacccctgactctgttctgggcaagcgaaaagctgaggtgagttaggtaggaccttcaatatccatgagctgtatgctaacgtcctcagggaactgactctcctagccagaacgtgcggatcaagaccgagccggtctaaacagcacgagtcttagctggcgaaagcacttgaaaagttatcgc

SEQ ID NO: 20496 - DNA, 1503 bp, Emericella nidulans
ggggaaagctgcgcctgcatttccattagtatcatttctatggggagctcgcgctggcgtatctcaatggctcgttcttcctctcatattgatgacagtgggcctgtttcgctgggctgtcagtctgtggggttattcaggtaagcataccatcgagttgctgtatggattcttgtatgtatacttgggctcatcatgcgaaggctttaatacccctccaatgtatggtgactttgaagcacagcgtcactggatggagataaccattcacctgcccctgtcgaagtggtatacctatgacctacagtattggggacttgattatccgccattgacagcgtaccatagctggctgctaggaaaaatgtacgttggattttggccaagttacagacttaaccagaagtttaacttataaacagtggctcggttttcgatcccactttgttcgccttggatgactctcgtggaattgagggctctcttctgaaagttttcatgcgtgcaatcggtggttgtgtccgagtacctcgtatatatcccagctattgtcactttcctgcgacgttacacccggatgcaagcggtacccgtatggtcctcgtccatcgcactcagcgccatccttctgcagccagcaaccatacttatcgatcacggccactttcagtataatactgtcatgctgggattatttgttgcgtctttggatgctataatggcaggacgcatgctttgggcgtgtattttctttgtcggggctcttgggtttaagcaaatggctctgtactatgctccggttatgttcgcatttctccttggaatctgcatctttccgcggattcggcttgtccggcttttctgcatagccctcgttaccattgcttcctttaccgccctccttcttcctctgctacttggggctactagcaccgaggctgggaaacagccagtccctgagccacctttgcttcaggctttccccgtcaatctggaccatggatcatcattatacctaattctctttcaattgacacagatagtccacaggattttcccattctcgcgaggtctcttcgaggacaaagtggcgaatgcgtggtgcgccattcacacattttacaaactccatcatttcgagcctgaattgttgaagcgcgtatcactcggcgctaccctagcatcgatcttgataccgtgtgccatcgtcttccgtcatccgcgcgcttcaattctgctccccgcttttgctactgtcggctggggctttttccttttctctttccaggtgcatgaaaagagcgtgctgttaccgttacttcccatgacactacttatcgccggtgatggagggctcaataaagatacccggtcatgggttggttgggcaaacatccttggttcctggactctatatccccttctcaagcgagatggcctccaagtgccatatttcgtggtgacttgcctctgggcctatctattaggccttccccgacgtcg

SEQ ID NO: 20497 - DNA, 1507 bp, Emericella nidulans
gaggacctccaccggcaaggagttccattgcgtctaccagccaaataacgaaccgacccggaagttccgcgagcaggttaagccgcacccatattccatcgctagctgcgtcgggcttcttccggcccatgtcatcgcaacgtctgcaagcacatcgtggacgtcctgcaacaaatcacacagtctcaacagaggattggggtgatcaaatgaaccagaacaggcggagtctgatttcaaacagcacgtttccgaactccctctcagccgccgatcaggaggttcccccgtcgcgtggcacagaattcaccgaccctattatccctgatcggattcattcgaacgctagccctaccgcgaatacgacgacagtgagaagtgaaagtgcgaatttgatacgcgacagagaacggcccccgcacctcaatctaaaagtggactacaaaggcacgaacgaaaacgagacgcctgaaagatcacccctttcgttcctttcgctgcagaacaggaacgcgcctgcagataatcgggatagccgagcgcatgcacggttatcgtctgctgactcgtctccgcaatcaattgaaaagaagcccgagttggcgaagagtcgcaacaagggcaggaattacgaatattttgttggaaatactatattctggggaggagggagattccagaattctagagacaaaccggtcaatatcgcaaccgggctcctcgtgcttgtgccaactggcctattctttggtttctcgtatgtatgcgtggtccaaacatatgacttgtcgctaacagccgtctaggggtccttggctatggcacaacatctctccagctattccggttctctttgcctatgtcttctacctatgcttctcctcatttatacatgcgtcagtggttgatcccggggtaagcgatgaccattatcatccgtcctgtaattaccctcactcatcgtcttcaggtcattccgcgcaatctgcatcagatgcctcctgtcgatccctctcaggatcctctcgccatagggccaccgacgaacgactgggtaatggtgaagcttgcaacctctgatgttgctgccatggacgttcccgtcaaatactgcaagacgtgctctatttggcgccctccgcggtgctaccattgtcgcgtctgcgataactgcattgagaccctggaccaccattgtgtctggttgaacaactgtgtcggccgccgaaactatcgatacttcttcgctttcgtcagcacttccactctacttgccctcttcttactcggtgctagcctagcgcacattctggtgtaccggtcacgtgaaggtatcagcttcagcgacgccattgataagtggagggtacctttcgctatggtcatttacggagctctagcagcgccttatccggcgtcattgtgggcgtaccatctcttcctggtgggccgcggcgaaaccacccgtgagtaccttaattcgcataagttcgccaaagccgatcgc

SEQ ID NO: 20498 - DNA, 1517 bp, Emericella nidulans
gcctcggaacgactcaccgtatctatcccagtgctcttaatactcggcttggtggtacggaccatataccgtctatattttgatccgctacaccacataccgggccctaagctggcagcaattactcacctctacgagttctatcacgatgtcatccgaggggggttgtttatatgggaaatagagaagatgcaccgggaatacggtatcgtcaatcgataaaaaaccgctatccataagcagtccatattaacctgcgatttatctgaaaggacccatagtgcggatcaacccccgtgaagtccatatcaaagactcgcaattctatgaggagatatacgcgcctgccagcgggggaagacgagacaaggaccggcaagccgttgagatattcagctcccctaccgcgatggttgcaacggttgaccacgacacgcaccgtatacgcagaaaactactcaccttcttcttttcgagacggtcgatcgagcggctggaacctgttgtccatgagtcactgtcaaagttcctagatagccttgtcgcagcctacaaggaagacaccgtggtggaccttattgacagactccagggcttgacaggcgatgtgatcacacaatatgcttacgggaacagctatgggctccaggagccccaaaatatcggtcgcgggatcacaaaggtggtccaagaaggaacgacccagatccacttgcaccggtttttccctttctttgagcgccttctgcgagtcgttccaaagtggttcatggcccagatgctgccagccagagcggcaatatacgaccttttgaatggcgtaagagagcagtcaattgaggcgcttaaacagagggatatgtccgcccctcctccgaagaagacaacaatgttccatgccctaactgcgccagaagtacccccagaagaacgaacattacaacgcctccaggatgagggattagttctgttcgcggcgggcactgagaccacagcaaccattttgggcgtggctctatttcacattctgaataataaagaggtccatcggaaactgcgcaatgagcttgaccaagaactgccaacaccgcaagccgggacaacgtggcgtcagcttgaaaagttaccatatctggtatggccatttcttgcttgcagtacccgttctacttttttggttattgggctaattttctacagaatgctactatccacgaggccctccgctgttccggcctgactatgcgacaacaaagaattgccccgacagaggtagtaaaatacaagaattatgtcattccacctggagtatgttacgtcctttcccaggatgctcgtcataacccctaaccagccaatgcatagactcccgtcagcatgatctcccatttcgtgaatatggatccagacatcttcgacgatccgcagacattcaagcctgaacgctggatactcccggccgaaaagaagcaaaatctctctagattccttgtgacatttggcaagggcaaccggaa

SEQ ID NO: 20499 - DNA, 1519 bp, Emericella nidulans
tccagcccacagaaacggcaatgtacctggtgtagtagattcagtcacttcgatgggaacaccaattcagacacatccagaagcaagcaacccccgctctggcgcctttggcaacgctggcagggacaacacggggcgcaggcctgatgcaattgcgcatactataccaagcagcagtgagtccagcaatgctatatggacactcggcatggtactcgctcaggtctggaggcggacatccccaaagccgactgaagatgttaagccaaatccaaaccacagcagcaagagttatcaccggcgctttccgggccacggcatctgcggggcttaacatcgcggcacacttactcccagagcaacgctcttggagagaaagatgatagcgacatcctctggtttcatactggcacagccatggacatggtggaaagggtgaggagaggagaagatatcggaaacggacacctaggcaacgggtggcggccatggagctggagccctttggagaagatccaagacttcacagaaagggagatcgggaaagacagcctcaggaacctcgagcaaattttgccattctctgtcgcgccgcactgggtctccccagacataataatcgacggggacgcagagaccgcgatagagacacaccgaaacatactgaaccgcgcaccacgccctatagcactgtacactgatggcagtggaatcaacggtagagtgggagcagccgcaatatgcccgaaatatctgatatcgcgctcgtcgtatatggggcaacaatcggagtcaacggtatacgtcgcggaactacaggggatcctgctagccctggtgattattctccagcgccaaatgcaacacgcagtcatcttcacagataaccaggctacgctccaagcactacgaaacccgggcagtcagtcaggacagtatatcctggaagccattataatggcgctaaacaaagggcggaaggcgggattaaatgttcactttcgttggattcccgcacacagaggtgtcgagggaaacgaacaggcagaccggagagcaaaggaggcaacaggatggcgacggatccggggccaccgaggcagaatggtagaggtcatgactgatgagacagcgcccaagcctcactaactcaagaccattaggtcggccgtgaagagaagggcccatgaagttgtgaatgcccgatgggaaaatgattggaaatcatgccatcatggccgggagctatacgaattaacgccaacaccaacaaggaaggtcctcagggtgcatcaggacctacacagagcgctgagcacgataattgtccaaatgcgcaccggcaagattggactccgccactatctctatcagagaggagtaccggatgtaccaaacagcgattgccaatgcggaagagcgacacaatcggtccgccacatccttctcgcatgccctacattcagcggcctacgggagtaaatcttcggtggacgaagtgggggaccagaaggggagg

SEQ ID NO: 20500 - DNA, 1521 bp, Emericella nidulans
taccgcaggcgcgcagtatcactggacatatgtccttgcaccgtggcatcccagattcttcagtttcttccaaggtacgaccggtccagccttctgtgatgtaaacagagattaacacgagctaccaggatggataaccgtaaaacctttacctctctcccctcttctggcgtccatatcattgataacagctgatcgtgctggcaggtcttctcttggtcctcccttgtctccatagcgcccttcttaatcggcaatcagatcgaagggatgatcaaacttgctcatcccacatacacaattcacggctggcgcagcacattactgatgtgggccgtctccatacccccaattgtagtgaatatctttgcgcggcggtgtctcggcgtcattgagaccgtggccggcatcatgcacatcgtcatactcccgatgatcatcggcgtcctgggtcgttcggcggtgagctcgaatgaaagtcacaatagcattgaagacgcgaataactttgtctgggataccttcttgagtgggttcagtgggtggaaggacgcgggcgttgtcttttcggtgggccttttgggcgttatcacgcctctaagtggtaggtgtctgctaacacccttgttctatacttctatgaaaagcaagtgttgataggcatgtgcaggggttgatggcattattcacatgtccgaggaagtgcacaatgcgcgcctgacaattccaagatcgatggtctggggaactctgttaaacgggattatggccctcggctatgccatcgcgatcctttacttcatgggaccaagtccagaagcctacgcctcagcattgctgacatcgacgggatacccaattatcgagatcacgtatcgagtgaccggctccaaagccgcgactttcatgctcatagccacaggcatgtcatcggggtggatcgcattcttcaacggcctcgcctcggtgaccaggctgatgtgggcgtttgcgagagataacgggctgccattttctgacttctttgtcaaggtcgataggcggctgaaaatcccgctgcgggcgttggggttggtgactggctggatctttgtgctatccttcatgcagatggggtcgacggcggcctttaatggcattatgagtctgagcgcgctcgggctatatatctcctatctgttcccattgtccttcctggtttggggcaggctgaagggtgatgtgccgtcaggggcatatagcctgggacgatgggggcttaccctgaacttggttgccattctgtttgcaacctattttgcggtctttctgccttttccacccacgttgccggtcacgccggagaacatgaacttctccggtcctgtgctaggatttattatgctctgctcttgcgttgactgggtggctcgagggcgtcacaagtggacgggacctacaatgaggtatcctaggggatgagctatgacgatgactccccagtcatgcaacattgaagagaaatggtcactaatgatactt

SEQ ID NO: 20501 - DNA, 1522 bp, Emericella nidulans
  unsure (1)..(1522): unsure at all n locations
cgcatccgacgagcatgtttctgagaaatctgatgagcatggatacggaggagatgataagggctcagccattggatgcntgtgttatgatcggcggtgagtttactttcccgatggcggatgggactaaaggatgtccttaggatgtgacaagactgttcctgcacaactgatgggcggcatatctgcaaacaagcctattcttcccctaattactgggccgatgatgcctgggagtcatcgcgggcagaggataggtgcttgtacagactgccggaacaactgggctgctttccgtgctggcgaactagacattgaagaaatctcaaccatcaatgaagagcttgccccgacggtgagttgggatctggacgtcgagtcggttgacccagactaaagagtctagattggaacatgcggcgttatgggaacggcaagcacaatggcgtgcatcaccgctgctcttggtatgatgccactacgcggagcatctgcaccagcggtgtcgtctgcaagagctcgagttgctgaagagacaggtgcgaatgcagtaagggcagcaaacagcaagtggaaaccacaggatatcctatcgaaggagtcttttctgaacgccatcaccgttctacaagcaatcggcggatcaacaaatgcagtagtgcaccttatggctattgcgaatcgacatccaaaggtacagggtgtgataaccttacagacgtttgaagaggttggatgcaagacaccgctactggtagacctcaagcccagtggcgataactacatgactgatttccataacgccgggggcatgttagcgctcttacatactcttcgacccctcctccatctctcagccatgacaattaccggccaaacgataggcgagctcctggatgcatcgccattcagaggtttctccctatcccagaaaatcatcagaccactctcagaccctctctacccttcatcatcgctgatagtgctgcaaggaaatatagcgcccaatggcgggatgcatgaaagcctccgcctccaaagaccgcagacttcttacgcacaccgggcctgcagttgtctttgagaattccgccgacctcgccagacgcattgatgacccggatctcgatgtcacggcagactcaatccttgttctcaagaatataggaccgatcgggaaccccgggatgccagaggaggactcctacctatcccacgtaaactagctgccgcagcgtaaaggacatgcttcgaatctcagacggccgtatgtccggcacagccgagggacgatcatccttcatgtatcgccggagtcggctgtgcccgagtcaccgtttggtattgtacagacaggcgaccttattacttgtgacattgagagcaggggactgcacctggagatatcaggggaagaactaaagtcgcgaattggggctcggaaagcagcggctgctgtaaagccgaggcagagggggtatcgggggttgtatgagcggtcggtcaatcaggcgcaggatgg

SEQ ID NO: 20502 - DNA, 1526 bp, Emericella nidulans
ccgcatgattttaacccacgtttcagtaccctctcaagagtccagcagaaaatgggcgacagcctgacatactctcaagcgcaggcgcggatcctcaccagatcctactctgggtcaaacgtagactctgaggactcctacagttctattccactcttagagcgaggacttagtgacgagtccatgaagaagcctgtggatggaggccaactcactgcgcttcagcccatggcagctaatgaggggagctcggatgttggatcatcgcatccttccattgacatggtcaagaagaccgagagcatgaagcgcatcccgcgaggatccagtcttcctgtccctcatcaaaaatccagagtatctcgtttatctggtctatcttcggagctttctgtcgacgtcatagaccccaaggaagccgcggatgcgcggctatcgtttgacacgcgaagtctcaacgagtcgagtgctacaataccccctcacccccttgcacatccaccttccccccctatgactattcaaaatcatcgctcagttcattcatatcgagcttccctgtatcctgaccttgccaaagctcagcccctgaccccagacccatctccgatccataaggctgggaagcgggcaaatatcccatctttggatatgcaacatgtgtcaggagacgttctctgccgatcggaagcagaccaccatatttctgcaatcccgaaaataccaatcgctcaacatgtgccctttgtcctgtcatgcgaatctcacgttttggccgagcagttcactttggttgagatggctgctcttggtgaggtagattggagggaccttgttgacatgaagtggaatagcggtcctccatttaccacgagctgggtgcagttccttatggacgaggagcgccggggcattgatttagtggtgggacggttcaacctcatggtgaaatgggctctgtcagagattgttctcaccctggatatcaaggagcgggctcttaccatctccaaattcatacacactgcggtacatgcacggagaatgtgcaactacgccaccatgctgcagatttgtattgcacttacttcgacggattgctctcggctccagagtacgtgggcgctagtgccgctcgaggataggcggatgttgaaggatttggagatgctcatccagcccgtccgcaacttccatgacctccgtgtcgaaatggagactgcgaacgtgcaagaaggctgcattccatttgttggtgcgtccatttgtaaacctttcccttggattcgcaatactaactgggaatcactaggactctatatccatgacctcacgtataatgctcaaaagcctgcccaggtggcagcaacccgcgagggagaaccgctaatcaacttcgagcgctatcgcacgacagcgagaattgttaagagtctcctccgattgattgacgcgagcacaaagtacaatatcgagccggtaccaggaatcgttgagcgtgtgctttggatcgcctccctctcgga

SEQ ID NO: 20503 - DNA, 1531 bp, Emericella nidulans
gcgccactgcctatcgacctgccatttcgcattgtctcaaagacattcggtcagggcgcttatgcttggtacctttcaattctttacgtgctctgttatgaatgatgagctgtgctgatgcctcgctctttccagtcttaaaaaagcgtgtccactgaacgccgacactccggtcttcgcggtcaagttcattaacaaagactacgccgctcgccatggcaaaataagtccacgacaattgctcatggaagctacagtacacaaacatatcggcgaccataataacatcatatctttcttccagaccggagaggatggcgcatggcgatggattgcaatggagctagcagacggaggggaccttttcgataaaatcgaggcggacgaaggcgtcagcgaggatataggacatgtctatttcacccagcttataagtgcggtaggatatatgcactcaaagggcgtcggacatcgagatatcaaaccggaaaatatcctcttgaccgcggatggaaacctgaagatcgcagatttcggtctcgcaacgctatttgagtacaaagggggcacgaaactgtccaccaccttctgtggtagccctccatacatcgcgccagaggttatcacctgtagctctcgaaatcagactaaagggcccggataccgccctgacgtggcagacatctggtcgtgtggcattgtcctttttgtccttctcgccggaaatacaccttgggatagcccgacagaggatagctatgaatttcacgaatatgttatgactaacgcccgcacatctgacgaattgtggcagaaattgcccaccgcaactctctcattactgcgcggcatgctgaacattgacgcccaggctaggttttctctagaagatgtccggcggcatccctggttcacgcgccagaacaaacacctcgccccagacggcagactgcgagaccctatcaaggttgcaccgtctatgtttgagtctcttcatattgactagtctcaatccgcctcccgccccttgaaaggcgggagtttcgggccagatcgaatggacgtggatattggcgacgatctaggtgccgagcataggatttcatccacgcagccagaagtaccgagaggcgacatgctaatcgactgggacacgccgcatctcacggacgtcttctcctcgagccaaccaacgaacaacccacgcccaccatccagcagcctcacgcccgaaatcctcgaagacgagccctcgttttcacagttctcacaacggccatctgtgcccatgagccgaactcagaacgcccagcgcttccacgatatcgttccctcccgctccctcacccgcttcttttcgacgtgggaactcaagctcctcgtcccgcttatctgcgaggcgctacatcgccttggtgtcccggttcccgctgttcctgccgtatcgcccggtgacaattcggctatgattagagtgatcacgagagatggcagaatgtgtcccttcatggaaaggtgcttgttgaatgtg

SEQ ID NO: 20504 - DNA, 1539 bp, Emericella nidulans
cgagtgctggaggcggaagctttggctgagaaagccaagtccaaatatgacacattggcggagcagtatgaccgggtaaagacaggagagaaagcaggtggaaagttcggcttcaagggtaccaaatctgttgcccagcaggaggaagatttgttacgcaaagttcaaagtgcagactcggactacaaggccaaggttcaagccgctcagacggctcgacaagagctgatctcgacccatcggcctcaggctgtacacaacattcagcaattgatctctgagtgcgactcgggacttgctctgcagatgcagaagtttggtgcgctgttttgatgctatgctagcctgcagctgctgactatgtttctaggaacgttcaatgagaagctgctgctagggcagggcttatctatcagtccattaaaagaaccaggggagggtgccgctgctcccaagagtctccgcgaagtcatccagcaaattgacaaccagaaagattaccatgattacattttaagccatgagtttaatcctggcgccgtgacctccgagcaaattcaataccatcgccatcctgtgagttatgacgtcttctgatttgtttctcttgcttaaccttctgcagacactaggaggaccaactgcgccacctgtttctagtcctcagagtacacagacgaagcggcagtctgttgtagttcctcagcccgtctatcagccacctacttccacccaagctcctcaaatcccaatccaaataccatcatcaggcccactagagagcccccagtcagccccataccctcaaaatccagatgtgtttgcgccaccacccttccagccgccgtacccaactgcgtcaggacctcctcctgagccgcagcccttgaaccagccgcagcctccggcgccgaaagaaccatatccagccccgggaagtggctatttaccaaatttgaaccttcctccgctgaagcctgtctttggagtctcgttaaatgagctgtacgcccgtgatgggactgctgttcctatgattgtgtatcagtgttttcaagcagtggagttgttcgggcttgatgtcgagggtatctaccggctctctggaagtgctactcacattagtcagatgaaggctttatttgacaatggtaagttctcccaagctatctcctgaaaggctactcatattttttatggcagactcgtcccaagtcgacttcaccaacccagagagttttaaccatgatgtgaacagtgttgcaggtctcctgaaacagttttttagagacctaccagatccattgttcacgtcacaagcgtattccagcttcattgacgcagcccgtaagccttctcgaatgacgtccaatcaatgcctcatgctgacatattcacccagggattgacgatgacatacaacgacgggattcgcttcacgcgattatcaatggtctcccggacgcccattacgctaccctgagagctttgattctggtgagcctgcatttaagcctttacttctcgctagggtcttgc

SEQ ID NO: 20505 - DNA, 1547 bp, Emericella nidulans
ctctctttctctgtgcggtatatctaaatatccatttacaacatgcctcactcagttctctacaccaaaatcgacacacgccccccagaggttatccacagccggggaaactacctgcacaccagcgatggtcgtacaatatttgatgccagcggtggcgccgcagtcgcctgtctgggccataatgaaccccaggtgaagcaggcaatcatggcgcagtagacaaggtagcctacatctactcgccgttcttcactgtgcctgctgcggaagagatagccaccttcctgaccgagtcgacggggggtgcgatgagcaaggtgtttattgtcagctctggtgggttcctttttcgtccttgccctcttgaatgttcttgattgagactataggtgctcgataattgaccgggacaggcaccgaggcaatcgaagccgcactcaaaatgacacggcagtattttacagagctctcgaagcctcaactacaacggacaaagttcattgcgcggaggcagtcgtaccatgggaatacgttaggatcgttggcggccggtgggcacaaggcgcggcgggcgatattcgagcctatactggcggcaagcacatcgcacgtctcgccatgctacccataccgggagatgaagaaaggtgaaagcaatgaggagtatgtctctcgcctggctgaggagctggagaatgagtttcagcgggtcgggcccgatactgtctgtgcattcatcgcggaaaccatgtcaggaacggtaggtcaacaactcggaccaattcgcgcttgcaagtaaactaattgaaaaaagacactgggctgtattcctgcagtgccgggatacctgaaggcaatgaaacaagtatgcgaccgccacggggcattgttcgttttggacgaggtgatgtctgggatggggcggacgggtactctgcacgcctggcagcaggagggcgttgtcccagaccttcagactgttgcaaagggactaggggcaggatatgcccctgtgggagcgctgctcgtcggcaaccgggtggcagacgttctcagcaaaggaactggcagtttcacccacagtcagacgtaccagggacaccccatcgcatgcgctgcagcatgcgctgtccaaaagattatccagaaagaaaacctgttagataatgttcgccggcaaggcgagtatctaggccggcttctcaatgagcgcctaggtgggcataggaatgtcggcgatgttcgcggacgaggactgttctgggctgtaagtatatttcatatctttacctccggcgagtattggactgacaaatcactgcatagctcgagttcgtcagagacaaagagaccaaagagcctttcccagcggaagcggcatagcgcacaaggtgcacttgacaggcttgcaaaaaaagcactccatctccgttatccctggcgctggggttgcagatcgtcgtaatggggatatcatacaaattgcgccggcgtacaatctgtcaaaggaggatattgaattgattgttgagcgcgtcgagggc

SEQ ID NO: 20506 - DNA, 1550 bp, Emericella nidulans
gaattcgggcgttgtacttcttgcaacggcgcagtccaaggaatcgttaaataacgtcattgtgggcggccatgttttccgagaagtaatccatctaagggctcctgacaaagagggacgccgtaaagtgctggagtacctcacaagtcaggatcgcaggacgaccagtgcgacggcggaagctggtccatccggcgcgactaatggccacacaaggacagtcagcacgtcgaccaacgattcctggctggacccttcaaatccaggcagtcggccaagctcatccggtggtgacggcttcattcttgggcgtgatgtcgactttctcgacctagctggaaagaccgacggattcatgcctggagacttggtgttactgcgtgcctcgcgctcgcaacgaagccctcattcgatctatcagcgaggcatcggatgagtccagggcgatcatcctcggagcagcggattttgataatgccattaaaggattcaccccggcatctttacgcaatgtaactctgacttcatccaccacgaccttttccgctattggtggtctgcacgagactcggaagatgctcctggagacactgcagtacccaacaaagtatgctcctatcttcgcacagtgcccactccgattacgctccggtttgttgctctatggataccctgggtgcggtaaaaccatgctggccagcgcagtggcaggcgagtgcggtctcaactttatcagcgtgaaaggaccggaaatccttaacaagtacatcggcgccagtgagaagagtgtacgggatctgtttgaacgagcgcaggcagctcggccatgtatcctcttctttgatgagtttgacagtattgcgcccaagcgtggtcatgactcaactggagtgacggaccgagtggtcaaccagcttctcacccagatggatggagctgagggtctctcgggcgtatacgttctcgcggctacatcacggccggatctgattgacccagcgttgctccgtcccggtcgtttggataagtcgctactctgtgatatgcccaaccatgctgatcgtgctgatattattcgagctgttagcaagaagcttgcgatgagcaatgaggtggtggcccggattgatgaggtagcagcgcgtacagcaggattttccggtgctgatctacaggctgttgtctacaacgcgcacctggaggcagtacatgacgcattatgcgatcggtcgggcgataagccgtcagcgaagaccgccaagtcgttcacacccagcacgagtagtcgctcgttcatccaattcctgtactctgatctggagcagcgagctggaacagtggcaatgccggcaccggcagttgtggcgtccaagctcgatgcgctgaagaacgcgcgacgtcgccaacggcaattcgagcaagccgccggtagcttagcgcctacaactgcgacggacaatgcccatgagacagggccagccgaaggtcgggaagaaatagtagtgcgatgggagcacatggagcggtctttgaacacgacgcgcagttcg

SEQ ID NO: 20507 - DNA, 1564 bp, Emericella nidulans
atcccggtggcccctttccggagcctgtaatgaatgagcctccttattactatctcattaccacttatatcagttatctgattctaattgctttcggtcatgttcgtgatttctttggtaaacgttttcgcgaggagaattatcgtcacctgaagccccggaatggctatgcggctcttaacagtgactttgacaacttttacgttcgccgcctgaagctacgtatcaatgactgtttcgaacggcccgttactggtgttcccggaagatacatcaccttgattgaccgagcgacggatgaccacaacaaaaacttctaccttaccggaactacgaccgacacgctgaatttgagctcgtacaactatcttggttttgcccagtcagaaggcccttgtgccgatatcaccgaggaaacgattcgcaagtacggcattacccctgtgagtactcgcgcagaagtcggtacacaggacctgcatgtcgagctcgaggagttggtcgccagctttgttggcaaagaagcgtctatggtcttctcgatgggcttcggtaccaatgcaaacatcttccctgcgttggttggcaagggtgatttaatcatttctgacgaactcaaccatgcctccatccggttcggtgcgcgtctttctggagcatctatcgccatgttcaagcacaacgatatgcatgacttggaagctaaactacgagaggctatcagccaaggtcaaccacgtactcaccgaccatggaagaaaattcttgttgttgttgagggtctttactccatggagggctcgatgtgtaaccttcccggtcttattgccctgaagaagcgctacaagttctatctcttcgttgatgaagcacactcagttggagccatcggtcctcgtggtcggggtgtctgtgattatttcggcattgataccaaggaagtggatattctcatgggtactttgaccaaatcgtttggtgccaacggagggtacattgccgccgacaaggtgatgattgacaagcttcgggcaaccaactccggcatgttctacggagagtcaacttctccggcagttatcgcgcagattatctcagcactacgacttatcaagggtgaacttattcctggccagggcgaggagcgactacagcgtttggccttcaattcccgatatcttcgtctgggcttgaagcgtcttggctttatagtgtacggtcacgacgattcgccgattatacctgttctcctcttcaaccctgccaaaatgccggctttttcccatgagatgctgaagcgcaagatttccgtggttattgtcggttatccggcaacgcctttggtttcctcgcgtgctcgattttgcgtttcggcggcgcatacaaaagaagaccttgaccgaatcctgacggcttgcgacgagattggcaacatcctgcagcttaaattctcgaccggtgtcgcaggcggtgcactccccatgaatgacgacatggcgccgcccccagagaaggaagtccagtggcagcagaagcgaaacccgcgaattgtccctccgcggtg

SEQ ID NO: 20508 - DNA, 1567 bp, Emericella nidulans
tgtctcgctagatacgccgccaattgtgcgagtggcccttgagcctgtcaacccgtcagatctcagcaagatggtcacgggcctgcgcctacttgaacagagcgacccttgcgcactatacgaagtacttccgaatggtgaacatgttattctgaccgcaggtgaactgcaccttgagcgttgtctgaaagaccttcgtgaacgtttcgcgaagtgcgagattcaaaccggccagacaatcgttccataccgggagaccattgtcagagccgctgagatggcagctccaaaaaatccagatctaggaaggggtggtgttctggctgtttctgcatcaaagcagttgacggtccgactaaaggtcattcctctaccagaagcagttactgatttctttaccaagcatgttgggaccatcaaacgcctacagtcccagaagcgaatcattagagcagagggtgaaaatgctaccctttcctctgaaagtacacagcaggacgaggccgccgacgcaacaggcgaggctagagaagtctccttgctctctcttgacgattttagaaaggagctcagcaagaccttcgaagaagtcaaggaagacaaggagctgtggaaggatgttgtggataagatcatcgccttcggtcctcggcggacagggcccaatgtccttatcgacgccacagtagtcaacacatgcgagaaattgtatttgttccccatatccctaagttgattcctatactaacaaaaccactagcctcctcgacgatcccaagcaacaacccagtgtccttcccgaaaacgccagccgcgacgcactcatcgtccgcgacttctgcgacaagatcacctacgccttccaactcgccacagcccaaggcccgctctgccaggagccaatccaaggaatagcagtcttcctcgaggaaattcaaatcaataaccacgaagatgaggtggacctcggccgtcttaccggtgagacaatccgtctcgtccgcgaaagtatctcccaaggcttcctggattggagtccccggatcatgcttgccatgtacagttgcgaaatccaagcctctagtaagtacttgccttctcattcgctgcaatttctagcctgggtatctcacaatcgactttatgaatgctacgaaagataccatgaaatatgctaacaccatctgcagctgaagtccttggccgcgtctacggcgtcatcacccgccgacgcggccgcattctctccgagacaatgaaagaaggaacccccttcttcacaatcctctcccttctccccgtcgccgaatctttcggcttcgcagaggaaatccgcaagcgcacctcaggtgccgcccaacctcaactaatcttcgcgggttttgaagccctcgaccaggaccccttttgggttcccgcaacggaagaggaattggaggatcttggggagctggcggatcgtgaaaatgtggcgaagatgtatgtcgatgctgttaggtctaggaagggcttgtttgtgcaggggaagaagttgattgatgcagagaagcagaagactctgaagaag

SEQ ID NO: 20509 - DNA, 1576 bp, Emericella nidulans
gccgtagcgggagagctggattatgacattgccattctaaatctgagtgaacgagggatgactgacgatcggctcaatcgactcttgactatagtcccgaagcggactcttgttcttttggaggatgtggacgccgctttctcgaatcgccgcactcaaacagatgaggacggctatcgcggtgccaatgttaccttttctggcttactgaatgctttggacggcgtcgcgagcgcggaggagcggattgtcttcctgaccacaaaccacgtggagcgccttgacgaggccctcgtgcgtccgggacgagtggacatgacagtacgtataggcgaactcactcgctaccaggctacctgtttctgggagcggttctacggcgacttggactcgaccgggtcctacaagcaagcgtttctcgaacggctctatgaattaggtcttattgaaaatgagaacggcgagagactcgacccgccgcagagcacagactgccgcgctacagggcttgttcttgtataataaaggaaatatgcaggggctatcgcaatggccgaaggactgacttaccggattcaggaataggctgagcttagtcctggattatttgtatattatgtgacctgaagcagatagactgcttgatagagtcacgagtgaacaatgtagtataatatgaaccctcgtcacggaggaataactccaacactccttcacttttaccttcaacccaaccaccccacctttatcatgtcatcatcatcatcaattcaccccagatcagcttgcatcttctgttattggaagaagttgaaccaagtacagtctgtgcatgatgcagcaattgaaccctcgaccagttgaaccaatcctatctgaagtccattcttcataagccatgcatacgcatacggcccctcattacatgacctacgatccttccattgttcagcgcttgggtaacagcaaatcagcatctcagttttagctctctctaagcgctgtagctgtgaagaaccgccctgctgtgattgggaccgacagctctccgactgaccatcgaggtgtcgcgttaagcgccggcgtgggctctcaggaacaacatgcaggccatctgctcatccttcacatctgcaagagcctctcaccgttgagaccctgattctccatcgaaataagtttgtgacgattcttgagccaagacatggctggcacgcaccttgtaaaaccggccggagtcggacttcgcgcataacgatcttgatatacatatagccatggctggatttctctgccttctgggttaatgtcgctccgagtcagactcctaatacttcctctactcttgccattcctgcctcattgattgagtcgccaatccatggtctacgtaccgaaacgactgttgtgcatgtgcatttaagaggttgcattaactcctgcgccatagcatcaagcgggtcctgtttgtgagctcagtcaaactgagcccgtagtcatgagcagctgtcaatttcagttgtttccaccccccgccccccagggggttcccaagaatccttttcggcgaggcccc

SEQ ID NO: 20510 - DNA, 1581 bp, Emericella nidulans
cccgctctcatctttgtgcctaaccggaagcaaacccgcgctactgccattgatcttttgacagcatgttctattgacgacgacgaagaccggttccttcatgccgacatcgaggagctgcaaccgttacttggccgcgtccatgagcgtaccctggcggagtcgctctcacatggtattgggtactaccatgaggctttgagtcagactgacaagcgcattgtttcccatctctacaacatcggtgcaatccaagttgtcatcgcctcacgagatgtctgctgggaactcaacctcaccggacaccttgtggttgtcatgggcactcagttcttcgagggccgtgagcatcgctatatcgactacccaataagcgagattctccaaatgttcggcaaggcttctcgccccggtcaggacaaagttggccgaggtgttcttatggtcccgacggtcaaacgcgagtactataagaagttcctcaacgaggcgttgccggtggagagtcacttacagctctacatgcacgatgccttcgttaccgagatcagccaggggacaattgcctccactcaagattccgttgactggttgacgtacacttacttttaccgccgccttctagccaaccccagcttctatggtctcacggatataagccacgagggtctgagtacattcctttctgagttggtagagaacaccttgaaggagctgtctgaggccaagatcattgatctggatgaagaggatgacagtgtttcacctctgaacgctgcatcgatcggcgcgtactacaacatttcatacatcaccatgcagaccttcctcctttctctgtctgcccgaacgaaactcaagggcattttggagattgtcacagcggcgaccgaatttgagtctgtccagatgcgccgccacgaagaacacatccttcgccgagtgtatgaccgcgtccctgtcaaaacgtcacaggtcgccttcgactcaccgcacttcaaatcctttgtgctgcttcaagctcacttttcgcgcatgcagctgcctattgatctggcgaaagaccaagaagttattgttagcaaggcccttaaccttctcagtgcttgtgtggacatcctcgcctcggaaggccacatgaacgccatgaatgccatggaaatgtcgcagatggtggttcaggctatgtgggatcgtgatagccctctcaagcaaattcctcattttggccctgaagccatcaaggttgccaatgagtataagtatgttactcctgctttatatgctaaaactcgttctaacatttgcatgattagtatcaacgatatcttcgagttcatggatgcgatggacccgtccgagaacaaagattacaataccctagttaagcgtctcaacctcgacaacaaacaattggcgcaggcagctgcgttcaccaacaacaagtaccctatcctagaactcgactttgaggtcgaggacccggaaaacattactgccggtgaacctgcgtacctcaaaatcaaggttgagcgggaggtggatgaggatgaagagtttgacacgacagtgcacgcgcct

SEQ ID NO: 20511 - DNA, 1588 bp, Emericella nidulans
gcagaaatgatcaaacgagaaaagctggaagaggactatacagatgaatactgggagaagcgctatactatccgcgacaacgaagtgcctccacaactcgatagcgtacgggataaggtcctactggcagggaaatacctgaatgtggtgcgagagtgtggaggggtggacgtcagcaaagcggttaaggatgttccgaagacatttgatgatcctcgctttctggagaacgtcaacgctgcttatacatatgccaatgcctctttgctgaatcttctgttgactaaaaactctctcactacatgttccgctccttaaaacactacttcttcctcgatcgatctgatttcttttcctatttcctcgagcttggagcgtccgagcttcgcaagccagccaagaacgtgaacgaaagcaaactacaatctctccttgatttagtcctgcgccaaccaggcagcattgcggcgcaggacccattcaaggaagatgtcaaagtccggatgaacaagatcggactcaccaaatggcttatgcaggttgttagcgtctccggtatagatcaggataacccagaagccgctctggaaaagtaccaagcaccgcaagcaggcagcgaggatgacaaggatattgttggatttgatgccctggagctcgactacactgtacccttcccgctttccctcgttattagtcgcaagacagtcctccggtaccaactcatctttcgacacctactctcgctccgtcatctggaatccatgctctcatccgcctggttagaccagagcaaaatcctgggatggcgccacaaatcaactgaccgaaggctagagctctggaaaaggcgcgcttggaaccttcgagcgaagatgctagtctttatacagcagttactctatttttgtacggctgaagtagtcgaaccgaactgcaaagccttatggaccgcgtgaacggtaccgacgctgatggatcagaagtcaccgtcaacggcaccaagcaggtcaaccggacagtggacgaactcatgcaggaccacgtggatttcctggatacttgtttaaaagagtgcatctgacgcaggctaaactgctaaaggtatattcgcagactatcccaccattccttctcagtgctgacaggcgtcgccttttagatccattcaaaactcctaacctgctgcacaatgttcgcctcctggaccgcagcaccccttggccgcgccctcatctcagccgacccaggactcagcgcgaaccctgctacttctgacggacgaggctacgaccctgcgcggattgggaagctcgaggacacattaaaacgatatgaagatcattttggtcgtcatcttcggattcttatggataggtaagctagcttacactgctctctcattctctcttcaggtcaacgctctgatattcatgttcgacctagcttgaattacttcgcggcaactgaaagcgtcgtattgctgaaactagcgcatgctctaagctctatcagcaaggaagactgagtcaatcacaagctttcggtatccagcagggccagtatagatgatgcacttatcatctta

SEQ ID NO: 20512 - DNA, 1592 bp, Emericella nidulans
tcacagggacaagagccacagagctcagtccaaacgtttgaaccgattgctgagaatgcagtcatccaagcaaagcaaaggtggaacgatcctccaatcaacaaatggcgtcttttagctacgtttgtcagtttcgcggtcgtaggggccagcgacggcgtctatggagtgagcttttcccgttcggatcccccagaaaaccggctaatgacttctctcgcaggcacttgtgccatatgtaagcgtcgaatcgaattcaaatcccgtcgccgacaaggatgctgacgttgaatagcttcgtgatgactataagctgtctaccacggtcgtctctttgattttcatgaccccgtttgccggatacacgatcgcaactctcattgtcaacaaaatccacatgacgttgggccagcgaggtattgccattattggtcccctatgccatatcatcccgttcgtaattatggccattcgcccgccctggccggtcatgttggctgtctacgtaattgtgggcttggggaatggcctcattgatgccgcatggaactcttggattgcagacatggttaatgcgaacaccatgatggggtttctcggtgccttctatgggcttgggtacgttgataatgtgcaagggctaccaatggcacactgaccacggcacagggcaaccctgagcccaacaatcgcaacgcagatgatcaaatccggcctccactggaattacttttattatacactgcttggtggctctgtcctggagttgacgacgagtgccgttttgttctggggagagaatgcggctagcttccgagagaaaacacgcaggagtgctagtagcagtggcggaaacagaactacagaggcaatgaaaagtcgcgttacctggatgatagccttctggctgtttatctacatgggtgccgaaggtgggatgctctggctttatcctaggagtgaatggttttctgacggttggatttgatagtgtctgtgggtggctgggtcgtcgattttatggtccaggctcgcaacggacagccattcgagtctggtctaattcccacgggcttctgggctggcgtcactattggccgacttttactcggctgggtgaacgactggctaggcatgttatgcactctacgtatccaatgcacgaatgctgactgagaatgaaggagaacggattgcgatcagtatctatcttgtgatctcaatagctctggaacttatattttggctcgtaccgaagtttgtcgtttctgctgttgctgtctcgctgcttggcttcttcactgggcctctctttcctgcggcaattgtagtggctgcgaagctgcttccgaagcatctacatactccaggcattggacttgcgtcagcattggctggtggtggtgcagcaatgtgagtttactctgtctgttaatactttataaaccagtgatttagacatttggctaatataatgctctctgtatctgcgcatagactgccgtttgttgccggtgctttatctggggcgcgcggagtgcaaagtctacaaccatttattcttgctttactaatcaccttaacaatcgtct

SEQ ID NO: 20513 - DNA, 1595 bp, Emericella nidulans
tgccctaaccccgtgataagtgctataccttaccagcctctcacgaagatgacttttatgggcctggttggttcatctttggccacggctcgaatttgcatgatcctcattccagccttcctcctattcggctacaaccagtccaacctagggggcgtgctggattatccctccttcacccggaacttccccagcatcgatacgagcaacaccaagggagcagtcaaagaccacaatgccactgtccaaggtaatcaatatcagtctcctattctcctcttacgtttgcttttatgtttgctcgcagccctatccacattcagttacttaccaaccgcgtcttctctaggcactatcgtcgctgtctacaccctcggctgtcttgttggctccctgggggtcactcaactcggcaaccggatcggtcgtcgcaaatccctcatcgtgtcagcagttgtagctacagtgggcctggtcatacaagcttcatcatacagcctgggccaactcgttgttggtcggctcgtctctggcgcaggtaatggcggcgtcaatgcgatcgtccccgtctggcagagcgagtgcacccagccgaaaagccgcggcaagaacgtggtcatcgtcggtgtgtttattgccagtggtatagcggcggccggctgggttaatgtagggctttcctatctggaagaaagcgaggtggcatggcgtttgcctctggccataccaatcctcttcacgctcccactcatgactctgaccatgacctttcccgagtcacctcgatggctcatcagcaacgggcgcagggaggaagctcatgctgccatatgggcgctcaccgggcgcgaggagtccactgctgagatgcaagagttggaacgcgtcctacaacaaacgcccacccaggaacggggtttcatggatctgctcataccaggaccccaacgtctcttttacaggctctgtctcgctgtcggtatcaacttctgtgctcagatgaccggcgctaatgtcatctcctactacggcaagaccattttccgcgactccctgggcctctcgggtgacaaggcatcgctcctcaacgcgggcgtcctgacctggaagatcttcgctgcgatatcggcatacttatccgttgatcgctttggccgcaagcccctctttatcaccgcctgtctagggatgggtctctccatggctggtctggctgggaccgtctgggcgatcgagaaccgaccgggatctacgctcggcgcatctgtcgcagcgaccttcttcctcttcctgttcatgaccttcttcccccttggcttcctaggcgcaaacttcctcctcggtagtgagattgcaccacaggatctgcgtgtgcatcttgccgctgtcggcacggcagcgcattggcttttcaactttgtgatcgcagaaatcacccccgttgccttcacaacgatcaagtaccggtactatattgtttatgcagtaatcggcgtctccgcctcgatcatggtatacttcttttgcccagagacaaaaggtcgctccctagaagagatggatagtctcttctctgagcccgaggcatggtggaa

SEQ ID NO: 20514 - DNA, 1599 bp, Emericella nidulans
tcacaatggcctcttgggaggaatttgacgcgatattctacttcaataaaaacttcacatatgatggcaaggttattgaacagatcctctctaaccgccgtgcgctagacaaccgactcttcgccgacaggttacttgagctgctcggtgttcaagcaggtactctcttgtctgttggtttctgcatagtttcaattgctaatatctcaaattttcagttaccaagctatatcccccaatttcaaattctgaccttcgtaccctcatccgccacattgtatcctctgagctcgatgcccaccagaaacaaagcttaatttactatatcctaaaggactgccgagctcctagcgatgtcgctgctcaatttgcacgacgatgccatctaccagaaaagtacaggttgtttatagagggactttggaaccttgaccgactggaattcaaggtattcattttttatttcctttttcaggactgccgtttgtcagacagcaggatgctaatgaaggcatagcgcgcaattgagtatctcagcgaaccttccattatcccaacatttcctgatgagattctttacgcccttaccctttcgcatcttcccagacatgacgacagcctcgtcatggcctactatctcacagtcaacccccctttaacctcggagaaagctcagagagcgtttatggaaacactgtgtcgtgctagcattacagaggctttctatttcacccgaaaacatcacgaggctctccgtcaagcttatcttacacagctcattgagtttgtccatagaacagacgcaggccagatgagaagcagacgcgctatggaactgatcggtcttccttttgatgaccaagaggagcagtggtttgaggatgctttgcttcgtggaagcgcaaaaacactgcatggtgcgaaggacacggtaatggcgcggcgcctcgctactgggaaagtagcagggctgtctgcagagctggaatctttggacggaaaaaagatagatggcttgaattgggacttgctcaagcaaagcatgaaacctcctctaaattcagccgacagaggccaatcccaatgataaatgaaatgaacagtgaatggtaatgatagtgttatttgaagcgggcgttggctgggattttgcattatcttctcgtggaccatgtaataaaggcgcaaggtggtttgaaatgttacagctgtcaattcttgagagcaagcaactttcccatctttcgggcctccatcaccagtttgcttgagcaagaggtatcataattgaagggcatgggtttgtttgtattgaaaacaatcgtgatagtactacagaataagtcgtattgaaattaccgatattttacaattggctccagcattgcgcgcccatgtgacgtacgttaccgtcacataaacctatgagctgttcatcatcgaaggactttaatcaagcctcattttgagaggatcgctgagactttgacactcacaaatattgaaagcctcggaagcattgaaagcattggattttagtctttctgagatcttgaatggccactgactccaaagcgaactttgatggaaatcctgcga

SEQ ID NO: 20515 - DNA, 1601 bp, Emericella nidulans
tcagccccaaggtccaggtcaaggtcagcctcagtctcagcagcaagggcaatctcagggccatgtcaacggtcaaagtcctgttcagaaacctactctgccccctgggcatacccaaggcgcttctcaaaaccaggttccacaacaacagcagccgcaacaaccgcaagggcagcagaatctccaggtacctggacagcaacctcagcctgcacagcagaatccagccgctggagcggagccggaaaaggaaccactgaagaaaccttgggagtactctgacgagatcatgtctggccttaagaccgcgtttcccttgctcgctttgtcaatgcagactatggtggatcaaatccacaagaatttcaagtgcccgcccgatgaggatgcgtaccgcctgatcgtggcgctgttgaacgatggtctggcttatgttggccgcatgcctggctcgtacgcccaggacttcaagctgcctgcggcgacggaagctaacataacccgcttcgctgagaccatccttcccgctcatattcggaaatcttttgaggccgactttgtcgtcaggaagccaaccatgtacgaatacattcagaaactccgacgctggcgggacaagttcgaggaaaaactcgatcgacgaccccagattcagttcttggaaacctactccccgcacctcagtgaattccgcttcctcaagtttgatgaggttgagatcccaggtcagtatctacagcacaaggacaagaaccaggacttcattcgcatcgatcgcttcttgcctgacatagatttggtccgcggcattggtgtctgccaccgtcggctgaagattcgcggtcacgacggcagtgttcatccttttgctgtccaacatcctgccgctcgacactgccggcgcgaggagcgaattctgcaattgttccgcatcttcaatggagtgttgggcaagcgcaaggagagtcgtcggcgaaacctcaatttccacctgcctctcatggttcctttggctcctcatatccgcttggttcgcgacgacccttcgtatatctccatgcaagggatctacgaggattactgccgacgaattggcatcaacaaggacgagcctgtccttttcacaatggagaagatgagggctttggcagagacaaaacaaaatgtaagtgcattgctgacactgatttcaacggcaactgatgattctagcgtaccaccgaacagcagcaggttctcagaaccgaaatgctcacggctatccaagaaaaatgggttcctccgacgatggtgctggactacttccagaagatctatccaaacttctcggacttctggcttttccgacgccagttcgcttatcaatatgcggctcttgcattcatgacctatatgatgcacatgggcaaccggtaccctaacaaaatcatgatctcacgctcgactggtgacatctggggctctgaactcattcccattatcaacccgaacaaggcgttcttctttaacccggagcaggtgcctttccgccttacaccaaacatccagacgctcatgggaccaattgccacagaaggtctctttgcctgcgcaatcatggc

SEQ ID NO: 20516 - DNA, 1612 bp, Emericella nidulans
gtgagcgcgagtccgccctagaagaagagtttgatgtagatgaatatcatcgccggcgtgaagagcgaaagaagaagaaaaaagaaagacggtcgaagcaggcagatgaacaggaattgagcccgctgtatcttcccgagttcatcagcgtcagcaattttgccgatgtcgttggcatgcggccagcacagctcgttgaacggatggaggaaatgggtttcgaggatgtttcatacagccatgttcttgacgccgagacagctggcttgatcgctgccgaatttggttacgagcctatcgtcgacactggagccgagcaggacctcacagctgcaccggagccagaggacaaatctatatggccgtctagaccccccgttgtcaccatcatgggccatgtggatcacggcaagactactatccttgattggctacgcaagtcttccgttgtcgcatcagagcatggagggatcactcagcacattggagcattttccgtcaccatgccgtctggtaaaaagataacattcctggacacccccggccacgcggcctttctcgatatgcgccgacgtggcgctgatgtgacagatattgtggtgctcgtggtagctgccgatgacagcgtcaagccgcagacggtggaagccatcaaacatgccacaagcgccaaggtccctattattgtggctatgagcaaaattgacaaggaaggtataaaccctgagagggtcaaacaagacctctcatctcacggtatccacgtggaagactatggtggtgatgtccaggcgattggtgtaagtgggaaaactggccaaggaatgctagagcttgaagaagccattatcactctttctgaggttttggaccacagagccgacccggatggcttcgttgaaggatgggttatcgaggcctccacgaagagttatggtcgcgtggcaaccgtgctcatcagacgcggcacccttcgacctggagacattcttgtcgccggcaacacctgggcccgtgtccgtacgcttagaaacgaggccggcgtttctatttccgaggccactcccggcatgccagttgaaatagatggctggagagaaaacccaaccgcgggcacggagcttctgcaagcagaagacgagcagcacgctaaggatgtcgtggaataccgagtcgagagggaagagactcagaggctgggtcaagatacggcagccatcaacgaggcccgccgtgacatgattgagaagcgacggaaagaagcttccgaagaggaagagctgacggaagagaaattatctggtcccaaaccaatcaattttgtggtcaaggcggacgtccacggttcagcggaggctgttgagaactcaataacagctattggaaacaacgaggtatatgctaaagtgcttcgttctgaagttggacccatcagcgagtcagatattgagcttgccgccgctgccaacggccatatcgtctgcttcaacatgcctattgacacgaccatgagtcggatggcacagaacctcggtgtcaatatcatggatcataatattatctacaaactcgtggatgatgtcaaagatactctgagcgagcagctggctcc

SEQ ID NO: 20517 - DNA, 1649 bp, Emericella nidulans
tcacctgcgttctcggcttggggtcatacttaatcttagttgatttccccgagcaatcacccaattcatggcacttcctcaacgagtccgaagccacgtatattattgccagtatcgaaaacgaccgatcagatgtctatgcggaaccgttcacattgaagggttacctccgtaacaccaaggatagcaaggtctggctgtatgctatcctttacatgctaaccacaacaaatacgtactcgattgcgtactttcttccgatcatcctgcaggatagcatgggattctctgtcgtcaaggcacagtgccttgtcgcgccgccgtatgttgccgctgcaatagtgatgtttatccaaggcgtcgttgctgataagtggcgaatccgagggccaattgtggctatcaatgctgcgatgggattgctgggcttgggactactccggttatctggataatccagcgccccgttacttcggagtctttctggctaccattggaggtatgtgatgacctgtactggtaaggatgatactgaatgctttaggcaacgccaactgccccgctcttgtatcatggcagaggtaaactcctcctttccctagcattgaaaacaacagctaagcctctttcagcaataatattcgcgggcagtggaaacgagccctaacgtcggcaactttgatcggcggtggcagcattggaggcattctcggaaccaccgtctttcgtgcccaagacgcgccgaactaccgtcccggcctgttgacaaccatgttggcaaatgcaatcatgattctgattgtgggtgtgttaacattgaagttttatcgtgcgaataaacgggttgatgctgggggaaagccggttgagggattggctggattcaaatatacgctttgaccttctaagccaaggggtaatttggcaaccgtcaaaagatattcggcagttgagaattgcgaccataccgtaggataaatggttttgtgccttaatggatagagttagacggattgatagtcagtactaaatggctatacaatgacagatatatgacagcagttcatttgcatagtttcaggtttagtaccaccggtcggaaaggctcagcggcagattcggaaagtccaaataacagattctctcggagattacggattagtcccacaggaatgcggacctccatctattggttgttagtgattatacatcattgttgatcaggttcactctagcaatacagcagaactgagtgggcgatgaagggtaacgtattggacgaagccaggaacagggagcggtcaagaatagaacatgttttagcacagccagggccttgcggtcaacgcctttaggcttcgccgcttggcaaaaatcatctagcgccacataaagaggaaaaagaaatacttccgatgcggggaatcgaaccccgagctgccgtgtgagagacggcgatgttaaccattacaccacatcggattgttgttgaaactagctttttaacttggaaatatatacccagaacattgaatacatgtccagattggctgcaaaacttctcaagtaacatcacggatatcagagaagagtcctctagtcttgacataccagtgagcgataagcaggtaaatgtaattcatatgttc

SEQ ID NO: 20518 - DNA, 1652 bp, Emericella nidulans
cgtcaccggtgtcgggaagggtacaaaattcctcaatgatttcttaggatgcacaaagacgtacgagacggttgtaatcttcggcgcagagacggactcgtatgaccggttggggaagattgttcggcgagcaccctatgagcatattactcgcgaagcggtcgagaaagcacttgagcagttccgtgggaagattatgcagcgcccgcctattttctctgcgctcaaggtacaggggaagaaactgtacgaatatgctagggaaggtaaagagccgccgattgagatccagtctaggcccgttgaggttactgatttaagaatcgtggagtggtatgagcccgggacgcatgagtatacgtggcctgaggaggaggctcccgcggatgagagggctgttgcggaaaagttgttggcgaaggatgattcccttcctattgttccggccgcagatgatgctgatggttcttcgaaacgcaaatcgcctccggcagagggatccgaaggcaacgaaacgactgcttcaaatgctgcagcgaagaagcagaaggtgtccgctgaaggcgaggcagcatcggctcccgagcagaccaaagccccagaagctgtggaggaagctaccacaaagacgaaacctgaatctgcagaagaaatgaaacccctagcaccgccacctgcagtcaaaattaccatgactgtctcctctggtttctacgtccgctctttggcgcatgatctaggcaaggctttgggtagctgtggtctcatgagcgcgctcgtccgatcccgtcaagcagactacaccctggagccagataaaattttggagtacaaggacctcgacgccggagaagaggtctggggtcccaaagtcaagggcttccttgaagaatgggagagaaagagagctgcagaaaaacgctcaaattagatagataattgtgctgaactccatgatgcaaaatataattgagggtatagaaatattcaatacggttataacccctaaagcaaacgtctagcactggctggcgtacaagtttgactcgtgatccattcatattcgaaactgtcgagcagaaaagaaagttaaatttgaatagtaaatgacgcctcagatgcagtgtcaagagagagatagccggtaagatgacaaaaggaaaatcgttttgagagggtataccgctggaaacatgcatgatagggaaagaagccaaggtagtgttgaaagagaacgaatgcatggatttgagattttagatcggaagaaatgtaagtgaatgttattgaacggagttatttcgacgcaagtcgcctgatgagtgctatgggcgttgacaagagctatatcaattagtcctctgtgcatgttagatatatggtgctatatcttactttggagaacaaacgcctgcccttgccttgattcgcacgcgcattgaagagtgctcccgtctacaaagtccaacaagatactgttggagagctcttgccgttcctcgtcaggtatgcatggagttttgaactcagtcaggtggtatcgtttgaccatgttgcgattacttgaatcgacgttacccggagtcaagactaaaaagccttggttgtcaattcggatgaacgccgtttcaaagaagggtacaggaactgga

SEQ ID NO: 20519 - DNA, 1656 bp, Emericella nidulans
ggcgccctttggtattttcttccggggtatttgtttaccgctcttagtatgttcagcttcgtgtgctggatagcaccaacaaatgtcgtggtcaatcagcttttcgggcagaaaaccggattgggaatgtcgcttttgaccttggattggtctcaagttgtcttcgccaacgacagccctctcctagtccctttctgggcaggtttaaacgttatgggatcgtttgtccttttcttctggattctggttcctatcatctattatacgaacacatggtattccgcttacctgccgcttctggactccaacaccttcgataacactggtcgcatgtacgatacgcgccgtgtaatgaacattaacaatggcacagtcaacgtggaggcttaccgaaactactctccgatgttcatacccgccgggtttgccgtcacatatggcgtggcatttgccaatctcaccgggatattcgttcacacagcactataccatggaaaggacctacttcagcaatggagtggtcgacacaaaaaagatatccattctcgacttatgcaatcatataccccagtaccctggtggtggtttggtgcagtaagccttctgatgttcatactcagtattgtgaacaatgaggtatgggaaacgcgcctgccggcctggggcgtccttcttgccttcgtgttgccgataatatatttcatccccgtgggcattattaaagccttgacgaacattacgagtaaccaactgaatctaatcactgaatttatcggtgggtatgcctttctcgggaagcctgtcgccaacatggccttcaagttctacgggtatgtgacggtctcgcagggactagagtaagtaccaacagtcaattatcatgtgtccccaatgtctctaaatgcaattccagatttgtcgcagacatgaaactggcgcactacctccacattgcaccgcgcaccctctttttcgcgcagggtctcgctacactcattggcgcaattgtgcaatgcggtgtcacggtattcatgctcacccgtttcgaaggcatctgcaccccgcatgcggacggcggcttcacctgtccgcacggtttagtcacattttcctcatctctgatctggggtacgtagtgaattctacaacctgatctatagacctctaactaattgtcattaccaaaccaggtgccttgggccccgcccgcaacttcagcccaggtcaaatctacgggaatctcctctggttcttcctcgccggtcctgtggttgtcattatcacgtaccttcttgggcgccgctggaaggcagcaaactacatatcttggcccgtcgcattcggcgcaatgagcatggtcccgcctgcgacagggatcaacttttcgtcatggtgggttgtcaatgttatcttcaacggtcttgtcaagcgcaaacggccagcttggtggtcgaagtatagtacgtcatctcttgcttcagtccttcttcaaaaatgtgtacccggctaacagtacccagactatgtcctcagcgcagccttagattcaggcgtcgctgtttccaccgtcgttatctttttttgcatcatgctacctgctgggccgctgaggtggtgggggaacgaagtcttcatgagaacggccgatggtcgtgg

SEQ ID NO: 20520 - DNA, 1666 bp, Emericella nidulans
ttcagtctcgcaaagtgcccaccaatatatgttcttcccacccatctagaccttgacgcgctccatcaaaccgaggagactttgatccagcacggcgcacgcctgacatacgatgttgcagaggctacattgattctcggcaaggtcaggcagaagaagcgcgcggcgctggagctgaggtcgagaggagtgtggacagggaggtggagagcacctcctcacatacttcaggtccaccggcgaaacggcgacggctagagagcggaaggaatgggagtgcagtgagtgaaatatacttgagcacggaggatgagagtgaagaagatggtcgacggctcacggcgcatctcgagcatccacagctgtcggaatcgaaaaggagtgaaaggacgagcgtgtcaaaactgctaagcaaagacgaaggggtgattagagttgtgcgactggattggttggcgcaatgcgctgaggcgcagacgctcctaccactggcttcgtttgttgtgtatcatgcgcgcaagatcgagcgacctgcaacaaggggcgatgatgagaccgcaaactcacaggctatccttgaccgggccaagcaagacgccgcattcaaagccccgtttcctccgtctacggacaaacatgacagggtggccagccaccgcgcacctccaaagttgtaccggcaaacaacatccgaaaacgaagaggcagagcccttaccaccgccaccagaatgggtccgcgacggcgtcatgtacgcctgcatgcggtcctcattcctcaacacccccaacaatgccttcattaaccagctcgtcaagatccgcacgatccgcgagctgaacctcgacgagattggggttcgcgcgtacagcactgctatcgcagcaatagcagcatacccgtatgaaatcagacgcggatcccagatcctctccttgcccggatgcgacagcaagatcgctaacctctttgttgaattcaaagctagcgagagtggtacccttgctgcagccgaggcgctcgataaagacccggacctgcgcaccttgcacacgttctacaacatatggggtgtgggctcgaaaacagcacgagaattcttctacgccagacaatggcgcgatcttgatgatattgtcgagcacggttggcactcgctctcacgcgtgcagcaaatcggcgtcaagtactacgatgaattccttctcgacattcccagggaggaaaccgaggctattggcaagatcatatgccagcatgcgaactcggcctctgtccgtccgaccgcacagtacgacggccacggtgtggagtgtatcatcgtgggcagctaccgccgcggcaaacccgtctcccacgatgtcgatataatccttagccaccgcgacgaagcgataacgcacaacctggtcgttgacgtcgtcgcatccctagaatccgagggctggattacccacaccctagccctgcacctgacaacttcaaaacgtgaccagcagactcttccctaccgtggcgatgacgacgatcgtaatcattttgacagtttggataaggcgcttgttgtctggcagacccctaaagacaaacttggctccggtacacaggcgagcagtgcaaataccaacccgcaccgccgtgtcgacatcatcgtctccccatggcg

SEQ ID NO: 20521 - DNA, 1667 bp, Emericella nidulans
gtgccgtcccgcccttgttgcagccagccccgcagcgccaatcggcaatggccgagaccaggtatctaaagcagtaggccgacactttgagattgacggcaaagtgcagtactttgcgggtacgaactgctggtggttgggcaatttgctcaatgatttcgaggtcgagcttgctgtctctcagattgccgaagtacgcctccaacatgacggatatcggatcgagtactgatgatggcagaccgggtataaagtcgtccgaacctggggcttcttcggcgtcaacgatccatccaaccccggccagcctgtctactaccaggtcctgaatgaaagcttgtacgagggtggcttggggatcaactacgggtctaatggtctgtctttcatactccttcgttcacctgcaatcaagcgcagccctaacagacatctgaacgcaggcatccgccgcctcgacaccgtggtctccctcgctgagagatacgacatccagctagtcctgacattcatgaacaactggaacgactttggcggaataaacatctatagcaacgcattcggcagcaacgcgactacctggtacacagacaagaaaagccaaagggcataccgcgagtacatcaaatttatcgtcaatcggtacaagggctcttccgcgattttcgcgtgggaactaggcaatgagccccgctgcaaggggtgtgatccatccgtcatatacaattgggccaagagcgtcagcgcatacatcaagaaattagacaagaagcatatggttgcactcggagacgagggctggctctgtccgcccgagggagacgggacctatgcgtacgattgctcagagggagtcgactttgtgaagaacctcgagatcgagacgctcgactacggaaccttccacctctacccggaatcctggggttacaactacagctggggcagcgagtgggtgctgcagcacgacgccatcgggaagaggttcaacaagcccgtcgtcttcgaggaatatgggactccgctcaaccatacgcagctcgagcggccgtggcagctgacaacggtcaaagagacgcaggtggcggcagactttatctggcagtttgggactgtgctgccggtggagggaacggagtggggagatgtcaattccatctactatggaacggaagagtacgaggttttggccgtccagcatgcgtgggagatggccaggaagaaggtgccgcggcactagagctagtgataacagggtacttgctatctaatcaaagacacatctcagccattattagagttcaataagtggaaaggaaaagtttttcgcaagcagatcgcttcgggtaagccgtggttatagtatttcggcgacttcagcttgcaattttaaatcaactcccatcgcccattccctgccgccagagacgcttagtagcaggcattggacgcagagtacgatgccaatggacatgagcggcgcatgtcgataactgagttttccttggatggtcagccccgaacactaacctttgggaaccacgttggctctaaagatatggacaaccgtccaatttagcaacgttcagtcgcaggctttgagccaacggcgtgagaggccgttatcattttgacggcctggagaatcgagctttaccgactgcacg

SEQ ID NO: 20522 - DNA, 1670 bp, Emericella nidulans
tcacaagggagcccagcagagtacgtttttttgagagcgatagactagacaaattgtcgaatataactgacgtggatgtttcagttcaccctggcctttccaacgccacccgttctcacgtcggggcctcagcaaccgtttccggtcctactcctcgtgcccccgtggctgcgccattcgactacgacgccttctacaatgcagaactgcagaagaagcaccaggacaagtcgtatcgttactttaacaacatcaaccgtctcgctcaggaattcccccgcgctcatacggcttcgaaggatgagaaagtgaccgtctggtgctcgaacgactacctcggcatgggacgtaatcctgaagttctcgcgaccatgcataagaccctcgatacgtacggagccggcgcgggaggaactcgtaacatttccgggcacaatcaacatgccgtctcgctggagaatactctggccaaactccatggtaaagaagctgcgctggttttcagctcgtgctttgtagccaacgacgctactttggctactctcggcagcaagatgcctgactgcgtcattttgtcggactcgctcaaccacgcatcgatgatccagggtatccgccattctggcgcgaagaaaatggtcttcaagcacaacgatttggtcgacctcgagacgaagctcgcatctcttcctctgcatgttccaaagatcattgccttcgaatcggtgtacagtatgtgtggctctattgctccgatcgaggcgatttgtgatttggcggacaagtacggagccattactttcctagacgaggttcacgccgtgggaatgtacggaccgcacggtgctggagttgccgagcatcttgactacgagatctatgcttcgcaggacaccgcaaaccctctcagcaccaaaggcactgtcatggaccggatcaacatcattaccggtactcttggtaaagcgtacggatgcgtcggtggttacattgctggctctgccgctttagttgacaccatccgctccctcgcccctgggtttattttcaccacttcccttcctccagcaaccatggccggtgcggatactgcaatccggtatcaggcacgccaccagcaggaccgtatcctgcagcagttgcacactcgggctgttaagcaatcattcaaggatttagatatccccgtcatccctaacccctctcacatcgtccctcttctcgtcggtgatgccgagctcgccaagcaggcctcggacaagctccttgaagagcacggcatctacgttcaagcaattaactaccccaccgtgccacgcggtgaagagcgcctccggattacccccacccctggtcacacgcaagagcttcgtgaccaccttgtcgaagcagtcaacactgtctggaacgacctcggcatcaagcgcgcaagctactggaaggcaatgggcggattcgtcggtgttggcgtggaagctgccgagctcgagaatcaacccatctggaccgacgcccagttgaatatgcgacctgatgaaaccctcgaggctgcagttgaacgcgagtttcaggccgcggttcctggcatgaaagccgggggtgcaaaggcgaagcccgtcggctcaatcgcggccaaccctatcggtgcctcaatcccagtcgcggctgct

SEQ ID NO: 20523 - DNA, 1677 bp, Emericella nidulans
gcctttcaccaggtcgtcatgccgattgcccaggagttgaccctgatttggttataagtatgagatccgctatccatcgttaagaacagtgaactaacaagtccgaagttgcgtctggttttgatgctgctgcgggagatacgcttggaggatgctttgtcaccccggcgtgctatgctcatatgacgcatatgttgatgacgctggctcaaggcaaggttgctgtttgcttggaggttcgattgcgccgaaatatctatctttcgcgagctaattgtagaaatacagggtggctataattttaggtcgatttcgaagtctgctctcgctgttacgaagacactcatgggaaatccgcctgaccgactatccttcacctgcccttcagaagcggccatttctaccatacggcgagtatcgtccatccagtccgactactggaagtgcatgtatcccaaggcaataaagaatgaaggagtctggactgataggcttcacggtaggctaggaagacatcaaaaattgcatggggactaatgaagccgcagatatcattcgagcttaccaggccaagcagctctatgacaactataagctcacctctctctatatctaccgcactgctatatcgaaatcattcgagaatcaggttttggcaaggtaaacgctatcaacaagagtgtagtatcttaccatggctaacccctggaagtccaaattacaatcaagctaccccgcttatagtcatttttcatgatccgtgagtattacttctcgacgtaaatgttctatataccgacagtgacaggcctgagattatgggattgccacatccattaaccaacaacttggaggcgcacaactgctggctagtaagtgcatcctgtcttgccctgcggcggctgagctgacttagaacaaggctgatgtaatgaaggattatgtccaatgggctgttggcaagggttacgctgtgattgacgtaaatattcctaaacatgtcacaactgaacctgtgagtctatctagacccgaaatgatctagattccccattctgacaatccattagtcatcaggcaggttcgaggaagaagacgagaatcgaccgacagcgacggaagaactggccgggtatttgtgggataattacatcgagtaagctcgggatcccaaaagtttggcctcgagactgacctggcgccctagcccaaatgaagcaaccgagatattcctcgttggtattggaaatgctttctatggagttgccaacctcttaatcaatagaggtaggtgattgtgcatagcaaccacagaaaggcagctaatccgtgtatagaaaccctttaccagcgagttaacggtgtcatttcattcgttgctaaagacccagtccgtgcagtggcctcgcatactcaagtctggttatccagatggtaccgagatgtaagtagtcttaccgtcgttcgtctagtacaaaatcctgactccaacagaactcactcgtttttgtctcaaaggcgcatggtgtctggaagagtgaccgcaaggcaaccaagcgctatgggaaacttattcagtcatccagggaaggacttagtgacatgcttatgcaccacaaagatgaggttttccaatggatcgaagatcgtattgagcctgagagcgaggagacggag

SEQ ID NO: 20524 - DNA, 1681 bp, Emericella nidulans
ggtcgtacgtcacgctcaaatccaactctggtcttgtatttggtgttatcgagctatgcaccggcctaagcacggtatttcttgatcagggctactggcagcgagccatcgccagtcggcccaccaccgctgtccgggcctatatcatgggcggcttgtcctggtttgcaatcccctttggattcgcaaccaccctgggtcttgccgctgtagcgttaacgaacaacccccggttcccgacttacccgaacaatatgacaagcagtcagatctcagcaggtctcgcggctccatttggcgccacagcccttgccgggaagggcggtgcgactgccttgcttttgacactgttcatggccgtcacctcctccgcctcgtctcaactcatcgccgtatcgtcgatcctgacattcgacatttacaaaacctacctcaagcccaaggccactcctcaacagctcatcttcgtctcccatataatgatctgcatcttcggcgtggttatggcgtgcgttgcctgcctctggaacggcatcgggatcgacctgggctggctgttcctggtaatgggtctcttgattggcggtgcggtcttcccggctgcattcaccatcctctggaaaggacagacgcgcctaggtgctgtctgcggtgcaattggtggcctggcagctgggctgattgcctggctggttgaagccaaagtatactatggcgaactcaccgtagctacaacaggtgccaactaccccacattggccgggaacatggcgagcgtcttgactggtctcattctcactgttggaatctctcttctcaaaccggatgacttcaactgggaaaagacccgagctattaacgcgccagctacatataacccggaacccgtcatcgaatctaaacctcccatggcgatcaagacgacgcgcgttgaccaaagtgagaaaacagcagactctgcggtcatcgaggatccaaaagctctacagaaaacattcgtcatggccgtcgttgtatctgccgttctgtcgctgatcatggacatcattatcccaattcctatgtttcttagccattatatcttctccaagggcttctttacggcgtgggtagtaatatcgtttctctgggtatttgccgcctttttcctctgtgggattttgccagtcgttgagacgaggcgattctgggggatgctgtttaagaggatgtttggaaagaaagtggtcttggatgcgcaagtgcagcagggacagagttctgaagacgacgcgcaacgcgagcgaaggactcaatagcctagcagctgccaatggcacataagatgtcttctgcaagatagtgtatttacagaatatgagtttatccccttgatagccccgccactggccgcaccatcgttgtttcgtggtacccagggacaacctcgtagctattcagggctctgcagccatgcttctcatacagcccgcgacccgccggtgacgccgaaatgaacgtaataagccgtctctcgtcagccctgtggagaccccatttcagcaatttggcccccagcccacgacgagcgaacgcagggtctaccgcgagcatgtaaagacctgtgattttatattagactgtccattcatccaattcatttatttcgaaggagtgggaaagacgtacaataatgaggttg

SEQ ID NO: 20525 - DNA, 1696 bp, Emericella nidulans
cgtcattcacctccatgtcctgcatggcgcctcggaatctgacaggacgacagccagcatcagtttcttctcctcagttcttgtggcgttgttctcggttttcctttaccagggctctccctggaggtattatctttatggattctttccgatatttttctgggaggaggtgttcgctcggagaaaggccttccacgcagggcgtgagatacttctgggtcatgtgcgctcagtgggagatcatttctcgtttggattccagctgctgctttatgttggtgtgttggaggcgctggtaagttgtcttctatctgaacgggaaacaatcacttactcatgattttataggtgcactcctacttccaaagagagatttacactgtctgttttattctcggagcattttggcctgtcttctatgggcttgacttcttacaaaagcatgcagcagtttgcggcacatgggctgttggctgccttctgatgagtacgtttactctgcttccagccaacaaggtcgaagatatcgacacaatgtaagtgtattttggtctgcgtagctggcacctgtctcacagaatattacagaacttatggtggggcgttcatgcttctcaccggcttgctatacctgctttttgaggacgaaattcttggcactagtcaccagcccgcagctgtgtcccgaaagggttcaaggaacatcatgggattgcaggtacgataacacgacggcctggaattaaggattgcgggggaaaggttgcaatgctgacgtctagtagcttggtatggtcctgctcgcactgatcgtaacaagatcaagtgcagcctcgctccaagcgaacgaaggtcttccattcggcaaccaggtagtcggatggggcgtcctcagtatgaaacccaatctatcccatatctctcatttcgtgacttgtcaactaaccgtgcttattagttgcttcacttttattgccgttcgcccaccgactatatcccaatagccactacttacatcggctaatgatcatcttcctgacattctcaccgacctttataatcctcaccatatcttacgaaggtttattctactttgcattctgcatgaccctggttacttgggtccggttggagcatgctacgtacgtctacaccgcgaaacctgtcgccaagcaggcgcaggagaccattgagccgcccaaaaaagcaaacccgggtgccacaacagttgtggatggcgaaacataccgcttccgcacactcaccgtttcagatgcacgcgtagctttgttctttttcttccttctgcaatcggcttttttcagcactggaaatatcgcctcgatctcctccttctctttggacagcgtgtaccgactcattccggtgttcaatccctttagccagggcgcgttattaatcctcaagctccttatcccgttcgctatcattagtgcgaacctgggcatcctcaaccgtcgcctggaagtggcacctagtgccatattcatggtggtgatggccatttccgatgtcatgactttgaactttttctacatggtccgggacgagggctcttggctcgacatcggaactaccatcagtcatttctgcattgctagtttcctgtgcacgtttgttgccggtcttgagttctcagcgaggtgttcatcagtggtgtggactttggactccg

SEQ ID NO: 20526 - DNA, 1698 bp, Emericella nidulans
tgttcggagcgcatgtctgttgatgggaagacggttgttcccgttgatgtagcgacgcttcgtggcgagttgcagaaggcttgggtcaaggagagaccagaggctgtagcgatctcgttgctgaattcgcacgcaaacagcgagcatgaagacgtggttgctggcgtggtccgcgaggtgctgggatctaatatcacaatcatctgctcgagcgatgttcttcgcgaggtcggtgaatacgaacgtaccgtgacgacttgcaccaatgcgctcatcaagcccgtggttcagacgtatctcagcaatttgcagaccctgctcgcagaagatggggacgtcattcgcattctcaagtcagacggcggactaacaagtctggatctcgcagggcagctgcccgtgaatatcctcatgtctggccctgctgggggcgtccagggcgtcgcagacgttgtaacgcgaaacactcaatatagaaatctaatcaccttcgacatgggtggaacctctacagacgtcgccttggtttaccagggcaagccccggctccgccgtgagacagtcgtaggcgatctaactgtccgctcgcccgctgtggatatacgaaccgttggagccggcggcggctcaatcgcgaagtatatgcacatctcagaaacactgcgcgtcggaccagaaagcgccggtgcaacgcccggccctgcgtcgtacaacaagggcggcactgaagcgacagtgaccgacgcgaatctcgtcctgggttacttgccggataccctgctgggaggagaattcacgctgaacgcgaaggctgcatgggcggctgtcgagcaaatcgcaaagcagatgaatctgcctgtgacgcagacagccgaggacataaataatctggtgaatgagaccatgtacggcgccctgcggctcgtctccgtagagcagggctatgaccctaaggactttgcgcttgttgcgtttggaggcgccgggcctctgcatgccaacgctgtcggcaagctgcttggtgcctggcctgtcattgtgcctccttttcctggcacgctctgcgccctgggcgatgcaactacaaggctgagccactcgcagtcctcgtcgtttatacgtcaactggcggcaacaacctcgcaggaggtgaaacgtcgctttgaggaactggaaatgttgtgcagagagactatgctgtcttcaaacgcaaaccaggaaatcccgcttgatatcacctaccacatcgatctgcgctacagcggtcaggctctgaatttgacagtcgagctggagcgagatgatctctcactggccgacgaggaatggaggaaggtcctgcagaccaaattcgaccagctccacgaccagcagttcaagtactgcctccccaatttcaagctggaattgatgcgtctcgaggtcgttgctgttgatgccaggcctcccatcgactaccctcatctcagcaaagctacgtcaagcaaaccaccggctgcggccctagtgtcgacgaagacgattattgtggaaggctgcgagattgaggcggcgctctgggaccgcgagaaagtgagccagcagggggtccgcctgaacgggccatgcatcatcactgaaacagacagcaacactctgattctgcctggctactacggagaaatcgactcaattggaaatatcctcattcaaccggtg

SEQ ID NO: 20527 - DNA, 1705 bp, Emericella nidulans
tcggttacaatcattctttttcatcctcttcggaaaaaatctgatttgccattgatcaatcccggaaaggggcgcatcggtatactacgagggtatcgctcacggaagacatttaccacagagctaccgagattagttgcagatgggctttccaaggtactcatctatcctccaaatagtagtaaccgctgagcccatagataggcgagtgcctttcggatcgcagccccagatggagtcaacatcgtacttgctccatcgtatgcacatgagatcgcggagcatcctgacttgaaccccggcccaatcgctggagacgagttcaattcccatattaatggattcgaggtgtttgcacaactgggaaccagtgatgtcatctctgagtctgtgaggacgagactgacccggcagctgagtaagtgttcgtcctagaatagcgtcacctcattgcttctcgccttcggatgaaccatattgatataccaaatctcttagcaaaattgacgccgcttctcactagcgagactccccttcttctacaatcccaatggaaagatgcaccaggtatctagtccatcagtagtccgcccgcttttgtcacacaacctctactgatacctcgcactagactgggtggaggtgagcccgcatgagacggctctgtttattctgtcgcggctctcttctctcgtcttcgttggcgatgacctcgggcgcaacccggattggatacgcatcctaacatcatacaacaccgaggcttttgcagcagccgaagagctcaacctctggcctcagatacttcgacccctcatcgcccgtctaaaaccatcgtgccgccagcttcgtcgatatatccgtgatgcacgtgcgcttcttgtcccagtccttgagcaacggcgccatgcccagagccagggtgatcgaagggagtataacgacgcgatagaatggctcgacgagacgtctcgcagtacaggtcaaccctatgatcctatattatcccaaatgctccttgccatcggctctttccatacctccagtgacctcctggggcaggtcctccttgacctctgcatgagaccagattggaaagttctggtcagggagcttcggaaagaaatcatatcctcgctacagggagaggggtgggataagatcgctttgaacaaccttaaactgatggacagtgtgctgaaagagtctcaacgtttaaagccagcctcaactggtaagcttcctctatcaccctcttttcacaagttgatcccctccttttctaacctggccatgcatacagtaacgatggggcgatacgcctcgcgcgagatcacactctcagacggaacaataatccccaaaggctcaacagtctttatcgccaacgtggccatgcgagactccaatatctaccccgaccctgatgatttcgttcctgaccgttttaccactcggcgtgaaaagggcgatagttccgcctacctggtttcggcttccccagaacatctaggctttggccttggtcgacacgcgtgccctggaagattctttgccgccaacgagctgaagattgtcttgtcccatatgcttatgaaatacgacattaaacttcctgataatggcgcggttgcacccagcaagtcggggatcttcttagccacgaatcccgatgctaggatctgtgtccgccgaaggaaggagg

SEQ ID NO: 20528 - DNA, 1709 bp, Emericella nidulans
ccattttactataccttccaggctaacaagtcccagtcagaattctaccccgtccagatgactgtctcaaaaggcgagcctcttccatcccttttctcgaccttggatgagagcttccacgccaatcttcgccgatccgtcaaccacgccttctcaatgtcctccctcgttcaatacgagccaatggtcaaccaaacagtcgagctctttttagatcaaacagcagctttattcgctaattctggcaagacatgcgattttgcacgctggctccagttttttgcgttcgacgtcatcggcagcattacgtatagcaaacggcacggttttatagagaagaacgaagacatcgacgggattctgaaatcactcgctcggatctttgactacgcaggccccgtcggtcaaatgccctggcttgataaatggctctggaagaatccgatttatgatgttttgcagagatgggggattgcggataactcgcaccctgtggctatatttgcgcgacagcgcatgaatgagcgtttgatggctgataatggcaccagaacagaggccgagcaacagcaagacctgctcacgaaatttatccaagccggcaaagaccgcccggacttcatgacggagaaacgcgttctcacaatggccgtctctatggcctttgccggctccgagacgacagctatcagtctcgccgctgttttctattacctgctcaagaatcccgagtacatggcgcgtctccgaggcgaactggacaacgccgtggctcacggaatagtggaaaaccggtcctcaggtttagttacctggtccgagtctcagaaactccccttccttgacgcctgcatcaaggaagccttccgtatccatccagctgcaggtctctccctcgaacgcgttgttcctgcttccggtattgatatcgccgggcattttatccctggaggtacaatagtagggtgcagtgcatgggtgttacacaggcgcgaagaaatcttcggacctgatgtcgatagcttcattccagatcggtggttgaacgtgagcgcggagaggttgaagacgatgaacggcacgatgctgcagtttggggctggggcgcggacgtgcattggaaagaatatatctctcatggaaatttataagctcgtgccgagctttttgaggaggtttgatgtgcgttctctcttccatttttttattacccctgaacatctaaagtggttatcgtgatgctgacattcattagatacaacttgcgcatgcggatcaagagtgggagttgtggaatgcttggtttgtgaggcagtataactttaagacgaagttcactgctaggaattttgaagtatagttattctgaatatatgtatatcaactgtatatggaattatggcgcgaagataacgaattatggctcatctgcatattatatgtagtatgcttgatcagacgaaccccaacatgcttacagatcccaaccacgtaggcaacatctgtttccgcaactaccatacaaagcatctttatagcgcgtcatatcccactcattgcatctcaggattattagcagaagacaacagcactaagtgaggtagatacgagcagtggcctgaagatgccactggtgcctcaggcctggaggacccacccatctcttcgccaccggattagcaatcctgagcatcttcaacttcctcaac

SEQ ID NO: 20529 - DNA, 1719 bp, Emericella nidulans
caaaaggaatcatcatcagcgccaaatgaaatttcttctgctagagatcagacagacactgtggagaaaaaaagggctactactaccagcccactccctccccttcctatcccagaactcagagccatcattaatagacatctctcctatctgcgagcctttgcaacggaccaagagttccaggaaacagttcgattcgcgtcagacttccagacgccaggtagtattggaagacgtctatacgaccgcttgcaagttatgaaggcagccaatccagatacatggtatcacgatttatacctccaaaaccaatacctcgttcgcaatggtcccctcgccccctatatgaccttcttcttcacgcacccggttaatatcggaagacactcgcaagcggaacgggcagccctcattgcgtcaacggttatccggtataagttttgcctggaaaacggccagatccaaccccgacttgtcaacgagcagccgcagtgcatggacctatacaagtatatgtttaatacggtccgtgagcccacgctgggtgtagatcttatgagtcggtatcccggaaacgattactttgtggtcttgcggcgtgggcatgtctacaaggtcgagtttgattcgtcagcacaacatgcccaatatgagaggctggagagaatcttccagaccatcctcgacacgcggatagacgaggtcgactggcttggagtcctaactacagcggatcgtatttcatgggcaaaggtatactttcttctcgcaccgattatttgtaaatgcaagacagctgataacgaaggcagactcggcatgaatttatgcaccttagtgaggagaacgcatcgtatattcgaaccatcgagcaatccgcgtttgttgtctgtttggacgatggctctcccgagacaccagaagagcgaggtcgccatttccatttcttagacggctccaatcgctggcatgacaaaccgattgagttcatcatcgcggccaacggggcctctggtgttctaggcgaccatactgggcttgatgcaggcactgtccatgagctgaacaccgagattgcggaggcaatccgtcgccaccaggacagacgaacgctgtctaacggaacttcttgcgaagttacggtacacccggttcgatattcagcaatctctcccggaatcgaggctcgtatacacgagacgcgctctatatatacggccgccatctccagccgagagcatcgatacacgacgtggaccgggtacggctcgtcgctgatgaaggcatataagatcccagccaacagtgcattccagcttgtggtccaactggcagggcgatactacttcggacagacctctccgtgctgggagacagtgctccagtccaacttccacacgggccgggtagaaattaaccaagtagtcacggcgcaggttgcggcgttcgtggacgccgctgcagaggccgttccactgtcggattgcagacagctactccttgaggcggctcgagcccattcgagcgctgtgctggcttgcacgcgagcgggcggatcggatcgatttctctccatgatgcgagaaattgttgaggccgacgagcaggagccggagccgtatcatgacccagtctataagagggcacggccgcggaagttcatcagcaattgctttacgacgggtatggctgaaaatggatgctgcttgcgagaagacg

SEQ ID NO: 20530 - DNA, 1726 bp, Emericella nidulans
tgcgggtttgcgagctgcttttttctggctgctggcacttgctgatgtctttctcgttctcgtcgcagttcgacggcttcattgttgcaaactttcttcttgcgctcggcgcacgttcttgttcgtcccgtctttccagatcgccaatgcgtttccgaaacacactggaacaattgtcgctcttgtgacgggcgcttttgacgcatctgccgcggtctatctgttctatagacttgtgttcgaagcgagcaatggcactttcaccccggacaaattcttcctcgcctataccattgttccggctttgatccttatcacttggatcgttttaatgccagcgcgcgattatcagacgacccaccagttagaggttcggattgagaaggcagaggatgcgacggggatgttcacgattcagacgacgagatcgacagtttgaccgagctccatcgagtacgaagcgagagggctgagcgccgtcgcttgaaaatccaagaattggatcaggttctgggagacgaagaagagcggaagcatcgcgagcagcaggaagaagagcgccagcagactagcgctgtctggggtgttcttcatggcttgcccgctcacaagcaaatggcgacgccctggttcatactcatcaccataatgacagtgttgcagatgctccggatgaactactttatcgccaccattcgtaaccagtacgaatatatgctcgacgaggagaaaggcatcgagatcaacaacttcttcgacgtcgccttacccgttggtggtgtcctttccaccccctttatcggactgctgctcgaccatctcagcgtcccatgtacactggccctgatagtttttctcaccacgctgattggcgccctcaattccatccctactctctggacgggctatttcaccgtcatcctcttcgtccttctccgcccgctgtactactccgccatgtcgtaagttcgccaagtcttctatgacatccagagaatactaacatctgcccttaccagcgactacgccaccaaggtctttggcttcgcgacgtttggccgcgtctacgggacaatcgtatgcctgtctggtctgattaacttctctcaaacaggtcttgacgccctaaccaatggcccatttgatggcaaccctatcccgataaatatcatcctcgcaggcgcaggatttattgtcggctctattctcgtggcttttgtggcgactgcaggacaccggcttaggaaacagcgggaagaagcggaggatggcgaacggcagaggctgattcctgtgcgggaggagagcccgcttagctacacgtaaatgaaggtgaagtcaagcatgagacgcgaacatggaaccgagggccctgagtacacccttcggcattacatggggtttagactggtgctggggtggtgggagtgtatattatttattgtcttattatatttccttagttcaaggataatataatatagccaccaggatcatccgaccgtccagtgacatccagctattatctcactgcccagtcccaactgcgaatgtcgaacacgaacgaacaacaggcccagccttcagctctggaagtcttgtccctaggatgatcgaaaccgattccaaagctgattggagcggcagttgatggttaaggttctcaagtcagctgtcatcctcgtgtatctcgctaagcaaagtcaaaccaggcatggtccttccc

SEQ ID NO: 20531 - DNA, 1735 bp, Emericella nidulans
cgacctccactgctgccaggtattcgatttcgcttgtggagatatatatcaatcgccagcagatgaaggctcgcattgaggagcggcgccaggagattagagctgctcgcgagcaggccctggcggagcacgcagcgacagaagatcaaaccgcaaaccttgatttacccgatgaaaacgacatcaatgagttggagctcgatatcccaggttgggaagaaaagggccgctgggtcttctatctagatctactcaccgacttccttaagctcaccgtttatctgactttcttcgctattctatttacgttttacggtttacccattcatattctccgggatgttgtggttacgattcgctcattcggacggcgaattatggactttgctcgataccgaaacgccacacgtgatatgaacgacagatatcctgacgcgagtgctgaggaggtcgcgagagaagaggtctgtatcatttgccgggaggagatgacccattggcaacccggagacagaccagtttctcgagtttcggaaaggttacgccccaagaaactcccgtgcggccacattttacatttctcttgccttcgaagctggcttgaaagacagcagaattgtcccacatgtagacgaccggtcattgcgcctccacgtaaccaaggacctgctggggtcaatatgggacaaggaaacggtggtgctggtcagcagcagaatatgcctcccggaaatcagccagtcaaccaaaaccccccagcagatggccttcctagggctcgaatttaccaattcggtccatttaggatcggatttggcgcgggaagaggggatctcttcaacaatctgcatcaacagattcatcagggcaacggtccttggcagccaggtatgaatcctaaccctgctggcgccagacaaattggctttgggttcggcttcggacggcctccgctgcaacaagcgcctgcaccggctgcaccagctgcaacccagccggtcccgacgcccacttcgaacctgcccaacctgcaaaaccaactcctgcagatggagcaacaaattgcgaacgagatcaatggcctgcgcatcgctgcggatcagctgaacctcgttagattactgcagacagagctccaacgccttcgtactttgcaatcgcaaccattaaacaaccagactaacattccgcaaaatccctctccatcaataccttcaatatcccctacaactacacgccctcgaattgtctctaacccggaaacggcgcctatgggagctggtgaccctcgtctaccagatggactgacacttccccaaggctggaccctggttcccctccactctgtacaaccaggactgagcgcatcctcgaatgttgccgcaaatgcttcttcatcggaggctgaacatagtgctccaccatctgaagggatgctcaactcccaggtacccactgacactgagagtcagagaccgagtgataggagcgatgccgccacctccgggagttcaggtttaccaaactggcagtcaagccccttctcgcactcagctgcagacagcaccggagctatttcccaacagtcagagaacctcagttcggaggctggactgagggcgcctctggctccctcgaagactgagcaagttgagactccactttccgagcacggcgcagagactaggattgaaacccagacttcggattcaagatccaaagggaaggagcgggt

SEQ ID NO: 20532 - DNA, 1749 bp, Emericella nidulans
aaattgattgtacagaggtccaggcttgtgcaaaaggaatcatcatcagcgccaaatgaaatttcttctgctagagatcagacagacactgtggagaaaaaaagggctactactaccagcccactccctccccttcctatcccagaactcagagccatcattaatagacatctctcctatctgcgagcctttgcaacggaccaagagttccaggaaacagttcgattcgcgtcagacttccagacgccaggtagtattggaagacgtctatacgaccgcttgcaagttatgaaggcagccaatccagatacatggtatcacgatttatacctccaaaaccaatacctcgttcgcaatggtcccctcgccccctatatgaccttcttcttcacgcacccggttaatatcggaagacactcgcaagcggaacgggcagccctcattgcgtcaacggttatccggtataagttttgcctggaaaacggccagatccaaccccgacttgtcaacgagcagccgcagtgcatggacctatacaagtatatgtttaatacggtccgtgagcccacgctgggtgtagatcttatgagtcggtatcccggaaacgattactttgtggtcttgcggcgtgggcatgtctacaaggtcgagtttgattcgtcagcacaacatgcccaatatgagaggctggagagaatcttccagaccatcctcgacacgcggatagacgaggtcgactggcttggagtcctaactacagcggatcgtatttcatgggcaaaggtatactttcttctcgcaccgattatttgtaaatgcaagacagctgataacgaaggcagactcggcatgaatttatgcaccttagtgaggagaacgcatcgtatattcgaaccatcgagcaatccgcgtttgttgtctgtttggacgatggctctcccgagacaccagaagagcgaggtcgccatttccatttcttagacggctccaatcgctggcatgacaaaccgattgagttcatcatcgcggccaacggggcctctggtgttctaggcgaccatactgggcttgatgcaggcactgtccatgagctgaacaccgagattgcggaggcaatccgtcgccaccaggacagacgaacgctgtctaacggaacttcttgcgaagttacggtacacccggttcgatattcagcaatctctcccggaatcgaggctcgtatacacgagacgcgctctatatatacggccgccatctccagccgagagcatcgatacacgacgtggaccgggtacggctcgtcgctgatgaaggcatataagatcccagccaacagtgcattccagcttgtggtccaactggcagggcgatactacttcggacagacctctccgtgctgggagacagtgctccagtccaacttccacacgggccgggtagaaattaaccaagtagtcacggcgcaggttgcggcgttcgtggacgccgctgcagaggccgttccactgtcggattgcagacagctactccttgaggcggctcgagcccattcgagcgctgtgctggcttgcacgcgagcgggcggatcggatcgatttctctccatgatgcgagaaattgttgaggccgacgagcaggagccggagccgtatcatgacccagtctataagagggcacggccgcggaagttcatcagcaattgctttacgacgggtatggctgaaaatggatgctgcttgcgagaagacg

SEQ ID NO: 20533 - DNA, 1775 bp, Emericella nidulans
tcggctaccccagacggttcccaatgtttcgacatttcaagggctggtctccttccgacctgtcggataacccgttgagcttgttcggaacgagagctataaagactgggccagctcttatcttcgtcccgcttgcctggctcacttagaactcggctttccagggaccctatttcgctgcattccaatccgtcgcacagaatggcaaccacctcggtggctgacgagaaagccatgtcgggccatcaagagaacctgaagccggtcgacgaccctacacaatttgcccaccgtggtcaagctgccacggatcagtacggccatgcgctcttcgaattcgataagaaggccgagtcgaggctgcgctggaagatggatttctatctcctccctactgtcgcgctcctctatctattctgcttcattgatcgtgcaaacatcggtacataggtcgctctgatatcaaattactggcccccgtgactgaccggatcctaggaaacgcccgcctcgcaggattcgatacagacctgggtctcaagggaaatgactataacaaggtcctatcgatattctacgtctcctacattctcttcgagattccatgcaacctttgctgcaagtggatggggccgggctatttccttcccctgagcacgctctgctttggagccgccagcgtggccacagcgttcgtctttcctgatatccctcgcgatgatggcgcgctgatcaattgatccgatacagcttcgttgacaacatccaagaggcctctggagtccgatttgtgctgggaattttcgaagcaggcatgctcccgggtatcgcgtactatctcagtcgatggtaccggcgcagcgagctggctttccgtcttgctctatatatcgtcatggcaccgctggccggagcttttggcggccttctcgcgtctgcgatcctgacgctggatcatttcggcagcctgcacacgtggaggatgatcttcgcaatcgagggaatcgtaacttgcgcgctcggcctgattgccttcctcacattgaccgatcggcccgagactgcgcgctggctcagccaagaagagaaggatctggcaattgcacgactcaagtccgaacgtgttgctactactgaggtaccctcccctgtacaggccggtgtccagcggagttccagctaactcggcacaggtcctcgacaagatcgacaccaagaaactgctccgcggcatcttcagccccgtgacgttgtccacatcgttcatcttcctcctcaacaacatcaccgtccagggtctcgccttcttcgcccccacaatcgtgcggacgatctacccggacgccagcgtggtcagccagcagctgcacaccgtgcccccttacgttgtcggcgccttctttaccctcctcttccccttcctcagctggcgcttcgacaaacgcatgcctttcttcatcgctggcccaccccttatgatgatcggctatatcatgttcctcgccagctccgacgcgatgacgcgctatggcgcaaccttcttgatcgccagcggagcgttcgcgttcggcgccctctgcaacgcgcacgtcagtaacaacgtcatctcagatacggcgcggtctgccgccatcgggacgaacgtcatgttcggcaacattggtgggttggtttcgacctggtcatttttgcagttcgatgggccggactaccatatcggaaatggcctgaatctggccacgtcgagcatgtgcttgatcctgagcgcgctgctc

SEQ ID NO: 20534 - DNA, 1777 bp, Emericella nidulans
aatgttgtccagtcagtttcatctaatatcgatgacaaaactatgcacgaactctacctttggccattccaagacgctgttctcgctggtgctactaatctgatgtgctcttataaccgtgtaaacaactcctacgcctgtcagaacagcaagctcctcaacggagtgttgaaaactgagctgggttttcaaggtattatcccctccatgcccaagacctctacccgggagctaaagtacccgctttaggttatgttgttaccgattggggtgctcagcatgcgggtattgccagtgccaacgctggactcgatgtagtgatgccccggtccagcacgtggaacagcaacctaaccactgccattgcgaatgggaccatggaagcctcgcggttagatgacatgattaccaggtatgggtatcaagtgggtactgatcagtgtatcctactaatctgacctaccagactgatggcgacgtggtattatctcgaccaggacacggaattcccatctcctggtgtgggcatgcccagcagcccgagcgcagcccaccaggccgtcattgccacctcgccagagcaaagcccatcctcctccagtcggccatcgagagccacgtgctggtgaagaataccgatggcgccctgcctctcaagtctcccaagctgatatccgtttttggctacgacgcatatgccccgttgacatatgatcttggtaacaatttcgattttagctccaccagagtcagatcagatctttacaagaacggaactctgtacgttggcggtggctcggggctcaactctccggcatatatcgatgctcctattgatgctatcaagcgtcgtgcttatgaggacggttcatctgtcctttgggacttcacctccgagaacccctcggtagactacacttcagacgtgtgccttgtcttcatcaatgcatacgccacggaaggttacgatcgtcaggctctgtccgacacccacagtgactcagttgttgaaaacattgcaggcaactgttcgaacactattgtagttgtccacaacgctggtatccgcaccgccgaggcatgggttgaccatgccaacgtcactgctattatctacgcccacctccctggccaagatattggtcgcgcattggtcaggcttctgtacggagagtccaacttctcagggcggttgccatacaccgtggccaagaatagctcagactatggttccctgttggagccatcgcaaccggaagggaaataccagtacttcccgcagtccgatttctccgaaggggtttatatagactatcgcgcgtttgacaaggacgggatcgtgccccaatacgcgttcggatacgggctttcctacaccacattcgagtactctgaccttaagatctcgaaaaactctgatggggtcccctcaatctacccagctaaggcatcaatactccctggtggaaacccacatctctttgacgaactggtgacagtgacagcaaagataaggaatactggcaatgtcgacggtcaggaagtcgcccagctgtatgtgggtattccagatggaccagtgcggcagttcgcggcttcgacaaggttctcatcgagtctggtagctctgcgaccgttactttcagcttgacccgccgggatttgagtacttggatgcaaacgcccaagaatggtccctccagcggggacatacaagatatttgttgggcgggatagccgtgacttacccctagaagaaacgctagttttctgatag

SEQ ID NO: 20535 - DNA, 1840 bp, Emericella nidulans
tcgtctcacgggcggcagtagcgggattgggcgacagatcgcgcaacttctcgggaaccgcggcatcaaggtcgcgatcctggacatccagcctccccaagacggacaagccaatctgccctcgactgtccgctaccacaaatgcgatatcacgtcgccttctgccatcgccgaagcagccgctgctatacgcacgacaatgggcgagcccacaatcctcataaacaacgcgggcattcttagcagccgcactatactgggcagcacggagtcgcagacccgtctgcagttcgaagtcaacacgctctcacactactggctcgctaaggagttcctccccggaatgattaagaataaccacggcatggtcgttaccgtcgcctcgcaggccggatacactgtcacgccgaacatggtcgactactcagcaactaaagcggccgcgatcgcattccatgaaggtctcggtgcagaactagtaacgcggtacaatgcgccgcgagtgcgcaccgtgctcatcacgcagagctttgttaacacaggactaattgataagttaactcctgaggatacgtggttgcatccgctattaaatccagagacggtcgcggagggcattgtggagcaggttctctccgggaagagtggccatgtcctgcttcccgggtcaacgggatggcttgcgaagtgctttagggggtttccgctttggtttcagcatgcgaaccgcattaagttggagaagttgatgagagctgattagggtggagtttgatgggttgggttctggtgtttatacataattcaactgcgtgattgtggtgtatttggtatagggctgtatatagtataccgtttgcggtctatactacccgtactttcttccttgtataggttaatagctatcacacctattgtgctgatgagcacgtgcatgtgtacttacgttgatatgtatatagttgcctgaggtatggagcagtaaccccacatttctcggtcatcttaaccacagatcagatcggacggaatgacccatgggggggtctttttaattcccccccatggggggtagattcggttgtccctctcaacgagaaaaccagatatcgctgctctccgtaggcttgcatccaggtacgaggcaagtaccctgctgtcagaccagccaccctgattacagcacgtgcgatttccccaccgcccagcctcaccgcatccttcctccaaatcctcagcttacctagtcaagccagaatttctccgatcgaaagcaggccataacaactcattatcatcgatcttgtccctttttcatcatatttccgaacaatactgcgtgctttatctatctccgcttaacattgattcagacagaccccctgccactccccatccttcgaatcttcgcgatctgcccgtccagttcctcgcgaccgtgcccaacccgatccaggcgctagatcactagtggccgattgtctggagcaaccaacccgcttggacgtccaccacagcagatccacggttcagctcttgtttaccgccgccaaaacataccgtactgcctctagcccagtccagcctcctcagcacctcacttttctcttattcccagcacattatatggtcatcttacgactatattcactgcactcataatctttttgtttcccatcgatttagattatcaagcccacatgattgtctaaccgccagagcgtgaatagctctctgcccagcatgttcaaggccctcatgggcgggggccgttcctcctctgacgtccgcagcagcaccagctcgagctcaaagagtggcagtcggcgcaagtccagcc

SEQ ID NO: 20536 - DNA, 1848 bp, Emericella nidulans
tcgtgaggaggagggcgaacatctacgtgctctattctggtatatctacggttctgacaaaaccttggccatccgctttagcataccacctctgttcaatgacgttgactgggacttacagccgccggacggctacgttgaatcctgctcagacgaccattttttcctgcggcccctgtccttcaaacctgtcatatacccgtccgatctccgtatgtcccttatcaagtccaaaatccacactctcctctactccaaccatagccgagctcagccggtagctataagactccagtgtattcgcgaactcgatgaagaactaagcgctctcaagtccagcttcccgaatagctgctggcctgatgtttttgcgacagggaatacacctgactatacttttcacgacttgagtctacgcggagttaaccttcacctcgattattactttcgcctgcgaagaatccatggagcaagcagtacacacatgtcttctccagaggcctggtccttcctaccttctagtgcggagctgttccaccaagagtcccggatcatactcctctatttatgccgtatacggcatgcccacaactggcatactttttggtgtgtgtggctatctgtttcttaacataagcagtttcttacagtttttaggattcatgctcagtatatactgaccgctgtggtctccctttttcgatatctcattgcgtctccaacggcgcagactttcaataccgacctccggctcttggaatctatagcagacctcttttccgaccttgatcgtaagtcccgggccacgcggcgctttgcgccatttttcttcacaacatgcttcacaagaaaactgatattacttgcaaagcaagcattaaaacaagtcatgactaggcaagagtactccttagggtgaccaccgtttgattacataaccccttaagaagcggcaacaccgaatcattccgttgctgtgccttgcctgcgagtagatgtttactaccaaccacatatattgtcataatattggaaactggctcgcataccacacctcatacgaagatgcgccggaaaactcgttttgtctgtgtctctgatactcatggctacacgccttcggaagcgggattcagactccccgcgggcgacgttttgatccacgcaggagatctcacaaatcagggtagcagttccgaacttcgcaagacgatgaactggattgcgactgcggattatgaaatcaagattgtcatttgtggttagtattttatccgtcgcccagcaaggttcatagacaacaatccgcttttataccgaaggccagcgactaagcggacgcaaacagggaaccacgacataaccctggacgctcccttctacagtcaaaatagcacaaaatttcacaataaacaccgccaagatccagaagaatgccttaaaacaatcaccaccgcctcctcatcgatcgtattcctccagcaccagtcagcactagtgcggctccgcaaggcgtggtggtccaaacacagtctttaaggtctttggctccccgtattcacagagcgacggtgagtgggcgttcttatacgagcctgacggggctgaggagctatggcgcgatattccactggacgcagatgtcgtcgtcacgcatacgccgcctcgttttgcttgcgattatgacaatgtctctactagttctgaggcggataaacgtatgggatgtccagctttgggggagaggctgcgaattgttagaccgtgtcttgctgtttgtggacatgttcacgagggacgaggctataaacgggtccattggggggcatctacggccgcatctgcaac

SEQ ID NO: 20537 - DNA, 1861 bp, Emericella nidulans
aaaaccaaatgcagtggtgacacaccgatttgcagacagtgtctggagctcagggtcgaatgtcgatacccggtttcgtggcgtgaacggacgaaagggtaggcctagtctaccctacatattgtgcgtggatagctgatttctggttcgatacagacaaatatctaagctctcggccaagtcggatgactatgaaaagttgctccgggagatcagccaaatcgtgaacggccgagcggcggagcgaatcagatacaccctcgacaaagtgcgtgttaacttctacctgagaggcttagtctgccgctgacgtcgcgagcagtactcagaatctggagctgaacagcataatgatcaaccgtccgccaactctgaccctgcctccggcatcgatgaagggattgacccagaggtggaaagcctaccctcctctattgggtcattagacgccattgaccgtgtggatgaggacctcaaccgcagcccgaacgcccaagctacgggatacatgggaaagaattcggaggtcacttggctgcaacgcttgggaagagaagcagataatcgcgctcgcaatttatcagggttggctgagccaaggccggatcgtgagctgtccatccattctgtaaattatcatttagacgacgtggatatcacgcccccagggccagtccacctttattggatgcctccacggaatattgcagataagctgtttgaggactacctggatacagttcatcctgttttcccaatcatcagccggtcgctcttctcagcacagtacaggaatttctttgataactcagcgcgaccaggtgataaatggctggccattctgaacctaatattcgccatatcttccagtcatgctcaccttatgcaggcatcttggcgcggtgttggccgtgatcattttgtctacctggcccgggcccggcgtctcagtatgaacagtgacacccttttcagtcatcctgatcttcagcaagtgcaagtggaagcactaacggctttttacttacttgcaactaatcagattaaccggtaggttttacactctcgtgctccacaaatagtttcagtcatttgacaaagcatcagagcatggagaattgcgtcattggctcttcgatccggcatatctcttggtttgaacttgagaaatactagcgaagtcacgcctgacacgtctaaggaggctcggtatagagtctggtggtgtctttacacgcttgaacacatgttagggacaatgaccggacgcgtgacaggtatctcggacggtgtatgcaccactccgatgccgcttcctgtggacgaggaccggttcaatgatccagccgcggcagagctgctaagtagtttggagcttcgtcaagagcgcgtcgagttagctctcgcgagctgctatgtccgacagatgccacagaacgtacgacgtaatcgagagccgaacgatgcaggcaaaagtgccgacgttgcgaggctgcaaagcttaccccccagtacggctctcttctttctttactacgttgatctcgccgtcatcagccaggagatctttaaccgcatttattctctggattgcattctgacaccttggggagagatcgaggatcgcatgactgagctttgatcacggattgagtactggctttcgaatcttcctgaagcatacgactggactcgaggcaaccagcagaatctagaattgctacgtggcagtctttgccttgcttttctctattatagtgtgcgcatcacactagggcgcccctgcttgtgccgtcgcgatgttcgatcatccgaatctccgggtgaaagtacagccttcagccacgctatatcggtgtcg

SEQ ID NO: 20538 - DNA, 1862 bp, Emericella nidulans
cgcccttaccgcgaggttagcattccacgaaatatccaaaactcgttctgggtatatccaagattcatcgaaacgtaaaaacaacgttttggactacctcatcgaaacactcggtcagcatcatgatcttgtgacagagcgaaagaaccacggggacacgagcctgcgctcaccgagcaccccggcgatcatcaccgagtggctacgtacccttttcatgaaaagttgggatgggaatcctgaaatatcgagaagcagttcacaagggggtgtcgtacagattctgtcggtacttcataaagagcggacccgccttggccttgcgtcggaggatttctatacaccttttctttctgaacgcctggatcctctcgaaatgcctgtgcaatggttggcaagagtgcctaataataagacactccatctgttgtcttactcgtttttattcccgccctccgccctagtcatatacttccgtgctcttaactattcagccatgtcaaaatattatgaagcagccttgacaaccacgaaacatgtgtatcagactgcctttggtgctatggatatccaggatgatgttggccttattcctagattgcgaacctcaatgaccacctattttgtccttgttatccggcgagataacatactcacagacgccttgaaccagctttggcggcgggaaagacgtgagcttatgcggcccctgaaggtccaaatgggcatggatgaaggggaggaggggctcgatcacggcggcgtacaacaagaattcttccggttgttgatggcggaggctcttgatccatcatacggcatgttcacaacggatagtcgcacgcggtgctcatggtttcaaccttgctcatgggagccgctctacaagtttgaaattcttgggttattgatgtcactcgcagtttacaatggcctgaccctccctgtgaatttcccattagcattttataggaagctactgggattgaaggtcaagcacttggaccatattcgcgacgggtggccggagctgacccgtggtttggaagagctactacgttggaatgaaggcgatgtcgcagatattttcatgaggacgtatgagttcggtttcgaggcctttggcgcgttgagacggttgatatggaaaaggtcgatagagatgcaccgtggccgaactcactgcctccacagtccggccgctctgtgcgatactctccgtcgtggtccgatgtcggccgttataccgacctagcaagtctaagcccgccctcatccatggctgctgaaacggccgattcacaagatgataccgccaaatcagctataagcctgccccctttgccctcgcctacttccccagccgaggaagcctctttggtgaccaacgaaaatcgtggccaattcgtcaaggactacattttctggctgaccgacaagtctattcgcccccaatttgaagcctttgcacagggcttctatacctgcctcgaccgaacatctctgtctatcttcacacccgaagcgctgaagactgtggttgaaggcatccaggaaattgacattgcagaactggaacgtcacgcgcgctatgagggcggcttcggtgcgggccaccgggttatccaggacttttggagtatcgcgcatcaattctccgccgagaagaaggcgcagctgctggagtttgtcacagcgagcgaccgagtgccggtcaatgggatttcgagcattatgtttgttatccaaaaaaatggcgtgggtgatgctgtaagtttgactgatccaaattgaatgggcttgactaataatgaggttcagcgccttccaaaccagtttgacctgctttggacgactcctgc

SEQ ID NO: 20539 - DNA, 1863 bp, Emericella nidulans
aagtaagtagacagcgtatgcgaattccagggtatgctgaccatataggatcaaacactagtaccccgggcgttcgacaggatgcagtggctcctgactggtctgttgccgaagcacaagaatttataccccagggctttgacccaactcacatggtatgtttttttgtattagctatctcagtcgcactttcctcgtgaggattttgcattttttttccccaatccgaatagccaaatgtcctcggcttctggtgaatacatttattcactacataatctacgttgccagtggagcctttggcgcaatcaaagactttacggtatcgatgcctctggaggtaattcgctaacaggttattcagtcacctcttcacggcaatggcaaccctggcgtggcctcggccaatgcctttgatcctttcgtttctactccgaatcctcttgctgcaccaggtgctgttggtcctgtccaggccaaccccttctctcacgatgccgcagctgctaccctcggtggggcctactacgccaatcaggccgggtttcaacagccagtgagtcgtttcaacatgtaccgcgatcggactaatgccctcttgctctaggttcaatatcacttatacgcacccattggcccgcacaatcagaacgcactggcgtaccagcgcaacgtccacgatctattcctcccaaatgactttagagaagagctacaaaagaaagcggctgccacgctacagacattacccagtatgtagcaggaacgttgccggaaaatacacgcactgatgtgatatagatactcaattacctgcccaggtggactacttccactccctcgtacctcttgatcttaaccaccagaaaaatgcggccatcttcggctatccgagttgggtctacaaggcacagtccaccaaagacgggagctattacgcgcttcggcggttagaaggtaacatcttcattctcaatcttaccttctgatcgcacgttgttgattggccctaggttttcgattaacaaatgaaaaggctatccgctctgtccaggcctggaaacgtatagctagtggtagtatggtgacaatccacgacgcattcacgagccgaagtttccaggacagctcattgattttcgtcactgattaccacccactctcaaaaacgctcgccgaacaacatttgagtgctggtggcccaaggtttctagcccgccacaatgctcacgttcccgaacagatcctttggggttacattacccagattgccaacgctttgaaatgcatacatagtgctggtttggcagcaaggattatcgaccccagtaaaatcttgcttacggaaagaaatcgcatacggctcaatgcctgtgctattatggacgtggtgcagtacgatgctcagagatctgtcgccgatcttcagcgacaagacctagtgaatttcgggcaactcattcttaccttgggtgccaatcaaccgaacgtcatacacaatccttcgaaggccatggaacacttcactcgcgcgtacagtccgcagctcaagaacacagtgatgtggctgcttggcggaatgcagaaggatcaagagcgaaatattgacatattaataaacggcatttcttcacagttgatgtcgacttttgactcggctcttcatttggatgaccaactcacgtcagatttgggccgggaactcgagaacgggcgtcttgtccggcttttgacaaaactgaatttcatcaatgagcgcccagagcatgaacatgaccggcagtggtctgagaacggggagcggttttacctgaagatattccgggattacgtttttcatcaagtggacgcctcgggagaccc

SEQ ID NO: 20540 - DNA, 1863 bp, Emericella nidulans; identical to SEQ ID NO: 20539

SEQ ID NO: 20541 - DNA, 1895 bp, Emericella nidulans
  unsure (1)..(1895): unsure at all n locations
gtgggggcggggttgatctgcatccgcttactccggcaacgctgacagtatcagacacacccagagcttgtgcttacccaagcctgcttataaaatacaacttggtacccatattangcatacaggatcgataaatcaatatacttccccagaatgcacctcctcgctttcctccttcgggggaccttttaaaatataggggggtgtctgactacccttctttacacaatctacagaacacgcaccctctactccatccctggcccgttctgggcccgcttcacgcgcctctggtattttcgccggttatggaatggccacttcgaagaagacaatgtcaaccttcataagcagtacggccctgttgtccgcattgcgccagaccactacagtatcaacgaccacgccgcactgaagacgatctacggttccggtaccaagtttgcaaagtcagcatggtatgaaggctggaagcatcctgatccgcagcgctggacgctgtttccggatagagatatcaagagacatggtatgcttattttgttgtcttgtgctgattgattgctttggatgtctggtggaacgggcgtgctgatgtactcgtcgcggcaggcgagacgagaaagaggttctcgagtctctactcgatgagctcgctagtgcactacgaggagttcgtggaccagtgtgcggatgtcttcttcgaccggctgggcgagtttgcggaccgagacgtcaagttcaatctgggagagtggtttcagttctatgcgtttgacgttattggagagattacttacggagagcgtttcggttggttaccttctatcattgctactatatatggatatatgctgacagatagttaggctttctcgacaagggccaagatattgacggaaccatcggcgccctgcagaaccttatggcctacagctcgctgatcggcatctaccatgagtggcatccgttgctgttcgggccgctcagcagattcagctggtctggcgcaggcggccgcgcatatataatgcggtatgtccagcagaagatcgcccggcacagtttgcagaaaccacagagcgacgtcgagcacggtcccctgaagacccaaacgttccttgagaaaatgatcctggcaagagacaaagaccctgagaaggtgacggactaccacgttttcatgatgggtctgtcaaatgttatcgctggctcggatacaacagctataagtctttcctccatcatgtactaccttctccgcaatccggatgttctagacaagcttcgaaacgaaatcgatgagtttacagtacaaggcaaatgcagcgaccgcgtgacgttcaaagaaagccaggagatgccgtacttccaggctgtcatgaaagaggcgctccgaatgcacagcgcaactgggctgcccttttggcgtgtcgttccagccggtggcgcggagatcgcaggatatttcttcccagaagggacagtcgtgggggttaacgcatgggtaccgcattatgatgacaccgtgtttgaggatgcagaggccttccagccagagaggtggattgaggctcaaaaggaagatccagagaagtggaaggtcatgaatgacatgtatatgccggtatgctgccataaactccttcagacggtaagcaagtatcaaggactaacctactggacagttcggcctcggctctcggacatgcatagggaagcacatctccattctggagatgtcaaagctcatcccgcgcattctacgggagtttgatttcacgactggggaaaagaaatggaatacggcgaatcactggtttgtcaaaccgactgactttgaggtcaaagtgagacggagggagcaaactactgtaaaacctgagggcatataa

SEQ ID NO: 20542 - DNA, 1909 bp, Emericella nidulans
gggggcccctcaggactgggagagggcagctagctatctggaccgggcagccaaagtgcccccagaagtggttcagggcgcctttgcggcagaaatggttcctacggcggaggttccggacccgccgagcgtgacgctagacaatgcggctgagtcgttgtgcgggctgtttctgcgcgagtttgataaggccgttaaagagagcaatggagctaagattacgcgattcttcaaactgtttccgttgatcgggcgctccgaggtcgggctggatgtctacgggcgatatgtctgtcaaggcgtggcagcaaaagcgcggtcgaacctaaatacgggaactgggcaacaggacggttttttctacgccaacacgctcactaagctgtttgagcatatcgcgcagattatcgacggtcatggagggcttgttgagcgccactacggccctcgaaaaatgaatagggtgattgagcgcctgcagctagaggcagatgtccaaggcgggattgtcgtcgacacatggagcgacgagcggcatatcgaccgcaaactgatggatatcaagtcatacgcctttacctttctggttcagagcttccttcctccacagcgcaccgcaacgccacatgcgaattccccggccactcaacagagcgcggcggaggacgaaggggtagacatgaaagagatagatgggttattgaatgagatgaccgtcatgctaagtcgatggtcactttacacccgcttcctagcagagacatgcaatgtatgctttgtccaacatgtatagaagcacgagactaatgttattgcaggccaacgaggagcaaaagtttgaactgccccagttcctcaaggaatccgcgctttccaagaagatcgaggaccgggttatatccccgtttaataccatgacaaccttcttcttccgacggtcggttgagaaagcgttccagctagatgagcagccgacgggcttgactttgaacctccagcggccattgaaagcagatccaccacacataacgtccgcagttgacgatattatgtatatcgtaaacaaggtcctgcagcaatccctctcaacttcacaaattgctgtcgtcaccagcgtcgtccctaccttatcgcgtgtgctcggttcgactttattgggatgactcaacgcaagatgcgcgacgaatgctatccacgagccccccaccagggcgcctctccaccagagcatatcgtcatctccttcctagtcctgataaataacctcgatgtcgcagtggactatatccggcgcattgtccaaaacattaccgagaccaagaaaacaatcaccaacccagacgggcaggtcgaagaaactggccaactacacacgctcttcccatccccagcagatgcaaccctcgtatctcagaccctcacctcgctccttaccagctttgaagcgaaagttaccgaccttctcgcagacggcatacaagtcgttttcaacaacatcatcaaacaccgcctccgccccatcctctccgacgctttccgcgacatcgaataccaacctgcctctgactccaccccgctaacaacttaccactctgacctagactcctactctgatactgactcgatcccacatgacaatgaccccgaatcgccccgcgaaatcgtccggccccgtttcagcgccgcctggactgagctgctaggtcccatcttgcgcatcctcaaccccgccgcgttcgatcgcctcttaacagtaacaactgcctatctagcccggctcttggaaaagcgcctatgggcctaccacggccgcatcaatgccctcggcgcaacgcgtctggagcgcgacgttgcgggcatcgttagcgccgctgtcagtgttgatgtcctggttctgcgggggtaagcg

SEQ ID NO: 20543 - DNA, 1913 bp, Emericella nidulans
tcatcgctccctttgcatatcttctcagctcagttgtacaacagcgacttccaataggaattttctttcgcatcgttaccgggtctgccaggttagtactgtatttcgttgacttcgcggtagctttcttcagattccaactaaagtagtctcgtcgatcctccacgaatcccatccctgattggcggggcattatgtgtgcctgggagccttacatcaacttgtcccgcatcttgatcgcggtcagggcccaaacaaagtcggtcttcttttccttcaactccgtccctccggggtaaatagacttcgctacattagcttccagcatgtcttctgacagagccgatggctcatccgtgacatactcttctaatcgtagcggcaatcccgacctccgccttatccactacaatgacgtctatcatgttgagtacgctacgtgcctaatctttcctccttcttgctctcttgtcgtcacatattctttgaacttgggctaattgagcatgtaataccatagaccaggttctgctgaaccagtaggcggcgcccctcgatttcagtccgtaatcaaccactatcgatcacatcctagcttcgacggacaacctacccctctcaccttcttctccggcgacgcattcaatcccagtctagagagcacggtcacaaaaagggagcacatggtgccttttctgaacaaagctgggaccaatgtagcttgtgtaggggtgagtgcgttgttgcgccccagctcgacgaagcctcggcggataatctgacaatcaacagaaccatgatctcgatttcggtgtcgcgcagttccgccatttgcgcaatcaatgccagttcccttggctcttagccaatgtcttagacccagcattgggtgaagatgtgccgattgccaattgcgagaaaacttgcatgctaacgtcctcaaacggaatcaaagtgggagtgatcggccttggggagcgtgaatggtacgccggacacttaaacagcatgtcctagaagctaacttgttgtgtctcttaggctaggaacaatcaactcccttcctcccgatcttatctataagtccgcttcgaagaccgcgatcgagctcgtcccatctctacgggagcaaggggcagagctgatcgttgccgttacgcaccagcgtgaaccgaatgactataagctagctgaaagcataccctacggcatgatagatatcatattaggcggacatgatcatttctacggacatgcattcctcaatggcgtccatatcctccgctctggtacggatttcaaacagttgagctatattgaagcatttcggaaaacggacggcagaggatgggacttcaacattgttcgacgagacatggtccgatctatacctgaagatccatcgagcatggcactcgtgtctaagctcacttcgagtcttaaggccaaattggataagcccatcggttatactgttcgcccgcttgatgggcgcttttccactgtccgtgctggggaatccaacttgggtaactttgcctgcgatcttatgcgtttctattatcgcgccgattgcgctatgatggctggtggcaccatccgtggcgaccaaatataccctccgggcgtcctccgcctccgcgacatcctaaactgcttcccatttgaagaccctgtggtcctacttcgtctaaagggcaaggcccttttagatgctttagagaatggtgtcagccagcttcctgctcttgaaggccgcttcacgcaggtgtccaacatcacgttcagcttcaatccatctgcgcctcccggctcgcgcatcaactgggccaagataggcggaaaggaaatccagttcgaagagagctatacactagccacgcgaggttatatggcacgaggcaaggacggat

SEQ ID NO: 20544 - DNA, 1926 bp, Emericella nidulans
cggttcgctcctcgagccacctgtttcgtatctatccggcaatgcgacattgccgcaaatgccgtgggattcgttggtttcgccgaccgaatcgaaacatcacctgtctccgtttgtatcccaggatgctgcttcagagtctcacggactcatggaccgtcatgtgaccgactcgatggcgccgtcgctgcactcgctggtcaactctttgccagtttcaggcaattccactccgaacgcgttgtctccatacccatcaatgactgggcctgtcagccccgttaactacaggcgatccccgggtcccagccaggctctgactctgccgaaggcacctcaaattgccaacgatctagagcgcaaccagattgtggaacgcattcgtcttgctgactcgcttggtgtgcttcctgagtcgttccaactcccaacgacagccgctttgaacaagtatttgactacctatttcaacttgtatcatcaccaccttcccttcctgcatcaggagtcgttcaaacccactacggcctcatcgcctcttttgctagcagtcctctccattggagctctttacacattcgagcggcagcatgcattcatgcttcatgttggttctaaaatgcttgtcaaccagttccttcaacacaaggacaactttgactcgagaaagtgtcctttgtgggcgatgcagagcactctgttgaacatgatctttgagagctggagtggtgacccgaagggtctagaatggacttgctcaatcaagagtcttcttgccaatgtaagtcaaaaaatttgattccgtttatataacctgcttacaattttcttagatggtcgccgggaaccgataccagctcaagctccgcactgaagctcgtgaaggacggcaaccaaccagggaggagtggattgaggatgaatcttgccgccgtacttactacgctgtttacattttcttcggcatgcttaccttgaccttcaaccacactcccgcaatgagctttgatgaatttgataacctggagctgccctcgtctgaatccatgtggaatctagacgtcaatgatgatgaggcatggcgccgaaacttggcttcatctacgacaatgactgttcgcgaggcccatgactgcctctttcaaggcgatcaaacccggtacagcgcgttcgcaacccgtgtcctcatcaacgccctgtttctgcaggtgtggaaccacaagagaagtttcgaagctcttcaggatgtggtcacagaatacaagctccgcctcgcactggagacttgggagaactcgctggaggtttgcgagccggaaacaattgtcgttcctctcagcactcctcaaaacggacatccactcatctttaactcgatggctgtttaccgcaacactcgtgcccgccttgaggttgacctgaagtccatccaggaagctctgcgctatcactcttcctacgaagttgcggctgcgatgaccgtcgcccgcgagaaggtcaagcgatcgcaagagatgaacaaggttattcagtcgtgctttgagtgcattgagattgccgccatggggggaatggactgggttgccaaaacttcggccaccaactggagtgtcgaacacccgctctgcgggttggatctgatggtaattctcagcctctggctttatcgcctggaacatgacgaggagcctgcctccgaggcagaaatggccatttacaacaaggtccggaatttgtttgacgatgatgctgtcgactcgtgtggtaaactcagctccaccgttgcccgtgtatggggtaacatcctagacggtgtggtggtttgggggtaagttggcattcaagtttcttaaagtcctagactaactcgctacagaattaccaagcttatgggcgagtcattcaaacttcactcccaggctttgg

SEQ ID NO: 20545 - DNA, 1930 bp, Emericella nidulans
ggtggcgagctgagcaatctatcaaagaggaaaaggagcgtgcaaagcacgggggacgccggccatccgaccgtgtgaagggagaacgtgaggcgcgggaagaccgtgacagggaaagagcccagatacaggcggcttacgatacctacaaggtggatcttcaggtcaaaatggccagagcattcgttcagcaacataagaacgatgaatggttcaaagagcgctacatcccggagatacgggaccctcttcgtcgaaacctgatggaattcagagtgggcgcttatcagcagtgggagcgggatctcgatgggggtttgtttgacgaatttactctggagggcatctacaaaagcgaaagtgacggcgcgggcggcgtgattgagaaagaggaaggcgagacgacagctgttggggagacccttggtgttctagacttgcttcctgccagagcggagatctgcgtgacgaagctttatcacaacccgccttgctcatcaagacgctggcaccaaacgtcagccgtcagaagatcgaggagttctgcaaggaacatcttggagaacaggatggagggtttagatggctcagtttaagtgatccgaacccgtcaaagaagtaccataggatgggatggattatgctacatcctgcccccgaggttgcggtcgtcgaaagaggtgatggacgcgaagaagagggcgagatggaccaggacaatgttgccaatggatcgggagctgccaccgttgctgaaaaggcacttgaggcgactaacgacaagacaattcatgacccagttcatggagattttgtatgccatgttggtgttcacgcgccgccagctcaacttcgaaagaaagccctatgggatcttttctcttcacctgaccggattgagcgcgatctggagttggctaggagattagtcgggaagcttgactctgaaatgggacacggcgctgatggttacgccaaggtcgaagaacgtgttgaagaacttcgcggaaagggctggttgcaaccaccggttactggacccgttagtgttaagagaaggaaatccaacttcgacgctgacgatgttgatgagggtgaggctgaagaaggggaagagcaggaagactgggcagacgatgaggtcgatgatgaggagctcctggcgaagaagaagaaattggatctgatggtagaataccttcgtcgagtgtataacttctgcttcttctgcgttttcgagtccgactcgctccacgagctaacgcgcaagtgtcctggtggacatctccgtcggccacgaagtggtcttaccacccaggccaaagccgttgctaaagccagtgccctcgggcaacctttccccgtcaagaggaaagaccccagcgaggaaggcgaggagcaagcaccctctagtgagaaggagagacgctcccagagatacagttcgaagtcggagcagcaactgcagcgtgcgtttaactgggtaaagacatttgaggacaagattcttcagattctcgaaccagagaatgtggacattgtcaaactcggtggcaagcccgttgacgaagccttggaagaggaactggccaaacatgtcaagcaggaggatgagtcaaagttccggtgcaaggtgccagaatgcacgaaattgttcaaggcagaacatttctggcgtaaacatgttgagaagagacactcggagtggtatgaacgtatcaaaaatgatgtaagttgagattgctctgagcggtgacaatgtatgctaatttacccactacagctcaccctcgtgaacgcctatgtgcttgaccctgctcgcattgcgccttcgcggtccgacgccaatagcaacggccacttccctctcagctccggtcagaaccaggctggcaccctcgtggtttcagtctggcagcaatgccccctt

SEQ ID NO: 20546 - DNA, 1940 bp, Emericella nidulans
atatcttcagtcctttctcacaggaacaggtcctgacagaaggcgtgggattgggactgtgcattgcccataaactggtaacttaccttggcggacagattgacatcagcagtgagttgggtgtaggcacgcaagcttgcattcggatcccaatcaggtttgcagatgaagagcaggtagttggcaattttggtccgaatgacgatggaacttgctgtgcgaagaaagtttgtctcgtggacctgaatccagtccttccggaagaccagcaacttcttctccccgaagccaagcgaaaaattgcagtccgagacgcactgtgcagtgcgctctcaactagagatgattgggaattgctgtttgctgacgatatggacgacgcctcgggcgatatcgtagttttggaacagtcgaagctggaaaaactcgctatccccgggccgttgaaaaccacattccggtctgtcgtcgtgctcagaaaccacaatgtatctgctttcgaagacttgaaattggatggtgtagtcaatattgcttacatctcccaaccgtacgtacttcgcgctgtgatttagtaaactttttctggggctgatactactcagactcggtccacgcaaaatcacccaggcattgaaacagattgcagaacctgacgggcttaactcgcgttctttacgaaatgaccaaagtcgcgagcactcaataacaatcccccccgctcccagtctcgactccccacctgctgtcaggaacagtgtatcttatttttcagccgcggaagcaggcccactacagggcggactgcacgttttgatcgtggatgataacgacatcaacctcaaggtacaccctaatgtgcctaggtgcaaggttcatgttaacaatggcttaggttttgtctacattcatgtcgaaaattggatgctcctacgacaccgcttcaaatggactagttgccgtagagaagtaccgacaaacgcagcaaaagttcgactacgttttgatgggtaaatatgcactagccaaatattccttcaaggttaacgtttcttagatatatcgatgccgattatggatggaatcacggcatcaaggacgatccgcgagtacgaagatgagagtctgttggagcggtgtaccatcatggctgtcacgggcgtggcatcgagcgatatgcagcagcaagcttttgcggccgggatggacgattacctggtgaagccattgtcacttcatgatttgaagcggatactgggcgtgaactgagagtaccattcttatggtgctttcggttttctgcatttcgagaccagcgcaatattacagtagtgcaaagggttctacttttgagcgtcttggatgacgtttcaaatcagatatacccatttagcacagtaatgaaccactcttcccgccaagtctttaggccgaggcttgtattcttgcatccagcgcagtttacccgctatgccgccccaatggctaaacttgcccctgaaagagtgttgacaaatttaccagcagacgaaataaacggtcaaaatccacttgatcggtcatgaatcaagtgggcctgcttcgatggcactgaagggctgtatttccggaactccacggatatacggctttgacttatgtccgttcgctataacaccggttcatatacgcaataaggaacaatgaaaatttgactgtgggatatatagcatgaagcttgccatggtaatgtccctcactcatggaacaccaatggcctatcaagatgaagtggtcaatgttggcagcagggtgtgagacactctccattacggcatcctcttcttcgtccgaaatgatcgaccttgagcaaggcggctctgggatcttaaagagactaacgctcacattccgtgaccttactgtcaatgtcactgcggcggatgctgcgctcggtcaga

SEQ ID NO: 20547 - DNA, 1960 bp, Emericella nidulans
tcggagtattcaagaacattgagcacatgtgttcaaggactcgaagcaagacctggggcaaagatgcctggaagaagattgtggtctgcgtcattagcgacggtcgtgctaagattaacccgcgaacgcgcgcggtcttggctggtctgggatgttatcaggatggcatcgcgaagcagcaggtcaacgggaaagacgttacagcgcatatctacgagtacacaacccaagttggcatggagttaaaagggaatcaggtccatctcaagcctcgctcgggagtgccggtgcagatgattttctgcctcaaggaaaaaaaccagaaaaagattaactcacatcgctggttcttccaggcttttggccgtgtacttgaccccaacatctgtgtcctactcgatgctggcacgcagcctggtaaggattcgatctatcgtttgtggaaggctttcgatgttgagccgatgtgtggaggtgcttgtggtgagatcaaggtcatgttagaccatgggaagaagttgttcaatccactggtcgctgggcagaacttcgagtacaagctcagcaacatcctggataagcctttggaatcggcttttggattcatttctgtgcttccgggtgccttctccgcctaccgctatattgcactacagaacgataagaacggccaaggtccgctggagcggtacttcctcggtgagaagatgcacggcgccaatgcaggcatatttactgccaacatgtatttggccgaggaccgaatcctatgtttcgaaatcgttactaaacgcaattgccgctggctacttcaatatgtcaaatcctcaactggtgaaactgatgtgccggatcagatggcggagttcatcctccagcgtcgtcgatggctgaatggtagtttctttgcggccgtctatgccattacacacttctatcagctttggcgcagcgaccacagcttcattcgaaagttcatgttgttgatcgagacgatatatcagacgattaacatgctgttcgcttggtttggcattgtaagtcctctctttggatacattggagcctactaattgctatagggtaacttcttcttggttttccatatcctcacaacgtatcttggcgatgcagacctcctaggaactgctggtaaggtcttgggagtagttttcgaatggctctacctcgcaaccctggtgacctgcttcgttctatccctgggtaatcgtcctggcggctccaacaaactatacatgacgatggtgtatttctgggttttcatcatgatctacctcgcgttcgctgcggtcttcgtgacggtgcggtccattcaagaagaagttaaggatggctcgtttaccttttcgacgcttttcaccaatagcactttcttctctataattgtctcgctgggctcgacgtacgtcatgtggttcatcgcatcgattattttcatggacccatggcacatgtttacatgcgtaagtctcgacttgtgatgttcttcaatatggttctgacatttgcagttcattcaatacatccttctaacccctacctatatcaacgtcctgaacatctacgctttctgcaacacgcacgacataacatggggtacgaagggtgatgacaaagccgagaaactaccatcagcaaatctcaagcccggtggtaaagtcgacgtcaacattcctcaggatgacggtgatcttaatgcccagtatgaggcggagctcatgaaattcgctcagaaaccacccaaggaaatcaaaaccatttctgaggaggaacgtcaggccgactactacaaggggttccggtcctccgtcgttctcgtctgggtattttgcaattttgctctgggcgctgttgtcctcagctcggccggactggatcgcttcagtgatgacgccgaggccgcggagacagataggaacaatcgggccatgatttacat

SEQ ID NO: 20548 - DNA, 1966 bp, Emericella nidulans
ggcaatgtccgaaaagggcagacaatcctcattcatgaagcgacaagctccattggtttagccgctattattctgtgtcaaatgcttggtctcgagatatattgcactgtcaccagccctaatcaagcggaacacatcaccaccgctttcaacattgcttccagccacatatttgcctttggcgatgcgtcttttcaatctaacttgatggctgcgactagaaaccgaggtgtggacaacgtactcctcaacttgccgtcggtggatgtgttgcaggcctcgtggaaatgcgtggcctcacgaggaaaggtaaggacttgcatctgttctccgcaatggacgtccgattgatggctaatcattgtctagctaatcacactagcaaagccggggctttatgatcgtgcagagttggatttggaccttttgaagggcaataggagcttcgttgtggttgacattacctcccttcacgacgtatatcaagagtatgcgcccagttccccttccatcccacggaaacgccacttttgtgtagctctaatatcctcgctaggctcctcgatgagacaatccatctctatactcacggccatatcaaacctattacgccaaactccattgtcggtgccgaccaacttcaggatttacttgcagttgtgaaccaaagcaagtcattaggcacgactgtggttgtagtcccagatgcagccaacgcactcccagtacacacagcccaccctgagcttaagctgcgaccagatagagcataccttctagtgggaggtttaggcggactcggccaatccgtctcaacgtatctggtcgaacgcggcgcccggcatctcgtctatctgtctcggaatgcgggtgcgcacgaacgccaccgacaatttattcaggagcttgaaagccaagggtgttctgtacaggcagttcaaggggatgttgccaaactggcggacgtgaaaacagcagtggaagcggctagccagccaattgccggtgtgctgcaaatggccatggttctgaatgatcgcccttttctgagtatgtttcacgacgactggtgcactgcaattcggcccaaagtcgacgggacatacaacctgcacaaagcgctgctggatgcagatacaacccttgacttcttcgtggttttcggatccgtctctggcgcattcgggatcgcccaccaggccaattacgcggcagcaaatacattccaagattcatttgtgcagtaccgccacgcgcatggccttcctgcatctattttgaacatcggtgccatggcgaatgtcggctacgtgagcgaaaatcacgccgtcgaggaattcttccgcgctgccggcatgccgtttctatccgagggagacttctttgaagcactccaccattcgatccgtcaccaatttactgctgctcctttggcgcagtcaaggtcatcagctacggcgcacggtcgaggcgcaggtgcgaccaacgttgcccagctcgccctaggcattcggtctaccaaaccgatggatgatcccagcaaccgcgtgctctggaaacatgaccggcgagtggacatataccggaacattgaagccgcacggctgcaggacagcacggatggcagggacgggggcgaggaagacaaactcgctgcgttcatgactgagctgcggtccagcccgtccgtgctggatcgagcggacaccttggccttccttacgcatgagattggcgtcaagatctacgagtttatgttgcagccggtggaagagcttgacgtaaccaaaggcttggtcacccttggcgtggactccctggttatcgttgagattaggaactggctgcggcgcaaattggaagtcgaaaccagtacactggagatattgaatggcggcactatcgagactttgggacagatctgtttccatagattgcgcggaaaatatggaggatcggctccggg

SEQ ID NO: 20549 - DNA, 1988 bp, Emericella nidulans
tggcctgaccactcgcgatctacgggtgtttgatctcccttccgctggatttccgcatgtcctggttcgggaacatgcgattttggtccacttgtttgatctgcggctgctgattgagtgtgaccatgtcttgcttttccatctggctagtaaatctgttgaggctgggagtgcgagttccaacagtaatggcgacgacgatgaaagtgattttggcattggtagcagtgtctcacaggttttcagtcacaacctcgagcgaaagcttctaggtagcgccaacagtacaacccagccttacgaactacgggttctcgaagcagcgcttgcctcagcgacgtctgtcctcgaagcggagtacagccttaccgcagacgaagttcccaactcctccggaagacacaccaggacgcgcccttcatatcagacaaggaaaaggaatacgagtcgcttatccacgcccttcttcgcctttctcgtcatcttgcaagtattgatcaagccgctcggcaggttcgcacactgacttccgaggtcctcgccgaggatgaagatatggcgaatatgtacctcaccgataaagctcagggaaagccacatcttccgtccgaccaccaggacgtcgagtacctttttgaagcgtactttaaggcctccgacaccattgtgcaggaggccacacgtatgatgggcaatatcacacgcacggaagagacgatccgcgctgcgttaagcgtgcggcgtaaccagatcatggttctcgaggcgcggattgagatcttgaatgttgcgcttgcaggcgggacgctggtggcaggatggtatggtatgaatgttgttaatgggagcgaggaaagcagtacggccttcggggcgattgttgtgggcagtctgatgggcgttggcctcatcacctggggtgggctacggcggctgaagaggattaataaaatacgggtttaatctaatgtgctgataatgggggtgtgagtggacttggaattgaactgagcccgtatgtctcaattatagtaatacctaggctattgattatcgcgtttactcgtcctgcgacccggcctgctgaagaggttttgttgcatattcatattatatttctttcatttgccagcttgtggtttatcctcatcccaagaagccagatggcatcaataaccaagtgatctaaacatgaatgaagcagtatttccataaattctacggaaatgggatggtcacagatgctgcctttgcccagagcgtataaatggacctcaattcacctagggctgtggagctttctagttttgttagttcagatcttcttagatggtcccatatcgtagttcccaaggatattctggtctgccagccacgagtcgtgttcctcagcatcacggttaccgtacgagccaaaattataccatggcagagccatgcttttgaaagagcggctcgccgtctctggaatactgaccatacccacatgtcgcccacaatagtgacactagacaccagaacgtgcctttctggccaataaccccattttccacagggagagcatattcgatacttctctcatcgcgtccctcacaggccttaggtttttatagtttggtagacctcgacttggagagctctacattgacacaaacaatcactacgctttttcttctttatcagtttataagacataactattctcgccttataggtagcattcaaatattttgagttttctggtaataggagactttataagaacagttcagtgttctcgtaactgtaaaaccaacccctttcccataaccagtcttccaaggcgcattgtgctaccacgccaatagcttttcattccgtgcacaaaaaacctgtttgccatgactgcaaaggttcctgtaacacgtaaggcctgttgccgggtctcgatcgagtcacattgccgtgtcgtgtagactgttattgttcccacgacagcacagtggtga

SEQ ID NO: 20550 - DNA, 1989 bp, Emericella nidulans
tggctgaacacgaggaactcagcgagttgattgccgcagctgctgtcaaggttgtagaacaattccgcccgtgggtctctgctgtcgagtcgataaatctgggacctttggggaccagtttccaaaatccccagctcatcgatttcagctcacagaagcaacgagtttatgatgccatagctgactttgtcgtcagctgccaggcggtttcggcaccgcttggtgatgaatgggcagaacttcgcggtgactcgcttgaggatcgcttgaatgctgttcggggtgttgcccgacaacttgagaattatgtttctcagattgggttctctctctcgcttctccttgaacaggtgcccgaaacacctactctacgtagcgaaagtcgcattggcggtgatagtgatggctatatgggcctgcacagtcgctccgagtctcgttcgaccgaggtcggtgtgccatcagcacatccgttggacgggtctcccgagaaaatgcgtcgtaatatggacaaagctcagaggtttttcggacaagctcctcccgccgccattacaagagaacccattcgagaaatagcccgtgaacctgaagagacaccgtggtttttgaagatggatcatgaaggcgaagtgttctacgatactaagaatgacgtgccgactctgaagtgcggtacactggcagggttggtagagcacttgacccgtcatgacaagcccgatatgtctttcaatagcaccttcctcctcacttaccgttcctttacgaccgcatcggagctttttgagatgatcatgcaacggttcaacattcagcctccttttggcttgaacgccgatgagatgcaaatgtgggtggacaggaagcaaaagccgattcggttccgcgtggtcaatatcctgaagacctggttcgaaaactactggatggagccaaatgacgagtcgcacatgcagctcctctagcgtgcgcattccttcaccaaagattcaattgcaactacgaagacgcctggttcaactcagcttctggcagttattgagcagcgtctgaggggccaggatactaccgttaagcgactggtgcccacgcaagcaacgcccgccccgacgccaatcattcccaagaacatgaagaagctgaagttcttggatattgactgtacagagttcgcccgtcaactgaccatcattgaatcacgcctttactccaagatcaaacccacggagtgtctaaataagacatggcagaagaaagttggccctgacgaaccggaacccgctgcaaatgtgaaggccctgattctgcactcaaaccagctgaccaactgggttgctgaaatgattctcaaccaaagcgatgtgaagaagcgagtggttgtcattaaacattttgtgaatgttgcggatgtatgtgttcctgaccatctttgcgaaaccgtactaactcatactagaaatgtcgggccttgaacaactattccacactgacttcgattatttcggcccttgggacagctcccattcatcgactttctcgtacatgggctcaggtcagtgggcgcacatctgccatcctagagcagatgcgcagacttatggcgagtacgaagaactttggtgaataccgggaagcgctccatcttgccaatccgccttgcattcccttttttggtatgcaatctagaccctatcttttttttttaagcctttggaatccgctgtagttcacaaataatctaactttggcaggtgtgtatctcacggacctgacattcatcgaggatggtataccatctcttacgccctccgaattgatcaatttcaacaaacgaaccaaaacggcggaggttattcgtgacatccaacaataccagaattcgccctaccttttgacccctgtcaccgaattacaggagtacattctcagtaacttacaaggggcgggcgatgtgcacgacatgtacgatcgaagcctggaagtgga

SEQ ID NO: 20551 - DNA, 2004 bp, Emericella nidulans
cggagaccgggactctgaaaacttcgccccttttctggttaatgatgtatacatcgtcgttgctgcaggagtcacattctactgcgcctcactcatcatctaccggctttatttccacccactggctggttatccaggccccaagcttgcggctgcgacgcgatggtatgagttctactatgatgtgatccggcagggcaagtatgtttacgaggtgaaccagatgcatgataaatacgttatgtcttgaacctacccatagtcaatcgtcaatatcaactaagtcgtaggccccattgtccggatcaacccgcacgagatcgtgattaaagacccagagttctataaccagatatacgtggctggaaatacgcgccgcacggagaaatgggcgccatcaaatatcggcgttgatggcaagtattaccttttctatggagtaggtatcaaagccaactgcagctaacaagccaggctcgattgtgatgaccgtgggccacgaactgcacaggctgcgtcgtaagcctctagatcccttcttctctcgtatggagattgaccggctcgagccgctgatcgtcaaagaagccaaattgctcaaccaccggctgcagagctacagcggatcagggcgcgtcctccgacttgccgatgtcttctctgcctttgcggttgacatgatcactcatatctgctcggaggcaggaccggtgatgatgaacaagccggagtttggaaaagactggtctgtctgcagcatgccctagcggaatgcgatggctagcaagtgtctaggaatcaactcctcctggcaggaatccaccgacttcctctcctcatgcatttccctattccgatattgtttgtgaccctatagccctgagcattacaacgactaagaacaggataaaccagccttgctcaactgatacccatcacactcctccgcatattcccggtactggcctcgtacagactcgcgcacgaggtacatctccttctctatgacgttccaaaaagccatcctaacatgtcaataattaaaccagcttgctacaagacacatcaacgacgcaaagagatagagcctcagtcttgacgctagaaaggtccaacaagaaaccaagaattctcttttccgccaactcctttccccttccagcgctggcgggctgcctgagtctgaacttgacgctgagcgcctcgccagcgagaccatggtgctgtttggtgcaggcactgtcacagtcacgagcacgctcagccttatctgctattatattctacgtgatagccatataagagaccggcgagccggggagctggagggtgtcatggcccagtatcctactagtatgcctacttggcaacagctcgagagactgccttatctgcacgcccttgttcaagaagggctgaggtacgttccctgcctactttcgactcaaactgtgcagtcaagtaacggcagtctaaactggaatagactcagctacggcactatgcgccgtctcccccgcgctttccagacgcggccctgcactacaaacaatggaccatcccgcctgaacccccgtgggcatggctgcatacagcctgcacactgaccctgaggtctacccagatccgttcgagttcttgaattttccgcacgctaacgcccagaacaaaacgcagcctggcgtatgcggaggtgtactgggctctggcggttatgttcaagtcgaatgcaccgaagctacagttgtttgagactgaaaagatggatgtagagcatgtggtggactccatggttgccttgcttaggttgggcagccaagagactaggattacagtttgctagtatcacataatgagtgtatctagagttatagtagcaccggttaactggtagattgagaactatcataacagacggtgacgggaagctgcgactttgctattaagtactcatagctcatgactagtgtccaaccctattgagcagaaatccacgagcaccgc

SEQ ID NO: 20552 - DNA, 2012 bp, Emericella nidulans
ccctccgacaggggattccatcctttatgcgggtgttgtccacagtacccctctcgagtttgaagtccggtcggtccctactcaatggcttttgctggtcatggctggcaagggaaacggggagcagtggagggtaggccagttcaggcaaggcaagaaagggtctgggtggcgggatattttagattttcagctataaggctgacggggctatgagggaggaatggctgcgacaagttcatgtccaaagacttgcaaagattcaatatgctgttgctgtactgttctcgctttcatctctgcgtccttgcagctctcatttgtctcgccattgtgagcgcacagcaagactactcttgctctcctgtcagaccatgcaaactaggatgctgcgggaagaacaatgtgagttggtcgtctatgagggtccaacttggctcacaaggaacaggtctgcggtatggggccctcctactgcgccagcgagaactgtacctcgacctgcgacgcaaagagcgagtgtgacccaggctggggctcgcaatggagtcagcggcaaagctgcccgctcaacgtctgctgctccaagtatggtttctgcggcacaaccgaggagttctgtggcgatgaaaaggtcaccaagccgagttgtcccggggggacgagcgcaagcaaaaaggtcattgggtattatgaggggtggtcgacaagtaagaagtgtaatgggcgtaagtctttccactttctgtctgtgtatgtgggggaaaacacatgagtgagccctttctgacatctcagtcaatccggaggacttgttgatgggggcgtacacgcatctcaattacgcgtttgcatttattgacccagagagctataagattgccaatatgcaggactctgacgaggagtatatgccgcgcctgacggcactgaagaactataaccccagtcttgaagtttgggtaggtcagacgcagctgctcatcgcgagatagatattaacaagctcatgatagattgccataggtggctggagcatgaacgaccccgatcaacccacgaggcggaccttctccgagctggcggcatccaagtctcaccaagatgtattcttcgagtctctcctctccttcatggacaagtatggctttgacggggtagacattgactgggagtatccgtaagcgaccgtgcgtttcagtacagaagcatagattgactggagagaagtgtagcagaagagcgctccggcgcccccgaggactttgaaaactatgtatccttcctcaagaatctccgggctgtgttgggaaaccgagggctcaccatcaccctccccgcctcgttctggtacctgcagcactttgacatcaagaacatggagcccattctcgactggttcaacatcatgagctacgacttgcacggcacctgggatggcacaaacccttatctgggcccatacattaattcacatacgaacctcaccgagatcgacctcgccatggagctcctttggagaaacgacatagaccccaaaaaggtcgtcatgggaatgggcttctacggccgcagtttcactctctcagacccagcatgtaacactccaggctgcggcttctcagcaggtggcaacccgggtaagtgctcggcgtcggcagggagcttgatgttctctgagattcaggagattatcgatgcgggcggcgccaaagtgacgaacgacgagaaggctggcgtgcagatggtgacctgggacacaaaccagtgggtatcgtacgacgatgacgagactctcaaagctaagatggagtacgccaacgagctctgcctgggcggagtgatggtctgggcagcctcgacagacgaccacaaaggcaccgccattcgagccctagccaaggccgcggggcgcaccgacctgactgtccctgtgctcgcggcaaaggccaacaacgacccaagccagtgcgtctggggcgagtgcggcgctgactgcccttcagggttga

SEQ ID NO: 20553 - DNA, 2025 bp, Emericella nidulans
tcccccaaccaggtcggtcacatccacccaaaaccctggtagcacgctaaactttacaggcggggttgaaagtcacatttaccaactgtccaccgtaagaattctttaaaaagccttggatcgatcagtcaatactcatattatactagaaactcattgaccggggacataaagtcatcatcattacccatgcctataagggtcgcacgggtgtccgttacctgaccaacggcctcaaagtttatcatgttccatttttagtcatataccgagagacgacgatgcccactgttttctcctttttccccatctttcggaacatcgttatccgggagcagattcaaattgtccatgggcatcagagtttgagtagcttctgccacgaggctatactgcacgcccggacaatgggcctacggactgcatttactgatcattcgttgtttggcttcgccgacgccgggtccattctgaccaacaaattgctgaagtttacccttagtgatgttgaccatgttatatgtgtcagccatacttggtgagtctgctgtgcaagcttctcagttcagtcatcttaatgttgcctgcagcaaggagaataccgttctccgggcctcgttggacccattaatggtctccgttatccccaacgctgttgtcgcggaaaatttccggccactgcatgctacggcccgggcgaatgagcggcagtctggcgggggatcacagatacagcctcctcccaggcctattggaccgaacgacatcattaccattgttgtgatatcgcgtctcttctacaataagggcactgatctcctaatagctgccattccaagaattcttgcatcccatccgaacgtacggttcatcattgcgggctcaggtcccaaggccatcgacctggagcagatgctggaacggaatgttctccaagacaaagtagaaatgcttggggctatacgacatgaagaagttcgggatgtcatggtcagaggtcacatttatctgcatcctagtttgactgaggcctttggaacggtcattgtagaagccgctagctgtgggctatacgtggtgtgcactcgtgtcggtggcattcccgaggtgcttccccagcacatgacaacctttgcaaaaccggaagaggacgacattgtgctagctaccagcaaagcaatcagtgcattgcgatccaacaaggtccggacggaacgattccatgatcaggtaaaggtcatgtattcatggacggatgtagcgcgtcgaacagagcgggtatacaagggcatatctggggacatcagcccacaagagttctatgggtactacccgggagagatccaggaagccggcgatagagttcgcaattttgccttgattgaccgattgaagcggtattatggctgtggagtctgggccggaaagctgttctgcctctgcgtcgtgattgactttctactctacacgttccttgaaatgtggtttccacgagcaaatattgacatcgcgcgacgtggccaaagaagctgaacggaattgacggggatactgcgacgccgaaaaagagcgctccggttgaattcttgttttcccattttacatttgttttcctacagtccggtcacgatgatacccattataattgtttcacgttattgtacattctggtgctaataccacaaaattacatgcaaaaacttctgattcattcttttaaggacgagaaccctccgcatgacttccctctgcagcggtaggcttcttcgagaggtactgatccgtcctagttccaaagtcatcgcgcactcccttcatagccccctcaagtccccgaccagggttcttattcgtatgctgcccatcatggcgcagctcagcgctactctgtccagaaccagggtgtcccgcaccctggtgtacgtctttcgaagtcgcgcccattagagtcgactctgcagaagtcctcacttcctccttgccgtgactccgcaggacattgggattcatggcctgctcaccgct

SEQ ID NO: 20554 - DNA, 2029 bp, Emericella nidulans
tgccacccaaccctcccctatcaggcgcagggcgccgcaatggcagtagaggacggattcgcaatcgccaagctgctcggactttcaaacgctcatcttgcaaccatcgcagacgagccttcaaaatacatccctgaactgctcaagatttacgaggatatccgaaaagcccgcaccacgcgcaccgtgcaagcagccgtcaacaacagaaaagtcttccacattcctgatgggatcgtccgggcagtacgggactttgttctggggtatgctggagtgacgagcaagagtgattggacgtggttgttctcgagcaggatgaggcggatgctggtgcatgatctagatggggaatgcgaaagagaattcgacaagtttgtatcaacaagacgctgatcgtggtgatctgtctcatgggcagcagacttcttctgtattcgaggttgaaggttgaaacaggttccatgaccagggagtggtctatctattctcccgcactttgagcagaatgtctcttacatcgcgggtagtgaattcgcccatatctcataaagcgaagcagaccaggtagttgagcaagtaacgaatataatgatcagcgtctgtatcggctcggccttggactgctgaccttcgccatcgagctcggctgcagtagatatcaagatcgtcccctacattgcagccgctttgcactgaatgagttgcgatacccagcgcggcatacggcatccacgcgccgcattgcgtgcggttcatcactggagtagaagtatgacagtcgactgtgcgtagattgcgcaatacatctcaccaatccaacagttactccataggcaaaggctgtactcgatgcgtctcgcgaatcgtcgatagaaatggcgcgacaggtgggcgtcctatcgccgaaagccgatgcgtcggcgattacgagatctatacagcatatcatctataaaagccggaccatgtccagctcaaccaaaagcttaacatcttctcatgaagtaaaaaaagaaagacattatgaccatctcagttgaatctacatccaacggcagcgccaaggccgcctcccactctcgtctctactcctccggctcgctagacggcttcaaatccaccgtcctcaccccagtcattggaaacgagttccctaagggctccataaacattgtcaacgacatcctcaacgccccaaatgccgaggagcggatccgcgatctcgctattctgagtaatatcccgctcctccgccgcgaatgccactaaccacccatgcagttgccgaacgcggcgtcgtcttcttccgcgcccaggacaatttaacgaatgagctccagaagaaactgattctcagacttggcgagctcactggccgttcaaaggaacacggcctgcacatccacccggtggtcaacgatgcgcgggaattcggggaccccgatccccagatcagcacgatcaacagtctggaacggaagaagctgtacaagggggcctacggcaacctcgctgccatctggcacagcgacatcagcttcgagaaggcgccgagtgacttctctgcgctgcgattgaccctgcttccaccgacgggtggagataccctctgggcgagcggatacgagctgtacgatcgaatcagcaagccgtaccgggcgttcctcgagacgcttactgccagacactcaggagatgggttccatcgtgcggcgcaggccggagggttcggcctatatgagaaacctcgaggatcgccgttgaatgtggggagtgagttgacgagtgaccatccggtcgtgcggacgaatccgattactgggtggaagagtatctttccggttggtgagtggcatccgccctaattacctatttccactgggaacggttggggcctaggtaggaacggagctgatcgctgcgacaggaacgttccccaagaaagtcaacggcctgagtacccgcgagagcgagaacctattgaaatacttccacgacttgattacctacggccatgacctgcagg

SEQ ID NO: 20555 - DNA, 2030 bp, Emericella nidulans
tgttgatctctcaaaagtatgctcaagggtgtgtggtagtgaagaaggtgaagtcacccgcatagtggccgtccgcgagacgctcgttcattcgcgcagaggaattgagagtgcacggagaggtgaatggcgcggatctgctctccgggcggaggtctggtccgatgacttttaggcttgggtgtggaggtaatggtgggaagtaggtgtcggcaattccgttgttggagagatcgcgcctctcatcggccattgctccgtagaaagaattgggggaatgcgggggtgaccagaaagatgaccagaaagatgggaccagagattgtacctggggctgctgcttgggcattcctagggctgcctgggccgtcaaagagatggtaagagtataaaatttgggaatatcaggaagacatgagccttctctttgatcagaagggtaattggacaaccacatcggtgctatgccctgttatcgtgcttgagcgcgtcgcagcgtgggtggtgcgaacagttgtcctatgaaacgataaaaaaatcaaataaaatcaaacaaaggtcaattaaaaaagattagattaattgttaattgagattaatcttaaagcataagaatagtaagaaataataatcacaaataaaaatttgcgctgtcttatatttcctgagtttcaataggatcacagcaagtcagcctataaccgcagaattttactagattgacggccctgtgaaggatgactggtgttgatgggaatcgactatttctttgggctggccaacaaaaggtacagatactggtggttttggacttttctgtcacccagtaatcaatcgtctctggaataaacagcgtgaaccgcaaagagactgtatgcccgcaaataagtggcttacaccctgcgctctgcaatgcaagatttcagtagcaagggtctagatgttagaggcgcagcgggcccagcactcaatgttggatactagattgtcccggctggagaatgacagaattaccttgcaaattcttctagtcaaggtagacgcgagtcctgcctttcatgtggccgaggttttagatgctcatgcgcaccgactcgtgatgataggccaaagtccccagaccgagggctgcgtctatatgatacttgacgatatatatctgccaaatctcgacttcgcaaggtagtaccaactcctgatgaggtgctacggtttgtgcgccttccatgtatctcgtctgtatgtcaccaaagtatgctgtggagttactgcgctacagctgtaatcaactggcaaggaagaccctcgctgtaaaagcgcgggcaagaccgtatattagcaacgacgaaacatcaaagcgttaaggacggcgtcaatcccaaagtcagccagttcgatgcctcgcctaagaacacccgccgcgccttggacgactgcatcgcccagcccaagggccgcaagaagagttgacatattgagttggggtgctgcaatctaacgtccggctcgagctcacccttggcatgatcgacaaggattatgtgcaggcgggtaagatcagggtaattgcgctgtccgaggtgcgcgccaattcgtctacgaggccgtcaagtataccaagctcactgccgtcgaggccgagctttctatgtaggtttctcttcttcgaaatttcattctcgtccatttgtccgcgattgattccagtggctcaggtttacccccgatatcctggataatggtgttgcagccgcttgcgcgcagtacaggatcccaaccgtcgcctactcgcccatcggacgaggtacgttgacgggccagctgaaacactttgacctgcctatggactcggtactggtacagttttattttccgcgctttcagcaggtgaacttgaaagaacctcggcttttgagcaacgtcgaggagattgccgcgcgcaaaggctgcaccccccgcagctggccatcaattggacaatcacactgttgcggcggctgaaaacgagaactgtcccaatcaccagattg

SEQ ID NO: 20556 - DNA, 2030 bp, Emericella nidulans
gctctcacgatcacctcgttgctatccgcgctggaagcctccgtcatttcgacagccgtgccaccatcgttcgtggcctgaactcggcgatgcctaggtgtgatctccaatgcatatatgctcaccatggccgccttccaaccgctttacggccggatggccaatatcttcggccgccgtagcctgaccatcctcgcagtagtcctgttcggcgttggctcagccgtctctgagccaagagcacagcggcactcatcgcgggccgcactattcaaggcatcggcggcggcggcatcaatgtcctggtcgataccatcatctgcgacctcctcccgctgcacgagcggcccaaatgcatgggtgtcatcttttcggtgtttgctgtcgccctctcgctgggccctgttattggcggtctcatgacccaacgtgttacctggcgttggatcttctatctcaacctgcccatctgcggcgctgcgctgctcctcatcatcccccttctcaaagtcaactacaagaaagtctccatccgcaacatcgtccgccgccaactttctaggcaacgctctcctggtcgcctccgtactcttcatccttctagcgctaacctggggcggcaccgtgcacgcctagtcctcatggcggaccctcgtgcccttgatcctggggctcttcggactcatcgctttccttgcccctgaagcctcgactctgctgccaaccgacgaaccgaccatgccgctccgcctcttcggctaccgcacctccctcggcgcctttggcttagcattcatccacgccttactcacctactggatcacttacttcctcccggtctacttccaagcggtggaggaagcctccccaatcccctgcgtaaacctcctccccagcgctgtggcaagcatcccatttgctatcctcaccggcagtagcctttcaactttgaaccgctatcggccttttcatttcgccggctttgcccctttagttattgcgtttagcctgttcaccctccttgacaattcctccacaggcagctgggtgggttatcaatcctcggcgccgccggcgttggcaccctcttaaccaccacactgcctgccctgcaagcacccctcccagagaccgatgtcgccgtcgcgaccgccacctgggccttcctgcgcagtctcagtagcatctggggcgttgcaatcccctccgctgtgtttaacagtcaggttaatcacttcctcccgagccgtctgggccaagagcctttgttgcaggcccggttggccgacggcggtgcgtacgagcttgctacgaacgagttcatggcttccctgaatgaccggtctcatgttaaggctgtcgtgatgggcgtatacgttgatagtctgcgtatagtgtggtatgttagcttcgcatttgctattctgggctttttggtcgcatttgtcttgaaggaggttccaatgcgggagagcctggagacggagtttggattacaggagaagaagacgaaggatgagttggggtaaggaagtccgttagactaattgctctacgccgtcgttaagtctacagtagctgcttgtggatcggcctcttacgcagatagactatctgatgccgcttacatagctcagtgggtaatcatctcactaacactgatatcactcttatcagttgacttcctcatttgccttgcttctccaagctatagacctttgctctcgcggtatactcttataggattatactttcaacaattcaacggctacttccagtgctgccgggcaaggaggccaccaacactatttgcgaattctattgattctgtctaggttctttaatgtccggtgtcaggataggctacatctttgccgtctttctcactgcctttgtggcccttctttggtcgctcaccttaggttcatcttccgtctcacaaattcgaattttctgattcagagtcactctgcaaagacaccagtatctacagctttctgctagctcttaaggggctcttcaagacgcgc

SEQ ID NO: 20557 - DNA, 2053 bp, Emericella nidulans
cgacgccgtcaaacgccatatccaggacttctcgcaggactctgagctcgagtaccactgggttacgcggcccgccagtcccctgctcaacgatgcggcgcttgtgagtatctcgcgcgttaccacgagcatgacctgggcatgctctatactttcatcctctgggccgtcatctgcggcctgctcttcctcttcgtccttggacgaaccctgttccctctgacgcgggcctctgcccctgtcgacagaacgcatttcgcagactcacagtcctgccagaatgataaagcgcttcttgaagactcgcggccgcgccagaacgctccttaccggtttggtaccgccatcaagagcatgacgcggcggtacctgctcccagagagcggttgcgccttcgtgtttggccacacgacgcggctgcagctccttatcctcgccatcctgattggctacctgacggtcttcacttttgtcggcatcacctacaagacatggatgagccccgtcaagggcatgcccggcgtgtataacacccgcaccgggctcgggccctggtcggaccgcatcggcgtgctcgccttcgcgctcacgccgctcgccgtcatgctctccagccgagagtccctgctctcgctcatcactgggatcccctaccaccattttatgttcttacaccgctggctcggctatatcatctacatccagtcgacgctccacacgatcggctggacgatcatcgagggcaagctctaccagccgcagccgtcggcgtggaacacctgggttgcgcagacgtacattatctggggcattgtggcgatgatcttgctctcagtcatggtcgcccttagcaccccgtgggggatccggctgaccgggtacgaagtcttccgcaaactgcactatgttctggcgatggtctacataggcgcgtgctggggccactgggcgcagctctactgctggatgatcgcctcgctggtcgtctggttcctcgaccgcggtatcaggctagcgcgcacattcacgatgcaccacttcaacacgccaaacaccagccacgggttcggcatgcacgttcccaatgcgcgcatgacggtcttccagcgcgcgcgcgacggcgacatcgtccgcctcgagctcgagcacaaccacgacgagtggcagatcggtcagcatttctttctctgctttcccgctctgagcgtctggcagagtcatccgatgacgcccgccagtgtgcccgggacgaacccgcggggccagattcatacctatatcatccgcgcccggagcgggattaccaagcggctcgcccagctggcgcagacagctcaagcaacctcggtggtcttgaacggaccgtacggccagtcgattgtggacgaggacttttaccgtgacgacgaaatcaacgtcttctgtgttgcaggcggaaccggcgtgacctttgtcctttctctcctgctcaggctggcgcagcaggcacagcgccggggcctccttgaattcgtctgggtcgtccgtcgtaaggacgacctagactggatccagccggagctggagacgctgaagaaggctgctgctgcagtgcgaactttccgcattcgcatcttcgtcaccagaggggctcacgattccaccgaaccggtcgcagcattgggagaccctttctccaaggaggcagacgccgccgttaactgccagacaccgtcttccccctcgacgccatcagtctcgcctcatgaacaccaggacccaaccccaacttccacgttcaccatccacgccccttcgtcggccgcctccttagccagcggggacaaaaaccaccccgatctcgctgcgcaggtgacggactttgtctcacgcacggtatccggcccaacgcgcgtctttgctagcggccccctcggcatgatccgtgatctacgcagcgccgttgcctcgtgcaatgatccgggtaaggtgtggaagggtcaggagaggtttgatgtgcagttggtgcatgatgaacagttggaattctagctggaagcggagctggctctgc

SEQ ID NO: 20558 - DNA, 2062 bp, Emericella nidulans
  unsure (1)..(2062): unsure at all n locations
cgcaggcgcgcaccttttacgctactgctctcctgcgtggagtgaccgatagctcctcaacgatcacgtcggctcagtcactggaccaggcttttcagacgctaacccaggtttgtgatcgatttgcgctccgttgcagcgtccgtactataggagcgtttacatgctaacggttcggtgtggtcagaccttggaaacgcagaagaagagacggcctcagaaaaacaccaatgcacaaaaggccaagggaacggacagtcaagagacctcaaagcggacaacgaaacctcggctgcctcccaaggagactaaaaaacgtcgggaaactcgtcctcagcataagcacgccgaaccactgggtattaaaaccaagttgaaaggcgtggtccaacaattagatatacagaagaaacttgcaaaaaaggctaagaaaattggagccccgcaggagtttccaaagccgccgacaatacttagcaaagcgatcagtacacaagagcgtggcaaactggactcctcgacatctgctattgaaggtacgtatacacgatacccttttcttggttcagaatgctcgaagctaacggatctaaagtggtagatgtgaaaacccaaccggtgccggagctttcattcggcctacagagagtccttttcaagtaagtgaatgctcgcatcttactgctgaattcagacgattaaccaaccttttatctctatagccctggagtttatcaactgcgcgatccccggtcccgtgtctataatttcgatccgtacctggggaccatcatgcctgtaaccgagttcgacttcgccgctttgaaggaatacatcacatcctcgagagatgacactttacgaaacatagcgaaagagaacaagaggaaatatatgggctcgtcctccagtatgacaagcgttctgtcgcattttcactatttgttatcagcatggcgccctatcaatacgaattcgctctctcaaggcttcgaagacaagatgaaaacattcacacgtataatgcgtgcacctgcggctatgtttttgcggtatcaggatggtatctatgcgatagatgccgataaagggttcgacactgccaacattttaatgaatttgggcaagtcaatggagaagcttctcaccctgcctaaagaggaatatgaacgctatcggaggtctcataagaacaaaatcaccgccgaagaggaggcccaaacgccggaatcttaccactactctactttgggagacttcatgatgagatcgcagctcgatgcttatgatccgcgtctcccgggcacaggaatgtttgatttaaagacacgtgctgtcgtatccattcggatggatgcacgcaattttgaggaaggtctaggctatgagataaaatcgcgcttcgggaggttcgagtcttacgagcgcgaatattatgatatgatccgctcagccttcctcaagtattcactccaagtgcgtattggccgcatggacggcatctttgtggcatttcacaatattgaacggatcttcgggttccagtacgtcagtttggcagaaatggatgaaactctgcacggtacatcgaatacagcgctcggtgacgcagaattccgcctgagtctacagctctggaacaagatactggacaaagccacaaagaaatatccaggaaggtctctccggtttcactttgaggccagagaaacagttcaccccttcatgtacatattcttcgagcccgttaccgacgaagaaatccacgccattcaaaccaggaataaagccgaaatcgatgcctaccaacaacggatcctgaacctacctatccaagaagaccaggatccatctacggcttcgtcgaacgtgcaggacaccgcagccgccaccaatgatacaccgccagaatcgcaatctgaagaagtctcagtcaacgcagagaacttctcggagaccanaaagcgtgaggtctcggccattttcctcactgttcttaactatcataacggcaagcaagtcaaccgtgttgatgacttgaaacccggggacaagatggacg

SEQ ID NO: 20559 - DNA, 2074 bp, Emericella nidulans
cggagcttccctatagcctcccccgtggttctggaatcgtcactcgaagacctctcatcctgcaactcatcaacaagccatcacaaataaacggtgttaaggacgaacagctcgagacgacggataaggaagcgaatcttgacgagtatggcgagttcttgcacattcccggccagaagttctacgacttcaacaagatccgtgatgaaatcgttcgcgaaaccgaaacgaaggttggccgcaacgctggaatctccgccgctcccatcaacctgcgaatttactctcccaacgtccttaccctgacactcgtcgatttgcctggtttgactaaggtgccggtgggcgaccagccgaaggatattgagaggcagatccgtgacatggttttgaaatacattagcaagccaaatgccatcgttctggctgtcactgctgccaaccaggatcttgccaactcggacggactgaagctcgcacgggaggtggacccggaaggtcagcgcaccattggtgtgttgaccaaagtcgatctcatggacgagggtacagacgtggtagatattcttgctggcaggattatccctctgcgcctgggttacgttcctgtggtcaatcgtggacagcgcgacattgagaacaagcggcctatttcctacgcgttggagcacgagaagaacttctttgagagccacaaggcgtaccggaacaaggcgtcttactgcggaacgccgtacctcgccaggaagctcaacttggtgagtaattccacgcactgctacaaagcgtattctaactggagtagatccttatgatgcacattaagcaaacgctgccggacatcaaatctcgaatctcgtcctcgctgcaaaagtactcgtctgaactggctcaactcggtgactccatgctcggcaacagcgccaacatcattctcaacatcatcacagaatttagcaacgagtacaggacagttttggagggtaacaaccaggagctttctagcgtcgagttgtctggcggtgcccgtatcagtttcgtgttccacgagctgtactccaacggtatcaaggcggttgatccctttgaccaggttaaggacattgatatccggacgatcctctttaactcgtctggttcatcgcccgcccttttcatcggaactacagccttcgaactcattgtcaagcagcagattgcccgacttgaagacccgagtctgaagtgcatctctcttgtctatgacgagcttgtccgcatcctcggtcaacttctgaacaagcagctcttccgacggtacccaatgctaaaggagaagttccatgctgttgttatcgcctttttcaaaaaggctatggagcccacaaataagttggttcgcgatctcattgcaatggagaccacctacatcaacacggcccaccccgatttcctcaacgggcaccgcgtaagtcctcaatccttttcgccctagcaatcactaacgggataggccatggctattgtcaacgaacgccacgccgccgctaagccgacccaggtggaccctaagactggcaagcccctgcctccccgtgctaacagtccctccgtggaagcaactaccccggacaccaacagctcttccggattttttggcagcttctgggcgtcaaagaacaagaagaagatggctgctatggaggcgcccccgtcaaacctcaaggcatccgccgctctttctgagcgcgaaagtaccgaagtcgaagtcatcagtatgtttgcttcacatcgaggtcttgagatgatactaatatcacacagagcttcttattacctcctacttcaacattgtgaagcgcacgatgatcgatatggtcccgaaggccatcatgtacacccttgttcagtaagtactctcgccttaatgagaaggcgtttgctgatagccatagatactccaaggaaggcatgcagcgcgagttgcttgagaacatgtaccgcaatgccgagctagacgacctcctcaaggaaagcgattacaccattcggcggcggaaggaatgccagcaaatggttgagagtctctcgcgcg

SEQ ID NO: 20560 - DNA, 2076 bp, Emericella nidulans
cgatggatggcttcggcacaagcatgagatggtgaacttcgaggctgcaaaggctatttgtgatatcagggacgttagtgatgcggaagcctcgcaggctgtccatgttctccagttgttcctctcttcgcctcgtgccatcacaaagttcgcagcgatccgcatcctccaccgattcgcgtcattcaagcctcacgtggttaacgtttgtaaccctgatattgaggccctaatctcgaacactaaccggtccatcgccacttttgccatcaccactctcttaaagactggaaacgaggctagcgttgaccgcctgatgaagcagatctcaggcttcatggccgacatcactgacgaattcaagattactatcgttgaggccatccgaaccctgtgcctgaagttccccagcaagcaggccggtatgctttcgttcctcagcggtatattgcgagatgagggcggctatgagttcaagcggagcgtcgttgagagcatgttcgacctcatcaaattcgtgcctgaaagcaaagaagatggtacgggcttctccttccgaactgttaatttgtggtttattaacttgtggcagccctcgcccatctttgtgagtttatcgaggactgcgagttcactaaattgtctgtcagagtccttcatcttctcggtgttgagggcccgaagacatcacagccgaccaagtatatccgctacatctacaaccgagtggtcctagaaaacgccattgttcgtgctgctgccgtaacagctttggccaagtttggcgttggccagaaggatcctgaagtgaagtccagcgtttctgttctcctcacgcggtgccttgatgacaccgatgacgaagttcgcgaccgagctgctctaaacctccgattgatggctgaagaggatgaaatggccaatctattcattaagaatggtaagcttgtacttcaccacttcgatctccgactctcgctgactagatagaatcgatgtattctctttctacttttgagcatcaactcgtcatgtatgtgacatctggcgataaagagacctttgccacggcgttcgatgtgtccacaattccagttgtctcccaggagcaggcgttggctgaggagcgaactaagaagcttacgagtgctacacccacactcaaggcaccatctaccggaccccccaagggtgccaaagcaaatggtgtggccgaagctgccacggcggccgccacacaaaagtatgccgagcagctcatgcagatccccgagctcaaggcgtacggaacattgctcaagtcctctgttcctgtcgaactcagcgagagcgacaacggaatacgttgtcactgccgtcaagcacatcttcaaggagcatattgttttgcaatatgacattaagaacactcttccggatacggttctggaagacgttaccgtggtcgcaacaccctcggaagaagatatcctggaggaggaattcatcgtccccgcacccaaactaaataccaacgaacccggtgtggtttatgtcacgtttaagaagctcgagggcgaacagagcgtccccgttgtttcatttacaaacaacctcaaattcactacaaaggagatcgaccctacaactggagagccggaagacagcggatatgaagatgaatatcaggtcaacgatctcgagctaacaggtagcgactatgtcatccccacatttgctggcagcttcgaccatgtttgggagcaggcaggtgccaacggcgaggaagtcagtgagactctgcaactcagcaacttgaagggcatcgcaggtatgtgacttgaaacccttgattcttgacctgcgctaaccagtttcagacgcgaccgaacaattaatctctacactctctctacaacccctcgagggaaccgacgttgccctcagcaacagcacacacacccttaaattattcggaaagacagtattaggcggccgagtcgcggccctcataaagatggcgtactccaccaagactggagtgacgaccaagatcacagttcgcgccgaagaaggaggtgttgcccctgcggtgat

SEQ ID NO: 20561 - DNA, 2080 bp, Emericella nidulans
tgcaagatgggcctagaaggatcgcaatcactggttaagggggggtgggaaaaacacaagttgccttggagttggcataccgcagacgagaccaagattcaggatgttcgatattttgggttccatgcactagctatgcaatgattgagcagtcgttccttgagattgcacaaatacttggactgtttaatgtgaagcctgcagaggttaaggaacagattcaggcatatctcagctccaagaacgcagggaagtggcttctgattttcgataatgcggatgatacggatttgtggttaacggcttatgataaagctccagctcttgaggactttctcccccaaagtgagcaaggccgcatcgtattcactacccgcaactgggagcttgctgtggagctcacatactcaaatatcgttcctgttccagatgttgataaagagattgcgcggagtatccttgagagcctactaatacaaaaaagcttactaaagcatgatagtattatagttgcactcttgaaacatctggaatatctcccactggcaatcgcgcaggcagctgcatacatcaacaagaagcgtttggatctggctgcttacctgacactcttacaagacgaggagccggatgctgtggatcttctaagtgagaaattcagggacccgggacgatacaaggactattgagaatgccgtgatcaccacctggctaatatccttcaagcagattcaacagcaggatccattagcagcagactatttatcttttatggcctgtatcagtccgcgaaatattccgcagtctcttcttccagcccagatatcagggaaaaagagagttgatgctttagggctcctgtgtgcatacaacttcatcaacagccaagagggagacataaatatgcacaggctggtacatattgcgacccgatattggttgagaaagaatagagtgtttagtcactgggtccaaagggtagctgatcaaatggagaaagttttcccaaacgaccactacacaaatcgaggactctggcgacaatacctccctcatgctctggcgttgatgcatgagagcgattttaccaatcaaatggacccacatatcaacctagttgaaaatatcgcgaattgtctattgagcgatggccgatatctggaagcggaggttctgtacgtgaagttactggaattccagaagagaaatggccccgaggatcccgccactctgaggagcatggcaaacctggcatcaacatactggagtcagggaagattgaatgaagctgagaagctggaggtgcaagtcatggagacgtccaagatagtgctgggtgctgagcatcccgacacactgaccagcatggcaaacctagcatcaacttaccggaatcaaggacgatggaatgaagctgagaagctggaggtacaagtcatggagtcatccaagacagtgctgggtgctgagcatcctgacactttgagcagcatgtcgaacatagcgtcaacactttggaatcagggacgatttcatgaagctgagaagctgtttatacatgtgatggagacaaggaagattgtgctgggtgttgagcatccagccactctgaccagcatggcgaacctagcatcaacctaccaaaatcagggaagatggaatgaagcggagaaactggaaatacaagttatggagacatccaaaataactctgggggttaagcatccaagcacgcttagcagcatggcgaacctggcatcaacctaccggagtcagggtcgatggaatgaagctgagaagctgtttctgcaagtcatggagatacggaatatagtgcttggtgctaagcacccaagcacgcttagcagcagggcgaacctggcatcaacctaccggaaccaaggacggtggaatgaagctgagaagctagaggtgcaggtcatagatacggccaagacagtgctgggtgctgagcatccaagcactctgagtagcatggcaaacctggcatcaacctaccgaaaccagggccgatggaatgaagctgagaggctagaggtgcaggtcataaacacggcca

SEQ ID NO: 20562 - DNA, 2080 bp, Emericella nidulans
tgttgaaaaatccctggcgcaaaggcaaaaagagctcaaggaatgtgttgagaaaatacgcgaagccattgacgatgaagcccggagaatatcccgacgttgtcagccaacggcagaatcagctggacatggcgaagagtactgctgagcaaggggccggtatcgaagagtacatgagccgatgcctagcggccgcgaaagaggacaaaatctgtcgagtgtgcgctcggtctttcaagagcgataacgatttgaggacttttttcaataggctcgaaggtctaatcaagagagcaaagctgcaagcacaagctgaagacgtcgagcaattggaacaggatctcaatgtcgcccgtgccgctagcactgcctatgatacttggaagcgtctcaaagagactgagattccagagttgcagcaggaagacgaaaaatacactctagagcgtgatgagcttctgggccagctggaggaccgcgacaaagccgtcagtgagatggtcgagaagaaacgcgatattgaagctctgtccaaaacggtcagcactattgtcaggtacgatagtgacatcaaatcgactcgcgcacagatacaagatctttcctccaagcagcagcaaaatacagcggctcctcgtacgctcgaggatatccaagatgagatagctagcatcggcgagaaaaccagagctctcaaaaagactctgtcaaagcttacaaatgagagggagcatgcgcgtgcagaaattaacagcctggaactgcagctcagggacgtgaaaagcaatctcgacaatgtcaagtttcagctcgaaaggaaagctgatctcctttctcgcatagaagagtataagactcttaataatcagcaacgggaagcaattgccaaagcggacagagatatcgaggatctgaatccagagctcctgaagtatcaagccatatatgacgatatcagtcaacgggccgaggcgcgcgagagagagctgcaacaaataatctcccaactgtctgacagcatacaccaggtagagctcgcaagcgaagagattgacgcatacaatgagcgaggtggcccacatcaacttgatcggagtaaacgcgagctcaagtccatcgaaaatgagattagtcaactcgaaactgaacaggcagccctcaccaggacgatcaacaagatctccacacagctcaaggacagtgagaacacaaagcgtcagtatgcggataatctcacatatcgccaatcagtgcgagccttcgataaggtcacaagcgagatcagggaattggagagtaagaacgcagaggtcgacaggagccgattcaaggaagagtctgaacgccggtcccgcgagcataacgcactatctgcaaagcaatctagcaagatgggagaaatgaaatccaaagacgatcagctgatgcagctaataaaagactgggacacggactacaaggacgcagcctacaaatataaggaagcacacatcaaagtcgaaaccaccaaagccgccgttgaagatctagctcgttatggactgccctcgacaaagcgatcatgaaatatcacggcttgaaaatggaagaaatcaacgccatcatcggcgagctctggcaaaagacttatcgcggtacagacgttgacaccatcctcatccgctccgacaacgaaaacgcccgcggcaaccgctcctacaactaccgcgtctgcatggtcaaacaaggcgcggagatggacatgcgaggccgctgcagcgctggccaaaaggtcctcgccagtatcattatccgactcgcgttggccgaatgcttcggtgtcaactgcgggttgattgcgctagacgagccaacgacgaacctcgatcgagacaatattcggtctttggcagagtcgctgcatgatattattcgggcgaggcagcagcaggcaaatttccaacttattgtcattacccacgacgaggagtttttgaggtatatgcagtgtggggactttagtgattactactacagggtttcgcgcaacgagaggcaaaaatcaattatcgagaggcaatctattgctgaggtgtgttct

SEQ ID NO: 20563 - DNA, 2085 bp, Emericella nidulans
caagccgacgagccccagatacagcccgagtcctcaatcccagatagccggtcctctctcaagggagacgcccaccatgccgaagtatcccgacaaccatacggccccccgggtcttcggggtgtagtcgccaatccttttgtactgctctgcgcggcatgctcaacccgtgggtgacctccttccttgttcccacttgtaactccaagcggctaacagcaagatgggggggaaagtcggagggttgtcgttcgggtacgatcagggtgtgatctcagtcaccctggtcatggaacagtttctgggccggttcgtggaggttgccgagggccatccgggatcagggttctggaagggcttgatgacggcaatgttggaattgggtgcttttgttggcgcgctcaatcagggctggctcgctgataagatctctcgacggtactcgatcgttgtggctgtggctatctttaatgtcggttccgtgctgcagactgccgccgtggactatgcgatgcttaccgtcggacgcacaattggcggtattggcatcggtatgctgtccatggttgcgccgctctatatctcagaggtctcgccgcccgagtgtcgaggcgcgctgctcgtcttggaggagttctgtatcgtgctcgggatcgtcattgcgtactggatcacgtacgggacacggttcatggccggcgagtgggcgtggagacttcctttcctgctgcagatcgtgccgagtttcgtcttgctgggaggtgtcattgtcctcccgttctcgcctcgttggctcgcgtccaagggccggaatgacgaggcgcttcagagcctgagccagctgcgccggctgccgaccaccgaccaccgtatccaacaagagctgctggacatcaagatcgatgtccgctttcatcaagagctgaacgccgagaagcacccgacccttcagggctcggggacgacaaagagcctgcttcgcgagctggccggttgggccgactgcttcaagagcggttgctggcgacgcacccaggtggcagtccttgtgatgtttttccagcagtttgttggtatcaacgccctcatctactactcgcccacgctcttcaagaccatgggtctcgattacgatatgcaattgctcatgtcgggtatcatcaacgtcacgcagctggttggcgtctgcaccagtctctggaccatggacgccctcggccgtcggccgctcctgctctggggtgctgccatcatgggaatttcccatgtcattattgcagccctcgtcggtatctactcagacaactggcctgcgcaccgaacacggggctggaccagtgtcgcttttctgtttgtgtatatgctcgcctttggcgccacctggggatcagtaggctgggcgctgccggctggtaaggaccctttctctgatgctttcaatagatagtcctgacatgtcgcagaggtgttctcttcatttctccgcgccaagggtgtcgctcttgcaacatgcggcacctggctgttcaactttatcatcgtgagtccctcgccattttttttttttttttgaccgggacgatggactaatggaaatagggccttatcacacctcccttgattcaagatacagggtatggtgcgtacgtcttcttcgcagtgttctgtatcctcgccttcatctggaccttcttctgcgtccctgagacaagcggccgcaccctggagcagatggacgcagtattcaaggacaactcaatcagcgcggagcgggcaaggaggcaggcgatcgaaaatgagcttatgggagagcatcatggcgttacagcatagacagtagtctaaccattttatgtatagcgaaacgtatgatatctagcattccaccctgatcggctctagtctacgaagatgccgagatatatttcggaaagccccaagaactgacgcttggcactcgggtcagttgcgtgtcctgctttttttgggcaatgccgatcgtcaccgccgtacgaatccacctcgacggcgtcaaggttgatagccgggagcggacaaagaccatcatacatggcggtctggggg

SEQ ID NO: 20564 - DNA, 2106 bp, Emericella nidulans
tcaagcaaaagcggctgtgtcgtactaagtaaagctggagatagcgaaaaggccaggtaagtggtgggaagtggtgcggagctcagttggtagtatattacggtggccttttgagaataggacgaagtgtcttgtacgcggtcacccagctaggtttgaatgtgtccaggttgcaagtataggtaataagtacgcaagtaaagagagagtcaatgagtaatatgataccactatagcagttgatgaaacggttgaagcggaggatggggccgtggaggaaggagacgatcgctatcagctgattctgccgagcggtgagagactagaaacatcattttcccccgaaccggcattacctgttcacatgagtctatcctactgaaaatcccgcgcctcgggagagcctttacctgtttcatgtcccgttcgggatgactatcatggtgtgacgctcgcattatggcctcgggcctgttcagctactccgctccgttgcgccgcaacctcgcttgtctttcaaaagagcgcattgcgctatcagatatggtgtctttcggccctcctgagcggcttagggccggtgtcaggttcttttcgaagtctcgcccttcttacaataataaccaaaagcagaactcgtcgaccaaaagctcttttggatcccgactacgttttgctctacgaaataccaaggtcgaatggtatccaattccggttgggttgggaattggtctactaggtatactgcattattacaagtctcagcggaatgaacgaatacgacaagaaagggaagctgaagctgctggggaatcctttgatttctcgaaaccacccccgcggccaaagatccgacctagcgggccatggcaagttcagattatgtcaaccctgccattgaaggcaatgtctcgattatgggggcggttcaatgaaatagaacttccctactatttgcgcgtgccgggattcaagctatactcttggattttcggcgtcaaccttgacgaagtggccgagcccgatcttcacgtatatccaaatctggcagcctttttctatcgcaaattgaagcctggagtccgtccattagacccagacccgcatgctattctttctccctccgatgggcgtatccttcagttcggactcatagagcgaggggaagtggaacaggttaaaggcgtgacctatagcttagatgcgctcttaggttccgccactccatctcaggcagatcattccaagaagtttatggatcatcacaacgagccctcgcaaaaggatgccgccagtattgcggctgatgaacagtttgctaccatgaacggcatttcttacactttgccatctctcttttctggggagaccggaggtctaaggaaacgctcatcgtctaaagatgcgtccactgaatcccaaataacgtccgaaactctggtgcgagaagaccttgcccgtggcgatggcaccccttggtatgctccaaaacctacgtctaataatgctctctattacgtggtcatttacctcgcacctggtgattatcatcggttccactcccctgttccttgggtcgttgagagccgtcggcattttgcaggggagttattctctgtgtcgccgtatctacagcgacatctgcctggccttttcactctcaacgagcgggttgtgcttttgggccggtggcgctggggattcttcagctatacaccagtgggggccacaaatgtaggctcgatcaaaatcaacttcgactccgagcttcgaacgaatagccttctcaccgacactgcggcggatattgctgctgcggaagctgcacgacgtggcgaacaataccctggctttgctgaggctacttaccttcacgccagtcggacactcgggggccacccccttcaacgaggtgaggagatgggtggattccagttgggaagctctattgtactggtcttcgaggctcccatgggcacccgcaagtcattcgatgccggctggaaagagggccagcgagacggtgggttgaattggacgattgagaagggccagcgcattaagatgggtcagaaggttgcatacgttgatatcaaggaatagaat

SEQ ID NO: 20565 - DNA, 2145 bp, Emericella nidulans
ttattcttaatgttagtctagtctctcctgttctcgggaaggggtctgtcaagatgagaatggtattgaactgcataaaagggctacagtcgccctgagcccccatcccagtgcataactctcccaacaatagtgaaactacggagaccgggactctgaaaacttcgccccttttctggttaatgatgtatacatcgtcgttgctgcaggagtcacattctactgcgcctcactcatcatctaccggctttatttccacccactggctggttatccaggccccaagcttgcggctgcgacgcgatggtatgagttctactatgatgtgatccggcagggcaagtatgtttacgaggtgaaccagatgcatgataaatacgttatgtcttgaacctacccatagtcaatcgtcaatatcaactaagtcgtaggccccattgtccggatcaacccgcacgagatcgtgattaaagacccagagttctataaccagatatacgtggctggaaatacgcgccgcacggagaaatgggcgccatcaaatatcggcgttgatggcaagtattaccttttctatggagtaggtatcaaagccaactgcagctaacaagccaggctcgattgtgatgaccgtgggccacgaactgcacaggctgcgtcgtaagcctctagatcccttcttctctcgtatggagattgaccggctcgagccgctgatcgtcaaagaagccaaattgctcaaccaccggctgcagagctacagcggatcagggcgcgtcctccgacttgccgatgtcttctctgcctttgcggttgacatgatcactcatatctgctcggaggcaggaccggtgatgatgaacaagccggagtttggaaaagactggtctgtctgcagcatgccctagcggaatgcgatggctagcaagtgtctaggaatcaactcctcctggcaggaatccaccgacttcctctcctcatgcatttccctattccgatattgtttgtgaccctatagccctgagcattacaacgactaagaacaggataaaccagccttgctcaactgatacccatcacactcctccgcatattcccggtactggcctcgtacagactcgcgcacgaggtacatctccttctctatgacgttccaaaaagccatcctaacatgtcaataattaaaccagcttgctacaagacacatcaacgacgcaaagagatagagcctcagtcttgacgctagaaaggtccaacaagaaaccaagaattctcttttccgccaactcctttccccttccagcgctggcgggctgcctgagtctgaacttgacgctgagcgcctcgccagcgagaccatggtgctgtttggtgcaggcactgtcacagtcacgagcacgctcagccttatctgctattatattctacgtgatagccatataagagaccggcgagccggggagctggagggtgtcatggcccagtatcctactagtatgcctacttggcaacagctcgagagactgccttatctgcacgcccttgttcaagaagggctgaggtacgttccctgcctactttcgactcaaactgtgcagtcaagtaacggcagtctaaactggaatagactcagctacggcactatgcgccgtctcccccgcgctttccagacgcggccctgcactacaaacaatggaccatcccgcctgaacccccgtgggcatggctgcatacagcctgcacactgaccctgaggtctacccagatccgttcgagttcttgaattttccgcacgctaacgcccagaacaaaacgcagcctggcgtatgcggaggtgtactgggctctggcggttatgttcaagtcgaatgcaccgaagctacagttgtttgagactgaaaagatggatgtagagcatgtggtggactccatggttgccttgcttaggttgggcagccaagagactaggattacagtttgctagtatcacataatgagtgtatctagagttatagtagcaccggttaactggtagattgagaactatcataacagacggtgacgggaagctgcgactttgctattaagtactcatagctcatgactagtgtccaaccctattgagcagaaatccacgagcaccgc

SEQ ID NO: 20566 - DNA, 2182 bp, Emericella nidulans
ctgggtgggctacgctgggtaagtactgtttttattattttctctcctgcaattgttgcgagaccctggaaacaccaaccggtgatttatgcgatatgtgacatccgttcatgttattatccaaggttctatgcaaagaatccgcgtcaacaactacctgtgagcatatttgtcaatgctgtgcaatagctggatgattccatagcggtcatggagcactcatgaacttgttgagggcacaagtctttgtaaatggtttggctgggtgggggttcttaggatttgtctctcactagcattgtctacggcatcggctttgagatatgcttcttagtgctgctcaggctattcttcataataaaagtggtggcttgagagacgaagtatattggtacgatcatacagaggcttggccccgtccaactcatcgttacctacaagatgagttttccgccgttgagcccggtagaccacaagtcgatatgaaatgtgtaaagagctcatgatatcagcttagattttgcgaacatgggtctggaccaagatgatctatatgccgccgctggccatgctatcaaggattagtcctcagcacatcagtcacgtcgtgttatagcagcaatcaggacagcagaatcaccccctcccccagcccaacaggcacgctacataaacccacagaaacctcatgagttatgctcagtctttagttcaacaatgtatctccattgcagagttatggtcaccacgttcagcttgcttgcatatgtgcatggagtctgtgccatgctaacaacaagataaacagttgcatcccttgtcctgccttttgcccatgtcttgcgcccacgaaaacattatctccaccgccatatgatcatattcctcgctctcgttccccttttcatcattctcacaatctcctacgaagggctcttctacttcgccattgcttttaccctcttcagctgggtccaactcgaacagaggatccatcaacattctaggatccatcaacattctaagaaccacagtatccgcaatatcatttctaacgaaccttgtcaaccgggcaacgctaggaatgccgtagctaatgattgcgccccaaacaccgaagaggcccggaaagaggagatccagcaccgcttgcaacatccgccaaggcagcgaaacagagaggaaaggctgccttagagagaaacatatagaaatctcatcctgtcggaagttagagtctgtctgttcttccttttcctgctgcacttcgccttcttcagcaccgaaaacatcgcctcggtctccccattctcgctagacgctgtctaccggctactttctataatcgattccttcagccaggcggctcttcttatcctcaagattctggccccactcgcactggtttctgccaaccttggatttctaaccaaaagactgaacattcaaggcgggagtctgttgcggggttggaagctttgtcggaggtgcttgttagaggtgtagagtttcattacgatctgtgaaggggattcgctaaatacaatgaagaatatgtagatcggcggacggttactagatgttggcggttcccattatagagccgctgtaccaaggagtccagctccgagccaaaacaggatccatgatttccttcaacacagcagactggcatcgtgccactttagtcgttccctgattgagatttggcaactatggtacacggtcgcttcggacacctggcagcttgtataccacttggttaactggacgagcggtccatcgtagagcccttggtatgaatgtaagacctaaataatgagacgacgctggcattgttcacgctttaggttaagttggccacgttaggaattacgcgacatcgattcgagaaggttcattcgtcgttgcgacaataagctgtagcggcgaagtgataccgctgcgtatttgctctatcattgaattagaggctagtactccgtaagtcgtggaaaatgctcctcgaggagcgtggggttgaatccctctgcctttaactccgccaacggtaactcagatccctggcaacataactgctggctacggcgcagtctaccttcgccgcagtgtataaacccaatgataaaccgccggtgccagagctccggacgcggtccgtccacccggcgcctcaagagac

SEQ ID NO: 20567 - DNA, 2187 bp, Emericella nidulans
tcatccatcaacaaactgccatccagcttcacatggcgcaaccagtcacgcataagaacccgcaagtgaaccctcttgcgatgtgatgattcagtcgcatgcgaactctctggaggcctcgaactcctcccaagaagataactatgaaacttctcacgagcaagcagctattttccacgcagtctctcgagaagcaatagtcgcctcacaaggacctgctcgcaaaacttcctgcgattcatcaagagactcaatctagattcttgtgttcaacattgaccaggtgtccatgacgatgtctatagacataagcaccgccggcgatgagtgcgatgacgacgatattgccttttttgcataaactgttaacgcggtgattctttagacagtcagggatggagtaagattgggcgaagactttggtggtgggtggtgcgtgatcgtgatgacgtcgtacacgtgactcgagacgaacttcttgggttttggagactatcccagatgtatacgcccgctggattctcctttttccccacaaattccctccaaaacggtctgtaacagaccccatttgaaaattacgacaatatcgtttgtggggtccggctttcacgaaagacttacttggcccttatgtatagcccacatattggcagattgtggaaaccgtgggtcagctagacctatgctggcgctgcaagtttgatgtcaggagtgcaggcgaggaagaggtttttgagtagaagttaatggcttttttttctttggaagggatcagagctgactagcgagtcatcagcagtgccaggtttatggttttcggttctatgtcgttcagaaattaagtagaaatatggaagcggatactccaactccaactgcgagtttgtctgctcaatatctatataaacagcaatgcctaacgcttttcaaacctattctttgatatccttattatgtgtatcgcctcccttcctatcaccgctctcagtattaggcccctctctgtaattcttgaggctatactattctttgctatcgttacttgctgtagatgacacaggatgttctgttgaatattagctttctatatatgcgataactggagaagcctggaatctaaccttcatatgttgaaaatttgctaccacacgttatcccttccactgactcactgctgcttgggttttcaatcctactttttttctcttctccgagattactgcaacggtgaacagatttggcgttcggagcactatgttttgaaaaagcgaaatagccacgacggtgtgttactgtcggatatagttggcgtattttacgcatttttgatagtaattcatctgcatgtcacggtataaacgacatttatattgattcaaaatttaaaatcttgcttccccccccaccccccggccacggaacaaatcatgcgctccttataacgcccatctgtggcaaatggtttgcataccatgtggagttaagaggtgactgctaacagaatatggtaatataaggacattgctgacgtagttttggaaatcaagataggtaaaatagggaacttcctatattaaattatatccgaaccgaacatcccactctcaggcctgccggctaagaccacgctatccgtgggtctggttctcggccaggtgggcagcgttgtgattgggtcataataaagtaatacgtcttcgtgatgacggtaatgccgagttcatccccacatccagaaatcttcttgcctgtttttgttagcagtgcagatctgcattgagctcatatctattgagctaaaaaaaggttcactagggttattatggaagaaattgtggacaagattcaaggtctcgcttttccgttggaagttgatcactgccataggggtcggtgaaaggtattggcggtgcaataggccgtgatagctcctgtgaggttctcctggtatcggcttataggtgattcctaacggaggaactgcaacttgctctctgtcataaaccaagtttaaacacagcaactgtcaggtgacaagattaagtgtgatgtcattatgagtgcaccgcctcttacccacgttgagatggtccttgtatcacccgagaaagaagtacctcaagagaatctctttgtgtttgacctgctgttacaggtttatccggaaggtctatcaggagcaat

SEQ ID NO: 20568 - DNA, 2332 bp, Emericella nidulans
cgggcgaaatcgccgactcttcttaaggaccgaacattaatcactactactgagaacttggaccgcgtattacaggccctcagggtactaattaaagaaggtgtgcagcaaggaggttatcctgggtcacaacgacgaggcgagtcagacgagacaattgaggaacaagggtggttggccagattggttcacttactgcaggcgccagaaaatgacacccaacttaaggtaatcggcttctgtcattagtttctagctgctgctaattacgtctagcttctccaagcgactcgaaaagcgtatctagacggcaacgagaggatacgctacacctttcccgcaattgttagctcctcgatccgtctggcacggaaactcaaatctcgcgagcattacgatgacaattggcaatcacaatcgtcagcgctataccgcttcatgcatcagtgcgtcaacaatttataccaacgcgtcaaccccggatgcgccgatcttgcactgcgcctattcgtaatgtgcggtgaagtagccgatcagacaggcttcgaagaattcagctacgagttcttcgcccaagcttttaccatttacgaggattccatcagcgattcccgcgcccaatttcaagccgtctgcatcatcgccggcgccctccacggcacccgaggcttctccaaagaaaactatgacaccctcatcacgaaggccgcccttcacggtagtaaacttctcaaaaaacccgatcaatgtcgcgcagtatacctagctagtcatctctggtgggtcatcgaaaacccgcacagaggcgaagaggaccccaagaacgtacgtcgtccacagccccctgattgccatcctactgtgctaaacgagaccagctttaccgcgacggcaaacgcgtccttgaatgcttacagcgcgccctccgcgtcgcagacgcctgcatggacaccgccgtctcagtggagctcttcgtcgagattctcaaccgctacgtctactacttcgaccagcagaacgaaaccgtgacgacaaagtacctcaatggcctgatcgagctcatccactcgaatctccaaacagaccaggacgagccgaatccggcgctcgagaaccccaaaagacatttttaccgcacgctcgagtatatccgcgcgagggagtttgagggcgtggttacggatcccagatcttagacttgaatcttggatgtttcaagtaaactgcgacataggcatgccatcggtggtaaatatatgtcaattacggttgtatctgttatagtgagcgagctcgatgcttgaggcgagcattttatacagtgctgctggcctatactgccttacaacaatcaccctcccctaacctgttaggcttagtgcgtttgttttgatctgtatgctgatatatgtatgtaagaaagattcccttcgtttgccgttgagcatttctctcaataccatgacacagtctttttcgcgccctccgttgttccttctagggctgttatatcaatgatgtacttctaaaaggtggcgttagtaccatttgtatccgctatttagggtctgtctgactccctaactgaagcgtaaattgagaagcagatacagtacgttcaaggcatttttctctcaggagacatagcaaaagcactattagcaaggcggatgaaggtctgaattcccatagtaaaggaaaggatgatagacggggcccctatgtacttccttccaaagcaagtcatggatgtgtactacctcttcagggacgggcgactggtaacatggaacctctgtgtggatgccatttaaactttaaactacaagagtaccgtaagccctttactcgcacttaccatactagttgaacaagctcctggaaagtcgggacaggagttaatttgggcggatgtcaatagacgagcgaagtcggtggggttttatcgtgtctccattaaaagtggtttgggtgagaagtaccctaggaacaccactcgttacctaccgaagtcgagagataagatggggacttcgatataaattcgtacttgagtgttccgttcaggtgatgggtgtttcaggctcgaccgtgtaatgaatttttcctccaccctactgcgatactacctggtacatatgggatagcattacgagaattacatatggagtcaaaacgaaggtaagtaaaccgtgatacccacgagatatgaaccccgagttgtgtatgcattgttcgagaataaaacgagcaggaaccatgtatgccatgttttggctctgtggcctagcatacgtaagggtaaaaagaatacatgatatgacggcaatgt

SEQ ID NO: 20569 - DNA, 2351 bp, Emericella nidulans
caaggctctccacggcgaacattccaccgagacacattatatcaaagccctccgggttatcagggatatagcgaggacctggggtgatccggacgagttttacttgaaagctgctctcaagtttgccgacgggtttacaggatggggtgggtttgtttaaccaccttgtaaaaaataatttcatcgtgtgatttgctttgtattaatattgttgattactatatcccttggcttaaatattcatcgctttccgttgactcttgactattagagcttcttacctaggtatatatttgacactcgaggatgcggaagaaattataataatcatttacctctcatctttctgcaaggaggactattaacgtaatactatgcttcggagggggaatagtgtttgcagtgtttgcgttgttctctcgtctgccgacgctccaaatccagcacagcaaacatttactccatcacgagtcaaacaatgccaacagccagaatgccactaacaactcaatctaatcgagcaggctcaactgatacagaatccctgactctccacgccgagtacctccccaacatccgccaagtcagcctccagatatctgccgccggtgctctttatgcctatccagagatatccctttccgagtctcgtcgcgccgtgacggtatcgcttacccttccggaatcgcaagaagctgtgatggagacgattaaattgcccgccaaagttacggaggggtcaaggcgtcttttgagcaacgcgacgcaaagtgctggccagggcaagggtactattacaggaaccgagagggaattctcctatcgaatgcaggtcgatgatacggaatttgtggtgcgtgatgcagtggaagagcatatggatagttttgttccctggtccgcaggggatatgctcccgactaccaagttacggtgtgtaaagtgtgagcaggtcattcttgacaagccaagcaataccgctgccccgactctatcagatgagaatagtacgtcgcatgcgggatggctgtggaaagatctgcctagcgggaactgggctgagatgatggatttctggcattgccataaaccggaccctcatgaggggcaggatgcggacggcgcagctaaacagacgattgaagatgaaaattccaaggttaagggatatggtgcatcgaaccaggttctggctacgccgggcacggtacttgtggatgtggctactttccttgtcgccgctatagagtgtaagggtttgaaaaaggtgagcaagggtcatcccaaatcgttccattgtttctgccgtatgcttcatacttgcaataataatcgcttttggtgggcaaaaagaaggagaccttgtctcttccatgatcaggccttcgatacagttgccctataaatacagtctcgctcttcgatcactggcgtgaatggtggtcataaggatttgggatcgttgcagttatcctcggctgatggatttgcaccgtttccctgttctttgcgttcgtccacctactgcgagtttcgggagtgagacggcgcctcgttgtttcttcgttgtttggtccagagggatggcatcaacgcgattatgacaaggtacataagtggtttctaccaattactgtagtcaaacaagtagtagtttcgctgtgcttcaataaaagcttacttgaaactgtccctcggcctttctgcatagacttcattttgaggtagtacctgtgctaatttttgagatgccaggccacggaacaaagtatcaatgtccctttgtctgaacaagagctgcaatgtgaaaactgtggcacacttataggtgtggaagatacgattgccagagggtggaggctcttcaaggcaagtcttgcagctgaaggccgccttgaagaagggagcttggaggcacatccaacagagctcatagttgctgcgcagctgctagagctcattgaacgccagagcgcccgcagattcatcatccattgcggaaaggaagacgggattctggtaagcgtcttctcggttctggtctaaagccggtttcgctcattgactgctgaatagatctgggtctttaatcctgatatgcggttctccaattccagctcccagcatagcatcacttcccaacgggccatgaaagtcttctttcaacccactgctgatgttgaggcgatactgcatcccgagcccgggaagacatcgtccctatccctagaagaactcagacttcctttggagacgtatgcttctctcataactgcacttgagacaagaaatgcaatgcttcctccttcggcaagattcttccagagaagttggcgggtagggattttgca

SEQ ID NO: 20570 - DNA, 2355 bp, Emericella nidulans
cgctccagatggcgtttccagaggaccgaggtcaagaggcaacggaccacgccgcggcggaggtcgaggggggcgtggcggacaaaatcgcgacatcagcaagccggagactgagggtgacgtcgatggctcgtcttcggtggaaaccaccacaaccgcagataagggaaaggcgcgtcaggagacggcggatgacgctgatgatggagagatctgctttatctgtgcctcgaaggtcgagcataactcagtgtctccgtgtaatcaccgcacatgccatatatgcgcgttgagattgcgcgctttgtacaagaacaaggcttgtgctcattgtcgggtatgctctgtaatagttgctctgtctgaatgcactgctaatccactcgttttctagactgaagctagttatgtcattttcacagacgaccccacgaagcgctacgaagagttccaggacagcgactattctcaaaaagatgataaccttggtattaaatacgaaaaggatgagatcttcgaagacacagttctgttactccgctacaactgtccagaccggaactgtgatgtggcttgcctggggtggccggacctgcaccgtcatgttaagagtaagcatggtaaagtgatgtggtatgtaacagtcctctcaatcagtcgacagttcaaaggcttactgtaaccgtctcatagcgatctctgtactagaaacaaaaaggttttcacacatgagcatgcgctctttacacatgccgagctgcgcaagcacgaaagacatggcgaccatgtccctggagcgcttgagcagagcggttttaagggccaccctgagtgcggattttgtcgtcagagattctatggggatgatgagctatacgctcactgccgtgaccgccacgaacgatgccacatttgcgatcgacgctctacaacccgccaacaccagtattatatcgactacaatgcccttgaaagccatttccagacagaccactttctttgcctggacaaagaatgccttgaaaagaagttcgtggtctttgagtctcaaatggacctcaaagctcatcaactagagtgtcatccaaacgggctttcagggcgagacgcccgcgtagacatgaccgcttttgatttcagaacgccgtaccagcctcagcagcgacaacgtcggggtgctggtcgtgggcgagatcccaacgcagaaaccgctcctttatcaaccgtgcaaccactacggagggacgagatcgcctaccaacgccagatggctatccagagcgcacaatccgtttcgacacggagcttcggtggacaactatctcgtgacgaaacacagactgtgcgtgccccagcgcgttccacagcacctgctcccactcgaacaccacccgcgccgacgtcacctgtcaacgagtttgagaaccttaacatcacatcagccacaccagaggatcaggcgcgtcggcttcggcacgcagcagttattgagagagcttcaaatctccttgggaatgatcaaactaagcttagtgaattccgcacccgagtctccaactatcgtaccggcggcatgtctgccaccgagctcatcgatgcctttttctccctttttgacacatcaagttccgaactcggtaagctcataaaagagcttgccgaaatctacgaggacgccggtaaaaagaatgccctgctcaaggcctggaatgattggcgtgcatcaatgaggattacctgcacttccagggccaggcggtaacatcccaggcatgtcccctggtaccgccagcggcaccggcgccaccggcggcagacgagtcctgcgtctgaaatcctcaacagctcagtcctcccgggctgccgctggctcctcgtcgttaagcaaccccttccctcccctctcttcatcacgtccaactccccgtgccgttgcaacatctgccgcatggggaggctccgcaatcgctgcgccaccaccccctcccatatctcgaacctacgcaaatccctcatcccgcacaaataacgccccctccacatcctcaggccgcgtcaacactcgcgacacagaggccttcccttcccttcccgctgcacccaagcccaacgtcctcatggcgggcctaacccgaggcactgttcgctgggatgatcgccgtccgccaccggtaaatgcttggacttcgtctgctgactcaagacctggttcctctacagaggacttcccagatctttctgctgcagaaggtaagaaagggaaggggaagaaaggcaaacagacgcttttccattttggttgacgattggcttcccggatagtactgaggtcaaaagtgcaagtaacatactttt

SEQ ID NO: 20571 - DNA, 2362 bp, Emericella nidulans
cgcgaatctgaagcagccaggaattgctggtcgggcccatgacgactctattcttctcgctcctcccggaggctctatcccaactacacgatgccctaggatgcctagcaaaatacagtgataccgtcggcattgaagccgaatttgacttggtatgttagtggggacgttagagagctaaatgaacagttctgaccatggcctcagcttcgtctgagctcgctcaactccagcaagactgcatactcatcctttgcgtttgaagcccaaaacttctttgaagcatacgaattcggcatgaatggtaataacagtgggcctcggaaatttagctgcgaagtatatttgaaggtgcgggttctgacttcatttttgagttccttatgctaagagcctgcaggcgttactatccgtcttcgccgggaggacaaatcgacgagataaagatactgcagttgaacgctgcgagtttgaggttcgtgaagatccagacgtgactgaatgccgtctagttattcggatgatatgcggacttggttaggatccttggttgattatctggttcgtcgcttacagtgccaggcgtgatcaaatcatacaagctcacttacgagtcaacgacagtccaacatgccatctttgaccggtcacaatctactaatgaatggaccgttgagccggccttcctaaaagagatagccgtgcatttcagtccttcggcggacgagttggatatctattcagagaattctaaggtgatctttactagctttacgactaaaataacagacgggaagggttcgtctatccagaactttctcttacttagaatgtactgatcttggtctagacaccctccgacaaccagtgcacacgtcagtcgccgttgacaaaacagattttgaaaactaccttgccgacgacggcgtccacatcgccatcagcctaaaggacttcaaagcagtgataacccacgccgagacgccagagtcctgataaccgcgcgatacacccgtccatgccgacctctgcagctcgcgtacgactttgacggcatcagaacagaattcaccctaatgactaccggcgaagcaggcccagaggaccttcctagttccgcgaggcctgtccgggagctttcagctagacaaacgcctgctcctcggcctgcgcctgtacaagctcctcctcaaacaaataacagcaactcagccagggagagacaaacggctccgccgcgtggtagacccatccgccctcttacagggacatccacgcgaggcacgcaacaagatacacaggctacagttgcgacgcaacaggcgccgtccaccaaatttgatagtctttttgtaccgacggatgatgataggcagtgggatgtcgctgaggacgaggaggccgaggcggaggatatgctcggctgggatgcaactgctgatccagtatgatccatctttcgccttcattagcagtgttcttctaacagcagcagggcaatcctgagagcctgggtccgcttttgcgagatatcgagccgaacctgggaaatggcaaccaaatggacgcaggcaacgacgagatggggattccgccgacgcaacgaatgtcccaggtaagtgacactcgcactgcaactgcgttcatgctgatagccttagctgcatggcctcggacttttcgactagaattgtcgtcacgattaccactccctcacactaaaatgtgctttgcaccactcaagccgcaataatccagctcgtcgcacagcccgcaccaactccaacgaccttaactccctcaggtagcgaaattcgagcgcaaacgcctttaacatctcctctcgcatccgtctcaggcccgcaattgccatgctcaccccatccaaacgccacaacgctacaaccaggatcatcgtccagcattgcaaggcaatgctcacttcccacggccacttctcgcgccttatgcaggtttgccggcggcaactgaccgcggtcattgcgtccccaggcacagatagactggtctttttgatgtacatagacaccatgccagctagcatgtatacgcaaataccccttaacactttcgagcgccgggatccctgtttggatgctccacttatccttctctcccggagatccagagccaggtccgagaacagcaaactcccccttatccttatcaccgcataagactgtaaactctcgtccacagacggcgtcagagacagcaaaatttacgcttataccttccagatcaatctgtctcggctcccatacaatcttctcactgattaattgagcgccgagctgtcccttccttgcagcgcccatccatacactgatccatcagaaca

SEQ ID NO: 20572 - DNA, 2364 bp, Emericella nidulans
cgtgagccgggaggctaaagtaagcccggctggaccggcaccgacgatggcaatcttgaagtcggactggcgtagcatcgtggttagtcaacgtaactcagttaaggtacaaagtcttcaggcttgtctagctttcatcatatatgatttctaccatagtagcctttgcatgagtcatacaggacggttggaagtgaattcccggattggccgtcaaggtcatgcagcgtaccacaggaatagagaggctgtgtgtattgcagagacatgtggtcgctatgtggttatatgagacaaaaagcaaatgggttacagtgtgacaaatgtgtagacacacgcgccggccagtggcagcatcgatcttgcctccagagcttgcgccggctcgacttggtgtgacaggctgcgctgcaaagtagggttggtgtcggtatccgccagttctagcgtatgcctagagttatctggtgacggcaccgttatgctcgatgtcttagcttgtgaagaagcaatggaggagtgttccacgtattaggggtcgcgaccattgcacaaaattatttgcgagctagagcattattatactatatcacctccagttctgctttgggtcaccattgtcctctcacttcgtagttcggtccgagaatgactttgactccattgatggaaagcttccatatcctcgcagtgctcctcagtagccagaaatgtctaatggtgcacctttcccccttgattaccgcggcactcgcaactacgggcctcgttttatacctgatcgctactcgacttttgtttcatccgctcgcaaaagtccccggaccccgcctggcggctctgaccaagtggtacgagttctactacgatgtagtctgtgatggagagtatgtgaagcatatcgagaagctccacataatatatggtatgcgagctttttctggtagttcacgtacaaatactgacccttcgcatgatcttccatcatccgaactggccccaaccaggtgcacgtcaacgatgctggggtctacaagagaacttttgccgttgcatcgccctttcctaagtccgagtttttctactcatctgtcggagtcggggacgcgattggagccatgacagacacgaagaaacatcgcgtccgccggtcaattctgggtccccggttacgagccaaggcaattgccccttatacaccaagtttgcaaaagttggtcatcgcctgtatggatatcatggctggcaaggcgcgccagggcaaggtgatcaatctgttgcggtacacgcgtgccctaacggtagatgtgatttccgatttcacatttggacgcccgatgggtgtcgtcaatgaagcagaggaaatgccagacctgctaaatgatttggaggtgtttgggcggcacttccacatcctgaagcattttccgataagtcgcaagttgctagatatcatccctgaatcatttgcgcgcaagttgatgccactgccgggattcttcgagcttcgtgaggtattccccatgttttttctccaagccattgcaactgataaacacagaaagccaccactgccgtcaacgaagccgtggtagagagacaagctggcaagaccataagcaacaacaccgatggggcaagctttctagacctgcttcttaaccagatcgacgagaatcccagcgtgctggtcgatgaaggttgtgcattcatcaccggcgggagcgacaccacgggcttcaccatggagaacgcaacgtatcttatcctgagccatccacatattttgcagagtcttctccaggaactcgacactagcccacatatcagagatacctttgacctcgaccacatcctacgcctcccgtttctgactgctatcattaaagaaaccctccgtttatacactccggccccaagcccgttgccgcgcaccgtgcctgcagagggcatcgatgttcatggccacttcctccccggcggtgtgagttcgccctgacctgttttccagacaatagaacatatatatatatatattgaaatcaatatcgtaacgcgtcaggtgtattgtagacaatcctcacccactccctctacctaatccaccataacccggtgctcttcgcggacccgaaaagcttcaaaccagagcgatggctcgggacgcagggtaaggtgctggagcagtactatgtaccgtttagcaagggttcgcgttcgtgtattggcatggcgcttgcatatcacgaggtttacacctacctttcgcttctgttctcgcgattcgagatggagatcttcgagacaagtcagtcggacatggactggcgggaacatttttttgtcaagcgcaacgggcaactg

SEQ ID NO: 20573 - DNA, 2395 bp, Emericella nidulans
aagctgcgccgcattggtgtcctcacctctggaggagatgcccccggtatgaacggtgcagtacgagcggtggtcccatggccattcactccgactgcgacttacgccgtttacgagggatacgaaggtctggtggaaggcggggacatgatccgacatctacactgggaatatgttcgtggatggctctcccaggggggtacattgatcggatccgctcgctgcatgtcttttcgtgagagatctggccgtctccgcgccgctaaaaacatggtcctgcgcggaatcgacgcattggttgtctgcggtggtgacggtagtttgactggtgccgatgttttccgctctgaatggcctggtttattggacgagctggtgaagaatggagaattgacggcagagcaggtcgagccgtacagagtcttgaacattgtcggtctcgtgggctcaattgacaacgacatgtccggtacggatgccactattggctgctactcctcgttgactcggatctgcgatgctgttgatgacgtcttcgacactgcgttctcccaccagcgaggcttcgttatcgaagttatgggccggcattgcggttggcttgctctgatggctgccattagcacaggcgccgactggcttttcattcctgagatgccccctaaggatggctgggaggatatcatgtgcgcgaacatcacaaaggtgagaacttttggatcctgactaggctcagtcaactgacgatctcgcagaaccgtcgggaacgtggcaagcgcagaaccattgtcatcgtcgccgaaggagcgcaagatcgaaacctcaacaagatcacaagtgatcgcgttaaagatattctcaccgagcgcctcggacttgacactcgtacaacaattctcggacacacccaaagaggaggagccgcctgcgcctacgatcgatcgctatcgaccctgcaaggtgttgaggccgttcgtgctgttttggacatgacgccggactctccttccccagtgatcacgatccgcgagaacaagatcatgcgcaccccgttgatggacgctgtcaaggccacgcaggaggttacagctcacatcaaaaacagagaatttgagaaggcgatgttgttgcgcgactcagaattcaaagagtaccactttgcttatctgaaaactgccacacctgatcaccccaaactctccttgacccaagaaaaggtacgtagtctcttaccgttaagcatagcctctctctaatgcgtagcagagaatgcgcattgccattgtccacgtcggtgccccggctggaggcatgaaccaagctacacgagctgccgtgacatactgtctcacccgtggccacactccgattgccatccacaacggtttccccggcttgatccgccaccacgcagatcaacccatcagctcagtgcgcgaagtcaaatggcaagaaacagacgcgtgggtaaacgagggtggttccgacatcggcacaaaccgcggtctcccgtctgaagactacgacgaggttgccaggtgcttcaaagagcacaagttcgacgccttatttgtcgttggtggctttgaagccttcacggcagtgagccagctccgccaagctcgcgacaaatacgacgccttcaagatccccatggttgtcctgcccgccacaatctccaacaacgtcccgggcactgagtactccctcggcagcgacacctgcctcaacgccctgatcgacttctgcgacgcaattcgccagtcagcctcctcctcccgtcgccgcgtcttcgtcatcgaaacccagggcggtaaatcaggctacatcgctacaacagcagggttggccgtcggcgcagtcgccgtatacatccctgaagaaggaatcgacatcaagatgctcgcccgagacatcgattttctccgcgagaactttgcccgcgacaagggtgccaaccgcgccggaaagatcatcatgcgcaatgagactgcctcatccacatacaccacacaggtcattgctgatatgatcaaggaggaagcaaagggccgcttcgagtcccgtgccgcagttcccggccacttccagcagggaggcaagccctcgcccatggaccgcattcgcgcgctgggcatggcaatcaagtgtatgatgcacctggagggctacgcgggtaaatcaaaagacgaaatcgcgaacgatgagatgtctgcaaccgtcattggcatcaagggctcccaagtcctcttctccgtcatgggtggtgacatggactcgagaaggtcgagacggactgggcgagacggcgtcccaaggccgaattctggttgcaggtgcaggatacagttaacatctgtcgggacggtcgggggccaaagcaatgtggaccggt

SEQ ID NO: 20574 - DNA, 2399 bp, Emericella nidulans
cgtctaaaggcgatcaaagccgttgttcttgatttctccggcgctatcagcaatgtcattccaaacctacaaagtactgtggaccacatgatgctctaccaagagactattcagcctctgggagatcttaggtatctccttgaaaactatagaactggtggattcatacctaaggtccaggcctacgagaactattatggctctgttggaggtatgtatttcgaatatctcacagactttatatctaacggcttccagaccaaatctttggagtcgatcttgaggctcgggcaagggcggatcgcaagagagtgccagttattgtgactactctcttaacttacctggacaactgtaagatggaaacggccttctaaagagtagaactaacaatcagacataggctacccagaacttgaaggagacgagtcgagacgtgcaatttggctttatgatgttccattaggagcgacccaccacctccgtcacgccctcaacaacaggaaaggcgatttctttgaagtgcttcagaagtatgagattccggtcgttgcaagtgtgctcaagttatacctcctcgaattgccaggtaagacgaacccctcaagagctcagggcacaaaagctgacccggatagactcccttgtttcatcccaagtatacgaaatcattaagacgatttattccacgactgcaaacgagaccactgaagaaggacgcgttaaagtactgcagagcaccctcggtcaacttcgtctcaacaacattgccacgcttgatgctattatgacccattttacgcgtttgatagacttgacatcggccgacgaaacctatgtttctgcccttgcccaatcgctagctccctgcatcctccgtccccgtagcgagaacagccttacaatggatgagcgtcatagttaccgcttgatccgcgacctcttcgcccacaaggacaccattttcggtgaactgaaacgccagtccagtgggcttgttggttccgcaccccgtccgcgcgcaatcagcacagatgaaagcaaccgccgggccggcatggaagcccgcaacagagccattatggaccgcagccgcgcccacagcccagctcctccgcgcaaacatcgacgtgaccgttccagcggcccagaaccaggccgattcccaatcaacgtctctggctcgaaaaccccaacaactaccagaaacagcctagaggtgcccggtagcgattcgcccacaggcgcaggggctgtttcaaccgctgctacaaccgctgacgagctctccaccgtgaacatccactcccccgaacccatcacaaacggcactactgcccctagccctgccaccgccgaatcctccgtcgttcaagaacctccttccgaaccgactgggtctcctagtcccccgccggaaactcaatcggacgactctgccacacccaccccgacacctcacgttgaggagtccagttccaccaccagcagcctaaaccggagctccatgtcacgctccagcggcatccacacccgcaagccgggtctcggcagccgctccagctttcctatcattcatggagaaacaaacacagacagcaagcgaacgagtatcgctgagagcgctaccgagctcaagggtgtcacattagaggataagccgatggacgactaaataggtcaagtccttggttttaattgaggccgctgctgctgggtattctgcggaccctaggagcgccctctggccttccgcattgttttatgtttcagcttttcagtgttccgtataaactatatcgttacatcttgcatacccccctgtatgtctatctcattctgctgttcttattagtcctctttgctttacattttgcttcttgacttgtatagtactcatcggcttgagtctgtatgtgaatcgtatacagtcccttccccttggggtcaagaggtatcattccaagtgggatatgtttcccatatccatcgtaatgcaataatgctcctgtatattcaagtggacaatgatccagatcggcactctgcaagaaacagtgaccgctaaccaataatcgctaacagactccagaatgctccaaaaacaaaaataaaagaaaacagaaaaaataatgctgtatgatagagttatcatagaccttcacccgaaaacagcctcctaagaataccttcacctggcccagtgatctgactctcaatttctttctgggatacgaagcaaacaaggttttgctcgtccaatgctttgctaagtgagcttccgctagattttgaaggcgtgcgtcggacgtctgagccgccagcgacagtaccaccacgacctcgaccttggtattcaccgacaaggcctaaagtctccaagctaccaagaacatctt

SEQ ID NO: 20575 - DNA, 2466 bp, Emericella nidulans
atctcaaagcacgtggttttcaactggcgatattaagagatagcatctatgaggagatcctcggtcagaaatcgtatcctaaacaagacagtgagaacggcaaaaggaaaagggaagagtctgaagaggccgacattagctgggaacgtactttacaaaacgcaacaaacagtcccgaatacttcgaggcagcgtaagccacctatcatgataggagtcattgttgttgcaaactgatcagtttatacaggtctgctttcctgggacccgaatttccatgggtgccgatgagtcacattaagaaagtcctcattgataagggacgcctttatcacgcattcgtagctctttactctgacgataaccttcttgagcaacggaagtatcaatatgtgaggttgaaaagtcagagaagtacgaactctcccaaaaagtacacccctcttcgtgacactcttatacgtgagatcaacgcagcgagaaaacatgtagaagaactgcagagtgagtggcctgtcttcttcctagctcaatgtaattattctcattgttcctactagtcactttgcgcaaaaagaaggaagaagaggaggcggaaaaggcgaacgaggaggaacacattcggacaggcagtctcattgagtgccattgctgttacgccgatgtcccgtcaaatcgatgtattccgtgcgatggagacgaccttcacttcttttgtttcacgtgtattcgcagatcggccgacaaccaaattggtatgatgaaatacatactacaatgcttcgacgtcagcggttgtcaagcttcgttcaatcgtcagcaactcagggaaatcttaggcccagtagtcatggacaaactggattccctacaacaagaagacgagatccgaaaggcaggccttgaggggcttgaggattgccctttttgttcctacaaggccgtcttgccgcctgtggaagaagacagggaattccgctgcgagaactctcaatgcaaagtggttagctgtcgtttgtgcaaagagaaaagccacatcccccaaacttgcgaagaatatcgaaaggacaaggggctctctgaaagacaccaggtagaagaggccatgagcaatgctctaatacgaaaatgccccaaatgccggctcaagattatcaaagagtatggatgcaataagatgcaatgtacgaagtgccatactctcatgtgctatgtgtgccagaaggatatcacgaaagagggctatgcccatttcggacgcggcggatgtccccaggacgatatacatacgcaagaccgtgatgacagagagattcagagagctgagcgggctgctatcgataagattctagcagagaatccggatatatccgaggagcagattcgagtgggccatgagaaaacaaatgctcaaactcgcggagttcgtagagacccgcggctgcaaccagcaattcaaatgcgggatgctatgagagttatgagggcggacatggggggtttctaccctcaacagcaccagcatgctaatacagctgcgcaaagacaactccccgtctaccctccgccagcttacaatgtaccataccctatggactatggcactatgttcaacccacctttccctggctttaatgtccttcaaaggggtctccagccgggcaacctcccagctcagcctgcggttatgcagcccatggtagtgggcttggccaaccctcctgcaaactttcacccacaggacattcagaatatcaccgcgtttcccctcagcaaagtctacctcggaatcaaaacgcagcttatcgcggtgtcggtttcggacccttttgagttccttaaagaagcaatccagctccacgtctaccttctttcccgtttggcagtacaacttcacctcatacaccttccgaaatttatggcctaaataattttggatattcgattcaatcttggtcgttggagttaacctacgttccgccgtatacccagaaaagcgttatttgcctttcacactgagcgtttcttgttccagtcttttttccctcctcgtacttctaccgtctcattcttttctagagggtctcgatacagacactgatggtgcactgactatactgcaacgcagcattctgtttcgcgattattgtcctactccctgaaacgaacttccattccccttaactgtccaaacatttttcgtacccagaaggcatacaactttcagaacttagactcatcatacatgcgatgcattttctgcatttccattatatctgctctaatatgtgcataggatccatccatacgagtttgtcctgtactctccttgggcacttaatgcgtggcgtattcaaccccatccgtaagaccaaccatgaaatgctcactattcactcaccgatatcgaatatgcttatatctctctcctgacacacctatacttcagccaagatgagataaaaa

SEQ ID NO: 20576 - DNA, 2483 bp, Emericella nidulans
tgctcaccgccgggtaaggtctcttgatatctcgatgaggcaaggactaatctgtcggtaggggatttgaccgtgatgatcattggggacaccgagccccagagcctaacaaagcagtaatttgcagccttgcattggcaaaacttcgaactgatatcaggggtgacctagccagtaacaatgttggaatggctcagaagcttcttctgttctggcggaactgcacgaagatgttggtgggagggcgtcgagttggacaatgttgagggtgttgaaggcaagatcaaaatatggattcgcagggtctggaccctagaaatggtgagttttgtggtttctcaacttggcccacgtctactaacaaccccctagagcgtgattgggctccgatagtattaacaacccgcccttaaaaattggtttccatctttttgtcccgtcatatcaatcaccgccgcgtaccttatccattcgcgttccaatgcacgccagagatacaatgtcatgctcaacactttggaccctgttacttgaagccgcatattgcggagtttacgatatcccctagttttcgagtctacgtttgccgatcagaaaattatcgtcgcgataattttctgcttgtcttttggtgcttatgcaattttgtctatagtgcttacttgaaggccggcctccatgcatgatttgtcccgcctcgctttctgctctccccgtctactcgttttgttgcctcttagtttgccctttacggatacttagcaaaatgccggatgctccacagtcccgctgaataatatttccagtacacggagaatgatcccctacacactagtacaaacgtcaagaagaaaatctatggttggctgtaggatgattgtgtcacgtgatatggatctggaatgggactagcgcagttatgggcaaaacgcggagcttgagcgcgatccccatcttcaagtctcgttggaattgttcttggcccaaacaggctgcggaagcgacttaatccttggaagatacctgattgaggcaaccgattgttggacgcaactaatccgtacacaatcccaagtgaagccttttgcagatattcccatccactccctttcccagtcattgagcgatcaaattcgcaggcgctattatcgtatcgcagatcgcggctcaaaacgtccccaaaatcccaaactttgaaccatagggatatgttcatgacaacctagatggccaatatgtccccttccagaggttatatcacgacctacccgccacgagtgcgtcaatatgcaaacgcactcttcacacccgtcattcctcagactcaggtcggtccgacgccacgaaccacgaaacgagggactgcagccatcaactacgcggaagatggcttcgacgatgacgactttgatgatagtgaaggtccccgacgacctacaggtctcagaacgttcggcgagaggaatcttcgttcgacaaagcggcgttggccgaaaagctgggaaaggaggcacacgcgccagtagaggttcaagggatatttcgggattggatgattaagaagatgatacgacccgcgtatgtgttttctaattgaagtcgactttctcggtcgttgctgatttgcgccgtccttggaataggtgtgccgatcaattgcagatacaagcgcaactccctttgacacttataccgattcgaatcgacctcgaagttccggcgcatcagcctctcgaacctttccaggtaccccggcatgttgttgacccagcgattaacacgacgctgcctgcgtacaggcgacctgatcccttacctgcgtttcggatcaaggacacgtttatgtggaatcttcatgaagcgttttctacccctgaagagtttgctactggatttgtccatgacttggaccttcccaaccagcatgcaatgaccctggcgatcgctacccagatccgccagcaattagaggaatatgcgggcgtcgcgctacatccgttgtttcaaagtacacaaccaaaatcagccgctccacaagcaggtttatcgcgagacgcatccaatactcccgcgcctccccatactgcgacaccggacagccgaggcacactggtgacagcgacgaaagagccccttgtaaacgacagtatcttaaatccagacgatgcatatagatgcatgatcaatctgaatatcaacctacagaacaagctatatacggacaagttcgagtggtccctcttacatcctcctgggatggccgaggaattcgcaaaggttacgtgcgcagaccttggtctaggtggagaatgggttggggccattgcgcatgggatttatgaagcagttttgaagctcaaaaaggaggtctgtgagagtggcggtctaattagcggtctaggcagctacgggaccgaaattgataatcaagcggccaacgcggctgaggcaggttggcgatatgacccgaagtctcggcgatg

SEQ ID NO: 20577 - DNA, 2515 bp, Emericella nidulans
gttcatagtcgatatctcagccttgcaactcaaacctggaagcacttcaagtattgcgaggctctcaacaatagtcccagcagatgttgcgagacaggtggaagtggtacttggcatcctccccggatcaaggttcttctttcttgataaaaatttgtggctttgttctgttttccttaagagttcggttacggaagataccatcgagcgtcattactttttgccacgcgactggacaacgacagaatatttccaacagtgtttgctgttggagaatggtacgcttctttgccctagggaggatgaggtggctgtgattaaaagcgaactgagccgctcgtactgacagttttcaatgtgccctgacggcccatcactgtacggctctaatcaggctgccgcctcttttgacattagttgttgcattggagtagctaatcaccatctcttgcacctaggatgcgccagtggatgctccaaaaaagtaaatatataatccttgttaagcctgaggtagccgtggcacctgtcaggtcgttctatactggagggtttccattcaggcccgttcgaagctctgtatagggagtattgaattacgagctgtggtgtgaaagtctgtaatcctcatttcgcataaagcatgtattgcgatatcactatcccctcttgttgcattgaatctcgaaagattatgaatcagtagttgttctggtggctatacacgcgccttaagctaaatcggccagctgattcgcttgtttaggagttgtaaagcaaagccctgttttctgttttaccccgcctgctttgctgcgacttacagattgctcgtccgccagctctcatctggaaacgcccccttttctgctcatctactcttggaaaatccagattgtcacgagcaacagctgttttgttcccttgtgagataaaataaatacagaatatgtcctcggcaaacccttctactgatatggcacccgctgcgaatactcctaacaatatcttggaagcacgagagactcccgtgtcagctacgagaccgtacacttcattcacatctcgtagcacgatgttcattgttatcattgcgggttttgcaaccatcacatctcctcttaccgcaacagtctacttcccactactgcctacactagaggggcaattcagggtatcacctcaggcaatcaacatgacgttgacaatatatgtcatttttcaagccatatctcctgcagtgtttgggccactttccgacaccgttggcagacgacctatcttccttcttacacttgctatctatgctttggctaatcttggcatggcattgaacaagcataactatggatttcttctgctgcttcgagcgcttcagagcttgggtgccagtgctgcattcgctataagctatgggattgttgccgatgtctgcgtatcaagcgagagaggaaagacgatggcttgggttagtatagccctgaacatgggaacgtgtctgggtcccataataggcggcctagttgcatatctcagcggagatattgagtgggtcttctgggcgctattcatcgttggacttcttctattactaattgtcggaatgttcttgcccgagaccgctcgcaatctcgttgggaatggaggtgaccaaacggaggggactctatggcaacagtgctgctggagttatattcgaactgtgcgattgctcaacaaagaagagaatgagcaagaccatcgagaatacgaagctgcagttagagctgaaccaggaacgctcaaccggctgataacgagaatttctgcccctttcagtattcgaatgttcgccgctcccttgcgaattatcttctttccagacgccttttggtgcttgtggataaatggatcgttctacgcagtcgactatatccttgccgctacggttcccaatattttcacagacatatatcaattcaatacgctactaacaggtctagcctaccttccaagagggataggtatcattgtcggcagctactgcaacggtaggatgatggactataactacaaagtcacggcccgcaagcataatcagcctatcaaccgtgtctccggtgataacatacaacagttcccaattgaactggcacgctcccgcggtacttattatctcctagttatatcgacatgcacactgcttgcttacggctggacggcgaattataaaaagcacttttcagttctgttgattctgcagtttattcaggggttctggagcacttgcttctacacgatctataacacattgttgatagatgttttcccagataaccctagcaccgcagcagcaagtgcaagtataacaagatgtgcattggccgcgataggagtcactactcttcaaccatttgtggacgcagcaggattagggtggtattttacggctcttggactctttagtgcagtatgtggtattgtggccgtcagtttcgttagaaaatatggtatgcggtggagacagcagaggtat

SEQ ID NO: 20578 - DNA, 2526 bp, Emericella nidulans
  unsure (1)..(2526): unsure at all n locations
gcacgcaccaacaagggacaataaatgagcgtttttcaaggctagggactgagtcggtctccatccgaggcaaactcccggaaggccagtgatcccttgcgcggttgctgagcttccaagctaaggctgggggcttagcagaatcgccgcttcaccatgttttgcatgattagcatacgcataacatacagtacaagttggtcatttagtctcggtaatcattgggtgacgtaggattactcagactacaaattaaatacagtaccagctagtactccgtatttctcacgtctacccatgacgaggttggcagaaccctcttagaggccccgtcacatgatcaggtaaaatacccgccactagtaatgcaccagacggggtgacgaagctccgagtacgaagtgcgagtgcgggctttcctccaccaccaggcatctcctgctagccgccgtggaagaggggtctgttacatctccaactcctcttcctttcgtcgtttgcattccttccttcaattaatctcgtccctgggatctccatgagtgtaccttcgctctcctgcgcatccgctccttcccggccctgacttcattccttgtcccgcgtcaatgcgtcctatctgaatccaatttgcgcctcctccagttacgcgcggatacgcaagtcgccttcagctcgatatactgatacaacctaatctacagcctcactcctttgtcgactcgatcgtttcatcaaacgggcggactaaatacctgcgcatacgtgacgtctcgatctggtcacgcactaccttatcttgccgattcacgatcagatcattctcgccaccatggccgagtgagtcttcaaccctaagtcgatcgtattcttccatgaagctctactaattcgcatgtagtctgatcgccttccactcttattattcgcatcaaggtttcctctcgccgtcaaacatgttaccgcgcccatccagccacaaacggtctctgtcatccgggaataggnntcgttcgcctgataggcatgttacgaaggccaagtccacaaatgatcttctccgtgttgccgcagaccctccggccactgttcgttcctcaagtgaaggtggggacggcttcagcactttgagggacccaagacttctgcccagttctgaatcaacagagtcgactctatcgtcctcacatcacccggaccttaatgacgaagttgcaacacttagtctaaaacttgttcaagcgattaacaatcagacaaaactcgatgacactttggccgttactcgccaggagttagagcaagtccaggaaaaggcccgcgcgttagagtcggaaaacgagcaatactggcgagacattgaagacggagcgctggtgaagaaagctgaggttgaccaattgaaggcttctttggcagaagaaaaggctcagcgtttattggcggagaaggagaaaaagggaatcgagcaagagctagaaacactcactgcggctctctttgaggaagcaaacaaggtgagcatatactcggccatggttccttaaagctgtttttctaaatcattccacagatggttgctgctgccaagctcgagcgcgaggctgtggagaagaagaatgaacagttacgttctcagatcaaagacacagagtcgcttctcgcttcgcaccaagaacaattagccgaattgaaatcagtccttcaggtaatgaacatttccaaggacgatctcgatggtcgcacagcaatctccacagcaccaccttctccggctggtccctcacaacctcccgccttcactaggaagagtatggaagctacagatatccctggcgatgttgtctgcgccgagatagcacccggtcctgctacaagttttcctgatctcatcaaaactgtatgccgaaccgacatattggcttacgaggattttcgtgagctgtttactatatcgaagagttcgaaaccccccagtagggcgaccagcggatcatattcgggcttaaacgtcatgagtctggctggctttggtggtgcggggttcggctcgggctccccctcaccgtcaaaatctcaacctcattccccgagtgggagtgtttcttcgcctcaaccccctaactctagcgtccctttgaaggatgcacgattctacaagcgtgcacttgtggaagatatcgaacctacgttgagactcgatgcggccccagggatatcctggctgaccaggcgaaacgtgctatctagtatttgtgaaggaagcctggtcgtagagccggtaccaccaaatgttcgaaaatacgaattcccatgttctctctgtggcgaacggcggagtggcaccgataatgagcgcactcaccgtttccggacatctgacagtgaaacagcacagcgatacccattgtgcgttctctgtttagaaaaggtacgctcgtgctgtgagtttgcgggctacctccgtctcatccttgacggtcatatccacgccgaggaacctgacgagttgcaagaggcgtggga

SEQ ID NO: 20579 - DNA, 2571 bp, Emericella nidulans
cggaagatgacaagggcgtggatctcgagttcttaagcgaggctgtcaagaggttcgaggaggatgagaccattaagcctgcttttattgcggctgttgaggaactgagtcgggaactctcctcgatggggatcaatgatgattacaagccatacgtgactgtatgttaatctaccctcacctccagtccttttctcaacatgcgcaggctctgcgaaacctcgttcgccattccgccattgcctctgctatcacagagtcgtccatcttcaaccacacacgggatcccgcttcattcgaaaaagagaccctcctcggaccatggtttcgcctttcgaccttgcagggtgacgctacgatgtctttcttctccgccccgaagtcgagagaccaaggctacatcctaaatgctcagcggtcgattcgcatggtccaagaattgctcagctctgatatcctagatatcatcaatcatatggttcgagcttcagcagaagcgagaaataggattttggactggtttgcggcggctctgaacatcaaccacaagcgaagggcgatgcaggtagatccggctactgtttcttctgacgggttcatgttcaatcttaccacttgtcttgatcatctctgtcaaccgtttatggatgcgaacttcactaaagtaagtccaacgcatgtgaccgagttttcatattaacagtttatagatcgacaggatcgatattgagtatctgcatcggaaccctcgtgttgacatgagagacgagaccaaaatcaatgctgaccagcacgcttctgatgccttttatgcaaagaagtctgaaggcacatccaactttatcaccgaaattttctttctgacggctgcggcccatcattatggtagtgaatcgctgacctctaaactggatacgcttgagagagacctgaagcacatggaaactactcttgttaaacttgaggctgagcgacctaaatggtcgaactacccggctcagcttaggttgttcgagatacaactgaagaggttcaaagataaactggacatggggctggccctgaagtacagtctccaaggcgtattgttcgacgatcaatggcagttccggtctatgactttcatgcgttatgttgttgtctggctgctcagggtggcttcgggcaaaaactttcccaaagaacagcttgttctgcctcttccagaacaaccgcctgaagtgttcaagtgtctccctgagtactttgtggatgatattgtcagcaacttcaagttcatcatgtggtgtatgccgcagatcattacggcaacccaaggtgacgagctcgttatgatgtgcattgcctttttggagtgctcagagtatatcaagaatccctatcttaaagcaggcctcgtttcgatcctgtaccgagggacatggcctcgccctggtggcgcaacaggtgtcctggtcgacctattgaactcgatgccctttgctaatgagtatctgctgcacgcttgcatgaacttttacattcaagccgagcacacgggtgcccatactcagttctatgacaaatttaacattcggtacgagatcttccagattatcaagtgtgtatggcccaacacgctctaccgagcgaagctcctcaaccaggccaagcaccacctggatttctttgttcagttcgtcaacttgcttctcaacgatgtcacctatgttctcgacgagtcgtttggcagtttcaagaccatctacaacactcagctggagttgcgcaatgagggagctagcatggatcctgccgtccgccaggagaaggaagagcgtgttgcgcaggcccaacgtagcgccaagtcgtacatgcagttgaccaacgagaccgtggccatgcttaagctctttacagaagccctagcagactcgttcaccatgcccgaaatcgttcaaagattagcggatatgcttgattataacctggatgctatggttggcccaaagagttcgaatctgcgagtcgagaatttgcacgaatacgggtttagaccacgtgcgttgctgagtgagattgtggatgtctatctgaacttaatgggcaaacagaacttcattgttgccgtcgcccgtgatggtcgctcgtacaaacctgccaattttgaaaaggctgccgagatcctgcgcaaatggaatctcaaatctccagaggagctgaaacgttgggatcagcttcaactgaaggtcaaggaagctaaagaatctgatgatcaagctgaggaggatcttggagaaatcccagacgagttcttggacccccttatgtacacgttgatggaggatcctgttattctccctgcatccaagatctcgattgatcgctcaactctccgtgctcacttgctgagcgatccgcacgatccgtttaaccgagtcccattgaagatggaagacgtcgcacctggtatggatttctgccccctttatctttgaggattaataagctaataagtccatagataccgatcttaaggccaagattgaggagttcaaacggcaaaagattgcagagcgacgagcagcgcag

SEQ ID NO: 20580 - DNA, 2585 bp, Emericella nidulans
ccgagcgcgatctagatgaggagtttgaccttggtccaggtattcttcacacgtcgctactgagggccgtaagaagatgtctctccgtgagatcattgctgcttgcgaaaagatctactgtggctcgtacggcgtggagtatattcacatccccgaccgtaagccttgcgattggattcgtgatcgtttcgaggtcccggagccctacaagtactccgtcgatgacaagcgccgcattctcgaccgtctcatctggagttctagctttgaggctttcctggctaccaagttccctaacgataaacgtttcggtctggagggttgcgaaacccttgtgcctggtatgaaggctttgatcgaccgcagtgtcgattatggtatcaaggacatcgtcatcggtatgccccaccgtggtcgtctcaacgtcctgtccaatgtcgttcgaaagcccaatgaatccatcttcagtgagttcgccggttctgccgagccttccgatgagggctctggtgatgtcaagtaccaccttggcatgaacttcgaacgccccaccccctctggtaagcgtgtgcagctctctcttgttgcaaacccgtcccatctcgaagccgaggaccccgtcgtcttgggtaagacccgcgctatccagcactacaacaatgatgagaagaacttcgatagcgccatgggtgttttgctgcacggtgatgctgcgtttgctgctcagggtattgtctatgagaccatgggcttccactccttgcccgcctactccactggaggaactatccacatcgtcgtgaacaaccagattggtttcaccaccgatcctcgctttgctcgctctacaccttactgctcagacatcgccaagtcgattgatgcgcctgtcttccacgtcaacgctgatgacgttgaggctgttaactacgtctgccaggtcgctgctgactggcgcgccgagttcaagcgtgacgttgtcattgatattgtctgctaccgtaagcagggtcacaacgagactgaccagccctctttcacccagcctctaatgtacaagcgcgttgctgagaaaaagcttcagctcgacatgtacgttgagaagctcatttccgagggcaccttcaccaaggaggacattgacgagcacaagaagtgggtctggggcatgctcaatgacagctttgaccgaagcaaggactaccagcccaccggtaaggagtggctgacctccgcctggaacggtttcaagactcccaaggagcttgccactgaggtgctgccgcatcttcccaccgctgtcgagcctcctattctgaaaaatgtcgccgacaagatcagtggtgctcctgaaggcttcactcttcaccgcaacctcaagcgtattctgggcaaccgcaagaagaccgttgaggagggtaaaaatattgattgggctactgccgaggctcttgccttcggttccctcgtcagcgagggttaccacgtccgtgtgtccggtcaggatgttgagcgtggtactttctctcagcgtcatgctgttctccacgaccaggagactgaggcgacttacacccctcttcagcacatcagcaaggaccagggtagctttgttatttctaactcgtctctgagtgaattcggagcgtaagtttcactggaaattctctttcgcaattctctaacctgtttacagccttggcttcgagtatggttactctttgacctctcctaacgcccttgttatgtgggaggatcagttcggtgactttgccaacaacgctcagtgtatcatcgaccaattcattgcctctggagaatccaagtggctgcagcgctccggtttggtcctgtctcttcctcatggttacgacggtcagggccatgagcactcttccggtcgtatggagcgttacctccagctctgtaatgaggagccccgtgtcttcccctcacaggacaagctcgaccgccagcaccaggactgcaacatgcaggttgcttacatgaccagccctgcgaacctgttccacttgctgcgtcgccagatccaccgtcaattccgcaagcgtatgttgttccctcccttacaatatggacctaagctaatcaaatctagcccttgtgatcttcttctctaagtctctccttcgtcacccacttgctcgctcctctattgaggagttcactggcgactctcacttccaatggatcattcccgaccctgctcatggaaccgccatcgatgagcctgagaagattgagcgtgtcattctctgctctggccaggtgtacgctgccctcaccaagcaccgcgaagccaacaacatccgcaacactgccatcacccgtgttgagcagctgcatcccttcccttgggctcagttgaaggagaaccttgacagctaccccaacgctcgcaacattgtgtgggctcaggaagagcccctgaatgccggttcatggagctacgtccagcctcgcattgagactctgcttaacgagaccgagcatcacaaccgccgccacgtcatgtatgctggtcgcccgccaagtgcttccgtagccaccggcttgaaatccgt

SEQ ID NO: 20581 - DNA, 2637 bp, Emericella nidulans
cggaagacctcgccttcctcctgggaatgcagcagaaagacctgcgcaaactttgcgccaagttacgcgaagatcgtctgattgcagtgtatggcctgcccacgtcattttgacttcttggcagaaaattaatgagcgcttgctgttcgagtatagtaatacacgagctgagattcgcgatggttcgacccgcccggtcaaccgagagtactactacatcccgctacatccggtcattgacgcgattaaatacaaggtttctaaactgacgtctacaatcaaactgcaatatacaccgagccaggagaggaaggaatatatttgcctgagatgtggggccgaatggacggagttggacgttctaagtctttactcggaagagggcttcgagtgccagaattgtggagctattctcgagcgcacggaggacgtcaaaggaagcgagggcatcgaccgtaccggtcacgagaagaatagtaagctcatggcgcacgtagacgggatgctgaaacttctcaaacaaattgactccgtggaaatcccccccaacgacttcgataccgcctgggaccacaagattgatgtcgtgcgcaaccaacacaccaaccccaccagagcagccgtcgttgtgccatccaagaagcaagaagccgtccgcggcaatctcaagacggacgccagcgcgctcgagatctctctaacatcctcggaagaaaaaagcgccgccgagcaaaaggaggaagcagcccgcaaagccgcgctggagaagcaaaatgcccttccagtctggcacacccactccacagtctccacaacagctggcaacgtcagctcgatcaaaacagaacccgacgtcaagatcaagcccgagcttcttaaggaggaagaagaccagaaaccgagcctcgttgatctggacgacaaagtcgccgcgtactacgccgaaatggagcgtgagaaggctctacaggcacaagaagatgccagcagcgccgaagactcagatgaattcgatgagttcgaggacgtcggtgtctctgcttctgcttctccggctgtggggggtgtgaatggtgctgacccaactcgtgcaccgagtggcatcaagcgggagcttgatacagattccgggaccagtgcgccgcagacggcgacgggaacgccctcgactccggcggatgaggggccagcagcgaagaagatcaagactgagctggaaaatgaggtcaagaaggaggagtctgatgaggatgacgaggagtttgaggatgtctagttctcttttctatgggcgctggccgtcaaagtactatagactaaagattttgtgttttttcctggtcacgctctggcttacttaggtgatttatcaagcacgagaatcgaaatatgtgaaatcatctcatattgttatactagaaactgcatgttatgcgtctgcagtaggattatttgttatcttctgatattgaaatagattctttaaagtataccagacactcttgtaatactgcattcaaatatatagcatgagactaggtaatgcctggacccagaagacaagcagacaaaatgaaataagacgttagaatgaatggaacaaccgaattcactgcaagtttaccaactatcaagaacaaatcccgaattggtgcggcttcgatgttctcccttacccaacggcatcagcgccttttcgtgttataaccccaggccatggacttatctacactccacgcctgcgcttaaaataatggctcaacgcacaaacattcactcttctcattctcagcgccttctccttctgatggttcaatccgagtttgtactagagctcaagagcatcaacgagctctagaggaagacagacaataattccgaatggagatccaaccctcgatgaatagtgtcacatccggtaggttgaaaggttccgagcttgaacgggatttgcctactgcgacactgatagttctcccggtgacggaataggtgatggtgaagagtatgagatggttcatggcatattaaaggcggtattgtgccttgttcaatatacactgcacgaaaagataaaaggaggctggacggccaatttatcatcaggtcggtcaagaggatcagcagcttgatgagctgtctgcttctataattgttgcagctatcaaggcctggatacggctaagagaaatcgaatttcaaataattaggtggtatcatctagatacctcggtccggcaaccgaccatgatacaatgagccctcagtgtcactgcggcacagccttgtcgacagagtcctcatccagctagtatacacttttcgcaaactccgttcagacttttacctacctataacggtacaatagtcttcattcctttggcaatccgttgaatctgcccagtgtaatacgtctacaccatcgttagctacctacccgaagctggctgggaggggaaggggggaggaaaagggaaaaaggacaagacgtacgctctccgctccagcccctatagcagcaagcggaatccacttcgcccagaacggcacagggatcctattcaaatgcaactgcgcctcactttcctgcacgctctcatcgagcagcaactttggaaaatgcgggtcaattgccgc

SEQ ID NO: 20582 - DNA, 2655 bp, Emericella nidulans
cgcaattcccggcaagcattgggtgctgcaagtgtcccagggttctgaggaggatagtagcacaacttccgccgaatcgtctaggcctattctctcgcggtttgggtttcacaggtcccacgctcggcgattagcgcggaatatgcttcttgtgttcaatgacccggaggaaatgagttcttggttattggcggtccgcgctcaaatagagactcggggcggtaaaaagtacgtttctgaaaaggtgtatgacgagggaatggagagtcaattgcggaccacccctagcatgcgacagatggtgaagaaggaccctaaccggttctcggcggtctacctgcaaccgcggcaatcaatgaactttgaggacaaagactctagcgttggggatcagtctcgtcggagttcgtatatttcgctccatcgccggtcgatggttatgcaccctaagcccgagtcgcgtgcaggctcggtgtccacggcccagacagaagaagagcccgcacgcttctatgccgcagttggatcgccccctcttccagacagcagcatcattgcagagccaacgttgtctgtcgccggtccggctagcccgactttctcgactccgagaaagcgacaatcaatgttcctgcctcaggcgacaagttcagaagccgcagagatacctagagcgcagtcggcggtccctgaggcacattttcggagtgcttcgccgccggctccaaactttagtgtgccactttttagcaaaagatttgcagctcgacaagataggcaccagggtcctcggctgccgtctgtccaaggtgatcatccagatgatacctcaattgataccgtgtccatgttttcatctccaccgcaatctcccagtcgagacggcttcgctattccacttgataaccgcgagcagcgccaactggcagaacggcgggatcaaaacaacaagtcacttcgtacgtcaaattccgaagatacgcttgcgaatgtgcctcgagaacgcgaccgcagccgtcttcgttattcgcatctgccagagcatgttgcaatgctgccttgccaatcaacttcgcctcgccgagttagtgtcaaaccagtggtaccaagcgcctcgcatcaacctatgcccattgcccaagtcgtgaatacgtccaaccactctgatcagcccagcaagacagatcagccaagccgtccatcgtctatagtcatggcgcggcggaagagcatgactgggctcactgccggtcctccaagcgcgcctcctccaaacattcccctaccgaaaattccttcggcattcgttgatcgctctccgcaagttgcgttgtcagaaaagtctccaccatcgtcacctgtgaaagacgttcaacaggcactgggcgacgtcgctcctatttcttccgcgcggagccatcttccacggaccgtacggagtgtcacgaccaggccaatgaatacgcccgcgaagtatagcggcgcaaattatatctaatataacccggaccagaaccaccaaccctatatgaatcacaagttcccacgccgaaattctcgtttctcacggctcgagtactcccacctcgcatgcattctgagcggcttagcgttcactctcatttcccttcctttctttgatcacttcctgcatgataccatttctaatcccgtttcatctccctgtccacccaggcatttgatatgctgtgatggagctttcactttctcgagatatcccgcgctgtatgcgtttgcatgatttatttttgtattttggcttttgcatgtgtggggcattgttgtgtataataaaatagacatgggataccagcaatacaaaatagtaatacggtgtgaactgacttgtttgatatcttcagccatttacaaggaccaatgtaccaagtatcctcatccacacctctatagaaaacgtatcaacaacgtcaagactacggggtatacagtgggtaactgacggtagttgatatatacctgctgggaagtactagtactgacgactccacaggggtttattcgacctctgtaggatactagcaacattctcaaatttacacagatgccttcgatggaacatctcgaggactgcagcgagggtcgcctcagacacacttagtgtacttagtcccaggcatacaatataaccaatatgacgtcatatttggttagcgggcatcatttgcaactctagactcgtgatacaaggcaggaagagaggctccgtctcaaaaatacttctcgatggtccataaatctcatcagtgagcaggaatcaaacagggttgtggtcaggcaacctggatgacatggtgatgacggcaagccctaacaaacaccgcgttatgttccccttaggtctggatgttttccaggtccacctgtcctagtagccacttttgaatccacaacagctattatggctaaattgactggtggggtggacacttgcacgccagaggatgtatgatgacacctccgttgcagctctgtgtgctctgtagacgtcaccctgaaaccaccttcagcttgaccaaaacccgcatataaacctcccaaccatcctcaatccaaccttaattcgatataatgctccgctctcttttccaagcaaaaccctgcacctcgatatcg

SEQ ID NO: 20583 - DNA, 2658 bp, Emericella nidulans
acggctccctacggctgctgccgaagacgacgggaattcgtccaattcttaacctgagacggcggaccttggttagaagtatatacgctgggaaaaaccggtatcacccagcacagagcgtgaattcggccatcgcgcctgtctacagcatgctgaattatgagagagggcgacgaaacgacctgcttggttcaagcatgttctctgttggagatatgcattccaggctgaagaaattcaaagagtctctgatgagcaggggctgggatcagcgaaaacggctctatttcgtgaagctggatatccagtcctgttttgatactataccgcaggcgaagatagtgcgtctggtcgagaagctggtctcagaggaaaactaccattggatgaaatatgtggaaatgagacttgcaagcgaatttgacaacatgtggccgctgcgaaaaccgcagcagcgcagaacatggtcaaagtacctccaaagagttggcccagttggcaggccagagaatttggcggatgctatcgccaatggaagcgtagtgggacgaaggaacaccgtcttggtcgacacaatcgcgcagaaggagtacaatggtgaaggcctgcttgacattctcaacgagcacatccggaacaatctcgtcaagataggcaagaagtatttccgacagcgcaaaggtatcccacagggttctgtgctgtctagtcttttgtgcagtttgctgtacgctgaaatggagcgggacgtgcttggtttcttacaaacggacgacgccctgctccttcgtttgttagacgacttcctgctggtaactttggattctggcctcgcaatggatttccttcgagtcatggtccgaggacagccagattatggcatttctgtcaacccagcgaagagcctagtgaatttcgcggcggttgtagacggggcgcaaatcccgcgacttgttgacacgccactcttcccttattgcggcagtctcatcgacacgcgaactctggaaatcttcagagaccaggatcgaatgctcgagggggcggattctgcgagtgtcgctctcagcgattccctgtcgattgactccacgcgaacccccggacggtccttctaccggaaagttcttgcatcgataaagcaatccatgcacccaatgtacctagactcgacgcacaactcactgcccgcggtactactgaacgtttataagtcctttgtcacggccgcgatgaagatgtaccgatacactcggtcactgccgggccgggcgcgacctcgacccgaggttgtggtccgcacaatccacgatgcaacgcagttgggataccgactgatccgtggccggcatggtctgtgcagggtcacgcatcctcagctgcagtatttagggggggcggcgtttcaatttgtgttggggcggaaacagacacagtatgcgggcgtgctgcgttggctggacgggacgctggcggaagcacggcagagcgttggcaacagtgttttgctggcacaagcggtgcagaaagggaatcggacgtatagagagtggcggttttgaccttgctccttacagcttgagagaaattaaaattgaaaaatgtccgactatgcaggcattgcagacattgcagggccggcggaatggccaactcaatgaagggagccaaggggtcggtatctacagcgtagcatttaccatacagcagggcgggatggactcggtcttcccccaagagcaccagttgtggtccttccaataaccataatcatatgggattatacctatccatggtcagtgtgtggtctgagcagacattcccacggatcaggtttaagcggacgacaaccacagtggtcgagcagacagggggtggcaatctctttatcaatatcaacaaacaaacaattttgctgctacattcttccactttaggccttttagaccttgtaaacattttagacctcattactgttgttgcggtggtggtcttttatttcacgacaaacctcaaagccacacctgtggatcattggtggcgtgccttggaacagccgctcgctccttcatctcgacgacggaagacgtcgcgactccgcagtgccttgtccctaaaccggtttgatgttgatcgccgcttgcagcgaatgaaatgaggagtctggaccggatataagcctgaataccaacgtttctcaagcgccattgggcgatttgcaataatctctgcctcaggcgctcatatcggtggccggactagacccttttgactgcgttcggcagagaacctggaattcgcgcctccaacgcagtcggtgatggaatcgtcccagcttcatatcttcactcttttcgtctttccttgcttttttcactcgctcttccgtcgataactcctccaactgcccttccttcgcttgcgtcgatctttctttcttcttttctacttcacatcttctacctatcccatcccactcgctcctccctttccgtctcgagtctcacctcttaagttgaccgaacccctgttcacttttcgttccactggcgtcataacgcactgtgcaccgctgtctggcctgccctagatatcagtcctggttattgactggtaaattaatggccctgtgcctccttgtggaatattagtacagcg

SEQ ID NO: 20584 - DNA, 2658 bp, Emericella nidulans
tcggaacgcgcccttacctgttgtcgataaacataaacaagacgtcagattcccaggccttgaaagaagaattctgaggaaaacccaggttctggtcaatcaaatcactcccggtatgcgcgtagttcgtaagactcgtaaatggtcacaaagggaagatcatccaaagcgattgccagtttcgttactttcgttaattatgggttctcgttcttctcaagtcaatcgcaataaagaaggattatggaagtcaaatacgaagagatcgtggttgggggagattcagagaaactcgtgatcagatcatgcagatacagaggaaagcgagaagagcagacatgtcatccaccactggcgggaagagagacaaagacgtcagggccagacagacggatgatctagaatggaaccttggatgaaagaggagatgcaagtgcagtgggagcgttaagtaggcctgcgatcgctggtaccctggttggagactgcggactcgtcgtgcactggagcctcgacgattgttgacgtttgggtgtcgggagtctcccgggcaaccgcaccttcctgccagacctgcttgcaataatatcggacgcttggcgcctagacgcagaacactctcgatcgccttagtcctaatcaggcctagcgtaatagcctccccagtggtccgtgctgtttcccctttaggccttgaggatcttttttttcccgcggcgagagctggtccaggcttttccatcactcttcatctagccccaactcagcaatgaaccggttaggcgggctgtccttgcccttgaggccagtatgtctgttctgtcgagctcagacttcccttgccctgtctcctcttcagggaggacaggctgtacgatcgattgccacagggcgcctccgccgcagagcccgcatgactctctctaaagatgtcgccaaatcatccctcaagccgaaacgaacagaccgcggtaaattagggccgtttcccaacatgaatcagacacgagcgcgagttcgtgaagatccaaggtcacggtcaccggccgccttgaaacgttccggagagacagaagagaagccagcgatgaataccgaaagtccgctttacaaggccctgaagatgcagactgctctagcacctatctcctacggaaaacgaacagcaatcaaagccaagattgcagaaatcacgagcttcgatgccttcactctccttcccattgtccggaattcgattttctcgcaagcccttcctgggatagccgatgctgttcccactcctatccaacgagtcgccataccaagacttcttgaagatgctccagcgaagaagcaagctaagaaggtggacgacgatgaacctcagtatgagcaataccttctcgccgcggagaccggttcggggaagacgctagcatacttgatccctgtgattgacgcgatcaaacgccaagagatacaggagaaagagatggagaagaaggaggaggaaaggaaggtgcgagagagagaagaaaacaagaagaaccaagcatttgatttggaaccggaaattcccccgccatctaacgcaggcagaccgcgggcaatcattctagtaccaacagcagaattggttgcccaggttggagctaagctcaaggctttcgcacacacagtgaagttcaggtctggtattatttcctctaacctgactcctcgtcgaatcaagagcactctctttaaccccgccgggatcgacatcctcgtctcgacaccgcatctactggcttctatcgcgaaaacggatccctacgtgctcagccgtgtcagccacctcgtactggatgaggctgactccctcatggatcgatccttcctgccaatatcaacggaagttatcagtaaagcagccccgtcgctgcagaagctcatcttctgttctgccaccatcccccgcagcctcgattctcagctccgcaaactctacccggatatttggcgtttaacaacacctaatctgcatgccatccctcggcgcgtacagctgggcgtagttgacattcagaaagacccataccgcgggaaccggaatctcgcctgcgcggacgtgatctggtctattggcaaaagcggagcagggagcgatgaggccggcagcccgtggtctgagccgaagactaagaagattctcgtctttgtcaacgagcgcgaggaagccgacgaggttgcgcaattcctcaaatcgaaaggtatcgacgcccattcatttaaccgcgactcaggcaccagaaaacaagaagagattctcgccgaattcaccgaaccagccgccgtccccaccgcggaagaaatcctgctcgcccgcaagcagcagcaacgcgaaaatattaacattccctttgtgcttcctgaacggacaaatcgagacactgaacgccgccttgatggcgtcaaggtccttgtcaccaccgacattgcgtcacgcggtatcgacaccctagccttgaaaaccgttattctctaccatgttccccacacaactatcgactttatccatcgtttgggtcgtctaggacgtatgggtaagcgtggacgggcggttgttttggttggcaagaaggaccgcaaggatgtggtcaaggaggttcgtgagggtatgttcaggggccaggc

SEQ ID NO: 20585 - DNA, 2666 bp, Emericella nidulans
cccaatacccaggaattcgcctcgtgggtgggcaggacgaaaaaaaaggatatttatgtcatctcgaccgcgaagagacctgtacctcttgaacactatctttgggctggaaaggacaagttcaagattgttgactccaacaaaaggttcctcgaaagcggctggaaacaagcagatgatataatatccggcaaggacaagatcaaagctcagaaagcagcagaagctcaagcgcagtctcaagcaagcagaggtggttcacagggacggggacggggacaagcgcccgccaggggtggcccgaggggagggggaggaggacaacgtggaggaggacaacgaggccgaggccagccggcaaaccgaggaacaggcaacattgctcgtacagggagaggcggcggacgtacaactgccgcacaggacaagactgtctgggtccaggttgtgcaacatctgcgcaaggagaatctgttgccagcctgtatcttcgtattttctaagaaaagatgtgaacagaacgccgactcattgtccaaccaggacttttgcaatgcgtccgagaaaagccttattcatataacgatcgaaaagtcccttactcgactcaaacaggaagacaggacgctgccgcagattcttcgacttcgcgaactgctaagtcgcggtattgctgttcaccatggtgggcttctaccgataatgaaagaaatcgtcgagatcctgtttgccaagactcttgttaaagttctcttcgccactgagacatttgccatgggcctgaacctgcctacacgtacagtggtcttctcgggatttcgcaagcatgatggcaaaggtttcagagatctactgcccggcgaatatacccaaatggcggggcgtgccggtcgaagaggtctcgacaacgtcggctatgtgattgttgttaactctggcaaggacgaggcaccgcctgctggagcgttgagaaagatgatcctcggggacccaacgaaacttcgatcccagttcaggctgacttataacatgatcctgaatctactgcgtgtggaagctctgaagattgaagaaatgatcaagagaagtttcagcgaaaatgccacccaggccctgctcccagagcacgagaaacaggtacaaatttctgaagccagcttagaaaagatcaagcgagagccctgcgagatctgcgatgttgatctcgctgcctgtcatgatgcatcgatcgagtatggaaaattgacgagcgagctacacctcaacctactttcatcgcctgtcggcaaacgccttcttatgccgaagcgcttagttgtataccggaaggtgattaatggatctccataattagccgcagcttaagctgacactttgcaggatggataccgaaccgcaggtgtcattgtgcgagaagtcggagggggccccaaccccgtcatacagattctcgagataggtaaactgaacagcaagcgtcacccaagcgagattctcccattccttccagcgttcaggggatttctgaatcctctaccgacccgtgccgccgatatgactctgaaagtttttaagatcccaattgcggatatcgagtgcgtcacaaacactatagtcaaactgagtggcccaacgtggtacctcaatatcaagaaaggttggtctcaatgcatttggtacaagggtcttgctgacattagtttaaagaggcaatcagattcgcagacaaggagctatccaagctatgctcctcgtggactactccggtctgggatgagctagattgggctcgaatcaaggagctccaattaagggacatcctagataaacgacgagagcaggcaaatatcgcccagtcatgcgactgcctgaaatgccccaaattcttgaaacacgtatgttcatattctaccctttgacgattcctgccatactcacgaccttttagtttgagatgcaacgtgatgagtggcaaattaaggagaatatctcgcagttgaagcaactcatgtcggatcagaacctccatctactcccagactacgagcagcgtattcaagtactaaaagacttgggcttcgttgacgaacaatcccgtgtgcagctgaaaggaaaggtagcttgcgaggtaagacttcaaaataaggtattctccataaatgtgctgagacatgtgttagattcattctgcggatgagctcgttttgacggagcttatattggaaaacgttctcgcggaatacgaacccgaagagatagtcgctttactatccgcttttgtgttccaagaaaagacagaaaatgtgccgaccttgaacccccgtctggagaagggcaaggaagcaattattcgcatttccgagaaggtgaacgatgtgcagatacagcaccaggtccttcagtcgaccgaggatatcaacgattttgccagccaaccgcgatttggactggcagaggtggtttacgagtgggccaaggggatgtcgttcaaccggattacggatctcacggatgtgatggagggaaccattgtcaggactattactcggctcgacgagacctgtcgcgaggtgaagaatgcagccaaattggttggagatccaacgctgtacgcaaagatgcaagaagcgcaggagaagatcaagagggatgtgatcttcgcggcg

SEQ ID NO: 20586 - DNA, 2732 bp, Emericella nidulans
caataacctcagcgtacagagagtatgttatggaaagttggaaaatgccacaattcaggcgtctttgattcctatgccagcgccgcaaacaatccttggggacatagcgcactggccctcgatgaagcttggagttcatcggcaagcgggccaaaccaacaaccgcattgaggtctccgatccgaacgggaaagtcttcggtgtcgtcgattccagaaccgccgcggtgatagttcccctcctggattctccagctcttaaggttgagattgcggcgcgtctggatgtgcgaaagaaactaccaaacgaagtgccgtggaccccttgctcgtctattttccgagcttcgataaatctttacggcctccgtcaagatgcggaaaaggtgggcaactaccttggccagaataatgtctggcttgccaccccgttctctgttgaacaaggagttcctgtctttaatcctcatgccgagagaaggcgcttgcaaccgtcatatgcgccgacagggtcacaacgaaaccggtcgggcgtgaactatgaagtaaggtccgctgaagaagtgaccgatgcagttatgaaaatgttcgatcagctccaaagtgcagacaacctccctgaaatggaccccccggcggttgttaccacaccacttcttcgccatcagaagcaagcattgtggttcatgacggagaaagaggcccctcggaaattcgggcccaaagaggaggacaacaactccctctggagggaagagtatagcgccaatggaactaagaagtaccgtgaagtcattagcggcatcgttcttgaccaggagccaccgcaaagtctgggcgggctgttggccgatatgatgggtctgggaaagactctaagcattctgtctctggtgatctcctcgctcgcgcaggcccaggaatgggcgcgcatgattccacaaccgggactggtgaagagccggcctgggattcgaaacactaagaccactcttcttgtggcacccctcagcaccgttaacaattgggtttcgcaagtcaaagaacatctgcgagatggcgcacttacgtcgtatgttttccatggttcatctcgaactacgagcgtggatgaattgtctaaatatgatttggtgatcacgacgtatagtatcgttctaagtgagctttctggccgcggctcgaggcgagcagggtcaagcccgctgaccaaaatgaacatgtttcgcattgttttagatgaggcccatacgattcgggagcaaagcgcggcccaaacgcaggcaatttttcggttgaatgcgcagcgtcgttggtcagtaactggcacgccaattcagaaccggttagatgatttgctttcggtcaccaaattcctaggaatctatccgtatgatgataggagtcgattcaatatgcatattctaagccggttcaagacaggcgatgcaactgttctcgcaagtctgcgcgtcttggtagactcatttacgctccgccgagtcaaggataagatcgatctgccagcgcgacacgacaagattgtgatgcttgaattcagtgagtcagaggcacagctgcacgagttcttccgcaaggaatcaaacgtgatgatgcgggtgattgcagaagaagataagagcaaaatgaagggtcgcatgtaccaccacattttgaaggccatgatgattctccgtcagattagcgcacacggcaaggagcttctggatagtgatgaacgagcgcggattaagggcttaagcgtgcacgatgccatcgaccttgaagagggacctagcgctgacgctgtcgctactgacaagaaggcgtacgaaatgttcaccctaatgcaagaatcatcagccgatatgtgtgccatctgcagcaaacgtttggaggagccaaatccagacgcaaacggttcatccgttcctggaaaagttgacattatcgccttcatactgccttgttttgatgttctctgtccagaatgcttctccggtaggaagcaggtgttcaacaacagagtcggagaccaggattctttcgacgtcaaatgtgatgtttgcgaaggctggatttcagcatcgtactcggcgatcacggccgccggtctacaggattacttgatggaacaagcgcgagaaaaacaaactcgaaagcaagccaaagtcttaggcgagtacgaaggtccgcacactaaaaccaaagcactattatcgcatctcctcgcgacggcagaagagagcgcaaagctgcccgagggcgaagccccaattaagagcgttgtcttttctgcctggacctctcatctcgacctaattgaaattgcgctccgagaccagggattaacgggatacacccggctcgacggaacaatgagcttaccagcgcgcaacaaagcgctcgataacttccgcgatgacaataataccactattctcctcgcgactatcggagctggaggggtgggcctcaacctcaccgccgcgtcgcacgtttacatcatggagccgcaatataacccggcggccgtggcgcaggcaatcgaccgcgtgcaccggctcggacagacgcgcgaggtcacgactgtgcaatttatcatgaaggacagcattgaggagaagatcgccgagctggcgaagaagaagcagcaattggctgatatgagtctgaatcggggaaagctggataaggccgaggttcaggaacagcgaatgagggaataccgca

SEQ ID NO: 20587 - DNA, 2820 bp, Emericella nidulans
caggcgagcctcggcaattcccttttcgggcttaccctcgggccagctgagctcagcttccacactactctttctccggctcttgtctcgcctggaaacccgaccccgtggagtccggggcatccatccacatatttattacctcgcctcggttcaccgaccgatttctttttctttcaagtctcaccttctccatcttcatcctcccaccacaccagaccaccccagaaccagacgaaacaatgccaaatccacctcccgcctgggtgcaggccctcaagcccgcctcaccgcaaggcacagaactgctgactcaggagcgtgcccagtcaaacattgacgtagacacgctcggcgacctcctgcacacgaaagaagcactcaagaagcaagacgagatcttgtcggtgctgaaatccgaaaaggtcttcgacaagtcgcgcaaccatgtccttggacgtactgagaagatccagcttgcgttggcgcggggaaagagactgcagcagttgaagaaagcacacaattggtcagacgaggatgtgcatgttgcgaatgatttggtgtctgaaccaacgccttacggtttgcatgcgtcgatgttcttggtatgttacccttggtaaccgcagttgggcggtgggagaatcccagttggctaatagttggctcgctggttaggtgacacttcgcgaacaaggaacaccggaacaacataagctgttttacgagagggcgagaaactacgagattattggatgctatgcacagacggaactgggacacggatcgaacgtgcgtgggctggagacaacggctacctgggatccttcggatcagacattcatcatccattcgccgaccctgacggcgtccaagtggtggatcgggtcgctgggacggacggcgaaccatgcggtggtgatggcgcagctgtacattgggggcaagaactacgggccacacccgtttgttgttcagatccgggatatggagacgcatcagccgctggagaatgtctatgtcggtgatattgggccaaagtttggttataagtgagtgttctgggttctctggtgggatgttgctgactggtgccagtaccatggacaacgggttccttcttttcaacaagttgaagatcccccatgtcaacatgttagcgcggtttgcgcaggttgacaaagccacgaacaagtacatccgccccgcctcgccatcacttatgtacggaaccatgacctgggtgcgctcgaatattgtcctgcaagctggcggtgtcctcgctcgcggcgtgaccattgctgtccgctactgcgctgttcggagacagttccaagaccgtgacgccaaggccaatgccgaagagaaccaagtcctgaattacaagatggtccagatccgacttcttccgttgctcgccgctatgtatgctctgcacttcactggccgcggcatgatgcgcttgtacgaggagaaccaggaacgaatgacaggtgccgctcaggcagaccaagagaagcggggtgcgggcccagagcagctccgcgcgggctctgatctccttgccgacttgcacgccacatcgtgtggtctcaaggccctggctagtacaaccgccggtgaaggtctcgaagtctgccgtcgtgcctgcggtggccacggctacagcaactacagcggtattggcccgtggtacgcagattacctgccgaccctgacttgggagggcgacaactacatgctcactcagcaggttgcgcgatatgtacgtcccccttccaccaccacttatctcattactaatatttcgtagctcctcaaatccgctcgcgccgtcctcgctggcaaaggcaccgccaacgacacctcgcgcattctgcaagcgtaccttgcccgccgcgacaagggcgcctcgttcgacattcttggcaacgacgccgacattgtcgcggccttcgcttggcggacggcccacctcacattcgagactctcaagtaccgagacgttgagaagcgctcgtggaacagtctgcttatcaacttctggcgtctttccaccgctctatcacagtacctcgtcgtgaagaacttttacgaagccgtcaactcgcccgaaatcagatcctcccttgacaaggacacagcatctaccctccgatctctcttccgcctccacgccctgcacactctcgaccgcgaagcctccgagttcttctcctccgctgccgtgacggtacggcagatcggcctcactcagacaagtgaggttccgaagctccttgatgagattcggccgcatgcggtgagactcgttgattcttggaagattcccgattggcagctcgacagcgcgctcggacgcagcgacggcgacgtctatcccgatctgttcaagagggcgagcatgcagaacccggttaacgatctggtgtttgatccatatccatggaatgagaatgtgctgaagaacgcgggggagattaagagcaagctgtgaggtactatattctttctttttgaactattgcatagagatttttagttagagtactagactgtcctgatacaggtggaatatagaatagaacgatgattactcttctgccaaccttatttgctcaagggccctggttgctcgaatagaagattgacacttgctctaactagctattcccttactaacctccccgagccaaaaacaatgagtaagcatgagaccaagcatccaaaacttggcacggccgagacatggccgagcgagtagcatggctgcgctggtggcgatcgctccggcgccgttgcggcagaggacgatct

SEQ ID NO: 20588 - DNA, 2831 bp, Emericella nidulans
tgctggggtgctgaaggaggtacgtctggtcctttttttgtagtccttgtggcaagctaactttgatttctcaaggatgtcctgaatggcggagttggacttcatattgggttgtgaactacgtcgtatacaccttctatgcggtacctcaatctttgttcgccccaacgttaggcaacagctgagtatcgataggtattatttgcatttatagctgcgaagttggtcaagtcgtttgcgccatacgctgccggatcaggcatctccgaaataaaatgcatcatcgccggcttcgtaatgaagggtttcttgggtggatggacacttttgatcaagtcaattgcgcttccactggccatcgcttcgggtttatcagtaggtaaagaggggccaagtgttcactttgcggtctgtaccggaaacgtcatctcgcgattctttaccaaatacaagcggagcgcatcgaagactagagaagttttgacagcaactgcagccgccggcgtcgctgttgcttttggcagtccgattggtggcgtattgttctctctcgaagtatgtactctcccctatattttgaatccgagtactgacataacgtaggaagtagcgtcctatttcccattgaagaccctatggcggagctacttctgtgctctggttgcgacgggagtgttgtcggtatgtttcagttgttctcagtagagcatatactcatgtttgtacaggttatgaacccctttagaactgggcagctcgtcatgttccaggtgcgatatgaccgatcatggcactttttcgaattgatatttttcgtcattattggtatatttggtggattgtatggagcgttggtgatcaaatggaacctccgcgtccaagcgttcaggaagaagtacctctctcaacatgccgtagttgagtccgtgatcctagccgttgttacggcagttatatgtttccccaatatgttcttgaagatcaacatgactgaaatgatggagatcttgttccaagaatgcgagggagagcatgactaccatggcctttgcgagtgagtggcctgaccctaaccgttttcattgctaatgaagcaggtcgaagtatcgctggtcaatggtgttctcattagctacagccacaattttacggatattcttagtgataatatcctatggctgtaaggtgccggctggaatttttgttccatcaatggcgatcggggcgtcttttggccgcatggtcggtattatggtccaggcattgcatgaatcgtttccagattcgaagttcttcgcagcttgcgagccggacctcccttgtatcacgcctggcacctatgcattcttaggcgcaggcgcagctctgagcggaatcatgcacttgactatctcagtgaccgtgattatgttcgagctgactggggctctgacctatattcttcccactatggtaggcaatgcgactcctaatcgtggcactactgacgtatctagatcgtggtgggtgtcaccaaagcagtgggagaccgcttcgggaacggcggcatagctgaccgcatgatctgggccaatgggttcccattccttgataataaagaggatcacgtctttaatgtccctgtttcccatgcaatgaccactgacccggtatcgcttcctgcctctgacttcccagtgcgtgaagcagagcaccttctgaatgataataaattccaaggcttcccaatcatagaagaccgctcgagcaaaatcttggttgggtacattggccgcacggaactgcgttacgctatcgatcgagccagaagggaaggtatgatttctcctagcgcccagtgcgtgttcaccaaggacgcagcggaagcctcagtcgcccgccgcgcctcctctactttgcagcgtactctcttaacacccgacactttcgataatatcgagagcagttctggggcgagtttcgtggactttagcagatacatcgacaacacgccattaaccgtacacccacgcctgccgctagaaaccgtcatggagatcttcaagaagatgggacctcgtgtcattttggttgagcaccgtggccgactcacgggccttgtcacggtcaaggactgcctcaagtaccagtttaaggtcgaggccgaggagcaagcactagctgcaacacaccatcccgaacttccccttggggcgtaccaggcgaaggataatggcactcttgaagaacgcatctggaatcttatgcagaagattgggtcgaggttttccaagagttccggacaaccacgagatgccatgcctctcccgcaagacgaccaatctccaattggtgtggggaatgacgcagatggccggatggtcgagttggaagaacgaccttagtattagaattttgattgtatggtaaatgaaatatagacgaacaatcctttatcctatagacttctcacaactaaccgcgccctccctatccgtaaccatatggttggagccttcgtagcaagtaattcaagactcctccctcatgccgacaagaatacaccctccccccatcatcgcggcccccaaccaccatagtccaccaaccttctcccgaaagacaatcataccgagcaaggccgttatgaggaaatttgccgacgtgttggtgatagacacctttgtcgtggacggcgcggctgtcaatgcacgcgtgaaaaatgcccccataatcacgttgcagaggacatttaggccgagacatatcttgacaactttgttaactactgctggcatgctggaagagaatgacgggattatatagagagaagaaacaagcaacttaccccc

SEQ ID NO: 20589 - DNA, 2995 bp, Emericella nidulans
gccaaggcctacgcatccacgtttgcactttttatcctcttcccccagaactcaaaagaaggcaaggcgtacatgcgccttcctgccgcatggcgagatctctgggaggagtttgcaaacgcaaagaaggtgcaagatgatgaggctgacaagcaggttgtgaaaagcttaagaaagctgatacaagaaaatcatggcaccttcgaggatgatgtcgtgctttcagataacttccgaaagagaaacggaactccaaggaaccgttccccagtgcgagcgggtgcaaaggaggctccagggatcaatgagcagttatcccagatttggatggaaaaggcttccacgcccgcttttcaatatatggtccaaagccgcatgcaattgccaatttggacattcaaaaacgagattttgaacacgctgaatagccaccgtgcactcattatctgtagtgaaaccggaagtggtaaaagcacacagataccatcgtttattctcgaacatgaaatgttgtcaggacgtccgtgcaagatctacgtaaccgaaccgcggcgtatttcggctatctcactcgcgcgcagggtgagcgaagaactgggggagagcaagaacgatgttggaacctcgcgctcgttgatcggttttgccgttagattagagagcaaggtcagcccagcaacaaggctggttttcgcgtacgtttgtgtcacctagagaggacatcgaagaaagctaacagaaataggactaccggagttgtggtgcgaatgctggaacgccccgatgactttcaagatatcactcatgtcgtcctcgatgaagtgcacgagcgttcaattgacagcgacttccttctcatcgttctccggcggctgatgcagaaacggcaggaccttaagctgatcctcatgtctgcaacggtggatgccaaccgcttctcaacataccttggtggcgttcctgttttgaatatccctgggcggacattccctgtggagacaaagtttttggaagatgcaattgagctgacccaatatcgaaccaccgaaaacgagtctaatgtggccgacgacgagtatgaagacgacgcggagactagccaaggagaaactactggtgtggccgcgactctcgagaactattccaagcaaacacgagaaacgattatgaactttgatgaataccgacttgactaccagctcattaagaaactcctgatgaagctcgcaacggcgccggaaatggaatactacagcaaagccattttggtttttcttcccggtatggcggaaattcgccggctgaatgacgagctcctctcagagccaacgtttcaacacggatggattattcacgctctccactcgtcaattgccagcgacgagcaggagaaggcgttcgttgtgcctccagatggcatgcggaagatagtcatcgccaccaatatcgcagagacaggtatcacaatccctgatatcacagctgttattgatgcaggcaaggagaagaccatgcggtgggtaccagcaaaacgtccagaagaaggaagctaatccaagtaggtttgacgagcggcgccagctgtcccgtttagtagaggcgttcatctcacgggcaaatgcaaagcagcgacgcggtcgagccggtcgtgtccaaaggggtatatgcttccacatgttcaccaagcatcgccacgacaatctcgtacgtttccgtcttctccattcaacaaggtactaacacagatgtcagctggccgaacaacaaaccccagagatgctccgactctcgcttcaagacctggtcctccgcgtcaagatttgcaaactcggcgaagtcgagccaacgcttcttgaagcgctggatccgccgtcctcgaagaacattcggcgggcgatcgacgcactgaaggaagtcaaggctctaaccagcacggagaaccttaccccgctaggacagcagcttgctaagcttccgctggacgtgttcctcggcaaacttatcatccacggggcgttcttcaagtgtcttgacgcggcgattagcattgctgcgattctgtcatgcaagtcgccgtttgtgaatacgatgggctcgaacgctcagaaggaggcggtccgacttgggtttcgacggggtgagtctctagctccagttcaaatccattaaatggagaaaaatgctaatacagggcaggtgactcggacctattgactgtgtataacgcatattgcgcgtggaaacgcacacggagcacaccaggcgccaacgagtacgccttctgtcggaagaacttcctcagcccgcagacgctgctaaacattgaggacgtcaagctccagcttatggtctcaatcgccgacgcgggccttgtcacgctcgatactaaccagaaggcttctctcaaccggtaggtattctccaaccccaccttcatcaaaagggaccgaatacacaagagtaaggacgaaggagactaacaaatacggaaaaagtgcccgctcgacccgccaacgccacttcttcacaaccccgccatcccacgacacaaataacgcaaacgacacgctcatccagtccgttatcgcctggagcttttaccccaagctcctgacccgcgagggcaaagggtggcggaatatcgccaacaaccagtccgtcactttgcacccaacgtccgtgaacagagtcccttcagcttcgtcggagaggtcgccagggcaaagtcagtacctaagctactaccatataatgcaggggcggaacaggaaatacaatgcatttgagacgagcgcggttgaggattgggctgttgcggtgctctgtggagagggcgatttcaaggtctgttttgtcctatttgctcagttttgttctgttctgccttcggtcgaaacagcgtttctatatattttgcattcgttttccctacctcctgaatgtccctttcttgatcagtacattaacgtggtagtagatgtaccccggcgtcctc

SEQ ID NO: 20590 - DNA, 676 bp, Emericella nidulans
cggaggccacgaacgacgtggaagaagacccgtacgtactcacagagctcctggcggctcttgctgctgggggcacctacagctcggcaaactttatcgtcagcgttatcctcgatttgatagccaatccacaattcttggatgagattcgggaagagatccgccaaaaacacgaggagcttcaaggtcggtgggactttgcagctttcaataatctgcccaagctagactccgcgttcaaagaaacaatacggctcacacccggcagcctcacgacctacagccgcgtaatgctccaggactatacactatcgactggtattactctcaagaagggacaatttatctgcgtttcaagctatgctcgggcaaaggatgacgagatatatcagaacgcaggaagttacgatgcgttacgggcttacaatgagagccagcaatatcacgcggcgcagcctttcaagggtgtgtaccaacaggaatttagatggggggctggccgttgggcttgcgctggacggcatctcgcgtctctgctggccaagttcattgtcgtgaaactattggatgagtatgagtttcagtttgttccagggagccatcgaccacccaactcggtttttcacgaatttgtgtttgtccatcctagcacaaggcttctaaccagacgcaggga

SEQ ID NO: 20591 - DNA, 850 bp, Emericella nidulans
caccacgactggccacaccacgacgtcaccaatcgctgccgaagactcccagtcccagcagcaccacggccaccacggcggccaccatttcttccaccataaccaccataaccaccagccttctaacaattcggctaattcggcgaattcgcagaattcccacgccgctaaacaccaccaattcgaccagtcttcagctaccagtaaccagccttccgacgggcaaaccgcctccatgcaatcccccgcacaacagccctctagtacttccgcacactcgaattccggccaccacagcaatgccgccagcatacacaacatcatacacccgtcgcagcagaataccccgcaggtgtcgcgggcggagcgtaccaccaagggcaaatacaccctcgatgatttcgcaatccagcgcaccctcggcacaggtagttttgggcgcgtccacctcgtgcagtcgaagcacaaccaccgctactatgccatcaaagtattgaaaaaggcgcaagttgtcaagatgaagcagattgagcatacgaatgatgagcgacggatgctgaaccgtgtcaggcatcctttcctgggcaccctgagggggacttggcaggatgctcgaaacctctacatggttatggactccgtccagggtggagagttgatcagtatgcttaggaaatctcaggtgagctatgctggtccatgattactacaggagcgagctgatggtgggcaaatggaagcggttccgcaaccctggcccgaaaatctatgctggccgaggtacttcggccgtggagtatctccactcattgagtattattaggcgagagcttaagcctgagaacttgtt

SEQ ID NO: 20592 - DNA, 573 bp, Emericella nidulans
ggatctccctccgagcggccttgacaacctccaggaagcctctcgctttcgacaggcgcggccccgcctgtgtcgccctcgaatctctcggcgacttgttacgcgcctgcggccaaaacccgacgcttgcggagattgcggacctggagaagaatgtcggcggcgacttcgactttgagtcctttttgaaagtcctgaaccgccctgggggctttagggagcccggtgagccggaggagtactgccgtggctttcaggtgttcgataaagatatgacgggggttatcggtgtggggcagttgcgttatagtacgttcttcctttttccccttcatggactgggagctcgggttgattcattgagttgggttggttgtatgttgctgacggtgtattcgacagtcttgacgaacttgggcgagaagatgaccgatgaagaggttgatgagcttctcaaggcggttgatactagctctggcgagatcaactataccggtatgttgtgttatgtccatgttgagaggatgtagtggtgctaatggtgtagatcttgttcgtaccatcctggccaac

SEQ ID NO: 20593 - DNA, 850 bp, Emericella nidulans
tacaaccattaagctcatgaagctactgcctgaagctgatatggcaattcgtcttccggcggttcttcttgatgtttgcagtatcctgaagagtaaagctcaggattcccgggacacagctcggaaaacactgaacgacatcgctcttttgcttggacctaactacatgggctatatcctcaaggagttgcggcatactcttaagcgaggctaccaacttcacgtgctctcctttactgttcattctattctcgttgcaacaacagacgatttcaagcagggtgacctagactactgcttagcggatctcgcctcggtggttatggatgacacttttggtactgttggtcaggagaaagaagccgaagactacgtcagtaagatgaaggaagtaaagagtaacaagagttacgattcgatggaactcctcgccaaaaattcaaccatccagaatcttgccagcttggtgcggccattgcagtcgcttttgcgggaaaagctcacctcgaatattgtgcggaaggccgacgaactactgcgaaggatcggaattggtctcttgagaaaccctggagtcgaaagccgtgacattctcatcttttgttacgaggtcatcaaagaggcatataaggagccggtccagcttggcgctcaggttgccaaatctgctcaggaggagaacttcctgatcaacatgaaaggccaacgccggaacgaaaagcgaggaagtacgtcctcatacgtctacaaactagtccgcttctccttcgatgtccttcgctctgtcctcagcaagtataactcgatcatgactcctgctaatatcgccggctatcttcccatggttgga

SEQ ID NO: 20594 - DNA, 710 bp, Emericella nidulans
caacaagttacccggatcaatccagtgaagcaattcattcgcaatgttcggtcagccaatactattgcagacgaacgagcagtcatccaaaaagaaagttccgccatccgtgcgtcgttcaggaaagaaagccatgattcgagcattcggttagcattcacaactatactctactatatgcttcgctttgaaccaatatctcatatgtccggacaggagaaacaacgtcgctaagctactttacctattcacactcggcgagcgtacacatttcggccagattgaatgtctgaaattattagcgtctcatcggttcgccgacaaaaggttgggttatttaggcacgatgttgttgctggacgaaaaccaagaggtcttgactctggtgacgaattcgctgaaaaagtgagtggtctctgagttcttcgtccgctcactcgtctgatctcttcatattctagtgatctcaaccactccaaccaatatatcgtcggtctatccctctgcactttgggcaacatcgcttccgtggagatgtctcgtgacctgttcaccgaagttgaatctctcctttccaccgccaacccctacattcggcgaaaagcagctttgtgcgctatgcgcatctgtcgcaaagttcccgatttgcaggagcacttccttgaaaaggcaaagaacttgttgtcggataggaatcacggtgtccttct

SEQ ID NO: 20595 - DNA, 583 bp, Emericella nidulans
tatcctccctaaggtctttcaagagcgaaaggatgatctacagtacatattctcgaacaaagcaaaaacggttgatgaatcccattccgcactgctttctgcgcagaggatcgaaagggcaaaatccatgctgaaaccgttcgttctacggcgaaagaagcaccaagttattgatttgcctgcaaagatctcgcgcgttgagtactgtgaaatgaacgctgcccagcgggagatatacgaacatgagaagaacgaagtaaagaagctcttggaagacagagcagccggcaaaaagacgggcaacaagtccgcgaacatcctcatgaaactccgtcaagcagccattcacccactccttcaccgacgccactacaacgacaaaattttaaccaagatgtccaaagcttgtctgcaagaagagaaatgggccgaatccgacccaaaactcatctacgaagatttacaaccctacaatgactttgagtgccatcaactctgtgtggaaaaccccaaatcccttggcaaattcgctctcaagaataatgagtggatggattccggaaaggtcgacaaactctgcgaa

SEQ ID NO: 20596 - DNA, 624 bp, Emericella nidulans
  unsure (1)..(624): unsure at all n locations
ttacaacaggattaatctttcaaaatttgcctgccagtgtggtcatgatgatctctgcagtttgcacacccgacattttttatgccatcatgcctatcaaacagagctactaggggcagctgtttgcatcgatattagtaatgccttgcggaatgtgagttacttcatgatatatttcggactggtatccacacttactgactgtaaccagggaaatgtcttttcccgcatgcaatgttctagtttccaacgcgatacctcaagaacatcaaggagtaagtccattagctactaaactctttcaaaaggccatgaagctaagcgtgttgatgctatttgatggttcagcattgagacggagaaaataactaaaattgtgattgcaggtctcagccagcttagttgcaaccttcatgaattatgcgtcctctttgggtctcatgtttggtgcaatagtcggggttgatcacaaccaaaacagaacagatctcttaaggggctatcgaagagcttggtacttaggcgtcagccttgctgcgtcagggattatctncangatgtttcttgctctccatgaacatagggagtccattcgaacgaagttaaagttactcggaagaggag

SEQ ID NO: 20597 - DNA, 559 bp, Emericella nidulans
catatccccagctccgatatattgtgcaagaccgcgccgaggttctgcagcaggcacaggaggagatctggcctgttgaagcccctgaggctgtagccgacggccgggtacagttcatggagcacaatttcttccagccgaaccccgttaagggggcagatgtttactggttacgtggaatcttgtaagtggagtctagccgccatccaattctctcacgcctctctgtaaagggccggatcgagctgacagcgccacgcagacacgactggtcggacagttactgcgtgcagattctctcagctctgcgcacctcgatggctcccacatcgcgcattctggtatgcgatcaggtcatgaacacgacggccggctgcgatgagatcccccctgccccgtcgccactgccggctaattatggctattacatgcggtacccgcaccaccgggatctggcgatgatgtcgattatcaatggaattgagaggactccggcgcaattcacggaactggtgaagcaagctggtctcaaggttaacaagatctggaattgtcggag

SEQ ID NO: 20598 - DNA, 662 bp, Emericella nidulans
ctgttaacagtggtcttgtcagccgtccgagagggttcgggctcgacggcatcatgttcctccctcagcgaccatacctgagtgtcggaacccttcgagaccaggtaatatatcctcacactgaaatcgacatgcgagatgcaggtgtctcagaatcagccctccagaaaatcctcgatgatgcccaccttggctacctcccttctcgcgaaggcgggtgggactcacgcaaagagtggaaggacgttctgagcggtggcgaaaagcagcgaatggccatggcgcggcttttctaccatgaacctcgctatgccttcctcgacgaaggaacatctgccgtctcctccgacgtggaaggactactatacgaacaagctaaagaacgagggattacgcttatcaccatctctacgcgcgcctcgctgaaaaagtatcacaccttcaatcttactgttggtgtgggctccgagggggagcaatggcaatttgaaaggatcggaaccgccaaggagaaactcggtgtagagaaggaacttgaggagattcgcaagcgtctcagcaaagttgacgaatggaagaaacgacggcaggagattgaagacgagctccaaaaggtctgggtcgatcatggagagcttgcaccgtcttcatatgaagaggat

SEQ ID NO: 20599 - DNA, 577 bp, Emericella nidulans
tactatgttgagctaaaaacctgctccggcaaagagctcgtggtggggatggatcaagggaggaaataaagaggaagctaattcaggaaaaccaattcgcgcgaagcttggtgaggaaagttctttctactacgataaagagctgaagaaatgggtcaacaagaaagaccccaacagcgctaccccggctcgtgctactccacccccaccgaaagccatgggccctcctagcagagccgccagtgggagcagcatgccaccgtctggaacagcaggtctcggtagtcggccaccgtctgttgcgccgccgccgtctggcagcccggctccatcttctcttggccttccaccaacacctggtttaggccctgcgcgatctgcctctaccggcgccgtgccgcccgctggtaacgcttcatcccgcccgggaagctctgctgggcctcctcccaggccttctacgtccttgagccatgctagctcaattgacgacttacttggagcaccacaggcacgcaagggcgccacttctcgaggcaggaagaagggccggtatgttgatgtaatggcccaataa

SEQ ID NO: 20600 - DNA, 470 bp, Emericella nidulans
atctgtggctgttggctgatcttgagagtggcgaggaatttgtgaccgaggctggcactatgaatctttttgtagtctgggtgagttcttccacggggaagaaagaactggtgacgccgccactggatgggacgatcctgcctggggtgactcgaatgtcaatcttggagctcgcgagggagaggcttgaaggggacaggtctggtattgaggtggtagagaggaggatcaccatgcgagagttggcggctgcctcgaaggagggccgcctgttggaggtgtttggtgcagggacggcggtggtggtgtcgccggtgaggtcgattcgttggggagaccagtgtatttcctgcggtctacgagatggagaagaagctggcccgatgagtctgcagatgaaaacgtggcttgaggaggtgcagtatggcctggttgagcatccttggaggtgagtttcttccattacaacg

SEQ ID NO: 20601 - DNA, 850 bp, Emericella nidulans
ggctctgaggagagggcgaggggtgtgactatcgacattgccacaagaaaatttgaaaccgagaacacggtttttacgattgtagattcccctggccatagagactttgttccgaacatgattgcgggcgctagtcaggctgatttcgcggtgctcgttattgacgccagcatagggaactacgagtccgggttgaagggccaaaccaaggagcatgcgttgctcgtgaggagtatgggggtccagaggatcattgtcgccgtgaataaaatggatactgttcagtgggattttgggcgatttgaagagattgagcaacaagtttcggcattcctgatcaccgctgggttccaggctaggaatatctgctttgtgccttgttctggagtcaatggtgacaacatcaccagacggagtgaggatccaaatgtgtcttggtacaatggccgtactctggtggaagagcttgaagaaacaaaaccgtacttccacgcccttgacaagccgctccgaatgacaatcggcgatgtattccgcggcagcatacaaaaccctctatcaatatctggccgaattgacgcaggcagcttacaagtaggggaccaaatcctcaccatgccgagcggagaaaccgcaacaatccgaagtttagaggttgatgaagagccaaacgactgggcagttgccggtcaaaacgtcgtcctacacttggccaatatcgacccgatccatctccgctctggcgacgttgtatgccacgcatccgccccgattcccaacatcacttcatttacatgcaaggtacttgcctttgaccacttgcttcctagtaggtcgaatcggagagctc

SEQ ID NO: 20602 - DNA, 392 bp, Emericella nidulans
tacgcacaccagccatatctaatcgcctctagcgctccaaactacgtaacttcctcatgcactcattccacctaatcctctggctccttacacccgcgaaaaccgccatgatcaaagacacccagtgtggattcaagctcttttcgcgagcgtctctgcccgccatcgtcccctacatgcactccgaaggctggatcttcgatgtcgagatgctcatgctcgcggagtttgcgcgtatccccgtggccgaggtccctgttgactggcgcgaggttggcggaagcaagcttaatgttattagggatagtgtgggcatggcgtggagtttggctgttttacgcgcggcttggttgttgggggtatatagacggacatagtgtgctcttagtggt

SEQ ID NO: 20603 - DNA, 500 bp, Emericella nidulans
tcaatatgactgggacattagcagatgctagattgagcggaaatggcaaggagtatacaccgggtgtcaaataggcaccaatctataaatatggcggccattatgctaagacacgaacatatctcattgatcattaactactagacctctcaagaactttgaatattggtcaaaaacacaggtctctaacataatgaatgactatataaactacagtgcccgagcctagcaccgaacttggtcgctaccgcgtgctatcggcaactgaaggaattcgggtataggctctgcaacttggagccatgtgcattgaggaggcctgaacagagctcatgggatcaatgaacaaagagtgttccttcaagcagcaggatgccttcgtcaaatcaggatgcaactttattgatacgtgcaacatcgatgaaagcgaacagcacgagttctggcatggtgaatggatgacgtgcccgaacaaccgtgacagaatggcatagccacta

SEQ ID NO: 20604 - DNA, 500 bp, Emericella nidulans
tcctttctttcaccatcctcttgaccggcatccccatgttctaacaaggccagaaccagcacctttccggcgacggaacacccaagaaccgtcaggccgtctggctgtcggcgtacaacaccgattccgaattgtacaagctgattgctacgcttaacaaaatccgcaagcacgtcatctcccttggctcggactaccttgatgaacagaccgtccccctctaccgcgggggaagcgagctggcatttagtaaaggcgttgagggccggcagattattatgttgctttctggtcagggcagtaagggtgacccttacacattgaccctgccggttagctataatgccggcaccacggttacggatgtgttgcactgtgttaattatacgagtgtcgggagcggcgagcgtgcgggggagcttgatgtgcccatgagcaagggggagccgcgggttttcttcccggcagacctgatggaaggaagtgggctttgtggacat

SEQ ID NO: 20605 - DNA, 500 bp, Emericella nidulans
gcaggaagagccggtaacacagtctcgcttagccgctttattcccatcattcactgggagaagacgctctgttgttcttcctccgggtgtcaaggagcccggatggtggatcaaagacacaggaccagtccgtgttgaaactaaggtttggcttgcaaatcaacgaacttttatcaaatggcttcatgttagcattttactttcctctctttctctcggtttgtataatgccgcaggcaagcacaacgatatagcgcgcgcactgtctattgtctacaccgcatttgccatttttgcggcaacctggggatggtacatgtacgagaagcgcgcaagacttattcgagcacgaagcgggcgcgatctcgacaacacatttgggcctatcatcgtgtgtattggattggcagttgcattgatcctaaacttcgctttcaaggtacttaccttctctgatactgatccagcagaagctgacatgactagtacgcctccaccgt

SEQ ID NO: 20606 - DNA, 835 bp, Emericella nidulans; identical to SEQ ID NO: 8388

SEQ ID NO: 20607 - DNA, 850 bp, Emericella nidulans
cagcgaacagcgcatctcgcgcttcgaagaagtcttcggccgcgcgaactgggatatcaggtttcagcatcccccgattggtaatataacgccgtcgctacacttaatcaatctaaacagcttgacactcgatggaccagcttattctcaggacattcagactcaaggatacgcttatatcaacagtattattgaccgatcatacccagtcgaagaccggagcacgttcacgctcctgctgacacatctcccgctccataaacctgagggtgtctgcacggatggcccttattttactttctttgagaaaaacgatgaatccgggaaaaagcggtataaagctggcgggctgcgcgagcagaaccatctcagtgagtttgtcagttccaacgggatcctgcagggaatttttgggatgactggggacgagggcgcgccggcgggtgggcgggggaggaacgggctcatcttgacgggccatgaccatacggggtgtgatgtcgttcattctatacagaaacaaccacagcagccacctgtcgagaataatgaaggctctttccccgacgaggctgagagtggccaacagagctggacgtggaacacaacccgctacgacccatccggaccccaggactcatcatctccatctattcgagaaatcacccttcgctccatgatgggggagtacggcggcaacgcaggccttctgtcattgtggtttgacactgccgcttcggagtggaggtacgctgtcaccatgtgtcccgccggcgtacagcatatctggtgggctgttcatgtcgttgaccttaccacgtttattgttggattcttgtacgccttggtg

SEQ ID NO: 20608 - DNA, 850 bp, Emericella nidulans
ctgctgggcacaccgtctcagtagtccttcctcatcagcagcgatcatggattggtaaagcccatcttattggcgctgccgtcaaaccaacctatttccggcccggaacgctgcacaaagatgatggcacaacgcacgagtacccgcgcggcgacaacgacccagacggcgacgagtggattcttataaactcaacccccgccagttgcgtgcagattggtctctatcactatttccaggaccgtgggcccgttgacctcgtggtatccggacccaattatggccgcaataccacggcacttttcgctatgtcgagcgggacaatcggcgctgcaatgcagggcgccgcatgtggaaaacgctcgattgccctctcgtatgccttcagctcgcgcaatcatgaccctgtcatcatcgcggaggcgtctcggcattcagtacgggttattgagtacctcgcgaaaaactgggatgagggtgttgatttgtacagcgtgaatgtgccgctggaacctggtgtgagcgaaagcaaagtaatgtatactgagatgctcgataatcggtggtcatccgggagttgctttgacgctgttgatgccgaggtaccggtagaaaacccagagcagcgagaacagaccctgcgggatcaggaggagaagctggaagaagatcccactgcgaaccctaatgctaagtctggaaggaaatcgcggattgcccataagcattttatttgggcaccaaagtttactgacgtctatcggagcctggaggaaagtgcgcctgggaatgaaggctgaaactgtcaaggagggaatgacgaggtatgtcaacaccaggccttggctcg

SEQ ID NO: 20609 - DNA, 850 bp, Emericella nidulans
ttcttaaagtaaaccgcatgatggaaattgcgtttgaaaacgacttgcccctgatctcactcgtgcaatcggtactcccactagccaataacatacaggcaacctgatctgacatctataggccggggtctttctcccccagcagttccgcgtcttccacaagggaggtcagctcttccgggacctggcggtgcgcacgcagcacggaaagccatcctgtgccattgtctttggctcctctacagcggggggagcttatcatcctgcgctgtcagactataccattttcgtggagaaccaggcgcaggctttcctgggaggaccccctcttgtgaaaatggctacaggagaagttattggcgccgaagagttgggaggagcgaacgtccacgcgacagtcacgggtctggccgaccaaattgccattgacgagtatgcctgacggatataatgaagtttgtcccctgcatcctgctaattatacgcaggttcgacgccatcgtgaaggctcgagagtgggtttcaaccctacgagagcgagcagtgcctctccatagcttattatcgcctgctgagccccgatatccagcccaggacctcctttatcttgttaatcctgatattcggaagccgttcgacatgttggaagtgttgttgcggattgttgatgattcgcgcctgtccatgttcaagcccaagtacggcacgaacatgatcaacgcgtgggctcatattctaggtacagcagcggatgctgtatcccatttgcgtgtgaacgagtcgctaactgcgggatacaggatttcccgtgggaatcgtcgcaaatcaaatctccgtcatcaatcctaat

SEQ ID NO: 20610 - DNA, 850 bp, Emericella nidulans
cggacgcacctcacacgcggccattatcagtcgcgagctaggcttgcctgcagtcgtgggcgccggccgtgccacctacatgctgcactcggaccaggaggtcaccgtctcatgcgccgagggcgacgccggcttcgtctacaagggcctctcagagatccgcaccgagaccattgacctttccagtctcgcgttcccctcgccctcgccctcgtcgcactcgacgcaggtcatgctgaacatggccaacccggccgccgcgtaccgctggtggcgccttcctgccaacggtatcggccttgcgcgcatggagtttgtagtcagcaacagcatccaggtgcatcctatggcgctcgtgcacttcgacgagctccgcgacccagcagccaaggaccagatcgcacggctgacggcgggctatcgcgacaagcccgcatacttcgtcgaccggctggcgcacgggttcgcggcgctgtgcgcgaccgtgtacccacggcccgcgatcctgcgccttagtgacttcaagacgaacgagtacgctggtctcattgggggctcgcagttcgagccgcgcgaggagaacccgatgctgggccttcggggcgcctcccgatattactcgccgcggtacagggaggcctttgcgctcgagtgtcgcgcaatcaagcagctacgccagaccatcggtttcacgaacgcgatcgtcatgatcccttctgccggactgtcgacgaggcgcggcgctgcttgcgctcatggccgagaacgggctggtgcgcggccaggacgggctgcaggtgtacatgatgtgcgagatccgaccaatgtcattctggccgcgattttccga

SEQ ID NO: 20611 - DNA, 850 bp, Emericella nidulans
aaaagcgtctagcaaataccaaaaggtaaggagtcgtgctgaaggccctaaggagccgtgcactgacggttctacctagttgaatctccgtgaacatatcacaatccgcccagactcttatatcggctcagttgagcggaccacacaggaaatgtgggtgtacaattccgagattgacgggatggagtttcgggaagtctcctacgttcccggtttatacaaaatcttcgacgaaattgttgtcaacgcggccgataacaagcagaatgacgataacatggacgagattagagtaacttacagccgggagaccaatgaaatcagtgtttggaacaacggtaaaggcattccggtggaaatgcacgaagagcacggaatgtacatccctcagttgattttcggtaatcttttgacgtcctccaactacgatgatgccaaggagaagatcactgggggtcgaaacggtttcggtgctaagctttgtaacgtcttttctaccgagttcacagtcgaaactcaggattcgaaaaagaagaaacgatacctccagacttggacagacaatatgcaaactgtgggcaaacctaagatcaccgctgctaagggatccgtcttcacaagggtaacattcaaggccgactttcccaggtttggcatggatggcatcgatgacgattttgaggcgcttatcaagcgacgagtctacgacctggctggtaccacgggcgtgacagtcaagctaaatggaacccgtttgcccgtccgaaatttcaaaaagtacatggaaatgtacacgaaagccatccgtcgagagcacggtgatgtcgactccaaaagagatccaatcatc

SEQ ID NO: 20612 - DNA, 850 bp, Emericella nidulans
cggaattcaatcgtggattgagggcggcgtgatctcagccgtcatcatcctgaatattgttgtcgggttcttccaggaatatgcagccgagaagactatggagtcgttgcattcgttgagttcgccaacgggaaccgtttcaagaggcggcgagaccttctcggttccatctgctgagattgtccccggtgatatggttgagttgaggacgggtgataccgtccctgcggatatccggtgagttaactcttattcaatgatggaggtacggggattgacctgattagactggtcgaagccgtcaacttcgagaccgatgaagcccttctcactggagaatccctccccgtgcaaaaggaatgcgactctacgttcaaggaagagaccggccccggtgaccggctgaatcttgcctacagttcaagcactgtcactcgtggtcgtgccagaggcgtagtcgttaatacaggcatggctaccgagattggttccatcgcggccgcgcttcgtgccactaacagcaagcgccgtccggtcaaacgcggtcctgacggcgagaccaagaaacgctggtacctccaggcatggacgctgactggtactgacgcagtgggccgattcctgggagttaatgtagggactccgttgcagcgtaagttgtcgaaacttgctatcttgctatttggtgtcgctgtgctctttgccattattgtcatggcagccaatctgttctcgaacgataacgaggtaatcttgtacgctgttggaaccggtctgagtatgatccctgcctgtttggtggtcgttcttacaatcaccatggctgtcgggacaaaacgcatggtggaag

SEQ ID NO: 20613 - DNA, 677 bp, Emericella nidulans
ttttttagttttgaatatttttttttttttttatattttttttcctctttatgttttatgtgttatttttttttttgttaattctttttttttcttgttttatttttttctctttttttttttgtttttattgggtttttatttttgtatttttttagttttttttgttttttgtattttgtatgtttttttttttgttgttgtgtttttatttttattgttttttttttagtgtttttttttttattttatttgtttttttgtttttttttaattttttatttttatttttttttctaatgatttttattttttttttttattttttattttatttattattttttttttttttttttttttagtatttattttttttatttttttgtatttgtttatggtttggtctttacctttttttttgtttttgtgtgtcgtttgggtttttttttttttattgttttttttgttgttagtttttgttttttttttgtttttttttgttttatttgtttttttttatttgttttttttttattttttttttggttatttttttttaatttttcttctttttttttttttgtctgtttcttagttgccttttcttgctgtttttcctacaatattttgtttacttgttttgtttgtttggtttggttatccctttttctaat

SEQ ID NO: 20614 - DNA, 850 bp, Emericella nidulans
ggcggagcaaatggcataggagccagcctcgtcgagtatgctgtccagaatggcgcatctgtgtgcttcggggacgtcagcgtacaggccggcgaggagattgcaaggacggtgaaggccaacgccccatcctctcctacccgcgcagtctttgtccccaccgacgtgacaaagtacgactccgttttggctctcttcgacagagcgatggaggtcttcggacgcatcgaccatgcccgcgcaggcgcagggatcgtcgagattgggaacgtctttgatccagcgctggatatgcagtctatccgcgaggcaagtcaacccagtcttcttaatatcggtagaggacaggttataacaaattgaaaatagcctccacccacaaaggtcctcgatgtgaacctcctcggctgtctgtacacagctcgcatcgcgagcgtgtatctgcgccagaaccgctcagagccagaagcagaccgctcgattatcctcatttcctcggaggcgggctttaaggaatccccgggcctgtttgtctaccaagcctccaagcacggggagatcggtctcatgcgcgcactgcgactctacctccacggcccggcatccgcgcacaatatacgcgtaaactgtatttgtccgtggatgacgaccacggagatggtcaagggtatacaggagggatggatcaaagctggcttgccatgaactccccatggatgcagcaggaatacggcagctgactggggagatgtaactcttaatgggaccctcgatgtatgttgagggcgaacgggcatgggagattgaggcgaatatggatcgccttgagcctggctggctatggagaaga

SEQ ID NO: 20615 - DNA, 850 bp, Emericella nidulans
gagactagagtcatggctgtctgcactaccgcgagacgcgcagttcgtaccagcgtcgaagacgatttttaacgacggtgaggatgtattgctccttcacggcgcgatgatacggatgctctaccacgctacagtaagcgctctccaccgtccatgggcctacggatccacgaaagaccagacaaaatcccggcttgaattggcggctgcagcacgaacaaaaatgcaagacgccgcgatcggtatcacgcagattatccaaggcctcaaccagctagatctgacccgctacctccctcagtccggcgtaacagttatcctccctgccgccgtagctcacctagctaattcaatgtcaaacgaccctactctccgcgaaaacagcatctccaactttcagcggtgcatccgggtcctgcagggcttgaaggagatatatcccgccgccgacatggaggtagccaacattgaagccgccgtcaaagcgcagtccaacacaagcgccctgttacgaatcatgcagttcaacggatcactcccatctcggcctggatctccacacagaaccagtttggtttcaaatccagcccgtataccgtcgcctttggacgaaccaaaccactggacgccacctgccgacgaacaagacactgcacatcccatccttcatcaactgggtcacgcttcgccagataataaggataaacggtcctctccgttaaagccaaaccacgaacactcagcccaatctaacccaccgcgtcaagaccaaccaacacccccgaccgacatccctgatcccgtcaccatctccccaactacaccacagcagaaccagaaccagccacca

SEQ ID NO: 20616 - DNA, 850 bp, Emericella nidulans
ccttgtgagcgtccgaaaccgtgtggccatcctcagacgacgcacaattgtcacacagaggacgaatcttgccccaagtgccctttcctaacagagaaaacatgcctttgcgggaagcggaccctaaagaatcaaccctgttggttggcagatgtacgctgtgggcaaatttgcggcgaaccactcaaatgcggctctcattactgtcaaaagaattgtcaccgaccaggcgaatgcgaagatgcctcacagccctgtcagcaggcatgtggaaagacaaagaccgtttgcggccatccatgcacggagccctgccatgctccgtacccctgtgccgagaagacgccatgtgcgtccacatcacggtaacatgtggctgtggacgacttcgtcaggaccgtcgatgcaacgctatgaaagccgtgacatcgaagggacagctgcagcagccgcagaggctccccgcaaccagccccttatcatgcgacgacgagtgtgcccggttagagcgcaaccgcgcgcttgcggcagctctaggggtcaatatcaacccgtcgaccaccatggcgcaaaatactatctcctccacgaacctaccatactcttctgaaacactggacatgtacatccagctctcatctacatcccccctctcgacgcttcaatcccacgaagcaaccctacactcccttgctacaagcactacccaacgctccgtgcgaacccagcccgcaaaatcgtctatccgagctttcatccactctcttgcatcggactacggcttcgcgagcgagagttttgacccagagccccaccgacacgtattcgtcctcaagcctacaacttggac

SEQ ID NO: 20617 - DNA, 500 bp, Emericella nidulans
cccccggaggcccgaccccgggggggggaaaaaaaaacgacgacgggggggacaccacccccaacccacaagccaagcccggcctcggcaaccccccccaacaaaggaggcacacaagccccaagaggaaacccaaacaaagcaggcgaccaacccccaccagaaccacggacgagacaccccgaggagcgaaagcaacggcaagcccgaaaaccccgaccccaacagccaggcaaacccccccggacaaccaaccccgaagggccaaagacacgcaccccacctcagacaaaaggggcccccaaaaaccgcaaaccgacaagacccccagacacaccaacacgacccggcaccccccgccggccaaaaaaggcgccacaccagaacacccccaaaagccacccaaggggaccccggccacccagacccacggaccccacaaccaaacaacccccccccgccggccaacaaaccacccacgcggacccgaaaccaccccc

SEQ ID NO: 20618 - DNA, 850 bp, Emericella nidulans
tatacaagtatgaggtcgatattgcgcgagtaatacgcgtctacttcaaggacaagctcgagattccggtcgagttccgaacaccagccaccaaggatatccaaagcgaatcatcatctgtgtgggaccgccgggcgcgcagaagaaagatgaggatggacacctacctctgggatgaagaaaagggaatgtactttgattacgacacggtcaaacaagaacggaccaactatgagagcgccacgactctctgggcaatgtgggctgggcttgtcacgccacgccaggcttctgcaatgatcaccaaggcacttccccgcttcgaggagtttggtggaattgtctcgggcacctgaagagtctcgtggtgctgttggactaaaccgacctactcggcagtgggattacccatacggatgggcgccgcagcagatgctcgcgtggaccgggttcgcccgttacggatatcaggaagaggccgagcgacttgcatacaagtggctctacatgatcactaaggcgttcgttgacttcaacggcgtcgtcgtcgagaaatacgatgtgacccgacccattgaccctcaccgcgttgatgccgagtatggcaaccagggcgtcgacttcaagggcgcccctcgcgaagggtatgctcccactgtttccatatttgactgttgtatgctaactatcgccaactaggttcggttgggtcaatgcaagctacgtttacggcctggaaatgctcaacgcccatcagcgacgtgctcttggtgcggtcactccatgggagacgtacagcaaggctgtttctgcgcagggtagtgacaccgttcttgaaaacagatctgag

SEQ ID NO: 20619 - DNA, 519 bp, Emericella nidulans
  unsure (1)..(519): unsure at all n locations
aaaaaaacccaacctaggcttacccctcccaccctcacccaggatttaaccaacggcgggattacgtttcaacggcacacggtaatgctcaaatcctatttatcctttggtcaaactttgaacctatgaactcggcaataaagccattatgtgccgtcacaccataatccagcaaatctgcacgatcacagcagcaccaccgacttaggtcattacttcgcnccaagcacccagtcactcgacgaaattagccattcccacgccccatggtcagctccaaacacaacaatttccggcgatactagcggcggcaactaccatcatctaccgtttacgacgtcagatcactccgttacggtatcgcgcgagtcgcaccagaatcacagctttgaggggctactgccttcggatgatctcgttggaatcgttgggggattatctggtgatcctaatatgaacggggcgggccccgaacatacatcttcggcatatgctgaacatactgcggttgaggctgtc

SEQ ID NO: 20620 - DNA, 850 bp, Emericella nidulans
ttcgagcaccgtcagagtccggagatgctccataagtttcttgaccttgtcattcggatttacgaggactcgaaaatcaccaggactgagttgacggtcagacttgagcatgcattcttgattggcacaagagctaaggacgtggagatgcgcaatcgcttcatgaccatctttgatcgaagtctgacccgcttggcgagctcccgcttgagttacgtcttaacttgccagaattgggacactctctcggactctttctggctcgcgcaggcgtcacacttgattctgggctgtgtggatatgacagccccggctcgtctccaccccgacgacttcaccatgtatcctctatcattcctattcggtaacgccgagaaggacccgcgtcgggcagaagttatggttgataatcagctcgaagcattcattgccgaccgcaagaggtttcttggtgaaattgctgaagtcaaggctcgtgatcttattgaaccacttacccaactccagcatactgatcctaatacgacgtacaagctatggactgcgctgttcccaattttctggtcgaccctatcccgggaagatcgcagtgacctggagaaggggatggtcagtctcgttacccgcgagtaccaccagcgacaggtagataagcgaccgaatgtcgtccaggctttgcttgaaggtgtcgttcgcgcaagcccccgtttcaagatcccgccgcacgttctgaaataccttagccgtactttcgatgcttggtataccgctactgcgtacttggaggaatcggccatcaacccaatcattgacacgccgacagtccgtgagagtaatctcgacgcgctgg

SEQ ID NO: 20621 - DNA, 514 bp, Emericella nidulans
atgtcgacatccgcacgccgccgtctcatgcgtgacttcaaggtacgtactttcgcatcaatcctagcgccttcattgcctgtgctctgtatctctttatattccctgcctattctacactctcgtcctaatcaaatttcgcgctgttggactctctcggctaatcggtttcttcaacgccagcgcatgcaaaccgatccccccgcaggagtctcagcatccccggtggccgataatgtgatgacctggtattttctcctgataattattgtatcgagaggcttctaatcaggtcgctaggaacgccgttattattggtcccgccgataccccgtttgaggatggcacattcaggttggtcatgcatttcgaggaacaatacccaaacaacgctcccggcgtcaagttcatcagccagatgttccatcccaacgtctacggcacaggagagctctgtctcgatatccttcaaaaccgctggagtcccacttatgatgtcgcagcgatcctcacc

SEQ ID NO: 20622 - DNA, 507 bp, Emericella nidulans
  unsure (1)..(507): unsure at all n locations
attttgcctcgtgtcctaccctccaatgttgcaaacactggccgaatttttcttccgtggtctcacagttcaagtattagccggtacgctcaacgcgttcntcggtttatctggacacttttcggcactggtgtttcgatagctatcgcaatccccggttactcccattttgaaacggtgttggagaattttatgaacttcatcgcgtactggctggccatttactctgcgatcgcaatcatggctcattttgtctttaaacgcggcttctccggctatgtcgttgagaacttcgataagcgtgaaaagcttccagtgggtatcgctgctaccattgcatttgggttcggtgttgctggtatgatcactgggatgagccaaccctggtatgtgggccctatcgcgaggcacgcagccggcggtgatgtgggattcgagttgggctttgcatttgcggcgttttcgtatctttgtttgaggccttttgagatcaagttttttggcagg

SEQ ID NO: 20623 - DNA, 500 bp, Emericella nidulans
atctcagtctcatgatacgtcaattccgccacggtacacgtccaagtcgaaccgccggcctgtcgtctcctagaccacctcttccaccgcacaatgtccagcagctcctctaccgccctatccagctcctcaacgtccgcatcaccgcctaatcgaccgcttcgcatcctaccccttctacatctcattcacggacccctttgcgactcctattcaaccgtcctgcggacgcccttgagcactcagtgtcaccagatacgccgaacgagtacatgattacagataatgacccgcttgttaatacgtatatcagtgtaccaaaggagatgaaccagctgaactgtgccgcgtttgtcgcggggatcattgagggtgtttgtgatggatgtgggtttgaggcgaaggttacggcgcataatcagccgacggaaatgtggcccagccggactatcttcctattacgttttggggagagtgtcatggagcgagaaaaggtgttg

SEQ ID NO: 20624 - DNA, 665 bp, Emericella nidulans
tctagccccctactcccgtcatacatggtagatcagcggccaggattcccagcctttctccaactcgggtcagctccctccaaggctcatgcgagacgcaggtccctcagaggctgatgacgagctgattcccaccgcggtcgtgatcaagagcatcccctttgctgtgaagaaggagcagcttgttcagctgatgaccgagttaaccctccacctgccgtatgcattcaactaccatttcgtcaatggtgttttccgcggacttgcgtttgcaaatttcacatcggcggaggaaactgcgaccgtgatcgaggttctcagccactttgaattgcagggccgcaagctgagggttgagtataaggagatgcttcctctccaggaacgcggacgcattgaacgcgagaagcgcgagcgtcgcggtcagcttgaagaacagcaccgtcccatggccgcgtcgcagcttcagacccaaagttctatgtcgtccctcacctcacatattccggcggcttccccttctccggtctcccagcgtggccagaagctcggtgagttggcgcaatgccgttcacacttagacatccttacatagcttaactatttaggagtcgatttgagcgattctcagactctctcccacgcgttgcagcttcacatgtttt

SEQ ID NO: 20625 - DNA, 850 bp, Emericella nidulans
cttccgtccctacgatcacgaggcgtgtgcagcacaggagatggggacgttgtcccacctatctcctaagctccccttgcacatccgacatctatctgccatggaggccatcccactcctgcgcaaggcccgtgccgagggtgttcccattacagccggaacctgctaccattacctctcccttgcagccgaggagattcgtgatggcgacacccggcacaaatgctgcccgcccatccgttccaagtccaaccaagacgctctctgggccgaacttgaccgccacgccgaggatggcgtcatcaagaccattggctccgaccattccccttgcacaccagacctcaagcttctcccctcccatatcccgggcaactgcagccatggctcgtcaaagcatgccaacacaacacctgtcgttaacgaaggcagcttcctctccgcttggggcggcatctcctccgtcggcctgggcctgcccatcctctggaccgaactctcccgccgcaagggcctgacttcctcaccagacgacacaacaaccaaacaagctctccaggatatcgtccatctttgctgcgccaacaccgcggcccaggttgggctgcataaatccaagggcgaccttgtccccggatacgacgcggacttttgtgtctttgacgacacagcggagtgggaagttgagccgagtaccatgctcttccgtaacaaatgctcgccgtaccagggacggacgatgcgcgggatggtccgggaaacgtggctgcgcggtgagaagatcttcaacagggatgacggattcactgtcaaggcgccttccgggtcactgctcctggagaaaagggtt

SEQ ID NO: 20626 - DNA, 578 bp, Emericella nidulans; identical to SEQ ID NO: 3118

SEQ ID NO: 20627 - DNA, 500 bp, Emericella nidulans
gactggaaactgtcaccaacaactgctggcacagcgctcgtcgctcagaagcgccgcgccggccctatcaatctgtactaccagatccatggccacggtcctataaaacttgtggtgcgtgacgtgactgcctattgttgagatttagggcgggactaacgtacctaccagttcatcatgggcctgatggcgcccacagcgactggaagcgccaagtcaagttcttcggccacgaccacgccgacaagtactctgtgctggtctttgacaaccgcggcgtcggcaaatccgacaagccgatctcgtactattcgacatcagagatggcacaagatgtcatcgacctcctcacaagtatcggctggctcgatctctcgacgcccccatcacgagacatcaacgtcgtcggcgcaagcatgggcggcatgatctcccaggaactcgcgatgctcatccccgaccgactggccagcttgacgctctgctgcaccgcaccacgg

SEQ ID NO: 20628 - DNA, 850 bp, Emericella nidulans
tagtatgggaatggcgctaaacaacttagttgttgggacgctggggacggttgtgatgcaattaaattttctcgatgcggcgctgtgtgcgctgtttgggaatgtgcttggttgcgtagcgattgggtatatgtgtacctgggggccgaggagtgggcatcgcacacttgtgaggtcgatccattgtgatcttgaggagatggaagctcacaattgctagatcgtatcgcggtttcttatggggttcaaccctagcaaggtgtgctgctttctgaatgtgcttaccaacattggttatggaatgatgagctcgacggtcgggggccaaattctgtctaagctgtctggcggcgctgtatcagttgtggtcggaatcatcattgtagcccttgtgagtctggtggtggccaccttcgggatgcatatattccagtactatgagaggtatgcccagccaataaaacacagagaccaaccgtcgctaatgcaagcagatacgcatggttcccgcagttgatggtcttctgtatcctactgggatcgtccggtccagagttcgatttcaatactgtctctatagggtctgtagaagaagtcaacgccaaaagactggcgttcttctctctttgcctctctgccgcaatgtcctgggtgccaggagctgccgactatcacgtatattattcacctgataccgggacgtggaggatatggtccctgacgacggtaggagtaggcttagccatgactatcacgctccttctcggtgttgggctgggaactggaattgcccacaatccccgctggggcgccatttacgacgggacccccggtagcgtggtgatcgcgg

SEQ ID NO: 20629 - DNA, 784 bp, Emericella nidulans; identical to SEQ ID NO: 12957

SEQ ID NO: 20630 - DNA, 528 bp, Emericella nidulans; identical to SEQ ID NO: 14604

SEQ ID NO: 20631 - DNA, 500 bp, Emericella nidulans
ctgaatttattgttgacctgtgaagctatccagaatccttagcagacaagagctttgacaatacaggctgtgagttaagctcggcaaaacgaacgccatgccatcgctaatgcccgaacctcagtactcctcgaagcccccttcaatcccacacgcagacagaagaattcggttctcctcacaattgacctaaccaaggccgttgccgacgaagcaatcgctcgcaaagactctgtcgttgtagcatatcgtacgcaatccgtgaacaatggctataacacagaccaagctcaccaatctatcgttcagatcccattatcttccgcggcctcaaatccctcactttcaatgacccccaacaacagtcactcctccgcctcgccgcggagggcataagcgtctattctccgcacacggccgttgacgcaacccctggtggtatgggcgactggctctgcgacgttgtcacgggcgcaaccactccatcctcgtcgtcctcc

SEQ ID NO: 20632 - DNA, 850 bp, Emericella nidulans
ttgtggtttgtatcatttcggacgggcgaaagaaggtgcatccccggacgttgaatgctctggctgcgctgggtgtgtaccaagagggcattgcaaagaacgtcgtcaaccagaaacaggtcaatgcccacgtttatgagtataccacacaagtgtcgctcgactccgacctcaagttcaagggggctgagaaaggtatcgtgccttgccaggttatcttctgtctgaaggagcacaatcagaaaaagctaaactcgcatcgttggttcttcaacgcttttggccgcgctttgcaacctaacatttgcatcctccttgacgtcggtacccggccggagcccaccgcactgtaccatctatggaaagcgttcgatcaggattccaatgttgctggtgcagccggtgaaatcaaggccagtaaaggcaagaatatgctaggtcttctgaatccgctcgtcgcgagtcagaactttgaatacaagatgtcaaacatcctcgacaagccattggagtctgtgtttgggtatatcactgtgttgccgggtgcgcttagtgcatatcgattcttcgcattgcaaaatgacgccgaaggtaacggtcctctgaaccagtatttcaagggagagacgctgcatggtaaggatgcagatgtgttcactgccaatatgtacctggcggaggatcgtattctctgttgggagctggttgctaagcgggaggaaagatgggtcttacgattcgtcaagagtgctgttggagagactgatgttcctggtacgtaccttgcacggcactggaaataacccactaatggatgacagattccattcccgaattcatatctcagcgt

SEQ ID NO: 20633 - DNA, 850 bp, Emericella nidulans
agctctctgacattgagattctgagccacaacaccaagaggctgcgcttcgaatttcccgacaaggaggctgtctccggtctccacatcgcctgtgagttctccgagcgcacgtattatggctagatgaacttacagcactatccagctgctcttttgaccaagtattctccccccgatggctcgaatccagatatccgccctacactcccactagcgatgaaggtacgctactgatacaccactcgtctggcgctggcgtcatttgctaactgaccattacagatcagcccggttacctcgagcttgttgtcaaacgctaccctaacggcccgatgtctgagcatctgcacaacatgaatgtcgaccagcgtctggacttcaagggacctcttcccaaatacccctgggaagccaacaagcataagcacatctgcttggtcgctggtggaactggaatcaccccaatgtaccagctagctcgcgagatcttcaagaaccccgaggacaagaccaaggtcactctcgtctttggaaacgtcagtgaggaagacatcctcctgaagagggagttcgaggacttggagaacacatacccccagcgattccgcgcattctacgttcttgacaaccctcccgagggctggaccggcggcaagggctacatcaccaaggagcttctgaagactgtcctccccgagccgaaggaggagaacatcaagatttttgtctgcggtcctcctggcatgtacaaggccatcagcgggcccaaggtcagccctaaggaccagggcgagcttaccggtatcctgaaggagctgggttacagcaaggaccaggtctacaagttc

SEQ ID NO: 20634 - DNA, 850 bp, Emericella nidulans
ccacgccatcccgctcagatcatcgtgggtcatgacctgcgcttatgctcctagtggaaactatgtcgcctgcggtggtctggacaacatttgctccatttacaatctttcctcacgagagggcccgactcgtgtcgcgcgcgaactctccggtcattccggctacctctcctgctgccgtttcatcaatgaccgtcgaatcatcacctcttccggcgacatgacctgcatgctctgggatatcgagtcaggctctaaagtcaccgaattcgcagaccacctcggcgatgtcatgtcaatcagcatcaaccccactaaccagaacatcttcgtctccggtgcctgtgatgcttttgctaagctctgggatatccgtactggaaaggcagtccaaacttttgctggtcatgaatctgacattaacgccatccaattcttccctgacggcaacgctttcggaaccggttccgacgataccacttgccgtctcttcgacattcgtgcagacagatcactcaacacctaccaggtgagacccggttgccacactcattgtaggacagtattgttaacaaatgccacagagcgatcaaatactgtgcggtatcacatccgtcggtttctcggtttccggaagattgcttttcgccggatatgatgattttgaatgcaaggtatgttctgttctcgacgcctgtgattctggagacggtgactgaccgatgaataggtctgggatgttctccggggagacaaggtggggtctttaagcggccacgagaaccgtgtcagctgccttggtgtcagcaatgatggcatcagtctttgcactggatcttgggactctttg

SEQ ID NO: 20635 - DNA, 755 bp, Emericella nidulans
gcagacaaggagcgccctcttgcgggggcggttctgtgttttacgtccattgtgccagagcagcgggtgagtttacacctcattccagcaatttgaagatagacgctgacaatctaaaacgcctacagactgaactagcctctatcgcaagccagatgggcgcgagccacaattatgacctcacctccgacgtcactcatttaatagtcggtgaaatcagcacggaaaaatacaagtttgttgcgcgcgagcgatcagacatcgtggtgcttcgaccagaatggatagaagccgtacggcagtcttggatgcagggtggtgacacagacatacgtgctctggaagagcaatataggttgccgacgttttcagggaccgcaatctgcatcacaggattcgaagacagtgagtaagcagagctgtacaagatccgacttatagtgaccagcctccttcgtagtgaacctccgaaactacatccgcaacaaggcccaactcaatggtgcagatttcaggaaagatctcacaaagcaggtgacgcaccttattgcgcgaactgcgggaggggaaaaatacaagtacgcgacgcagtggaatgtcaaggtggttactctcaaatggttcactgatagtatggaacgcggaatgatactcgaagaaaccttgtaccatcctcttttaccagaagagcaacagggcatcggggcatggaaacgctcattacctgcagtcaaaccaaaaccacaagaaacaga

SEQ ID NO: 20636 - DNA, 850 bp, Emericella nidulans
taaatactcgattcgctattcacaacactaaaacccaggttaacaaacttcttcatcgcagccgaccagctcatcggaatccctggcgcgccctcgcgcaacgcccagctctccatcaccgaccctaaagtttgccgctcgtacctcgtcggaacctgtccgcacgatctattcacaaacacaaagcaggatcttggcccctgtccgaaggtgcacagtgaaggactgaagacggaatacgagacagcttccgcggcggacaaggcgaaatgggggttcgaatatgactatatgcgcgatatgcagaagtatattgatgactgtgaccgacgaattgagtctgcccagcgacggctggagaagacgccggatgagatccggcagacgaataatctggtacgggccacggaacgcacgccttgaactgtgttagggactgaaatatgctaatgctttaactacaatagctcaaacaaatatctgaccttacgcaaaccattaacaccggccttctcgaggtctcggtccttggcgaaaccggctccgtcgcgcaagctctcaatgaattacacaagattcgcaccgcaaagcatcagaaggaaacatgtgaacgcgaactcaagaacttgcaagatacatccggcccatcaggtcaccagaaactccaagtatgcgatgtctgcggcgcgtacctgagtcgtcttgacaacgaccgtcgtctggcggatcacttcttcggaaaaatgcacatgggttattctgatatgcgcaagggatggaagaagctacatgaggagcttaagggtcgaccgccgcccatgagacaccatgatgaggacgatggtggtgg

SEQ ID NO: 20637 - DNA, 850 bp, Emericella nidulans
caagcctattggtttcacgactcccttactcacaacctcatcaggtgagaagttcggaaagtccgctggtaacgcaatctggttggacaaggatatgacttctacctttgaattataccaggtaggttcagcacatcttgcaaagattagcatcttattaacataaatagtttttcgttcgcactcctgatgatgctgttgagcggtatctcaagatgttcaccttcttgcctatacctgaaatctcaaagattatggaagagcaaaaccaagatccgtcaagacgggtagcccaacatgctcttgcttatgaatttgtcgaactcattcatggcaaagatgaggcggatgcagtgtctatgcaacaccgccaattgttcagaccacgaacttcaactgcagaaccaacgcccccgcctcgtactgcatcacccggcaatcccaaatcttcattgtctggttttgtcaatccgcagtctgggaatccacacgcacctcaaacaaactttgccaatatgccgtctgcgcgggtaactctccctaaatcccttgtctacgacaagacgttcagcaaggttctttggtccgccggtcttgtggcgctcaagagtgagggtcaacgaattatcaataataacggtgcctatgtgggaagtcgtccaggggtcaagaagaacgagcctggtgggggaatgccagatgacttaacctttacgccaattaagacttggaatgcctcaaaaacacaggagtttatcatcgatggcgacctgctcatcttaaggtaggaaaatggaacatgaaagctgggagtattagcagccgatgagaagtcaaagagctggtctca

SEQ ID NO: 20638 - DNA, 850 bp, Emericella nidulans
cgcgctgcgaataatggtcacgtagtcgatcttttcgctggctgcctcgaccaagttggtcttctggaaatgaagaacctcgctaattacactggaggtcatattcttcttactgacagcttcacctcatcacaattcaagcagtcttttatccgcgtgttcgataaagatgcaaacgataaccttcttatgggtttcaatgcatctctcgaagttttgaccacgaaggagcttaaggtcaccggcctcattggccatgctgtttctcttaacaagaagtccagctccgtgggtgagacagaatgcggtatcggcaacacctgtgcctggaagatgtgcggtatcgatccttcttcgagctatggtatttatttcgaaatcgcgaaccagggtggtcctgcagccgtacaaccagggcctcaaagggggatgatgcagttcttaacctactaccagcactcttccggacacttccaccttcgagtcacaaccgttgcacgaaacctgagtggtcctgcaggtgatcccactcttgcacagtctttcgaccaggaggccgccgcggtgctcatggctcgtatcggagtcttcaaggccgaggttgacgatggtccggatgtcctcagatgggtagataggatgctcattcgactttgctcgcgctttgccgactaccgtaaggatgaccctacgtctttccgacttgagaagaacttcacactctatcctcaattcatgttccatctccgccgaagtcagttcttgcaggtcttcaataactctcccgacgagactgctttctatcgccatgtgctcaatcacgaagatgtcggcgactctcttattatga

SEQ ID NO: 20639 - DNA, 614 bp, Emericella nidulans
caaatcggcaagttgcgaccatcccgatctattcttaagaagcatgccgagggcgggcaaaacgttctcgtttgctgcatctgtgatgaaccggcggaggaagcgatccgatcacggtgccgtcatgacttttgtcggcgctgtgtcaaagattatatccggtcatttgatgcaggtgccgtagttgactgcccgcgatgccatatacccctctcgattgacctcgaccagccggatcttgaacaacatgaagattatatcaaaaagaactccatcgtcaacaggatacgaatggaggattggacttcgtcgaccaaaatagaaatgcttgtctacgagctctacaaactacgcagcaagaagcagacgctcaagtccatcgttttttcacagttcacctcgatgttgcaactcgtggaatggcgcctgcgtagagctggctttaatacagtcatgcttgatggaaccatgtcacctgcacagcgccagaagtcgatcgattatttcatgaataatgttaatgtcgaggtgttcctcgtatcgctcaaggcaggcggcgtagccttgaacctgacggaggcgtcaagggttttcatcgtggatccgtaagtgtc

SEQ ID NO: 20640 - DNA, 850 bp, Emericella nidulans
gacaccccagagttacaagttgatggtgtttcagcggcggaacaagctaccacagccaacaaagaggaactcgctcggaaactacgccgtgtcgcttcggctccgaacgcccagggcttgtttactgctaccgattcagatggccgaccccagactgcagagctgggtaaggaacctctggtgcactcgggagctgcaggctcccctgtcggtctggttgaggtgagctcaaacacagaccaggatggaaatcttaccgttccgcaacctggctccggcaagcttcctgctgtcactcaagttcgaacttctagcggtggtttccgtcgaacatacagctccaactcgatcaaagtacgaaatgtggaagtcggacccgctagctttgacaagatcaagctcatccgcaaaggcgatgtcggcaaagtttatcttgttagggaaaagaagtcgacacgcttatatgccatgaagggtaagtttatgcagtccttgtgagagcgagctggactgacagtgcgtagttctcagtaagaaggagatgattaagcggaacaagatcaaacgtgcattggcagaacaagaaattctcgccaccagtaatcatcccttcattgttaccttatatcactccttccagtcagaggactatctttacctttgtatggaatactgcagcggcggggagttcttccgaggtatgatcatgccgcgagcttggtgctacgtgcttgctgatgtcacttcgtactcatagctctcccaacccggcccggaaaatgtatttctgaagaagctgcacgattttatgcagacgaggtcactgccgcccttgagtatcgccattgct

SEQ ID NO: 20641 - DNA, 850 bp, Emericella nidulans
tggttgctccctatgggtccaccttggtagagaagttcttcgagcacatccacccgaccttcccaattctgatggaagatgtcttccgccagtcgtacagaaccaggaatggcatctctccacttttactttctgctgtctacgtcctggccctcaagtttgttgacatcggaccagcctcgcagtcgcgcggcggcccgacgccactcgtcttgaggccactgctttgaggcttcttaatgaatctctaccatatgcatcaatatcgacgatccaagcggggctgttactcatgcaaaagtcgacgttggcaaccgctgctttgaacgcgcaattggtcaccgctgggtttgagctcgggcttcaccaggattgctccgactggcggatggaaacctgggagaagggcctgagaaagcgtctcgcctgggcactttacatgcaggacaaatggtccgcaatggtgcacggccggccatcacatgtcgtttcctccaactggactgtgcaggatctcgtggaagaagattttactgacgcgttcgcctcgaccgcatcccagccggaagacgccccttgtaggccacgggccgcttttcttctgtcatctagtggccctgaccaccattctctccgatatctaggaccgcttattacccccttcagtcaatacaagtatttacagccgcgggcagcaaccgaacccgtctcatcctagaacgcgccaaaccggcccaaatccgtctcaaggaatggttcgcgcgtctacaagcaaccctcaccctaggctcttccaccgtcctcattaggacatccggaaaaaatgccagcaacggcgccctgcacctct

SEQ ID NO: 20642 - DNA, 850 bp, Emericella nidulans
  unsure (1)..(850): unsure at all n locations
ggagagatcaaatccgcgcttgggtttgtcgacctggtgatgaccacatttggattaggaccctatcgactcgtgctgtctacgaggcccgaaaaggatttcatcggcgatctccagctgtgggacagtgcggaagctcatctgcgcgaagctctagaccagaccgggaaaaactgggcgataaacgaaggtgacggcgctttttacgggcccaagatcgatatacagcttcaggaccaggctggcaagtaccatcagttgtctactattcaactggacatgaacctgccacggcgctttgaattggagtaccaagttgcagagggagaggaagactacaatccagcgacgcctggaagggcaacgncccgtcttgatccaccgggcgaattttggatctcttgagcgcttccatgccctgctcattgagcaatactcgggccgctggccgttttggctatcaccgcggcagggcatcatattaaccgtgaaccaggacgacgctgttgtgaagcaggcgcatgaagcagcagcgcaaatctcaggatttaaggctcttgatcagaatgcggccgatggaatacctcagcctctgtcagcgacggactctacatttttgatcgatgtcgatacgagcagtcagacactaagcaaaaagatccagcgggcgaagcagatgaaatacaacctcatcttcattctcggtcccaaggatcttgcggagggccggatcagcgtcgatattacgggccagatgaatagcaaacctgaccataatgccgagaagctgcaggcagtgctgacccaacgcgtgggaaaggaagcgttgcgaaaaccacgggcgattccg

SEQ ID NO: 20643 - DNA, 850 bp, Emericella nidulans
ttgtttctcttgaggccgtccgccttctttcgaaaatgatgaaagccagggactttaaaatccacggcagcgtcctggatacattccttcacctccgactgctccgcgaattctcttcaaagggttcaagagaccgagtagaccgcgacaatgaggaagaaacttctggtggcaagaaaatgaaacaaaagaaagaatggcgcaccaagcgaaaccgcaagctcgaaaaggagctctcaggccgtgaaaaaagacatgaaagaagctgacgcgctcgtctcgcacgaggcccgcgacaaaaaccaagctgagactctcaagctcgtctttggcatctacttccgcatcctgaaactccgcgtcccgaatctcatgggtcctgttctcgaaggtctcgccaagtacgcccacatgatcaaccaggacttcttcggagatctcctggaagccctcaaggatctcatcggacatgccgaggacgacgagctcaacgaggtcgacgataacgaagatgatgaacacatcaactccgcctcttcgacaactcgcgactccacccgcgaatccctcctctgcaccgttacagccttcgctcttttggaaggccaagacgccagcaaagccgccgcagctttgcacctcgacctcagcttcttcattaaacacctctaccgctccctgtacactctctccacaaatcccgacgtcgaattcaaccccaatgcctctaacgccctccgcctccctgacccttcttcctcgcaacaacagcaacagaacgcgcaagaccgcaagaaaaaagtaaatttccaaacgcccatcgtcctcctcctccgctgcctcaatgcct

SEQ ID NO: 20644 - DNA, 850 bp, Emericella nidulans
ttcaggacggccagccagagatatcatcgatgaagagggagtcagcatggaggagttcaaggcgacgtttgagaaagggaatgaatttgcaagtggcataggtaaaattcccttattctatccgtgttctggctctcgcaattgctgacactgaccaacgtcatatacagcggtaaattatgatgccagtctgcttgttgcaaagggcagcaagatcgcagaatcaaatgatgaatacaaatgccgggttaccagcaaaccacagctggccacaaaaatcgacgttggcaaacggatgcccagcttcaaagtgctgaaccaggctgacgcacgcccgtggcatctgcaagagctcctgaagagcaatgggcgctggcgagtgattgttttccccggacgactcacagatcctcgcaacatgcagcgcttccaacagctcggccagaaactgggagacccagactcattcattcgacaatatacgccaccaggccagccaattgacagcatgatagaggttctgacagtccacgctggaccccggactgagattgaacttttggttctccccggagcgtttcatcccattcatggcgacatgggctgggactattggaaagtgtatgtggatgatgattcttatcatgagggccatgggcaagcatatgcaaattacggcatcgaccccagcaacggggctagtgtgatcattcgtcctgaccagtatgttagttgggtgggagatatggacgactacgaggagatggcgcggttcttctcggccttcatgaaacagcaggtcgccggaaagcctggagctgccaatgtccgagtaccgtttatgactacg

SEQ ID NO: 20645 - DNA, 850 bp, Emericella nidulans
gattacgggctttggcgaaactatgtggcttaagacctgatcagtgactggctctttaccacctacgtccttgtcactgatacgaatatcggatcgatctacacccccagctttgaagaagcttttcgaaaagctgtcgtcgagattactccctccccacgcctccttatttataatgctccccccggagaagtttccaagtcccgacagacgaaggccgatattgaggattggatgttgagtcagaaccctccatgtggccgcgataccgttgtaattgcattgggtggaggagtcatcggagatctgacaggattcgtcgcttccacctacatgcgcggtgtccgttatgtgcaggttcccactactcttctggccatggtagattcatcgatcggcgggaaaactgccatcgacactccgctgggtaagaacctgatcggcgcaatctggcaaccgacgaaaatctacattgaccttgagttcttggagacgctgccggtgagagagttcatcaatggtatggcagaggtcatcaagacggcagcaatctctagcgaagaagagtttacagctttagaagagaacgcggagacaatcttgaaggcggtccgtcgcgaggtcaggccaggagaacatcggtttgagggcatagaagagattctgaaggcccgaattctggcatctgcgcggcacaaggcgtatgttgtctcagcagacgaacgtgaggggggtctccggaaccttttgaactggggtcactctattggccatgcattgaagccattctgacgccgcaaattctccacggagagtgtgtcgcaatcggcatggtgaaggaagcagaact

SEQ ID NO: 20646 - DNA, 553 bp, Emericella nidulans
tgatacaacctcgaaggcccggccgttcgagtacctccgtcttacttcgctaggagtaatcggtgcgcttgttaaaaacgactcttcagacgtcatcaacttcctcctcacgactgaaataattccgctctgtcttcggatcatggaaaccggctccgagctgagcaaaacagtggccatcttcattgttcaaaagatactgctggatgacatcggcctagcgtacatttgcgcgacctatgagaggttctacgcggtgggaacagttctgagcaacatggttactcagttggttgagcagcagaccgtgagacttctcaagcatgttgtgcgctgcttccttcggtatgttcaatccgcttcgtaatatgaactgctttctaaccctgataggctgagcgataatagccgtgctcgcgaggccttgcgccaatgtctgcctgagcctttacgtgacgccaccttttcctcggtcctccgcgacgacgcagcaacgaagcggtgtctcgcccaacttctcatcaacctctccgataacgtgtccgacggcgca

SEQ ID NO: 20647 - DNA, 322 bp, Emericella nidulans
gtctaccgagtccctcacaactcgggaaaaggtctttgcaccagttgtagcgttgtacccattcaaaccagaagaataggtgctcgccaagccaaactattgtgacgtcgggttagccagttatgtcattacggagtcgatgccgcgcatgtggagggttgcggagagcctgcaggttggtatggttgggattaacatgggcacgctgagtgccgctgagagtccgtttggaggcgtcaaagaatctggctacggacgggaaggcggacgccagggtattgaggaatatatgacagtcaagagtatcttgatgaatgtcgcg

SEQ ID NO: 20648 - DNA, 850 bp, Emericella nidulans
tcctaacgaccaccatcgaaagcgaatccttcgatactctccgccccatcttcgtaaatccccacgcgagcccacttgccatagtccgcccatccaccatcgaagctgtcagtgccacagtctccttcctagcgtcgaacaagattccctttaccgttcgcgtcggtggacatgatttgcacggccggagtgtagaggatggcggcgtagtgctggatctacgactactcaaccaagtcgtcatcgacaagagcggcagtgaggctgttggtggaaagacagcaacagcaagaatcggcggcggggtcctcatcggcgacctgctttctgctctggaaccgcacggcctcgtcactcccgtcggcaccgtctcaggtgttggctatctaggctgggctatgcatggcgggtacgggccatatagctctgggtttggggtgggcattgatcagatcgtcgctgcaaaagttgtggatgccactggacgtgtcgttgacgcggacgggaaattgctgaaggctattaaaggagctggaggtgcattcggggttgttgttgaggctgtggttcgagtgtatgagctggactcggtatgtcctgcatttgagaaccaccagcttgccacccggggtggccatcaagtggtgtatggtgctaagtattgtttactagattctcgccggcacactcatcttcaactcgcaagaccttgccactacgatccgcactttcaacaaagcctacaaagccctagcgctcaccgagtccattccgtcagcactaaacattttctcctgcatcctctccagccctcaaacgccggcaccaatcttcatcctgctggtaaact

SEQ ID NO: 20649 - DNA, 850 bp, Emericella nidulans
tgaaacgcgcagacgtctggggtttggcgcatgcgatcaacgggttcatcttcctgtctgtgatcagctgcggcgtgacgagcgtctatgtcgcaagccggagcctcacggctctggccgatctgggccttgtccataggaccctggggaagaaggacgctactggacggccgtgggtcgcgatcgccgtcagcctggccatcggcgttggtcttcgctatttgaacgtcgacggcactggcagtatcgtctatgatggctctcatctttggtagcccttcctctcaccaggtctctttcatgtttccctttcccgttttcctcgtttcctggttaccgtgcgaacacgatgtaggtcgcgattgtaaccctctttcaatgggcgtctatctacatcgcacacctccggttccggactggtctgcttgcccaaggaaggaacctcgctgatctccccttgaagggcttgcttacgccctacgcgcagtgcttcagtctgctgattgtgctgttcatcttcggatgcgagttctacctcgcctgtttcccgtttggggagaaggggtccgccaagagcttcttctcgacgtacctagcggcgccgctgttcttcttcgactatggtgtctacaaggtgagagagtctacctatccccataagccgtgagcctggaaggccgctgactggtcctgcagtggtggttcaagacgaggattgtcaagccgagcgagatggacttctcggccgcggtagtctttgataatatggagcaagcagatagaatcgctctggaagagaaggcaaagcatggcaaaaaatcgtggctcaaaagagtgcaatatatggtat

SEQ ID NO: 20650 - DNA, 850 bp, Emericella nidulans
cgtacaaggcatggaggagacatacatcgattccgcgactgcaggtatcaaacttctccagcaaggtagccataagcgtcaagttgctgcgaccaagtgcaacgacctgagttcacgaagtcataccgtgttcaccatcacggtgaatatcaagcggactacagagtctggggaggaatacgtgtgccctggcaagctaaacctggtcgatctggctggtagcgagaacattgggcggagcggtgcagaaaataagcgtgcaactgaggctggcttaattaacaagagtctgcttacccttggccgcgtgatcaatgccctcgtcgacaagagccaacacattccctataggtacattctttaccgtcgtttgaatacatgacgctaactagctactagagaatctaagctcacgcgcttacttcaagattccctcggcggacgaaccaagacatgcatcatagctacaatctcgcctgctagaagcaatctagaggagacaatttcaacgctggactatgctttcagagccaagaatatccgcaacaagccgcaaataaactctaccatgcctaaaatgacgcttctccgtgaattcactgccgaaattgagaaactaaaggcggagttgatcgcgaccagacatcgtaacggagtgtacatgtcagtggaatcttatgaggaaatgaagatggaaaacgagtcacgaaggattatcagtgaggagcaacgggccaaaatcgagtcgatggagtctagccttcgccataaggtccaaaagaaactcactttgacgagcaagttcagcgacctgaagaagggcaccgtcgtcacttgccacgatttatgc

SEQ ID NO: 20651 - DNA, 850 bp, Emericella nidulans
tgctgtcctgactgagactcttttcatggctcttatagcaatcatatcgatcctgtttatgataacactcgccctccgtgcgcgcgacgcgacccttcatgctcctggccagaaatactgggtcagcgcgcacaactaccaagtccacctcgactgtgttggcaattcatcttacagcaactccccttccacagtcctcctcgaggctggcgaaggccccgtcgagcacactctacaaccctttatcaacgagctctatcaaaagggcgccatcccacgctactgctactgggacagaccgggtatggcttggtccgacaacgcaccatctcccttctctgcaggtatggcctccgacgcactctccgaagcgctggccctggccggtgaagagggccctttcgttctcctctctgcaggcataggaagcatatacagccgtatctttgcaagccgccacctccttgaaaccaagggcatttttctcattgaccccttgcacgaagactacctctccgatattgccagcccaggccgcggtttttggctctggatccgtggtattttatcacccgttgggtctttgatcgaattgcgggcgcgattttcaggccccgacccgtgaagaagggtgtttggtcagagcgctttcatacgggaaaattattctgcaaaattccggggaatcttttgcgggttcatgcacctttcgaatttcggcttcagcttttcaattgcgatactccctaactctcatgcctctcatttgctctatcccacatcggctaattctcgtattctcctctctctaaaatcacaatcgacttctctatctccccttgggggggtt

SEQ ID NO: 20652 - DNA, 516 bp, Emericella nidulans
gagaaagccctactcagctgcaaatcctgactgctgtcgtgaagctgttcctgatcgccctgataaggctcaagggctagtgcagaaagttcttcaggcggcaacggcggagaacgacaaccccgatgtccgtgaccgagcctatgtctactggcgcttattatcaaataccagtgacccagatgctgctaggaacattgtgctctccaaaaagcctccaattgttaccactatccattcccttcctcctgctcttctcgagcaacttcttactgagctttccacattggcttctgtttaccacatgcctcccgagcagttcgttggccagggccgttttggtgcggacgctgttcagaaggctgccattgagtacgtctacgtatgcctctcactgtagtatgtatgctaatgcacctatctagggaacaactccagaatgcgcgcgaaaacccgctggctgctgccgcggcggcggcagttgatggcacggccgctccgcagcagcagaacaat

SEQ ID NO: 20653 - DNA, 850 bp, Emericella nidulans
atgcaacagctgtctatacaggcttcctgctaacatgaaattagaattcggtgactgtaagtatccaagcgcttaagccgactggcaaactcaaactcatattggcagcaacggacatcgaaaaacccatgacagtcaaccaagacggacaagaggtaaccgaatggctcgaagtcggaaacggctgcatctgctgttcagtgaagtaagtttccatatttgtccctagacgaatacgcagtggtgtttacatcaggttgcagagactccggggtaatggccatcgagtctctcatggaacgccgcggtacattcgactacattctgctcgaaaccacaggtctggcagaccccggaaatattgctccgatcttctgggtagacgacaacctcggcagctccatctacctcgacggaattgtcactctcgtcgacgctaagaacatcctccacctgcttgacgaacctacgccggaggaaacagtggccgtggagaacagcaaagacggttctgatcacgaccacgatcacgctcactctggaccagtcctgtccatggcacatatgcagatctcccacgcggacgtgatcatccttaataagacggaccttgtcacagcggaagagctagagcatgtccgggacagagtaacagccataaacagcgccgccaagatccatgtcacagatcatagccgcacgcctcagatcgagggtgtagtcctggatctacatgcgtacgatcatctcgatagtctggatttcagccagaagggccacagtcatattgatccggtacgtccatccagtaacatgatacacacaagagactaatatatacaataagtct

SEQ ID NO: 20654 - DNA, 831 bp, Emericella nidulans
cagagtgatctagcgacatcccgctcacccggggttgtctggcgcccatcaacacgatcatccccaagggatgtttcctgaacccgtcctcggggccggcagtctgcgcaggaaacacccaaacctcccagcgcgtggtggatgttatcctccgcgctttccgtgcagccgctgcttcaaacgggtgcatgaactgtctcggattttttggaggggatagcgacggcaccgaaccgggctcgaaactggaaggcttttcgtacgctttcggcgagacgatctgtggcgggtctggcgccacaagcacgcagaatggcgcttctggcgtgcactgtcatatgaccaacactcgcatcacggacccggagagcctcgagaaacgataccccgtcattctgcgggaatttgccatccggcgtgggactggtgggaaggggatgcatgatggtggggacggggtggtccgcgacatcgagtgccgggcaccgctgagcttcagcgtcattactgagcggcgcagtgtgcctccgtatgggatggaagggggcgccgagggagaacgaggtgcgaactactgtgtgaagagagtcaatgggggcgaggggaacagggctgaagctgcggatcagtggcgatgggtgaatatgggggcaaagaatatggcgcgcatgcatcctggggatcggtgtgcgatccatacacctggtgtggaggtgtggagtgccagagctttctaatggaaatagcatggaagatgtaccttgagtgcaataactgcatcccagggcatcatgcagtgtgattgcctatgctgatgtacaggaagcgtct

SEQ ID NO: 20655 - DNA, 850 bp, Emericella nidulans
acaccagcccggctggtatataactttgatgaatatggcttccagcctggcaaaggaaaatcaaggaaagtgattagttcaaaaggtactcctaattttgctgaatctgagaagggtaagaatattacagctattaaatacatagctgcagatagctgggtaatagacctattctttatctttaaaggcgacggcatcttcatggaatcttggtttggtaagagtgaggctttattactatatatggtaatagctacttcacctaatagctggatttcagataaactagcccttcaatggcttcaatattttattgaggcaacaaataagcatacaaaaaggggagagaaacagattcttatatttgatagtcatggcttataccttaccattaaattcttgcaaagatgcaaagataatagcattataccctttggattccttcctcatacaactcatctttgtcagccattggatgggaagctatttctaagttataaataatactttcacaaaattagtaataatctatcttactgggccggcgagccagttaggaaatcagaattcctataagtaatcagtccggtacaggagaaagcctttaaccaacaaattatctgtagagccttcaaagatcatggcatctggccagttgaagtagaagtaagatagtcgacaatcttactatcctagcatgggaacaaatcccagatatctacatgcctgatttgtcaacaccctctctgccaataacagctatattatcatctagtattaatatcttgcctccaaggacaattcagagccttgagaagaactaggcaaagatatataaacatgcagatct

SEQ ID NO: 20656 - DNA, 850 bp, Emericella nidulans
gcttctatctttatactctctctcttttgtgttgcgttgtacttcttttattattacacaattcttattttgtttttatcgttttcatatcttcttgcttcttttcgttggaattagtttttttttactttttccttggttttggttatgtatttcttattttattttatttttaattattcttatattattttcttctttccaatggtaatgtctgatcttctcgcacctttttgctcttttttatttgcctattgtccttcttttgtttatgttttatcggtgttattttttatatcatctttctctttgtgcttaatttaataattggatctttttttttttattttatctcatttcatcctctcaatttttattgttattcttttctattcttttatcatcatcatttatacattattcttgttactatttttatctttattttactttattattttgtcattttatctatttaaatattctttattctttgtatatttcaactttctcctattctctctttatcttctctctctatttattattcgttcatccactttctctctttcgtgttctctctatgtctttttctcatttcaatcactatacctgtcttcaactttatctctttcttattcaccttctcttctctattttctaatctcttttattattatctatatattttttctttaacgtaacttgttgttattatttttcttcaccttaatttctttttattttacttctctatttactatatatttatttatctacaattatttatattatagttctgtctattatttctctacttatcctcttacttcttcttccttcattactt

SEQ ID NO: 20657 - DNA, 631 bp, Emericella nidulans
ctgtaaaaaatgagaatacgaatacgaggtccctctgggcaatttgctattacccttgctgaggacgcaacagttggagacctccgaaacacgatcattgagaagacaggattgactgcctatgacgcgaagtacggctatccgccgaaaccgatatcgttggaacatgcagaaacagaccagaaacttgtcgagcttgggattcaattagaccgggagcagctcattatctccgccaaagatggaccacctggaccatcaggaaagaaggaagacacttcctcttatgccgggcaatcatctccgaaactctctttatcacgcaaacaaaatcccgttgccgaggatacaccaaaagtcccctcgccggagcatggtggtctattcgttctacgtgtcatgcccgatgacaactcgtgtctgtttcgcgcaataagcactgcactcctgccaggcgaggacaccatggttgaacttcgatcggcggtggcgaaacgatcagaacaacccgacgagtactcctccgcagttttggagcagccacggatgactattgtcgttggatcaagaatgagacatcgtggggtggtgcaatcgaaataagcatattgagcaacattttgatgttgag

SEQ ID NO: 20658 - DNA, 850 bp, Emericella nidulans
gtcgagtttgttctgactgtacctctcaccaaaatacagaaagaggcatatgatatgtacgcagcgtttattctacaaggacgaatggatgaggtcacacagacacagttatggtcgtggctatctattctgggattatgctgcaatcacccagcatgtttccaggataaactagtcagtcaggcccagggttcctcaaaaaaaacgaatgataccagaaagacgagcgacgttgaccaggcaatatctccagatcggttaggcgatggattcattgaaaatgctggaatccgaaacctggaggagcttgtagccgaacagctccgtatttttgctaacgtccatgatctgaaggctgtggagctttcagttcgcgcggtaataacgaagaggatcattgatgaatctatcagggctggtgataaagttcttgtcttttcacaaagtctacacacacttgactacttagaacgtttattgaaggtcaccaatcgacagtactcacgactagatggtcagacgccggctgctaccaggcaagcagctacaaaaaagttcaatcagggcgaaaagcaggtataccttatttcgactagagcaggaggactcggcctgaatattacgggcgcgaatcgcgttatcatctttgacttctccttcagtccaatctgggaagagcaggcaattggacgtgcgtaccgcctagggcagcaaaagcctgtgtttgtctacagattcatagccggcgggacttttcaagagatcatccacgaaaaggcgacttacaagacgcagctcgctgttcgcgttgtggataagagaaaccctattcgatctgcgcacaagaaac

SEQ ID NO: 20659 - DNA, 542 bp, Emericella nidulans
tcaatggtcagattcctccaaacactataagcagactctcagctctcagagttcttagtctcagagccaatctaatctccggcgagtttcctaaggatttcgttgagttgaaagatttggcctttctttatcttcaggataacaacttgtctggtcctttgccattggatttctctgtttggaagaatctcactagtgttaatctctcaaacaacgggttcaacgggacaatcccgagttcgttgtctcgtcttaagcggattcagtcgttaaatcttgctaacaatacgctttctggtgatattcctgatctgagtgtgctctctagtctgcagcacattgacttgtccaacaattatgatcttgctggaccgataccagattggcttcgaaggttcccgttctcgtcttatacaggcattgatattattcctcctggtggtaactacaccctcgttacgccgccaccacctagcgagcagactcatcagaaaccgtcgaaagctcgcttcttgggactatccgagacggtggggatcctc

SEQ ID NO: 20660 - DNA, 781 bp, Emericella nidulans
tctaatgttagtcaaaatctccgtgatggggttctactgctgacatggctagtggcgtcttctactggcgggtctgtacccggttgagtttcgtgacttcttcctgggagacatgtactgttcccagacgtatgcaatgggcgtgagtgactaaaccctgattcatctgcgcagaagcgttgaccttgcttagaacattgaattattcttctgcctctatgcgaagcactggggcgcctcgtcaacgcagtgcacctcgtctcactccagattactggggttctttaccactctcccgtcgatatggagagctttccagtgtatccgtcgatatgtggacaccaagaacgtgtttccccatctcttgaacttcggcaaatacatgtgcggagtcctctactacaccaccttgagcatgtaccgcatcaacagaacgacgcgatttcaggcccccttcataacattcgcgctgctgaacgctatatatgtttctgtgtgggacttagcaatggactggagtttgggaaacccctacgccaaacaccccctactgcgtgaaaccctggcattccgaagagcatgggtttattacgtagccattgtcatcgatgtcgtcattcgattcaattggatcttttatgctatcttcgcacatgacattcaacactctgccgtgctcagctttgtcatctccttcaccgaaatttttcgccgaggcatctggacagtattccgagtcgagaacgagcactgcacaaacgttctcctgtttcgcgcgtcc

SEQ ID NO: 20661 - DNA, 684 bp, Emericella nidulans
tttggttgatggcaccgcccaagactgacattcttgaattgtatttcaggtataaacttgtgtagaagctctaagggagcgaaagtactttgtgaacaccgcccctcatctttccagctggctcccgatcatggtaccagtccaaaagtggtggcagattccctacttctgggccggtacgaaatgctatgattggctagctggctctgaaggaattgagagctcctacttcttgccaaagagtaaagccattgaggcattccccatgctccgaaaggataacgttctcggtgctatggtttactacggtatgtgttttatgacccctgagaaattgaaatggaggcgctaatattgtagatggtgctcacaacgactctcgaatgaatgtttcgctcgcaatgacgcgtgcgctatatggtagcactgttgtcaaccatatggaagtcacaggcctcaccaaggatgcgtcgggaagattgaacggcgctcggcttagggactgcattcccgaacgggacggccaaggagcagaggagatctccattagggcgaagggtatcatcaacgctaccggtccattcactgattccatcaggaagatggacgatcccaatactaaggagattgtcgcacctagctctggtgtccacgttattctgcctggttactacagtccttcaa

SEQ ID NO: 20662 - DNA, 434 bp, Emericella nidulans
cgagggtctacccgcggtgcaatcgtagtgcttggatcggcggccccgcacgtcgccatgcccggagtagcgccgtatacggctgccaaacacgcttgtcgggatgattaagactgccggtaagcgactcgggcagcagttgacatttcgccagcgaaatattccaatcgctgatggatggacgcatggcgatcgataacatcccgcatggcatacgcgtcaacgtcgtctgtcccttgtttgtgaatacaccgggggtccaagccgcttttgaggatgacccagagctggaagaagtgatcagtaaaatgcacccgctgggccgtatcgcgaatgcggaagaggtcgcggatgcggttagtttcttgtgtagtgataggtctagctatatgactggatgtgctcttcttattgacggcgggtctacgctcact

SEQ ID NO: 20663 - DNA, 557 bp, Emericella nidulans
ttcttggctgtggctggggtactctggcgaaatacgcttctgtccattatggcgctcaggttaccggtattacgctgggccgcaaccaaaccgcttggggcaataagggtctccgtgctgctggtattgatgaatctcagagccgtatcttgtgtatggactaccgcgatgctcctcgtgtccctggcgggtataagaagatcacttgcttggagatggctgagcacgttggtgttcgccacttcggttcgttcttggctcaggttaatgagatgctggatgacgatggtgtcttcttcctgcaaattgctggtctccgcaagtcctggcaatacgaggatctcatctggggtcttttcatgaacaaatacatcttccccggcgccgatgctagcactccccttggattcgttgtcgataaactcgaggctgctgggtttgagatcaagggcattgacactatcggcgtacactactctgccactctctggcgctggtaccgcaactagcaaggtaacggggagaaggtcaaggcgaagtacggtgaacgctggggc

SEQ ID NO: 20664 - DNA, 343 bp, Emericella nidulans
  unsure (1)..(343): unsure at all n locations
aaatggaccaggtgcgcaagatggtacaacgtcggaaattaagcgtttcgctcgagtgaatgtgcagttgttgctggatacaaggnaggcagaggacagtgcgatctcggaccctatgtcgaaggaatctttgatgagcggaggttctttcgagaggctgaaccgtgccgtcgctcaacttattgatgattttagtatggtatctttcttacagctggacgttcaggacgaggatagtgttgctgccgtgctaagccatatcgatgccgccattcaattccatgaggcacaagagccgaaagagcctaacgatgcgcaggatgttgattacgaggattgaaat

SEQ ID NO: 20665 - DNA, 850 bp, Emericella nidulans
agaaccagaccgctttttacgctgccccgtctgcgtcagaaaccgctcgtagaccaaggcaaattccctaagccaccgaaaccgagtctgaggaactggatcaacctcttgattcaaccaacgcagtgcattgtttttgtgaacggagccctctccttcgctgggttgtaccttatgtatgtttccttcccagatgtctggggcgagaagtacgggtttagtaccgcggaggttgggtatgcatatttgagccctggtatgcttctagcttttgtcccctttctcaagaaaagcagctaatgtgctcaaggaatcgccctcttcattgcctccctcctaacgggccggttctccgactggcatcgcgcacgcctggtaaaggccactcccgacataaagatcaaagcggaaacacgcctcccaattcaaattatgggttttgtcatctccgccgccggaaaagtcatgttcggctggttcacgcagcataagctccatcctgttgctgggcttgttgcatctgccttaggtacgttccccgacatccatactctaagagcagaagtaactaagatgaacttgtgcagccggaatcggaacagctataattttcgtaacatccacctcctttcagactgaatgtgcgccggcgcagtccgcgacgatcgttgcgttagccggtttgctgagaaacattgcagctgcgattgcggccgtaattgtagatggagtcgtgaagaaaatgggatatggttggtgtttcacaggattgggagcattggatgggatctgtatcggtgggatcgtttatattatctggaaggggtggaagcgtgacgaaaagagagaa

SEQ ID NO: 20666 - DNA, 726 bp, Emericella nidulans
  unsure (1)..(726): unsure at all n locations
actcaacccgctcaccccaccttgctcattccgggccctatcgaattcgatgatgccgttcttcagtctatgtcccattatgcgtgagtttttgtcattcgcagtccatcgaccccaactaacctgtcaatcaccagcgagagctcatgtggccccggtttcgtaaaggtctttggagagacattgtccatgacccggaagctcttccagtctacaaacccggcagcccagccctttgtcatctccggaagtggcactctaggctgggatttcgttgcttccaaccttgtcgagaagggcgagaatgccctcgtcctgcactccggctacttcgcggactcgttcgcgtcctgtctagagacatacggcgccaatgctacacagctcaaggcacccattggggagcggccatccttcgaggcgattgagcaggcattgaaggagaaacatacaagatcatcacaatcacccatgttgatacctctcctggtgttctaagcgacatcaagacggtggccaatatatgtcgcccagatcacccttaaactttgggtgatgcggatggtgtatgccatggacgctgcgaggaaattgcttttgacgagtgggatttggacgacgtctctcccgcaagcccaaaggcccttggctgccctncgggctcagcatcattatgttctccggcgtcttatcagaccttaatgtccgcaagactccctcttgtca

SEQ ID NO: 20667 - DNA, 716 bp, Emericella nidulans; identical to SEQ ID NO: 6521
  unsure (1)..(716): unsure at all n locations

SEQ ID NO: 20668 - DNA, 500 bp, Emericella nidulans
taggtaaattggtacggccttagctacctcatcgatatgaagcagtaggaacctcggcaccccgctctcaggattaatccgctgtaagtgattggcccagaaataatgtctggggtatttgaaacgattttcactaaagatttttcgaggtctagccgctgcctagggtatacttaaatcccggaagcccagcctcacttgtgttactgtggactctcgctcatcccacacctctttttcccacaaaccatctaatcaaacaactatgtctaagacattcacgcgcgacgaatttgccaaacacaacaccgaggattcccttttggtgcatcatcgaccaccgtgtctatgacctaaccgacttttttcacgcacatcccggtggaagcgttttcctgtcccagatagctcggcaaagactcaacaaccgacttttacaaccttcatcggtatgaagttttgacaaagcacccggactcgctttgctcggaaccatcgcg

SEQ ID NO: 20669 - DNA, 850 bp, Emericella nidulans
taccatacgtcttctcaaatactggtttagctcccatctcttcgacgcgcacatcaacgaagaactcattgagctgatgtcggtacggacatttactcagccacatccttgggagacaccatcaagtgtaatgactggtttcctcaggacgttgcacttaatttcacgctgggactggcaacaggagccgcttattgttgacctaggtggcgaactggatcaggccacaatcgaattgattcggacacgttttgttgcctggcgaaacatcgacccagcaatgaatagcgtgtctatgttcactgcttccgacgttgaccctgaaggtgtaacgtggacacagtacgaaatgcctccaaaagtggtagctgcacgaatttgcacccttgcaaaggcagtgatgaagctcgtacgggaacagggcaatcgactggatatatcgcagctgttccttcctgcgctcgaaccttacgactttgttattcacttgcacccgaagctgctgcatgaacgctcatcctcatttatcaagttcaagaatctcagcgcagcgggagattccgcgcaacttcaaaagcaagcggctgttagggcatttgtttgtgatttacaggcttgtttcagtcctaatatcctctttttctggggtgctgagcaacccaacatcgttgccgggctctggaacccacagactttgaagaagaactggagcttaggactcacatactcgacaatgcctgaagggatgagtagccctgcttcggactgcagcgtttccatcaatcgtacggccatgattaatgagatatctaggttagggtcggacatggtttctcggatcgaagtccac

SEQ ID NO: 20670 - DNA, 610 bp, Emericella nidulans
gacccgcaggtcaagaagcaggtccgcaaggcggactccttccctctccagcggtactgctcagcttgagcaatctctcaaggacacatggcaagagcgcgagaactccatgtacatggaggacaagctggtcgccgagactgacgagaagaagaacgagctcgagggtaccatctacgagctgcgtgataagatcgatggcgtctacgcccgagttcgctagcgaggaggagaaggataagctgcgatctaagctgaccgatttagaggtatgtttgcttgaagaaaggcgtttatgcaactgtaactaacttttccaacgtaggactggttgtacgaggatggtgaagatgctaccaagtccgtttatgtggctaagcttgatgagatccgcttcgttgccggtcccatcatccagcgccaccgcgagaagctcgaggccgagcgccaggctattctgaaggcccaggaagaggaagctgcgaagaagcgtgctgaggaagaggctaagcgcaaggccgaggaggaggccaagaaggccgccgaagaggctaagaaagcagagaaccccgacgctgaaatgaaggacgctcctaaccagggcgaagcc

SEQ ID NO: 20671 - DNA, 850 bp, Emericella nidulans
tacggaatattattcgagaacggcgaatgctggaacatctcaaccatccctttctttgtaatttgcgatacagcttccaggatatagagtacatgtgtgtttttacctccggtgatattcgaaccgttgctgactttacaagctacattgtggtcgatttaatgaatggtggtgatctgcgattccatatctcgcgaaaatgctttacagaagaagcagtgaggttttggctcgctgagcttggttgcgctctgagatacattcactcgcagggcatcattcatcgagatgtcaagccggacaatgtgctactagactcggaaggacacgttcaccttgcagactttgtaagttctccacatgatgtctagatatggactggctctgactcgcggcagaacgtggcgtccgactttagacctggaaagcctctcacgagtaagtcaggtacactcgcatatctcgctccggaagtgtacgagggaggaggatatttttttgaagtcgattggtggtcattgggggttacattttacgaatgcatctacaacaagagaccctttgaaggccggtctcaagacaccctcagcgagaacatcaaaagggcccaaccgaagtactacgttaccaacgccgccgtatccattccgggttgcgcgccatgtcggccttgatggagaaggaccgaagcaaacggattggcgcggttagttttgagagctttacctcacatcagtttttcgcagacatcgactttgaggcactagaacgaaaagaagtgcccccggtattccggccatccagcgacaagacgaacttcgatgctacgtatgacctggaggagctactc

SEQ ID NO: 20672 - DNA, 850 bp, Emericella nidulans
ttgatagcttcagggaggaaacagctacagaccatgcggctctaaagcaacaagtcaacgaactttcgcgcaagaatagtgaattgatgagtgaggcgagccgttcaaacagtcaacttgttgctgcaacccaacgtgcggagcttcttcagagcaacttcaatatgctcaagaccgagaacgcagaattgcagaaacgttacgctgcgctgttcgagaccgccaaccgacaggatcttaggactcagcaagccgcagaagatcttgtcgagtcgaaaggccttattgacagcctccagcgtgagagcgcgaacttaaaggccgaaaaaactctctggaagaatatcgagaaacgactcattgaggacaatgagaccctacggaatgagcgtagccgtcttgactcgcttaatgcaaatctgcagaacattcttaatgagcgggaacacgcagactctgagagtcgcaggaggcttcaacagagcgttgaatctctcgaatcagaattgcagacaacgaagagagagctgaacgagcagattgaggagtctaagaaagccactttacgacgcgagtacgagcatgagcagaaccagaagcgtatcgacgacttagtgactagcctaagctccacgaaggaagagttggttgcggtcaagacaaccagagatcatctacagtctcgcgttgatgaactcactgtcgagcttcggagtgcagaggaacggcttcaggtcctgcagtctcggcccagtgtttctggcgctcccgctgaaaccgctcctcctgaagggtcacaagagtccggcttgaccagagagcaagaactcagcattgaagtgtctgagtt

SEQ ID NO: 20673 - DNA, 407 bp, Emericella nidulans
gctgcacaaatcactggcgcggaattgcggtagggcgatgtggtgcgtttctatcacccgagcttcttgggcttgcttggcgcaaagagggttatcggtttaccgggggattttgtttgtcgggatcacccgctcagtactgatgttggggggagtggagagatgatcagagtatgttcttcacatatgttcctatatttttaagtcgagggtgcatatgctgactgtgagggtaggtaccggaaggacatgtttacgtgtgcggagacaacctgccgtggtcgagggattcgaggacctttggcccattgccgatgggattgattaatgggaaggttattgcaaggatttggccgttgtccaaggtacagtgggtgacaaataccttgaagcctgttgaggctgcg

SEQ ID NO: 20674 - DNA, 850 bp, Emericella nidulans
ttaatgcaaaagccggggataatctcagcgtcagtaacacttgccacctctcggctggttgtctcgtacgacacctctatggtcgggatccgtacaattgttgccgtcattgaagctgctggctgcaatgctttactagcggattctgatgacaagaacacgcagctagagtctttggcgaagacgaaagaggtcttggagtggagacgcgccttcctgttctcactatcctcgccaatccatgtgttcgtgatagacatgattcttccgatgtacctaccaacgttcaattttggcggtatccgaatcattccgggtctttacctcggcgactccgtgtgtctattactcacaattcctgtgcaattcggtatcggtaaacgcttctacatcacaagctataagtccttacggcaccgtgccccaaccatggatgttctcgttatgcttggcacttcagcagccttcttctacagtgttttcaccatgattgtagccatcgttattgaccctcaccaaagacccaacactgtctttgacacaagtactatgctcatcaccttcataacccttggtcggtggcttgagaacagggccaagggtcaaacgtccgctgctctttctcggcttatgtccctcgcaccatcaatgacgaccatttacgatgacccgatagccgccgagaagatggtagaagaatgggataaagttgacggccaagagcaaaaaacggctacaaacgaaatgtccaccgtctcacaaaaaatcatccccactgaactcattgaagtgggcgacattgtcgttctccatcccggcgacaaggttcctgctgatggagttgtcattc

SEQ ID NO: 20675 - DNA, 850 bp, Emericella nidulans
ttattgaaggcaccgggcggccccaccccacccacacagaaccgagcccactctcccgcacaccacacccaaccccccaccgaccacaccatccgccccaaaacaaccacccaggaagcacccccccacccagacctacagcccccccggcaacgcccagacaccaactcacaacgcccaagcacaccaaacccccacaccccaccacagcccccaacccaagccacgacccacccccagaccaaccccggccaacaccccccccaatcaccaccgcccccacccgacgaccagccgccccgacccaccagccccccccacacacccaacccaccacgacgcggaccaaaacccccccgaagacaccccgacacccccgcgaaagcaccactgcccaccgcaacacccccatgaaccgcccaagaaacctcccctcccaccccccaccgcaccccaccccccacccccagcccccgcccacaccccactcctccctcccaatcgcccaccccgcacacaacgcgggaccgctccaacccgaacccacccaacccctcccaccccccgaacaccacacccaaaccacccacacctcaagcccataaacaacccacactccccacacggcacacgacctactcccgacctatacccacaaacaccccaaaccctaaccaccccaaccaaacccacccccacgacaaaaccaacaccgcaccccacccaccacactcccccccccaccccctcacccccccaccaacacccaaccaacccccacctcttcaatcacacccacccctacctcacccaccccccaccccaacactacccactcaccacacctctc

SEQ ID NO: 20676 - DNA, 850 bp, Emericella nidulans
gtggaaaagagtctcgatcggtcccaatagcgtgcatcgtcgccgttgcggcgaagaaagcacgccgtcccgtccggataatgctcaaccgcgacgaagacatgatgacctccggccaacgacaccctgttcagtgccggtggaaggtcggctttaatcgcgagggaaaactactcgtccttgacgcagatacctacaataacgcgggctactcagtagatatgtctgccgcggtaatggacaggtgcctcacgcatatcgagaactgctactacatcccgaatgtctggctgcgcgggtgggtgtgtaagacaaatacgcactccaacacggcattccgtggctttggggcgccgcaggctatgtatatcactgaaagtattatcagtgcggtggcagagaaagtgggtatcgatgtcgacgagatccggcggaggaatctgtatcaggtcgggcagcgcacccccttcaaccaggtgcttgacgaggattggcatgttccgttgctgcttgagcaagtgcgcgaggaggcagactatgatgcgcgcaagaaggagatcgaacggtttaatagcgaacaccgctggcgcaaacgaggaatagccctgattcccaccaaattcggcatctccttcgcgaccgccctccatcttaatcaggcgtccgctgccgtccgtgtctacacagacggatcagttctgctcaaccacgggggtacggagatgggccagggcctctatacgaagatggtgcaggttgcagcgcaggaactgcgggttccggtcgaccaggtctacacgcaggacacgtcgtcttatcagacagcgaatgcgagtcccacagcggcaag

SEQ ID NO: 20677 - DNA, 795 bp, Emericella nidulans; identical to SEQ ID NO: 6116

SEQ ID NO: 20678 - DNA, 850 bp, Emericella nidulans
atccaatcccaaatgagggagtttgtcaagtacgtgcgtgacacggacgaaacggcaatggaagaattctggagacgcgagctgaggggtgctgttggtccccaatttcctcgtctgccgtctcgagactttcttcctacacccaacggcatggttgaacgccacatcaatctagagatcggtgctggctcaactttcactattgcgacgctgatccggggcgcttgggcactagtggcatcacagtacactgggagtgacgatgtcgtatttggtgaaacgcttatgggtcgtgatatttctttacctggtgttgagggtattatcggtccgctaatcgcaaccgtacctgttcgcgtacatgtccaccgaacaagctctgtcgaggcttatctccagagtgtccaaaaggccatgttgtcccgcacaccttaccagcacatgggtatgcagaacattagaaaagtcagccaagatgctcagcatgcctgcgaaactggtactggcttggtcatccaaccagaccccgagtacgtgggtggtgagctagggttcgaagtgggcgatgtcgtccgcgaagcactacatttcaacccatacccggtcatgctgggctgtggaatccagaagggtggcttcaggatttgcgcaagctttgatgtctctttggtcgaagtcaggcagatggaacgtatccttgcgcaggttgagactgcgtgcttggagttgctgaagaattcctccaggagagtcggcgatatctcctgcgtgcccgaggcggagttgaaccacatatggaaatggaaccaattgcctccgctatctgtggacgaggcaaccggcaagccgc

SEQ ID NO: 20679 - DNA, 850 bp, Emericella nidulans
gtgaagaactgctcgccgaagccgtgcgcgcaaggaaagattgcgacccaattgaggatatgaatgttgagagtcttctaacctcattcttcctatttgcttcatacggaaatctagaccgccaggaccacgcatggttctatctttgccaggcgacatcaatggttttcgcattgggcttgcaccgcgaatcaacatacgccgagttgaacaccgaagaagcagaacagaagcgacgggtcttctggctgctcttcatcacagaacggtatttacctccgtagagctgaatagaccataaactgacaagtgctgcagaggctatgccctccaacaagcgaaacctgtcatgctccgcaactccatccacaaaccgcaagtcctgtgctccgacgacccgattctcgcctacggcttcatcaacctcatcggcgtcttcgagagcctcagcgtcaacctttacgactgggtctcagcagggggaagcgtaagcggaggtggaaataaccgagacggctcctccgagatgccgcctacatcagccatccaggcaactctcagcaaaccgatctcgctcgagggtgtctcggaaatccaaaaggttgatatcctcatcacacagcagtggcttcaggccatgatgtggaaactctccatgacgcgtgcatcgcagccaggctcgcggaatgagacggtcctcccgttccatcttcctgtaatggtgggcaaggctgttatgtctgtcattgcggaggcatcgcagggggctgtcgacgcgcatgggattgggatggtagtcttcaccactttagcaatttacttcgattaaggctgacgattacgcaggaac

SEQ ID NO: 20680 - DNA, 850 bp, Emericella nidulans
gaggtgctttcagacccccacgagcggtcgtggtatgactcgcaccgtgatgcgtttctaggtggtgacgctgggggcgaggcggctgactactcgcataacgcccgcatgacgagctctgccgatattctgaatttgttttccaagttcagtcctcgaatggactttactgatgcgccctgtggattttatggtggcctccgcgagacgttcgcacagcttgcgcaggaggaggagatggcatgccgctgggaaggtgtagacagtattgactatccatcgtttgggacccgtcatgacgggtctcaagttgtgcgcgatttttacgctgtatggggcagcttctcaactagaaagtcctttgcatggaaggacgtctatcgttactccgaggctccagaccgccgagtccgtcgtttgatggaaaaagaaaacaaacgcttgcgagaagccgctattcgcgagtttaatgaggccgtgagatcccttgtggctttcgccaagaagcgagacccgcgctacaagatttataaggatagcctgtctcaaaaacgcgaagctctccgccaatctgctgcttctcaggcagcaaaatcacgagcagcaaatcaggctacgttacgagagcatgttctacaagattgggcaagatccgaggaaggtcctgaagaagaggaggcagatagtgaagaagttgagacggagcatattgagtgcattgtgtgccgcaaaactttcaaaagtcacaaacagtttcatgctctcgagacgtagtaaagacacacatcaaagcggtgaagcagcttcgtcgagagatgagcatgggggattgtcgaccaaagtttggagg

SEQ ID NO: 20681 - DNA, 586 bp, Emericella nidulans
  unsure (1)..(586): unsure at all n locations
actattactgacaccgacattcgaaacatcaacaagatctccaaaagaagcatgtcttcgaattgctgtccagctcccttgctcncagtattcatggacacgagtacatcaagaaagccattctactcatgctcttgggtggtatggaaaagaatctcgacaatggtacgcacttgcgtggtgacatcaatatcctcatggttggtgatccttccactgcaaagtctcagatgcttcgttttgtcctcaatacagccccacttgccatagctacgactggtcgaggatcttccggcgttggtctcactgctgctgttacctccgacaaggagacaggcgagcggcgacttgaggcaggtgctatggttctgggagataggggtgtggtctgtattgacgagtttgacaaaatgagtgatgtagaccgcgtggctatccacgaagtcatggaacagcagacggtcaccattgctaaagcaggcattcataccagtctaaacgctcgttgtagtgtcctggctgctgctaaccctatctatggtcaatatgatcctagtattctatagtgtcacctaaatcgtatggt

SEQ ID NO: 20682 - DNA, 554 bp, Emericella nidulans
tttataaacgccccaaaaaaattgaaaaaacgacttttttaaaaataaatagggacccttagggggtgttttatttaacccgaaaaccctgataacccctaggcccttagaaaccccctttttggggggtgcctggggccccagaggtttacgaaaaaggccccggtttttttttttccaaaccggttttccttctgtgaagtccgccaaaatttatgtttacccaataaacgggcttttggggggttatggattcgttcgtttctctgataagaccgatcaccagcgtgcgctaagcgagatgcaaggggttttcttcggcaacagttcaatgcgcatctccactgctaccccgaagaacaagggtcccggcgttgttcctggcggtatgggcatgcccggtcctgctggcatgtatcctcccatgggtgctcccccaatgggcttttatggcgccccccagccaatgaatcagtttaccgaccccaacaacacgactgtcttcgttggcggtctctctggatacgtcaccgaggatgaactccggtcagtct

SEQ ID NO: 20683 - DNA, 850 bp, Emericella nidulans
gcctggtggagccgatggcccgagcggtgttcttgtatgtgcggaagataatatcacctatcgacactcgaaccaagatgctttcagggtacctataccgcgtcgcaaaggcgcaatggaaaatcctgagcgcaagcgttgcattacatgctggtgtaatgcataagatgcgtggggcttttcttcttcctcttacagaccgaggatggtgacctttttaagctcacgcttgacatggttgaggatgacaaaggccgactcacggggcaagtaagaggattcaaagttaagtatttcgatacagtacccctggcttcgagcgtgctcatcataaagagtggatttctctatgttgccgcccaaggtgggaatcatcacttttatcagttcgaaaaacttggcgatgacgacgaggagactgagttcaacagtgatgacttctcagcagacccggcagccccctgtacacctgtctatttccagcctaggggtgctgaaaatctgaatctcgtggaggctataaactctctcaacccactggttgatagcaaggttgtgaatatctccgaggatgatgctccccagatttttacagtttctggcacaggtgctctgaagcactttccggacgttaaaacatggtttggaggtctctgagatagtggagtccgagcttcctagcgtaccatcagctgtttggacgacaaagcttaccagggcggatgaattcgatgcgtacattgtactgtccttcgcaaacggcagtctcggtttgagcactcggtgaaactatagaagacgtgattgataccgggttcctatcgtcagcgcccaccatggctgttctgca

SEQ ID NO: 20684 - DNA, 775 bp, Emericella nidulans; identical to SEQ ID NO: 8518

SEQ ID NO: 20685 - DNA, 601 bp, Emericella nidulans
accacgatgaccgttactccattgcagaagaatacattaaagtcgcctacaagctgtgggaatcatcctggcggtccgacgccgtcatcctcgacaagcagcgccgcgtatacacagagccctcgcgcgtacgggaaatcaaccacgtcggcaagtattttaacgtccccggtcctcatctctgccagccttctccacaacgtacacccgtgatcctgcaagcgggaacctcaaaggcaggcaagaccttcgcggcgcagcacgcggaagcgatcttcgtcgcaggacacagcccgagcgtcgtcgcaaagaatgtcgccgagatcagagagcttgcgaagtcgcaatacggacgcgatccgtcctcgataaaattcctggccctactctgcccggttctgggaaagacagaggaggaagcgaaggagaagtttgcatactaccgcagtctgggttccattgatggtgcgctagcactattcggcgggtggacggggatcaacctcgacgtttacggcgacgacgaggaactgcgatctgtgccgagcaatgcaaatccgtctgccgtcgaggctggtcgaagcgacacccgaagttcaaa

SEQ ID NO: 20686 - DNA, 450 bp, Emericella nidulans
attcggcgcgaaggaatgaatacgttctcaatggctcgtaaacctcttccaacccttctttaggaatctaaactaatagagtgtacctatagaaatggtgtcctcagtgccggagacccccgctgccagatctacctcgtcatgggcaagaccgatcctcgcaacccagacacctacaagcagcagtccgtccttctggtacctgcatccacacccggcatcaccatccaccgcatgctcagcgtctacggctacgacgacgcccctcatggccacgggcacatctccttcaagaacgtaccggttccgctatccgccatggttctcggcgaaggccgcggcttcgaaatcatccaaggccgcctaggacctggccgtattcaccacgccatgcggacaattggcgccgccgagcgcgcaatcgactggctcattgcacgtatcaatgat

SEQ ID NO: 20687 - DNA, 495 bp, Emericella nidulans
ccgccgcctttgaatcccaagccatcctcatgccgggccaaccactcctcaccgacgaaccgtctgtctcttcagggagcgcatttgacttagtaggttggggcatgaccaagcgcgcagtcacgcaagccatggccgaagcaggcatcacgccaaaggcggtcaccgtatgcgaactccacgactgtttctctgcaaacaagcttatcctgctggattgccttggtttctcagaaccaggtaaagcccatgagcttgttcgccgcggcgatatcacctacgcgggcaagggcccggtaatcaaccccttccggcggactgatctcaaagggccatccacttggagcaacaggactagcgcagtgtgctgagctaacctggcagctccgcggatgggccaataaccggcttgttgagaatacttcagtggcactgcagcataatttgggtttggggggtgcagttgtggttacagtctacaagcgggctgatggg

SEQ ID NO: 20688 - DNA, 431 bp, Emericella nidulans
caacccccatgggcatcaaaattggcccctccatgaccccccaggagctagtcaccctcctcgatactgtcaatccaacccgcgaaattggcaaagtcaccctcatcctcccgctacggtgctgccaatatcgccgcccatctccctggacacatcagcgctgttcaatcctccggccatatccccgtctggcaatgcgacccgatgcacgggaacactcgctccactcccaatggtgtcaagacgagacatttctcggatattctttctgagctgaagcaggcgttagagatacataaggccgcaggcagcttccttggtggcatgcatttggagcttaccggtgaggcggtcacggagtgtgttggtggtgctggagggttgacagaggagggactgggagagagatccccgactttctgtgatcagac

SEQ ID NO: 20689 - DNA, 850 bp, Emericella nidulans
gctggcgcatctgtctgtaccttcccctatcttacggctcaagtcttttcctctgttgctgacgagaagttaggacgagtcttcgtcacactcctacctagattccgccctctacacgattgccctcgcctcgagagggcataaaattatcgtgcaacgaagtacagcgccctacggtgctacagcgtatatcaagaatcgagtctgtcgccctctccctatcaatcctgcccccaatgcttcggttaggtgactgaccagaaatactctagttacaagcaatatcttcgccaaggctacccacactgttctggcaaaccccgttctggccgtcccattcccaggctctctaatagcgtcaatgattaccccatcgagcgtgataattggccacatcttctcctctacggcctcgacaccagcgataactgctctgaagaggttgtacgcctcatttgtgcctgaagaccgcattgtgaccatggacgcgtactcggctgaactaggaaccattagcgccaaggcagtaattgtgcagcagatgatggcgttgaactctgtgcacatgatatgtggcaaggtagaggcgagtccgggaaatgtgggatggatactgggagggctggacatcgcagccgtcaggacaggagtgtggatgaggagggaggtgcggtgcttagtcaatcttgctaaggggctggggatggaggaggtgaaggcgtactgggagggggtgctgaagctggaggggatgaagtaccggagagatgttaggaacttcttggaaactctaaaccagggtgaagaccggaagaaggctgctttgatcttgacggatgcaatgggagat

SEQ ID NO: 20690 - DNA, 632 bp, Emericella nidulans
agcctctcgccggtggttttcggactctcattgctgaccgctgtcgcgtatggaacgctctacctcttattcacgacagtaaccgacgtctttgcatcgcgctatggcatcgccaccaatgtgggcctgatatatcttggctgtggctgtggtcaatttgccggcctcttgatcttagggcttgtttccgatgcaatcgttaagcgagcagcccaaggcggagaaatgaagcccgaataccgtctgccccccacgatctttgggggatctatgattcctatcggcttactcatatatggctggaccgctgagatagggtcttctggttcgtgcctgttatgggcacatttttcatcgggcttggcatgatcacggttttcacccccgttgggacgtacctgatcgacgcatttcccatgtacgctgccagcgccaccgctgccaatacggtcttccgcagtgtggggggtgcgcttcttccactggcgggtccccgaatgtatagtactcttggccaaggctgggggaatacgcttctggctggtatatccttgcttatgatgggcatgattttcctgtccctgcagtatggagaacggctgaggacacatcccaagtaccaaattaagcta

SEQ ID NO: 20691 - DNA, 500 bp, Emericella nidulans
tcaccagatactcctttaagctagaggattcgagctggaatgttatgaggaagatttatttgtcgtccgtgtcttttgtatcttttcaccattgtattccccatattctttcccccttatgttcgactctcttcttgtttctatgttttttaattattgtttattttttactgtccctttctaacctttttgtgttttacttacgttagtaatgtcttccttatctttattctctattttttttatttttttattttctatttctcttttttatttttttgtcattatttaattctttttctttttttttacttttttacttttttactttttttcattttaattttattatcttataacttacttttttatcttttttttttttttcttatttatattctttttccaattttttatattctttctattctctttttccttttttcttattttttcttcttctcctttttcaatttttcttattttttttcttattcttt

SEQ ID NO: 20692 - DNA, 850 bp, Emericella nidulans
tctgaccgagattgcatcggcataccaaaagcttcaactgaaagagaacgaattcaaagccatttctggtcaccttgtggacgcggaaaccatggttgcgatgaaggacttggctaacaagcttggctctgataatcttgccttggatcagcccggtggtagctcgccaatcgcccacggcgtcgatatccgctcaaattacctcttcaactctaagatctacggcatcgaagaggcggacgccatccttttggtcgcgacgaaccctcgccacgaagcttccgttctcaacgctcgcattcgcaagcagtaccttcgctctgatctcgaaatcggtctcgtcggggaagctttcgaaagcacatttgactttgaacaccttggttcagacgttgctgctctgaaggccgccctgtcagggaactttggcacaaagctggcttccgccaagcgacccatgattattgtcggcagtgctgcggccgaacataaggattcgaaagcaatctttgaggcggttggtagctttgtggagaagcacgccagcaacttcaacacaccagagtggcaaggttataatgttcttcagcgcgcagcatcgcgtgctgcggcatacgaaatcggcttcacgaccccctctcctgaggtagcacaaacaacgcctaagatggtttggctacttggtgcagatgagattaaccaatcggaaattcctcgcaaagcgtttgtcatttaccaagtacatcacggtgatcgtggggctcaaatcgcgcatgttgttctcccaggaagtgcgtatacccagaagtcaagagactatataaacacggcgggacgcgtacaagtcact

SEQ ID NO: 20693 - DNA, 850 bp, Emericella nidulans
gagtgccagacgttggcccgggtaaacggacatacggagtcggtgatagaatggtggaagattgatatggcggacttgagcgccgtggacgcgttcgctcagcgctggctggataccggccgtgcgcttgacatcctgtgcaataatgcaggcatggggccgacgggctcaaggaagccgatactgacgaaggacgggctagagatactgcatcaggttcgtctccggtctggaatgatgagaaggagaatttgcattaaccgcatcaccaggtcaacttcacctcccatgtccttctgacgctgcgcgtgctcgactctctcgcaaaggctcctcaaccccggatcgtctgcacaacctcgtgcttccacttccgaggatatttcgacctggatcatttcaacggcgaattaggcatggcgggcgacccataccctaacaacaagctctacttccaggtctggctgaccgaactccacagccgtctcttagccagccccaattacagacacgtcaccgtcaacggcatcaacccgggctacgtaaattcagggatctggaacaacccgctttctgagaccaagaacacgtggattgacaccgcgtacaaattctggaaattcgtcgcaagcattctcgccatcagcccgcagcaggggagtctggcaattgtgtatgcagccaccagtgcagagtttggacccgaccctgtcacgcagggggtgggggagattggggggaagggtggtgggcactatattaaccggatctgggaaggcgaggcgatgcctcactgctcagacgaagaatgtcggaaagaggtttgggagaaggtgggcaaagagctggg

SEQ ID NO: 20694 - DNA, 850 bp, Emericella nidulans
aacacatcgaccgtggaagaagatcatggtcaccgttgaaggactatactcgatggaaggaacgatgtgcaaccttccacaaattctggagctcaagaaaaaatataaattttatctcttcattgacgaggcgcattcgattggagcaatcggcagtcgaggacgtggagtatgtgattacttcaaagttgaccctgctgatgttgacattttaatgggcacgttcaccaagtcattcggtgccaccggtggctatgtcgctgcgaaccagccgatcattgacaagctacgctgcaccaatgccggccaagcgtacagcgaagctccaacactcccagtacttgcccaaatttcttcttcacttcgattgatcgcagacgaggaccctctttacccgggtcagggtcttgagcgaatgcaacgcctgacattcaactcgaggtatctcaggctaggtttgaaaagacttggattcattgtttacggccatgatgactctccaatcgtgcccctaatgctgtatcatccggctaagatgccagccttctcaagagaaatgctgcgacgcaaaatctcggtggtcgttgttacctatcccgctacgccgttggaactttcccgtgcacgattgtgtgtatctgcagcgcataccaaggacgatctcgaccgcgtcttggaagcctgcgacgaagttggagaagcactacaactaaagttctcctctgggaaagctggtggattgaaacagccaagaccatgcgtgacgatatcaccagataaaattactgagcctccacgctggacattgacagagatcataaaatggggagttcgagatgcgaacgtgact

SEQ ID NO: 20695 - DNA, 850 bp, Emericella nidulans
tggaagaccgtgatcatgttatccagtatccatttacagagcacatcgtaccggagaaaacagaggaggaacttgcgcgaatcgcacagaggaagaaagagagcgggcgacggctgcaagaacaagctgcgaagatgcgactcgaaaagttgatgaaaaaggagcaagaactggagtactacaaggacctacagcgtggtctccagtctgagacgaaaaaggagaagacacgcattctagatgccgaggacctgaaagacgaagcacatctagagcggctaattcgggatcttgagcgctcaattaagagatcgagaaacaaagacctaggaaatgaagagcaggaagaagcatcggaggagatgtcgttcccattactggatgtgccagacgaagagctagacgaggctgggttgaaggagaagcgtcatcagcgacttatgaaatccaatgtcgacgcacggcaacgtgctaaggaagagaaggagcgggaacaagcgcgaaaggatgaagaactccggcttgatcgcgagaagcgggagaacgaccctgagggctgggtcgctgaacggagagcacagcgccaggtaggacttctgagctgcgaactacaagacttagctaacagggcaatagaacctccttcaacggatcaaggaacgcgaccgcatgaaagccgatctaggcaaccgcaagtcattagcaagccagatgcgcatgaagactctcgccaacctcgcagcggacggccctaaaaagcgacgaagaggaggtgatgatgatgatttcggcgccaacgatgaagattggggtgtttaccgtacagtggctactggcgagcagagcgacg

SEQ ID NO: 20696 - DNA, 770 bp, Emericella nidulans
ggaatttcttcctccgaaacataccatgccctcctactcttatcagactccgccctccctttgggctctttcgcctattcgagcggcttagaatcctacatagctcaccaaaagcctctccctcgcacaataacaccggttgcctcatttcaacgcttcctgaaactttccattgcctcaatgggaagtatctcactcccttacgtgctcacagcctaccgcaacccaatcgagcttgaaacgctggataacgatctcgacgcatcaacaccatgccctgttgcgcagcgtgcgagtatcgcgcagggacgggcattgctgggtgtatgggagcgggcatttcgaagcacatatgcgcatggtaatgggaactgtcaactcagaggctcaagggtgcagagcggcatcaaggccgtcgcggacttttcagaagcgttgaaatgctgtatggacgacgagctaggggttaagggccattttgcaccgctgtggggtgctgtgtgcttggccatgggaatggtgctcgacaaacagcgtacgtgttcatgttgaaccacgccaaagctgttcttagtgctgctgttcgagcgtcagtaatgggcccatatcaggcgcagagtgtgctagctagcaaagacttgcaggacatgattactgaacgaatagaccgggattggcacactgctatagaagacgcaggacaggtagtgcccccgctagatttatgggttggacgccatgagcttctttatagcagaatatttaattca

SEQ ID NO: 20697 - DNA, 850 bp, Emericella nidulans
  unsure (1)..(850): unsure at all n locations
cttgacgagcgcgccaggaccgtgctcgaattcgtgaagcgagccaacaaggccgaggtttcgacagtcgagagcacacgagactttcccgaggatcgtaggttgaaccgcaaacttgctgccgatagcattgtcctgcttaagaacgagtcggggcttttgccactaaacctgaaggcgttgaagagtgccgccttgatcgggccaaacatgaagaccgcggcgttctgcgggggaggttctgcgtccctccagccatactacagcatctcgccgtaccagggaatcatgaaccagctccctccgggcgtcgagattatctacgagacaggcgctagttcgtatgtttttatcccggagctggaggcgtcagaagtgcgcacgccggaaggcagcctgggcttcgaatgcgcttctaccgagaaccaccctccgtcaaagaacggcgcgtggttgaggaaaccatcctacaggagtcttcgtggcagctgatgggcttctccaacccacaattggaccggctcttctacgcagacattgaagccgagttgattgctcctgccactggtcctttcgaattcggccttgctgtctatggttctggcagcctctttatcgacgaccagcttataatcgataacactactgtgcaacgagggggcaatttcttcttcggcaaaggcacccgggaggaaaaggccaccgtggatcttgttaagggtcagttgtacaagattagggtggaattcgctagtggcccatcgtccaagctcatgaaaccgggggttgtgaatttcggtggcggcgctggtcgctngggaatggttcaggccatcgatccggagctggc

SEQ ID NO: 20698 - DNA, 663 bp, Emericella nidulans
tcacagatgacgctcaaagttcctatccaggagattttggatgtgttcgtgaagcactactttatatatgtgcatccgttcctaccggtagttgatgaggccgtattctgggcaaagtatcggggattggattcgagtgcgggcaagatctcgacattgctctttcagacaatgctcttcgctgctagtccggtaagccctagaccctagaatgcttgaggatgggcagatctaattatgcagttcattccgattgaagccgccaaagaatgcgggtacgattccctgatatctgcgcgggacgatctctaccgacgagccaaggtacgtcactagttttaccagatagcttcaagctgacccgacagcgcctctatgagagcggtatcgagaaagaccgtctggtaatcgcccaagcctgcctcctcctgacctggtacaccaccgatgccgagcgctccaccaattcccgctggttacgcatcgcaatccgatacgcgaagaaagagcaagcacatctataccataagatgccacaattaggttcaaagaggaaagtatcggacctcaagcgcctctggtggtgctgcatgatccgagaccggatcatctcgctcggcatgcgtcgtccgatccagatcaccccggatgaattcgatctgc

SEQ ID NO: 20699 - DNA, 719 bp, Emericella nidulans
agtcgtatcttttaacattacgcttgaaatcaacaccatcgttggaagtgtgcggcagactgtccagtcagcaataatattaaaatgtagttccaatttataaggattgttattgtgcaaaagatttacgtggagcaattaagtggcaaaacaactgcaataccgtttcgcatttagcaatcgaaggcgaggtagtgtatcctgacggttctatgactggtggggcggtaaagcaagcgtaatcttctttattagcacgccaacgtgaactggaagagtgtactcgcaagttacctgatatggaagaacaatcaacgaagttagaaaactttgttaaagcagtaaaacaagagattcaagaaatagaagtgaaaatacgcgaactaaggcaaactgtagaagcagatcgtgtagatgagcagaaattaagagaagagattaatcgtttagaattagaagaacatcgtattaatgatcggttgtctatttatgatttagagattgaagggtttttgcaagatcgagtaaaaatgcaagggcgtaaagaggagttagaaggggttttaacgaatcttcaagctgaaatctctaagttagatagtaaaattgtagctttaacaaaacaaaaaagtgagcaacattcttcgaaagaaaaagttcaaaaagaaataaatgagttaatctgaattcgtcgacaagcttctcgagcctaggcgagg

SEQ ID NO: 20700 - DNA, 850 bp, Emericella nidulans
agggctaccctcaagagagactcgaggcccttctggcacgaatgagggaacgttttcctaagagccaactttggcttcttgaggaatcccgtatgaacggcgccaaccgcaggcttgacgtggcccttgagcttttgtgcaccgaggtgcacagccctctgaaacaggttgaggcactaaaaattttcgagaagagtctgaacgcattgtatatccacaaatacgaactgtgctctgaggctttcattgaggtttgtctccggcagatctgcctgttttccatgcgctaacggtaatatagtgtgctgaaatcaactcatggtcccgcgcgttatattactacattgcaggaacatgccatatcagtttgtacagagagcttgccactaccgacccgaagaaagcgaaagaacatgcagagactgccgtcaaactcttgcacaaagctcctcaatatgcaggggccaaaaaattcatggcgcgacagttgccgttcgatatattcgtcgtccgcaagatcgccaaatgggaagctcgagccaaagagtggaacgtgccgttgatagacgccgtgggagttgatcctgtggaggagatgattttcctatggaacgggcatagccggatgacacaggcgcagcttgaagagtccttaaaaagactatcatggtccgagagcgatgcgaacaaaacatggtctcgtgaggggccccaagagaagggtatttaccagctccttcggcaacagtgctgcgcttgaagccggtacccgacgaaccaaggatggttctccaggactgatcttacctaaaagaggttggtattcaagggccccccactggaggaccgg

SEQ ID NO: 20701 - DNA, 850 bp, Emericella nidulans
catccctaaccccatcggtctttccgccggaaccgatcttttccaacgctacttaatcacaactcttcaaaggccaggccagctggggcctgcaggagatttcaatgcgattcgagcacacctcctttccaacagtcggttgttcattcgacgtgccaaggagagccgagataagattgctggttttgggaggggctttgtccgcgatggaagcaccgtattgacaaacggagggtctagagtcgtcgcctcgctgttacagcaagccgcagatgaaaaggggggcccttctgcagtgcgattcaacgtgatatacggcctttggtcgccaaagggagacattaagaaccccacggctgagccagagggaatggagacggtacgtgcgcttcgggcaaagggcgtccctgttgctacgatcccggagtctgctgtggcatattcactcggcaaggcagatgtggttattgttggtgcggagggtgttgtggaaaatggcggcatagtatcgcgaatgggcacttaccaaattggactccttgcaaaagccatggggaagccattctacgttgtggcggagagccacaagttcgtccgtgtttacccgcttgggcaatatgacctgcccatcgaacagcacgttatcgacttcaagacgcaagaagaagttgacaacgctaagcaacaacgagagcctgcagacgcgtcgaaatcctctggtctgaacacagaattcgatgccggatctgtggatttcacaccaccccatttaatttctgcattgatcacggacagcggcgtcctaacaccaagcgctgtcagtgaagaattgatcaagatatggttctaa

SEQ ID NO: 20702 - DNA, 850 bp, Emericella nidulans
gcctcgcgagcaaggcgatcgtgatcaatccggcgtcgagccgttagtaacatttctcgagctcgtgaatgtcggtgacctcattcttcagatgattgatgtcttctacgagcaggagatgattggatcgaatatcactgatcgaaatgactttttggatccagcggtgaaagagaagaagaagtttgagcagaatcttgacgaacgtgttgcggctgggttgaacaagggaatcgatgtcttgatggaggaggtggattatatccttgccacaagacagctcgcaaccgacttcaacccggatgtctctactgacccgcaccgaaaaaccatggatgtaagcgttaccgaagccgcagccgcagtggtggatgtcgtttcatcgcatacgcagatgctcgtcgggagcacagacaagagtactcttgatgtgttcaaccaggaggttggattgcgtctctttactgctctttgtaagcatctgaagcgccagagaatcagtatcgaaggatccttgaagctgatcaggagcgctctcagctgtatttatttcggctattgctaacgataacaagtgacatgaaccactacttcaagttcatccagagactcaaaaacaacgagctgctcatctactttaaggccttccgagagctatcaccagatttacctcatcgattcggccgatgcaaaggaactagccaacttcattgctgatgcaggccggttctctggtatttggcgagtggaagaagtgtaccagttctcggagaggcgagcagattggtaccaaatcaagcgcgatgtttgacgagctatgtttggaattgggtgcaatgttatggtgatg

SEQ ID NO: 20703 - DNA, 522 bp, Emericella nidulans; identical to SEQ ID NO: 13368

SEQ ID NO: 20704 - DNA, 850 bp, Emericella nidulans
gacgtgagcgtacccgcgcgctttcagcacgaggttacaatccaccagggacgcattgagcggattctagagacagatctgctgaggtactcgaagcgcggcgttcagaggaatacgagactcgtggatgtgaagcttgatgaggcggatggggagtttccgattgtggcggtgatcgaggttgggaatggcgatggcgaaagggaaaagaggacgattcgctccaagtaccttgtcggtgcggacggggcgcactcgattgtccgccggtgcatgggtctcagtctagagggtgaatccttggaccacatctggggagtggtagatctggtcgtggatacggacttccctgatattcggcggcggaccgcgatccactcccctgcgggttcggtcatggttatcccgcgcgaacgtattgcgacaggcgactaccttacgagactttacgtgcaggttcccgagattgagattgaggctggcgatgatcggcgggcgaaggatgccgcgaaggcacgcagggcgggcgttacgctggagagtattttccagcaggcagctgaggcgttcaagccgtactatatcagacccaaagaagatggttctgtggattggtgggcggcgtatcagattggccagcgcgtgtctgggcaattcaccgtcaaggactcgaaggggattaaccgggtgttcattgctggcgatgcatgccacacgcacagtcctaaggtacatccaaacttcaacctgtgcattccggacaagtacgctaacatgcctgaagacaaaaacaaggcatgaatgtctccatgatggactcatccagcctagcatgaaagaaaatcaactc

SEQ ID NO: 20705 - DNA, 578 bp, Emericella nidulans
ggcacgtatacgctcatgatgcaccagcacatccatatgggcgggatcctaaaaaagagtttctggtggtttgacgggttgtttccgtacatcacgaacccgctgatgggccatacctggaactcatattactaccatcatgtcaagcaccaccatgttgaaggaaatgggccaggtgacctgtcttcgacgatccggtaccagcgcgatgaactgatcgactttctgtgctatgtcggccgctttttcttcttcatctgggccgagctgccgctttacttctggcgcaagggaaagttcggtatggcggccaaagctgcgttctgggaactaggaaactacctcgttgtggcgctgctctggcattatgtcaattggagagcgacgttatgtgtcttcgtcttgccgcttctgcagctgcgtgtgggattgatggtgggtaaataaagacaacacgcctttgtcgacgaggtcgatccgaaattcgaaactttcggacgagtataactcttattaatgttcctgtacgccatctccccctccatcccccctccgcgcgctggattcctcccgtcatt

SEQ ID NO: 20706 - DNA, 850 bp, Emericella nidulans
cgccgtcttctgcgtcagcccctcagcgctccagtctcttcctcgcctccatgatggaaacctgccggtgactgcagtgactcctcagaatatcttgtactgcatcttcacctccggcagcacaggccgaccaagaggatgcgtgatcgaacactccaatttcctcagcggcgctgtccaccacgcgcgcaggtctcgtatttccgaatccacgcggatcatgcagatcgctccatacacctttgatgttagtatcctggagatgctcacaggcctgatcggtggcggctgcatctgcctgccccgagactatcaccagggtgcgcgggtggcagacattatcaacgatctcaatatcaactggactttcctgactccgtctgtcgcccgtacgattgttccttcagaagtaccaagcctacagaccctgattcttggtggggaggcacttgccaaggtcgacattcagacctgggctggcaagcttcacctccataacggctacggaccaagtgaatgctctgtggctgttgcctcgaacgaagtccgcgatccaactattgatccagccaacatcggatcgaagatgggctgcaatatctgggttgttgacgcggaaaaccatgacattctcctgcccatcggcgcagtgggcgagctgctcgttgagggagccatagtcggtcgaggttatctccaagagcctgaaaagactgcagctgcgttcatccaggatcctgcttgggtgcattacctgcccaacaccaagagctcagaacgccgccggttctacaagacgggagatcttgtccgactgaatgctgacggtacaatacacttcatccgaatc

SEQ ID NO: 20707 - DNA, 651 bp, Emericella nidulans; identical to SEQ ID NO: 10925

SEQ ID NO: 20708 - DNA, 500 bp, Emericella nidulans
cagacagaccatcgtcactatgcccgcctggtccctcctcgtcctctccgccctcccagtggtgggtatgttcgccggtcaaacgaccttcttctcctcaccatgggagaccctttttggcaccgccgctgagcagcatgaagcagcaatggacggccgcatccaaggccgtggcctcctcagctctcactttggctggtacgggtggccgggccaaaccttcgactatgtgattgttggcggcggcacagccggcctagcaatggcccatcggctgtcagaggacggtagcaactctgttgcggttattgaggccggaggattctacgaaattgaggcagggaatgccactgaagtgccaatgttcctgttcaactacattgatgacaacggccatgtcaagaacccgctgtttgactggtttttttatatctaagtccagccagtatgcttaccctacaatcgagatagctcagatgcttacagtttcaggggctggc

SEQ ID NO: 20709 - DNA, 837 bp, Emericella nidulans
accggaaatcccagcagtatgctggtctcagcattatctgggactactatcttaatattcgtgcagctggcctcaagagttttcattttcgcatcgaatcaagtgatactgcgaagcttatcgccatcaatcctggggatggcatcgcaacttgagctgttcttgatctcgattttatacttttctagggaaagcatacgagccgcgatccagaggcacccactagagtctctacctacacatcccgctgcaaacatagacacgaatgcactgtcgccagtcagagagcgggaaaagaggagaatccgggcagcatcctctcagtcaatagtgaacatgtcgtatttgagtattggcatgggcatcataaccgctactgcattcgcggtgttttatatgcgatttgttcctgtggaagtctcggagactccttactatcacatgagcgttgcgattacagtcattgcttcacttcttgagttggcctctgaacctatttttgccattatacagcagtatatgttgtacagcaagcgtgcaactgttgagataagtgctgccttttcaaaaagcctggtcacttgcggaacattcatttgggctgtgcagaatgaccatactcttggtgtgctcccatttgcgctgggacacctgtcccacgctctcataatcttttgcggctacttcatcggtgcatgacgtcaatccaacagttttccattctccgtcctgctttcccggataagcccaaggtaggaacatcgagattataaaaaaggccgggaacacaaggtaacagcaactagtgcagctcagcatgtacgtcaatccatttct

SEQ ID NO: 20710 - DNA, 646 bp, Emericella nidulans
cacgaatcctttgaacctggccttgcaatctctgtacacactcagaatatggcgactacggtacttgtaacaggagccactggccttctgggccggcaagttttcgacaaatttaagcgctccggatgcctcactgttggccagggcttctcgcgagccaacccacctaccatcctcaaatctgaccttgaaaagccggatgacattaagggacttcttgatgaagctaagtatgtgagacaatgagctctgatatgggaatgctgcattgaaagaccctgagacaataatcaatttcgtactaacacctgttctagacctcagatcgttatccattgtacgcccaggcacacctagagacttagacctatgatgaacataaattgacaatttatctaggcgccgccaatcgatcccccgatctgtgcgataaggaccccgagcgagctcgccgggtcaatgtcgacgctactcgcacccttgcagagttaacagcggagaggaatatcttgctagtctatatttccaccgactacgtcttccctggcgtcgagggagaggcaccgtacgaagcagacgcgccgacaaagcccccgaacttgtacggtgagctgaagcgggatggtgagcaggttgtgcttgaagc

SEQ ID NO: 20711 - DNA, 587 bp, Emericella nidulans
taacactaaagggatcattgtatctgcgggagccctccagtcgccacagttacttatggtttctggaattggaccccgcgagaccctggaacgccatgggattcccgttgtgaaggaacttgccggtgttggccagaaaatgtgggagcatccattcttcggtatcactcaccaggtcaaccttgtcaccgcaactgagttggcaatcaaccagcaagcgctgcttcaggcactgaaccaatacaagtcccaacaaggaccgctcacttcggctggctttggcgttttgggatgggagaaacttcccaacagcaccctttccgacagcacgaacgaagcactggctaccttcccctctgattggcccaccattgagtatctcagtatcgacggttaccttaacggatggcatagtgctgcagaccaggcaacgggcaacgggcaacaatggggtactattgcggtggctctggttgcaccactctctcgaggaaatgtcactatctccagctctgacatggatgacccccctgtgttcgacctaggcttcctaacgcatcctgcggaccgagagattgctgtcgcgc

SEQ ID NO: 20712 - DNA, 850 bp, Emericella nidulans
  unsure (1)..(850): unsure at all n locations
ctctccaaggagaaatctgcgcccacggcggagccggtcaaggaccccgaagagcggtcgatctcggcgcgcctggtcgaccggttcggcaccgatgtctcgcagcctaccaaggacggcctgacgccgctgcagatcacactggaggagtttagcccgccggaggtcatccaccaactgctcgacctcggcgccgagccgagcgtccagtccagagacgggtcgacggcactgcacacgttggtccggttgaaacggtatgacctactcgagactctaatcgacggcgcctcgctctctgcctctgacagcaaaggcagaacaccgttgctgttagcggttgctgtgttcaacgtctcagcggcgtcgcttttcatcgagtgtggagctgatcttgcagccagggatatacacggaagaactgtgctgcacctagcggcgtctcactcttcaggagtgattctgtctatgcttctaagggcgggagcggacgtctctgcgacggacgaggccggtcggattccgctgcattacacgacatttggatctaatcttacaatccctagcgcgtttatcgctacacacagagctacaagaaccgaccacctcgtccgatcgcacaccggccgaaccgtcttggatatggcggccgagagcgggaatctggatttggtaaggganattgatccgggagggttgcagacgtcaacagccactgggaggataactcgccgttgcacgccgccgtcgccaacagacacccagaacttgcggaactgctcctctcccatggcgccaacccgctgcgtctcgactactacgggcagacccctttcgaccttgccgcggg

SEQ ID NO: 20713 - DNA, 818 bp, Emericella nidulans
atgcccggccgcctcgaaggacatatcgcgctcatctccgggtcaagccaagggttcggacggggtatcttcgagacattccttcgcgagggagccctggtgctaggcctggacctgcaagccatcgacggtcaagtagagggctttcctgagaaccgcgcctaccagatcacagccaatgtcgccgaggaggagacttggaagagagcggtaactggccttgacccgtgtggttgtgcagctctaactatgtataccagctggaaaccagtatcgcaagattcgggaaagcgccgtcgatcgtccatcacaatgctggctggccgtacccgaacaaatctggtctagatgtgacagttgaagaatttgaccgtctgtttaatgtcaacgtgcgcagtatctacctggcctcgaaagtcctcgtgccggaaatgaagaagaatggtcccgggtcgacgattgtaatctcgagcgagaacgccatccggccaggagccacgcagacctggtacaacgcaactaaggccggtgtctcgtcagccaccaagtcgatggccttggagttcgcccgagaccagctgcgcttcaacaccatctgccctacgtccgggaacacgccgctgttgaacaagtttgccggtattagcgatgggcctgtaccaccggagattatcaaggccaagtgcgaggcaatccctataggacgacttgttgagccgtcagatgtcgccaacgtggcacttttccttgcggagcccgcgagctcaatcatcagcggtgttgagattctggtagacggtgcacgatgcgtgtagatt

SEQ ID NO: 20714 - DNA, 584 bp, Emericella nidulans
caatccagcctcccggcagcctattaccgcggcggaacatcccgcgccgtcttcttcaaccaagatgacctccctaagagccgggatgaatgggccccaatctttcgaggagtaatcggcagtccagatccctacgggcgccagctcgacggcctcggcggcggaatctcgagcctgtcgaaagtctgcgttgtcgggaaatcagcgcatcccgatgcagacgtggactatacatttgccgcattaggaatcagagataccgacgtcgacttttctagcaactgtggcaacatggtaagtgcggttgggccgtatgctgttgacagtgggcttttcgccgcacacaaggacgccgaatctgcggttgtgcggattcataatacgaacactggcaaaattatccatgccaccttccctatcattaatggagaggctgctgcggctggtgaactagcaattgatggtgttgcggggacggcggcgcctattaagctggactttgtcaacccagctggatcacggacggggaagttacttccgactgaggctgtcaaagatgtcttcgatggcgtcgaagcgacgtg

SEQ ID NO: 20715 - DNA, 850 bp, Emericella nidulans
tgatccattagacggtacgctcctttgctgcctccaggatgcaatgcctaacctgcttatacaggaactgtaaacttcacccacgcctttcccatgttctgcgtctctatcggctttatcgtaaaccactaccctgtaatcggagtcatctacgcgccaatgctaaaccagctcttctcgtcatgcctcaaccgcggcgcatggctgaacgaaatgcaacaactcccgctcatccgcaaaccgtctatcccacctctaccagcaactgcaccatcgaagtgtatctttgcatgcgagtggggaaaggatcggcgcgatattccagacggtactctgcaaaggaagattgagagttttgtgaatatggcggctgaacggggatctcgaggtgggaagggaggcatggtgcatggggtgcggagcctggggagtgcgacgatggacctcgcatacacggctatgggctctgtggacatctggtgggagggaggctgttgggagtggtgagtccaccatagcagtagcagttgtggttgctccagatgattaatgacagctcagggatgtggcagccggtattgcaatcctgcttgaagctggggggttggttactgcggcaaatccgccggaggacatagaggggccgattgagccggtgaagctaggcagtcggttatatctggctattcggtatgcctctagattcatccttttgcttgatactgacttgttctacagacccgccggaccctcagaaacagaaacaggtcgagagacacaagaacgaacagttcgagaagtctggcgccgcgtccgccagctagactatgaaagaccgacgagacaatca

SEQ ID NO: 20716 - DNA, 850 bp, Emericella nidulans
ctcaagactcctatcatgattggcaagagaaagactagagatattcagttctacagggaggctaccgagatgcaattcgacgagaccgggaaccgaaggcgaaagcatcgctatggggatgaagaagagtttgaggccgagcaagaggagaggaggcgtcgggcagctttggacagagagttcaaagcatttgctgagaagatagctgatgctggcaaggatgagggtgttgatgtcgatattcctttcagagaaattggcttcaccggtgtccctaatcggtcgaatgttctgattcagccaaccacagatgcactcgttcaactgactgagcctcccttcctggtcatcagtctcaacgaaattgagattgcgcatctagagagggtgcaggtaagttaacacagatattctagtcattcaggcggggactaaaatgctgtacagtttggcctcaagaatttcgaccttgtcttcgttttcaaggacttccacagggcaccagtgcatattaacacaattcctgtggagaatctggaaggtgtgaaggattggcttgattctgtggatatcgcgtacacagaagggcctctcaatctgaattggactacgattatgaagacagttgtcagtgacccgtacggcttctttgctgacggtgggtggtctttcctggctgccgaatcggattccgaagacggctccgatgaagaggaggaatccgctttcgagctctctgagtcagaacttgccgcagatgaaagctcagaggaggatagagactacgatgacgatgctagtgctgacgatgatttcagtgcggatgaagatgagagtgacaggactggca

SEQ ID NO: 20717 - DNA, 597 bp, Emericella nidulans; identical to SEQ ID NO: 9847

SEQ ID NO: 20718 - DNA, 850 bp, Emericella nidulans
tgatatcgcaattgtcttcactggccatactccagattgggagacggaagggcaggaccagataagcttccacctaccgtccaacggttcccaggaccggctcgtggcagctgttggagccgccaaccctaacaccgttgtcgtgaactgcactggcgtagcggttgctatgccttggttggacaaggtcaaggcggttgttcaagcgtggttcccaggacaggaagccggcaatgcaattgctgacgtactcaccggcgctgtgaacccttctggacgtctacctgtgtccttccctcgggcgatcgaggatgcccctgcacacggtaacttccccggtgactacacagacgggaaggacaaccggcgccatctcgaagttacatacaaggaaggtgtcttcgtgggctaccggcactatgatctctctgaagccaaccgcgccaaggtcctgttcccgttcggctacggtctatcctacaccacttttacacatgcgaatcacaaagcaagtgctacgagcaggaacaccgtcgaagtggccgtggatgtcactaacgtcggcacctgtgctggagctgatgttgttcaagtctacgctggtgcaaaactggcagtcccagagaacccagtcaaagagctagttggtttcgccaaggtacacctcaagccgggggagaccaagactgccaatatcacattcgaagtgcgccaactgactcacttcacggagaggagcggcaagtgggagctggaatcaggcgactatgaaatatcaatcggtcagtccgtgagggatatcactggcaaggtggagattggtctggaagcccagaattataaaccttga

SEQ ID NO: 20719 - DNA, 714 bp, Emericella nidulans
  unsure (1)..(714): unsure at all n locations
atatttcccgtgtgcttagctcttgacagtcagctaatatcgaccaggatcccaccacccgctcggaaatcgagcagcttcgggacactaggcaagccgcagagctagagaaacgcctgcggaagcgtgacgatcgctcagacacgtacctgagcgctcactaacatggaataggcatccagtttggcacggccggtttgcgcggccgcatggctgctgggttttcatgcatgaattctctaacagtcatccaggcgtcgcagggtttggccaagtacttgcgggaaaaccatggcgactttgtacattgcggggtggtcatcggtcatgatgcccgccacaactcagcaagattcgcggttctggccgcgaatgcttttattgcccaggagattccagtttggttctattcagggccggccgttactccggccgtgccctttggcgtgaccgacatgcgtgcccttgcaggtgtcatggtcacagcgagtcatgtaagtaagctcatcattggtaccggagctccgggctgactatgcaacagaacccagcccaagataatggtaagcttaccgagactgctgattgttcctcctgctaacggtcccaggctacaaagtgtcttnttccaccttccagcgtttttattnttctcctaacatcgttcagttatttcaagaatggctgccaaattaacttctctatggacagaga

SEQ ID NO: 20720 - DNA, 850 bp, Emericella nidulans
cgaccccgctaacaacggatactctcccgcgaaagcggacatctgggctatcggtatctgcctactgaatgttttatttgctcgtaacccatttgctacgccaaccgagtccgacatcctgtttgctgattatgttagagaccgacagtctctttttgacatcttccccaacatgtctcaggatacctttgagattctgaggatcagcatggctctcgacgctgagaagcggtctctctccggcatccgggatgcgatcatgcgggctgtatcctttacgacggatgatgaagctctggatgaattctgtactgacgagcgcgaggtggttcccgcaagtgccaatcgcgaaccccttcggacttcctccatccaaagtccccaaatcaatcaaggcgactcctttccctgggcaaaggcgctccagtccagcccaccacagcccattcgacagtgctccgccattcccgacaacgagagctactcggaagaccttttcccaccatccgaaacagccggcacttcttggttctcggtccatcatactccctccatggcttcagtcttggaatcttctctcggagactcgtatcggtctactgctttgccagtgcttacaaaggccgctcctcgttacccgcctccctctgatcctgttactattactggatctctgcctagccaagcagccaagcctataccgtctctgtcgatggtattcgggcgaaagaacaagagtagcgagcaaatttctaagagctggagcgacctttgggaagaggaagaatctgaatacgaggatacggctctgaatcaacggcgcgaacagaactcccgtagctggagccac

SEQ ID NO: 20721 - DNA, 850 bp, Emericella nidulans
actttttctttttcgtgacgattgttaatgccctgcccaatgggcgaacacgacattctcgaaactcatctggaagtcttttgggttctcgtctcttgagacgctgctcaagggctcaacgccgtactacgccgtcagcattgtgtgattcctcattgttgggtgcgtcacattcaaatggccgaatctgagatgtgagtctgcccttcggccgttgtaggatcgggcatatctaacagcgtagctgtctgcctatgcgtgtagttttcatgatgatgggctccctcgtcccagcttttgttggcgtgatcgccctttcccagctcccgacagatagcatgcaatggacaagatgggggatgtacatcatgcaggtgtttggcaccttgcctggcttgagtacgttctgttctctctcttttgtctctttctttctaatacattggcaaaacagtgatatggaccttccttccctccaacgttgctggccggactaagaaaactgtcatctcaacggtcctctttatcgcctattgtgttggcaaagccgttggtgcgcagatgatggttccatcggatgcaccaaagtatacccgcggcatcacggcgtgcggggtgttgtatgtggtagagttctgttcaacgggggcatgcaggttctattgtatgggcttgcccaatccctatcataaaagatagtgctaatatgtacagacatctgggagaatagacggaaagataggcttgttgcggagatagtttttcggaggaggagtgtgagagggctggaagtgtgaatgcggagaaggatatgacggatcgagagaatgtgttttttcggtacaagtac

SEQ ID NO: 20722 - DNA, 850 bp, Emericella nidulans
cgtgatcatccaggtcacatccttcccaggccatatccccctgctgcagttcttcatcggtcgtgtcatcaccggtattggcaacggtatgaatacgtaagttgcgattcccagttatcgagcctctattgggctggttctaacatttgtctacagttccaccatccctacttaccaggccgaatgttccaagaccagcaaccgtggtctactcatttgtatcgaaggtggtatcatcgccattggtactgcgattgcctactggattgactttggatctcactatggcccgcccgacttggtctggcgcttccccattgcgttccagattatcttcggtattatcatcgtcgtcggcatgtggttcctcccagactccccccgccacctcatcgccaaaggccgcattgaagaaggcgaatatgtcctcgctgctctcaatggctgtgaggttcacgatcacgaaacccagattcagaaacagctcaccctcgactctctccgtgcctctggcgcgctgggtaagaagactagcttccgcgatctcttgactggcggacctagccagcacttgcgccgcatgcttgttggctcctcgtcccaggtcttccagcagctcggcggctgcaacgccggcatctactaccttcccgtgctgcttaagtccaatttgcaccaagacaacgaccaggctctcctgaacggcggaatcaaatgaatgtcttttctggcttcggttccttctcttggttcttcctccaaaggattggtcccccgaagcctttcatgggggtcttttggtccaaaccccagtcctgattttaacctttgcttgtttatcctggagacg

SEQ ID NO: 20723 - DNA, 850 bp, Emericella nidulans
agaccagtctgcaggaaagagctctgttctggaagggattagtggaatcccgtttcctagagaagatagactttgcaccaggttcccgacagagatcatccttcgccataaggaaactactcaaacgattataacggccagcattcgaccccacacttctcgtcctcaagttgaacaaaagttgcttgcatcttacagcaggactctggaaacgatatcggagctacctcctgtcatagcagaagcatcgaaactcatggggattcgtggatatactgatgatgataatgataattatcgaccctcctttgcgccggatgctcttcgaattgagataaccggccccatcggcttgcaactgagcatcgtggatctaccaggcctaatatcggttgctagcgaggggcagactgaagaagacatctcaactgttcataacatggtcgcaacctacctgcaaagttctcgaaccattatactcgcagttgtgcaagcaaccaacgattttgccaaccaggaaattatcagactggcacgcaagtatgatcacgatggccagcggacagtgggcatcatcaccaagcctgatttaatcaacaagggcactgaggctaaggttgcacgcatcgcgaagaaccaggatactatcaagctcaagctcggatactttctcctgaagaatccaagcccagcagaacttgatgaatgtaccactatggctgcaaggtccgctcttgagctatgcttctttactggccctgtatgggccagccagcatctggacatggatcgagttggggtagataacctacgccgtttcctgcaaagacttcttgacgcccatatcgag

SEQ ID NO: 20724 - DNA, 850 bp, Emericella nidulans
tcatactgagatcccttacctgtttgatctcatgcttgaacatggcgccttgttgcacctgccccagttcttcttcgccagcgaagcaacctctcctgcattttctggaatggtcttgcagtatctcatggatcggattcacgaagtcggcaccccagatatggctaaagctcggatccttttgaggatgttcaaactgtcattcatggccgtgaccctcttctcagcccagaacgaacaggtgctccatccacatgtctcgaagattgtcaccaaatgtcttgaactttcagtgaccgccgaagagcccatgaactatttccttctgctgcgttctctgttccggagcattggtgggggccgttttgagcttttgtacaaagaaattctgcctctactggaaatgcttcttgagaccttcaataacttgctgcttgccgcacgaaagccgcaagaacgggacctctacgtcgaacttacactgacagttcctgctcgtctcagtcatctccttccgcatctgagctaccttatgcgccccatcgttgtagcgctgcgcgcagagtctgaccttgtaggccagggattgcgaacgctggagctttgtgtcgataatcttacggctgactaccttgacccaatcatggctcctattatggatgagctgatgacggcgcttttcgatcatctccgaccccatccttacaaccattttcacgcacacacgaccatgcgtatccttggaaagcttggaggaagaaacaggaagttcttgaaccaccctcccaaccaaactttcgaacaatacgccgacgatgctcctagtttcgacatcaagcgcattggccaa

SEQ ID NO: 20725 - DNA, 500 bp, Emericella nidulans
gaatggacgctgtggtctacgcttgagcaattaaaggtcttttagtaattgttcctgctttattatcagttgcttttgtaacagtagcagaaagaaaaactatggcaagtaggcaaagaagattaggtcctaatgctgtaggttattatgatttattacaagcatttgcggatgctttaaaattattattaaaggaatatatagcgccaactcaagctaatatagtattattctttcttggtcctataataactttaattttctctttattaggttatcttgttattacatttggttcaggtttatatatatctgattataatttaggtatattatatatgttagctgttctttagctacatatggtatattattagctggttgatcagctaattctaaatatgcatttttaggttcattaagaagtacagctcaattaattagtcatgaattaatttttaagttctgtaattttattagtaatattattaacaggacca

SEQ ID NO: 20726 - DNA, 850 bp, Emericella nidulans
cgaaatacgatcctattactatccccaacaggattttcaaagcctagtcttcctcatgggcttgctcacgaacgcgacagattggttccgtgttaaggtcatgaaaatactgtgtgcagtgattcccgaagttgacatgcggcgatctgatgtggcaagtcatggccctgatttgatatcgccccttttacgccttctacagaccgatctttgccctcaagctctgcaagttatggaccatatcatgaccgtttcgggcaatcctatggagcgccatcatattcggatgagcatggcttcatcgacttcatcgagggcaatccggaaagaatacgagcgaatccagagtctttacgggatcccagaacctacggggtggtctatcccgatgccggcggcccagtcagctgttacacgacataatgtccacgcggtattctacacatgtgctgaagttgatcgggtagatgcgcaggaacctgtaccgtccgaggttgagttccacgctgacgattacaatgacaattttttcccaatgcgagccgatacgatgcaatcgattgagacgcagacggatggcaacattggggatattgtgcagaaactggatagtctggacgacttcttcgaggacacagaatcatcccatccgacgcttgatgctgtgcctgatatgtcattacgtggtttcgcaggcggttacgtggattccaacgcaagtatctatgaccagcaaaccgccccgatactgcgaaagtcgctcgcgcggacagcctcaacatcctcatttcataatggtctcgttgactctcgccctacaaatatgcgctttgacggtgttggctatcat

SEQ ID NO: 20727 - DNA, 850 bp, Emericella nidulans
tgggcgacgatgagggagaggaagaagatgatggagaagacgataacgtcagcgtcgatgacgacgaggaggtcttgaaagaattgaagaaagctgataccaaggcggcggggtatgatccagcgcgcgatgggggcttctcagagtcgtcgtcttcggaggatgagtcgagcgaggatgaagatgaggaagaagaaacagacgaagacgctctggggggcgaggagttagatttccccgacaagcagcgggaggatgtgcctgttggggaggtgacgaatcgcattgccgtggtcaatctggactgggataacattcgggcagaagacttgatggctgtattctcgagtttcacgcccaaccggcgggaaagtcacgaaggttgctgtttatccgagtgagtttggaaaggagcggatggagagggaggagacggaggggcctccgagggagatttttgctacgcaagacgaggttaacgatgacgaggaggaagatgaggacgaagagcttgattctgaagaggaggaggagacgatcaagaattcgatcttgaaggaggatcagggcgaggagttcaacaccacgcaactccggaaatatcagttggagcgactacgctactattatgctatcctgacattctcgtcgaaggaggtcgcgtagcatgtctacgataacgttgatggcgcggagtatctgtcgagtgcaaacttctttgacctccgattcgtgcctgatgacacagacttttcagatgaccagccgcgagacgagtgtgagcggattccggatggacaccagccgagcgaatttgtcacagacgctctcaacacagagagggtagctt

SEQ ID NO: 20728 - DNA, 850 bp, Emericella nidulans
gacatgaatgtgaatctcatttctctgacatcgtcgtatgcgaggcatctgcgtccggaggatgtcccgagactcgagacacttgcgctcgtcggtgagccgttggctagagacgtccagcgtgtctgggccaaccgcttgacactcataaatgcctacggacctgccgagtgttccgttgtgagcacggtcaagcgtcctgtcacactcgattccaacccagccaatatcggtactactgttgcgggaagggcatgggttgtccaccccaaagaccatgagatcctcctcccgatcggtgcaacgggcgaacttctgctcgagggcgaccacctggcgcgcggatatcttaacgacgaggagaaaacagccgctgcttacattttcggtccatattgggcaccatctccaacgccccgtcggttctacaagaccggtgatttggtgcattttgacgaagacgggtcgatcgtcttcgaaggccgcaaagactcgcaggtcaagattcgggggcagcgagtggagatcgcagagatcgaacatcatcttgctaggctgtttcctaatgctgccggcgctgcagttgacgtcttcaagcatgagtatcatgttcatctggtcgcctttctcttctgcgataaagaatcctggaattcttcggacacaccggcagatattctgcagcgtcttggtgacgttaatgtttcgaccatgtcgcacataaaacagcagctggagcaggttatgcctcaccatatggtgcctacccggtaccagatctgggctcgcatgcccacgtcgctcgccggtaagcttgatcgaaaggctctgcgcaaggaattgggcaacc

SEQ ID NO: 20729 - DNA, 850 bp, Emericella nidulans
  unsure (1)..(850): unsure at all n locations
ctgattttctcccagtccgatacatttacctcaagggcgccatcgttggtccagcttggaagctcccgtttatgggaccgttcctccagtctgtcaaccccaaattccacgagtacaaggccaaatgggacagcggcgagctgagctgtgtgtctgttttccacaagtatgtgaccaatacgatctccttccaatccgcaatgtctctaatatgtcgacctttttagggttgtttgtcatcgcattcacttgtgatatggtccgcaagatcttcaactcgnctacttatgtcaagccctgtgtcgtcgatgctgcgcataaactgcttggcaagactaactgggtattcttggatggcaaggaacatgttgacttccgcaagggcttgaacaaccttttcacccgtcaggcgctttcttgctatcttcctcgcatggaggaggtttacaatgactactacgcgcgcttcctcaaaaagtctaagaacaacaactataagccaacgccgtggatgcccgaattccgtgacctgatgtgcgccgtctcttgccgtaccttcgtaggccactacatttccgatgaggccattgataagatttccgtcgactactacaacatcaccgctgcgctggaattggtcaacttcccgatcatcctccctttcaccaagacctggtacggaaagaaggctgcggacatggttcttgacgaatttgccaagtgtgctgccaaaagcagagctcgtatggctgcgggcggagagattagctgcattatggacgcttggatcaaggctcagttggactctgccaaataccgggaaaagattgccaagggtattgaggttgac

SEQ ID NO: 20730 - DNA, 850 bp, Emericella nidulans
aaactacccgccttttgggaggatacagacattgcagtttgcaccattgaaaaggtttgctatcgcagaatactggcatgacctcgatctgacagtgttaggcgaactcattgatcaacgctgctattgaggaatgcagtattgcagaactgggggcagtcgtgttgcatgaattgcatatgcttgacgacgagaatcgaggatacttgttggaactgatggtgaccaagctgcttctactgcagcaggatattcagatcattggaatgagcgctaccatctcggtaagtgacatcctaattacaagatgcaatatctgacaggtcaagaatacggagctgttggcagactggattaatgctagatactttgtatcaacctatcgtccagtgcccgtggacgaatatcttatctatgataatgcgatctacccagccgcgacttcgagacagctctttcagacaatctcgaagctgacagccacaggaggacccttcttgagcgaggccgtgcctccccagcgcacaatcaaaccttctgccttcagggaattatctaacccgatgtcaaacgcaatggtagctatggcaatcgatacggtcactgcaggatacggtgctctggtgttctgtggcagtagagtagcctgtcaagtccacgctgcgctcataagcgaggcaatgcctgatccaggtacgcttggcgcagaggatctgggtaagcgactcgacctgctggcagagcttcgcagtcttcccagcggactggatccggctctggagaaaacccacatcaaaggcgtgggattcacagtgagcaagtttctgacagcactgagggccgatactga

SEQ ID NO: 20731 - DNA, 850 bp, Emericella nidulans
gcaaacgcgccctgtagcggagctagcaccccccaatgttatatcgcaattccgcgccgacctcgacgccgcagccggaattgttgctccaggcgcaaaggcagatgctgagattgagcgtgacttgcgtctccgtttggatggatatcacctggaaatattttcaaagacgcagactgagactactaaacgctggacataccgagtcggagatcaagcgaccgtatttccatgtcacggagttagatgaaggccaattggccaactggcgaaagtacctcgacttcgaagaggccgaaggctcctacgctcgaattcagttcttgtatgagagatgtcttgtgacatgcgctcattatgacgagttctggcagcgttacgccaggtggatgtctgctcagcccgggaaagaggaggatgtgcggaatatctaccagcgcgcaagctatctatatgttcccattgccaacccggcaactcgcctacagtatgcgtactttgaggagatgtgcggacgagtcagcgtggcgaaagaaatccacgaagcaattcttatcaatattcccaaccacgttgaaacaattgtctccctggctaacatgtgccgtcgtcacggcggtcttgaagccgccattgaagtgtacaagtcccaacttgactccccgcaatgtgaaatgagcaccaaggccgcccttgtggctgaatgggctcggctattgtggaagatcaagggttcgactgaagaggctcgccagggtcttcaaagaatcagcattctacctggacagtcaggcgtcttggacagttatctaacgtttgaactggatcagcctacagcgctggtacaata

SEQ ID NO: 20732 - DNA, 647 bp, Emericella nidulans
atgtcccgagtctggcacatcatcggcgccaacaccgggctcggcctttagctcacgctcaaagccctgtccgagggtgaccgtgttatctgccgtcgtacgcactctgtcgaaagtcccggatagcttgaaacggaacgactctgaaatccaccagcctgacctctcctggccccaggaagctatggacatgtatgcaaaaaaagcactcgcagcgtttggaagatcgatgttctcgttaatagtgcaggctattcgtatatgggtgcaatcgaagagtccgagtaaggaccacctgcttctcgaccttctttacccagacacttcaccccataagagcctaaggcagacgctaatgcaacctcagggacgctgcggtgaagactcagtttgatattaacgtcttcgcccagctccggcttatctgcgcagccttgcctcaccttcgcggacaaggcagtggcacaattataaacttctcttccatcggcggtctaatctccggccctagtaacgggatctactgcgccaccaagttcgcgctggagggtctaacgcaagccctcgcggccgagatcgcgccattcgggctcaaggcgctggtcgttgagccgggctatttccgcacctccttcctctcatccgtc

SEQ ID NO: 20733 - DNA, 500 bp, Emericella nidulans
caatgtgcgggacggaatgccttagtgggggtccttaagcaccatatcgatgtccatgattgcacagcgattataccatatcaggatacgtgaggcaagccagacgtgcgctgattagatgagcagtattaggacccgggggataattgctatttaagatttgcacgtgagctgtgtgccgtgttaaaattacaccatagctgctgcttcagctcaggagaagtgggttcttgttaatgtgacctacgtacaggcgacagaacataattcgctttgaatgtcccatgcgcctgacctgcttgtattgcatagactacgtagcgtccgatggcattccccatattacatatcaggactgtactggctgactgaatttaaaccccttgctaccaatgagcgagcaatccgacctagtcatgatggatggatgccaacaaattcgagtctgacctgaacatcaatacatgcattagaagaatgacctgattattggccaaatt

SEQ ID NO: 20734 - DNA, 850 bp, Emericella nidulans
cactaatgagagcgttgcgcactggtgcacgatcgatattcggacggggaggttgtctgtaatactcgaaccaggccggtgcttcgacgcggagatttacgcagatgaggctgatctagcggactattcacaaatccgcgaagaccaaagatgtatgtttgcctgtttataattaagatttctgactaactggaatagtgaacctggggaaatgggtcctccgatggctcttcgctccattggtggatgaacttgtcaagcgtgatgctgagtaccgtgccgaagcgaaagcccgagcagaggagatggtcaaatctcatagcgtgtccgcgccagtggatattcctgggaagttgaccgtgccaataccatcagacccgtctgccgttccgggacgtgattcgattgccagtcctacaactccctttagcataggcttagcaacaacccctggttcattgacctcgtcggtgctcaaccatggacatagctacaacaacctgggaatgtctcctggggaatcttacgatcatttgacgtcgcatcatagtgtcgatatggctcggagctcaatgtcggataggtcaagtgactacttttcgtccccgaaatcgcatgcagcgatcgatagtgacaagccgttgcctacaccgggcgagcagacgccaactcccgctgcagccagtgagcctgataaagaggagcgtaaaaagggcggctcactctttggcaagaagttccgaatggactttcccaagaagctaggacgcacttcgtctgaagtcaagccccagatccaggaggagaaggcggaggaaccagaaaagacgtcggtgaaagaagagaaagt

SEQ ID NO: 20735 - DNA, 669 bp, Emericella nidulans
gggtcaaggatggaggccttcacttttgcggtttccgcccaagtggattttccgatatatgtcaagatgtatgcctaagggaggacataaagagcatgtgaaagttcgctactaatagaaatcacagtggttcactagaagggaaacagaagcagatcccactctcagttcttctcaagcaacctgaattgcgacatatcggctctgtgcagaatcccctgtccgatctattcgtgactgcgcaattatggtcggagtccaagcccctgggggttccattgcagacttcttacaaagccttcaagactgttagagcctggaatgagtggctacagttaccgatctccatcaaagatgcccctttgagatgtcaactcgctattacgatctgggacctgtcgccgtttggtggggaaggagcgaacggccattacatcccatttggtgggacgacgatacggctgtttgacgatgatggcaaattaaaaacggggaagcaaaagtgcaaggtataccggcacaaggccgcagatgggttctcggcgacgacgacgccatcaactccatcgaaaaggcgaaggggcaacaaaccagatccgctaggtccctctccggaagagttggagttggagagagtagaagttttgatcaaaagcatgagatggagag

SEQ ID NO: 20736 - DNA, 850 bp, Emericella nidulans
gcagtatcaactctaccagcatgatttggcgcagtacatgaagctcgatgcggcggcattgagagctttgaatcttatgcctgggccgagggatggatcaaaatcgatgagtttatttgggctgttgaatcattgtaaaacgcctgttgggagccggttgctggcacagtggctgaaacagccgttaatggatctggcggagattgaaaagcggcaaaggcttgttgaggcgtttgtcgtgagcacggagcttcggcagatgatgcaggaggagcatctacgatctattccggatctgtatcggcttgcgaaacgattccagcgaaaacaggcgaatctggaagatgtagtgcgtgtgtatcaggttgctattcggctgcctgggtttgtgaactctctggagaatgttatggatgaggagtaccagacgccgcttgagacagagtacacggccaagctacgcaaccattcggcgagcctggcgaaactggaggagatggtcgagacgacggttgatctggatgccctcgagaatcacgagttcatcatcaagcccgaattcgatgatagtctgcgcatcattcgcaaaaagctggatcagttgcgccatgatatgtaccttgagcataaggctgtcgcgagagacctagatcaggaaatggacaagaagctgttcctggagaaccaccgcgtgtacggatggtgtttccgtctgacgcggaatgaggcgggttgcattcgcaacaagaaggcctaccaggagtgctcaacgcagaagaacggtgtgtactttaccacatcgacgatgcaatctctccgccgcagatcatgatcagctctcctccaacta

SEQ ID NO: 20737 - DNA, 580 bp, Emericella nidulans
aatatcctagtcagcagcaactttgagcgcctcctctggtttctcgcccttcgaacaaacacctcctctgactccattgaggagcgccgcaagcaagcctctgaaaacgtcagccaatggctctcacagctcaaaacggaaggcggcttcaccgtcccgcccgccgtcattgaggccgccaaaaccgaatttgaaagcgagcgcgttagcaacgacgagacgatcgcccaaatccgttcaacatacaactcctccttcccgtctaacctcactcccggtagtgctacctcttccaagactggcggctacattcttgacccccactccgccgtgggtgttgcggcttcactgcgctccatccagcgcaaccccggcacgaaacacatttctctttccacagctcatcctgccaagtttgctagcgctgtagatctcgctcttcgcgccgaggacggctatgacttcaccgaggtcctgcctcaggagttcattggtctcgagcagcgtgagagcagagttacgcccgttcgtgctggtgctgggtgggaaggtgtccgtgagattgtcaaggctgaagttg

SEQ ID NO: 20738 - DNA, 517 bp, Emericella nidulans
gacaaaaaaaaggtgaggtcaattaattattccccccaaaaagagaaggggatggcccctttatgcgcggcacggtagaataacccgggagcccctcccccggttaaaggggggtccccaatccggttatggaagaatgggccaaggtgggtgtcataaggtccgtaggtccgatttaacgcccggcgggcccccccttttgaaggtaattacgctaaagcgtcaattcctaaaacattattcaaatccggggctaatatgactgcgtctgtgggcttaagcttcaaaacaagaaaggcttttctcttattttgccctgggcagtgcgcagtgggctgaatagcaaggaattgatcaccgtctatgggagaaaatactggagaaggatgttgacgagttgcgggcagagctagggattgagaagccgccagatatgagggatattcggcggatgataaggctccagcagaagagggagcgagaacaacaacaagggaaaagctcttgatgcccttgc

SEQ ID NO: 20739 - DNA, 500 bp, Emericella nidulans
agactcttttgcatgatgccgagatccacggcagcagtggcagtcttcagcccgaagaaaaaggaaacgatcccgcgggagcacggaacagagggaaatgtatgtccacgctctactcagggcccgagtaagctcatactgacaaggtggatagcgacccaaaatgcgtcaaatcagacacattccgataaagacacaatactgagactccaagctctgaacaacactcaagcggccgagttcgagcccaccgtcttcgtgacctgggacatgaaagatctcgcaaaattgcctagcatactaaaaaggctaatacaagcctacattgcgactgcgcgacagatagttcgtgtcgagacagacgttgtcatgctcacacatcttatcctctacttcactacgtcagtcccgagcgccctctaccttttcgggcctggaaacttcacctgggtccacggcatcctgcactggattatgcaatcctactatgtaggcacgta

SEQ ID NO: 20740 - DNA, 850 bp, Emericella nidulans
agggcagcaagaaaaagaagaaaaacaagaacggtgactctggttcaccggctcgttccgctgctgcagagaagcctattgttacctttaccccggacgacattgtgaacatcgtccccttggtcaaggatgcctctccacggagttcgcttgctgaggaggctctagaagcgggccgcatctctctcatgcagaaccagaaacagcttggccaggagctcatcttggagtctctgtctctgcatgagcagatctatggtattctccaccctgaagtcgccaagttatatcaccagctgtctatgctctactatcaaacagacgagaaggatgctgctgtcgagctggctcggaaggcagttatcgtcaccgaacgcacacttggtgttgactccgccgacaccatcttgagctacctcaacctcagtctctttgagcacgcttctggaaacaccaaagttgcgcttgcgtatatcaaacacgccatggacctgtggaagatcatcttcggttccaaccacccggattcgatcaccactatgaacaacgctgcggttatgcttcagcacttgaagcagtactctgactcaggaagtggttcgaggcatccttgtcagtctgcgaatcactcttcggcaagcagtccatcaacactgcaacaattctcttccagcttgcgcaggcactggcccttgaccaagattctaaggctgctgttgggaagatgcgcgatgcgtacaacatcttcctcagccagctcggccccgaagaccgcaacaccaaggaggcggagacatggctcgagcagctcacgcagaacgctgtctccatcgccaagcatgccaaagat

SEQ ID NO: 20741 - DNA, 573 bp, Emericella nidulans
ccgatccgcacatctcgcaatcgcaagccacccccagcgggcttcgacgatattgaagacactttgttagagttcagcaataaaatgaaagatgccgagaatgcgccgcatgagggaaagaagaagcacgaggtcctgtggcctatcttccagatcactcaccaacgtcagtatctttatcctagtcttcatacaccattcaaagttccaactccctgaacttacctgaaccttatcaatataggctcaagatacatttacgatctttactaccagaaagaggctatatcgaaacagctatatgaatggctcttgaagaacgggtatgcggatgcgaacttgatcgcgaagtggaagaagcaagggtacgagaaggtaagttcttcgctgttatcactcgtcgcaatatatatgaggccggactgacaaacttctcagctttgttgtctccgctgcatccaaaccaaggaaaccaactttaacgccacttgtatttgccgggtaccgaaggctcaactaaaggaggatcagatcatccagtgtgtcagctgcggatgccgtggttgcgcgagc

SEQ ID NO: 20742 - DNA, 306 bp, Emericella nidulans
cgctaaaagtccggatactcacgctcgtggcgggaggatacagtcagggctctgcggttattgacaaatcaatccagaagctcgatgatagtaccagggatcgagtcaagggtgttgtgctctttggtttcacgcggaatctccaggataagggccagattcccgggtactccaaggatcagacgaaggtgtactgtgcagtgggtgacttggtctgctctggcacgttgattataacccgcatcgcatatgacctatggcctgaatgcctgagatgcactgaagtttttggcaagccaagtctca

SEQ ID NO: 20743 - DNA, 380 bp, Emericella nidulans
cctaaccgccgactgggtgccaatggtgccgcggagatcaaatctcaccacttctttgccaacatcgattggcgtaagttgctccagaggaagtatgagccgagcttcaggcccaatgtggtatgtagcaattctgcgcccctagagataatcatcgttcagtactaacagctatataggctgatgcccgcgacactaaaaatttcgatgccgagtttacatccgaggctccaaaggattcatatgtggatgggcccatgttatcttcgactcaacaacagcaattcgaggggtggtcttacaaccgtcccgttgctggtctcggcgatgcaggcggcagtgtcaaggatccatcattcgccagtatccctgaggattct

SEQ ID NO: 20744 - DNA, 850 bp, Emericella nidulans
tacccagaaactcttgaaaccctctacaatgccgtgaacgccatggatctgtctccgatgccgaaactgaacctgcttgagcgccagatactgcaagctacgaacagcaaagacatgttcatcgagaagttcgagcagatggtccagcagcgcgcgattgaggacggcgagaacgacatcgatgaggataatccaccctccccgagaaggggcactgctccccgttacaccctaccccgagatacccacgagtttgagtctaagattatctataacgacattcccatccctgtaaaggtacccacggtgatctggcctgagatcgtgggcgacttttcgctcgtcaagctcatccagattttctctgcaccacatgctgcatcgcctcaaccgtttcctcttcatcctcacttgaccaccagtgggccacttacccacccaattatcgtcctcgtcaatgccatgctgacccagaaacgggtcgtcttcctcggccacaaccgaccgtccggagaggttgcagaagcagtgctagctgcctgtgcactagcatctggtggaatcctgcgtgggttcacccgtcatgcctttccctacacggatttaaccaagatcgacgatctactgcgcgtgccaggatttatcgcgggagtcacaaatcctacatttgctaatcaccccgagtggtgggatgtgctctgcgatctgcctacgggtcgaatcaagatcagtaaccacatagaaccggctccggtgactgacggccaactatacttccagcagcagagcccagttagcgcgtccggcccgaatgccgatcccacaggggacaacctgttcaggaggacct

SEQ ID NO: 20745 - DNA, 850 bp, Emericella nidulans
gtgggctgacttcagtctacaagactatatctcgaatacgacggacttgggtgagacattaccaggctatatccacaggggtgagcccaatgttgatatactcatctgtacacccggtcgcctcgtggaccatattcgctatacaaaaggctttacattgaagcatcttcagtggctcgtcattgacgaggctgaccgattgcttaacgagagctttcaggagtgggtggatgtcgttatgcagtcccttgatgcacgcaaggcgtacggggctttcggaccaagtggacggttcctggcggatctcgggatgtctttgcagactaaagagcctaggaaggtggtcctcagtgccacaatgaccaaagatgtctcaaagttgaactctctccggctcacgaatccgcgattagttgttgttggtggctctgatcaaactactacagccgatgatgagagcggggttgttgtccacgcagatgaaagatttactcttccgacgacactaagagaatactccattgcggttggtgacggagagcacaaaccgctgtatctcttgcgcctgctcttatccgagatgaaacttgatgttccctcttcaacaaaacgcacagcttcagttacgtctgaatccgatgataccagctcagaaggaaccagctcggacgagtcgacgtcagacgactcatcttctgatgagtctagctctgaagattccgacctggattcatagtctgacgcatcgagtgatacctgctcgagcgaagaatcagacgactcggacaatagctccgaatcagcgtccgacgacgatagacttgtgatgcaccttccacctcacgcccca

SEQ ID NO: 20746 - DNA, 850 bp, Emericella nidulans
gttccggaacaagaaaatcacgtcccctctccagaatcaggactcaagcgaagacaatcctcaactactgatctcgagtcggacatcaagcgtcgccgtctcagcacccagaacgatgaccaagattcagaagaacctccagcgcgcagacaatcgtcgccgaaactagaagttcaggacacagaacgaaaacgcaaccgccgagatgaggaaaggaaacgtggacagcggttattcggttctctgctaggaacgctctcacagacatccaattctgcggcgcaacggcggagagctgatattgagcggaagcagcaggataagctaaagctgcaagatgaggagtatggggagctgaagaagaaaaggtgggaggagcggttgctacgcgcaaaaaggagcagaagtcatacgagaaggagatggtgagtctcaactacgcctgactgctgacgacttgctaatgtatactcggttttttagatgcttactcgccacgagaaccttttggcgatggctcactctttaaaaacaaagcgatcgcctgcattggtatggtcatcataccgaatcgtctttttgattttctaactggttctatagtactataaaccatggcagctgcggcctgaagaggaagatattatacaggatcaggtccgggaagccgaggccacaatcgcacgagaagtggaggaattcgatgcgcgcaatgcacaagaggaccagccagagaccgataggcaggaacaacctgaagaagctcaggagaaactagagcaacaagagcccagtcaagatgcgcaaaacgacgaggcaaaggaacaggaggagaaagtacaagctgagc

SEQ ID NO: 20747 - DNA, 500 bp, Emericella nidulans
agcgcacactgtatctcatctcatctcacgcatagcttcaatacaccttagcctccacgttcaacatcaacgtttttcaattctcgacgtcttccatgtattgatcactcaaaatgggaaagaagacatggagaatgcttggtaaggagcccaagctcccatagacaactcgtctttgagtataactcatcgctattcgcaaagaacaaccccaatgtaatgaaccagttggcgacgaagttgggtctatcgtccgagctccaattctacgacgtatattccctgaatgaacccgagcaacttgcccacattcctcgacctgcctttgctctgctggtcgttattccgcttacaccagcttgggatgaaagtcgcaaggccgaggacgctgacaaagaaccctatactggttccgggactgatgaaccggtcatctggtacaagcaaaccattggccacgcctgcggattgatcggtctgctccatagcttgtttaacgg

SEQ ID NO: 20748 - DNA, 547 bp, Emericella nidulans
atgcagaggtccaagatactgacagtaacagcatcttctcggtccagccgagtacatcagctcccttccctccaagggagttcgggaggccttcattgaggggctcaatgtctggctcgtcttgcccgaccaacgcgtgaacgaactgaagagtatcgcgcagagcctacataacgcatctctcatgtatgtcttttctcagaccacatcgccttctcacaagcaccccgctcaagagcacacaggcttgacgacatcgaagaccattcacccctccgccgcggccgtccggcaacgcatacgatcttcggggcagagcagacgatcaattcggcaaattacctcctaatcgacgcgatgcagaaagtgcgggctctggatgacccggtctgtttggatatctacctcgaggagatgcacaatttgtttgtgggacagagctttgacctctactggacgaggcaaggacagtgtccgagtgaggacgagtatctggccatggtgaggttgagtacgtatttaagccggcgtatgattgtggagggtg

SEQ ID NO: 20749 - DNA, 500 bp, Emericella nidulans
ccctgtaaaacctggggtttagttaaacacagctaacgcatgaggcacccgcagtccccggctcatcgcagcgctttatcaccaaatcgcgctctcttacggctgattgcgtcgcctacgacctcgaagacagcgtcaccccgcacaagaaagccaaagcgcggtcgctggtgcggagagccctggatgagcccgcaccccccagtatccgcgagcgcgcagtgcgcattaactcggtcgacagtggactggcactggcggatctgacggaagttgtacgtcgctgcacatgccgtaagctctcgctgtctagctagatagctaataaactgtgcagctcaagtctccaaatctctccacaattgtgatcccgaaagttaactccgcgtcgcacctgaccttcgtcaacgatgtaataacacaaacacaagcccagcaagaagcgcagggtcgtgcctgtaacgaaatcacccagctcgctcttggcaatggatgagtcc

SEQ ID NO: 20750 - DNA, 567 bp, Emericella nidulans; identical to SEQ ID NO: 10011

SEQ ID NO: 20751 - DNA, 850 bp, Emericella nidulans
ggagtcggcgcatatggcgttgtctacactgccgtggatattcacacggatgtgctctatgccgtcaaggccctcaacaagaccgggctagatccccgccagctcaagttccagcagcgtgagatcaagctccaccatatggccagccagcacccaaatgtcgtctctctagtgcgcattatggactcggacgactgcacctatgtcgtcatagaattctgccctgaaggcgacctgttctctagcatcactgacaagagccactttgtcgggaatgatcccttggtcaagcgtgtctttctccagatcttggatgccgtccattactgccactcgctgggaatctaccatagggacctcaagccggagaacatcctggtcaccgaccagggaatgacggtcaagttggccgattttggccttgccacgacggatatgttcacctcggactttggctgcgggtcgacattctacatgtcgccaggtacgtcttcgtttttctgccttgcagtctcggccaatgctgaccctagcagagtgccagcaaacaaaccctcgcccaatgtcgtactaccagtcggctccgaacgacgtctggagcttgggtgtcatccttgtcaatttgacgtgcggccgtaacccgtggaagcgcgcctcgatcgaggactctaccttccgcgcttacctgaaagaccctttcttcctgaagtcaattctgccgctgtcggatgagatggtctgtatcctcagccgtatctttgagcccaacccatcaaagaggattaccatcccggagttgcgccaaatcattctggagtgccctaggttcacgcttaacccaatgacccct

SEQ ID NO: 20752 - DNA, 500 bp, Emericella nidulans
aagtacggcgagaacaaggcgcagacatggtctttgatatcacgcagacagacaagatgccggagttcgtaaaagaaattactgcaaagtatccggatatcgacagcgtctacctcaacgccggtgttcagcgtacacacgatttgacccaggaagggggatgggatctcgaggcgttcaacaacgaattccacacaaactttacgagcgcggtttcgctcgttcatgcgtttttgccgtttttgaaacgcaaagccgagacgcagccggcgagctttatcttgtatgtttcatcgctgttacattggatgttgggactatgcgaataaactgcttgtggtacagtaccggaaccaaccttgcgattgtccctgcggctccgatgccagcttactcggcatcgaagacggctctgaatgtgtttgtcctctctctgcgtgagcagctgaaacagtcgagcaagctcaaggtgatcgaagtctcgcctcctgctgttcaga

SEQ ID NO: 20753 - DNA, 459 bp, Emericella nidulans
ctacgctaacaactactgggtttgtctatcccttccgatacccactccccaatatctgaatatcggcaacaaaccggataccctagcactcccacttcagccgtcttaacatctcgcatcgctaacaaccactattagtacaacctgaactcccgcgctccgtcaatccgcttcggtaccggccacatctacaacaactactacgaaactgtgagcgacggcatcaacacccgtatcggtgcccaggttctcgtcgagggtaacgtcttcgtcgacagcaagaaggccctctactcgactgacgaaggatacgccgtcgagcgcaacaacgactttggtgatgccaagaacgaggcccttgagggaacccttacctccgttgaatacgagtacgacctccttgatacctctgaggtcaagagcgctgttgttggaactgctggtcagacccttactttc

SEQ ID NO: 20754 - DNA, 850 bp, Emericella nidulans
gaagctcgtaagggtaagtcatccaacggcgcgaattatatggcgccagaataagctgatggtttatcttgcagcacggtacgaggtttctcaaataaattccaagctcaacggccttctcagggagatcggcaaaaagaagaaggtgcgggctcttatttcagcttttcaggagactactctcactgacctctgagattatctagaacaaggaggacgcaaccagtcttctggaggagaaggcaaagttagagagtcagcggaaagaggcagagagtgttgccttgcagaaggaggatcttagggacaagaagattcgaacgatcggataactacgttcatgactcagtccctgtcagcaataatgaggtcggtgatgccctgctggaaatgtcgaaacttgactgatcgatctcaattggattctgtaggatgataattctgtcatcagaacatggttcccggaaggcttcgttgctgagaaacccaattgcctgtcgcatcatgaggtcctcactcggcttgacgggtatgacccggagcgtggtgtcaaggttgttggccatcgtggatactgcctaactggctacggccttttcttgaaccttgcgcttgtcaactatgggctggaattcctctggaaacgtggatataagccaaaccaaccgcctcacttcatgcttagagagatgatggcaaagactgcccaacttgaacaatttgatgaggaactctacaaagtcacggagagcgaggacaaatctaccgacaagtatctcattgctacttcggagcagcccttatcagctctacatgatagtgaatggctccaagacaaggatcttccgat

SEQ ID NO: 20755 - DNA, 710 bp, Emericella nidulans; identical to SEQ ID NO: 129
  unsure (1)..(710): unsure at all n locations

SEQ ID NO: 20756 - DNA, 850 bp, Emericella nidulans
  unsure (1)..(850): unsure at all n locations
tcaactctatcgcagcatattgtgccctggctgactgattgcctcgttttaacaggatgggccagttggaatgtatgtacttgatcgattccaagccgatcgtccgaacaaggcagctaatgcgggcggatatagataggcatattcctatgcatgcgatgtgcagccttgcacaggaagatgggaacgcacatttcgaaggtcaaatcgttgagtatggacagctgggcctcagatcaagtcgatgtgagccatccggtccgaccgcacagacagaatcagacggctaacgagtagactcgctagaacatgaaatcgcgtggaaacatcctcgtgaacaagatctataaccccatgaacatccaaccgcccgtccctactgatatcgatgaatgcgatgcatgcattgtgcggctcattcggcaaaaataccatacaaggacattggaagatgggaagccaaagccaccaagccgacaggaccctagctatacacgatcgccggagggctcaccttcgccgttgcctccgaaaccttaccggccgtttgggttcggtcttcggtctgcctcgtctgctgtgaacctcaacagccattctgctggcagccatggcccagactcgcctgttagcgattcgagtcgttcgtcatttgagtccaagctcgccaagctgagggatatgggatttacgaatgagcgcaggaataccaccgcccttcgggaactggatgggaactttgacatgacagtggagacactcangaggcttggagaaggatggcaacacacatgttcggacgcatctgcatnggcgcataactaatccttcgatcagtgatgccaacacc

SEQ ID NO: 20757 - DNA, 748 bp, Emericella nidulans
atggctcttcaccagtacgactggattctcgccctgggtacaatcttcgccttcctcgacgcctggaacattggcgccaatgatgtcgccaattcgtgggctacctcggtctcctcccggtccgtcaagtactggcaggccatggtactggcgacaatcatggagtttgctggagggtaagttggcgctcctccactagtcatcacggatgaccagtactgactcttccagtatcggcgtaggcgcaaccgtatcagacaccatccgcacaaaggtcgtcgacgtcgatctcttcgaaaacaatccagccctcctcatgcttggcatgctctgcgccctcgtcggctcctccacctacctcaccttcgccacccgcattggtctgccggtttcgacgacgcactcgattatgggtggtgttattggcatgggtgtcgcgctcgtcggcgccgatggcgttaagtggtggggtggaaatatcaattcgggcgtcgtccaggtcttcctcgcctgggttattgctccgtttatttccgcggcctttgcagccattatcttcctgctcacaaagtacctgattctgctgcgcagcaatcctgctcgcaaggccctctacacgattcccttctatttcttcgtgacctgtaccctcctcgccatgctcatcgtgtggaagggcggtacgagtcgtatcaagcttgagggcaacgagattgcagggacagttgtcggtaccggtgccgttatg

SEQ ID NO: 20758 - DNA, 542 bp, Emericella nidulans
atccacgcgacaagcaagttaacagcacgcctcaaggaactcgccgagctcacagagtctcctccagcgggcataacagtcgaactcgcgaacgaatccaacctctatgaatggaaggtgttcatggatggtcccgagggttctccctaccacgtaagttgcacctctttccctcagccaaccctgcagcgattcaagaacggccaaagtgaccttatgttcatatagaaaggccgtttcgaactaaagctcaccctccccaccgagtaccccttcaagccaccaagcgtctcgttcgtcacgaaaatttatcaccccaatgtaacgaacgacgacaaaggtagtatgtgtctgggaatgctgaaagcagatgagtggaagccttcctccagactttccgccgtcctggagtttgcgcgctcgttgctcggcgagccgatgccggatgatgctgtcgagggacgcattgcggagcaatatcgtgaggaccgaagcgatatgaagagattgcaagggagtggacgaggaagtacgctggtggt

SEQ ID NO: 20759 - DNA, 500 bp, Emericella nidulans
ttcaaacagcaatctctactcagtctcttcatactcactccataacacataatctcataaaacaagatggcaaccaaccaagccgcgtggctcaccaaggcaggcaatgacctcgaagtcggtgatgcccccgtccctacggctggcccaggcgagattgtggttaagaacgccgcggtggccatcaacccactcgacacccatatgcaggacgtcggcgtctttgtccagcagtggcccaccatctttggctgcgacgtcgccggtacagtgcatgagacgggtccagacgtcgagcggttcaagaagggggaccgggttattgggtaagttcatggccattgacttgtcgtttggctcgtgactgactctgatattgtagtcacgccatcaatctggtcaccgggcggcctcaggatggtgcctatgctctctacaccgtcgtccccgccaacaaggcggctatcctgccggacgctatctccttcaccgacggagtc

SEQ ID NO: 20760 - DNA, 850 bp, Emericella nidulans
gcgctcgtgactgggcgcgcaccactgggtcaagagaccgctctcgactttcaaaagagatatccgaaggttgctattcggcaggcatatggtaggtcatcagcttcatgagtatgaccgatagattactgatttcgattcacaggccttaccgagacatcaacggtcgtcacggccacacactttgatgacatcgtgcctgggtcttccggttggcttatccccggcgtagaggcacgtatcgtgaccccagaaggggaggatattaccaagtatgacacccctggtgagctctgggtccgagctcccagcgtcgttcttggctatctcaacaatgagaaagctaccaaagagacgtttggcgatggatggatgcataccggtgatgaagccgtgattcggaagagccccaagggcaatgaacatgtgttcattgtcgaccgaatcaaggagctgatcaaagtcaaggttcgtagcaatgtacaggaaagcatgaccccccgataactaacctgcgtgctagggtcaccaagtcgctccagccgagcttgaagcgcatctcctcacccacccagcggtggcagattgcgctgtcatcgccatccccgatgacgctgccggtgaggtacctaaagcaattgtatctaagtcacctgaggcgggaccagatgacgaggctacagtcaagtcgatcgtcaaatatgtgcaggatcataaagcgcgacacaaatggcttaagggtggtgtgagattcatcgacactgttcccaagagccctagcggaaagatcttgcgacggctacttcgtgaccaggaggcggctatgcgcagacaagcaggctctaagcta

SEQ ID NO: 20761 - DNA, 850 bp, Emericella nidulans
gctaccccagcgagtctcgaatggctcaagcgcccaaacagcaggtgtgcaaccggacgatctcaagactatacctttgaacaaaagccgagtcgagaatctcatgcatctgctacttccattcatcaaccacgtccttggccacccgcaagtcctgcaagctcccgttgaaattcagagagagctcgccgacgagctgtaccgctttctcttagctcatgtcgaacatattcgggcaaacctaacgcgaacaaggataaatacactgtccgccagcagtggccaccagctccgccaacttacatattaccgctgggttcattccatcgggtcagcggacaccagctgtcccctcgcagcagttttcttcttgtgcctaatcagcaagcacgggagcttttgcttccagcacccgaaggcacagtaccttagtcgaaccgtggctcaccatttatctgtgatctgtagacagtataacgactacggctcggctgttcgcgatcacgaagaagggaatctcaacagtcttgattttctcgattttcaacaagaggcacaggcaaatggtgcagtatctgagctcaggacgtcaaacagtgtttgcccttccgtctcagatacgcagctgttcccacgagctgcatgcacgtcgcagagtgcaaaagatagccttatggaagtcgctgagtttgagcggagctgtatggagctagccctgcagcgactggaagatgccgcatgtacacttgacgcgctcaagcaatttagggtgtttgtcgatgtcacagatctgtttgggcatgtttatatcttgaaggacttgacaggtaaagttcatccggccgcgtaa

SEQ ID NO: 20762 - DNA, 850 bp, Emericella nidulans
atccagtcccgcccttgcttgctctcaggattattttatcctacactcgcagctcagcttagagtccaacgacccattgtgtccttcccatccatggtcctattcatagacgctactttctagcagtctgctgccgaatctgttaccgcaatggctgaaagcaagagactcagcagcagctcccgcccaggccaggacgagagcgagaagatccaggaagtgcagtaccagacccgcagccgacagaattcgaggatagatcaagatgacaccacattctttgacgaaatcaaccctggaggaagggctgagttgactcgtattgcctcgaactttgccaggcggacctctacagcggcatccactactaccgggaagggcattgagcgaatggacactgtcgacgagatgacccttgaggatccggcatttgatcccacaagcgatcagttcaatcattacaagtgggcccgtaagattatgaaactcatggacgaggaaggtgcccctcgacctccgtcgaccgggatcacttttcaaaatctcaatgtattcggctcggggtcagctttacagtaccaggataccgtggtctctctgttgactgcgccattgcgcctccacgagctccttttcaagcgagctcctgaaagacacattctgcacgatttcaacggtctgatcggtagcggtgaactcttgattgtcctaggacgaccaggtagtggctgttcaacctttttgaagtcactatgtggcgaactcaatggtctgaaactaggcgaagggtcgcacatccagtatggagggataccgatgaagacaatgcataaagaatataagggagagg

SEQ ID NO: 20763 - DNA, 850 bp, Emericella nidulans
gattctcaaatgtgcgttcttcgaggctgtcgtgggcgttgctgtttatgttggcaccaccagcctggagcagtatattctacctctaatggttcagtcaatgacagatccagaggagtttgttgttgaaagagtccttcgctcgcttgcggccatggcggaccttggtcttttccagagacccaccacttgggatcttttacacgccactgtgcgtttcttagtacatccaaacgcctggatccgagaagctgctgtcagcctggttgtcaattcaaccaaatttctatccacggccgataagtactccattctcacccccctcgttcgcccgttcttaaaggtgagtatcgtggatttctccgaaggagacatactcgatgctctgaaaactccactccctaaagccttgtatgaccaagcgtttgtgtgggcatcgcaagctgaaaagggatttttctggaagtctgtcggtcgagatggtgcttctctgggtagcgttgatgcagcgtttcagaagagggcatcaaaggccttctccctatccgcgcaacctaaaaatgatgaggacgagcaatggatcgcgaacgtgagggcattaggattgaccactgaggacgagtctaaattgctcgccttgagggagcacatttggagggtctccatgcgtcaaaccaaggatcatgagagcgcaggggcttcgttgaataacgtggttgccttaatcgattatggagttacaccccaaacagtgttctttgacaaaagccaaaacgtcaaggcgcgaagaaatcacgagaatcctgtcgggaggccgcaattaacccgagccgaagatagtaaggcacat

SEQ ID NO: 20764 - DNA, 850 bp, Emericella nidulans
  unsure (1)..(850): unsure at all n locations
tcggaacattacaaaacttgacttgtatgagcttcttgctcgatcactgcgcctagtatttacgagatggacgatgtaaagaggtgatcttgctccagctatttggtggcccaaccaagtcttcccaaaagggtgataatccacgttaccgtggcgatatcaacgtcctcctttgtggtgaccccttcacatcggaatctcaactgctccgatatgtgcacaagattgcgccgcgaggtgtatacacncagtgcaagggttcatcagccgttggtcttactgcttacgttactcgtgaccccgaaacccgccaaatggttctggagtctggtgctttggtactgtctgatggaggtgtttgctgcattgacgaatttgacaagatgaacgaatcaacccggtctgtcttgcacgaagtcatggaacagcagacggtatctattgccaaggcaggtatcatcaccactttgaatgccaggacaagtattctcgcctcagcaaacccaattggcagcagatacaacccgaacctgccggtaccgcagaatattgatttgccacctacccttctgtctcgttttgaccttgtatatcttgttcttgaccgcgtggacgaatcggaagatcgacggcttgcaaagcacattgtcaacatgtatctcgaggatagaccggagaacgcgagtgagcgcgaggttttggtaagtcaacgcgggctgatattcggacctatccattgctgacttcatgaatctacagccggttgagtttttgacggcctacatcacctatgccaagaccaaggtgcaccccgttcttactccggccgcaggtaaagccctcaccgacg

SEQ ID NO: 20765 - DNA, 850 bp, Emericella nidulans
tcaccccgacaagatcgcggaccagatctccgatgccatcctcgatggtacgtctacaaggattcactaaagtaaaagagtagatgcttacagagaaatcagcttgtctcgctgaggacccgctctccaaggtcgcttgtgagaccgccaccaagactggtatgttatctagccttgcctgaccgcataaccgggtgccttgctgattcctgcaggtatgattatggttttcggtgagattaccacccaggccagactcgactaccaggccatcatccgtggtgccatcaaggacattggttacgatgactccgagaagggttttgactacaagacctgcaacgtcttggttgctattgagcaacagtcgcccgatattgctcagggtctccactacgaagaggccctcgagaagctcggtgctggtgaccagggtatcatgttcggttatgccaccgacgagacccctgaactccttcccctcaccctcgtcctttcccacaagctgaacgctgccatgaccactgcccgcaacgacggctccatcccttggctccgtcccgacaccaagacccaggtcaccgttgagtatgcccacgacaacggtgccgtcaagcccctgcgtgtggacaccgttgtcgtctctgcccagcacagcgatgatgtgaccaccgaagagctccgcgctgtcatcaaggagaagatcatcaagaaggtcatccctgctgagctccttgacgaccgcaccgtctaccacattcagccctctggccgcttcgtcattggcggtccccagggtgatgctggtcgtactggccgtggtctcttaagcggggccacctatagtgag

SEQ ID NO: 20766 - DNA, 850 bp, Emericella nidulans
gctctggctagtatcagccatatcgcccatctcactgtcaccacgaagacggctgactcaagctgtgcttggagagctcattatgccgatggaaagctggtccctcccaaaccagggcagagcgcagctcctaaggccactgcggggcgtggagggacgcagatcacagttagtcaatgaccatatcaagatgaagacgtttctaacactatcaggtcgaagatctgttctataatgtgcctaccagacgcagagcatttcgttcagccagcgaagagtacgccaagatccttgatgtagtcggccgctacgctgtacattgctctggtgttgctttttcatgccgtaaacatggtgacgctggcgtcagcatctctacggcggttgctctcaacaccattgaccgaatccgccaaatccatggaagtgcagtggccaacgagctggttgagttcagcgtcaaggacgaaaagttaggcttcacgtcatctggactcgtcacaaatgcaaactaccatgtcaaacgaaccaccatcctactcttcataaatcaccgctcggttgagtccaccgctattaagcgagccgtcgagcagacatacgccagcttcctacctaaaggcggccacccttttgtctacatcgacctcgagattgagccacatcggctagacgtaaacgtgcatcccacaaaacgagaggtcaactttcttaacgaagaccaaatcatcgacaacatctgcgccgaaatcagatccagctctctcaagtggactccagccgacattcctacccagacacttctgcccttatcagaccccaacggtcaagcaagtcagacgctgagcag

SEQ ID NO: 20767 - DNA, 850 bp, Emericella nidulans
tcagcgacggggagattgatgtagtactaacaagcactagctccgctccctcatggaccgcaaggccaacatccgtaacatgtcggtcattgctcacggttcgtactcgacaattccttcaccggcgtgatttgtatgctgaatgtttcatagtcgatcacggaaagtccactctcagtgactctctcgtctcgcgtgccggtatcattgctggtgccaaggctggtgatgcccgtttcatggacacccgtcctgatgaacaggagcgtggtatcaccatcaagtctactgccatctctctttacgccaagttcgccgatgaggaggatatcaaggaaatcccccaggccgtcgacggtaacgagttcttgatcaacttgatcgattcccccggtcacgttgatttctcttctgaagtcactgctgccctccgtgtcactgacggtgcccttgtcgtcgtcgactgtgtctctggtgtttgcgtccagactgagactgtgctccgtcaggccctgactgagcgtatcaagcccgtccttatcatcaacaaggtcgaccgctctctgctcgaactccaggtcgagaaggaggacctctaccagtctttcctccgtaccgttgagtccgtcaacgtcatcatcgctacctatgaggacaaggccctcggcaacgtccaggtctaccccgaaaagggtaccgttgctttcggttccggtcttcacggctgggctttcaccgtccgccagttcgccgtcaagttcgccaagaagttcggtgttgaccgcaagaagatgcttgagcgtctgtggggtgacaactacttcaacccaagaccaagaagtggacaaga

SEQ ID NO: 20768 - DNA, 531 bp, Emericella nidulans; identical to SEQ ID NO: 9532
  unsure (1)..(531): unsure at all n locations

SEQ ID NO: 20769 - DNA, 850 bp, Emericella nidulans
ctgattgctcgtcccggtccttatatcaatgcagaggcatctgggggcggattcccgggatggctgcagagacttaatggcacaatccgttcatcggatcaaagttacttggatgctacggagaagtgagtttcaagccctttcgatcataggaatgtctgtactcatccacaatagctatgtatcgcacattggcggtctcattgccaagtaccagatcactaatggcggacctgtgattctctaccagcctgataacgagtatagcgggggctgctgtgggcaggaatttcccaatccggattacttccagtatgtgatcgaccaggcccgcacgggcggggatcgtggtgcctacgatcagcaacgatgcttggcctggtgggcataatgctcctgggactgggaagggcgaggtagatatttacggccatgataactatccgtaagttgtgtattgaatgtttctttgagtgaagctaatgatggctaggctcggatttgattgtgtatggatattcaccagaaagaattcaatcgctaacggacataggcgaatcctgatgtgtggcccgaagcaacctgccgaccgactaccgcgacttacaccttgaaattagtccctcaacgccgtatgcgctcgttgaggtaagttctccttctccaaaacagatggctgaaggctaactagctcagtatcaagtcggggcattcgacccatggggaggacccgggttcgaacaatgcgccgctcttacgggctacgagtttgaaagagtattccacaagaacactttcagttttggtgtggggatcctgtcgctgtatatggtaggtcatcagcaacata

SEQ ID NO: 20770 - DNA, 666 bp, Emericella nidulans
caaaatactaaaccacggacgcgaaagaaaaaaaagagaggaaaaattggatgttagataattaatgacagttttgcaatttataatttgattaattttattttacaattatggaaatttactaatcagaatataaatccttttaaaaatagctaacaaatattactaattaattataaggtggagcaaaatggagaaggcccagggctaagatgctcacatggcatagctcaagtaggcaacaagatttactcttttggtggtgagctcataccaaatcagcccatcgataaacacctttacgtctttgacctcgagacccggacttggtccattgctccagccaccggagacgttccacacctctcttgcttaggtgtccgtatggtgtcagtaggatcgaccctctatacctttggaggccgagacttttcacgccaatacaacggtttctactcgtttgacacgacaacaaacgagtggaaactgctaactccggtggaagaaggacccactcctcgtagtttccattcgatggcagcggatgaggaaaacgtttacgttttcggtggagtgggtgctatggatcgaatcaagacactagactcttacaatatcgttgacaagacgtggtttcattgggggatcctctagagtcgacctgca

SEQ ID NO: 20771 - DNA, 850 bp, Emericella nidulans
tttcatgtactaccgtcttaccaacttctaccagaatcatcgaagatacgtgaagagccttgatatggatcagctgaaaggaaaggctgtcaaaaacgctacgatcaatggtggctcatgcgatcccctcaagctcgatgaaaacggaaaggcctattatccctgcggactcatcgcgaactccatgttcaatgacacaataaataaccctatacttgttaacggccgcggtggtgatcctgagacgtacaatatgaccaagaagggtatcgcgtgggacagtgacaaagagctcatcaagaagactgagtacgaaccaggtgcggtagttccgccacccaattggcgagaacgctatcccaactacgacagtggaatcccaaatctgcatgaagatgaggatttcatggtttggatgagaacagccgcattgcccacatttagcaagctgtcccggagaaatgacaacgaatccatgcagtcgggacgatatcggttggacatcaaagatcgtgagttcatagtaatgggagtaataacatacgtagagtgctgacagcatgctagcttttcccgtcactgattatggcggtaccaaatctattctaatttccacccgaagtgttcttggaggccgaaatccattcatgggaattgcctacgttgttgtcggaggtgtctgcgttcttctcggagctatgttcacaattgcgcacctagtccgtccaaggtaaggtttttcctttccaaccgaccatgagctgacatcttcaggaaactgggagaccatgcatatttgacttggaacaacgaacaggatagctccgctatcgcgactgggcgagatgat

SEQ ID NO: 20772 - DNA, 850 bp, Emericella nidulans
ttctcctaccctcaatcgtgatgccgtctacacaaagcgctcccgaatcgcgcggctgccgaaatatctcactgtgcattttgttcgattcttctggaaacgcgatgcgcagaagaaagctaagattatgcgcaaagtgacattccctgcggagcttgacgtgctcgacttctgcactgacgagctcaagaaacagctcatccctgtccgagacaaagtacgagacattcgaaaggaggagcttgacattgagcgtgcgcggaagcgccagaagattgcccgtcaacgagaggaggatgcgaaaactgacaacgcttcaagcttggagcctatgcagaagaagaaggctactgaagagcgcaaggaagagggaacaaattcaggaaaggatgaggatgctgcaatgactgacgtcttcaagaccgatgctgagtatcaggcagaaaagcaggcgtctatcaccgcagccaagaaggagctggcccagcttattgacccgaagctgggcgcagacagcggaacaaacaagactggcctctatgagctgagaggcgtaatcacacaccaaggtgcaagtgccgacagcggccactatacttcgtacgtcaagaaacaaggcagcaatagtaaggaggagcgtgacgacaagtggtggtggttcaacgacgacaaggtgaccgaggtagatggctcgaaaattgagactctggctggaggtggtgagttcttctttacctacatttcctccctttgccaaacaacattaatggagacgaactgttgctaacgcaatatctcaggtgaatcgcactcggctcttattcttctttaccgtgccgttgatctgcca

SEQ ID NO: 20773 - DNA, 497 bp, Emericella nidulans
tgaatttgcatcaaataaggcggcaaagatatgcgcacagacgctgaatgcaacgatcgtgggtggaaagaaaggtggatggtatcatgatggtaggtaaaaaatttgctctttgagtttccgcgggctaccaagtgccactagatgtatggaacatgaaatatctcaaagggtttaagtgggccgatctcatggagactcaagagagagaaagatcggaacgggaagcgaagcgtcggattgaagatgcaagagcgaggaaagaggagaaggtgttcctgcaagggtacgagaaggggaagatgctggagggtattcagaagaagaacgaggagaagcggcgtaaaaagatggccgataaggatgggcatggagatcaaggaaaagagcaggcaatcaacgcgaggagactattcaagcaaaatgaggtcaagctcgggcgggataagacgtctgctgaccagactactgtggaggaggataccagccgggttttg

SEQ ID NO: 20774 - DNA, 767 bp, Emericella nidulans
atggagggcttcgacaccatggcgttgccctatctggcttccccgctgtcgttagggaatatgcagggcacagattatctcaatgctttgcaaggcatggaccttcctgatcaacgatcaaactttgactccgagacattcgttaggtgcgtggtccttttgttcttttgcaaagctttctctctgacgggtcttttcttctagcggagacgatttgacctttgcccatctatctccacagacactgaagcgattctcttccggttacgaggactcgttcccagagatggtcacttcctttgaccccccgcctccagctgagccgcctgccgactcctccattgaccataataacaagctattgagcttctcgatgccagtatatccgtggactctgcttgattattcttttcgacgcgcctcaatatcaatttcagctcagctgcacggcatgtttttccttgccgagtcaccgtggaccacgtctccgacagaaaatgctccgcctcagcaaggagcagaactgacctgctaccggcgaaatcttttccagatcactggttctgtaacccttcctcgggccctgcgctatatcatcaccgacaccggtgaccggatacctatcgtcgcgcacgaactgacagtgtcggctaccgagtctgttgagggcaattcggtcaagattatttttgtgcccctggaagactcccgctgcaaatgacgctggcaaggatacaagaaacagtagttatactgccgccaagtcg

SEQ ID NO: 20775 - DNA, 839 bp, Emericella nidulans
tttcccacgactcgcgtggctcgagaacattctcagctcgccaatcattgctcccattcgtttgctgaacaagcgcttcggacttgccggtggcttttttaatcagtttgatggtcaggtcgatttgctggatgatcttgatgaccattacacggcgcgtcagcacaagcgggagcgcagaattttcatccagcgcctacaggacttttccaaggctcactccatccgtgttacgattttaggtggtgatgtgcacttagcggctattggacgattttattcgaatcccaagctgggcgttcacagcgagaacgaccctcggtacatggtcaacatcgttagcagcgccattactaacaagccgcctccgaaagcagttgcgaatctgctcgcgcgacgaaacaagattcatcacctagacacagatactgatgagacgctgatggactttttcgacggtcagcctggcggagtagacaagagcgcctcctggaacaaagtcactatgccatctcgcaactacgcctgcattaccgaaattgaaacacccgctgctaacggtgatggggcgcagcaaaatggtgtgactctcccaatccccaaggacggccattcccctctgcatacgggcgagtcaacggctggctccgctcactcagcagcggacggtgtcagcagcgcgagcactctccatggtggcttgaacgtcgcaattcgcgtggagattaacccccagaacagagacggcgcagctcatggttatgggtttagcagtatgttgcctaataacacaagcatcttgcccatgacactgtaatgcgatagagctaaccttgacg

SEQ ID NO: 20776 - DNA, 671 bp, Emericella nidulans
actccaaggtgatcccaatgggtagtagacttggattttgaaaagaagccagaggtgcctggacaagcggggtgcaggtgccatgatcgagggcaatcattgccctggaagtgctatctttctattcaagaaggctgtgagctctggggcttctacgcggatccaacgagtactgcactgcggtgacttccgagcatctccccagcatgtgcagcatgctcttttacgccctgacgtggttgatccaaagacgggtaagagatggcagcaaaggattgatgcttgctatcttgataccacttatctaagtccgaagtacgcgttcccgagacagtcggacgtcattaacgcgtgtgcggagctttgtgtgcgcattgatcagggtcaatacgacagtcttggccacatgccttttcagaccgcgactcccaccacgaaatcgaagaacccgataagcaaattcatgtcggctgccactgctgccgtgaaaccttcgactcaacccgaaccgaaaggccggttacttgtcgtcattggaacctacagcatcggcaaagaacgaatatgcctcgcaatagcccgagctctcaagagcaaaatctacgcgacaccggctaagcaacgtgtctgcgcctgttagaagatccctatagtgagtcgtattatgcggc

SEQ ID NO: 20777 - DNA, 525 bp, Emericella nidulans
ctatcaaagatgaaacagctaggcagtcgttagcttctatgagccttatcgacacgcaagttccacaagaagaggcgtctaagccaggcgaaaatgaatggtcagaacgcgatgtttatccagatgcagcccgtgcgaagttggctgccccttcaagccaaccgcagcccgaaactcagaaagactcggaagcaagtgggacgcctaagaagtcgcgcaagcccaagaaaaaccggtcatatggagtgaaatacagtacttgccaaccaattatcatcacattcgattcacttgacctccctcgttcgggaaccatcagtatcctccgcgaatacctcttcgccgaagcaaagtcgaagcggggcatcgagattgacaaatctttggtcaaaggcatgaccgcaaaggagatcccacatcagccgaacttttctgattgcggtctttacctcctagcctacgctgaaaagttcgttcaagacccggattcattcgttcggaaacttctgcggaaagagatgcgca

SEQ ID NO: 20778 - DNA, 850 bp, Emericella nidulans
ctgcttttggaatcatgctgggtgagtgctcctcgatgacgttggggtggaattaagatgttgactgtattaggttatatctcgtctgtagcgttcatgaatgtccagagtgacacgctccaaggcctcaattggagattgatgtttggagtcaccgctatcccgtcagtatctctgcagagacccggtttcatctcttctctggtcctaacgttcacaggcccatgcttgtgtgtgcccaggtctacttctgccccgagtcgcccaggtggtatatgatccggaatcgttaccacgctgcatacgatgccctctgcaagctgcgtccatcgaagttccaagcggcgcgggacctctactacatccatgcagcactgcaagttgaggagaaactccgtgagggcaaacagctctggcgggagatgttcaccgtcccgagaaaccgacgtgcagcacagtcttccttcttcgtcatgttcatgcagcaggtacactcagaattccactgggcaactcgaaatgcagcggaattcggctaacaggcacagttctgcggcgtcaacgccatcatgtattactcctcgtccatgttcaccgacgcagggttcagccgagaaaacgcgctccttgtatccctgggctgtgggataacgaactggcttttcgccgtaccggctatctacacaatcgacacgttcgggcgacggaacctcctcctcaccactttccccttcatggctctcttcctcttctggacgggcttctcgttctacatcgagggcgagcagactcgcaccgccatggtggcaacggggatttacctgttcatgatcgtctactcgccagggga

SEQ ID NO: 20779 - DNA, 850 bp, Emericella nidulans
attcacaaactcgggatctgaaggtagcctgtgcaggagattcgcgcgccgttctcggccgtcgctcagaaaacggtaaatggacagcaacacccctttcagaagaccagacggtcggcaccccctctgaaatgaagcggctgcgcgaagaacacccagagagcccaacgttgtccgaaatggacgtatcctcggccaactcgagcctagtcggtctttcggagacgccttctacaaatggagtaaggaaacacaggaaaagatcaagcgccagttcttcggtcggacccctcatcccctcctaaagacccccccttatgtcaccgccgaacccatcatcacaacaaccaaggttgatcccagccaaggcgacttccttgtcctcgcaaccgacggtctttgggagatgctaagcaacgaagaagtcgtcggcttggttgggcagtggatcgaagagcaaaaagccgctgccggagccggtaccggcaataagagctgggtccggagtctcttcggctcccagccgacccagctacctgtagaagcaccgaaggaaaccagtaccgacggacaacgtcgaccgatacgtcagcagcagtacgacatctcaggtgccgctagtcgtttcgtcgttgaagataagaatgcggccactcatctcgtccgcaacgccatgggcggaaaggacaaggacatgctctgcgctttgctcactctcccaagcccttactctagacgatatcggtatgttttaccttcctttgcgctgagaaccccccagaagtactaatttacacctgctagtgacgatgtaaccgtcgaagtcattttctttggcgagagccccgac

SEQ ID NO: 20780 - DNA, 850 bp, Emericella nidulans
attgccagccgtgctgccctcgatgctctcgacaaggttgctgttgaccgcagtgacgacatggagaagttccgcaaagacctccactcgattgcccgcactaccctcagctctaaggtcctggcccaggaccgcgaccagttcgctgctcttgcctgcgatgccgttcttcgacttcggggctcaaccgacttgagccacatccagatcatcaaaaaagccggcggaaagctcagtgactcttacctcgacgagggtttcattcttgataagaagattggtgtcaaccaaccgaagcgcctggaaaatgctaagattcttgttgcaaacacagcgatggacacagataaggtgaagatcttcggagcgcgcgtgaaggtcgagtcaacagggaagttggcggaattggagaaggcagagcgtgagaagatgaaggccaaggttgagcggatcaaggcacacgggatcaactgctttgtcaaccgacaactcatttacaactggcccgaacagctgttcaccgaggctggtatcatgtcaatcgagcacgccgactttgacggcattgagcgactggcgctggttaccggtggagagatcgccttgactttcgaccaccccgaccaggtcaagctggggtcttgtgacctgatcgaggaggtcattattggcgaagataccctcatcaaattctccggcgtagctgctggccaagcttgcacaatcgttctccgtggcgccacagagcaacttcttgaccaagccgagcgttcgcttcacgatgctttggcagtactgtcttagaccgtcaaggatccccgagtgacttttgtggggggtgcccaagatg

SEQ ID NO: 20781 - DNA, 567 bp, Emericella nidulans
  unsure (1)..(567): unsure at all n locations
aatgcggcaagaagcagctgctgtaacgtgaatcattcttgcgggactgcacttggaaaagtcatgaaccggtctaagacttcatcttaggccctattcaaaatttcgtgttggcgcggcctctcctcacccagtcaggggaatttttcacaggggccaatgttgaaaatgcctcatatcccgttggcacatgtgctgagcgggtggcgtttgggactgctgtcgtaagttgctctttcgatatcctggaaccacccaaaattggacagtgcatggtttcacacactctgttctgctcccttggatagctaatcatcccgttcaataggtagccggccatcgccgattcaaggcgatcgctgtggccactgatattaaacctcctgcctcaccatgcggcatgtgtagacagttgtacgtcttccaagtttactgaaacaactcaaactttccccatctgctctgtcgcttcctggagtcaaactactgatctagatgttacctagtatgagtgaatttacaacgcggagaggtccagtgtacaagtatgacaagaaaattgnattc

SEQ ID NO: 20782 - DNA, 850 bp, Emericella nidulans
gcgtagcgacgaccctgtccatgctttacgcacattacctcagacagcaaagctccatcaattagcaatctgtcactgtgagaacggtcgaatgttttgcaagttggagatcaaccatgccttgatcgatgggacatctatggctatcattgagcgggacttgaagcgcgcctacagcaagaaactcagcagcgtgccccctcttgcatacgtcgactacgtgagcttcctccaagaagcaaagagggccgaatcggtcaatttctggaacgattacctccaagacgctcagccctgccagtttcccattcttaatgacggccgagaccaatctcaggctctggaatcgatcaatgttgagcttcccggcttgacaaaggagacactgagcgccttttccgaacgctggggattcaccgttgctaacgtcgttcaaaccgcgtgggccctggttctgcgcgcttttattggaacagactctgtctgctacgggtatctgacctcgggccgtgatgctcctcttgatgggatcgaggactccgtgggtccattcatcaacatgcttgtttgtcgcctgaagttcgatccccatgagccggctctggttgctctaaaaaacacccaagatgggttcctgaaggccatgtcccaccagtacgtatccttggcagaaatgcagcatgccttgggtgtggcggcgcagggattgttcaatacagcgatgtcgttccagaggtattcaccagaagaatcgatgcactctaaatttgaggacagtttatgattataaacatactgaggtaagtccacggggaatgctaacttttaaacgagtcgtactgccgcacga

SEQ ID NO: 20783 - DNA, 823 bp, Emericella nidulans
atgaacgaagatcctaggaagcttctcgagcaagcgacaatacttctccagaccggacaagccgatgctgcgctttcgatagcccagcaggcgctcgagattgcgacctccaattcccccgcgcagctttcaagtttgaatacgattgcggagatctacgttgagttaggcgagattgacctcgcaaggaaacattttctacaggcggtcgagcttgatccaactggttctatccctgagtctgagggaggcggcgctgaaaagttcctttggctggctcaattgagtgagcttggtgggaaggacagtgttcaatggtttgagaaaggggtgggggctctgaggggcgttattcaacaactcgaagcgaataacggccctacacaagcattggagttggaagagaagaaaaggaagatggcaaatgccctttgtggtgttgcagagatctatatgacagatctttcgtaggtcgcccctgttttttattgctttctcccgagcctcttatcaagctgacattttcagatgggaggaagacgcggaatctcgctgtgagaacctgatcacggaagccctcctagttcagcccagctctcccgaagtcctccagacgctggcgtctattcgaatctcgcaattaagagaggatgatgcgcgggcagcactttcaaggagtcttgagctgtggaaagatttgcccccagaagatccgcatgtccctgacttcccaacaagaatcagtctttctcgtctcctaatggaggtctccatgttgctggaggcgctagaagtactcgagcgcttgattttagaagacgac

SEQ ID NO: 20784 - DNA, 850 bp, Emericella nidulans
ttcagctgcgggaatgatcctgccttttggactgggagctggtgtctcttatggtttgtatcacgagtttcatgacgaagaaggtctaaagccaattgattttggcacttatttactcttcattggtattgccatggccattaccgtaggtttctcatccgctaatcccattacttcatctaatagcttaggcatttccggtcttgtgtcgtatccttaccgagttgaaactgctcgggacaaatgttggtgtcatcgtgctgtccgccggcgttggcaatgatgtcgttggctggattttgctcgcactctgcgtcgcccttgtcaatgcaggaagtggtctcacagcgctgtgggtgtttctcgtctgcgttggctacgtcacatttctggtcgtgattttccgcccattgttcctacgcttcctcaactatactggaagcttgcagaaaggtcccagccagtcagtggtcacgattaccattctaatcgccttggcgtcgtccttcttcacccaggtaataggagtacatgccatttttggtggtttccttatcggcttgctctgccctcacgaaggaggcttcgctattaagttgacggagaagatcgaagacctggtaacggcgcttttcctgccattgtactttacgctttccggcctgcaaacagacttggggctgctggacacgggaatcgtatggggctatgttgttgccgttatttcaatcgcgttccttgctaaggttgccggaggggcgcttgcgtcaagagcttgcggccttctctggcgggagagcttcgcgattgggacgttgatgagttgcaaaggcttagtagaacttattgt

SEQ ID NO: 20785 - DNA, 850 bp, Emericella nidulans
cgcaatgggcaagcttggcacggacgttgccaaagaagcagccgacatgattctcacggacgacgatttttcgaccatcctgcgagccatcgagcagggcaaaggaatcttctacaacatccagaactttatcacgttccaactcagtaccagtgttgccgctctgagtctagttttgctgagcaccatgttcggattcaagaacccgctaaacgcgatgcagattctgtggattagtatgactgccctataactgcgccggtgttcttttgctaatatttgactagatatcctcatggatggtccgccggcgcagtccctcggagtagagccagtagacccttcgatcatgggccggcctccccgacccaagagcgctcgagtgctcacgaaaccgcttatccaacgggtcctcacctcagcgtttatgattatgatgggcactttggccatatacatctatgagatgggcgatgatgacgacgtactgacgggaaagcgctcccgagtagtgacggcccacgacaccaccatgacattcacgtgcttcgtcctgttcgacatgttcaacgcattgacatgtcgcagcgaaggcaaatccgttcttcggggcgagatctctctttttgggaacaagatgttcaactatgccgtgctgggctcgcttgccggccaggcttgtgtcatttacctaccgttcttgcagcgggtgttccaaacggaaccactaaacgcagcgcacctgttcaagctggtgtgcattgccagcacggtgttttgggttgacgaggggaggaagtactaccaatcgctgcagcgacggcgggcagttggggtaggatatagcgtg

SEQ ID NO: 20786 - DNA, 750 bp, Emericella nidulans
atgtcggaacaagaaccgtcttctgccgacctcgccgcccgcgaggccgaagaaaagcaacgcaaagccgccgaagaagctgagcaggcgaccctcccctacaaatggacacagacgatccgcgacgtggacgtcacgatacccgtctctgcgaacctgaagggacgcgatctggacgtcgtgctcaaaaaggacagcattaaggttaaggtcaagggcgagaacggggaggtctttattgacgtactacaaccatctcccccaaatctccacgcagcgagggctaacaagggtttgataataaagggccaatttccgcaccccatcaaaccgtctgagtcttcctggacgcttgaaacaacgtctaaacctcccggcaaggaagtcagcatccaccttgacaaagtcaaccagatggagtggtgggcgcacgttgtcaccaccgcgccgaagatcgatgtcagcaagatcacgccggagaactcgagtctgagcgacctggacggtgagaccagggcgatggttgagaagatgatgtatgatcagcggcagaaggagatgggagcgccgaccagtgatgagcagaggaagatggatattttgaagaagttccagaaggaacatcctggtatgttgtatctatgcatctgcgcgttcttattgttctggagtgaaggtggaatgatgcgagcattgtgctaatgttactgagcttttgcagagatggacttttcgaatgcgaagattggt

SEQ ID NO: 20787 - DNA, 500 bp, Emericella nidulans
ggttttactagcttcaaaactaggctgaattaagaaagcggtgctttgaaggcctcaccgcttcagaggagtcatatccttgtaaggcccaccggactaacattcttaccggggtataccagagtatatagattataatattatactactttatatactagcatattcctcctattttttataactacttaatattagatattttgcagttttaaagtgcttgtatactagcttagttaatcagaaaatatagcttagtattagctatattaataaacttaatttccttgcagcctatctataagcttaaattaatatatttaagctagatataattagaaatagtttttaagtagcaggactagtactattaaatcctaaactagtacttttaaagcttagtatttaggcttatatacttataccccctagaagctatagcagctaggcaagtattttttacctatatatactagtaaatattaataagcttttaaagc

SEQ ID NO: 20788 - DNA, 850 bp, Emericella nidulans
agactaaactgacaatgatcaagtgaaggatcacggtttaggcaaaaacatctggaccgttccgttcagcgacatcagtgagactctcaaggtatatggaacctttcgcccctttctcttcccgctaggccgctatcccaagatattaacaccatctgccgctgcagctgttcttcatagaagaagtcctctacacaatctgcacagcattgatcaaactatccatgctcttcctctaccttcgactcttccccaatactcttctacgcaaagcagtcttcgtctcgctggccataacttccctttgggcaatcgggtcatttctcgcacaggttctctcctgcaagccaatatcctactactggaaccaatgggatggtgagcatgaaggcagatgcgccagccataactcgctcctccttgcgcactcgattatcaatatcttcctggatgttttggtgattgcccttccaatgccggttcttgtcaagcttcagatgagcattgagaagagggtgggcatgtgcctgatgtttgccgtggggcttgtgtacgtcgtctttctgatatgtgagagtcagggttgacctttggtgaacatatagtgttaccattataagcatcctccgccttgttgaaacagtcgggttcaacgacactaccaatccaactagtgcgtcaacactactcctccttgcacaatagcttttctgacagagttccttcagaggatttcgttcccgtcggcgtctggagtcttctggaaattgacgtcggaatcatgtgctcctgcatgccgggcattcgggcgttgacgaaacggctgtacagtacattattcaagactgat

SEQ ID NO: 20789 - DNA, 843 bp, Emericella nidulans
acccaagacgcaatcatacgcgcagtgatactcaccaagtcacaataatatctggagagacaggtagcggtaagagtacgcaatcagtacagtttgtcctcgatgatatgatcaagagaggactcggtggtgtggcgaatatcatctgtactcagccgcgcaggatctccgcgttaggtctggcagaccgagtcagtgatgaacgttgctcatccgtcggcgacgaggtcggttatatcattaggggcgagtcgaaatctaagcctgggactacgaaaatcacattcgtcacaactggtgtcttgcttcgtaggatccagtcaagcagcgactcaggaaatatcgcaagctctcttgccgacgtcacgcatgtggttgtcgacgaagtccatgaacgcagtctcgacacagacttcttactggccctcctaaaggatattctccgccatcggaaggatatcaaggtgattctgatgagtgcaacacttgacgcagacatctttacacaatatttcggcgggcggcaatcggtgggcttggtccatatccctgggcgaaccttcccggtggaagattactatctcgatgatgttattcgtgaaacggggttcgcaccagagctcgccgagcgaggcctcgaagaagacacagccccttcttcagcatctgacgagtcatttggcaaaatccttcggtccgttggcatggggattaactacgagttgatagcttccaccgttcggtatattgactccaagctaggagatcaacctgggggcatcttgatctttttaccaggaacgatggagatcgacaaatgcctgaacgccgtgaagaagatcc

SEQ ID NO: 20790 - DNA, 850 bp, Emericella nidulans
tcgccatgattcagcacaccaacgaactcgaaaaatccctgtctgccggtacaagctacctcgactgcttccgcggcgttaaccgccgccgcaccgagatcgtctgtggcatttgcatcgggcagacactcagcggccagaacataatgggctacttcgcatacttctgcgtgcaggctggcctacccgagatccattccttcaacctctcgcttggccagtaggcccttggtgtcctgggcaccatcggctcttggttcatgaggtccgagatgggccgccgcacaatcccacctcctgggcttgtcgttgctcttcactctcctcattatcaggggcagtctttcctttgcgccggactccaacaacgcccgcgaaatgggcaatcggggccatgctcatggttttcacattagtctacgatatcagcatcgggcccgtgacatattccctcgtctcggagctctcgtcgacgcgtctaaaggcgaaaaccatcaacctggcccgcgcagggtacaatatcagcaacatagtcgtcaacgtgctgacgaactaccagctcaacgactctgcttgggcctggggcgcgcgctcagcgtacttctgggccggcacctgccttctttgtctgtgctggtcagcgatgcgtgtcccggagccaaagggccgcacgtatgaagagctggatctcctgtttgagcagagagttccggcatggaggttcaagaagactgcggtagatccgtaccagggcttggctgagactgagggtcatgttagggaggatcagcaaaagagtagctgaaacattcagaatctgtattcctatctcttaaatatcaaacacgcc

SEQ ID NO: 20791 - DNA, 850 bp, Emericella nidulans
cgactccaagaggaggaagaggcgaggaagaaggaggaagctcgccaaaggaggaaggaaaaggagagggaaaagaaggaacaattgaggagggaaggaaagctgctcaccaaagctcagaaggaagccagggagcgtaatgagctccgcatgaagcagatgcttgctgcaggtgttggtacggttgctgggttgcagaaggatcaacctgagaagaagaaacccgtttacgagaacaaaaagaagaagggtccgaagaagcaggatgaagaccttgaggctgctgctgctcgtgctaaggctcagcgcgaggcagaagacgagcgacgacgaaaagaggaggaggagcggaaagcaaaggctgaagctgaagctgccgctgccgctgccgctgctggtgatgaggagagcgagctcgacgattgggagaaggctgctgatgccgaggaggtgaaggatagctgggacgcacctagtgatgatgagccagagaagcccgccgctacaaacgatgaagagataactctaccagagcgacctgcagctaagcccgccaaagaggaagcaaatgaggagtcttcagaagaggattcggacgaatctgactctgatgaagaagaaaaatccgccgcgcaaaaagcaatcgcccaacggaaggcggaggctgctgagcggaggaagaagcaacacgaggaagctttagctgctcgttcaaaggacaacttgcgatctcctatttgttgtattcttgggcacgtcgacactggtaagactaagctgctagataagattcgacagacaaacgtccaagaaggtgaagcaggtggtatacccaacagattggtgcaca

SEQ ID NO: 20792 - DNA, 663 bp, Emericella nidulans
tcagtctcgctagatattgtgttacctgtcacattacgggatgcaatccggggttaatgagatctatgttgcggactgctactggccattcgcaaggtctgttagcggccattgttgttgctgtttcacactcttgggatagcttctatcaagccacggaggaagtcattgagcttctatttcgcctcggctgggagtgccaccacgctgcaccttgtagcatggttcccgcagcaaactacgcggacgtggatggagcgaacgggccgtcctacatgctgagcttacggggcctcaagagacaagagactgaggctacgatcgaccatgttaacgcaagtctaccggaggataaacggctttacctggcactgatcaacgcgtacgatcaatttgtggtagctggaccggtcgcctctctgcttcgattggaaagccatttagtcgaaattactagcaaagatattgaccaaagccgaattcctttccgagatcgaaaaccatatatacagcatagcttccttccggtcagcactccgttccatacgccgtaccttacccgagctgcagcacgagtaaagaaacagtttgctgcccgtcccatccctacacgccggctggcgattcctgtttatcatactcaaactggcctagacgtgatca

SEQ ID NO: 20793 - DNA, 690 bp, Emericella nidulans
ctcttttgcaccacgattattatctacgagggcctacgatccgctccgaatacttttctgcggttccgatcattttagtatagcttctttgaaagctctccatgatgaacacaagaaacggcccgatcggatcgcttctatcgatgtcgtctgtaggcccgggaaaagggtgggaagaggcatgaaacaaatacgagaaggtggttcatggtggagaacgctatgtgagacggcttgttgctgatacaatgcttcgacagttccaatcaaattcgtcgcatcagacttaggtctccctatccacgaagttgacaccttcacgggatggcaggtatctagaacctggtattcaccaacatagtcacacacaaactcatgatgctagcccccggtgtacccccatggaccgatcaatctcatagtggccgtatcgtttggtctttttgtgcccccgcgaatactcaacggtgctagatacggtggattgaatgtgcacccatcgttacttcctgagtaagtacggacatggtggagctcaaccttaccggtccatgccaactgagataattacagcttccgtgggcctgcgccgctacaccatactctcctagctgggagaaccacgactggcgttagcctccagacattgcacctccagcatttcgatcacggaacaatcctcgcccaaac

SEQ ID NO: 20794 - DNA, 850 bp, Emericella nidulans
aagtctaatctctccacaaggcatgataacatgcaaaataagctccgtgagcttcaggctcaagtcgatgctatggtatcagaaaagatccaactcgagcgcgaagccgccgacgttcagaagcttctgcaggcgaagatatccgaagatgccgaagctggagagagccgcaaacttctcgagcagcagattcaggacctgaagaatcaattattccaggcacaggctgatctcagtagggagcgccagtcaagggatgacgtacagatgctcgcggagcataagctcgcagagctaaaagacaagtttgaatcattgaacgaggctaaaatcaccatcgagaaggagatgtatatccaacaagatagtcttcgacgggctacggaggctcgggtcgctgctgagcagtcaaggaaagagcttcagcaagaattgatcaagcttcgggatcgatttactgcggctgaagatgctcggctgagagctgaggccgagatggagcaggcccttgtgaaacagaccactcagcgtctggaaagtatcaggaaagagcttgacaatacacagcaccgtttagaggaggtcgaagcggagaggtcgcgcctagcagcacgtgagcaacaactcatgaacgccattgctgagtctgaaagcttccgtatccgtcatgatcagcataaggaacgcttggaaagggagctagtcactctcaaaggccggttgacagcatccgaaaatgacaatcgtgctctcttgaccaaaatccagcagaaaaaccttgacattgctagatctaattcaaaagcaagtgaaagccaacgcttacgtgtcacaaccctacaggctgtat

SEQ ID NO: 20795 - DNA, 352 bp, Emericella nidulans
cttcgcgggattggcgctgggcgcagacatcgttctcgatgccaccggtgctgaaccttgtttgaacagcggcattcacgcattagcacctggaggaacgtttgtgcaggtgggcttggggcgcccaaatccttccctgccggtaggccagatctgcgacaaagaaattgtcttcaagggcagtttccgatatggcccaggagattataagaccgcgatcggtcttgtgagctcccaccgcatcaggcttgaaggtctcgtcacccacgaattttctttctcccaggcggaggaggctttccataatgtcgccagtcgcgcaggagtcaaaagcgtcatttacggaccaggg

SEQ ID NO: 20796 - DNA, 850 bp, Emericella nidulans
cgcctctggtcgaggaaggggaggaagcaagctttggcgcatacaaggtgcgttacccgactagccaacagatctgacggtacacagtcaagctgatatgctcgcgcaaaagaggatctttacattcgccggcaggacagaacttatccttcaggccgttgctatccttgctgcatgcgcctctggagcaggaattgcgcttcaaaacctcatctttggccagtttgtcaccgtcattaccgatttcaccaacggaatctcaacgccggcagactttcgtgacaatgccgtctagttggcgtatgtatcctctctgagtgctggttacagagctgacgaggttcagcctctactttgtatacctgggcatcgcgcggctcgtcctctcctacacctacaacaccctcctaacctacgcggcctaccgcatcgtccgcaatatccgacacgcctatctcaaagcggcgctgagccaagaagtggcatactacgatttcggtagcgggggctccatcgccgcgcaggcaacttcgaacggcaaactgatccaggccggcgcctcggataagatcggtcttctcttccagggcctcgcagcattcgtgacggctttcattatcgcgtttgtggtgcagtggaaactcactctgatctgcatctgcatccccgtagccacgatcggcacgacgggggtggtagctgcggtcgaggctgggcacgagacgaggatcttgcagatacatgcgcaggcgaattcgtttgccgagggtattctggcgggtgtgaaggctgttcatgcttttgggatgcgggatagtctggtcaggaagtttgatgaatatctggtgga

SEQ ID NO: 20797 - DNA, 599 bp, Emericella nidulans
atggtatgtctgcgtcttacctgcccctcccccacatccatcgctaaaaatactaggtcggagctggcatcagtacagccgccggtatccctgattttcgatcaccagatactggcatttacgcgaatctcgttcatttggatctgcccaatcctgaagcagtgtttgacattagcttcttcaggcagaatcccaagccgttctacgctctggcgcgggactagctccaggacagtacagacctactctcgcgcattcattcgtaaagctactttatgacaagggaaagcttttgaagcacttcacacagaatatcgattgtttggagcggttggcaggcgtgccgggcgatatgatcattgaagctcatggaagcttcgcgactcagcgctgcattgagtgcaaaacagcgtatccggacgacctgatgaaagaagcaatcgcaaagggggaggtgccgaattgtgccgagtgtcaagggctagtgaagccagatatcgttttcttcggggaagctttgccctcggccttctttgacaaccgaacactgtccgagacggcggacctgtgcattgtcatgggaacaagtctgtctgtgc

SEQ ID NO: 20798 - DNA, 525 bp, Emericella nidulans
gaatatctctggtttcatggttggcgcagatgcagaaaagggcggtattgcgaagaacggcgcgaagctcgtgaccgccgttgcttgtgccgatgtaccgaagtttaccgtggtgtttggatctagtgctggtgctggaaactatggcatgtggtatgtactttttggctttccccttctccttgactcctactcagaggccaaatatgtacaagcaactaaccatctgccagcggccgcgcatactccccccgcttcctcttcatgtggcccaacgctaaaatcggcgtcatgggatccgagcagctttcctccgtgatggaagctgtagggagaaccgcagaccctgagcttaaggccaggattgaccgcgaatccgaggcaaccttctcctctgcgcgactctgggatgacggtatcatccctcctgcgcacacccggcatgtgctgggattgagtctggcggctgcattgggaggtaagagcgataaagatgtacagacgaaattcggtgttttccggatg

SEQ ID NO: 20799 - DNA, 850 bp, Emericella nidulans
tctggatgccttgcaggacctttcatctcatgctaagagagaagcggctttgcgaacattgggccagatagccagcaactcaggctacgttatcgacccgtacaccgaccaccctcatctgctggcggtgcttattggtatcatcaagacggagcaggcaggatcgcttcgcaaggaaacgataaaagttctaggaattctaggtgcactggacccttataaataccagcaaataagcgaaaccgcaccagacgtccaccatatcaacgaagtacaagtggtgtcagacgttagtcttattatgcaaggccttgccccttccaatgaagagtactacccaactgttgttatccatactctcatgcagaacatacttcgcgagaactcccttgcgcaatatcattctgctgtcatcgacgcgattgttacgatctttaagacccttggcttgaagtgtgtccccttccttggccagatcattcctggtttcatttctgtcattcgaggttcaccctcaagccggctcgaatcttatttcaaccaaatggcaatccttgtcaatattgtgcggcagcacatcagagcctttcttcctgaaataattgaggtcattcgggaattctgggacacgtcatatcaggttcaagcgaccattctctcgcttgtggacgcgatagccaagtcccttgagggtgaatttaagaagtaccttgcaaatctcattcctccaatgctggacacactggaaaaggataatactccgcgccgccagccttccgagagcattttccatagcttcttagtattcggctaagatggcaaagagtacatgcatctgattgtgccctcc

SEQ ID NO: 20800 - DNA, 500 bp, Emericella nidulans
tctctatcgtccccgagtcgctgggtgacctcccgcgccttcttttcagcgggccaagaactccgcatgatctcctacgcgaagttgagctcggtgcagacctcctcacgatcccgtttctggccgattcgtcggatgcagggatggctttcaccttctcctttccggctccatcagataccgcatcagcatcaaatccatccaccgaaccccttcctctcgctgatgatctttggtcgcgatcaaatactacaaatactggcccactaagtgaatcatgcgcttgctatgcttgtcaaagccatcatcgcgcctacattcaccacctcctctccgctaaggaaatgctcgcatggacccttctccaaattcacaactattatactatggacctcttcttcgctaacgtccgtaagagcattgagcgcggtacattcgaggcagatgtccgcacattccagcaaacatacgtggctgagtttcctgagatcacgggtcaa

SEQ ID NO: 20801 - DNA, 437 bp, Emericella nidulans
gatctgctccgaacgtttttacgcccagactataccagacggagccatcgggtatctactctgcttggtacgtcatattttattggttgggtggaattttgggttgagttgtaactgagacgtggtttatacaggaaagcgaatgctatcggccgttccagcaagaccgtgcgagaattccttgagcgcaaccaccaggatgatatggaccgagagcagacgattcagcttacgatcaagtcgctgctggaggtggtgcaaacaggcgccaagaatattgaagttgccataatgtcaccgggcaagacgattgagatgcttcccgatgaccagatcgaatcttacgtcaagagcatagagacggagaaacaggaagaagcagcaaagaagaagactcgggccggcactactacggcggccatcctaacacgatccgg

SEQ ID NO: 20802 - DNA, 850 bp, Emericella nidulans
aagcatgatatcgaccggcagttcgttggtaggtatctttggctgcgtatcctcttgacagactactgaccagtgctacgcactagctcgggcaatcctaggattgttcaatgcatcctcacttctttactttgccagcagtttgcgccgcacggctgggagagccactgctatctggtacctgctgtttcaagccagtcagttccacgttctatactatgcatcgcggaccttatccaatatgttcgcgtttggtatgaccaccttcgctctggcatctctcctcccagaacctgtgagctcagccacgtatcgcaagcgaagcagggttgctctgtacctgatcacaatcgcgggtattgtcttccgcgctgagctggcgctgttcctggcaacgcataccctcttccttcttgcttccggacgcatcagcattcagcgtgagatcattcctgccggcgctctgggccttgtccttggtcaagccatcacactcccaatagactcattcttctggcagcaatatcccctctggccagaattcacagcatttaagttcaatgtagtcgccggccaggcttccgcttggggcacgcatccatggcactactacttcaccaacgcgctgccccgtctcctcctcaaccccctaacctacctcatcggtatccctatatccctgctgcaacctgcaacccgtggcatcgccacatccatcctcatcccatcactcgcctatatcgccatttattccatcctaccacacaaggaatggcgattcattgtctactcaatccatctttacagctgccgccgcgctaggacgtcatatatctggacgcacaggagt

SEQ ID NO: 20803 - DNA, 850 bp, Emericella nidulans
gctatcagaagaggatatagacaatatcattacctttatctcttcatcacaacgtacgcgccgactatcttataaacgagttattgaagaactaaatcttccctgcggagaaactgcacttgctcgagcacttaaaaaacgaggctattcccgatgcaaagctcttcgaaagccacctttatcggacgatataaagcatgtatgtcttgcctgggcccttgagcatgtgaattggacaattaagcaatggaattgaatactttggtctgatgagacttgggttactccaggcttctataccagaatctaggttaccagaagagcaggagaagagctagatgagacctgtatttattcatctacccctaaaaagcatggttggatgttttggggatcattttatggagatactaaaggcccttgccttttctaggagaaagaatagggctctatcaatgcagagagttactgtgagcgaattatgcctattattgacagctatctttgcctgaactgacagcaaggtaactatctttgtcttatgcataatagagcacctggccatgccagtaaagatactatagcagagcttcatgagcatagtatctatcctattagttggcctgccttctcccctgatctgaaccctattaagatggtatagaactagatgaaagactggatccaagagagatatccagatgaccgccagctatcttatgatgccctacgagaaattgtacgagcttcatgggatgcagtccctacagactttttggaaggccttattgggtctatgcaagccagatgtcaggcagtaatcgaggcagagggtggccatacaaaatat

SEQ ID NO: 20804 - DNA, 850 bp, Emericella nidulans
tggatcgatgacgagaagggagaagaccgaattcatcctagaacaagtcgcactctgcattgagcgtggcgattggacgcaagcgacagttcttagccggaagatcaataaacgatacttcgcccgaaagcccaagaagagcgctgaggagattgagaagctcaagaaggaggctgaggaaagagaaaagacccgcgcaccggacgaggctcctatggaagtggacgacgacgtcacggacctgaagcttcgttattacgaacagcagatcattcttgccaaccatgactacaaatacctggatgtttgcaaacactacagagaggtgcttgatacggattcggtacaagagaatcccgaacagctacgagcggtaagcttgctggccgccacaaagaagtccaacatgtcagaaactaattcatagtcaggtccttgcgcacattgtatactacatcgtactatcgccttacgacaacgagcaatctgatttactgcaccgcattcaacaggacactagactttccgctgttcctgttgaaatcttgtctggtgaagctctggtctgtcaccatacttatgcgctggcccattgtttcggagcaatttggtcctaatctgtgcaactctgatgttttcagccctaaacggagtcagtctgccgaaaaccgagccatacagaagatggcaagaccttggcaagcgtgtcattgaacataatgtgcgagtggtggcaaaatacaacactcgcattcagatgggccggttgactcagtgacagaaccttaccgagaaagaaacagagaagtacatcagtgacccgggcacgtcgtagacataaacgcaaggc

SEQ ID NO: 20805 - DNA, 575 bp, Emericella nidulans
acaatgtcatccatgacgcagaatcgccttttccgcgaatataaaacactatcaacaaacccgccggatgggattaccgcggggcctgtctctgaagatgacatgtttcactgggaagccttgatacagggacccgaaggcaccccttacgaaggtggggtttttgctgctgagctcaaatgccctaaggattaccctttaagtccaccgacaatgaagtttgtcggcgggggaaggtggcatgcgaatggtgagttgtgacctctatgtttcttttcgtttgaacgaaaggggagatttatcggctaatgttccgttgggcagtctatcccgatggcacagtgtgcatctgcattctacacccacccggcgatgatccgaaccactatgaacatgcctcggagcgctggtcgcctatacaaagagtggagaagattctcatcccagtaatgagtatgctagcggagccgaatgatgaaagcccagcaaatgtggaggctgcgaagatgtggagggaacggagggctgcgtatgagcggaaggtcagagaggaggttagaaagggactggggtcg

SEQ ID NO: 20806 - DNA, 850 bp, Emericella nidulans
cactaattactcgattgcaatgaaacaataccttcgtctaggtaattgtgaacaatggaggaacttcgaagatatgtacaagagaaaatcattatttacaagtcctgacgtcagagccacacggtcccgatcgatcgattgcagaataggtacataatcaatttccgcgcccaatttctgccagctagcacagccaaggaacaaataaacttcgcaagcttggaacatgcggcagaagcgcaaactctccaatggcgctgatgagcgataccaccccaatgcccaacaaacggcagatttcggcatcgtgctgcgcgacttttatccgccagaaatgagcaacgcgcggtgcgaagcttacaacagcggaatcctggagcggccgattgaatcatggcaaaaagcatacacagagacgagcgctcagcagaatgcgatgaccgcgaacgcggcagtggtgcattggttcaaatccgatctacgtctacacgacaatcgcgctctgcagatggcgtatagggttgcgcgggagcacaagatccccctcattgggctttatattctctccccagaggacttgactgctcacctgtcaagtccggcgcgcgtggatttaacactgcgcactttggagcagctcaaacgcgatttgggggaactcgatgtccctttatatatggagacacaggcatgtcgaaaggacattccgcgccgcatcatcaatctctgtcaagaatggggcgcgaaccacctcttcgccaatctcgaatacgaagttgatgagctccggcgcgaggcaaagcttattcgactctgcgcggagaacgggatccgattcgagactgcgcac

SEQ ID NO: 20807 - DNA, 382 bp, Emericella nidulans
atgcttcatccagccagacgggacggagaggcatctcctctgccagccagagagttggaaaattgagctgccaaatggcgaagtccaagcccaacggcagcaggtcccgctgatcctcgcatgggctctgtccattcacaaggcccaaggccagacactacaacgagtcaaggtcgatcttgggaaggtctttgagaagggacaagcctacgtggctctgagtcgagccacctcgaaagccggtcttcaggtgctccgattcgatccgcgcaaggtcatggtccatccgaaggtcattgaattctaccgaaatctggttcatgccagcgacttgatcaagtcgaaacagccgcctaagccgcagcgcacaatatcgaatgga

SEQ ID NO: 20808 - DNA, 850 bp, Emericella nidulans
cccttgatggaggcggcgtttgcgggcaatattccattcatgcagcgactgttggagaaggatcctgaaggactcaacatggttgatggtgttggagcaacagcattgtggtatgctgtctatgggaaaaacgtcccggcgactgcgctgctgcttgaacagccatccgtcgatgtcaaccaccaactgacagaaggcgaaggccgagatgcctaccaagtcacaccgttcatgcacgctctttggcacggctgggggagatacgatatcatctctttgtttatcaagcacccagcaactgacctgacatttctggactcgactggccagactgccattcacctggctatacaggaagagcgagaggacatagtacgcgatttgctcgagtgcggtcgcctcgatgtcaatgctgcctggggtaatggctggactcccttacacagcgccgccgcaggctataaggacaccaaattcgtcaagctcctactcgcacaggatggcatcgatgtcaaccgggccacagtcaccggggaaactcccctgatgacaaccaaatcccctcattgcatggaagtcctgcttgctcatcctggaatcgagattgaccgtgtagatgactttggttggactgcgctgggctataccgcatatcgcggtggccgcggggcactggaatgtgcacatgtccttctacagcatggagcgcgccctgatctcgtggacctggacggctacaccccgagagatagagcagagcaggccaagcactgggagatggtgaagctattggaggatgccctcggccagaagtgaactttggcgcatttccataactatcgagtctaaa

SEQ ID NO: 20809 - DNA, 850 bp, Emericella nidulans
agttccacaagactcgcgcggtgacgtgaaaaacctactcttgttgaataccggcttttttcaagccgtgggggttatttcctttggtatgtccagttgccacccctgcatatttcaaaacctggtactaattatgcttagcatttgtttgccgtacgtggtagtccccggatagcactcagacaactgacttttcaacaagaccacaatagcctcttgatctatggttcactgaaaaagccaacgttggatcggtttgccaaggtcactcactactcgaccgggatatcgctcttaatgtgcctactcatgggtgtctctggcttcctattcttcgggtccgagacacaaggcaacgtgcttaataatttcccgtccgataatattctgataaatatcgcgcgactgtaagagcaagatctacctaaaaataagcccaatattagtgagctgacactcgcatagttgctttggcctcaacatgctcactacgttaccgcttgaagccttcgtgtgtcgtgaggtcatgacgacttactatttccctgacgagcctttcaacatgaatcggcacttaatcttcacatctgccctggtactaacatccgtagcaatggcactgctaacgtgcgacctgggcgccgtgttcgaactgattggggcgacaagcgcagcctcgttggcctatatctttcctccgctgtgctatatcaagctgagtaatggctcgcaaaaagcgaaaatccccgcgtacgcgtgcatcgtcttcggagtcaccgtcatgggcgtcagccttctacaggcagttgggaagatgataaagagtaggtgtccctcctatccataaaat

SEQ ID NO: 20810 - DNA, 443 bp, Emericella nidulans
gcaaaggtaccgattccggaaaaaggccctcgaaagcgagtgcaagtcgtctttatgccggggccagatttggtccattccatgtctacgcccggagtatgaagtgagaaggatctcgatcatattcttggacagtacggggtatgttatgttgtatctatcttaaacttcgcgcaagctaactggtctagactttcatcgtcgagcgaagcgggacagatattgacaaggcgctcgcggcattgcagccatggaaaaagaatatccatgttattcaacaacttattcaaaatgacgttagcagcactaagattcgcttattcctcaggcgagatatgagcgtacgctacttgatccctgacccggtgattgagtacatctatgagaataacctctacatggacgacggtacgacacaaccgacggccgacaagggcaagaca

SEQ ID NO: 20811 - DNA, 850 bp, Emericella nidulans
gggattgtggagggtgagtctagcttgccatgatgatcagctgtctctaatcgtatacggcctgctaattcagtttctgcgcagacaagatgctttcatggagacctacctcgcctcgcaacgagggaacatcttctccgacgttgcagtcctaatatacgtcttcgacattgaatcgcgtgaggtcgaacgcgatctcgacacatacatggctattattgccgcattaagagaatacagcccccacgcctacgttttctgccttgtccacaagctcgacctcattcaagccgagcaccgccaacgcatctatgaggagcgctccgcgctcatccgcagccgcacagaacacttcacgatcgacaccttcgggagcagcatctgggaccagtccttgtacaaggcctgggcgggcatagtccacaaactcattccgaatcttagcgttattgaacgattcctgcacgcttttgccaagcgtattgatgctgaggaagtcatcctctttgagcgctctactttcctaacagtgacatctgtctcctctgaaatcggcgatttaaatccgatctatgaccgacatgaacgattatcaaatatcatgaaggcgttcaagcactgcgctgctcggaatacacacacgactccggcttcggcaggcttcgttgtcatgcataccaaaacacctcagtttaatgtcttcctcggccgcttcactgacaatacgtacatctttatcgttgtgccaccaggcgaggcagcatacaattgtgccgtgctgaacaccatgctcgcaagagagggcttttctaaagccgcaggtgctgtccacggtgatggcttcccgctt

SEQ ID NO: 20812 - DNA, 850 bp, Emericella nidulans
attgtttaaactcacgcgcagctgcgcggggatcaccgaagtatgtacttctgcgatcaggtcaattggttgggacagctctgatgatctacgtgcgcgaggatattctcagagacataaagaacgtggaaggaagtgtaaagaaggtgagcggaacttgctatcctcttataaaactcactaattcggtccctgcagaccgggctttctggaatagctggtaacaaaggaggctgtgccatccgcttcgaatattcgaataccaggctttgcttcgtaaccgctcatttagctgctggctttgcgaattatgatgaacggaacaatgactacgaaactatttgccagggacttcgctttcagaggaatagatttattgaggatcatgacgctgttatatggctgggagacttcaattataggattggccttcccaatcagacggttagggacttggtaagacagagcaattatcagaagctctatgacaatgatcaagtaagctatgtcttcccatggcatccgtacttcactgaccttggttagctgaatctgcaaatgctcgcgggcagggctttccaattctacagtgagggtcttgtcacgttccccccaacttacaaatatgacgtgggcagtgacacctatgacacttcgtaagtaactcaaccaaatgccatatttgatgctgatttccagtgataaatcacgtattcccgcatggtgcgacaggattctgtggaaaggaccagatctgcgacaaagcggctatggtgcttcagacatgcgactttccgaccatcgtcctgtatgggcaaccttcacatgcacaatctggcggccgttacta

SEQ ID NO: 20813 - DNA, 711 bp, Emericella nidulans
acgacgcagacaccaaaacgcctaccaccgccgccgccactctctctaccgtttctccagacattgcgcacgagacgcgttatcctagcctcgcaatctcctcgccgccgccaaataattgcttatctaggcctccctcatgtcgaagtcgtcccatccaactttgccgaggacctttcgcacgaactgcaacctattgaatatgtgctagctacagcaacgcaaaaggcacaagatgtttacgcgcgtgagatcgtcaacgaggaaaagggcgagcccgcgctcattctcgcggctgacacaattgtcgtggagccgcagtctggcgcaattttggagaagccacgctcggaggcccatcatattgccatgctgaaaagtctgagagatgcgaggactcataaagttttcacagctattgtggcgatggcgccgctgaacagtgcgagggatccgggttatgcgattgagacagcgattgaggagacggaggtgaggtttgatggtgggttgacggatgagctgatattggcgtatgtgaggacgagagagggtgctgataaggctgggggctatgggatgcaggggttggggagcatattggtcgaggggattcaggggagtgcggataatgttattggattgccgttgaagacgacattgagagttatagagaaggttctgatcaaggcagacgatgatgagcggttg

SEQ ID NO: 20814 - DNA, 643 bp, Emericella nidulans
acttcctccagccggggggaggagcaaaaaaaaaagatgggtcccttcagacatgcccaaaaacacgtattgggcaaacagtttctatatgggattgtttgcgatccaccctatagtgttcgtgagggtctctcggtacttggttccagggatactagccgtcgtaaggaggagctcattatcgacggggtcctgcgcatcggtatgtcctcttctaaggtctagcccacgccttgcctgctaatctttcccagtcgacccggatacatcccgccgaagaaaccctacggcttcgaagccatgatgaacgatatcctcatttttgcagcacgtactctcgtcaccggtgggcgtttatgcatgtggatgccaacatccggcgaggaagaagcagaactctctgtcccgatgcaggaaaatctcgaagttcttagcatttccgtgcagccgttcaacaactgtaagtatcttgatgctctgaacaatccatcactttaatgagcacagtttaatgctttcgatttcttcgttagggtcacgacgtcttatcacataccggagactccctgagggcgtattgtccgacgtatcatcggggcggcggaaggatgatgccgctggtgtgtcggccgatgatctgaat

SEQ ID NO: 20815 - DNA, 588 bp, Emericella nidulans; identical to SEQ ID NO: 14167
  unsure (1)..(588): unsure at all n locations

SEQ ID NO: 20816 - DNA, 844 bp, Emericella nidulans
ctaccgcgtgcgccagctgctcacaaaacccgacctgtttgttgttgtgcaggatctcttcctcacagagacggcagcaatcgcagacgtcgtcctcccaggctcccaatgggccgagaagaccggctgcttcaccaacgtcgatcgcacgatgcacctgagccgcaaggccgtcgacccgccaggagaagctaaagctgatctcgacatattcctcgattttgcgcaaaggatggactttaggaatagggacgggggtccgttgatcccgttcacgaatcccgaggaggtgtttgaagaatggaagaagatgtcctacgggcgcccccttgactgcagcgacctcacgtatgagaagttgtccggcgggtctgggatccagtggccatgtacaaaggagtacccgtttggtaaggagcggctcttcgacgatggcaagttcttcacggacaccgactactgtgagagctacggccacgacctggagaccgggacgccgctgacgaaggggcaatacgaggcgatgaatcccgccggacgcgcgatattaaaggcagcgcattatcggaagccgtgggaatcgccagacgaggaatttccattttacctctcgacaggccggaacgtattccatttccacacccggacgaagacaggtcgcagcaagaggctgcagaatgctgacaaggatgcctgccttgtcatctgtcaggcagatgcagatgagctcggcgtcacgaatggggagatggtgattgtcagatcaaggaggggccaggttgagctgcctgtaaagaccgaggggatcctaagctgggtctccctatagtagtgtatattgata

SEQ ID NO: 20817 - DNA, 850 bp, Emericella nidulans
ctacgggcgtagcatggcgacgcttatgaatcccgtcagggacccaaataccctgtccaactataacaactggctttgcactcatactactgccaacttcgagatcttttttgaggaaaagaaactcgtagggaacgtcgtccacaagctcagatcaataacgaacgctgagacggacgagatcatcctcgactctcatcatgtggacatacgcaatgtccaggtggcgggcttgcctgtgaaagcgtgggaacttctccctcccttgggcccttatggcacggctctgaaaatcaaacttgaaaatcccgtgggactcaacgagataatcgatgttgatgtgtgttgagcgagtcgtgtaggctgccttttgagctaatatactaaccactattatagatcgctgtgcagaccactaaggagtgcactgcactccaatggctgactccagctcaaacgtcgaacaagaaacatccatacatgtgttagtattaccttctgagctttgtggttaatgtgttgtggtttcacgactaatcatcgctgggatccagtttctcaatgccaggctatccatgcacggtcaatcttcccgtgtcaagacacgcccgatgtcaagtgcactttcgatttcaacattacttcccctctgcctgtaattgccagcgggctacctgttcgcagtacctcgactgtcccccagtctggcgtaaaaaccctccaccgatttcaccaaaaagtgcccattccgagctacttgtttgctctcgctagcgggtgagagcaatgactcctacccgtcactttacagttcgtgtgtaaataagggttagctacaaacgaagcctgg

SEQ ID NO: 20818 - DNA, 850 bp, Emericella nidulans
tatgcggcaggtgacgcggatgctgacatacccgctcacaatcggaagtgtattgcatgaactgagcccttatagcatcagaaaaaatcagagacttacaaccgagggtcttaagagtgtgagcggtaagctttctggtactaatttttgacaccgctaatcactgttagcccttcgatactccctacatccgcctaggaccggggagggcgtcgatatccagggcctgcgagtaaaagcacctcctgtgcggatctttatcctaggagcgcgcgctgaatcatctctacctcgcgatgtgtggcttcaactcagccatattttcccacggtctctcatccatctcatcttcatcggccctgagagcatggcgaaccgcgacgaggagtttcccctgcccgagcgcacgcctgagaaccctttcggaggaattgttgaagacagactaggtggtcagatgaaaataacaacatatgtggattatttccacacgatgtataaggcacaatactttcagcctttcgacccctacctggactgcattgtgctcttccaccccggtcttggacaccctgccagctcccacgagtgggaggaaacattgcctctgctgctggagaccaaggttccaatcatcaccactggctatacacagtgggatatggagagagatatcaactgggtgcgtgagaagtgtgccggcgaatttgacattctactcgagcccggtgagaatatattccgtagtctgcggtgggatcttaatgaccttgacccacatgacatttcttgtggcaactggggtttgtgggcgttcagagggaagaggtatgatctttgtcctattcaa

SEQ ID NO: 20819 - DNA, 508 bp, Emericella nidulans
aatggccagccggtcaatgttttatttgtctgtctcggcaatatttgtgcgataaacccgtaacccatgcttcactcgcacttatactaacgaatgcaaatccaaatcaggccgttctcccatggcagaaggcgtttttcgcaatattgccgccaaccatcccctgatcaataacattgattctgctggtacaggagcctaccatgccggtgagccgtcagactcacgaaccatgtctaccctccgccgccacaacatcagaaactaccaccatctcgcccgcaaggtcacactggaggatttcctcaacttcgactacctcttcgccatggatgaatataacttggaagacttgctggagttgcgcgcgtctgttttgtcgtcgtcgagccagtccgcgggacgggcggctcgcggcaaaggaactagagcggcgacgaccgcgttcgatcgctgcaacgtcgaagctggtgctaaagttgcggaagtgcgcctgtttggtgattat

SEQ ID NO: 20820 - DNA, 421 bp, Emericella nidulans
  unsure (1)..(421): unsure at all n locations
cgggtggctctctcgaaaccctcctcagcctacctcatccgcggattccccgtcgttatgaaagcctcgaaccccgttctccttggctatgtctcacgcaacgagctttcttacgccnctaagaaccccacatctccatctggagaagagctctctagcgcaactccggtcttttttgcgcatcaaccatttgcggacccgatggatacgctcgaccttcgaccttggatggaccaaaacccctatcacgctgaacagcggtacaaccttcctaatagtgctgcgcatgtttcaaagacttggcctccgttatgtcttatttgtaaacaaaggtttcctccatgggctactaacaaaaaaggatgtatggtctgttgttaatgatcctgcatctcgggagggcgaatggacaagtggtcct

SEQ ID NO: 20821 - DNA, 850 bp, Emericella nidulans
tatacaagggcagtgtcccaagagccatcccaagtcagaactccgcgtgacatgctttgatattctcgaggtggaaccttcacagactgaagccgaagcgagcttcctgctctgtctgacatattccaactccacaatcaaggtcttccatttatcatgtgccaacgaagacggccgcttcagtctcctagccagcggcacgtacacgagcaactgtctcacccaagtccggttcctccgggccccatcgtcgctttgtctagtaaccacgtcgacggacggacactttacgctttgggacataaccgccgtcttagagcaattctaccaccttgatcggccgctacgcctgaaacaaccgctcagctccctctcaataccggaggagacaatcgcctgcgaaagcagacaccaaatccactctaatagcataaagacaatcgacatggtacatctatccgacactgtcaccctgttgctcgccggaggcgacgacaacgccatcacgcttacactactacacaccgacacagaaaccggcccggcaacaatcacaatcccggacgcgcacacagcgtctgtcaatgccgtaaaggctattgaagagtcgattgcccgaaacagcgggactatccagcttagctttgcatcctctgggaacgaccaccgcgtcaagttctggcgggtgaccattgacatgcaagaccgtccggtcttggacggggtccaggtggacaatgtgctggaccggtatagccccgtagcggacatctcatcgttggacgttgttcatgacgaggaggggatgaagctgcttgtttgtggagttgggatggagtggtttaccgtt

SEQ ID NO: 20822 - DNA, 500 bp, Emericella nidulans
  unsure (1)..(500): unsure at all n locations
caatattgtctgaccgtgttgtagttaccgctcaccacctttcgattattattgattcttgggcaggagaccctttctgctcttgcgagcctgtcgccagaacccctgctgatcgagacgctcttctgcgcgccgctgcctccggcaactctaagttcttctttggctcagatagtgcaccgcaccccgcagcttccaagagaggaggagagaagatcgcagcgggtgtattcacccagccgtacacgacncagctcgtggttgacgccttcgagcaggcgtgccgaaacggcgttctgaaggaagaagatatcacccccgagatcatcgagggcttcatgagtaagttcggccgcgctttctacggcctcgaggagcagaaggagttcattatcctcgaaaagaaaggcgagaaggtgacaaatatactcaagtcggataaggtggacgtggtcccattcagaagggatcaggagacatggagcttggcttggtccgca

SEQ ID NO: 20823 - DNA, 850 bp, Emericella nidulans
ggcctaaaaccaggcttaaaaggatcctacagctcctccttagccccctgccagagcacactataatagagctgcctctccctctattatgcatgctcccaacagataacaaagactatagccctgccctattatagatatcagtatacttagacagcttgtgaactggccaaggggcaggatttggctatgcagtctactttggccctatcctggtaaccaagggacatggccccgcgggccccaggacagaggtctatgatgcggaaatcatgggtgctgtagaaggcctacgcgcagccctgggataaccatgtatgggttactctacacagctagttatcctcctagacaacctagcagcagcctccctgctagcaagctataggcccactccacataggcacagactgtcagagtcctttggccagcttgctacccagtggttggaagctccctcaatcctaaccaggccacggaagcccctttaagtccgctggatcccaggctattctgggattgctgggaacaagctggcagacaagcttgcaaagcttgggtcctctatatacagccctaacatccccccatcccctgcatacctacaacgggagacaaaacagtggcttcgtacagagacatatacagcatatactagtaaggcaccacaagcctacaagaccctggatatcagaccccatacaaaggaaagccgcacccgcgagcacaagcttccccgttgggtacttggccgactcgtcgccgcccgtacaggccacggagactttatggcataccaccagcgcttcaaccactcagactacctggagagctgctcttgtggtaggac

SEQ ID NO: 20824 - DNA, 629 bp, Emericella nidulans; identical to SEQ ID NO: 6070

SEQ ID NO: 20825 - DNA, 772 bp, Emericella nidulans
gcccctctacgtgatgggatcgggcatcttggaggaggaaaatgagaaatgaacgtttagctaatggctcatagcaataccaaacctacctcgacgcctcgacccctttcacagcctatcgctggataggcactgccgtgctccttttcatcttcttcttgcgcatcatcctcgcccagggctggtacattggtacgtccgttttctacaactaaattcaagtacaaaccaaaataggtatcacagtaactaacgggaccacagtcgcatacaccgtcgggatctacctcctaaacctcttcctccttttcctacagcccaaatttgacccctctctcacacaagacgagggcctcgaagatggcgacgcgggtgcccccagcctcccgacaaagcaggacgacgagtttcgcccttttatccgccgtctccccgagttcaaattctggcactcggctacccgcgccctggccatcgggttcctctgcacctggttctatggctttgatatccccgtcttttggcctgtacttgtggtgtactggattctgttgttcgttttgacgagtaagtccagtctctattttccaaaccgaaccctggctttcgtgtgtggacaatttggaaagataaatagtatgatcgctaacgcggcttgtcctgtccagtgcgccgacaaattcaacacatgatcaagtaccgatacgtgcctttctcctttggaaaggccagatatggccgctcatgaaagctgactaaacgatttaccact

SEQ ID NO: 20826 - DNA, 512 bp, Emericella nidulans
gacaagatgcctctgataacgctcacacccgatgaggtcgacgacctcatctacgatgtccgcgccggcgactctgcagccctggaagaggacctcacagccctatcccagaagtattccgtcaagccagccgtaatcattgcctcggcagtcgactcggcacctgaagatgagggcggtagcgggtgctgtctcctacattaccctgctgcaaatggaaaccttggtatttactccccaaattcccttttgcattccaggccggatgtggatagtatgctaaccatatgcagaaatccttacaaagctaaaagagcagcttctttcagtcacaaaatgagaacattattaacagcggctgaagtaaagaccactgtaacccaccgaacccacctggaaacacggccccacactgggcagcgctcaacacccacctagagtgcgtgaaggtgcttgttgaggctggggcagatatctcaatcaagaacgaggccggccttgatgcggtgttc

SEQ ID NO: 20827 - DNA, 850 bp, Emericella nidulans
agaacgacatgcgcgaatggctacaagacaccattacagcgatactcagctgcagcccgtccagtgttcttgagatcggaacgggctccggaatgatcctcttcaatatcatcggcagcatccagaagtacgttggcctggagccctccccccgggctgtggatttcgttagaagggcagtccattgggttccagaggctgccgggaaagttaatataaaatgcggcactgcatcagatattggacgactgcaggatatggggacccttgacctcgctgttatcaactcagtagcccagtatttcccctcgcttgactatctgcgtaacacgatcaaagaccttgtacgccagggcgtaaaaagcatcttcttgggcgacatccgctcatatgcgctgtaccaggagtttcaagtcagcaaggtccttcggctatatggccgcggtttaaccattaccagattccgccaacatatggccgagattgcccgtttggagaaggaactccttgttgacccagccttcttcacctcgttgccagcagaattgccgggcatgatcgagcacgtcgagatctggcctaagcgaatgaaggcaacgaacgaactaagctgttatcggtacacggccgtgttgcacgtcaaacgtgctgaacagcccttgcttattcgagaggtcaaagagatatcatgggctgactttcaagcaaggggtgggactacaactcactttcgcaaatgctagaaatcagcgatgcttccacagtcctggccgtggagaatatcccatttaagaaaacgattgtcgagcgggacatggtacgtttactccaagagctgcctgaaacaccg

SEQ ID NO: 20828 - DNA, 415 bp, Emericella nidulans
cacatccctcggtaagtaaagaacaatgcattgatatcaaactggagttaacaagcaagatagaaccgtagatgatcccctcgtcatcgaagtcgccaaattcttaaacagaactccagctcaggttctcattagctgggctgtgcaacggggtacagcagtgctcccaaaatcaggtacccctgagagaatcaaaagcaactttcgagggtcggttgtgtcaaccactttctactacataccaatcaggatcctattaactctattgtgggcagacttcattctacccgaagacgcctttcaggctatccagtctctaaaacgacaccagcggatgaatttcccagtccgacttggcgtggatatctttgacaaggttggtgaggagagtgcacagatacaagctcttgagatg

SEQ ID NO: 20829 - DNA, 850 bp, Emericella nidulans
cgtctttcattccgcgcgcctcttctctacgaaatttatgaatgcaaatactgatggggagacagctgcaagcagcaccctctcgggcctcgtcgtccactggatcggacggtacagggagtgcatcctcttcggatggatgatctgggctgtgggacttggtctgttttccacattagatgagcactcgggcgtaggaaagcagatcgggtatgggatcttgacgggtgtgggcgttgggaatactttgcagccgtatgctccaatcagtctgtataattcagcatcgatgctaacggatcccgtgtgccagggcccttatagccattcaagccggtgtcgagagacgcgatatggctgtcgttacctctttcagaaagtgcgtcctccctccttccgctcctctagtgcttgcagttagtccagtcaagagctaattactgcgaatcgttgcacctacagcttcgtccgaaatctggggggaacactcggtctcgcaatagcccagacaatcataaacaacctcatcctaagctccctatcgccagtccatctctctccttccgagcagaagtccttcctcgcaagcccaactgcctatatatctactcttcccgagaccgaagccacacatattcggagtctcctgataccagcctacaaacgcggcttccggatcattttcattattggggctgcgcttgcggcgttggcatttggtatcgcgttcgcgcttatgaggcaggttggattggagaagggagatgatgagaagcttaaggaggaggggagaagaagggtggaattggaaaaggggatgaaggggcatgcggaaaaggagggtggagat

SEQ ID NO: 20830 - DNA, 500 bp, Emericella nidulans
gccacaagctacttagtacctacgctccagtctcaataacgcactgcaacattttaaaatttactgaaacaaatattgagaattgaaaaatgtcctccgaccaaaagacaccccgcttctcccctgccaaaacaaccgtcgtcttcctcctaggcggacccggctcaggcaaaggaacccaatccgccaacctcgtccgcgactatggtttcgtccatctctcggcaggcgacctcctccgcgctgagcaaattcggcctgaatccgaatacggcgctctgatcaagaattacatcacggagggcaagatcgtacccatggaaatcaccgtcgcactgctctcgaacgcgatggctgcggactcgacgcgaacaaggacaagtatgcgagcgcgaaaccacgcttccttattgatggatttccgcgaaactcgaccaggcggtattctttgaggagacggtttcccgtcggagttcaactgttcttggattgccggagag

SEQ ID NO: 20831 - DNA, 850 bp, Emericella nidulans
tgaatctgaggtcgacacagctgccgtgctctgcctggtgtatggcaagttcatcaaagtctggcggcagcaggaagccgctttggagagctccagccttaccaaattgctcctggcaaactctgcgcacgaagtacgcacacctctgaatgccattgtcaactatctagaaatcgcgcttgaaggtgcgctggacggcgagacaagggatcacttgagcaagtcctactccgcatccaagtccctgatctatgttatcaacgaccttctcgaccttaccaacgtcgagaagggacagagcctcatcaaagatgagccctttgatttgcccaccactttcagcgaagcaacggccatgtttgaaagtgaagccaaacgcaagggcttgaactacaaggtattgtcacaaccggggattcccgagaccgtgattggagatcagcggcgtgtccggcagtcgatcagcaacctcatctccaacgcggttcaaaacacctcgtccggtggagtgactgtcaaggtgtggcacgctcctggggagggcgataccgacaaggcgacggtcaagatcgcggtccttgatacaggccgcggtatctcatcaagcacgcttgagctattgttccgtgagctggagcaggtgctaggagaagacgactcgcattattatggcgggagcgaagaagggtaggaatccgctccagaggctaaggcgagcaaggataaggctgttttgggcctgggcctggcgttggtggctcgaatcgtgcgcaatatgcacgggcaactcactgtgcggtctgaagaagggaagggtagtcggttccagatttcgctacagttccctatc

SEQ ID NO: 20832 - DNA, 850 bp, Emericella nidulans
gtgacccagagcaccccgccatcaagtacctgaacaccaaggtcgaggagtactacatcggtggaaagctcgaggcagtcaacaagcttaaccactacgattatgtcggcctccgctgtacgtttgagaacacaacaggagcctgcataaatcaagaaagataaatctaacgcgattttagacacccccgcggaactccgtattcacttcgacaagctcggctggacccgagttgttgccttccagacacggttcgttctggttacttgactcgagactgggatgtcatggctaacagacctaattaaccctatgcacagagctcaccgtgaattgaccgtccgtgccggtcgcgcccgccaagctaatgtccttatccaccctgtcgtcggtctcaccaagcccggtgacattgaccacttcacccgtgtccgtgcctaccaggcccttcttccccgctaccccaacggaatggcggctcttgctctcttgccccttgctatgcgcatgggcggtccccgtgaggctgtctggcacgctatcatccgtaagaaccacggtgccacccacttcattgttggccgtgaccacgccggtcctggtaagaactccaagggtcaggagttctacggcccctacgatgctcagcacgcggtcgagaagtaccgcgcggagctcggtatcgaggtcgttgaattccagcaagtcacctacctccccgacaccgatgagtacatgcccaaggacgaggttcctgcgggcaccaagaccctcgacatctccggaactgaactccgtaaccgtctccgtaccggtgctcacatccctgagtggttctcttaccccgaag

SEQ ID NO: 20833 - DNA, 685 bp, Emericella nidulans
ggatcgcaccattccatgcctctcacggcactgaggctttctatgttctgatttactctacatggagccggctcttctgaccaccatggacgtgatcatggatggtttcggatatatgctttcgttcggcgatctcgtctgggttcccttcatctacaatctgcaaaccagataccttgcaatgttccctaacgaacttggcctgcggggtatcgctctcgtgctggccccgacagtcgtgggatacatgatcttccgcggtgccaacaaccagaagaaccgcttccgtaccaaccccaacgacccgcgggtcaaggacatcaagtacatcgaaactgcttctggctccaagctcatgacctctggctggtggggcctagcccggcacatcaactacctcggcgactggcttatgtcctggtcgtactccctgcccaccggggattccggctttgtcattgtcaacagcgtgagcccgtccactggcgaacttgagaagcgagccgtgcagacaccagagtcgcgcggcgcagcttttctaatcacctacttattcttgatctactttggagtcctgctccaccatcgcgagcgtcgcgatgaggagaaatgcaagaagaagtatggcaaggacagggatagatatacttccctcgttcgcagccccattatcccaggtgtctac

SEQ ID NO: 20834 - DNA, 316 bp, Emericella nidulans
aaatagtagcgtgatggaatttctccctaaaggatggcgtaagcttgcaggagtcggtcagcttgtgtaccaatggggagctaggtggtcaggaatgagacatgtaggctcgtggcatgacccggatggggaaatatgtcagtttcccgatactgataggcgatgtatgtccgtctataagaacggtaggatcggatacaatgagacttattttggcgagtgggcaaaaagtgttttgggtaagtttaaagaaagaaagatggcaaatgttgtaggacgcaaacacagttatggttcgctagatggatgttggtgt

SEQ ID NO: 20835 - DNA, 655 bp, Emericella nidulans
acgacatatgagcatggtgtccaagtaatcgacgagaataaagaattcaagtatgccttccgttctttctgacatgcaaacatgtttgtgcgcaatgcggcttgatgtgacgtcgacggcattcgctttgtatggcgatgggagctaacagtcatactatagtacgaacctgaccaagtatctaaccttcgaaaatgtcacccctgcaggtttcaactaccatcttatctcggtctttggatctcaatcgacagggaagtctacccttctcaaccacctcttcggtacccacttctccgtcatggccgaaacggaacgacgtcagaccaccaagggtatttggctatcaaagaataaaaacggagacggcaagtcgatggccgataacatcttggtgatggatgtggagggtaccgatggacgcgagcggggtgaagaccaggacttcgagcgcaagagcgctctctttgcgctcgcgactagtgaggttctgattgttaacatctgggagcaccaagttggtctataccaaggagctaacatgggcttactcaaaacggtcttcgaggttaacttacagttgttcttgaaggataagaagtatgttactggatgttcattctcacatgcgcgaaagctgactattccgggtcag

SEQ ID NO: 20836 - DNA, 476 bp, Emericella nidulans
agctcgcgaccgcttccatggacacgccggtcattgatgtgattcatatactggtccagcggagtatatctagtgtgcccattgtgaactcagaaggtgtgcaatatttttatgaagatacgggtcgcccaactaactgcggcttaggtgtcgtatacaacgttttcgaatcggtagatgttgttactctaatcaaaggcggggtatatgacgatttgagccttacagtaggcgaagcattgaagaagcggtccccggtatgaattgaagactaggaccctgatgtcttttgctgaccatgctcgcaggatttccctggaatctatacctgctctttgaacgacggtttagacactatttttgatacaattcgcaagtcccgcgtgcatcgactggttgtagtagacgacaatttccgattaaaaggcgttcttacactgagcgacattttacagtatatcctgctagaaggcgaa

SEQ ID NO: 20837 - DNA, 850 bp, Emericella nidulans
tacaaggaaggccctgagcctgggtaccaatgccaccttgagcattgagtctcttacagacggaattgactatggttctaccatcaatcgcactcgttacgaactcctgtctagcaaggttttcgctcagttcaccggcctgatcgagcaggttatcaagaaggctgaactcgatgttctggacattgacgaggttatcttctccggtggtgtttcccacactcctaagatcgcccagcttgctcgcaatctgttccccgagaagacccgaattttggccccgtccactctggcgtccgccatcaacccatctgagctgtcagcccgcggtgctgccattcaggcttctctgatccaggagtttgaaaccgaagatatcgagcagtccatccatcctatggtgactgccacacctcacctcagcaaggcaattggtgtcgagttcacttccggtgatgctgtcgagtttctgcctctccttaacacagagaccgcccttcccgcccgccgtgtggcccagtacagtgttcccgccgagggcggcgacgtcctcatccgtgtctgcgaaggttcccgtgagatcaaggttactaagcccgagcccaagcccaaggaggagaagtccaaagccgaggacgatgaagacgactccgacttcgactccgatgaagaagaagaagacatccgcgagattgtgtggaaaaccgagcagcccattgctgagctcgccgtcaagggcgttaaggccaagggtaaagttgagctgatgatccacattaacgccgacctcggtctgcagatcacagctcgagaagttggcggccaaagcgccgtccggggcgctgttgag

SEQ ID NO: 20838 - DNA, 850 bp, Emericella nidulans
gcgcgagcgacaaaagccctgcaacggccgtgacgagctatgtcgaagtgtattgaatgatgagtgggcctcccacccgacttgggcctctgaagaatctggcttcgttgcccacagaaaaaatcagtacgaagacgctttacaccgcattgaggaagacaggcacgactatgatcaccatattgaagcttgcaaccggactatccagcttatcgagcccattgttcagcagttcctcgtcatgaccgaggcggagagggcagctttccagcttcctcgcggtcttggaggccaaagcgaagcaatctatcagcgtgtgatcaagaaaatttacgacaggcagcgcggagagaggatcattaaggagatgttcgagcgcccttgccatgttcttccaattgtgctcttccgactgaaacagaaatgcgaggagtggaaggctagtcagcgcgaatgggataagatctggcgcgaacagatgcagaaggcttactggcgcagtctcgaccaccaagcaatagccagcaagggagttgacaagaagctttttgtggcgaagcatattcagactgaaattcaagccaagcacgaggagagcaaaaatctgcgtaagagcggatttcaagtgccaaaacatcagttcgagttctcattcacggatccgaccgtgcttattgatgcaactcatttgctggtgactttcatcgaccgtaactggctggttttgtgccgatccccaaaagtttgatgttcatcaaggatttcattcccggtttttcggattgaccgtgacaccttcatgtcatatgaacgagctttcaacgaaccttcgcgattgacagggtgccat

SEQ ID NO: 20839 - DNA, 850 bp, Emericella nidulans
atcgaattgattgctagcatcaacaggcaaggtttagtgcatccgaaagagtgcgctggagtcctagtctccttggagacatccaccgtgccagccatagccaaggtagcgtacgatacgcacaagatgcttcaccagcagtatgagtctatgttcgaaagggaatatatgcgtgccgtccaggaggcgttctactaccaacgcgatgtcgttggggatccctctggcgccacggcccgtccatatgttgccaagctagcgccgctattcgatatcgtcaagataagtaatagccggtatcaaaaaaagttcctttcgaacctctgctccaaagtgaacttcgaactgaagaagcttaactccagcggtaacccgccagagcatcttctgcttgcccgctttatttctcaaaacctggcattcttcgactacaaccagcttgctgaactagtggcgactgttggctgcttggagcgcatcgtctccgcgacaggaaccattgtagcacacgctattgagaccgagatattcccgccaaaacaggaagctatgcagggagacgaggtgtccatggctgtgtcagccgagactgtcagtagcttaccactgccaaatgtcaatccggcgactttacgacatcttactgtagcagccgcgtctttgtcgatgttgtgggaggcacgaacacatcttcgacgtctgtacggagtcacggcccatgtccggaacgatgcgaaggcggccgctaaggagactaacaagtccgctacgaaggtacaaggtgtcaatggtgatagattctgggaggccatttcccgaaatatgtcatctctggacagtcagcaaaaca

SEQ ID NO: 20840 - DNA, 850 bp, Emericella nidulans
gggtgaggtcgtaatttgggagtctcatgaggggacgtggtctaagacaaaggatgttgtgcttgcggatatctgggccgttgccctctctgccgacggccagtacttagccggtaccacgcaggatggtcacgtcaaggtctgggacatgaacgcaaacgaggaagaaatacgtgatcacgaaacaaagggcagttttggaacctgcatagacttggtaggcattccggtctatcgtctgcgctattcaaatctgatcttctttgatagtcaccggacgggcgattcattgccagcggccatgagaatggcagcgtatacattttcagtacagaaacgggacgcatgccatttagtctatcaggtatgtcctacacttaacattcgtttcctcgggatcaaaacgcgcacgtattaaccgctcaataggtctggtaaaaccggtacggtccgttgccttttcccctggtgggaaattcctcgctgcggctggggactctagagtgattgtgctatacgatacaacctctggcgagcaggtggcaagccttaccggtcatgctgcatggattctatcactctcctggagcaatactggagaatatctcctaagcgggtgagtgtcttctctttatcccttgtgaccccgagctgatcaaatggtacaagatcattcgacggcaaagtcaaagtttggtcaattgatacgaggaactgtgttgcaacccattccgaaaccgaaagagccatttggagcgtgatatggttgcctaagatcggaaagtcagagggatttgctacggctggtgccaatagaagcatatctttctacagggaagccacaggaggt

SEQ ID NO: 20841 - DNA, 690 bp, Emericella nidulans
accaacatccgcgccttcaatctcgccgttcaaacccttctaagcacaccatcccagttactgccgcacctaacagtcccaacaatcacccagctccccgagtcaataggtccgctccttgaaacccattacggccgaaaagcaggtcagcaacccgaaaaagggcgagaaataacaatacgcgccctgattcttgataaagacaacacgctctgtcccgcgaagacaacgactttcccatcgaagatctacgcgcacctccatacgctccgcaactcacctacatctccatttaacatttccactgccccaaactccatcctcatcgtttcgaaccgtgcgggatcgcatccgcgttacgaatccgaggctctcgagattgaagagcgtctggcagaactcaaaattccagtgttccggttaccgtcatcaccgaaggagggcgtgaatgttgagaaaaagccgttctgtggaaatgaggtgctagagtggttccgggagcgaggagtagtgcagcgagccgacgagattgctgttgtgggagatcggttggggacggatgtgctcatggctaaggagatgggggcatggagtgtttggtgtcgggacggagtcggggaggaggtgacaaagggaaagaggaatgtgcttgaaaaaatggaagtctgggtagagcgatatttgagggag

SEQ ID NO: 20842 - DNA, 500 bp, Emericella nidulans
gtggcgatgtcgacgacggcggggttgaataggataccagcacgccctggattcgcgaagaaggtggaggagtcgagagagcatcagatggcgcgggcagtggtgaatgattgcttggagagtgggctggatagcgttgatataaggtatggtggcatccttaaattgagttgctgttgcaatgattctaacaaaacagcaatggcaatctacgcgttattccatctggcctgctccgacctctccagcacctcaccaagctcccatccataaaagaagctcccatcagcgaagaggtgtacacttcactacaaccgttcctccgtctcttcctttccggcaacagcttgaataccctccccggcgagctattcgagctcggcaacctgcgcgtgctcagcctgcgcaataacaagctcgccgagatcccacccgcaatccgcagactaactaagcttcaggagctgaatgtcgccgtaaaccgcttatcagtcctcccc

SEQ ID NO: 20843 - DNA, 625 bp, Emericella nidulans
atggctgctgttatcacgctccagtcgtcctcgacggctggtctccaacagggctctccatctgaccgtcatctccttcggccgctgctgcagaataaccctcagcaaccgccgctacagcagcagccgcttcaaccacagcaatccccctctcctgcccccattggcacccttcctcgtcttcctgcactgggccgggatggaccgagttgtgacgcctgtctgcgcagaaagagtcggtgtgctatgaacgaaatggtcaacaagtgttattcgtgcgactttcatcgccaggactgcaccttcaccctatcatcatcgtcaaccaccacaacaaccattaccacgaccgcgaccagcgcgaacagcgcgaacagcgccagcagtgccagcactgccggcaccagccgtccaagcacggctgacgtgcagtctaaaaagcgtaaactggacgatatcatcaatagtgatgcggattctcctaaaaggtaaaagccattatctgatgcggttcgagagccgatctcggatatactttatcagagagagactggggcgctaattgttgctatcccgccaggttatcgaccgtttctaaagctgacagtgctcgttgcccttgagt

SEQ ID NO: 20844 - DNA, 500 bp, Emericella nidulans
atacatcttttaatacctattcatcatgtctggacgtaagtatttctctatctcctaaatctgtctcccactggacgattgtcgtcgccgttggaccgtgtcccaaaacacgtgacgtcagtcctttcctccagatcaaccctactttactcatcctcaacctccgttattctttaccttctgctaacactcactctacaggcggaaaaggtggcaagggtctcggcaaaggtggcgccaagcgtcaccgcaagatcctacgtgacaacatccagggtatcaccaagcccgctatccgtcgtcttgcgcgccgtggtggtgtcaagcgtatctctgccatgatctacgaagagacccgtggtgttctaaagtcttttctcgaatccgttatccgtgacgccgtcacctacaccgaacacgctaagcgcaagaccgtcacctcgcttgggggggtctacgcccttaagcggcagggcctcaccctctacggcttgtgtggc

SEQ ID NO: 20845 - DNA, 850 bp, Emericella nidulans
aaacagaaacttatcttgcacgaatcgacgctttgatttgtattgccacagtggcttgcgtgaacggcccgtcaagtatcaccgtctcaggcgatcaagacgctgtaaatgccctcgaagcgctggcaagaaacgacggcatcttcacccatcgtctgaagatacatactgctttccactcccatcacatgaatccgattgcagatctgtatcgcagcgctttacaaggagctctatcaccaaatcacgataaagtcgagagtgacatcacattctcttctcctgtcactggacgccgtatcaccaacctctcgcagctgtctgagcccgaccactgggttgacagcttgctcaaaccggtccagtttgttgatgcattcaccgacatggttcttggcgcttctggtgcatctagcgccaatgtcgacttgattctcgaagttggtcctcatactgctttgggcgcgcccattaagcagatccttgcagaaccaaaatttgccgggttagatatctcttgtctaggctctctggtccgagaggtcagtgcagtcaggagcatgcactcgctggctgctagcctagttgcagaagggcttcctctggatctggacgcagttaatttccctcatggacggccccccagcgtacgagctctttcagaccttccctcatatccctggaatcatcaaacgcgccactggtacgaatcaaggttcaacaagggcctccgcgaacggcacagccaccacatgaccttctaggcagccttgtattgggaaccgatccgaacagtcctacctggcgccacatcctgaagctcacaggacgcccctgtggttcgcgaaca

SEQ ID NO: 20846 - DNA, 850 bp, Emericella nidulans
ttttctctcgcgtaaggcgacgctcgataacatcgccaagtttgacagcctacttaatgagattgttgagtcaactttaaatgcggatgcagagaagcaaccgaaagtagtttcgcatatgctcaagcgggccctggataacggtcaattgacccccgagctgtacagatacaatctgcgcatgtcgttcatgttcgggcatgatactactgctatcttcatgggactgactatgtatgtgctgggaaataatacagtacgcatcgtcctccctgcgccttccctgctgtttcgtgcggctgatactattattcatcccattttctaggtcctccaagaccgcctccgcaccgaagtcctccaatcgacgggcaagactatccatcaactcccctacctgacttccctcctctacgaagtccttcgactgtaccccccagtaaccgaagtgctcaaccacactgtatcccggcccacagcgctcggtgggaaggtcaccattcacccaggcacctggctaggttggaacgcctacggtgtacacactaacccggccatatggggtcccgacgcattggaagttaggcctgagcgctggggtgacactgtaaaggatatccaagccagctttaggctgcagagtacgaaggggaactatatcccgttctcgctgcatgcaaggaagtgccttggacagagtctggtgcttaccgaagtcaagctgttgatgtttgagatggtgagacagcttaagtgggttgttgacccgacgtataagctcaatctgggcggggtgagtagactattttttcttttccggagtttgatctattttcagcttccatttgtt

SEQ ID NO: 20847 - DNA, 850 bp, Emericella nidulans
tcagtgggggatcaagttgagaacggagtcattcgacattgagcagtcgcaacgtttgagcgctcttatcttgcacgctgaattgttggcctcttccgttctggaaagtccagtacaacagccttcagacacaagcggagactatagatccagtacgctgtctgttctcggattttacttcacactggcagatctgttctctcacgcacatactaacgggaacattaaactcactgtccctcttgcgccgtctgtctacaccctcattttcagccccgtgagctttgttatctcgagcatgaactctatactgtgcagctacaagtcatcctttgagttatcaatgaattccgagacgctccagtccaaagatccgctttggacacagaagctcgttccccagttcaacggatatattatggatgtttgcaatcttgtatggcggaatcgagctcttaactcagaggatccaaacgcgctgggctgtttgataccgccagcaacaatagctgcactaacacagtatctccgggaagtcaatgacaaagcccgaaaaaagagccgcgaatccgcattctcttatacagttgggtcgttatactctctgagccatcatgccgcgctgtgcaatatgtctgcctgctgcttttctgatatcgagaaggagaatgatgttggcgagactcaacccaggctacggaagcctgtgacgcagagagctctgagtgcgctagagaaggaaggagggattcagatgacctggcaagattatagagtgcggatgctcgactggatggatgctgcgggaagcgtgggaattgcgaatttgatgcgcacgacgatgaaagct

SEQ ID NO: 20848 - DNA, 785 bp, Emericella nidulans; identical to SEQ ID NO: 14246

SEQ ID NO: 20849 - DNA, 850 bp, Emericella nidulans
aatacttctttgaagtgtgggaccgccttgatgacgctgcccgagcggccggggaagatccaaacaacctacagacgaagccccaatatttcaggtatctcacgctgatggccttccatacctatctgagtgagggcgtggatgcagccgttatcgaatgtggaatcggtggagaatatgattgtaccaatgtcattgaacaaccagccgccacagcgattacaagcttggggatcgaccatgttgctcttctggggaatacgattgaggagatcgcatggcacaaaggcggcatcataaaggcgaacactaaagctttcagcgcgccccaaccgccaagcgcggagaaggttttacgtgaacgtgctgccaacaagcacactgagctggaattcgtgtccagtcatcccgatctaaagaaaaatggcgatattaaactcggcctagctggtgactttcaatatggcaacgctgcgctggctgttgccactgctggagaagtccttaagaaggtagggaagctggatatcagcgctggcttcagagagcagtccctccctgcggagtttcgcaaaggtcttgaacaggcacaattagagggaagatgtcagaccaggaaggaggaaaacgtcatctggtatatagacggaggtcacacgcaggaaagcatcaagctagccggtcagtggttcgcatcacaaatcaaggcagactcttcgtcggaagcttcagcagcgaagaagctacgggtcctgatcttcaaccagcagactcgcgatagcaacgcgctggcccagtctcttcacgagaccctcgaatctgccttggctctaagacgccatttactcat

SEQ ID NO: 20850 - DNA, 500 bp, Emericella nidulans
gaactagattgatctttgttcatctctttataccatattcgccatgtcttcttctcttgaacagctcaaggcaactggcaccgtaagctacccctctctgggttactgaattcgacatctacgaggagtcgccattgctaacgatttcgattcaatataggttgtcgtttgcgactccggtgacttcgccaccatcgacaagtacaagccccaggatgccaccaccaacccttctctcatcctggctgcctccaagaagcccgagtacgccagcctgatcgacgccgccgttgagaagggtaagaagcagggcggttctgtggacgaccaggttgacgccaccctcgactacctcctggtcgagtttggcaagaagatcctcgacattattcccggaaaggtctcgactgaggtcgacgcccgcttctcctttgacacaaaggcctcggttgacaaggctcttcacatcatcaaggtacgccagacgtttttctcttcga

SEQ ID NO: 20851 - DNA, 637 bp, Emericella nidulans
atgggagttccccgcatgccaactaatacgacaaagcttcgcaccacctcaaacagctatctccaaccaagcaacaaatatccagcgttagatacaatgtccctccaaggcaaagtctacgccatcactggcggtgcaagcggcatcggtctcgcaaccgccaagctcctttcctcgcgcgggggcaccgtttgcatagccgacgtcaacccgaccactctcgccgaagcagaatcctatttcagctccaagacacccgtcgtccaatacacaatcactcaagtagacgtctccaacagacaacaggtcgattgttggatcgcgtcgatcctaacgaaataccagcgtcttgacgcgccgccaatatcgcaggcatagtggggaaggaccacggcgtcaaaagcgtggcagagctcgacgatgacgagtgggatcgaatactcggcgttaatctcacggggctgatgtactgccttcgcgcggagcttaagaatatcgctaatggcgggtcgattgttaatatggcctctatccactcaactacaggtgagtggggttcggtcccaaagaaaagcctgtacatactaacagagctcctccaggcgtcccgaaatacggtgctacgcggcaagtaagc

SEQ ID NO: 20852 - DNA, 377 bp, Emericella nidulans
gccgctgcggctggttcgatctcgtcctccttcggtactctcagtcaatcaaccactacacggcgctcaacctcaccaagctcgacatcctcgacgactttgacgagatcaaggttgctgttgcctataccttgccggacggcactcgtctggagaacactattccagcggacgcggaggttcttaacaaggtcgatgtcgagtatgttacattgcctggttggaagagcaacaccatgggtgtgaagaaatatgaggaccttccggagaacgcgcgcaaatacattgagtacattgagcgcgagctaggcggcgttcctgtgaaatggattggtactggccctgctcgtgacgacatgatttgccgtgagtagatg

SEQ ID NO: 20853 - DNA, 850 bp, Emericella nidulans
agtcaccaagtctcttggtgaagagagggtacgtttgcggtatatggtccaagtggatgtggcttacacttatatcgcagagacgtcaaaccctattgcaggagatggatcgcaggaataaagtcggaggtattatggatcggcgttttggtgagaacgacccgaccatgacaccggaagaacgagccgcggaacgattcgccagagccagccaaaagaaactacgcaaagactcgatgttcaatcttgaggaggatgatgaagaggagtttacgcttacgcacaagggtgaatcgctatcgttcggtgatgaggatggcattcgcgatgatttccaggaagatttagacgcaggcgacatgtcagatactgaaatgcctcgaaagagaaaacgattcattgacgatcccgaagccgaggaggacggatcgcaagatggggaagatgtcccggaacgaaagaaatcgaagcacgaagtcatgcaggaggtcatcgccaaatccaagttttacaaagcgcagcgacaaatggcgaaggaggacgatgatgaattacgtgaggagctggataagggtctacctgaactctttgatatgctccgaggagtgaaaccccctccaaaacaagaaccgccaaaggacgatcttgcaggaatgaatcccgatcgcgcagccatcatgcaaggccactctcagggagacccagaaaaggagtacgatcagcgattgaagcaactgactttcgacaagcgatcgatgcctacggaccgtactaagacagaggaagagaaggcggaagaagaggcacaacggttgaagaaactcgaggaagaacggattcgcagaatgcg

SEQ ID NO: 20854 - DNA, 850 bp, Emericella nidulans
ctccgattctgcgaaaccgccacgagaaggtgcaagagaacaccattgaccttgtcggtcgtattgccgaccgagggcccgaatccgtcaacgcccgcgaatggatgcgtatctgttttgagctgcttgacatgctaaaagcccacaagaagggcatccgccgagccgcaaacaacacgttcggcttcatcgccaaggccatcggtccccaggatgtactggcgaccctactcaacaaccttcgcgtccaggagcgtcagtcgcgcgtgtgtacagcagtcgccatcggtatcgttgccgaaacttgagcgccattcactgtcctccccgccctgatgaacgaataccgggtccccgaattgaacgtacagaacggtgtcctgaaagcaatgaccttcctcttcgaatacattggggaaatggcaaaggactacgtttaccccgtcacccctctcttgaggacgccttcatggaccgcgaccaagtccaccgccagggggcagcaacagtcgtctagcacattgccctgtgggttgttgggctcggatgcaagaatgccatggtccacctcctcaagctggtcttccccaacatttttgaaactagccctcacgtcatcgacatagtcatttaagccattgacgcgatccgcatggctgtcggcacgggcactgtgatgaactacgtctgggccggtctcttccactctgcgcgaaaggtgcgcacaccctactggcgtctatacaacgatgcgtacgtgcagagcgcggacgcgatcattccttactaccctgagctagaggaggacggactgaaacggaccgaattgctaatcatgatctcctctgat

SEQ ID NO: 20855 - DNA, 850 bp, Emericella nidulans
  unsure (1)..(850): unsure at all n locations
gcagaggacttctggcgcgcgctgccagtgcagaaggagttgctagctggtgtgctagcctgcgacctcatcggcttccacacggacgagtataagcggaattttatcgagtgctgttcgcgcgggttggacgtcagcgtcaaggatgacagtattgtttaccagggccacacagcgcgtacgggcacgttcgtcgtcggcgtcgacccggccaagttcacggatgggctgcagactaccgaggtgaagaaccgcatcaaggaacttgaggatgagtacaagcataagaccgtgatcctgggcgtggatcgactcgattacacgaaaggccttgtgcagaagctgcagggatacgactacttcctacggcagcacccagagctcaagaacaaggtgaggctcatccaggtggccattccgagccgcgaggatgtaaaagaataccaggagttggagagggagctgagtatgcttgtgggcaagattaatggagaacactgtacgtaccgaacctttcctttccctcagaccgtccttcgctgcttgccggagatggtgtactgacagtgatagcgacgcccgacggcaccccaattatctacctgcaccactccgtccccttcactgacctgacggcactctaccgcatcgcggacatctgcctcatcacctctcgacgcgacgggatgaacctggtcgcagcggaatacgttgcctgccagaaagaccggtttggcgtcctcgtgctgtcggaacttgcaggcgcggcctccttcatgagcaagggaagcatcaccttcaacncgtctagtgcgcagcagcttgcagacgcggttacaaggagcgacat

SEQ ID NO: 20856 - DNA, 772 bp, Emericella nidulans
ccaatcttatatggcgaatcctgaccatgccaatgcaaacgggtatgccgttggcgcgtataacgggctagaagccgactcttcggtcaaatgcaatcgctaataccagtcagctacaatagtgacggcatcatggcggtcatgaaatccgcggagcggcagcgctgtgccgcaataatccagctctttccttggacgatgcacttccaaggaccggaatctatccgctacgtagtcaataccgctcatgcagctgctgttccggcggccgtgcatttagcctactgcattaaggcccaggatgcagagctcgcactgacgcttccgtttgactcaattatggtagatgcctcaacagcagacgaggagtccaatatccgcttctgcaagagcattgtacagcgcgcccaagctctgaatatcaaccatcgaagcggagatgggtcgcattgagggaggtgaggacggtctgcctactgttgatatggagggtgtcataaccagggcggaggatgcggagcctttcgtccaccagtcaggggtacacttcctggctccggcactttgaaatattcacggagagtatctgcccgggggtgcggagaaggcatggaatcccccggtatgtctttctcagctgcctgtccttcgaaccatatcgctgacatccagtacccgtctagactgagcgccattggtgacttagtgtcttccaaaataccactagtccttcacggaacgcattcagtgccagatgacctcttcaaaaacg

SEQ ID NO: 20857 - DNA, 850 bp, Emericella nidulans
tctggaagcaagatcttcatattattcctctcagtgctgcaatctacctcctctgttatctggatcggtcaaatatcggtacattatttttcgtataatgactagagtcagtgggcttataaatcccaggaaacgccaaaatcatgaactcagaaactggcaatgatctcctgaccgagacgaacatgtcctcgtacgagtatacgtaggtgtccttaaccgtcgcccgacttagcactaagtcggtcaggatcgcattgatggtcttcttgatcgcctacgctctttttgaagttccatccaactattttctcaagaagctcaaaccgagcgtgcgtcttcctaataccctcccaacgtcaaacctaacgccagccacagagatggatcgctttcttgatgctgtcatggggagcagtgacaatgggactcggtggggcacacaactatgcacaagtaacaggccttcgctttctgcttggaggtacatacacaaactctacccaccagaactgcgaaattatacgccttgaactaacgcaaaccagtcctggaagccggtctctttcccggactcgtttacttcctcactttctggtatcgcacatcagaacgaagcatgcgcgtagctttgattcttgcatccgcgacgctagcaggggcttttggcggcgccatagcttacggagttggacatatgaaccaggcccaaggtctttcagcgtggcgctggctctttatcattgaaggcgccccgtctttagcgtccgctttcctgatgtagttcatcctcccagactaccctgaatccgcaagctggctgcggtggagcttacagcaattgcctgag

SEQ ID NO: 20858 - DNA, 644 bp, Emericella nidulans; identical to SEQ ID NO: 15542

SEQ ID NO: 20859 - DNA, 850 bp, Emericella nidulans
gcttggctcactgtcgtcctttatgctctctcatcgcccatcttgtcctagataacgccgcattgtcgagaattgtcgcggacagattacacgtgcaagacccttccttccagcagacgaaccgcctcgcatgtctcttatataacggtgctgaaggtcctttgctgacgatctgtaggtgtctactgtcatgtctgcctccatcaccacgctccgatacctcggtcatatgcataatgacctcgtcgggcatatcgcatccctcattcccacgccgcgcagccatttcctactcacctcatacacgccttttacgggagataatatcgatcaggccaagacggtccgaaaaacaaccgttctggatgtcatgcgccgtctgctgcagcccaagaaccggatggtctcgatcaaccccagcaagtccagctgctacattagtatcctcaacataattcagggtgaggcggacccaacggacgtgcacaaatcgctgctccgtattcgcgaacgacgcctagcgtcgtttataccttggggtcctgctagtattcaggtggccttaacgaaaaaatctccatacattcaaaacacacaccgagtcagtggcttgatgctggcaaaccacacctctgttgccacattatttaagcgaatcgttcaacaatacgaccgtctgcgaaaacgaaatgctttcctagaacaatacaagaaggaagctccattccaagacggcctcgatgaatttgatgaagctcgcgcagtggtaatggatcttgttggggagtatgaggcggcagaacgagaaaactacctcgacccagatgcgggaaaggatgaagttggagta

SEQ ID NO: 20860 - DNA, 850 bp, Emericella nidulans
cttgggtccgaaactaccgtgacctcctacatctggccctctcgcaatgccttatcgaacctatacgatgggacgtcgtcgaggcagaagtgccgcggctcctcaaagaccgtgatggtctcgatacgctgacaattgtagccttcacaaccgtgctttctaaaagtttgtccaatgctctggttaccgaaggaataaagccagcagaacctccgacctctataaataagaccccggagcgatatagccaccgtccagggtctgacagaggcaaactggcgattgtgtctatgtctggtcgatttcccgaggccccttctaccgattcattctgggatctgctttacaaaggccttgacgtttgtaaagaggtccccttgcgtcgatgggatgtaaagacccatgttgatccgagcggcaaagcgcgcaacaaaggggccacacgttggggttgctggcttgactttgctggtgaattcgacccacgcttctttagcatctcgcccaaggaggcgccgcaaatggatccggcccagaggatggcattaatgtcaacttacgaagccatggagcgaggaggcattgtgccagacacgacaccgtcaactcaacgtaaccgcatcggagttttccacggcgttaccagtaatgactggatggaaacgaataccgcgcaaaatatagacacctactttatcacgggcggaaacagggggttcattcctggtcggatcaatttctgccctgaattttcagggcccagttatagtaatgacaatacatgttcctccagtctggcagctattcatctcgcatgtaattccctgtggcgtggtgcctacaatctgcg

SEQ ID NO: 20861 - DNA, 606 bp, Emericella nidulans; identical to SEQ ID NO: 6571
  unsure (1)..(606): unsure at all n locations

SEQ ID NO: 20862 - DNA, 556 bp, Emericella nidulans; identical to SEQ ID NO: 15948

SEQ ID NO: 20863 - DNA, 850 bp, Emericella nidulans
atctcttttctccctcagtggcaaaactgccctcgttaccggcggaacccgcggcattggcgctgcaatggccattgcgcttgcagaggccggggccgatattatcctcattcaggtgcgtccacccatttcacctccccatatccactacacgacaacgatccactagctaacatgcgacgcgcagagagacaccagtaacaccacgacaagagaccagattacgcgcttaggccgcaaagccacaatccacgccgccgaactttccgaccggtctgccgtaaaggccattatcccaacgctcgtatcgcaagggcacaacccaacaatcctgctaaactgtgcagggattcaacggcggcatccatccgagagattccccgacgaggactgggacgaggttctcaacgtcaatttaacgagcgtcttcacgctctgtcgcgagttcggcgcttacatcctctctctgccagagtcttctttcacgccgaataagaagaagggctcgattatcaatgttgcttccttgttgtcttaccagggtggcattacggtccccgcgtacgcggcgagcaagggtggtgttgcgcagctgacgaaggctctgagtaacgagtgggtgagcaagggcattaatgtgaacgcgattgcgccggggtatattgatacggatatgaatgtggcgttgatcaatgatgcgaatcggaatgcggggattatggcgcgcattccggcgggacgatggggacggcccgaggactttaaggggccggtggtgtttttggcgagcgaggccagtagctatgttagtggagagcttgttacggtcgatggaggttggatggggagg

SEQ ID NO: 20864 - DNA, 808 bp, Emericella nidulans; identical to SEQ ID NO: 6850

SEQ ID NO: 20865 - DNA, 753 bp, Emericella nidulans
tcagagatgcgtccctcaaacccccgccccccagtgacaggcccggactccggccccgaagctcccttccccattcgcctttctggacctgtgatcaagggcttcggacgcgggagtaaggaggtatggttccgtcctgtggactcacctctaccgaagaaacaagctaaccgaattgccaaaccagcttggtatcccaacagcaaacatccccgtcgacggactagaggaggtgctccccaaagaattgggggtgggcgtttactatggcgttgttgcgctggacccagccacagcgcccgcgccttcatcatctgattctacatcaggagacgcggctccgatcctcccggctgtgctcagtataggttataatccatactacaagaataagacgcgctcgattgtgagttttgtgtaccccctcctcctgtacttatttgtccatcagaccagatcttgatacctttctctttctcttccatcaaacaggaaatccacatcatgccctccctaaccctgccctctccaacggctcccagcgaagaaaaagaaaaagtcaaatttcacaaacttcccgacttctacggcacaaagctcaacctgctgatgctagggtatatccggcctgaatacgactacgtttcgatggaggcactggtcgaggatattcgtattgattgcgaggtcgcgagggcgagtctgctccgcccggcttaccgagtgtatctggatggaaatgaggacgaaacg

SEQ ID NO: 20866 - DNA, 500 bp, Emericella nidulans
atctacatgcttcactcgagaaggggctcaaatcagtagcgtgccaaggtgtcaaagacacgttggagtggttgacggcgaagaaaaagaattccgactctccaaccctaagagtgggactgctgactggcaattctcgttcgaacgcactcttaaagatacgtgccgctggaattgacactgaactcttcgaccttagcatctctgcattcggtgatacccatgtggatcggatatctcttattcaggattccatgaaaaagctgcgtgctagggacggccctgacctccatgaaagcaaggtcatcattgtcggcgacacgcctctcgacatcgaatgtgctaagagggctggatgtgctgtcgtcgcggttgccagcggaaactacaacatggacgacctggaaatgctcgagccggatcatgcttgtgcacagattggcgagtcgagagcttaccttgattctcacttgagccgacccgccactccactgcctttg

SEQ ID NO: 20867 - DNA, 498 bp, Emericella nidulans
tcaaccaaaagacgaagacgagaaactcaaccgcggaatcggcgcgcacacggacttcggatgtatcacgctgctgctgcaggacgaggtcgacgggctccaggttctcgacgccccgagtgggcaatggcttgacgtacgctctctagactgtctacgcttgcgttttctaaaagaaatcaggtccaacccgttctcggcgcttacgtcgtcaacctcggtgaccttatgatgcgcatggccaacgaccggtacaaatcgaacatccaccgcgtgatcaacaagtccgggcgcgagcggtactcgatcccgtttttctttagtggaaacccagaccatgtgtgcaagtgtctgccaaactgctgcaaggcaggcgagcagccaaagtacccgcccatcacggtggaggatatggtcaggggcgcgtataagcagagctatggccgggctgaggcgtataagaaggagctcgcggagaaagcaaaggcgcataagata

SEQ ID NO: 20868 - DNA, 850 bp, Emericella nidulans
agtattatctagaactaaaatcttgctttgcaaggtgctataattatcagcaagctaaatataagaatcctaggattattaaaaagtagttttataatctaagagagatctgcagcaagaaggagattttactagtaaatatctataattttaataagactagctttactatagggcttatagtaactgctaaagtacttgctaggagtaagatactaagtaatccttatctaatttagctaagaaactataaataggtaactataattaaatatattaatactataggatggtcagttttctctactattatttttaaaggaagggtctttataaaaaaatagtatatagaatatagcttaccaggtaattagaggattaagttaagtaataataaataaataatagacaagataggcctttgctagctttaaaattactttattcctactagtactccttatataattagctaatattaattacttatcttagacagctatagaagctatctaatattttaatttaacaagctctgtaaaaataataatataatatctctttatatatctgctagtttatcttatctactataactactaaatattagctattttggtctgctaaagtatatatatagaggtcttattaaattaagatcatgccttggcaaatattatattaataagtttgactttttagaggcctattcctgtatatattaaaatatttttaataaaaagaatatttagagcagctttactactataaaaataaagctatataacctagataagattcttagtaaactttatatattactttttatactatctccccttctagtatt

SEQ ID NO: 20869 - DNA, 845 bp, Emericella nidulans; identical to SEQ ID NO: 15601
  unsure (1)..(845): unsure at all n locations

SEQ ID NO: 20870 - DNA, 500 bp, Emericella nidulans
gagtgctgtactctgtgctctttacattatacttaagagtcgaacaattacagacttgatttcgattctgatcccagcttaccccgtctaaatatccagaacgaccctaaataacaaccaagatgcaccccacctcaaccccctccaacctttcccttccccccatgaaagacctgacaaccgaaaacatcacggaaaatgtacatatcgtgaactcgcaatgccgcgatcctcgccttcgttaccttctcaaccgcatagtcagccacctacatgacttctgcctcgaaacgcgcctctccacagaagaatggaacacaggcatccaatttctgactgagatcggtcagattagcgacgacctccgacacgagatgattcttctctcagatacactaggtgtctcatcacttgtggacagtatcaaccacccacggcaaccgcctgccacagaggggacggtgctgggcccgttccatacgcatgacgcagcggatatg

SEQ ID NO: 20871 - DNA, 850 bp, Emericella nidulans
ctaggctgtggtcgcagtcaatttggaggtactggcggtaattcacatggacttgcacactttaatgcgacatcccacgccgttgccgtgaaactgggttcaataactgccgatggttcagcagatatttactgttataaatgcaacgaagaaagaatcgatcctgaccttgctacgcacctgtatcattggggcattgatttagcggggcgcgagaaaacggagaaaagtctcatggaaatgcaagttgaacaaaatctgaaatgggatttcttgatgacgactgaagatggacaggatctgacaccagtcttcggcgcaggcctgacagggttgtcgaatcttggaaacagttgctatctgtctagtgtggtccagtgcctttttgatttaccagagtttcaacgcagatattaccatcctaacgaagacccgcctctggcagaaacaccagctgctgatttcgaaacgcagctgcgaaaactggcggatggtaccctctcaggacgatactctcggccagatgataagactgtcgcctctccaaagccacaagaaatccgacaccaaaagggcttggctccatcgatgttcaagcatcttatcggtcgcgatcatcctgaattctcgactatgagacagcaggacgcctttgagttcctactgcatgttttcaagcacgtcacattgtccaagcaccctgtagggatggataatccgattgattctttcaagttcagcattgagcagcggctgcaatgtctgaagtgcagaggagttcgctacaggctcgatgaacaagacaatatctcgattccagtgcccgctcgtcgagtaccgattcagaagg

SEQ ID NO: 20872 - DNA, 536 bp, Emericella nidulans; identical to SEQ ID NO: 14022

SEQ ID NO: 20873 - DNA, 850 bp, Emericella nidulans
gatagtgggtggtgcattgacgcagtccctgggctggagatggtgtttctggtatccctcttacgtcacaggctggcccgcggtagcttcatattgatctaactcttgactaggatcaaccttcctattggcgccgtatcactcgcagccatggttttcctgctttcagatcctccaacccgtcgagagggtaacttcacattgatccagaagatcagagcactagatctagtcagcaactgcttgttcatcccgtctctcaccacgctcttcatcgcgctctcctgggcgggaacgaagtactcctggtccgatgggaaagtaattgggttgtttgttgtattcggcgtattgctgatcgccttcttcctgaatcagtaccggcgcggggactcagccgcactcccgtttcgcgtcatcaagagccggaatgtcatcgccgggtttatctacacaacatgcacgaactcaatgacaaacgtgcttgagtggtacttaccaacatactatcaagtcgtacaatcccgggtatgttcttgaaatgtggccgattcgcaactacgagaagtgcgctaaccatgttgtctgctgctagaccccaggtgagagcggttatctgatgatccccatcctacttgggatcatgctcgggctgttcctccagggcatcggcacctccatgtttggatattacgctcccttcatgatcttcggctctatatgcatgcccattgccgccgcgttgatgactacatacaaaccccatttatccctcgcccagatcatcctttattcaggatttgctggcttcagcggaggtatcggtttccaaggatctcagaccgcggta

SEQ ID NO: 20874 - DNA, 635 bp, Emericella nidulans
gcgcaaacacataatccgtcacaagaatcgaatccgttaaaccggttaacggaggagcagcgcgaggaaatcaatgaagctgtacgtcttcccgtatagcccaattgaccgcggttcttaccggagcattgactgattcttcctgctagttcaccctcttcgatctcgatcgtgaccgacatctagactaccatgaactccgtgtggcattccgcgcccttggcttcactctcccgaaacaagaactcatctccctcttaacgacgtacggtgtcccacgtcctcaggtccaacagcaagccgcagcgcaacaatctcagcaacagcccaagacggctccaactacgaatccccagcatccatctaacctgttgatgccactttctgcatttcaagcagtaacagcggtgaaaatcctcgagcgagacccgcgagacgagatcctccgagcgtttgagcttttcgacgagggcgggaaagggtatatcgacctggaggatctgcgccgtgtcgcgcgggaactaggggagacgggcctggaagaggaggaacttcgtgcgatgattgaggagtttgaccttgagggcgttggcggtgtgacgagggaggcctttgtgagtatctgttggcagtga

SEQ ID NO: 20875 - DNA, 479 bp, Emericella nidulans
cgacggagtacgttggcttcccccagtatatttccagcctcgcgaaccaggacacctggtctagtcgtgagtactggcgctcgctcctcaaaggctgtacaatgccggccatcagctcatcctcgcaacccagacgtctaccatctagacaggtctaccacgattctcgccgtgttagtttcaaaacccttccagcaggcatcactctctcaacgatcgtgcgatcggcgtgggctctgaccctaggccaacacgtagggaacccagacgtactctttggggaggtcgtctcaggccgcaacggcgaccccattgccgaaagagcagccggatgctgcgcaaatctcgttcctgtgcgcgctactatccacccagcctggaccacacatgacctcctcagatctgtgcagcaacagcttgtttcccgcctgccgcacgaatccctcggattccgcgacttgatgcgcaactgtacggat

SEQ ID NO: 20876 - DNA, 692 bp, Emericella nidulans
ctcaagatgcataagatcgcttctattcccggtgacggcattggcccagaagtggtctcggccacaattcaggtcgtcaacaagctcgcctcgaagctgggcttccagatcgagttcacccatcttccatggggaactaagtactacaaggaacacggccagttcatgtctgacgatgccctggatatccttcgcaaatttgatgccggcctttttggcgctgttggcgatcctggtatgcttgcttcactgcaaccccctcgcattgattaagaattctgaccttggtagacgtccccgaccatatctccctctggggcttgctgttaaagatccgcagtccacttcaattgtacgccaatgtccgtcctgtccggactttccctggaaccaagagtcccctcaccacggctaaaaacggcatcgactgggtgcttgtgcgtgagaactccgagggcgagtactgcggacaaggaggacgcagccatatcggccacccgtgggaggcagctactgaggtcgccgtcttcacccgagtggcgattgagcggattatgcggtttgcctttgagaccgctcgctcgcggccacgcaagaggttacggtggtgaacaagagcaatgcgatgcgccccggcttggtcctttggaccaagtggcttgcaaggtggcaaggatttcccgccgttgcct

SEQ ID NO: 20877 - DNA, 850 bp, Emericella nidulans
atcgcttgtactcgaaaacacggcattaaagatgtatgttcacgagcttgatatggcaatctcgcagacgagccgggccatgttccacatgatgtgattctcgctcacgcaatccgtcgagtattttgtgctagcgctaggtttttggttagttttgcctcctatattaaggggcgtcatgttgatcgattcccacgaacagatggggatcaaagctgatcaatgacggcgaaatcagcttgtatcaatttatcgtttcattcatggtcgtttacttctccggtcaagacaccgcgctggccttcagttcgccagcagtgagtatggccaagcgcgttctggcctatagggatcattggcaggttgggtcacctggattcaccaagggaaaccaagctgccaactactacttctggcttgacatgatcgacgggacagtccgtggaactgacgacaaccgcaacgagggccctaaggacggatgccgctctattgacttcgaagacgtgcgctctgctctgatttttcggattgaaccatgtccggcccactaacactacataatccagatccgacgcggcgcctttatagccctcgttggcgcattgggctgcggaaaaagtaccatgattttcgcttctcgagcgcttctacgacccgacaagcggctccatagatataaacacgtcaacgccgctgccaaccctaaacccgcctatcgcagacaattatcactagtgcaacaggaaccaactctctttttgggtactatccgcgagaacattttgcagggcataccagacttcggcctcaacgcatcaagaacagaaactggatcaaactccgactg

SEQ ID NO: 20878 - DNA, 732 bp, Emericella nidulans
tcttcctctcaaaacagtacaaaccacaccccatccaaaatgacagaatttgatcgcgtgcacccatcgacaacggcctacatcgtcgccacagccattgtttccggaatcgctggctactttatcggccaaggtgcgtcgctaggactattctcaacaaaagagaaagaaggctggccaaatggctataatgtgaagccgcaccgaggctcttcggatgaggaagatgatactgaacaggaggagagtgatgaagaggaaggcgatggaactgaacttgcaaactttgagaacaataccgaggaggttaaattggtgcttgttgtgaggactgatctggggatgacgaagggtatggcacttttacctctcttttttagtagccatttaattgccctcaccagcgggatgctaaccgctgtctgaattaggcaaaatcgctgcccagtgttcacatgcaactcttgcctgttacaaatatctcgttgcgaacccatctacctctacgatcctgcgtcgctgggaacggcaaggtcaagcgaagattgcgctacagataaaatcggaggaggaaatgcaattgttgcaggcgcaagccgtcagtcttgggctctgcgctcgggttatacaagatgctggacgcactcagatcgccagcggaagcggacggtgttgggtatcttagggccaaaaagtgtagttgacacagtgacgggccatctgaagctgctt

SEQ ID NO: 20879 - DNA, 547 bp, Emericella nidulans; identical to SEQ ID NO: 9537
  unsure (1)..(547): unsure at all n locations

SEQ ID NO: 20880 - DNA, 850 bp, Emericella nidulans
atcgtatgctgcttgttaactgcaggctaacagtgcaggatgctattcgtctcttcagcgggactggagcaggcaaagcgccttatctcctcctacaagcagaacgaggtcccgacaatgaatgcggagttatggagggcgaagaaggtggtggattcgacattacacccgggtatgttccagatatgaaccctattactggctcactgttcttttggctgacttgtgcttgctaatagacacgggcgagcctgtcttcctccccttccgcatgtcatgctacgtcctctctaacctggtcgttacggcgggaatgctcacaccgggccttaaggtaacagcctcgcctatatggacagaataatatatctgacgggacttagaccaccgggactttgctctggcagattgcaaatcagtctctcaacgtggcaatcaataatgccaactcgaacaaatcaacacccctctccgtttcgcagatggctaaatcctacctcatggccgtgtccgcttcatgctccgtcgcgctcggcctgaacgctctcgtcccccgtcttaagaacgtctcccccaataccaagctcatcctcggccgactcgtccccttcgctgccgtctcgagcgccagcgcgctcaacgtattcctcatgcgcagcgaggaaatccgtcagggcatcgacgtataccccgttcctgagaaagagggcgagccggtccagagtctcggacggagcaaggtcgctgctaagatcgctgtcggtgagacagctttcaaccgagttctgaacgcgaccccgatcatggtcgttcctcctctgatccttgtgcagcttgagaagaagagctg

SEQ ID NO: 20881 - DNA, 476 bp, Emericella nidulans; identical to SEQ ID NO: 10734

SEQ ID NO: 20882 - DNA, 574 bp, Emericella nidulans; identical to SEQ ID NO: 6376

SEQ ID NO: 20883 - DNA, 593 bp, Emericella nidulans; identical to SEQ ID NO: 11982

SEQ ID NO: 20884 - DNA, 850 bp, Emericella nidulans
tatcaatgcttatttgagcatcacgcctgagaaggtcagtaacaccctttttggcatgcttattccagactaaccaagttcaggaattgaatgataccttcgaacgtgtgactcagatgctcgagtcgtcggtgacttccgagcaggaagcagccaagcagggcaaccagcctacaaactccggagacaaaatgccgccaacttcccacacactcattgaccttgtcatcgcaatgtcaatatacctacctcgttcgagctttgctgcactcttctctctcgcagcagcgattctgaacggtggcactgccgatcagcagctcatcaaaaaggcctacaagttaattccgcgcttagctacaactgagacaggagctgctgcgctaagagaaaggaacgcagagctccagggcctcatccttgctacggctgacaagacacctgcatccgcgcgccgggatcgtatgctcgccatccatgaactcgtctcacacctcccaacttccgatctccatttcatcccttcaattctctcagaggttgtactgggctgcaaagagagtaatgagaaagcccgcactgcttcgtttgacctgctcattcagcttgcgaaacgcaccattgaccatgagctgaacccaccgggcaccaccatccggaactctcttgtccctcatatgcctgatgacgcccctgatgctcctgccacaattgaggagttcttcacaatggtatctgctggtctcgctggtagctcgccacacatggtagccgcctcggtgaccgcgttgtcgcgactctttttcgacttccacaaggacatccagtctgccataccgctggacctggt

SEQ ID NO: 20885 - DNA, 850 bp, Emericella nidulans
ggaaacaagacattccacgcgccctcggtgttaactactttaggtgatccccaaacctggatcatgtgcctcctcaccatcctcgtcactatcccttctggtctgatcgttaccttttcctcaatcctaataaaggggttcggttatacttataaggaatcggctctcctgaacatgccgtctggcgtggtaagtatcctctccatcctgttgtccacatacgcagtcgcaaaggggtactcgaggtggcttgcgatcgaccttttgcttgtcccgacgctattgggctcatgtctcatgagttttctgccgaagagtaatcaggccggattgttggtggggatttatatggtaaatacggtaaatctgctcagaactacccaattgactgaacataagaattgatagcctgtgttcaaagactgtcgcccccttgattctgatcttcgcctggacgggagcgaattttaaggggtataccggcaaggtcacaggctgcgcgtttatatctgcagcattcagcattgcgaatatcatcggcccgcagacctttcaggcgagggatgctcctgagtacgtttcccaagctcttaatctgacctttccgcatcaatcgtagagctgtacgtcactgacagtgaatgaacgtcacagatatcttcccgctaaggtcaccattgtggtcgcgaatgctgcagcgatcgcggtctcaactgcgctgaggttgctctacgggagcaggaaccgagaggctgaaaggctaggggctctggtttcggcgaagagctggatggaaaaacgggtcgtcaggcaggtggaggaagaggagactggattccggtatatttac

SEQ ID NO: 20886 - DNA, 850 bp, Emericella nidulans
ccctcaatcctcgcatccatgtctcccccactcagctcgcctggcacccgtttgacatcgaagagtctgagaccgatttcgtcgccggtctcaagactgttgccggctccggcgaccccaccctccgtgagggcattgcaacacacgtttacacagctaacaagagcatgacaaagagggcctttgtcaactccgacggcgagttccttattgtcccccagcaaggcgccctcgacatccagaccgagttcggtcctctatttgtccagcccggtgagattgtcgtcatccaacgtggtctccgcttccgcgttgagcttcccgatggcccttcgagaggttatatccttgagatctggggctcgcagttcgagcttcctgaattagggcctctcggtgcgaacgggctcgcgaatgcgcgggacttcctatacccgactgcgaaatacgaagtcgttaaggagccgtgggagattatctacaagctaggtggcaaattcttcaagagcacccagcagcacagtccattcgatgttgtggcgtggcatggaaactatgtacgtcatgcgcttccgaaccttcttccttcctcttatggtaaacgtaactgacagttattgcaggtcccatacaaatacgacctgacaaaattcgtcaatgtcggctccatctccgttgaccacatcgatccatctattttctgcgtccttactgccaaatcccgcgaccttaatgcccctctcgccgatgtcctgatcttctcgccccgctgggatgttgcatcgcgtatgttccaccaggtcaacaattcgaaaacatatgttacaggaagcagaactactgccccctt

SEQ ID NO: 20887 - DNA, 768 bp, Emericella nidulans
taggtcgaagcatttcagttgttgaataatatgctgatagtgaatgcatagactactaaagcgcgcgcaagcaccctccacctccctcatggatccgtctcgctcccaatcttcatgcctgtcgcgacacaggcaagtctcaagggccttacatatgaccaattgaaacaaacagggtgcatgctctgcctcaataacacgtaccaccttggcttgaagccagggcaggctgtactggatgaggtagggggagcacatgcgctgcaaggctggaatcgcaacatcctaacagacagcggtggctttcaaatggtttctcttctcgagctcgcggaagtcactgaggagggtgtccggtttctgtcaccgcacgatggcacgccgatgtacgtttgagtttagtattacgggcatgttcactgacgaaaacaggctgctcacaccggaacactcaatctcactacagaattccattgggtccgatattatcatgcagcttgacgatgtgatagcgactacatcgccagatcacgaacggattcatgaagccatggagcgctcggtgcgctggctagatcggtgcattgcagcccacaaaaccccagaaacgcagaatttattctgcattattcaagggggactggatctagagctgcgaaaacggtgctgcgcggagatggtagcacgcgacacgccaggaattgcgataggtgggctgtcaggtggagaggcgaaagaggatttctgtaaagtgtatgtgacctgagg

SEQ ID NO: 20888 - DNA, 380 bp, Emericella nidulans
agaacaccacgggtaagaagcaacttgctgtcgattcgttcgcacatgctctcaagcagcttcctacaattttggccgacaatgccggtctcgattcaagtgaccttgttacccgactacgaaccgcgatcaacaacggtatgacgagctctgggctggatctgctcacagcctggcggtggcattgccgacatgcgcgagttgggtgttgtggagagctacaaattgaagaaggctgttgtgtcgtctgcttcggaagcagctgaggtaagataatatttcacgctcatttaagtccccgactaaccgtctaatagcttctcctccgtgtggacaacattatccgcgccgctcctcgtcgacgtgaccggatgtaaatg

SEQ ID NO: 20889 - DNA, 850 bp, Emericella nidulans
aagcagcagctggggaagccaatacgcattgcttgggcaaaccggacatacttccacccaacagacctgagcaaaggagaagcgtacaatcttttcgttctttgctcggcttcgaaacgggtccatggggctgaaatatccgaaggtggctatatccaaggtgcaggggatgacagcgaagcttgggcccacggtcttacaccagctgtattttgggctgacaaattcacgctcttgacacgggcagaagaagacctgcccgaggtgattgcggatttgatgcaggagagccgtaagcagggttcggggcaggaagcgacacttatcgccgccgtctcagaacctatatgtcagccgaacggatcctagcttggctgccaatggtctctatgacctggttattgattgcaatagcagcgcagagactacggaagagaaacccaagcgtctgaatctaggctgtatatcctcaaagcagggcggccgggacctccggaatcatttagacaaggttcgggatttcgttaatctgcacctggcctcgagtccgtcacagtctctgcttgttatgtgcgagtctgggaaggacctttctgctggcaccttgctcactataatctgcctgttctataatgatgcgggtaagttgaatcgctaccagcactattccaaccttactctgactgttgtaggtgagtttgtcggacctcaaacgcaaccgataagtaaacagttcatccgacaacgtcttgcttggatcgtgtcatcgaaacatgacgtgaacccatcacgcagcacgctgcagtctgtcaatgcgtttcttatgcaacgaccggactattaaactctt

SEQ ID NO: 20890 - DNA, 850 bp, Emericella nidulans
cgacggaagtaagagactattataaacaatccgcgtccgacgtctccagtcctaatctgtacgtatgccaggattgccttatcccaagggtacaggacatagcggatctggatatttcagatgtcaagtggatcctgatcattgagaaggaggtattgttctggcaatccatatcaacgtctcacctctttagactcataataactgctatcctaactcactcaatggttacataggctgtctttcgtcgtctcgtccgaaacaacttccataaccataccatagtaggaaaaggaatcctaattacggtacgccaggcatacacctaagcaccaaaacatcagtccatgctaacgaatgtcaggggaaaggctatccggaccttgcaacccgctctttcgttcgcaggatctttcaaagtacattcccacgatcgaccctgacccaagctccccccttctatatcctcgccgatggtgatccggatgggatagccataatgtcaacatacaaatacggctctatggcgcacacacgagagaatgaacggctgaaccttccttgtctgcagtggctagggctacgcatctccgagataattggaggcttagagtctgacgcggacgagaccctaatgtcgctaacaaggagggataggagaaagattgggaccatgttgaaacggagtccgatttgggcagtagatgggcctgaggcagaatggcgggtggagttgcagcgcatgctgatcctgaatgttaaagctgagattgagatactgtacgaccgtgccggcgggctcgaggggtggattgatcgtcatatgaaaacacaggggcagtaaatccta

SEQ ID NO: 20891 - DNA, 850 bp, Emericella nidulans
cacttccacagcactgcaaccgtcgtatggccggctctataagatattcagtgtttgttctccctcaccctctttcacccccttggagaggcacatgggctgcttagtctgacagctataggcaaaatgggcgtttctgtgcgccgtctttctctttgagctggggtccttgatatgcgccgtcgcaccatcgagtaccgtccttatcgtcggacgggccgttgctggtataggcgtcgcgggtattttctctggtgcgctggtcatcattgcactatgtggtgggttgctttagaccatcccgtttactgctgaatcctctgacctgaatagtacccctacctaaacgcccgctcgtcttcggtatgttcggcatggtttggggcatcgcatccattgccggaccgctgttgggcggcgccttcactgactctgtctcctggaggtggtgcttctacatcaagtatgtcgctcgaccacggcattcaaccattattcactgacacttgacctttactagcctgcccatcggcggtgtctcgatggctatagtagcctttatcctgcagctccctgagcaaaacctatccagcaaagccactccactcctcgaccgcatcaagcaaatcgacttcatcggcgctgccttgctgatcccctgcatcatctgccttctgctcgcactgcaatggggcggaaacaaatacgcgtggagcaacggtcgcataatagggctcttcgtcaccttcggcgtcctcgcgatcctaaccatattctctcaaatcaaactcggtgaccgcgcaactctcccaccgcggatcataacccagcgcactgtcatcacatcaac

SEQ ID NO: 20892 - DNA, 654 bp, Emericella nidulans; identical to SEQ ID NO: 15931

SEQ ID NO: 20893 - DNA, 850 bp, Emericella nidulans
tcgctctcactctccaaactattcaatatacggagctattatgggagatgcttgcacgacgccgtggcgagaaggtccgttggcgtgttgtcgtctttattgaggtcgtcaaggcgatctgtcgacttttcctactacgccttacgaactcgcgcccccttgtcagcccaccgctacctgagcgtgaaatagatcccaggtcattagaagaagatgacagcgattggaacggaatggagtccccggtcagcgaacggctctcggatttaagttggaacatgcctcgtactgggctttcactaccttctttgcccgacgtcaacgatgtttcgaattatcttatatccaaggtcttgacggcagatgacatcaaacccccaaaagcgcttttgcacagagtcacaggtcaaggtcaattagcagaagttcttcacatcattcggccggttatctatgcacttgcgctccaaaaatggggtagcgataagcgaagctggaggccctggttgatcggctttgggatggaatacggctcacggcaattagccaaggccgactttcgagagagagtcgctggtggcctccgcggactgaccggcctcgagagagaggagctgaagaagagaggctggtcgatgggctggtggttgatgcggggagccttttatgagaacatcacgaggttcgtaactctttaacagatgggaagcattatgctgacattagtaggtctacattgagaggactcacggataagatgagaggaaaaccacttcttgatctcgtgggaagcatcattgaggattacgaatacctatgggataactactatttcccgactgctacatta

SEQ ID NO: 20894 - DNA, 582 bp, Emericella nidulans; identical to SEQ ID NO: 1571

SEQ ID NO: 20895 - DNA, 850 bp, Emericella nidulans
tcacgatttccagcattccgtgtttggtttgttacattacaacgctctttgagtcgtcaaaaagacccatcgcacgagttccataaagacccttatttattgcgcaaaatcgaagtccaggcggtggatttcttccaaggagggagactgggctttgtgaaactgagagcagaaatatcgaatgctggcggcgagagtcttcctgggagcgtttttctgcgcggcggaagcgttggcatgctagtaagatcgcgcacacctacaacacctcttgagtccgtagcatttccatctgactgcgccactaatagcttctccttcaaccgcacgatgttccttccactgaagaggacgataaatgggcagtccttacggtacaaccacgcatacccgctggctcacttgcgttctcggagatcccagcaggaatgctagatgatagcggtacgtttgcgggcttatcgtcggagggaatactggaaccaacaggctatgtcagttcctctataacgaggtggtgcatgtgtcttctctcgcattacagtcactgtacgagccggaagacggcgagacccttcaaaaagcagtatatccatcccccggtggcagcgacgagttcatacccttgttcttatgcgagaaacgaatagcacgcaaagatattgaagccctacaaggaagattgactggcttacggcagcacggagagaaaataacgctaaaaattgtgccactgaaggacttgtggaaagagggtatacgagacggaaagactcttgctgcttgggcattgtacacgggtctaaagagagacaacaaactctaactgaaagcgatgcattcgatctat

SEQ ID NO: 20896 - DNA, 850 bp, Emericella nidulans
tccggcttcatcgtgtttaaacttcacgaggtcaacctttcgcgcagcaacgtgcatgtggaaatcataatggatgattatatgttcccagtgtggtcatcgcccaaaatccgcactaagactgctaagatcgaggacagtaagtattctagtctttctggaaatttgaagttggctgactttttatccagttggcgatgcgtttgtgcgtgaacttgagttctcaaagatcacccttcggattgtggagaaggtcaatgccgacactgatgatgacgaacatatcgtggccaaactcacaggcgacacgttcagtacgctccagcgcatcctgtacacacctacagagcttgtcctccgatccaccgatggagaggtgagcagagtcacagttagtgctcgatacattcctgtcactatgaaactggatccatcagaaagcatcaacaacatgggaactctccgtgtggatgtcttggacgctgccgatctaccgtctgccgaccgcaacggctacagtgatccgtactgcaaattccgcttggacggtaaggaaatcttcaagactaaagtgcagaagaagaccctccatcctgcctggaacgagtttttcgagacgccaatcaagtcccgtattggtgccaatttccgctgcgatgtctatgattgggactttggcgacaaggctgattatctcggcggtgtgccgatcaaccttgaaatgctggaacccttccaggctcaagaggtttctctaactctagacggaaagtcgggcgcgatcaggttgaagctgttattcaaacctacgtacgtcatgcgtctcgccaaggatcatctactttctccg

SEQ ID NO: 20897 - DNA, 514 bp, Emericella nidulans; identical to SEQ ID NO: 14439
  unsure (1)..(514): unsure at all n locations

SEQ ID NO: 20898 - DNA, 501 bp, Emericella nidulans
ttcgacgacaagtcccaacactgcattccctttctccttcagcgtctgaaagcccaccaggcgcggcacagcaacgaccccgccaataccccgcccttctttcttggactgaacggcgtccagggcgccgggaagacagtcctggtatggccctggccagatcagtaatggacttgctgagagcaaggtactaaggaatcgctaggtgtccaccctcaattcaatcctccgctctccgccctactccctcgccgtggtaacactctccctcgacgacctttacctcacacacgaagaccaagtatccctcgcaaaaagcaacccgacgaacccgcttctccagcaccgcggccagccaggaacacatgatctcccgcttgcgcaatccgtcttttcagctctacgcgctggccgtcctacggcgatcccgcagtacgataagtccgcgtttagcgggcaaggtgatcgtgtccctatggaacagtgggagactgtgaatgt

SEQ ID NO: 20899 - DNA, 850 bp, Emericella nidulans
gccgttgtttgtgggggtttgcgaaattgatgtttctgctcttggggaggttcaggggacaaagggacatgctgtacggggtattcattgggagggggatgagttgtgggcgtggagcccgtcctcgagacctggtgttcctgctccagagtatctggaggggtgggatgaggtggaggaagagagagaagctggtattgaggaaaaggttcaagggctagagttggaagataaagatggtcaggaagtcgaagcagacgctgcagagcctgctcatgaagcggcggaagagccgattgccgagaaagagcctacaacgaaaggtacggttgccgttgctaccagactcaaaatactaataggagcagaaatcgatgatgcattcgaaaaggcctttctttattctctatacaaactaaagcaggacaacccatcaacacccaaccatggcctgtctctccctatctcgccgtcagcattcatggcaaacatgatcaccccgtatctccctgtatacaccgcacagcaagctcagtattaccaaatcaagaaaacaagctggaagaacgtgaagaagttcatcaagtacctcgacaagcaggttctagtgaagtcaaaggaccgcagcgggcaggaaaccgttattcttgacgtggactttgacgaccgccgagtcgtcaacttcactccgtacaggctcccgaacaagaatgcagtcgaaggcgcaggaaagtcgtcaaatgcggctggcaagaagcccgcaacagctgcagacggcgacccctccgtgggccagacgcttacagtgcaaaccttataccgaccaacagcaaacgtcacgccgacaatg

SEQ ID NO: 20900 - DNA, 850 bp, Emericella nidulans
cccgccaacgcgctacctggctgcggaaatggcatgccctctgcgtcgagaatatcgatgacctggcgctcatcctaaccgtcgagaacggcaagactctcgccgaggcgaaaggcgaggttctatacgctgcatcctttcttgaatggtttgctggtgaagctgagcgagttcacggcgaggtcgtccctgcttcaaatgccaaccagagaatcttgactgtcaagcagcccctcggtgtggctgcttgtcttgcaccctggaattttcctatcgccatgatcacgcgcaaggttggcgctgcgctggcggccgggtgcacgaccgtctggaaaccagcgggtgagacgccgctgagtgcgcttgcgcaggcggtccttgcaagagaagcagggtttccaagcggtactatcaacgtcattacgacgctgaacagtgtcgctgaagtcggagcggcattatgcaattccaagcttgtgcggaagctcagctttacgggctcgacacgcatcggcaagctcctggcaagccagtgcagccaaaaccttaccaagctgtctctggaactcggcggaaacagcccttttattgtttttgatgatgcgaaggttgagacggctgtcgaggcctgtattctcgccaagttcaggaactccgggcagacctgtgtcacggcgaaccgcattttcgtgcaggagggtatctatgaccggttttcggcagcactggtcgagaaggtcaaggcgctgaaggttgggaatggtgtcgaggagggtgtgatcattggacctctgacgcatgagcgcgctgttgaaaaggccgtcgcccatataaaaggtagcttctcctc

SEQ ID NO: 20901 - DNA, 850 bp, Emericella nidulans
caaagccgtcactactctcgcgcctccgacacccaactctcttctacccggtccaccgtcgttcagctgttgagcaacatcggctcgaagcgtgaggtccagcaatacctttcgcactttacttcggtctcgtcccagcagtttgccgttatcaaggttggtggtgctattatcactgagcacctcgaaaccctctcctctgcgctcgccttcctgaaccatgtcggtctgtacccgatcgtcgtgcacggcgccggccctcagctgaaccgcatgctcgaggctgctggtgtcgagccccagtttgaggatgggatccgcgtcacagatggcaagacactggctttggcccgcaagctcttcttggaggagaacctgaagctggtcgaggagctggagcgcatgggtgtgcgggctcgccctctcaccgctggtgtcttccaggccgactaccttgacaaggagaagtacaacctggtcggcaagatcaacggtgtcaacaagaagccgattgagtctgcaattgaggctggctgccttcccattctgacttccatggccgaaacccccgatggccaagtgctcaacgtcaatgccgatgtcgcagctggagagctggcgcgcgcgcttcagcccctgaagatcgtctatctcgctgagaagggaggtctgttcaacggtgacactggcgagaaaatctcgagcatcaaccttgatgaggagtacgaccacctcatgacacagtggtgggtgcgtcatggtactcgtctgaagatcaaggaaatgaaggagttgctcaacgatcttccccgtacttctagcgttgctatcatccaccctgccgacctgc

SEQ ID NO: 20902 - DNA, 850 bp, Emericella nidulans
agggcattgtcaagggtgatcatgtggttgtacctttgaccctcctactacctttagacaacaggaggactggctcaaggactggctcaatgggcaggggagtctgatggagtcctccgagagtacctcgctctgccttgtattggcgccgtgaaactccctaaagactctcccctgagattttcgcagtagtcgccctggcctgcaccggtgtgactgcctggaacgtcctgtacgggaacactcccctgaggctgacagatcgtgttaggtcaagatatgtaccatcaaaaatgattaaggaaatttgataaccgctgaaacactatgagcactggtggcgtgtcaattaccggcttgcttgttgctaaggctgcaggggcgactacgattgtgacttcttccagcgatgaaaagctcgagtctatcatggcgaagtttggctttgactatggtgtcaactacaagagatacccggagtggtctaaggaagttcttcgcttgaccggcggcgaaggggtcgactatgtcctggagaacggcggttctggtacgattgctgagagcatcaatgcagtcaagatgggcggcaacgtcagcgtgattggactcctttcccaggccaaggagatgcctgatgtgctggcctggcgctcgctaaaggcgcagtggttcgcggtatcacagttgattctacccagctcttgcaggaggtcgtccgctttgtcggccgtaaagggctgcgtttacagttgacaaggaattcggcttttctgccgaagaagccgtcaagactttggaatccatcaagtcgtgctctcatatcagcaaggtctgaatcaaggttgcc

SEQ ID NO: 20903 - DNA, 338 bp, Emericella nidulans
actccttcacgcagtacgggtacctcaactggtccggccctgtgattgcactggctcccatcgcattcggcattttctacatctttgagtctacttacagcttcacttctgactgctatggcgagaactcgtcctctgctattgcgggacaggggctgcttaggaatacgctaggcgctgtatcgccgctcttcgcgtcgcagttcttccataatgtggggagtcaatatgcaggtctcattctcgccatcgcggggacagccctcgcgcttattccatttgccttctttaaatggggcccgaagatccgggctagatcgaagcttgctgagacggcc

SEQ ID NO: 20904 - DNA, 793 bp, Emericella nidulans; identical to SEQ ID NO: 7947

SEQ ID NO: 20905 - DNA, 850 bp, Emericella nidulans
tgaagaaactgcgcgtattctcatttctcgcagcattctagcaagggacatcttcgagctctggggccacggtactacctatgaggccctgcatgccgacgtccgcaggcggacgcagcacctctggaagcaatacaagcaagcatccttcaaatttaacgtggaaagcttcgccggcaagcgtagctcggcccaaaagacagagatcatccagtcgttctcgtatttgggctttgagggtcccatctcaatgaaaaatgctgaggaagacttttgggtcatggagcagtactacgatcgcacgcataaccctaccgctgctactggtatgtcgcagcatccactgccgtccaagctggattcggctcctgtgaacatttacctggcgcgcaagcttgcggagagtagtcgtgaggtagtgaataagtatgatttaaagaagcgacgctatatcagtaccacatctatggatgcggagctgagcctgattactgccaatatggctaatgcggcgccgggaaaattattctatgatcccttcgtcggtacgggcagtttctgtgttgcagcggcgcatttcggagcaatcacgttaggctctgatattgatggacggagcttccgtgggaaggagatgcataagtggaagatgacgggagtacagttgaacttccagcagtacggtatcagcagcaaatttggcgattgtttcacttcagacttgaccaatacgccgttattgggcaagcagtttctagatgggattgtctgcgatacaccttatggtgttcgtcagggtctacgggtacttggatcctagtattctatagtgtcacataaatcgcatgtg

SEQ ID NO: 20906 - DNA, 359 bp, Emericella nidulans
gatgactactatgacatgttgcggcccgcaccaacaagcgcaaagcggataacaaagccttcgccgaagcccaagcccaagccgctcgtgaaggaggccatgtcgagattcaagaagagattggtcccgacgggaaacgtgccatcacataccagatcgagaagaacaagggtcttgcacctaagcgtaacaagctcaaccgcaacccacgtgtcaagaagaggatgcgctttgaggacaagaaaaagaagcttcgtagcgttcgccaggtttacaagggtggtgagggccgtggtggctacgccggtgaacttaccggtattaagaagaacctggtcaagagtgtcaagctttagttg

SEQ ID NO: 20907 - DNA, 660 bp, Emericella nidulans
acctgcacagagagcaaggctacagtcgccgggtggagttatctgggcaagtacattattgctggccacgaagatggaagcgttagccagtacgatgcaaaggtgcgattgacatgtcttggtttggcaagtacactatatactaaagtttgtctagaccggtgagcagctggagaacgtccaggcgcacgagtttgaccaccagatcaacgacctccaattctcccccgaccgcacccacttccttaccgtctccaaagacaaatccgccaaggtaggcttccattatcaccagactcagaattggtaattcataatatgcagctcatgtcctctcgtaacctcgccatcctgaagacctacgttgccgacacaccgctgaacagcgccgctatcactcctaagaaggaatatgtgatcctcggtggtggtcaggccgccatggatgtcacgacaacttccgctcgccagggtaaattcgaggctcgtttctatcacaaggtcttcgaggacgagattggccgtgtcaaaggccacttcggtcctctgaataccatccacgttcaccccgctggtacagcctatgcctctggtggagaggatggttatgtccgtgttcaccactttgacaagccctactttgattttatgtacgaagtc

SEQ ID NO: 20908 - DNA, 638 bp, Emericella nidulans
tgggatagctccatctccatgcaggtggtgattccctctacaacagcccttctgcaacagacgtcgcagacctgtcgagtatatacaaccttgtatcgtctgccatctccaaagcgacggggacggtcttagctttggcccttctcctatccggtctctctgccggcattgtctgctccatggccggacaaatggtgtccgaggggatgctcaactggagtattcgcccttggctccgtaggctcatcacccgttctatcagcatcatccccagtattgtgattgctggggcggtggggaaggaaggccttaataagacgcttacagctagccaggtcgtgctcagcgttatactaccctttgtcagcgcgccgcttgtttattttacttgccgcaaccggtacatgactgtgcccatggagcgggtacatgatgcagatgcagatatagatacagacgagcagacccagcctcagaacgccgcagaaggtgacgacaacggtggcagtgctaccgacggcgtcaaaatgggcaatggacttcttgtttctgctatagccgtcttggtctgggtcattatcgcggtcatgaatgtggccttgcttgtccttgtagggatgggcaaggcttaactaaca

SEQ ID NO: 20909 - DNA, 595 bp, Emericella nidulans
ggatgtttgattcgcacatccagtcttaccgtgccagagacacagtattgccagaggcgctgaaaagacacttcacaaatgcgcaactggcagcttctaaaaaagccacgcatcaaccgccagtctcttaggtactcctgtcaatccgataacaattccgctaacgcttttccagtggcattcaaccgcatgtctcggaagacctgacgctccggacggcaccctcctgcccaaaggaacgcatttcagcatgccctccgcggccatcctccaggacaacggcgtggaacccggtgccgaccaattcgatgggttccgatactacaagaagcgcctcaaccccgaggaagccaacaagcaccagttcgccatgaccgacaacaacaacctccattttggccacggcaagtactcatgtcccggccgcttcttcgcctccaacgagatcaagatcatcatggcgcacctgttgaccgactacgaattcaaatacccccggggcgcgacaaggccgcggaatctgacggccgatgagaacctgtatccagatccgtcggcacgtctgctcatgagacgacgggtggtggctccgccg

SEQ ID NO: 20910 - DNA, 830 bp, Emericella nidulans
accgtcatgggcgatacagtccggacagatgtcctgatcgtcggggccggcccgtccgggtatgctactctgcctgcttccctttgctctgcggaactacgtagttaacagcatgtactaactgtgagtgaacaggttgatggccggagtttggatggcccagatgggggtgaacacgatgataattgatcaaaagcacaatcttacgcgatgcggtcgagccgacggactggagagtcgaacattagagattctggacagtttcgggctcgcagataaaatctggactcaggcaaaccacactgtggagattgcgttatgggtacagctccccaaatggctctcgataggaaacccactgattcgagctctgttatgttcagggcgctggagccgatgggaggttgcaaaggcagagcatcaccgcaaattccaagcctggatggtcccggttctatgagtccacgcttagccagggccaagtagaagagtatctcatgcaatttgtgagggctcgaaagcacgtcgaagttaggctggaaacaatccccacttcgttggagattgataacatgacgatcgaccaccacgatgcgtttccgtttcgcgtcaatttggagactgcgccatttagtccgcagtcttcgttcgatggcgtggctactccgaacagcgagctcagctcgggacagtctgatgactcggggtatgcaggcatggggacaatggttgaagccaagtacattctgggctgcgatggagctcatagctgggtcaggaagcaactcgggttgaaactcgagggcgatacttacgacagactgttgggg

SEQ ID NO: 20911 - DNA, 545 bp, Emericella nidulans
tcaccgacagcgaatttgctgcggaagtctcgtcagtttgcacttccgcaggctcttactccgggggaggctcctacctcgaggccctacgctgaatccgacaccgcaacccggcctcatcctatccgagcatctatcgtcacaccggcatcgtcattagcgagaggagattggggtctcaagagaccgctacccgccaagtcgacatcacagaagtcttcaaggccagttgtcaggatcaatgaactagacaccttcgaacatgtcaccgacttcgagtccgcgtccgatcacaccgtgactctggagaaattccaagaattacatatgccaatctccctccctgcgaaggtacacttttcgtcgaacatggtcacaagacatcacagtgtttttgatcaggatgtcgacaacacggaggcgagcgaaaacattgatcaacccgacattaaacaaatcagacacactggaccctggctttcagggcttacggatgcggagttcgctgcttacttaaagaaggtacagaaacagaaacctcaact

SEQ ID NO: 20912 - DNA, 558 bp, Emericella nidulans; identical to SEQ ID NO: 6166

SEQ ID NO: 20913 - DNA, 850 bp, Emericella nidulans
gtccctggcagttagaggattgaaataagcaccaatagttagactatagatataattggcttttgctggcttcaaaatatcttcattccagcgacaaataagcgtacaagggggggatattggctgcttatctcacctcctaaaccctttggatgttggttgttgcagacctttaaagaaggcatatagcaagcttattgaggagaaatgacgcctgggatataactatattaacatgctagatttcttgaaattttacctagcaggttaccaggaagtctttactacagagaatatttaaagcagattcaaagtaactaggatactaccttctgatctcatggtagtgcttgaaaagtcaaatatcagcctgggtactctaaccccccctccaagccaagggggtgcttcaatcccttcttctcagcttggtacgccttatactgtgtactatgtatattgaaaagtctcttcagttaaaaggatgcttgagagaaggttaaaagtcccctaactccctccaaaagaagtcttagataagttggtaaaagggtgtaagttggctatctataatacaacttactagcaagggaaaactgtggtctctactcagccatagagaataacagacaggaaaagagttattcttaatactagataactcctatacaatgtcttccattccaggaagccagggacctaatttagacaagaaataactaaatacaggcaagataggggggtgctggcggaggtgcgcctcaaactttagatgcacctaaatatactctaccaacatgttttagaatataatattcagggctataagaggaccagctgtcctactcat

SEQ ID NO: 20914 - DNA, 850 bp, Emericella nidulans
tggcccgctttgtgttgggcaatgaacgatgctacccatgtgctctcatttgggcctggcgctgttgggagcctggtgcaggatgttttggagggaacgggtatgaacgtcgttaatctgtccggccagtctatggcttcgaatctatcgttgcttaatctgtctgcttttgctctcccacttggtaaagactggggtcgcaaatatcgcccgcggctacggaaagcagctgagggaagtgctcatgcatccattgaaaccaaaatgacgcggctgctaggaacaccacatgttatggtggcagggatgacgccaacaacatgctcacctgagcttgtagcggctatcattcaggcggactatcatgttgaatttgcctgtggtggctattacaaccgagcaacgctagaaacagcactccggcagctgtcgaggtccatccctccccatcgctcaatcacctgcaatgtcatctatgcttcccccaaagcactttcctggcagatccaggtgttgcgccgcctgattatggaagaaggcttgccaattgatgggataacggtcggcgctgggatcccatcgcccgaggtcgtgaaggagtggattgacatgttggcaatttcacatatttggttcaaaccggggtctgttgatgcaattgaccgcgtccttaccatcgcaaggcaatatccgacactccccgttgggatccaatggaccgggggtcgtgcagggggacaccattcttgtgaggacttccatttaccgattctcgactgttacgcccgtctcaggaactgcgcgaacgtcattctcggggctggcagtggattcgctcctgctgaggaca

SEQ ID NO: 20915 - DNA, 389 bp, Emericella nidulans
ttgcggaagagcgatacaccgttgatggagttgtgttcagcaatagtcaagtcgtgaattcccagaatggatgccggatcaagacaaatgagggggagactggcgaggtctcgaacatcaagtatgagaacatcagcctcagtggaatcagtaagtacggtatcgtggtgcagcaggattaccttaacgggggcccgaccggcgagccgagcaacggggtgagcatcaccaatgtcgaattcaccgatgtcacgggaacgatgagcggtggaaaggattattacattctttgtggggatgggagctgtgagaactttacgttcagtggggtcagcatcacggggggtagtgatgatagctgcaattatcctgactctggatgtccttga

SEQ ID NO: 20916 - DNA, 722 bp, Emericella nidulans
  unsure (1)..(722): unsure at all n locations
gtagttgcagagtacttgatgacgaggcacgaaaaatccgcccgaccctgcaatgtntgccgaactttttcgggggtctgaagaagccgattatatttttgtcaagcggctcggtattaacgcactcatccgcgaggccatgcaagcctggagcgcgggagagctaagccgtttggtgcaccgtcatggtggccgtcccataggcagttttgagttggatctgccctccccaggcctagatctttcaaaatcccaagtgagtggtagcgagagggaaataatacgcagtatacgccccattcccgttccagcgttgttcatggactgtacacatgacaatgaaatgccagcgcaaaagagaacggcgacagatacactaccaaacgctgctcttgtagcaatgtgtgactctgccattggaagcgttatgggatatgatgaagtctatcccaaaatcgtggatcttgtgcatgaaacccgactgtactccttctttgatcttccggaatccccaactcttgacgaactggtcaatcttaaggggatcagtggcttgaagcggctgctcaacgaacttcatactatgatgggtcaaatggggtacgatgaaactttcattcatcatgatggtgaatacatcaccgtgcataggaagcatccacaaacgcgaaagggtatattcttgatcgcccatacagcgtttcccggtcaaaatagcggac

SEQ ID NO: 20917 - DNA, 850 bp, Emericella nidulans
tcttttgcggaaaacgtccaggacaagacataatacctataccaagtggaaaactttctcacacaaaaagtcaactggctgctgcatcggaagagctctcaaatcatgttcctgagcatatggtcccaaagatctggattcctttggaaagcatgatgccacaaaacgactcatcaaaattggaccgcaaaaaattgggggtgtggcttgaggctattgatacagcgttcctggaagctctcaccaagtcttctgacgctggctctgagagtcgagagcccgaaacgcttctagaacgccaagtccaacaagcatgggccgatgtgttgcgtttgccgcctactcaaattcctatagagcacaagtcattcctaagtgttgggggagactccatcactgccatgcatgtcgtgtcctggctgcgggtgcgggggattacggtagcggtgcgagatgtgcttgaaagcaagtccgtggctcagttggcgcaaaccgcagaagtaaaggatgagaagacggaaggccaccaatctcttctgtcgcctatgcagaagtggtatttcgagtccattgccgatcctgagttgcctctgaagtccagtggtgcccacagatacaattccaatatctgcttggtacctcgcaaactttttgaatattcagaactagctcaagccgtgggtgcgcttgtcgacagacatcctactttacgttccagatttcagcgtcataacgtcgctgggtggcaacagagtctacacagtgatggtgatcaaccgtttgcgttgaggcattacactgtatctaccagcgaggaggcggaggcccttattgtggaggctcagggcag

SEQ ID NO: 20918 - DNA, 605 bp, Emericella nidulans; identical to SEQ ID NO: 14502
  unsure (1)..(605): unsure at all n locations

SEQ ID NO: 20919 - DNA, 850 bp, Emericella nidulans
gcagttgtaccctcggaagatagtcaccagtcagaatacattgcaccctgcgacggccgccgaggtagctcattcccccttcgagcgcacaccacgcctcctatcgataccggacatacatagcttacccatatacagagttcatttcgggattttctggttctgctggaaccgctattatctcactaaatgaagctgcgctttccaccgatggcagatattttaatcaagcggcgaagcagcttgacaacaactggacactgttgaagcgcggagttgagggtgtcccgacttcacaagaatggtatgcacttggcgatctttacatttcgcgttgctggaaacttatccgcctccaggataacgcagcaggccgagggtggtaaagtagtgggtgttgatcccgctttgattacagggggtgagtacgcagtcctgaaattgtctattcaccctactgattactcctagcggccgcccgcagtctatctgatgcccttcagaagagcggtgcttcattaattggtgtctctcagaacctcgtcgatttggtctggggcaacgatcggcccgctccgccccgggaaaaagtcagggttcatccagaaaagtatgcagggaagagctttcaagaaaaggttagcgacctacggaaggaattagagaacaaaaaggcggctggtttcgtcatctgtgtgttacttcgttccctaaagtgtgcccgtgctaacgacaattgcagccatgcttgacgaaatcgcttggcttctgaaccttagaggaagcgagtgagtttatgtgcctctgctattgaacaatcagtctgatcgttagacacatggttcatcaa

SEQ ID NO: 20920 - DNA, 850 bp, Emericella nidulans
gccattgacaccgagagtgaaaaggagttgaagaaaaaacaggccctcgaacggcaagccagggtaatggctcaattccagcaacaacaacagaatttcctcaacaatcaaggaggcttcgattggggcgatgaggattttagtgacatggagtctgagcccgaggtaacgccagagaccaaaatctggaaatatcctagcggcacttgcatcctctgccaggaagaaaccaatgactcgaggctttttggtacatttgccctggtccaggagagtagcattctaagacagactgatattcaggatgcggactttattcgagaggtactcaagacaccttcaagcctagacaagtccgctgaacatctccgcccatttggcgttgcgggtgaaaatcgtgccacagttcggcggctagactcatccggtggggaggttatcagcgagaaaattgggttgagcaaaggattcaacgctaagaatactgtgcgtggtccagttacaactggttgcgggcatatcatgcattattcgtgtttcgaggtatattactcggccacccaacggcgtcatgcgcagcagattgcccgtaatcacccggagcgtctaaagcataaggagtttgtctgccctctgtgtaaggctctgggtaacgccttcctccctatcacctggaagggcaaggaagagtcgtacccaggcccattgagcacaaaggtgtcgttcgaggagttcatggaccacgaggtcaaatctgttctctcccctaagcataaaattaattacgccctgctgtcagacaacagtgagctgcaattacaggcgtaccaagggttattccgggactatc

SEQ ID NO: 20921 - DNA, 850 bp, Emericella nidulans
aagccgcagcccgagccctgcatctggcgatcgtagcttttgcgtcgcaatggacgcagcatgcgcagaggggggctgggctaaatgttcctgcagacatagccgccgatgagaggtccatccggaggaacgcctggaatgaagcacgccatgccttgcagcacacgacagggattccatcatcccgggttatatttgcgaatatcatcttttctctaagcagagtgtgctggatgatgatgagcagcacggtatgggtgcacgtctagacaagctactcgaaaatgacggtgcgcccgtgttcctggaaaccccgaaccgtcagctttatacattccgacataagtttgcacgaatgcttctccgcggtaaggctttcaacaggctcccgggaggatctgtcgcatcgacattcgccggtattttcgagacaccgacgccgtcgtctgaaagcccacagcttgacccggttgtggccagtgaggagcatcgcagtacattaagccttatgttctggctagggatcatgttcgatacactaagcgctgcaatgtaccagcgaccactcgtggtgtcagatgaggatagccagatatcatcggcatctccaccaaggcgcggcgctgaaacgccgatcaacctagactgctgggagcccccgagacaggtcccgagcaatcaagaaaagagcgacgtatggggcgacctcttcctccgcaccttggactctctcccagatcacgaatcccacacacaaatttctcagccagtggctcgatggccctgcacctacgaacaggccggcggcgctttctcctttgcaacgcccgtcaaagcctcctttaccgcc

SEQ ID NO: 20922 - DNA, 850 bp, Emericella nidulans
cccctggaaacgagctatgtggaggctcacggaactggaacgccagctggcgatccggtggagggctgcggctctcagtgccgctcttaatacaacacggtcatcccaggaccctttactgattggctccgtgaaatcaaacattggtcatacagagacagcaagcgggctggccagtattatcaaggtgaccatggctctcgaaaagggctacattccgcccaatgcgaacttcgaaaagccgaacaaggacattgatatggatgaactgaacatacaggtgagaagagataaagtacaaacggtcgtggaagcatggctgacagggcctagatcccaacctcattgaagccctggccacaaacagttcggagggcatcggtcaacaacttcggatacggcggtgccaattcgcatgtcattatcgaatcaccagcggtactaacacagccttcgccaccggccgtttcccagaccggcagtttgcgtcgagagtatttgtcctcagtgccaaagaagaggcggcagtgtcgaggatggcatcaaggatggcagaccaccttagcggtctcactttggatgatgaaagcgcatatatgcgtcatctggcattcaccctcgggcaacgccgctcggaattttcatggaaggcggcatacttggctccgagtaaagattgcattgatcgagaagtttgaacaagggcaggtcacactccattaggcctctgggcatccgaggcttggatctgtcttcgccgggcaaggcgcgcaatagaaaccataggccgggagctcattgaggagaaccaggtcataaagtgggggtttctcatacaggcagtcgtgtt

SEQ ID NO: 20923 - DNA, 850 bp, Emericella nidulans
tcgttacttcacctacctcggttacgatatcctcacatgggcattgatcagttcgcttggtcaaaaaggtcgaagccgggtacaggacggtggcctgctcacaagccgatggcttaatgccttggccacctttgctggcagaaccttcaaacggtattcagtaatggatccaacccccgtgctgcaatacgttgttgagcaactacgccaaaataattccacggatcttattattctggaacagataattagttcgatggctggaatcatcaccgataccaatttcaatgactctcagatacaggccatggcgggcggcgagatcctgcagtcgcaaaccatcctccaattattggataaacgacatgagtccaaaaccacttcaaagcggcttttgaaatcacttacctcctcaaaccttgctggccagttgctcattgcgattgctcaggaacgtcttacgtgcattttcaaagaatcagagaactcctctgagctcaagttgctgggtaacatattcgatgaaatccaccgaattctcgctcagtatctggacctacttcgcagcaatttatcagtggacgaattcgactcgtttgtccctgacattgcgtcccttatcaaagatttcggcatccagcctgaagttgccttttggattcgacgtccaagtgttgcacggaagcttatcgactgggaaaaaacttctcaggatacagccaacgccgctaagaaggaaagtcaggatgttcccgctctgaaggcagaagtcgagaaacttgagggaagtggtgacactgaagtcacggacgctccctcgggagacgacaaaatggatgtcgatcaagaa

SEQ ID NO: 20924 - DNA, 850 bp, Emericella nidulans
tggatttcggcggccaaggactgcgggctctggcaccgtcactgttcaagtacgccttcttggagaagctttatctcagtcacaacaaattgaaagtactgcctccgcagattgggcaactgcggaagctcacccacttggatttatctgccaacgatcttaccgagcttccagaagaaatcggcatgctcactaacttgaggcaccttcttctgttcgataacaatattcgcacccttccctacgagatgggatatctttaccgactggagattctgggaattgagggtaacccattggaggacgttctgaagtctctgatcatgaaagagggcaccaaagccctgattaggtatcttaaagaagagatgccaggtcagtatcatcactttgagtcacatcaaaccacgctaatctgtataagaagtgcatgttcctcctcccgcacgagactggctcgttctcgatgagaccgcagctacttctccagacaaggtttccgtactctcctacaacacactttgcgattcctctgcgacccaatcacactacggctatgctccgtcccgcgtcctgtcttgggaattcagacgagagaccatccttaatgagctcagagctcatgacccggatattatctgtctgcaggagattgaccaaggaagctacaatgagtttttcagggagcaattggcctacagtgattataagggtgtgttttggccccgaggaagggctatgggcatgcaggaggaggacgccaagggtgttgatggatgtgctaccttcttcaagggaagcaaattcattcttctagacaagcaggtgatcaacttcggtcagacggcgg

SEQ ID NO: 20925 - DNA, 528 bp, Emericella nidulans; identical to SEQ ID NO: 6195

SEQ ID NO: 20926 - DNA, 850 bp, Emericella nidulans
cttctctccgcactgccctcaccagctcgctggtcttcacgcctggcgacgaggggtacctggactccctgcggagatggtccgataccgggcgcaaggaagctgtgcgtttcctgactcgaacccctcatttcattcctttctcagaatatcttctcattctcccctcacatcccttctcatatcacagcagcatctaaactgaataccgggctagggaatcgttattcaaccgaccgaaaccgccgatatccaaaccgcactcaaatgggtccaagaacaccagatcgaccttgccgtcaaatgtggcggacactcggtttcgggcacgtcttcatccgccggtggattggtgattgacctctcgcgcatgaacggcgtctcggtcgatattcagaagaaaaccgtcactgtcggcggcggcgccgtctggaaagacgtcgatgaggccgccgccgcgtacggcctcgcggccgtcggcggaaccgtcaaccacacaggcgtcggcgggctgaccctgggaggcgggtatggctggctgagcgggcagtacgggctgacgatagataatctggtctctgcgacggtcatcctggcgaacggcgagaccgtcatcgcaagcgagaccgaaaacagcgacctcttctgggcgctcaggggcgccgggtataacttcggcgtcgtgacgagcttcaccttccaggcgcacgagcagcccgagcccgtgtacgcggggatactcgcgtacacgcccgacaaggtcgagcgagtggtcgagatcctgaacgcgctgctcctcgacaagccggacccgcggtccggcgcgatctgtattttcgccgaaccgccc

SEQ ID NO: 20927 - DNA, 850 bp, Emericella nidulans
cgcaactctcttacatctccgccaccgtccgtgacctcatccgaatcgatttcatcaccgcgctccctcccgagattgctttcaaaatcctttgctatctggatacaacctctctgtgcaaggcttcccaggtctcgcgcggatggcgtgcgctagccgatgatgatgtagtttggcacagaatgtgtgaacaacatattcatcgcaagtgcaaaaagtgtggttgggcttaccgcttctggatcgcaaacgattgcgtgagtcgaagcgtgagattgaacttcgtgctacaacgtgggacaagggagtggtgggcccacgatcccctgatgcttcggcagagtcacctccttcgggcaaacgaaagcttgaggatgacgaggttgctgttgttaagcggcactgttcatcgctcgggtcagacgcaggagtcgacaaagatagtgatttcttcaagacccgctaccggccatggaaggaagtgtacaaagatcgcttcaaggtcggcacgaactggaaatacgggcgatgctcgatcaaaccatttatgggacatactaacgggctcatgagtctgcaattcgaggataacactcttgccagtggctcctacgacactacaaccaaaatctgggacactgaaaccgtagagggagctgcgcacactccatggacacgagtctcgggtccggtgcttacagtatgactacaccaagttgatcagcggcgagatggaccgcactatcaaggtctggaactggcgcactgatagagagcgattacacatatactggtaccaggggggattcatagagcttgatatgatgattccagtctcgcaccggctacg

SEQ ID NO: 20928 - DNA, 850 bp, Emericella nidulans
tcatttaagtaatcagctcaactgaccgatctagcaattacctattcgtgcatcgcaccgctggttctcggcttcgccaccatcggcttgtatctcttctactttgcctaccggtacaacttgctgtacgtgtccaatgccgatattgacactcagggcaagacctttgcgcgggcgttgcaacagattctggtcggatgctacctattggtggtctgccttatcggtcttttcgccattggaactggtactgacccaatcgctcttggacctatgattctcacaatcattcttctcgtgaccatgatcatctatcacgtttcgctcaatgcagccctggacccgctcatcaactacctcccaaggaatctggaagcggaagaggaagctttgctttcacaggaaaccaacggggcgaaggatgaatacgacggcatgcgccagcccttccgccgctgacggtcaaaccgcggataatgttgactctgctgagaagggtctcactcaagccaaccccgctgaacccaagaccaacttcctgactaagtatctccgacctgacaagtactcgggataccgtcagctgcgcacactcgtacccaacggcacggaaactgtctcctaccctcccgaggtcgagcggaacgcttactaccaccctgccattagtgctcaggcaccacttctctggataccccgtgacgaaatgggcatcagtgctcaggaagtggctcacacgagccgcgttatccccatcacagacgaggacgcctggttggatgagaagaaccatatcgtttggaatgttgaaaagggtgttcctccgattttcgaagagaagatctactac

SEQ ID NO: 20929 - DNA, 500 bp, Emericella nidulans
gttcctcaacaatcagtcactggtcttgaggagccggaatacaggcaccagcatccttaccccactcgcatctgatcacttcccacgcaacgaaacgtgcaaatatacctcccattcgatccgttgaacgaagcactttgcggccgtcgatgggcaccagcgctaactgttccgttacaggctcacgaggttaccttcgagtccgccgatgctggcgcctcggccacctaccccatgcagtgttccgctctgcgcaagaacggtttcgttgtgatcaagaaccgcccctgcaagatcgtcgacatgtctacctccaagactggtaagcacggtcacgccaaggttcaccttgtcgccatcgacatcttcaccggaaagaagtacgaagatctgtccccctccacccacaacatggatgtccccaacgtcacccgcaaggaataccagctcgtaagtaccgaaaatctgaatggcctgtgtgatccagttctaactatact

SEQ ID NO: 20930 - DNA, 627 bp, Emericella nidulans; identical to SEQ ID NO: 2686

SEQ ID NO: 20931 - DNA, 603 bp, Emericella nidulans
cctcccgaagagaactccacctctccaatcccattctttcatctcctcgagcgattaaagacgactaaacgcgaggggtggcgccggttcaacattaacgacggcgagtccatctccgatcacatgtatcgcatgtcgatgatgaccatgctcgcccccccttctctcgccgctcgcctagaccttccccgctgtatgaagatggctcttgttcatgatatggccgagtcgctcgttggtgatatcactcctaatgacccgattaagaaagacgaaaaggcccgtcgggaagctgctgtcatggaatatatcgccaactctctgttgcgcaatgtgccgagtggagtctctgccggcgacgatatcttggctgttttcaacgaatacgaagcgaatgagacgctagaagcgcagttcgtgcatgacgttgataagatggagcttttgctgcagatgatcgaatatgagcggagttatgagattgacctgaatgagttcctgggtgttgcgaagcgaatccaacttcctgaaatcaaggaatgggctgcgacagtactcgaggagcgaaaggcgctatggaagtcacggcagcagcaggaatca

SEQ ID NO: 20932 - DNA, 850 bp, Emericella nidulans
atgagggctcgagtaatactggctttcgctgtaggcgtacaaggccagcagttatacattaccacgactggatactctgctcgacctgagtgcactgctgcgccggccaccccaagctaccggtttgagccgtttcaatacacactaaatgaaaccattcggtaggccgactgtctgtttgtgcagcgtctcgctaacgggtcaggtatgccacttctgttccagctcctacgacaacgcagacctttgcgccgggctataaggaagcactggaaatatatggcatggagctgtctaccaccacttggggcagctggctgcccggagagaccgtcatttccgccactgacaccgaggacaaatatggccaggctgcttggtcgtcgcagtggcaggcggccagcctgatcaactataccaccgtcggattgtacacgacaaccgtgagccctaccccaattccatccagtgaactagtcctccctccccgtgactacttcggtcctaccgactgctacgatttcccggaggatttcatgttcggcgtcgccgggtctgccgctcagatcgaaggcgccattgcgctggaaggcagggcgccaacgaaccaggagaagctcgtccaggatgaccggcctaaaaactatgtgacaaacgaaaattactacctgtacaagcaggacatccagcgcctggcggccatgggtgtcaagtactacagcttctccatcccgtggactcgtatcctcccgttcgctgtgcccggaagtcccgtcaaccagcaggcaatccagcactacgacgatcctagtattctatagtgtcacctaaatcgtatgtgtatatcata

SEQ ID NO: 20933 - DNA, 660 bp, Emericella nidulans
acaatggatgacctctatgacgagtatgcttcaattatcttaattctccttcagattgttttcgctgactgactcccaggtttggcaattacatcggcgaggccgcggaatctgacgaagagtttcaacatgaggccgcaaaaccacaggcatttgactatgatgaagcatttggagcggacgagcttgaagagccggctcagcaggaattgatggaagtagatggtgcgttatccttttctcctccatcgcgtgagttctgacatatgagcccgcgttttacagaaggcccatccaatgccgttatcctacacgaagacaagcagtactatcccagcgcgcaacaagtatacggagaagacgtggagacattggttcaggaagaggatgcacagcctttgtctgagcctataattgcgccggtcacacaaaaaaagttcgcgattgaagagagcgagttgccaccagttttcttctcgcgcgagttcatgacagacctgttaaactttcctgaccaaataagaaatatcgcgcctgttggtcatctgcaccacgcgaaaaccgcgttcatggacatgcttgtcatgcaaacccatgatttggccgaacgactcgagaagagaacagcaaggaagagggacgaacaacttcgcgacgcgt

SEQ ID NO: 20934 - DNA, 553 bp, Emericella nidulans; identical to SEQ ID NO: 6104

SEQ ID NO: 20935 - DNA, 850 bp, Emericella nidulans
gtggccggatagagcggctcgagagcgcggcgctctttgtctctctgacggcgattttagacggtactgtgccatctatcccttattgcaacttgctgtacggatattaacacggggtaaacagatgcattcagccaaatgtccatctccgagtctaggcagatcggagccaagctactggatatcatgcggggcgttgcgctggctgacgtcctgaaccccctagaaaagatccttggcaaggttgttgaggatatgaacgcgcaaagccctgaacttgccaaggatgtgcttgatggtgccgttgctttatttcttgcgcagacggacaaagcacggttggaaattacgcaattggatgagtattttgagtttcagtttagggatgtgggtggtgagtatgtatctaacagtctgatgtgtggcattggggctaaaaggctgactgaattatggcggaagattcttcatagcgctaatccgcttcgtgaatgatattgttctctcacagtctgagcgggccaagttcaacagcctcgagaaaacgacgatccgacttttgatcattgcaaatgatatcctctcctgggaaaaagaactcaaagaagcgaccgagagcaacgaggaaggcgccgctttgtgttcagttgtcccgatcctggccagaaatctgggcatagcgatgcgcgctgctaggactgttggatgagctggagtaccatcatggatggccggtagcaagctatcggaaccagttagaagtatcatggggagtagccgtagacagggcctaatatgatcgcatagcagtggagacgacgagatagaactagggacgttatagaaaacg

SEQ ID NO: 20936 - DNA, 511 bp, Emericella nidulans
actgaacgtactcggaaacattccgaccccgacgactgctgttgacgcctgtctagatacgggcttccatctggacaatggcgtcaagattacaggtggtgacggagttatgcttgtcggtggagaagcgtttacatggaggccttggatgagtaagaaggatgggaccaagaacaacatgatcaatgcaaagggacaatttgaagtggatgagcaggtttggggtatattggacttggtatggcctcgtccgggtatgtctttttttttttttaccgttgtcttctttagttggttcactgactgtgccacggtgacagacctgttaattcttgggatgggagcctcaatctttcctttgtcgccggaaactaggaagcatattaactcgctagggatccgggttgaggtgctagatacaagaaacgctgctgcgcagttcaacctgctcgcgaccgagaggggagtttctgaaattgcggctgcgatgataccgatcggatggaagggg

SEQ ID NO: 20937 - DNA, 698 bp, Emericella nidulans
ccgttcagaagcctatctagcgagatagtagttagggtggaggaggagccagtgaggagggtgggaggagggtgggaggagctcctcccagggcagcccctgcaccctggtcattagagctcctccaaaaactcaccatggaaattgctagaggatcgatttaaagagagggaagtatgtacaccggatccttttctcttcatgtcaccatcatagccataactgagtttcatcaaaatgtcacgccaactcatctccagcgagaaatttcctctcaagcctcacaactgtacgcaacttacaacagagtcgcattcagtctctagcactctctaattttgtttcaacaggcccagcaaccaaagttcccggcctcgtcttccttgccggtcaaaccgccacaggcgaaatcaagcaggcaactgtacgccttatcgtcactaccctctccaataccccaactgatatgtagccagcgcaccgttctccaaaacataaaagaagtcctcgagctctctgggtcgtccctggaacaggtggtgaaatacaacgtttacctcgccgatatgaaggactttgcggccatgaacgaggtctacattgagtttctgcccaagccgatgccgtcaagatcttgtctccaggcgctgcctccgggcgagggaaccgttattgagattgagtgcattgcgcaggtt

SEQ ID NO: 20938 - DNA, 713 bp, Emericella nidulans
acatgcatttgaaccagcagaccctcaaagtaatctcagtattcgtgcccgttgggtaacttcttggacaaccgtctatcatcagccagtcagcatagcttgagagtccgcataatatcattcatcataaccatggcgtcaactacaaccaccaagacggtcaaggaagagcagccggtgcaggtgcgtgttttctggtgtttgaatctttgacctttgactgatattgggacagtccaagccgagaaccctggcggacatggcagacagcatcgaccaagccacattcgaacagatccttgagatggatgacgaggacgagcacgaattcagtcagggtatcgtgtacggcttctttgaccaggccgagtccacctttgataaaatggagaaagccctgtgagtgcccttgcgtctggcttaatggagcccatactgatgacaactgcagcgaagacaagaagctcagcgagctctcgtcgctgggccactttttgaaaggctcgtcggctactatcgggctcaccaaggtcaaggatgcctgcgagaaaatccagcactacggagcaggaaaggatgaatcgggaaccaacgacgagccagatgagaaggtgtcactggagaagattgaaaaaacgctggcgactgctaagaaggattacaaagaggtagagaatttcttccggcgggaatactatcgtgatgaggagaca

SEQ ID NO: 20939 - DNA, 508 bp, Emericella nidulans; identical to SEQ ID NO: 9830

SEQ ID NO: 20940 - DNA, 818 bp, Emericella nidulans
tacatgattcacacagtcaaggtacccgtgaacggggcttcagcagatgactcgagctcgcagtacactatcaaagcggagaagttgctgaacatgactgatttgtgggacatatttgattatgacctcaagttcaaagccctggtggagaaacgcaacactatccaaaagacttatgataacatacggtcggttttctctgtcgaggaccctattgtggaggaaatgttacccatagccactactatggaagagctgcaagatatccaagactaccttcacttccagtatgcctcgcagataagggatttgacgcttacaaacggtgataccaacggagaagtccaaaggcggaaggccctcacaagaaacttctttgagcgtgttcgcaatagcaaggcttatggtcttgtgcgtgcatttggaattacagcagatgcattcgcgcaaaacgctcttaaagagggccgtcgtcagtacacggaagatgcatcggagcgcccggaggatatggcggatgggctcgttgataacgacttcaacaactcatctcaagtactcaaggcagctaagggtatgtttgcagaggaaattgtgatgagtcccaaaatgcgcaaagtcatccgccaggcatattacatgaacggcgcggtagattgtttccgcactgagaagggcttgcggcgcattgatgagcaacacccgtactacgaattcaagtaccttcgagaccagcaactcagcgatatcgcccgcagccctgagctatttctccgcatgctgaaggcagaagaagaaggccttattgaggttaaagt

SEQ ID NO: 20941 - DNA, 565 bp, Emericella nidulans; identical to SEQ ID NO: 10980

SEQ ID NO: 20942 - DNA, 462 bp, Emericella nidulans
ggcccgcttattttctgcctgctgctgagtatgttcctctctatggcgaagggggatcagtcggatttggtcttctctggggtgttttccctcgtctgggtcggggaggctgttgtaacattgcaaattaagttgttgggtgggaatatgtatgacttccaatcttctttgccaccagtttctgggtgtcttagtgctaacgtgctagcacagttcgttctttcagtctatctgtatcatcggttacacgctcttccctcttgttacccgtcgcttctcagcgcattcggcctgcccacgatcgtccggataccggtctacctggtcttgattgcttggtctctggccgcaggagtgagtattctagggggctctggtgtcgtgcggaaccgggtcggtatcgcggtatatccgctgtttgtcttttatattgcgatcggttgtctttgctttatcagttaa

SEQ ID NO: 20943 - DNA, 816 bp, Emericella nidulans; identical to SEQ ID NO: 7920

SEQ ID NO: 20944 - DNA, 850 bp, Emericella nidulans
ccattccgccctggcaccgcctgatgatctctcggcgccacagttcctgcacgattcattagaagttctgacagcgttgatgaaaacccacgaggcttccctcggaacagaagatcccagcatcacatccgaatctgaagagaacgaattcactccggtcctccacgcagccctcgaccctttcttcactctcgcaaaagcttctgcagatgaacttcccgatcccactgcccgcgcgatctaccttacaaatgttcatattaccacccgctccaccatctcgccctatccttttgcaacatcaacgcaccttcctcctctctcagcaacgctttctactctccgagtcgaactcctcgaaagccagcaccgctacctcctcgacacctcaggccttcaagtactcttaacagctctacaaccattttctcaatccaatgaatcaggcacggagaaggatctggcagctattgcagatctcccggccttccaagccgaagccctcatttcaaccagtcagcagctagacgacttcttgccttcggcactcatggacgcaacagataacttgaaacgtgtgcagagcgcaacttttgtcaaaagtgttacggaggaggcggttgaagcattttgtcgtgatttcgaatttgtggaggggatgattattggagctgatgaggctaggggtgttggtcagagtgacggtgcagttaatgaagagggtgaagagggtgacggtgacggtgacggtgaggttgagcttgagcttgaggttgagcaaagaggacagggtcagagccttagaaagttgttcccgcgtaccacaggagagattcgcgtgttgttgagc

SEQ ID NO: 20945 - DNA, 850 bp, Emericella nidulans
gatctgtccgcgaaacagcggttcaaggtcgtggtcatcaacgaggcggaccatctaacacgagatgcgcaagcggcccttcgacggacaatggagaagtacagtcccaatatgcgactgatcctcctggcaaatagcacgtctaacatcattgctccgatccgctcgagaactctgttggtcagagttgcggcaccgagtgaagaagatatctgtaccattttgagcacatcggcgaagagggaaggttggaatgaggccccggagcttaataaacggatagcgaaggagagtgggcgaaatctccgtcgtgcgctgcttatgttcgaggctatttatgctcagaggtatgcttcttgactccctctgctctgtggagctaataaggttctccgtagtgagaaagtatcggatgatacacccattccaccacctgactgggaagctcttatctcggtgatcgcggaagagattcttgcggagaggtcaccggctagactgttacaagtccgtgccaggttatatgatctgttaacccactgtataccggctacgacgatcctcaaggtctgttagctgattatggaaaacggcgaatctactaaccatgtctagacactgacattcaaattgatcgccaagattgacgacaccctgaaacctgaagtaatcaagtggtctgctttttacgagcacagaatcactcagggtagtgtaagggttccattgagttgttgatgatgtcaaagctgactcagaacagaaagtaatatttcatctcgaggcttttgttgccaagttcatgcgtatatatgaaaggtttgtacttacgtttctagagtgaacatta

SEQ ID NO: 20946 - DNA, 850 bp, Emericella nidulans
gcggagccagtaactagaaaaaaactccacgggcgagcattctatgagagcataggatcaccgaaatatatcgttgcgcctatggttgaccggtccgaattcgtaggtgtagctccccttggtccctgcgcgctaaaagtctaactaatgtttactactcccaggcatggcgcatgctcacccgttcctttatgacacccgaagagtctaagtccgttctcgcatacagtcctatgtatcatgcgcgtctctttgaggaacatgctggctatcgcgcaaaggccttccacccgactcgcgcttggggcgacaccaaatgcaaaggcgacgactctccatacctcgacggaaacccagcgattgaccggccgctatttgtgcagttctgcgccaatgatcctgatgacttttttaacgccgcgcgccatgtggcaccttattgcgacgccgttgatttgaacctgggttgtccgcaaggcattgcaaggcgaggccactatggcgctttcctgcaggaggactgggacttaatctacaaattgatcaacaagcttcatatggaactcgaagcccctgttacggcgaagtttagaatccaagaatcgaaggagaagactttggagtatgccaagatgatactctccgctggcgcaagactaatcaccctccatggacggacaagagagcaaaagggtcataataccgggctggctgattggagctatattaggtatttacgagataacctgcccccggacactgttatctttgcgaatgggacaacctgaacacgacgatttggccgctgctcgaggaaccggcgcagatggtgtgatgagcgcgaagaaac

SEQ ID NO: 20947 - DNA, 500 bp, Emericella nidulans
  unsure (1)..(500): unsure at all n locations
ggctggcgcgcatatatggggagacggggagcatagagtggagaaatgtggaagaagcgcctggaccagcgaaacggccgatggccggacacacgtgggactacagtactttaatatgctgcagctgctctctgaagacttctaggaatccatacctaccttcagagcgcagtcaacatgcaacacccaacagtccaaggatgtctggtctcgtttcctaccccagagatcctgcttctcacactcaacaggcccgagaagcgtaattctataccgcttgctataagcgcagacatcatacggctatgggaatggttcgatgcagagcctacattacgagccgcaatcatcactggtacaggtgaatccttctgctctggagccgatcttaaaggtatttccccccagcatcagattccatgcagtatctaaacgcaccacttcactagaatggaacgaactcaatgcccgcgganccgtcaataaaatgaccgccccgg

SEQ ID NO: 20948 - DNA, 850 bp, Emericella nidulans
gttataggcaagtctattgttggcgctcactccgtagaggaattctgctccaagctcaagcgccctcgccgtatcatgctccttgtcatggccggaaaccccgttgaccagttcatcgagtctcttctgccccacctcgaggagggtgatattatcatcgacggtggtaactcccacttccccgacagcaaccgccgcaccaagtacctgaaggagaagggcatccgcttcgtcggcagcggtgtctccggtggtgaggagggtgcccgctacggtccctctctcatgcccggtggtaacgaggaggcctggccttacatcaaggatatcttccagagcatcgccgccaagagcgatggcgaggcttgctgcgactgggtcggtgatgagggtgctggtcactacgtcaagatggtccacaatggtattgagtacggtgacatgcagctcatctgcgaggtaaggcgtgaaatttatcttaagaaaccaggctaattgttacaggcttacgacatcctcaagcgtggtgtcggcctctcctccaaggagattgccgatgttttcgccaagtggaacaacggtgttcttgactctttcctgattgaaatcactcgtgacattctctacttcaacgacgacgatggaacccccatggttgagaagatcctcgacaaggctggtcagaagggtacggcaagtggaccgccgtcaacgctctcgacctcggcatgcccgtcaccctgattggcgagtccgtcttcgctcgctgcctctctgctctcaaggacgagcgtatccggccagagcctcctcaacggcccactcccgagttcacggtgacaaggaggag

SEQ ID NO: 20949 - DNA, 464 bp, Emericella nidulans
aagaaagtcctagacgtcctcgtaagaccactaggcgaagtcttagacctcaactctcgtttttccggcgtcttccctgagcattacacaaatgcgcttccatacagcactgcccctacaaaatcctccgcaccatcttcgtcttcgccctcgcaacttcaacttgtctcttctcctgccgcagcccgtaccctcctcttcaacctccttaccccatccaccccgcttatcggccacgcaattgacaacgacctcaacgcctgccgcataatccacccaactgtgatcgacaccgcaattctctacccgcatccgggcggcgggttaccgtatcgaatgagcttgcgcacgctcgcgaagaagcatctagaccgcgagatccagactggtggcgcgagtggtaagcagggacatgattcggttgaggatgcgctggctacgggggatctcgtaagggttaaggc

SEQ ID NO: 20950 - DNA, 850 bp, Emericella nidulans
gtcgcaaaccagcaattcgcaggcgacacctcgtgcttctcggcgtttacagggcgaagctgctgtcccatcctcgtcccctatgttctttcagtcatcacccgtaaggggcaacagcagcagcgctgaaacgccagatgctagaatggaagagcctagttcacccatcagggcttcctcaacaatggatgacggcgagacaaccccgcgtgctaccgggcctgcgcttcgaggtaagatatggctttgctaaacgatagctaggagaagctaatgtttgcaaccagattcctcaccaattcgatacgtatccagttccagtcctacgcgcgctttcggccggcagacaggtcactccaatattcctagcagcagcagtggtttgttcgtatcatctcgacagggattggacggccagcggatcgcctcccgccgcagtgacctatattctggaggctttggttcaacaccaagtcgcagacgcagggtctttgtggatgctaatggggtccctgccgctgatggcgagattcaatccgatgcaaccttctctaatatccacccagatacttcagaagcagaggccatgggcggtagttcgacccgtgtgatctggggcaccaatatctccatccaggattccatgtccgcgttcaaaaatttcctttacaactttaccaccaagtaccgtctatgggcggatggggctactgaagacgaaactcgtcgtatgggagagatggcagaggaacgggaatatatcaacatgctgaacacgatgcgtcagttgggcgtcacaagtctcaacctggacgcaaaaaatctcaaggcatacccaccaactttgaag

SEQ ID NO: 20951 - DNA, 483 bp, Emericella nidulans
ccattatgcggaaacctgtcccgctcattttctttcctcatctcttccgaatttaacgggagggtttggctctccaagggacaatcatcaggctcgtctgtttccccctcagcgtccttcatcttagacgggtttcctcgcaccgcctcccaggccgcgagcttggactccctggtccccatcaactttgtcgtccacttagtcactccaccctctattattctctcccggatagcgtcgcgctgggtccacgagccgtctggaagggtgtacaataccgatttcaatgctccaaaggtccccggaaaggacgacgtaacaggagaaccattgactcagagggaagacgattcaatagagacatggaaacaacgactacataaattcgaagaaacaagcaaagctctacttcaacactatcaacaaaagggctgtctttggcgcgtggaaggcaactccagtgacgagatcactccgaagctt

SEQ ID NO: 20952 - DNA, 479 bp, Emericella nidulans
gatgccagcatccagacaaacctggacacgacgcatgtcgcctgtctccgtatcttcccaggtatcaagccggagatggtggatgcggtgttgaagctggagggcttgcgtgggctggtcctggaaacgtttggcgctgggaacgcgccccacggccaggacaatgccatgaccaaggtgcttgctgacgcgatcgcgcgagggatcgtcatcgtcaatgtcactcaatgtgagtaacccatagcgtcagaagaaaccgatcaacgttactaaattgtccaggtctgaccggtagtgtcagccccgtgtatgctcccggcatgagtctctccaaggccggtgtcgtcgcgggattagacatgaccacagaagctgccctaaccaagctggcttacctgctggcgctccccggggcggaccccaagctcgtggcgagcaagatgtccttctctctgcgcggtgagctgacccgagtcggt

SEQ ID NO: 20953 - DNA, 850 bp, Emericella nidulans
gatgcagatttggagacgacgctaacggctctccagtggactcgcaacggaaatgtggattgtcatcgtcggccgtgccctgagcggtattggcggtgctggcgtcatgaccatgagtgcgatcattatcaccggtgagtgcgaggccaggtgccgggaatactacagtcagctaaccgggcagacattgtggccaagcgagagatcgcaacatggcgagctgttgtcaacctgtccatgacgctgggtcgcagtcttggaggcccagttggcggagtgctgacggacacaatcggatggcgatggtacgtctatcgaatgctcctattgtctacatgctgaccctagcagggcattccttctgcaagctccattactggggattgccgcccttctcgtcgctattcaactcaagctggtccagcgtaatggctttggtgcacagcctaataagtccaagttcagccgtatcgacctccgcggatccatcctggtggccacgagtatcgcggccatcattcttctccttgaccagggcggaaaggcattcccctgggcatccctgcccgcattagtcctagtcagttcgggggtcctaacgcttgccctgtttgtttacactgagctctacgttgcaccggagccgatcttcaaactccagatccttaaacgtcccaacgtggctgctagctaccttgtcagctccttccaggtcgccgctcaggtcggcatgatgttcaccgtgccgctttacttccaggtttctggatcgggcgtccagtaccgttgctggtgctcatatgattcccgcagtggctggcaatgcaatcggggggcttaacagcaggtt

SEQ ID NO: 20954 - DNA, 850 bp, Emericella nidulans
gatagaactggggtgtaagaggagagttatggatacagattaccttgcttgtttgcacagagagaacatggagctcatccatgatgatccgattgagaggatcactgttgacggcgtgagaacaaagtcagggcggaagatctatgctgatgcaatcatcctcgcaacgggatttaagactgcgcagccactttttcctcttggagataacatccgtggtgaagggggcgttactctgagtgagcacgtttgtcacctcccagtgctaccagggctatcaaagtgcaattttgacacattaacgcagtgggaaagtaccgcctcccatgccccgcaagcatactacggtacatgcgtctcgcggttcccgaacatgtttatccttgtcggccctaatacggcgacgggacatacctctgtactctttacagtggaatgccagattgatttcacgctgaaggttcttgatcctattctcaattctctctatcccgagtcatcatcgtcatcctcctctgtcttgcaggagatgatctgtttcctccggaaacctttctcctctggacctcgggcgggaaagaagctcgcactaccaccagatatagtctccgtaacgtcccaagcagaggaaaaagaaagccaatggatcgacgaggcaagtaagcaatatgtctggacgagtggatgtgcaagctggtacttgcacccgtcgggaaggaatacgacgctttatcctgggagccaggtggcgttttggcttaagagttgggctggccctttggcgggtgattttctgtatagacggagctcggccgcggttttggatgaggataggcgagctgagggtgat

SEQ ID NO: 20955 - DNA, 713 bp, Emericella nidulans; identical to SEQ ID NO: 6550
  unsure (1)..(713): unsure at all n locations

SEQ ID NO: 20956 - DNA, 850 bp, Emericella nidulans
cagcccaagtgggcgtaccccgcctgctgcgtctcttccaaaggcatggcatttcctcgtcggtgacctggttcgtccctggtcactcaatggagtcgttccccgagcagactatagccatcgtcgactcgggagcggagattgggtgtcacggttatgctcatgagggtgcaacgcagttatcagaggcccaggagcgagacgttatcgataaatgcgtccagcttgctacagtattgactggaaagaagccgctcgggtggagggcacccctgtatcaactgcgggagcacactgtcagtaggctcgaagagcatggctttctctacggtgcgtcacccttggccattcacggtacccattctaaccccgtctagacacttccttgacccaccatgactcttctccatatttcctgctgacaaaaacaaccccccagccaatcgacttctcaccgtcagtcccagcctcatcgtggatgcatccactcccgccaccagctccccggacagccagtacgctcgttgagattccctgcaactggtacatggaagacatgacccccatgcagtttctccctgcggccgcgaattcgcacggctttgtcagccccgaggcgatcgagaagaactggaaggcccgctttgagtatctctacaatgagactatcgatggcgcccagcaggtctttattttcccgttgattttgcatccggacactagtgggatggcacatgtcattgggatggttgatagggtcattggatggctcaaggggtggcagggggtggagtttgttacatttggggaatgtgcgaaggagtgcaagagcaggcagtagtccaatact

SEQ ID NO: 20957 - DNA, 850 bp, Emericella nidulans
cagcgtaccattgagaagttcgagaaggaagccgccgaactcggtaagggttccttcaagtacgcttgggttcttgacaagctcaagtccgagcgtgagcgtggtatcaccatcgatatcgctctctggaagttccagacccccaagtatgaggttaccgtcattggtatgtatatatgatcctgtacaacgtaactccatctaacaattcaactagacgcccccggtcaccgtgacttcatcaagaacatgatcactggtacctcccaggctgactgcgctatccttatcatcgcttccggtactggtgaattcgaggctggtatctccaaggatggccagacccgtgagcacgctctgctcgctttcaccctcggtgtccgtcagctcattgttgccctcaacaagatggacacctgccagtggtctgaggcccgttacaacgaaatcgtcaaggagacttccggtttcatcaagaaggtcggctacaaccccaaggccgttgccttcgttcccatctccggtttccacggtgacaacatgctcgaaccctccgccaactgcccctggtacaagggttgggagaaggagaccaaggccggcaaggtcactggtaagaccctccttgaggccatcgacgctattgagcctcctgttcgtccctccaacatgcccctccgtcttcccctccaggatgtctacaagatctctggtatcggaactgtccctgtcggccgtgtcgagactggtgttatcacccccggtatggtggtcaccttcgctcccgccaacgtcaccactgaagtcaagtccgttgagatgcaccaccagcagctcaggagggtgctcc

SEQ ID NO: 20958 - DNA, 850 bp, Emericella nidulans
agccggcatcagcaaaataactgaacgttgtgatctgagcagtattgcaacaaactcgacgaaataccagcttgcggtaaccgggttcagtgatggaccggatgactacaatgagtactcggttccttttccctcagaagtacttgtcgcgatggaagaaatgtgtcttgcacgagatattagtatgaggtctgtgatccagtttgcagtgcattatgtgttgaaagggttcggtggtggctcacatactgttgctgcgtcgatcgatgtgggtgacgaccccaataacatagcgacatcatacactattacaccctcaattgtctgccatgagagcagacaaggacagaccgtgatgcaggagattcagagtatggaaaagttaaaccaattgaggaagcaagaaatgcatccgggggaggctggattaagtctcatcagaatggggttattcgacattctggttatcttcgcagatgcaaacaagtgtgagggtctaattgctggcttgcctctagcagtaatggtgtgcgaaggaggtggaagacttcaggttagaatacacttctcagggtccctttttcgacagaagacgttagtggatatcgccgaagccctgaacgtcttgttcgctaaggctgcgtcggggggagcgacgccggtccgagatcttgaacttctttctgcagagcaaaagcagtagttagaagagtggaacaagacggatggagagtactttgaatgcaaagactcaatcaccttattgaggaagcgacacagctgtttgagaccaagttgcattttgtacaaacgttccagtttcattcggcgattgaagcccaggcactgt

SEQ ID NO: 20959 - DNA, 850 bp, Emericella nidulans
gaatctgctatgctgatcaagcccttcatcgcgcactgcacgatggccgaaatccaccagatcatgtgctccggctacgcaaccatcgcaggttccgtcctggtctcctacctttccatgggcgtcaacgcgcaggcccttatctcatcctgcgtgatgagtatccctgcatccctcgcgtgttccaaactgcgctggcctgaagaagaagaaaccctaacggccggccgtgtcatcattcccgaagaaaccgaagacagaccagctaacctcctcgacgccttttccaaaggcgcttggctgggtatcaagattgctggcatgattgccgccacactcctttgcatcatctccctcatcggtctcatcgatggactactcacctggtggggccggtacctgaatatcaacaacccaaccctaacgctcgacctgatcgtcggctacatctgctatcccatcgccttcctcctcggcgttagccgcgacggcgacctcctgaaggttggaaagcttattggcctgaagctcgttgctgtacgcacatctatttacctacccaagcaattagtccaaaatcaaactaacaaatatgtttagaacgaatttcgttgcctactcggctcttcagaccgatccccaataccaggatctctcaaaccgcttccgcctcatcgccacctatgcgctcgccggtttcgccaatatcggctctctaggtaaccagatcggtgtgcttgctcagctagcacccagccgtggcggcgatgtttcccgcgttgctgtgagcgccatgcttacgggtgcgatcagcaccttcacgtctgcggcgattgcgggactgttgatc

SEQ ID NO: 20960 - DNA, 850 bp, Emericella nidulans
gaagcagtttggcatcaacagccccaatcgccgtattgggtacgagcctaattcggccaccctgactcacgagatcggcaaattactggaagaggccgtagatgggctctgtactctggttaaccacagcacgttgtttacgcgagaactgcgcattgtcaagtccccgactgaactgcgcaagatccgcaaggccgcctatttggccgattttgccctcatccgcgcactcaaattggcgaaaccaggagcgtacgagggcgatttatggcgagagattgtgggaacagtctacgagggcggcggcgacgacccagcaaacgagaacatgctcgtctccggaaacaaggcagtcctcacccgttattcggctggaaagtccaagatcgaccgacagattaccctcgaacacgcgggcgtgtataagcattaccatgcctgccttatgcgtacaatccatatcggcggcgtcaccaagctcgcccgggagatgtttcgagtcaatatcctgcagatggaagcagccatggctgccctaaaacctggtcgcgagataggagatgtcttcgaagcctatgctcgagttgccgacaagaatggcttccaggaccaacggtttaacgcgtgtggatatagcctgggcgccacatttgccccgacctggatggactatcccatgtttgtgcggggccagaaggtcattgcccggccgggcatggtgtttttcatccatatcatcctaatggacaaagcgactgatacagcaagctcgatcggtcaaacggtcgaggtgacccaggacgggtgtgttgctctctctaagctccccttctgtatcacgcggaagcag

SEQ ID NO: 20961 - DNA, 755 bp, Emericella nidulans; identical to SEQ ID NO: 15710
  unsure (1)..(755): unsure at all n locations

SEQ ID NO: 20962 - DNA, 635 bp, Emericella nidulans
cctgtctcaagtgctctatcgctcgagaacatcactggggtctacgctccctccgctcttctggtcgtcggaacgttcattttgaagaaggaatgggttccttttgccgtggccctagctgcaggtttcgttgcatggaagctgtctgtcggcggtagcagcagtaagtgcagtagtaccaaatggtcatatattccgtggatatgggctgacatgacgtgcagagcccaggaaagtcctcaaccccaacgagttccagaacttcgttctgaaggaaaagaacgacatctcccacaacgtgaccatttaccgcttcgctctgccccgtcccaccgatattctcggtctccccatcggtcagcacatctctcttgccgccactatcgagggccagcccaaagaggttgtgcgctcctacacccccatctcgtccgacaatgaggccggttacttcgacctcctcgtcaaggcttacccccagggtaacatctctaagtaccttaccaccctgaaggttggcgataccatgaaggttcgcggccccaaggcggccatggtctacacccccaacatgtgccgccacattggtatgattgctggcggtactggtatcaacccgatgctccagataatca

SEQ ID NO: 20963 - DNA, 848 bp, Emericella nidulans
atcaatactgctactccaacaagaagattttcctgcgagaaatcatctccaacgcttccgatgcccttgacaagattcgctatgagtctctgtctgacccctccaagctcgactcgggcaaggacctccgcatcgacatcattcccgatgccgagaacaagactctcactatccgtgataccggtattggtatgaccaaggctgtaagttcgcttgatttccacacagtcgggaaagccttgactaacactagcactaggatctgatcaacaacctcggtaccattgctcgctctggcaccaagcagttcatggaggctctctccgctggtgctgatatctctatgattggtcagtttggtgtcggtttctactccgcctacctcgttgccgaccgtgtcactgtcgtctccaagcacaacgatgatgagcagtacatttgggagtcctccgctggtggtactttcactctcactcaggacaccgagggtgagccccttggccgtggtaccaagatgatcttccacttgaaggatgaacagaccgagtacctccaggagagccgtatcaaggaggttgttcgcaagcactccgagttcatctcctaccccatctacctccacgtcctgaaggagactgagaaggaggtccctgacgaggaggctgagaccaaggaagaggagggtgacgagaagaagcccaagattgaggaggttgacgatgaggaggagaagaaggagaagaagaccaaggctagcaaggagtccaagttcgagcaggaggagcttaacaagactaagcctatctggagccgcaacgccgcagatatcacggaggaggaatacgctt

SEQ ID NO: 20964 - DNA, 440 bp, Emericella nidulans; identical to SEQ ID NO: 10770

SEQ ID NO: 20965 - DNA, 850 bp, Emericella nidulans
ttgacttccaccccctgtctatctgtaagaaggtcacccccatcctcaagaagatcggtgatgatcccgagatggagaagtatgttgtccctctacagcaggtcatcctcacccgtctcttccagcagctctcgcaggtctacgagtcggttgagcttaagttcgtttacgaacttgctcagttccccgaccccttccagattactccttccatgattgaaaagttcatcatgaacggttgcaagaagggtgaccttgccattcgtgtcgaccacatctccggtgtcctcacctttgacaccgacgttttctcatccgccaaggctttgcactctggcagcgctgccggttccgcagaaagcgaactcggctcggtacagcgtctccagaacacccctgctgaaattgcccgcctgcagctcacccgtctggctaagacccttcacgtcacatgcatgtatgtcgacccgtcatacaacgactctcgtctccaagccaagcaggccgctcttactcgcgctgcggctggtgctgccaaggaacacgaggacactctcgaacgtcgtgtcatcattgagaagaagaaggaggctgctacagatgccctgcagcgcaagcaaaaggaggaggaaactcgcaagcgcatccgcacacagcaactccaggaggctgagaagcagcgacttgctgaagagcagcgtgagcgcgagctgaagcgcatcaaggatgagcaagaccgcatccgtcagcaggaactcaagaagcaacttgaagaactgaagagcggcgtcaagggtattgatctcaatgaaatcgacctggaggatctcgatgccaaccgcctccgtgc

SEQ ID NO: 20966 - DNA, 850 bp, Emericella nidulans
ttcagttctgcaacgttatccctgcccattgcgcgcagcttcgcaatttggtcttgagcgcttacccttcctcgttccagaaacttcctgatccattccgcgaaggtctgaaagtcgaacgcttggaggaaatgcgagaggcaccaagaatagcaggtgatactgccggcccattgctacgtgccggtatcaagaacgtcattgataatgcactccagagcaacaatgtgtccgactcagttatccagcaaatccgtgacgctgtctatgatacggaaagcaaggaatcaggtctctttcacgctccaatcaatatcaacttactgcttgtcaacgcactggcactttatgttggccagggggcagtctctgtaaatgaatcaaagggaaatactcgagcagcatttgagagttctgcccactcagcactgctagagaagctcgtttagatcctgcggcctgaagcccgctattaccttctgagcgcaatggcaaaccaactccgctaccctaacagccatacctacttcttcagttttgcgatcctgcgccttttcggtacagattacacggagcaggatgagtcggatattcgccagcagataatccgcgtgctcctggaacgacttattgttcaccgtcctcatccatggggactaatcattacccttcaggagttgctacaaaatagtagctatgcattcttccatcttccttttattcaggctgcgcctgaggtaagtcactaggtccctacactatcaggtatagctctaataggcatcatctagattggccgtttattcgatgctctcctgcaacacattcaacagcaaagccccagggcaat

SEQ ID NO: 20967 - DNA, 500 bp, Emericella nidulans
tttcttcttcttcttcttctccccttcctttcaccatgtcccaacataccgcttccacatcccccgatgcctcctccaccacccaagtcgccggacacccctcctccgctacctcccgcgccgccgaactcgccagtcttaaggtaaacgctcggcggtgcgtgcgccagtttcctgacttcccgtcccccggcatcctcttcgaagatatccttcccatcttctccgatcactccacccacgaagccctcgttcgctgccttgagctccacatcctagaaactcttgcggatgagaagcccgatgttatcgtcgcctagaggcccgaggattcctcatgggccctagcctcgctctaaaactcggcgccggttttgtccctgttcgcaagcggggcaagcttccgggtccatgcgagacgcagggctacgagaaggaatatggtcaggacttcttccagatgcagtccgatgctatcaagcctggccagaaggtgatcg

SEQ ID NO: 20968 - DNA, 750 bp, Emericella nidulans; identical to SEQ ID NO: 15175
  unsure (1)..(750): unsure at all n locations

SEQ ID NO: 20969 - DNA, 575 bp, Emericella nidulans
ctcgcgaaaaccaaaaacgaggtcgtcgtgcgaccgaaaaagccaaaaaggaagcatccaaacggaagcgcgacgaaggaattgaagaaccaacgcttaagcgattaaagccctcagcggacgaggacaacgcagtcaccgccggcgcagactacgtacctctcgaaggagaggaatacgatgaccaatatgcgacgggagcggcagatgaaatgcctttctacggtctgcttgactccgaagaacaggaatatttcagcagagcgaatgagatgctagagctgaaccaattcggggacgccgaggagcgcagattatttgtagacagtgtgtttcgggaggctagggggaaggaattgaaaatcgcttgcagtcagtcgtgctcgcgactcatggagaagttgatatcagtttcggatattcatcagatctggaggttgtttaacaagttcattggacatttcttgacgctcgtacagcatcggtttgcgagtcattgttgcgagagattgttcatcagcgcggcaccaggtgtgacgcagaaggcgtcgaaaacaaagtcaaaaaaagacgat

SEQ ID NO: 20970 - DNA, 711 bp, Emericella nidulans
cagggcagctcaactacttttgaggcaaaaaaacaccccgaagtaatgtcacacctcgttcatcagcttggtctctctccctcctaggcttcacagacgttttctccatcgacgagccagaccttctcgcgcttgtgccgcgcccttcccaagctctcctcctggtattccctgtctcaaaaagctacgaatccagtcgtatcgccgaggacagctctctccctgagtacacgggctccggaccaaatgagcccgtaatgtggttcaaacagacaattcggaacgcgtgcgggctgattgggctcctacacgctgtgtcaaatggcgaggcaaggaaacatattctgccaggctcagatcttgagaatctgctaaaagaggcggagaagctagatccgatcagacgggcagatctgctgtacgaaagtaaggcgttggagagtgcacatgctgatgcagcgaaattgggggataccaaggcgcctggggcggaagatgacgtggatctgcattttgtggcatttgtaaagggggaggatgggaggctgtgggagcttgatgggcggaggaggggcccgttggagaggggggtacttggagatgaggaggatgccttgagtgaaagggcgttagagttaggggtcagaaggttcttggatgttgaggctaaaggagggaatccggatttacggttcagccttgtcagcttgg

SEQ ID NO: 20971 - DNA, 783 bp, Emericella nidulans
gccctgtccatcaccgccagctaatacatcctccgtaacctccgccctctgcacaaacctcgtcatactccccagcgtcgtaatctgctcatcaaagaccggccagagttcatccaccagtacctccacagcaaccctaaagacaggttcaaaccaatctttctccccactgcgcccaaccagtctatccgcctcctcgtcctcctcaataccctgttcctccaccgccgcaacggccagtaaaaacggcgctttggatcgcagcgccggcttgtcgttgctggctgctcttccctggtacaggacaacaccgaggtcacggccgacgggacacaacaagaaatacaggcaacgactgaccgtgtgaaatggacccggactcttgtattgagcgatacctggcacgtagtcgctcaatgagctctgtgttggtcatgtcctccgccattacctctctgcttcctttctcctcttcttcgttatctagccaatcccatcggatttcaaacgccttccgcgcattctcaacctcttcagccgactgtcattgctccaaagccgcctcaaagggaatccccacgatttcagacaccctccgctgaaactcttccacgccctcaaagccacaatccgaatccaccatccgctcagctgcagagacagccgcagcagtccagagcgccacaaacccccaattctttctcgggctccgatacctctttcgccaaatcttcaaccactctggcggtggcggcgccgccgccggagcgcgtcctgcagtat

SEQ ID NO: 20972 - DNA, 817 bp, Emericella nidulans
tttttgcaagtggtttattctattgtcaaggtaaagcagctgtgaaaaaccgatcattcgctcgcacgaaaagatcttttttcagatcgagtctgtttaccaactgctgcagcttatctttacatattttggtctggtgagttccctacttctaaaatatcagaactcatggctaccaacgataggcaaacttttacctagctttcttcttcattgcgggttctcttaccgatgagaagattgacccatttggccacaacatgggcaaatacatatttatcgttttgagatatgcttgtgttcttgttatgtgtcttcaattcatcttctctatgggcaatcgaccgcaagggtaagactcttttactccagataagaggcgtactaaccggtctatagagcgaagaagctatacctttcaagcatgattgtctacagtatagtcatggcgtataccgcattctgcacactatatctgatcgtgttggagcttatggctaagactggccacgatgttcccataactatgagcgatacgcttttcgtgaacatcgtggtttccctactttccacggtcgggctgtactttttcacttcgttcatgtatctggacccttggcatatgttcacgtcgtctgcgcagtatttcgccttgctgcccagctatatttgcacactgcagtgttatgcgttctgcaacacccacgatgtcacctggggaaccaagggtgataacacaatcaacactgacctgggtacggcgcgcatcatcaatgggtctattgtcgaggtcgacatgccatccgacggtcttgat

SEQ ID NO: 20973 - DNA, 850 bp, Emericella nidulans
ggttgacgatcatcctgtatatcttcgctgaggcagctattgttgcaacggatatagcagaggtacgggcactatatttcacttttgaccaaatttactaaatatcggtttaggtcgtgggctctgcaatctccctcaacctcctccttaatatcccacttgttgcgggctgcgccatcaccctggcagatgttctctttatcctgatcttctacagaccgaatggctcaatgtggggtctgcggctgtttgagttctttgtcatggccttggtgctgggagtagtcatatgcttctgcatccagctatctctcatcaaagagcagtcgatcggagacgtgttccgcggctacctcccgtccccggccgtagttcaatctaatgggtacaccatcattctctccatcgtagggacatactgaccttcataggttataccaaagctgcggcatcctcggcgcaactgtcatgccccactccatgttcttaggcagtggtattgtacaggcccgcctcaaagaattcgacgtcatctccggctacgccgacccaaccgtctgcattggcagtacaaacggtgaagtcgagtaccgcccatctctccgtgcaattcgcggctgcatgaaatactcaatcattgagctcgctctgtccctattcaccttcgcactctttgtgaatagctccatcctcattgttgctggtgcttccctctacaacaccccctctgcaacagacgacgcagacctcttcggtatctacaaccttttatcgtctgtaatctccaaagcggcggggacggtcttcgcactggcccttcttctttccggtctttctgacggcattgtct

SEQ ID NO: 20974 - DNA, 850 bp, Emericella nidulans
ctttacgacaacagtactcaggaatttttacaaaaagtccatcaagagatttctgaactcgtgccggagaagaccgaagactcagagaccaaagaagaggaaccaaaagagtcggacgcgttattggacaaccaatcttcatctattggtgctaacgctgattccaaggtgtcagcagaggcgcgtactgcgtttaagaatattctcgatatcctcgatgggatcaaaaccattcagctgaacatggagttcctgcatcggaatagcagggttgatatagctattctcaacaaacttcgagacaccttggaacctcgcaactcgattttccactcggcgataacgatctcaaatggatttatgtacgctggaacagcgcaggacaaattcttccgtgataacctggaatggcttggaaaggcggttaactggtccaagtttactgcgaccgctgctctaggcgtcattcaccgtggcaatttgagccagggtcagaggcttttgcagccttaccttccaaaggagaacagtatcgatggcgtcggtaactctggatctctgtatagtcagggcggctccttatatgcgcttggtttgatctatgccaaccatggcggaatggctgtcgactatattcgtgaccagttcaagaaagctaccgaagaagtgattcaacacggtggtgccttgggtcttggcgttgcgggtatggcaacaggagatgagggtatatacgacgatctgcgaaacgttctgtacaccgattctgccctcaatggtgaagccgttggtcttgccatgggcctggtcatgttgggaaccggtaacatgaaggtgcttgaggacatga

SEQ ID NO: 20975 - DNA, 850 bp, Emericella nidulans
gtctctatcggtgacgaattgatatcctacgagttcaacaacttcaagtacctcaccggcccaaagaaggttctctcctttggcggttgggatttctcaaccaacccaaggacatacaacatcttcagacagggtacacaaccagcgaaccgtctcaagctagcaacaaatatcgccaagttcgtcaaggatcacggtctggacggcgttgacattgattgggagtatcccggtgtaagttactccctcttctccaagagtagccttttcaagatgtattctgacatataacaggctccggatatccctggcattcccgccggcagtgaagatgagggagataactacttgaagttcctggttgttctcaagaacttgttgaaagacaaatctgtctcaatcgctgctcccgcgtcatactggtatcttaggggtttccctatcaattcgatcagcaaagttgttgactacattgttttcatgacctatgaccttcatgggcagtgggatgccgccaaccccaactctcaggacggctgcccgagtggaaactgtctgcgcagtcaggtcaatcttacggagaccatgacttctttggccatggtcagtcaccaaccccctacaataaatctacaatcactaatttgtgctgctgtaagattaccaaagccggagttccgtctgaccgcgtggttgtgggagttgccagctacggccgctccttcgccatggccgaggttggttgctacggccctgagtgcctgtacacgggctcacgcgccaactccgacgctaccaaaggaccatgcacgggtacaacaggctatctggctaacgccgagattaacaa

SEQ ID NO: 20976 - DNA, 404 bp, Emericella nidulans
aataagtcatggctcattgcaaagcttccaatatcggcaaatgcaaaggccgttagtgaatgcttgacttacgtgaaaacgaaactcgcggactaaatgtgtctatgttcttgcctctagtcttgaagatggtcgtgtaactcatggatgctacgtccctaaagtaagttgttcctgaattattctatagcgagcagctgtatggtgtctaacaggccacattatgtttataggcaattagcgaccagggtgcgtctgctagcgaatggtccagtgccgtctctagagcggttggtggcaacgcagggggcaaaggtcatacgtcgattggcaacggtatcaatcccgagaaggttgatgacgcggtagacttggcttcggaatacctcagcaagttcaagtta

SEQ ID NO: 20977 - DNA, 648 bp, Emericella nidulans; identical to SEQ ID NO: 8748
  unsure (1)..(648): unsure at all n locations

SEQ ID NO: 20978 - DNA, 504 bp, Emericella nidulans
ccgtatgctgtggctttcgtagtgactatgatcacagcatacatagcggaccggtatcggcagcgcggaatctgcgcctttgcaaccacctccatcgctctcatcggcgcagcgctcatgcttgtcggccgcagcatcgcactccgctacgcggcacttattctgctcgtcacaggaatctacgctgcagcgccgtgtctcatctcatgggtccccaacaatacagcgggccatgttaggcgcgccacagccgttgccctcgggttcgtcactactagttcgggcggcgtgctgagtacttggatctacccgaagagttcggcgccttattataccttaggtgcgacagtgaatctctcgctcatcgtggtttcgcttgtgggattggtgctccaagtcggtgttttgatgtggctgaatcggcgaaaggaggtgaagagaacggagattctgagtgagccagggctggaaggacttagctttgaagagcagtttgagattctt

SEQ ID NO: 20979 - DNA, 716 bp, Emericella nidulans; identical to SEQ ID NO: 490

SEQ ID NO: 20980 - DNA, 850 bp, Emericella nidulans
tcatgaaaaaataccttctctcccttctcgctgcggtgacctacaccaccgcgcagtccgtttctggatctgctgagggcttcgcctcaggcgtcaccggcggcggcggcgcaacccccgtttatcctgctgacacggccgagctcgagagccttctctccagcgaaggggagcaggtaatcgtgctcacaaagacctacgacttcaccggcacttctgctaccggcacagcatgctactcgtggggtaccggagaagggtgccagctaatcctgcaggacgactgcggcgacacccccagcaccacagtgacgtatgatgcggccggtaaaaccccgatccccgttgcttcagacaagacgctgttgggtgtgggcagtgaaggtgtgatcaagggcaagggtctgagcttcacggacaacgtgagcaacattattgtgcagaacatcaagatcacggaactgaacccggagtatgtgtggggtggagatgcgttgacctttgacgggtcaagtaacatctgcattgatcatgtcgaggtatgccatattggtcgttcttactgcattccgaagggtaaatcgtgtccaattcgaccaactgacaatgaacaaatagacgtcccttatcggccgcgtccactatgtcttcggctacaatccgaacagcggcatcaccttgtcgaacaacttcatcaacggcgaaactacctactctaccagctgcgacggataccaatactggggcttggagctagtcggcaagaacgactccatcacattcaaaggtaagcccgacccatggcgcatgcgcttcgacaccagccaaccgtatatatataggaaactat

SEQ ID NO: 20981 - DNA, 500 bp, Emericella nidulans
ttggatgccgggcaacagcccgcattatgggcgttggcctcaacacgattttacgtcacttaaaaaactcaggccgcagtcggtaacctcgcgcatacagccgggcagtggacgtcatcgtctgcgcggaaatggacgaacagtggggctatgtcggggctaaatcgcgccagcgctggctgttttacgcgtatgacagtctccggaagacggttgttgcgcacgtattcggtgaacgcactatggcgacgctggggcgtcttatgagcctgctgtcaccctttgacgtggtgatatggatgacggatggctggccgctgtatgaatcccgcctgaagggaaagctgcacgtaatcagcaagcgatatacgcagcgaattgagcggcataacctgaatctgaggcagcacctggcacggctgggacggaagtcgctgtcgatctccccatcggtggagctgcatgacaaagaaataaagcattatctgaacataaaacac

SEQ ID NO: 20982 - DNA, 752 bp, Emericella nidulans
gtcccatcaaccggcaaccaagatgcaagcaaacaaaaacacaatgtccgaagaatcagtcgctgtcagatgagtaactatgagccatccccgcgtttatccgctgaaatggccaggtgggacccgatttgaattcacccacggcttcccctgcccttcaaacgcaaaacgtgccggaattccccaagcaataatcgaggcagccattgctcgaggccagggactgagcattaccgaagaagcgctggagccagtaacaattgaagcaatcctaccacattctgttgccgacgtaatcgaatgcctaactgagagcaaggctcggctattgcaggatgtacggcatgctattaaaaaagctggcggcaccgcgaccccgactgcatacctctttgagaagaaagggcggatagtgtttgagaaaaaagacggtgtcagcgcggacgactgcttggagcaggccatagaagcgggaccacggatatatcctcagatgaagaagggcgtattattgttttcactgaaccaacggcgactaagaatgttggtgaaacactttccaagctagctggtctaactgttgaagagcttgaaattatttgggccccgaaccaggatacgctggtagaattgaaggacgaacaggtacaggagattgaggagatattagcttttctcagggacgaagccggtgtccgtgacatatatctgaatacgactcaagctttatgactgtagcattaggcttggta

SEQ ID NO: 20983 - DNA, 850 bp, Emericella nidulans
cccgttctaatatggaatgcaaatagatctacttcggccgcgcgcacggcgacaaccctgtcaataacattggcctctcccgcaagcacgtcatcgaaggcaccaaggcgtccctttcgcgcctccagctcgactacgtcgacatcatctacgcgcaccggcccgaccggctgacgcccatggaggaagttgtgcgggcgttcaatttcgtcatcgagaaaggatgggctttttactggggcacgtcggagtggagtgccgacgagatcagcgaggctgtggggatcgcaaagcgattaggactcattgcgccgattgtcgaacagccgctctataacatgctggatcgcgaaaaggtggagggggagtttgcgagactgtatgagcgtgttgggctgggactcactgtcttctcgccattgaagggcggcagactcagcggaaagtataacgaagcgttggagcggccgccgccggggagtaggtttgccgagagcaaggacgtttactctgtgggcattcgcgagaggtggcagcaggaagagggtgttatcaagcagctcaagaatgtcaaggtgcgtgtccctttcactggcagatgaacgcaggatagtgctgacaggatctgcaggccctagccgacaagctcggcgtgaagcaatcccatctggctctggcgtggtgcataaagaacgagaacgtcagctcgatcatcactggcgcctcaaggccagagcagatcgttgacaatgtcgagagtcttaaggtgctcccgctgctgaagcccgaaatcatggctgagattgacaaggcgcttgggaacaagcccgccgttgcgcccgctcgcgtt

SEQ ID NO: 20984 - DNA, 458 bp, Emericella nidulans; identical to SEQ ID NO: 3309

SEQ ID NO: 20985 - DNA, 696 bp, Emericella nidulans
atggcggacgcccaatttgatagtgcgctgtaagtccttcacttgaaaactgtcttcgcaatataccccgcccattccaaacatgtctaccccaaaccaaccccgcctgcaccctgcacactccgctgacacggacgccatggctgcaccagcgacctcctccggcgcctgaacccccgtgacacaaagcagaacctccaggcaattacctctattgtgcccgaccttaccgaagaccttctatcatccgtcgaccagccgctcgagatccgtcgatgtcccaagacaaagcgcgactacttactctgcgactataaccgcgacggcgacagctacagatccccctggagcaatgagtttgatcctcctcttgacgatggcacagtaccgagcgagcgagtgagaaggctggaagttgccgcaaatgaggcgtttgatgtctatcgcgagctgtactacgagggcggtgttgggagtgtgtacttctgggatctggacgatgggtttgcaggtgttatacttctgaaaaagggtgcgtcgccaccttatagagtgggaacgaattggacgttactaatgcattcatgcgtacaggcgtgtccccaggcggaaagcactctggtgaatgggatagcattcacgtcttcgaggcgactgaccgagaacgcacggccctctatagctcacagcactggg

SEQ ID NO: 20986 - DNA, 586 bp, Emericella nidulans; identical to SEQ ID NO: 14048

SEQ ID NO: 20987 - DNA, 850 bp, Emericella nidulans
agctaaactacatgattttgcgactcatcgcgagaagcaaaatgtcgacctgcgcaatgccccagcccctcgcccacccatctggcatcatagtggttggcacaggtctcgcgggcctctccaccgcaacgcagttaacaacgcacaatgtcccggttatcctccttgagcgcgctgaacggccgggcgggaatagcatcaaagcgtcatcagggattaatggtgctgggaccaagttccagactgttcccgatagcgctgaggagttttatgacgatacggtgcgctcagccgggaaaccctttgcaacggctgcaaatgtagagagagaacgaagggaaagactcatccacactgttacaaggaactcaaagggtgcagtcgattggctttctgacgaaataggcgtggacctaagcaaagtcgcacaactgggtggacacagcaaaccgcggacgcatcggggagagaaggggaaaccgcctggggcggcaattattgggtcattattggacaaactaaagtccaatccattcgtggacatgcgtatgaaatcccgcgtgacaaaggtgctgaaggaggcgcaggaagtcgtcggcgttgagtacatcgatagcgacgagaagacccagagtctccggggacccgttatctttgcaagtggtggctttgcaggcgacgtgcgcggcatggtcgcgcagtatcgccctgacctggctgggttaccatcaacgaacgaagcagggaaggctcgcagccactcctgcttgagtcgagcggggttgattgatatgaccacattcaaattatccacgggctcctgatgccaaaacacgttgcggtgaaaagt

SEQ ID NO: 20988 - DNA, 831 bp, Emericella nidulans
aagcccgacggcgaagagttacgcactacccacctttttacttcgtaagcgccggctcatccggggctggcataccgtgcgctggcaccgcgcacccggccttgatccgtccaatggcgcacttcctctactagcaagaaagaagtcgcccaacgtgacaggcttgtatttgccctccccaaggcggactacatcctcggactcccaacagggcagcatgttgccctccgacaaccgtcgatggaaagaccgtccagcgcagttacacgcccatctcgaacaacaccgaccgcggcacattgagcttctgataaaggtttacccaaagggcctcttgaccaaccacctagcgcagatggaggtcggagagacgatcgaaatgcgcgggcccaagggcgccatgaagtactctgctcaatacgcctaccggatcggcatgattgccggcggaacaggatcacacccatgtaccagcttatccgggcaatctgcgaagatgagtccgacaatacacaagtcagtctgctgtacgccaacaacggcgaggctgatattctcctccgtgaggagctggaaagctttgcggggcgtttcccacacaagttcaagatggagtatgtcctgagctttcctgatgataactggaagggatatagagggttcgtgaatggggaaatgatcgcgaagcatattgggtcgccggcggatgatgcaaaggtattgctctgtggaccaccgccaatggtcgaggctatgaagaagacgctggccggcatgggctgggacatgccaggggcaattgcaaacgggacagatcaagtgtttcttttt

SEQ ID NO: 20989 - DNA, 850 bp, Emericella nidulans
acgcaacgaccttcttccagcttggcggcgaagacgtgaacgtctatggcgggggcactctcgacggcaatggccaaatctggtacgacctgtacgctgaggacccgcttatcctgcgccctattttgtttggagtgatcggcctgcacggcgggacaattgggccgctgaagttgcgctactcgccgcagtggtaccagcttgttgcgaacagctcggatgtgctcttcgacggcatcgacatttccgggtacagcaaaagcgagaacgaggcgaagaacacggatgggtgggatacgtaccggtctaagaatattgttattcagaattcggttatcaacaatggggatggtatgtattctacccttgtccctgccatagaagaatgtatggcgggtgctgatatgttatgtacagactgcgtctccttcaaaccgaacagtaccgaaatacttgtccagaacctgtactgcaatggctcgcacggtatctccgttggttcgctaggtcaatacattggcgaggttgatatcgtcaagaacgtgctcgtctataacatctctatgtataatgcttctgtatgcctcaccttccatcaaaccctctacaacgcgcagagttaatggaacaatgcaggatatggctcgcatcaaggtctggccgggcgtcgcatccgccatgtccgaggaccttcagggcggaggcggtctcggatcagtctcaaatatcacctacgaggacatgtacattgagaacgtcgactgggcgattgaaatcacacagtgctatggccaaaagaacatgaccttgtgcaacgagtaccccgtacgtttgcttaccttgtactgat

SEQ ID NO: 20990 - DNA, 500 bp, Emericella nidulans
gtaacggtaccctcccgagtttttcagtccaagacttttgcaggtcatgttttctcgccacgcggcaaggcgggatgggcacgcgtggaacaagcatggccttgactgtccctgtgggcgacactattccaacaatctctgctggactcgaattacccacgtagcgggacccgactcaaccaggtatcgcgcgcggtacgtgcccccgaactcgggcgtttccgtctaaatccaaggcccaatatcgaaaggcgtatgtcgtgtactcgaacatcaagtttggtcctattggaagtacctttggcaacggtggaggctcagggccaacaacaacggtgacgacgagtaccgctactagtacaactagctcggcgacgtcgacggctaccggtcaggcgcagcactgggagcagtgtggtgggaatggctggactggtccgacggtctgcgctagcccctgggcttgcacagtggtgaactcatggtactcgcagtgtctg

SEQ ID NO: 20991 - DNA, 540 bp, Emericella nidulans
cactgaggtttcttgcctgggacaagaatctccacaagcccctcatcctccccttcgctgctatcattttgatcatccccaaatggagattgacccaatcgagagctccggaagctcttgtactgcccgggcccaagttctggataccctagtgactcattgaggatggcatcttcctcttcatctgagtccatcatgtgagagtccattgatgggcccaccatttcgcccatatcgtcatcgtcgtcatcaacctcaagcggaactcgctccttgcgccgtctcgaaccaccgaaatcgtccccctcatcagaagagccggtggagaatgagtctgaagggctaaatccagactcagggaacgttggtgacgaggcattagcggcggggaattccgatgaaggacctgcatttgattcttggccaccaaaggtatcagacggccactgaaactcggttgagcgctgcttctcgtcttcggtttcaccaccctcggcattttcggctgcctgtttctgagccgcaagtcgtgcagcgagt

SEQ ID NO: 20992 - DNA, 406 bp, Emericella nidulans
cgaggtcatccctcgcacgctcgctgaatccgccggtctcgaagctaccgaggtcctttctcgtctttacactgctcatcaccaggcaaacgccggcgtgaagtctaccgacggtgatgatgacgacgaggaggaaagtgaagacagcgaagaagagcgtagctccggcggcggcgaagcagaggcttactggaccactggagttgaccttgagggttcctcatcgtctggtacgctggataccgtggaagagggtatcctcgatctgctttcctccaagagttgggctattcgtctagctagcgagtcagctcggacagttctgagcgtcgaccagatcatcgttgctcgacaggccggtgggccgaagccccccggtcctaaccctaactgggatgaggactag

SEQ ID NO: 20993 - DNA, 576 bp, Emericella nidulans
cgttttcctcttacgcacgactcgaacgagtggactcacggccacaccatgacagtgcccagctcgaaggatgatatactctcggcggtcgagaactggggcccgcatatcaaggaacttgccagcctcttcccggaacagctaagcaagtacgccatcttcgatcaggcggaccacccgcttccttactatgccgctggccgggtggcgctggccggtgatgccgcgcacgcgtccagtccgttccacggggctggggcctgtatgggcgttgaggacgcgcttgttctcgctgagttgcttgagaaggtccagaacggctccgcgttcaaggagaagaagtctaatattgagcttgccctgaagacttacagcgatgtgaggattgagcgtagccagtggcttgtgaagagctcaagggagatgggagatctctacgaatggcggtatgaagacattgggggtgacggggtaaagtgtaaggctgaatgggagaggaggagcagggtgatttgggatttcgatgtgcagggcatggtcgaccaggcgagagaagcgtatgagcgtgctgtagtg

SEQ ID NO: 20994 - DNA, 500 bp, Emericella nidulans
atcccgggtatcaccacacccatattactcaatcgccattttctcagtaccgcacaatgtcctccttaatgcaccgacgcccaggagggggcctgttctccctcatgcgagcgctagacgatttcgactcctccctggccaaccggtccttcgacaatcagttcacagcctacgcaccacgcttcgatttacgtgaaacaaaggacagctaccatctggacggcgagcttcctggagtggaaaagaaagaccttgaaatcgagttccctgatcgaaacactctgaacatcaagggccacagtgagtcttcgtcttctaaagaaggtaacgagggcacttggtggtatgtcgagcgttcgacgggagatttccgacgctcgttcaactttcctactccggttgattgcgaccatgttgatgcaagtctgaagaatggcgttctctccattaagattccgaagtctgagggggctcctactggaaagcgcatcgatatcaag

SEQ ID NO: 20995 - DNA, 748 bp, Emericella nidulans
aacctccacctaatacagggctcgctcacctcctccaacagagattcgagctctttggcgatcaagtagcggtcgaacaagggaaccgcgttgtgacttttcaggagctgtatctcagcgcggtgagaggggcacataagattcagaggcagatcgatacgaatgtgcgagagcgaccgaagagatctataccgattccgattcttgcggctcgagggatagaccatattatctgtcaaatagcagcggtttttgctggcggcagctgtgttccgctggatgttgaccttcctgaagagcgcctggtggaactcatcaacaaccttggagaagattcgctgctgttagcagattatcagaaccggaaccgctgtctatctacgcgtatcccgcgcatcgtgattgacttctcctcgcagcaggttgttgaccgagaagtcgaacacgaacagctacaagttgccacaaatggtccggcctcgtgttcccacatttatcacacatccgggtcaacggggatgcccaaggccgttcaggttctggctcgggggctaattaatctcacgttcaacgagttccagccactgcgacgaggccaacggcttgggcatgtctgcaacattgggttcgacgtgtcaatgtgggagatatgggctggaatcttgcacggcgcaacgatagtggtctttgagagagacgagatcctagatgcgttcctcatgcagcagaagctccgcgaggctagggt

SEQ ID NO: 20996 - DNA, 850 bp, Emericella nidulans
agaagagctggcattccagttgacattgttgggggacatctattgtgcctttataggcggtctctatgccagagatgcagatgttgtcccaatgtacggtcgcgcaaagaagtttgccgggcgtatggggagtatatggcggtttgccttggaccttacctacccgtccgtgtcgtacacaacaggccatgaattcaatcgcggaattttcaaaacctttggcgatagccaaattgaggatttctggttggagttctattgtaatactaccaatattagccgctccagggctgagtatcactcctccggctatgtctggcgttatgtgcgcgcatcaatgtcactggcaggtctactcccgcccatttgcgacgaagggagcatgcttctcgacggcggctacattgataacctcacggtagcccatatgaagacgctcggcgcagacgtcattttcgcaatcgacgtgggctccatcgacgacaatacccctcagggctacggtgattccttgtcaggcatgtggtcagtcatcaatcgctggaacccgttctcttccatcccaaatccaccaactttatccgagattcaagcacgactggcctatgtctcgtccatcgacaatcttgaacgggccaagaatatccccggctgtctctacatgcgtccgccaatcgaccgctacgggacccttgaattcggcaattttgatgaaatttaccaggttggatatgcctatggtaaggagtacttgcaaaagttgaagagccaagggtctctacctcttcccgaggaaaatgaagagaagaagaagcttcagcgtaccctggctcctcggcgtgccagtatc

SEQ ID NO: 20997 - DNA, 684 bp, Emericella nidulans
caacatgacctggtgtatggttggcgacgcttgtttgcaggagggcgtcggtcttgaagctctgtctctggctgggcactggcggctcaacaacctttgtgtgatctttgacaacaataatgtaacctgcgatggaacggcagatgttgccaatacggaagacatcaacaccaagatgcgcgcgacaggcttcaaggtgattgacgtgtatgacggggattcggacgttgttggtatgcttcatcctgtcttctcaagtgatcatcactgacgaagaaaccgtagccatcaccaatgcgctcctcgctgctcgctcctccaccaagccaactttcatcaacattcgcaccaccatcggcgtaggctccaagcaagccggcacggccgatgcgcacggcgccgccctgggcgtcgacgaagtcgccaaaatcaagcgcgcctttggcctgaaccctgaggaacacttccacatcccccaagacgtttacgacttcttcagcgatctaccatcgcgcgggaagacccatgaggcagaatggcacgcggctgttgccgcataccgcgaagctgagcccgtgctcgcctctgaatttgacctccgtgtcgcaggaaaaacgccagcagactggacaaagtgtatcccacaaaggaggcgaaggcggccaggctggcgggctggcaggc

SEQ ID NO: 20998 - DNA, 850 bp, Emericella nidulans
tgtcttgggtaggccggcatccccctggcttacatattcgccgaaacccaggaagagcgcgctaaattcgccgaggagttcaaacccattgcagagaagcacaggggcgctatcaacatagccacaattgacgccaaggcttttggtgcccatgccggaaacctcaaccttgaccccaagacgttccctgcctttgccatccaggatcccgcgaagaacgcgaagtacccgtatgaccagaccaaggaactttcggctaaggatgtcagcaagttcattcaagatgtcctagagggcaaggttgaacccagcatcaagtctgaacccgtgcctgaaactcaagagggccctgtcacagtcgtcgtggcccactcatacaaggatcttgtgatcgagaacgacaaggatgtccttcttgaattctacgcaccatggtgtggacattgcaaggcgtaagttttgcccctctgtgcttggaaaatttgctgacaatacttgggatagtcttgcccccaaatatgatgaattggccgagttgtatgccaagagcaaagatttcgcatctaaggtcactattgcaaagatcgacgcgacggccaacgatgtccctgactctattaccggttttccgaccatcaaattattccctgcaggcgccaaagacgcacctgttgaatattcgggttctcgtaccgtggaggatctcgcaaatttcgttaaagagaacggcaaatacggtgtcgatgctttcgccgctcaggccgaggaggccgaagaagttgccgaagatgccactgagaccgccagcgacgctgagccctctgctgaaaagcctgagcatgacgagctt

SEQ ID NO: 20999 - DNA, 500 bp, Emericella nidulans
tatcgaaaatttaagccagtcaagttcacgttcaattaatcaacatcaccaaaatgcctcagtctaaccccaaacctttgatctcgcacctctacacagccgacccctcagcccacgtcttcaaccaaaagctctacatctacccctcccatgaccgcgaatcttccatccctttcaacgacaatggcgaccaatacgacatggccgattatcacgttttctccatcgacactctagctcccctcacctctacctccacagagaatgtgaaagtggaggtcaaagaccacggccccgtcctgaaaactgagcaggttccttgggcttcgaagcaactctgggcccctgatgcggcggagcggaatgggaagtattatctgtatttccccgcacgggaccatgaagggttgtttcgtattggggtcgcggttgggaatgcgcccgacgggccttttgttgcggaggagacttggttgaaggggacttttagtgttgatccg

SEQ ID NO: 21000 - DNA, 850 bp, Emericella nidulans
cagagcgcagcacgagctaaagctacgcgatccttcttggtgtctcagcgaaaagctctattaaaagagagcgagtctgtgctcgagcttcaatcaattgctcgtggtgccattctgaggaaaagactagaagaagatgccgcgttgttgcaacaagagaaagctgctatcatcgatctacagtcgctcgcccgggcagctgtgctacgtattcaggttggtgatgtcctggagcagctggatgattgtgacgacgagatcagcgaattacaagcgcatatcagagccatgattgtgcgagtcgatgtcggtcagacattggctgatctagcggctgaagaagacatcattgcggaattccagtcctatatcagaggccacctagtacggacaaggttcgaggaaaaacgtcgctactaccaggagaacatggagaaagtggttaaggcgcaaagtttcatacggggtagaatccaaggccaagcgtacaagagtcttacaagcgggaagaaccctcctgtgggaaccgtgaaaggctttgtacaccttctcaatgacagcgaattcgattttgatgaagaaatcgagtccgagcgagcgcgaaagttagtggtgcagcaggttcggcagaacgagctcgctgagcagtacattagtcaactggatatcaagattgctcttctggtgaagaacaagatcacattagatgaggttgttaaacaccagaggcactttggtggccatgtagggaatctcctttctaacacggagatttcctccaaggacccgtttgacctgaaagctctgaacaaaacttcgaggagaaagttagagcactatcaagttttct

SEQ ID NO: 21001 - DNA, 549 bp, Emericella nidulans
tcatgatggcattggttgaccttttcgagcatgatctgatggatgcgcgggtatcgatatggcgcacacgctttgtggatcttgccaacgcccttgtggacgccgtggactcaacttctggcgcctggtggcaggtcatgtctgcgcctgggcaggaaggcaactatatcgagtcaagtgggtctgcaatgtttgtctatgctttatacaagggtgtgagggttggtattctacctgcgccagaaaaaggcggggaggcttatatcgaagtcgcggagagggcctacagcgagcttgtaaagcgattcattgttgagaacgaggacggcacgcttagttataatggaaccgtgggtgtctgcagcttgaactcaacggcgacgtatgacgtacgtttgcaaattgactgaacattattttgtgaggcgctgactgagtgagctacagtactatatccaccaaccgcttgtctacgacagcgtcttgggctctgcggcttttattcgcgccagtacagagcacgagttgcaccttgaagcttctttgaat

SEQ ID NO: 21002 - DNA, 813 bp, Emericella nidulans
atgagccatattcaacgggaaacgtcttgctcgaggccgcgattaaattccaacatggatgctgatttatatgggtataaatgggctcgcgataatgtcgggcaatcaggtgcgacaatctatcgattgtatgggaagcccgatgcgccagagttgtttctgaaacatggcaaaggtagcgttgccaatgatgttacagatgagatggtcagactaaactggctgacggaatttatgcctcttccgaccatcaagcattttatccgtactcctgatgatgcatggttactcaccactgcgatccccgggaaaacagcattccaggtattagaagaatatcctgattcaggtgaaaatattgttgatgcgctggcagtgttcctgcgccggttgcattcgattcctgtttgtaattgtccttttaacagcgatcgcgtatttcgtctcgctcaggcgcaatcacgaatgaataacggtttggttgatgcgagtgattttgatgacgagcgtaatggctggcctgttgaacaagtctggaaagaaatgcataagcttttgccattctcaccggattcagtcgtcactcatggtgatttctcacttgataaccttatttttgacgaggggaaattaataggttgtattgatgttggacgagtcggaatcgcagaccgataccaggatcttgccatcctatggaactgcctcggtgagttttctccttcattacagaaacggctttttcaaaaatatggtattgataatcctgatatgaataaattgcagtttcatttgatgctcgatgagtttttc

SEQ ID NO: 21003 - DNA, 850 bp, Emericella nidulans
gtctttcactcttcacccaccccccaactcctccttcgcgcggcaccgctagctgcgcctcctgccgccattcgcgtttcccccatttgcctgggcgccatgacttcggcaccgcgaatagtgggacgtacgggcactgcaaaaaagacgacgcattcggtatgctcgacgccttctacagcaaaggcgggaacttcatcgatacggccatcgtctactgacaaggccagtcggaggaatggcttggcgagtggataaaagcccgtcagaaccgggacgagatcgtgctggcggcgaaatactcgtcaccatggcagacgcagcactcaaattgcagtgaaatatgggggtaacaatgtcaagtcgatgaagttggcgttagaggcgtcattgaagcggttgaggacgaactatgtggacctctattacgttcactggtgggattattcgacgagtataccggagctcatgcacgccttgaatgatattgtcagctcgggcaaggctttgtagggcatatcggataccccagcctgggttgtctccaaggcgaacgagtacgcgaggcagaaaggaccgcggcaattcgtggtgtaccaggggatgtggaatgcgacgatgcgcgactttgagcgcgatatcatccccatgtgccgagaggaaggaatgggtctctgcccttatggagtccttaaccaaggccgcttccagacagaagagggtttccggagcgtgaaaaacacaacgaggggcggaatttaattgcgacctcgcaacgtgacaaagatgtctcgcgggcccttgagaagatcgcgaagagaaaaaaggttgaccttctcccatgttgcct

SEQ ID NO: 21004 - DNA, 500 bp, Emericella nidulans
gtcagagaccatgattatcataccgtcgaggatatcatacccaccaccgttcttacggatcttgatacaagccctggagattcgtgcgctatttgtctcgatcttattgaagacgatgatgatatacgtggtctttattgtggccacgcctttaacgcctcatgtgttgacccatggctgacaagtcgaagagcctcctgcccgctgtgcaaggcagattattatacacccaagcctcgtcctgacgcttccgacttaccatctacttctggtcgtcgcgccgcaagcccaaatcatccccaagctgttttgatcaggggccgggttaacccatttcgagcacagacactatatggacaggcctcacagagtgctccagacaccgtttccggaacttctcgcccaataggccacagattatgggccgtacggaccactccaacgatcgaagagggtcgatcgagaaatgatacctccatcccgcgactgtcgtcttggtt

SEQ ID NO: 21005 - DNA, 590 bp, Emericella nidulans; identical to SEQ ID NO: 6517
  unsure (1)..(590): unsure at all n locations

SEQ ID NO: 21006 - DNA, 850 bp, Emericella nidulans
taccggagacgccatgttctccaatcgagtgtcgcacttctttgacttgcgagggcccagtatcactctggacactggctgttctggaggcctggttgcacttcacgagggagttaagagcctgcggaccggagagtccgacatggcgctgatctctggcgtgagtgtcttgctcaatccggatttcttcaaagccatggggtctgttgggtaagtaatatcttgttaccttccaggagggcctgactgacgaaggaaggttcttttcacctgacggtaagtcgtatgcgttcgactcgcgggccaacggatatggccgaggagaaggcattgcaacaatagttatcaagcgtctgtcagacgcgatcatcgccggggaccccatcagagccatcgtgcgtgaatcagggttgaaccaagacggcaagaccgaaacaatcaccacgcctagcgaggaggcgcaggttgccttgatgcgagactgctaccgtcgcgcggggctggattatgcggacactcagtatcttgaggcccatgggacagggacgtcgacgggtgacccgatcgaatgccgtgcgattgctaccgtgttcaaggacagtcggtcatctgaacaaccgctgcgcattggttctgtgaagacgaatgttggccacacagaggcggccagcgggctcgcgagtctcataaaagtggttatggcgctcgagaaaggcaagatccctcccagtatcaactttgagaagccgaatccgaagattgcgctggatgaatggaatctacgcgtggtgactacgttggaggattggactgcagggcctggaggtgtccgccgcgcgtccatcaacaa

SEQ ID NO: 21007 - DNA, 850 bp, Emericella nidulans
agtatgacgagccggatcgcacttttccccagctcctaaggaagaatctcatccggccattccgaatgctgttcactcagcccgccatccaggcaatcgcactttaccgagggtatcaatacgggctgatgtatctagtggtacgttccctgaggcaatgaaaacaaaggtatatcgctaactaattcagacttgcttctttcccaactgtctgggaggggaggtacgatcaagaaaaaggaatcgccagcttgaactacctctcccttggagtcgggttcgttcttggactgcagttctgcggccggctcattgactatgtaagctcaccctagaaatgcgcatccccttttcagcctccccgttactcagacactgatcgtcgcctgttctgcggcaggtttacgagcgtctctccaaatactacggcgataccgggcgtcccgagtaccgcgtacctttgatgatccctggaggtctgatagtcccaatcggcctcttcgtctacggttggacagcagagtacaaaacacactggatcgtccccaacattggggctgcattattcgcgattgggctcatcgtctgcttccagtgctgtcagacttatgtgatcgacgcctacactcggtacgcagcaagtgccacgggcgtcacggcgtttgttcggacgatggcgggcttcggcttccccctctttgcagatgggctgtaccgggcattaggactgggatggggcaatagcctcttgggttttgtgagcctgggcatgggcctcgtggctccagtgctactttggttctggggagagtggatgcgggccaagagcccctactgtgctggagacgag

SEQ ID NO: 21008 - DNA, 363 bp, Emericella nidulans
cattatcttttaggaatgagtctaacaactagcaaaaaggccctagctctgatgtcttacccctccaacattcccctctccctctctgaactccacgccctctcctcagacatactccacctagctggcgactcctcggtcgacgcatcctggtacacgaaacgtctctccgtcagcgctatttacgcatccgcggaagtaataatgacccgggactcgagccccgatctctcggcaacagaggcgttcgttacgcggcgggttgaggatagcaaggccattggggacaaacttagtggtgcgaagcaatgccttggtttcatggggtcaacggctgttgggctgggaaggagttgggggttg

SEQ ID NO: 21009 - DNA, 850 bp, Emericella nidulans
gaagacgcgaagaacgagaacgcgaggatgaacatcttgacgaggaagacttggaactgattggcgagctgaatccagggctccagtatgcggctgcagcagacgtatggttccctcgatccactgtcggtaggaagaaatactaacaggccgcagtcaaaattcaagcgcctaaaacgcggtcacaaggatcgagattcgcggcaaccatctcaggctattaatgactttttcaattctgacgaggaagatgagcctgcaccagactacggcaggcaccgaaggcaccccggcgacgagatggatgatttcatcgaagaagatgtattctcggatgatgaattacaaagggaacgggaagatctggaggtagcccgtcctagaaagacgatcggctttggagccacagacaccactggcctcgacgagaatgcgcttgaagacatgcgcgccgcttttggagatggaaacgaatacgattttgctcttgctatggaggaggaagaggagcagcaggaggaagacgtggaaaagcacttggatctgaaggacgtctttgagccgtcgcagctcgccgagaagatgttgaccgaagaggacaaccaaatacgtcttatagacgagcctgaacggcatcaaatcgcccgcaagccctaccgcaatgttgtcttgagcgaagatcaattccgtgaagaagccgcttggattgcgaacctcatgcttctaaagaaacggcttgagccagagctgcgtgaacctttccagcggtcagtggccaaggttctagagttcctcgtcactgatgactgggaggtgccgttcatcttccagcaccgaaaggactacatga

SEQ ID NO: 21010 - DNA, 850 bp, Emericella nidulans
ttgaagggactttaatctcaagcagaactccgcaaccacaggcataggctatccctgcgtcaggaagaggtattggtagcatggatagtattacttgatatatgtggagcaccccccaggcacttccaagtacaagatatggcacaaattatcctggaagctgattcctctaccccccctcaactggtcggaaagaactgggttacagagtttaccaagcgccgcccagagattaaaagcaggtttgcttgaaagataaatcgccaaagagctctttgtgaagattctaaagttattggtaaatagtttgctgagttgcagagggttaaagctcagtaggggatccaggatgaagatatctacaactttgatgaaactggctttgctataggacttattgcaacaacaaaggtggttactagagctgaaatgcctggtaaaccatggcttattcaaccagggaacagggagtgggttacaactattaaatgtgtcaactctatggggtggtggtcagttccctccactattatcttcaagggaaaggtctatatagagggatggtttgacaaagaagcaatcccaggcacttggaggattgaaacaagcaccaatggatggacctcagatgagatcaggcttcgctggcttcaaaaagtctttattccagctacatacagctgttctaggggggggtatcgactccttgttctggatggccatggaagccacctaacacctgaatttgatcgtacatgcaaggagaataatgttgtgaaatatctgcatgccttcacattcatctcacctcttgcaacctcttgatgttggttgttttggatcccttgaa

SEQ ID NO: 21011 - DNA, 660 bp, Emericella nidulans
ccggtcgactcggccgcggccagtaagatcctagtcgccgaattatttcttctttcaccgattgttttcttctgttggcacgctaggacggcactcaatctagaatcgtggtccacagggctgaggaacgatcggagactaaaagcgtcgacgatcagaaatggattgagtagtacggaggacgggcttgaacttaatcctcgaccttccttgaggagcccgtcccttgcccacatcctcgactctcgaggcctcggcgctgatttggtcacaagtggctggtgcttattgtgcaacaagcgggagactgcagtcgccgggcgagagtcgctctcgcccctccccgtccccgagtcctccccggcgtacttcagaactcgcagcagagacgcaaaagtacggcagccttcttcctcagcgatcggcggtgtccactgtctggtatggacgaatcaaggctcgaacggactaagactcttggccggcaatcatggctggaatagagtaagcaggatcattatagtgtggttgtctgctgccgggctctcgatgcacatcatcagggcttatttgttagtcttgtcgaggattcggccaatcaagcatccattgtgttgtttgactgagctgcttaggaagtcgaggctcagaagccgcgac

SEQ ID NO: 21012 - DNA, 850 bp, Emericella nidulans
aactcgcatccgaaaggctgtctttttgatggttcccggtctggagctgggaatgttaaatggaaaagttccgctggacgggtcagaggtgaaagaggttaagggagcagacgcagaagacggtacggaaaatacaaggaccgctgaatttgctagatggaaagaaggacttccgccgcaggaccggtctcacttcttcagccttcgtccgctatcgcgcgacaatgttcccgagcctcttcagccattagccgacgtgtttccccatgcctggccggtccgggctccaggggactccaaatataacaaggttcactcgcctctgcaagctgttctcttgacatccgtgcccaaagaaaaggagaagaagacaaaaggcccgaagccgcctcgggtggacaagaactatacttccaagcgaacgcctatcacggcgttcatcagtggagctgatgagcttcgcgagaatgattatcctctacatcccgctctttgcgcctctgaggacgaaaaattggccctgaaaaatgcccgcaaacgtgctggtcaatctgcggaggatggatgggtggatacccatgtagaaagcctcgaagaaggcaacgttcctgaagccgagattcagcaaggtagcatgacggcaggacgtgatgttctcgctttagactgcgagatgtgtataaccgaaggcggtagttcagaactcacccgcatcagcttggtccgctgggatggggaggtggtgctcgacgagctcgtaaagccaagactgccagttatcgactacctaacacgattctcagggatcaccaaggagatgttagaccccgttacgactacttgagagatc

SEQ ID NO: 21013 - DNA, 537 bp, Emericella nidulans
tactcgataccgacgacctcgatcaggactgtcatcgcctattacatctaccgcagcatcttccctggcgacaatagcaaggacatcacatgggaggagtttaggagcaaatttttggataagggacttgtggagagattgaccgttaccaacagaactagggttcgtgtcgaactgaaccgtgatgcggtggctcgaacgtaccctgattcacctgcagcttcaccaaacttctactactatttcactgtcggatccgttgagagtttcgagcgaaaactcgaccaagcccaatttgagctcggcattccaacttccgagcgtatccccgtttcctatgttgatgaagtcccatggatggctaccgtgctgtcctttggccctacactcctcttcatgggtggtttattctatctttcgagacgtgccggcagagcttcaccaggtagaaacggcatatttggaattggcaaaaaccgtgctaggcgcttcaaccatgaaacggatgtcaagatcacgttgtgttatgttgctgaa

SEQ ID NO: 21014 - DNA, 850 bp, Emericella nidulans
tcgttggtttgctggtattcagtttctatgaataccgcttcgcaaaggacccgatcattccacctaagatcttccaaaaccgcacagcagcagtctcatttgccggctcgttcctccaaggtctcgttctctggtgtctgctctattaccagccgctctattacgaggcagtgaaggggtactcccccatcatggcgggtgtcgctctgttcccggcgacgttcaccgttgcgcccagcgcgggcctggtcggggtcctagtaacgaaatacggtcactaccgctgggcagtctggcttggctgggttctgtcaacattcggcctcggtctcctttgctatatggatgttgacacttccatcccagctttcatcttcatcaatatcgtccccggcatcggtctgggccttctcttcccctccatcggtttcgcaatccaagcctccgccacgaatgacacgctcgccatcgcagtcggcatgttcagcttcttccgcgcaatgggccaagccgtcggtgtcgccattgggatgtggtcttccagaaccaaatgtactctaaccttgttgagtctgggattccagcccttgcgtccatggcctcggagtactcgcaagatgccgctggactggtggaagtcatcaagcgcatgccggacgggacggagaaattaggtctccggacagcgtacacagactctctaaggattgtgtatgcggtttgttgtggcatttgtgggattgcgctggccgttagtgtgttgacgcagagttatgatttgaaccgtgcgttggaaacgacgcagggactcaggaaggagaaaaacccaaggccgaatggggatcttgag

SEQ ID NO: 21015 - DNA, 500 bp, Emericella nidulans
tgatgctgaatctggttactgactgcaatgtttctgtagtaagaagcaccaaaagcgcctcagtgcgccctcgcactggctcctggacaaaatgtccggaacctatgctcccaaggcctcccccggtcctcacaagctccgtgactgcctgcccctaatcgtcttcatccgcaaccggtacgaacatgaaaatgcctctgcgtgatatgctcaataagaactgaaggctgacgtttctggttgattcgtagtcttaagtacgctcttaacggccgcgagaccaaggcgatcatgatgcagcgtctcatccaggtcgacggcaaggtccgcactgacccgacctaccctgccggtttcatggatgtcatcaccatcgagaagactggcgagaacttccgtctcatctacgacaccaagggccgcttcaaagaccaccgcattcaggctgaggaggccgagtacaagctctgcaagggcaagaaggtgcaacaaggcaaggg

SEQ ID NO: 21016 - DNA, 850 bp, Emericella nidulans
ttcaggcaggatgttatagagggggtcgacttcgtggtcgtgagggaaaattgtggaggcgcatactttgggaagaagggtgaagaagaccattatggttcgttcttacctatacttacggtgacttgagtggtttatatattgatgaataccgcaatggacgaatggggctactcagccttcgaaaaacagcggattacttgaactctcggcggagctcgcgctgcgacacgatcctccctggcctgtgatctctctcgacaaagccaacgtgctggcctcgtcgcgtctctggcgccgggttgtcgaaaagaccatgagcgaggaatacccgcaggtgaagcttgtccaccagcttgctgattcggcgtccttaatcatggccacgaacccgcgcgctctgaacggcgtcatcttggcggacaatacctttggcgatatggtatccgaccaggcaggctctctggtcggaacgctgggtgtcctgcctagcgcgagcttggatggtttacccaagccgggagagcagaggaaggtacatgggctctatgagccgacgcatgggtctgccccgacgtaggtcattcccaacccactactatcccttcactcgttgctcaccataatgtatgatagaattgccggtaagaacatcgccaacccgacagcgatgatcctctgcgttgcgctgatgttccggtactcgttcaacatggaggccgaggcgcggcagattgaggctgcagtacgcactgttctcgataagggaattcgaacatctgatcttggaggttcgacgggaactagagagtttggcgatgcggttgttgcggcgttgaagggagagctc

SEQ ID NO: 21017 - DNA, 850 bp, Emericella nidulans
  unsure (1)..(850): unsure at all n locations
gccgtttcgaccgtgaagtcgacattggcattcctgaccctaccggccgtcttgaaattctttcgatccacaccaagaacatgaagcttggagaggatgtcgacttagagaccatcgctgctgagactcatggttacgtcggttccgatcttgcttcgctctgttccgaggctgccatgcagcagatccgtgaaaagatggatctgatcgatctcgacgaagataccattgatgggaaggtctggactcactggtgttaccatgagaacntccgtaatgcccttggcgtttccaacccctctgctctccgcagggttgccgttgcgaggtccccaatgttcgctggaaggatattggtggtttggagaaggtcaagcgcgaacttatcgagagcgtccagtaccctgtcgatcatcccgagaagttccagaagttcggtctgtcaccttctcgcggtgttttgttctatggtcctcctggtactggtaagaccatgcttgcaaaggccgtcgccaacgagtgcgccgcaaacttcatatccgttaagggccctgaattgctgagcatgtggtttggtgagtctgagagcaacattcgtgacattttcgacaaggctcgtgctgctgctccctgtgttgtgttcctcgatgaactggactccatcgccaaatctcgtggcggctccgtcggagatgctgggggtgcttccgaccgtgtcgtcaaccagcttctgactggtaagttatattaattcgtcctatcttatcgaagataaattaacataagttcagaaatggacggaatgacctcgaagaagaacgttttcgtcgttggtcccngacagacctac

SEQ ID NO: 21018 - DNA, 850 bp, Emericella nidulans
acattgcaactaggcgtcgcggagactcgtcgggcgttcgttttacttttatcatttatgagaaccagcgtcgttggctaggtatcggttggacgtactctttatttccgtcggaacgcgctgcgtggacggatgagcatctgaatcctgttccttcgaagaacgagttcgagcttcccgaggtgcaaagcgggaatgcaaagtggcggtgggttgagggcagcgaatggcacattgatggagctgatgacgatgtgtctgactccaaggcttctgatgggggcggttggatatactatgataataaggtatgtactcaacatcacacccattcatccggctcctaacatatctgcagtggaacgacggacgtcgcggtctatacggatgggaccgttacactcgccgcagaaagtggtgtcgggatgccgaactcgcggagatcacaccacacggcaagcccctagatgcaccatccgccttgacccaggccttggcgcaagacatccagcagagcaaaacgggaaaacccgatgccaatgccgatgcttcaacagtggacgctgattccgtgagtctcgccccgtccacaacctctagcaaagcccggcgccgacgttggttcggcagttcctcaaactcgaaaagtgtaagcgacagcaaaaacagcagcagcacatctactccaccagccacaaataacaatgactccgaaagccctggaaatgcgaaaataacctcttcttctgccactagtactagtcacaaccgcagcaactcctcgttaaggagcgtctcttcaagaccggtgagcatctccaggtctcggagactgtccggtctctctggg

SEQ ID NO: 21019 - DNA, 850 bp, Emericella nidulans
aggctcatagaactttctgcatcatccatgacaaaccagtcacgcttcggccctggataaatcttccaagggtaccgagtcttcttgacgaaaaggaacatgtgaccgcaatccctggatttgtgcgtctggtgactcaatttcgggggttggacgttgatttgtccggttgttggacagcggcgggatttgttacacctatctctcgaagtctgagtcatggaacgggagttaccaccgctactaccgatgcatcaagaatagcagcaggttacgagtatgacgacacgggtctcgaaacagaggcatggatacccttgcagcaacttgacctcgccatcacgagagagtggctgcgcgcagagatgtggaaactgggaacccccggtcaccagcagtcttcatctccgagagagtttgtggcggcgcttgtaaaagaagggggacaatggcggctggaggagccattgcttataggcaaggctacactgggcattttacagagtatggaagaaattctgcaagataactggagtgcaatcatggtttgtcaactgggatagccccatcaggagacatggccatgaggctgacggatgtaggacgagaagctgtacgacatctgcgagtgcctgtgcgacatccggccggtcatacagacaagacaaaatggagttagagatgtcgaggtcgagatcaatctcgatcaaattctgcgagggcttctggactgtttggcaaggcttagagggcgtagtgcttacttgctggcgtcgcgtctcggagattaatgtccaatcttgggagcaaaaacagatccctatagtagtcgtattatcggcccgaagtc

SEQ ID NO: 21020 - DNA, 528 bp, Emericella nidulans
agtggatacgcacgcgcccttattgcccggggatggggagtaagcttagtcagccgttgtctccgggtgtcgcgtgcgcagttgcacgtcattctcagacgaaccgatgactggatggatggccgccgcagtcgtcacactgatgatacggatgtgcttctccgtatacaccatgttatcggagagctgccaacgtatggttatcgtcgggtatgggcgctgttcgcagacaggcagaacttgatggtatgcctgcgatcaatgccaaacgtgtttaccggatcatgcgccagaatgcgctgttgcttgagcgaaaacctgctgtaccgccatcgaaacgggcacatacaggcagagtggccgtgaaagaaagcaatcagcgatggtgctctgacgggttcgagttctgctgtgataacggagagagactgcgtgtcacgttcgcgctggactgctgtgatcgtgaggcactgcactgggcggtcactaccggcggcttcaacagtgaaacagtacaggacgtcatgc

SEQ ID NO: 21021 - DNA, 407 bp, Emericella nidulans
ttgctgtttgcgatgttgatttgacggaaaaggggaaagagttgtttggtgttgagacactggtgggtgccaacgctgtataaccatagagattctgaatacgacatgctaacggtatccagaaaatccaacaaatgcaccgtgacatcgtctttgcgtaccccgatggtgtgaccccgctgggcagctcgccgaggtgcgaagtccagggaatgtacaaggcagggaagtttattacagtgcaggggcatccggagttcaaagaggatattgtttctgaggtggtgaacttgcgggctgcggcgggtgtttttgataaggggcaggctgaggatgcattggagagagccggaaagccgcatgatggaattgctattggggtggcttttctgaagttcttgttagag

SEQ ID NO: 21022 - DNA, 850 bp, Emericella nidulans
tcagtatcccggcgcagattttcacgactatcaatgtattcctctcttcctttaaaccaaagttcaaacggcaagactaatgagagcattagatgctgatattaacttatattagcgttaaatggaatcagcgcgcgttcctcggcctcttcacgcagatctggttcctcccttgtctgattgccctggcggttctgccagaggggacgccttgatgggggagttatgcgcttgtcacagtgattttgtcgtacccgacgcgtatgtttttacttccacctcttaaccaaatatataccggttaatacatgggtcctgactgattatcaatacagcgcacccaatgcaagttggttggtgcagttcaaactcgaatacggtgcggacgaggaccgtctcggctgctttgtacaagtgtgttccttctcgtaaaatttgacatagagcaggcactgacgaaagcagtatgatggtccagatccagtcaatcatatcgtcgaatatctaccgtgaggacgacaaacctctgtgtaagtctcactttccagcctgctgatagtgcgaagggtactgatttgagtgtatgtagatcgccgcggaaaccgcgtcctgatcgcgatcaactgtctgaatttcgtgctgtatctgtttgccaagtggtactaccagcagaggaataagaagagggatgctgtttggaataggatgagttctgaggtaggtctcttaactaggcttcttatccaaagaagggatatggtgctaatatatagtactgcaggagaaagaagagtatctcaacattacaacagatcaggggaataagaggttagatttcagatttgcaagc

SEQ ID NO: 21023 - DNA, 456 bp, Emericella nidulans
acagtcctacttcttcaaaagcgacgagctacctctacgtctggcaattttctggatggcaaaccgcctcacggacgtcgtttccccgctcatagcatacggtgtactccatatgcgcgggactcaagggcaggagggatggaggtggctgtacgtccggatccaagcccccgtcctgcattagggcctcttgagttagggctaaatctgaccttcaatagcttcttgatagaaggacttcttacccttttgataggcatctggtcaatcttccagatggctccctcgcccacacaaacaaaagccctctggagacctaacgggtggttcagcgagcacgaagagaagatcatggttaatcggatcctccgcgacgatccctccaaaggagacatgcataatcgagaagcgatcaccccgaaattgctctggcggagtctatgcgactatgacctc

SEQ ID NO: 21024 - DNA, 516 bp, Emericella nidulans
gggagggtatcggaagcgacaaatatcacccagccgccagcctattccaagaagttcgtggtggtgggagacggaggttgtgggaagacctgtctgttgattagttattcgcagggttactttccagaagtacgtatcgtcctttgagctaattatgggatactgacggatgcagaaatatgtcccgacggtatttgaaaactatatcacacaaacgcttcatagaaggtctgggaaaactgtggagttggcgctctgggatactgctggccaggaggaatacgaccgattgcgccctctctcatatcccgagaccgaccttctctttgtttgttttgctattgattgtcctgcatctcttgagaacgttatggataaggttagacccccgaccttcgcgctaggattatctaaccaggacagtggtatcccgaggtgttgcattaatgccctacgaccccaattatcctcgttgggctgaaatcagacctgcgcaacaagcgaacgtgtatcgag

SEQ ID NO: 21025 - DNA, 576 bp, Emericella nidulans
ggcggcgtgctgcatctggtcgaggaccggccgacccccaagtccgtgtacaactggcgaatctacgtgctagcccttattgcatcatgcggctccaacatgatcggttatacatcggcctttattggcacgacaatcacattatcgtcatttgaacatgagttcggcttcgacgagaagacggatagccaggtagacctgatcagcgagaatatcgtgtcgctgttcattgcgggagcgttctttggtgccatcctcacctacggcctcggccacttgatcggacgaaaatggaacctggtcgtcgcgtctgccatcttcacgctcggcgccggcttaacttgcggcgcaacgggctcgactggactagggatcctgtacgctggacgcgtcttgtcaggactgggcacaggcgtggcttcaaacatcatccctatctatatttccgagcttgcaccgccagctattcgaggacggctggtcggtttttatgagcttggctggcagattggtggactggttgggttctggatcaacgtaagtgctctcatctacaatacgatcaagtcgactacc

SEQ ID NO: 21026 - DNA, 850 bp, Emericella nidulans
tatagggccgcccacggctcaagaaagctcttgccgacgcgtactcgcccttttttgggcgccagctaaacccagataccgaagtcacaatcactaccggcgcaaacgagggtgaggttatctacactggttctgggatacgagctgactggataaggcatgttgagtgctttcatggggttcattgagcaaggcgatgaggttatcattttcgaacccttcttcgaccagtgagtttggacgctccgatgcttctgcctatctaacagtctgtaggtatatcagcaacatcgaaatgcccggcggcactattcgatacgtccctctgcagcctccgaaggatggagccaccaagacgttacctgcgtccgaatggagcattaattttgacgagttggaaaggacgataaaccctaagactaagatgattgtgagttcctgattgcaaaccagacgctcagattctaatgcggttcaaggtcctcaattccccgtaagcctccatttccggcagtcaacattaggtgctaatgaactagtcataatcctgttgggaaggttttctcgcgcgatgaactcgaacgcatcggtgaccttgccgtgaagcacaacctcatcatcctctccgacgaggtctacgaccgtctctactatgtcccatttaccagaattgccaccatgaagccagagtactatgagcggacgctcaccgtcggctccgcaggcaaagccttctacgccaccggctggcgcgtcggctacctgatcggacccgagcacttgatcaagtacgttgccggtgctcacacccgcatttgctacagcagtgtgtctcctctgcaagaggcag

SEQ ID NO: 21027 - DNA, 540 bp, Emericella nidulans
tacgagaaagttaagtccgccacgctaaagtccatgattgagggcagaataaccctaacggagaatttgatcgggggaatcgtaagcctccagaagccactcagccggggatctgtccgcgcggcctcaactgacccgtacaacatgccacttgttgattaccgtgcgttcactaatccactggacctggcaatctttacccaaggtatccgattcaacacagacgttcttcccacgacggatgcataccaggagctgggaactgttgtacatttcccgaccccaggcttgtccaacacggagcttgaagctgtaattcggtcgtccgccgctcccaccttcaaccacgctagtggtacgtgcgcaatgctgaagctagaagacggaggatgcgttgataacgagctgaggttatatggctccatggggcgcatccgagtcgtagacgcctctatattccctgtcattccgtctgcccatacacagagcactgtctacgcagtagccgagagagcagcagatataatcagggaacggcac

SEQ ID NO: 21028 - DNA, 604 bp, Emericella nidulans
ccctacaacaccttcatgatagtcatctagcactcaagactttagctataagagctgactaaagcaatccaatctcatgccaatttctatggaataaatctcgctctaaaggcgaaaaaataagcgctcgacacggactcattgtcaccacccgtcacttaaaatctactcagcgtcggcaaaggagccatgggttctagcaactaacttacctgttgaaattcgaacacccaaacaacttgttaatatctattcgaagcgaatgcagattgaagaaaccttccgagacttgaaaagtcctgcctacggactaggcctacgccatagccgaacgagcagctcagagcgttttgatatcatgctgctaatcgccctgatgcttcaactaacatgttggcttgcgggcgttcatgctcagaaacaaggttgggacaagcacttccaggctaacacagtcagaaatcgaaacgtactctcaacagttcgcttaggcatggaagttttgcggcattctggctacacaataacaagggaagacttactcgtggctgcaaccaaactagcacaaaatttattcacacatggttacgctttggggaaatta

SEQ ID NO: 21029 - DNA, 850 bp, Emericella nidulans
gatcaccagccagcccatgagtggaagatgcgcggcatcctggttgactggctcatcaaagttcacactcgcttcggtcttcttcctgaaacgcttttccttgccgtcaacattattgaccgtttcctctctgccgaagtggtcgccttggaccgtctccagttggttggtgttgctgccatgtttattgcttccaaatatgaagaagttctctccccccatgtcgccaatttcagccacgtcgccgacgaaaccttctctgataaggagatcctggatgccgaacgtcacattctggccacgcttgaatacaacatgagctatcccaatcctatgaacttcctgcgccgtatttccaaagcagacaactacgacattcaaacacgtactcttggaaagtacttgatggagattagcctgcttgatcacaggtttttgggctaccctcagagccaaatcggtgcagcagccatgtacttagctcgtctgattttagaccgtggtccttgggtatgctccgctaagtattaatcatccatgggatttcatacactaactgatgcataggatgccactcttgcccattacgctggctacaccgaggaagagattgatgaagttttccggttgatggttgactacctccaccgtcccgtctgccacgaagcattttttaagaaatatgcaagcaagaagttccttaagggtaaggtttttatcctgaatatcctgttcgtgcgttaacgtctgagcagcctctatcatgacacggcagtgggccaaaaaataccaccatctgtacattgacagcgcgctcacagagccgtacaactccatcaaagacaacgaa

SEQ ID NO: 21030 - DNA, 850 bp, Emericella nidulans
ccttgactttgttcctaccaaggagctggaaaccgagctgagcaccattcagtcacttctatcgtgcgttatatatcctaaggagcacgcaaaaatcgcgaaacaagcgtggcaacatacgggtgacggcgtttcaagcaggcggggtgaattctgtcttggtgctctgaaggatggtcttcttacggaaaggaaaaatgttacaggagatgcaacgcgccaaatcatccacaagggccctcggagatatcagggaaagggttcaataaacgggataggtaaagtttcatcacataacgcagtttcagccaacaaaccgcacgaaggacgtgagtcagttcagtttattgaagaacggtttggaaggaacttgagtacctcactagccagcaaggcaaagattgccgtacgcaggcgaatagcaggtgtgctgacggcagacgtggaattgaatgaggctttggagaaagcctcacaggaaggaagagtagcagggctttcagaatcggatgttttccttttcccaagcggcatgagttcgatcttcaattcccacaggttgctcctcgaagcgaggggttctatgaaaagcgtctgcttcggattcccctacattgatacattgaaaatccttgagaaatggggccccggatgtgtcttttacgggcgagggtcatctgaggatctaaatgatctggaggcacggttagccggtggagagagattcttggctctcttcactgaattcccgggcaatccccttttaagacacctgatcttagcggatccgagcctagccatcaagatgagtttgggtggtcgtcgtgaaacaatgggaaatttctcacat

SEQ ID NO: 21031 - DNA, 822 bp, Emericella nidulans
actcggccaaacgacccctacagctacgcacccggctttggcaaccggcatcaatctgaagtgattcccggcacgctcccagcaggacagaataacccgcaggagccgcggtttgggctctatacggaggggatcacgtactcggcattcacggcgccgaggagagagaactatagcacttatatgtaccgtgttagaccggctgctgcgcatggtaagccctcccactctgacttcgcgcttgtttggagctgattaagcgctgatggcgtggtatagacgggtacgaaacggatattgagcataaatcccacatcgaaaatagccttctcaccctgaaccagcggctatgcacactcccttctcaaggcgaatgggcgccgttccctctgcccgatgttactaaggaagggaaaattgactttgttgacggcttgcatacgctcggtggcagcggcgacccgaacttgcgcgaaggggtagcactgtacgtcttcatgatcaacgcggatatggaccatagagctttctgcaatacggacggggacttcctaattgtacctcaattgggaagtttggatatccagacagagctggggatgttgtttgttcagcccggcgagatttgtgttgtgccgcggggggtgcggtttactgtacggctggggaaagaggatcccaattatggccacagcggatgctctggagcggatgccggtgatgccggcaagggcaggggctacatcgttgaggtctggggctcgcggtgggatctacctgatctaggcccgataggtgggcatggctcgcgaacccaagaga

SEQ ID NO: 21032 - DNA, 695 bp, Emericella nidulans
atttaaaggcggcggcggggaaaaccacccgaaccagatagaaaggagtcatatttagcaccatccataatgcacccattcaaggctgacggagaaacccagactccagcgcccaggaagcaagccccgagccagacccaacgagcccaagcaaacgagagacaaaaaagccacagctgaaccaactgtggaccaaagaaccacaacagcacaaaaccgagccagaactaccctcgaatgcaaggaaaaaaccaaaggcacaaaccccgggtcaagcgacaacccacccatgagaccgcagtgtacccaacaagccccctcaaaagggaaaaaacctttgactccaggaggcccacccaaaggacgggaaggctggctgccgccgcaagcccccaaggaacctctcaaaaccgtaaaaaccaaaaggaacccaaaaagggccccaaccaggcacggaaaacaaaaatcttcgagccgaacgccaagacccccccttccgaaaccaaactaacataaaagggccccaacaccacacccgataccaaaaaaaaaaattttgccggggttccccgaggggggaaatacccccaaacaatgcccaaaacccccccacccaaacacaaagtgcaaaaaacccaaaaaaaccccccgcaaccaaaaaaacccacaggaaacaacgttgccagggaaacaaa

SEQ ID NO: 21033 - DNA, 850 bp, Emericella nidulans
gcccagatccaagcgggcaagcctatcgtcggcgctggagccggtttggaaccccgcaatcccgctcatggtatcgcacacagagctgaccagcacaggaattggcctctccgctaaatctgtcgaggcgggcggcggcgatctgatcatcatctacaacagcgggcggttccggatggctggtcacgggagtctcgcggggctaatgccatacagcaacgctcacgaagtggtggtcgaaatggcgtccgaagtgctgcccgttgtgaaacacacgcccgtcatcgcgggcgtgtgcgggacagacccacttagggacatccctcgttttctctcccagctgaaggggatggggtttgccggggtgcagaatttcccaacagtaggcctgatcgatgggcagtttcgggccaacctggaggagacggggatggggtatgacaaggaggtgaagatggtgagggccgcaagcgaactgggcctcttgacgaccccgtatgtgtttaatgtgggcgaggcggaagcaatggcaaaggccggggcggatatcctggttgcccatatgggacttacaacgtcgggcacgattggcgctaagacgggcaaaacgctggagcagtgtgtggatgagatccaggcgattcgagacgtggcggtgaaaataaacccagatgtgatcctgctgtgccatgggggaccgattgcgaggccggaggatgcgaggtttattcttggacgagtggctggcttgcatgggttttatggcgccagttcgatggaaaggttgcctgttgaggtggccattaaggatacaacggcggagttcaagaagattgcgttgaggcactaa

SEQ ID NO: 21034 - DNA, 612 bp, Emericella nidulans
atgctcaaccacgtctcaagcacggaatacccatgcaggtgctgcggtctttgcttcttgcaacttggttcaactgctgttgcgtcgttatccttatgacgcagctgatcggttgccccctgtacatcatcaacaaacactattattacgcctggatggcgtccacgaaacgatcttttgggctggtgataacttcccttaccgagtggggctgcccgacttatgtccgggtcagcggtgacgagagtatacgcggacaagttcgcatcgccgacgatggccgtctaaagacaacctttccagagcgccttgtcatgatatccaaccatcaggtctacaccgactggatctatctttggtggattgcttattcgaacatgatgcatggccacattttcatcatactcaaggagtccctaaaatacatacctatcattggccagggtatgacgttttacggcttcatcttcatggctcgtaaatggctgtctgacaagcccaggctccaacaccgcctagagaagctgaagacccagcacataggctctgattcaggcgccccgaagtatgaccctatgtggcttttgatatttccggaagggacaaacctct

SEQ ID NO: 21035 - DNA, 530 bp, Emericella nidulans
ctgagaagcttgttcgcgaattcagatgcaatagctgattgctctccgctgacggttatgctatatagcgtggcaggacgatctattgcccaaatatcccgcgatacagctgtttgtttatcagaaatagaaaacattgttgctattaaagatgccgagcgcgatgtgtctaacaatgacagaaaccatggaaaaaacagcggacgactttgcggaatacagcggagacgacggattaacgttaccaggtatggctgatggagcgaaaggtatcgctccggttgactgttggggaattagacacccaatgcatgaaatgattactgcatttcaaataggagaatttaaaaaggcccaataattacatcaagtacttgtaagaggtcctgactcagtatttatggcgcccagatccaacttcagtgaaaacaacgtttcacatggggtggattagatgcaggtactgtacgtttaccccgttttcccttaacagcagaagaaagagctaccggtcaaacttgcagcattta

SEQ ID NO: 21036 - DNA, 850 bp, Emericella nidulans
ccaaggaccagcgattatgagccacaaggaagaggtgagtatgcttgcgcgtacgggcagcttgacgctaacgagatccccaggatgaactgctggccgcagcactacacaagttcgtggacgtcgatggagatcttggccgccgggccgttcctttccctcatgattcattccatgtccctgaggctcggcaatacgaccaaatgtcggcaaaggatcgtatgactcagattgccgattctcgtgtcacctcgtgagcgagccgctctagagagctttgtgcttctctgtagcggcggcactttggcgacaacgagtttcttcgagttcctgcactggtgggctctgtgcggctactcataccaagggtgtctggacgccttgatttcttataagttcaagcggggtcagtccagctttgcccttcgattctttagagaggcgctctcgacaggaaacctgtcatacgccttcaacagccccatacagtcgattgacgaccagggcgccaaagtggtggtcacgactcgtgaaggccatcgctatgctggggcccgtcttatctcgactataccgctcaacgtgctaaacacagtcaccatctctccgccacttggtacgcagcgcacagccgcagcaaataccggccatgtcaaccaatgcgttaaagtccacgcagaaattgcgagccgcgacatgaggtcatggacgggtatctcgtaccccttcacaagctctgctacgctatcggtgacggaacaacaccagcaggggacacgcacattgtttgccttgtgggttttacaaccaccattaaggcggagaggatttcaaacaaacccagacagcc

SEQ ID NO: 21037 - DNA, 850 bp, Emericella nidulans
agatgaccttcgatacgccgatgagctgtataagatcaaagcctgctatctgaagcagagctctacctgcgcattctaaccgacgacttaaacagcttgggcaattcataatgaagttcggcgcctctttgatgtggctcgtcagcttcttgagctggcccaccaacttgagctcaagatcgttggcgtgagcttccacgttggctctggtgcagaggaccccaaggctttcctcaaggccgttcaggatgctcgcctggtctttgatcaagccgccgagatcggccacgagctgcacactctcgatgttggtggcgggttcaccggggagactttcgagaaatttgccgccgtccttgacagcgctctcgaaacgtactttccgccgaacatccgcataattgcagagccgggccgctactacgttggtggagcgttcaccctagcggcgaacatcattgcgcgccgcggtgtgcaggaccccgagaaccccagcaaggacgcttacatgatttatctcaacgatggtgtttatggaaacttttcgaacatcatctttgatcaccaacacccagaagcacgcattctttcctgcgcgtccgagattaatggtcgccctgtctccgaagaatgtgacctattccatttggggaccccacttgcgatggtcatgatcgtcatcagccagcgcagcgtgcttcctggtttgttggacgttggcgactggctttactttgaggaaatgggtgcctatacccgatgcagcgcaacacgtttcaacggcttctccgataaccatgaggtgatctacatctctagcgaggcggacgcctctgctctccttgaatat

SEQ ID NO: 21038 - DNA, 512 bp, Emericella nidulans
gcgggaacactctcccttgtcattgcttgtttcgtcaatgtcgtggctgccgattttggttatgtcactgtcgaacggctccagagagccccagatggctggattagaggtcctgtggcgccgcctttcaagatgataaagtttcatatagctctccgtcaggaaaaagctgccgagttggaacaagtcactctggatatgtcgactcctggccatcataattatggccgccatttgaaacgtgacgatgttagggcttttgtacgcccttctggtgaaaccatgaaccgagttctggcctggctcgaatcagctgaaataccggcagaatctgtcaggacccatggaaactggatggaggttatactacctgtgtctcgagcggagtcgttgatgaagacaaaattccatatctatactcatcgagatactcacagacgcgccatcagaacccttagttactcggttccacgagcactctttccggataccagttaattcaactacgactc

SEQ ID NO: 21039 - DNA, 850 bp, Emericella nidulans
cgctctcgtccgcctgctcaaggcatgggggatcactgcctcggccgtgacatcccactcgtccggtgagatcgccgccgcgtatacggttggcgctctctcgctgcgccaggccatggccgccgcctactaccgcgctgccatggcagcagacaagacgctgaagagcgcagaggggccccaaggcgcaatggttgccgtgggtgttgacaaggctgccgcgcaggcatacctggaccgcgttgagaaatcggcaggccgcgctgtggtggcatgcatcaacagccccagcagcatcaccattgccggcgacgaggcagccgtcgtcgcggtcgagaagttggccactgaggagggcgtctttgcgcgccgactcagggtcgagacgggatatcactcgcaccatatggagccaattgcgagcccgtaccgggaggcgcttcgcgccgcattggcccaggaagatgctgagtctggtaccaaggaccagactgatgtcccgggctttgcggatgccactaaaccgggcagcctagaccacaccgtcttctcctcccccgtcacgggcggccgtgtcacagatgccaaagtcctctctgacccggagcactgggtccgcagtctgctccagccagtgcggttcgtcgaggccttcactgatatggtgcttggctccacagatagcagcaatattgacctgatcctcgaggtcgggccgcatacagcccttggcggaccgatcaaggagatccttgccctgcctgacttcagcagcaggaatgtcagcctcccctacatgggctacctcgttcgtaaagaagatgcgcgcgactgcatgctcactgctgcc

SEQ ID NO: 21040 - DNA, 850 bp, Emericella nidulans
ctacaaccctacatgattagatgaagggccacctatcttaaccagaactccataaccagaactacaggctatctctgcttcaggaggaagctttaatagcttggatagtatccctggatatacatagcactgcccctaggccctcccaggtacaagaaatagcgcaaataatcttggatgctgcaatattaactctatctctacctattagcaaaaactgggttacagagttcaccaagaggcgcccggaggttaaaactaggtttgcgcaaaagattaatcgccaaagagtactatataaggatcctaggattattggttaatagtttgatgagctgtagaaaaccagagattagtaggggattcaggataaggatatctacaactttaataaaactaggtttgctatgggtcttattgcaacaataaaggtggtttccagagcagaaatgcctggtaaaccatggctaatacagccagggaattgggaataggttactactattaaatatatcaatactagggggtggccaattccctctaccattatctttaaaggaaaagtccatatggagggatggtttgataaaggcacaatccctggcaattagaggattaaaataagtgctaatagatggactatagacataattggcctttgctggcttcaaaaagtctttattccagctacaactgagtgtacaaggggggggtattgacttcttattctagatagacatggaagctacctaatgcctgagtttgaccatacatgtaaggcgaataatattatacctctttacatgcctgcgtattcatcttacctcctccagcctttggatgttggttg

SEQ ID NO: 21041 - DNA, 572 bp, Emericella nidulans
tccgcggcacgcaattaatccctcactaaagggatcgaacgccgccgggcattcaaatcgtggactatttcttagctattctttcctgtagcgcttcacctcgttcctcgagacgcaaaatgcctcagaggcgccatcggatcgatttctcgctgctaagaaggcgtcagaacttttcgtcggcctcctcctcagacctttctcctggcattccggtcctccagtcgccaatgtcgtttcatgcgatggcgtcaccagaagtccccgaggcaacgcttaagcggaataagctggacagagctccagtcaagccgtccatgtttttcgaagatatggatgaagaggacgatggaccagtcaccaagtcaacggcccatgaccacaaggacgttccagcgccacgcacggcacagaaagttatcagtggcgagagtccaccaaagacccaattctttgaagattcattcagctccggtgtctcctttgtaccgccggttgcacgaatagggcaggattctcttgtcgtgattgaagtcttggtaaacgtcagcgtaagtcggccaagtcaacta

SEQ ID NO: 21042 - DNA, 495 bp, Emericella nidulans; identical to SEQ ID NO: 10154

SEQ ID NO: 21043 - DNA, 850 bp, Emericella nidulans
acttcgcgaagcatttggcgaactccgccgcaacctccttactgttgtaccttcgtacatggtcccccaactatacctgccattcgccaaactaccacttacagattccggcaaactcaatcgtcgagcaacgtgggaaatgattcacagttgcgggtcatggtcgcagtatttcctggtggatgatattaaggcagagcccgctactgtcaccgaacgccttttgcaaagtctatgggcgacggtcctcaaggttcctgcctcttccataggcgcaaaagacgactttttccgctctggtggagactctatctcggctatgcgacttgttgccagcgcccgtgaggacgctcatatttcgttgaaggtggcggatgtcttccgtcatccaatactatccgacatggccacactgatagatcgaaaaacaactgtgacaaagccagcatattgcccgttctctacaatgactgatgattatgccatccgcgactccatcaagcctctcctctcagtacccagcgagataattgacgttgcgcctaccacggacctccagtctctttcgattgccacatcgttgcgaccctctcgtgacctaatggcgtacgttagtattgatggaattggcagccctaattttgcccgatggagagcgtcttgcttggaggtagtcaagaagcacgatatccttcgaacggcttatgtcgtgtacaaaaatcaactccttcaggttgttcttcgagattacgcccctgctgtaacccactatcagacagatcagtctatcgaagaatgcaccaaagagttcatcgcgcatgacatgcatcgaccaccccaactgggttac

SEQ ID NO: 21044 - DNA, 790 bp, Emericella nidulans
atgcttcccaagattctcgaacccaaacgtcggccgctcgcactcagaacaatggaaagacccaacaagcccatggccctcctcctagcaagcttcctgctcctgtgcagccagtcaagcctctgaacattgcgaacaagcaggcacctaaaaaggctaccccaaatggtgtccgccaggccgaagctgctctgaccaagaaggccgacccgcacaagaaggaagtccgcatgtcggcaatgagcgagaatgaagttatggatagactgaggtcggtcgtgtctaaggacaaccccaatgagtcttatagcaagcagcgaaagatcggacagggagcttctggatctgtgtatgttgctcgggtcaaagaaaatgccacttctggagtcgctcgagagctatatcggcaatatggtccacgctgccaagtcgccatcaagcagatggatctacgtagtcagccgcgcaaggagctgatcgtcaacgagatcattgtcatgaaagacagccaacatgctaacattgtaaactttctggactcgtttctccaggagcagagcaatgaactctgggtggtcatggagtttatggaaggtggagctctcaccgatgttatcgacaacaaccgtgttattcaggaagatcagattgctacaatctgtgctgaggtagttgctcccgtattgtgctgcgtttggaacaattgactaacaaatcgactagacgtgcaaaggactggcgcacttacacagtcagagtatcatccatcgtgagctttacgcaaatgggt

SEQ ID NO: 21045 - DNA, 644 bp, Emericella nidulans
ctgcaggtcaaagatgaggaggctgttatctcgagaataactacacgaatggcgcaaatctaccagagatccgagtctttcatgttcgtcagcatgcaagtgatcccgtcgctgcgattcggcaactcgacagtgccagcatactccatgaaagtcttcgcgctgccgtatctcattgccccgatcacgaacctccgcagcaccatactcattcaagcggcgcttcacgacattctacatatccaaccctcccggggaatcatcctgtatattccagttgcagaagagaacatggcgaccaacaatactactatgatgggtgaggtagcccgtttacaaagcgatactcatggctggggccgggagtctggaatctttcagtctctttctcgatccctggttggaggaagaagtccagcagcggtgcgagtgttcctctgtctgtcgccacaacatcttcatgggccgctcgaagcgatgtgcatgaagcaaaaccagccgcgatttcagagtctgaaggtaccaatacatccgccgatgaaggctctgtgagacctagacaatctaggacgctgcggcttttcggttcccgccggttgactgagccctcggagcattccaacgcgggctcgggaataggatgt

SEQ ID NO: 21046 - DNA, 530 bp, Emericella nidulans
tccttttgcagcgctgttctcggtttcccgcgtatgggaaagctccgtgacctcaagaaggccacggaagcttactggggtgagaagatctctcgtgatgaactcctgagcgagggaaagagacttcgtgcggagcactggaagatccagaaggatgctggtgtcgacatcatccccagcaatgactttgctttctacgaccaggtccttgaccacatccaactctttggtgttgtccctgagcgttattccaagtacaacctccacccccttgacgagtactttgctatgggccgtggtctccagaagcctgccaaggatggccagcccgccatcgatgtcccctctttggagatggtcaagtggtttgactccaactaccactacgtcaagcctactctccaggataaccagaccttctagcttgctgccaaccccaagccggtcgttgagttcctaagagccaaggaggctggtatcgtcacccgccccgtcatcctgggccctgtctccttcctgaacctcgccaa

SEQ ID NO: 21047 - DNA, 475 bp, Emericella nidulans
taacatttaacagcctgatctcctacccgctcgccattgtaaacgtcttcgtctccgccggtctaatctacatttacctcacgaaagaaaagaacttcccgaactgggctcccggcatccgcgcaaccctccctgtaacagttttcttttgcctgtcaaacatctacctcgtggtggcgccatatatcccgccttccgccggccaaagcgtctacgaagagctcccttattacctgcactgcgttgttgcattgggaatctttgcgcttggctagtgctattatcttgtttgggcagttgcatgccgcgcctcggcgggtacgtccttgttaaagagacagtcgtcgatgccgatgggtggagtaggagtgtttttacgaagatgcctgttgcaagggtgaaggacgaggggttgcatttctagtcgttggtttctcttctctctcatccccaacagcgagacggatggtgtctg

SEQ ID NO: 21048 - DNA, 850 bp, Emericella nidulans
tggttgccagcgatgccattggcatgggtctgaatctgtgagtttcgtctatctagtggaatcggcgtataatctaacaatttgtaggagctgccgacggatcatttttgagactgttgtgaagactctcccttcaggacttaaaagactcaccgtccccgagattaaacaaatcggtggacgcgctggccgctatcgctcagcagcgcagcacggaaaagaccatcagcaggacaatgacaatgacaatgtcggttacgttacctcacttgaagaagtcgaccttccttacatccaagaagcgctgaacactgagccaccaccaattagtgcagcaggcattaatcctcccgactctgtttatgagaaattcgcagcctattttcctagcaacgcatcactcgcgtacatggtcaagcggttaacggagattgccagaatcaataacttgttcttcatgtgcgaccccagcccaaacctggaaaatgcggagatcattgatgccgtacctggcctgcattttgtggaccagctaacctttatggccgcgcccatgaacccacgagaagagctcggacgcagagtagcgatggcattcgagcgctgcgttctcgaacacacgaacggccggctcttggatattgaggaagtcaatctcgaaatcctcgaagaacctgtatctggaaacaaggagtatatgcataagcttgaaggcctgcaccgatctgttattctctacacttggctcagttatcggttcggaggcatctttacagaccgcactctggctgtgcacgtgaaagaactcgtggaagaaagaatggtcagagcattgacagaattctctgcc

SEQ ID NO: 21049 - DNA, 806 bp, Emericella nidulans; identical to SEQ ID NO: 15777
  unsure (1)..(806): unsure at all n locations

SEQ ID NO: 21050 - DNA, 609 bp, Emericella nidulans; identical to SEQ ID NO: 6520

SEQ ID NO: 21051 - DNA, 850 bp, Emericella nidulans
gaacctggaacctgcacaacaccctgctcaaatacagccgcaagacagactatttccttctcttcagctcattgtctggcctcattgggcaaactgggtatgccaactacgcagctggaaacgctttcctcgatgcgtttgtgcagtaccggcactcacttggcttgccttgctctgcaatcaatattggtgttatggaagatgtgggatatgttagcgagcagacacatgccatcgaccacttcgtcgctacgtcgacgtatactcttcaagaacgcgatctccatgatgcggttcaattagcgattgacaaatcctcaccggttggaacgacaaccaggaacggacctgcccagcccacatatgtcaatgaaagtcagttgctcatcggtttgcgtagtacagcgccgctggattctccaacaatcgaacgtcctggaggcgggatccgcgcatggccctctatcacaacctgaaccagtcggctgccaaaagcgcatctgaaaagaccactgatactgccgatgatcagattctcgtatgctttcttgagcaactcaagggggaacctgatatccttgacaaacccgagtcgattgacctcctgagtacagagattggtaagactctcttcagctatatgcagcgtgatcggtccaacttggatctggatgttccactgccatccctaggagtggactccctgctcgcaatcaagatgcgcaactggttccaacggaaaatcggggttgatattggcgtagtgcagatactgaatagtggaagcttgcgggatctaggaagaattactgcaaaggctatagcaggactgcggattgcagagtcgaca

SEQ ID NO: 21052 - DNA, 578 bp, Emericella nidulans; identical to SEQ ID NO: 112

SEQ ID NO: 21053 - DNA, 850 bp, Emericella nidulans
accacaacacgttcgagacaaaagaggagcaggtgtacaagttgcccttgaagtcgaagcgggacgtggtcctgctggcatcgaagccctggttccgcatcgccgcggccgacctcagcctcgacgaccacctggatgatgagctcactttccggctgaaaagctcataccattttcgcgacgccaacacgtacagccagatcgaaacctgtgggaccgtcagctgtgccgtggggaataaggacatgacgatcggcacagtgatgttcaaaagcaactcgcacttcctcaagaaccccgtcatcgacttcctgacccgtcgaggatttgcctacgacgaggtcaagcagcttccaaatgctgtgcccttggccgcagatgtccgcattgagatgcccacgtctagtgaccagtacgctgccgcctcgggagacagcaacccaattcacctatcgcgtgcgtttgcgcggtacgcggccacaacgaaggtcgggtcatccacggcatgcagactagtggtctggtacgaggcgtcgtggagttgcatgcggcaggcaacgatccgcggcgcatgaaggcctggtctgcttcattcaagggcaaggtatcccctggcgagaccctcctcgtggatatcagccacacggggatgaacaacggccgcttgattgttgttgctactgcacggtcggaatcgtccagtgtagaagtgtttcgtgcgacggctgaagtggcccagaagccaggagcctacctgttcactggccagggcagccagaagccggcgatggggatggatctgtacgagaccagccaggccgcacgcgatgtatggcacacggccgagcag

SEQ ID NO: 21054 - DNA, 813 bp, Emericella nidulans
accaagtccacgcacttaacaacgcaacatggctctgaaacgcacattcaagctcaacacaggctatgagatacccgccgttggactgggaacatgggtacgaacaactacttcatctttcaggaaccaagcttatgaatgtcttattgtgtatagcaatctaaaccgagcgaggttgaggaaccggtaactgcggcgctgaatattggctatcgtcatatcgacgctgctgcggtctacggtaatgagcgcgatgttgggaacggaattaaggcatctggtgtgccgcgtggagagatattcgtgagctctacgttgactttggaagaggtttgtgtgttcaactgacgtgctaagctcacgagcaaattatggaatacccatcatgaccctgagaacgtcgaagctgcagtagatcgatcccttagcgatctccagacggattatcttgatctttaccttgtaagtcattcaagttctgttgtgacagagtgtaaacgtcgctaatacctgctggtcatatagatccattggccagtggcttccgctactcaaccacaaccattcagcctgtcgatgagaaaaccggtttaatcgatgtgatagacgtaccaattaaagatacatgggctgcgatggaggcacttgtagctaaaggcaaagtgcggtcaattggagttagcaacttcaaccggcagaggatcgaggagctcctcaagacgtacgctcattgcccactcgagacacgctatctgaatctgacatacgttgagggcaaaaataccaccggcagtccaccaaattgaagctcat

SEQ ID NO: 21055 - DNA, 850 bp, Emericella nidulans
agtattcaacatttccgtgtcgcccttattcccttttttgcggcattttgccttcctgtttttgctcacccagaaacgctggtgaaagtaaaagatgctgaagatcagttgggtgcacgagtgggttacatcgaactggatctcaacagcggtaagatccttgagagttttcgccccgaagaacgttttccaatgatgagcacttttaaagttctgctatgtggcgcggtattatcccgtattgacgccgggcaagagcaactcggtcgccgcatacactattctcagaatgacttggttgagtactcaccagtcacagaaaagcatcttacggatggcatgacagtaagagaattatgcagtgctgccataaccatgagtgataacactgcggccaacttacttctgacaacgatcggaggaccgaaggagctaaccgcttttttgcacaacatgggggatcatgtaactcgccttgatcgttgggaaccggagctgaatgaagccataccaaacgacgagcgtgacaccacgatgcctgtagcaatggcaaccaccttgcgcaaactattaactggcgaactacttactctagcttcccggcaacaattaatagactggatggaggcggataaagttgcaggaccacttctgcgctcggcccttccggctggctggtttattgctgataaatctggagccggtgagcgtgggtctctcggtatcattgcagcactggggccagatggtaagccctcccgtatcgtagttatctacacgacggggagtcaggcaactatggatgaacgaaatagacagatcgctgagataggtgcatcacgaaatctgg

SEQ ID NO: 21056 - DNA, 850 bp, Emericella nidulans
  unsure (1)..(850): unsure at all n locations
aggcacgcggccacgagacccggccccggggcgcccaacccggagggggcgaggacgggcgcggagaggaccgcgcggagaccggaggaggcgcccgggaaacgaacgaccggcaaggaagagaagcgcgaggcacaggaagacgagcggccgaaggagcgcccccgcgggcaggggaaacgaaacgccgaaacccccagaagcccggaagggcaaaccaagaggaagcaccgcgcaacaagaaagggccagcccccccagccgggagcccccacccccgaaggccccgaggaaccagccggcccaggcccccaaagggaaggaaagcccaaagcccaacgggcacgacaagacagcgaaacccaaagggagaaaaacagacaaaggcaacaagaaaaaaccaaaaccccncccaacccggaggaaacccccaaaccccaacaaaacccaaaagacgcacccgaacaacccacccaacaagccacccccccccccaagagccccccgcagccaaacaccggacacaccccccccccccagccagcacaagggccaaacaccccccaccgccgaaacagacaaaacacgggggcggacaccaacccccccaggggggcaaacgggacacccgcccccccaaaaaagagggagggaaggagagaggaaaagaaaaagcccgggggagggggccccccccccccanccccccacaccaccgcgggggggggaggggggaccccaacccaccccaccaaacaccaaccacaccacaccaccaacaccaaacaccgccgacgaccacgaccacccacacaaaccccacgacccccaaaaacgcacacccacccca

SEQ ID NO: 21057 - DNA, 514 bp, Emericella nidulans
tggttgttcttagttgctgtcctccgtggtgactccaaggtctccggcaccgtcacctttgaacaggccgacgagaactccaagaccaccgtctcatggaacatcaccggcaacgaccccaacgctgagcgtggctttcacatccaccagttcggcgacaacaccaactgctgcacctgcggtggccctcactttaaccccttcggaagacccacggcgcctcgaagatgaggtccgccacgtcggtgaccttggtaacttcaagaccgacgccgagggtaactccaagggctccaagacggataagctgatcaagctcattggtgctgagagcgttctgggcgtgagtgactcccttacctgagatagcagcttgagaaatgctgactcgaaatagcggacccttgtcgttcacgctggtactgatgaccttggccgcggtgactctgaggagtccaagaagactggtaacgctggtgcccgtcctgcttgcggtgagcattcttcatctcga

SEQ ID NO: 21058 - DNA, 850 bp, Emericella nidulans
gtcggtgttgagacattgaccaggctagcagacgatccaaaatcccaggttaaggaatatatacgctggctcacgaagcacgagggagtcttgacgagcccggtagccgagttcctggcatgggagcggattccagacagcctgagggcaggcttttctgaagacacacggcggaatctctcactgtttgcagacggctggccagaggttgaggtatggtttatgtactgttgggacggagcttgaactaaccttatacagtacatgtcaggagcagggttccttgggaatatctccaatttctacagtatccaaccggacgatgggtatgaatatgcgtccattcttggtgtactcatagcaacaacgtgtcgaggtactgttactttggcgtccaatgacacatgcgacccgccgataataaacccgaactggctagataccgagtcggatcagcaattggcagtagctgcattcaaaagaatcagacaggcctttgcgagtgaggagatgcgcccagttgtcatcggcgaggaatactatccaggaccgcaagtccagtcggatgaggagattctggattggattcggaacaatatgatgactctctggcatccttcgtgcacgtgcaagatgggcagggcggatgacaggatggcggtcgtggacagccaagctcgagtgtttggggtgaatcgcttacgggtggtggatgccagtgcgtttccatttctgcctccaggtcatcctcagtctacatgctgtaagtcaacccctaggcccggtggtggttgctgatggttcagacatgctggcggagaagatcgccgaggatatactggagcaaagc

SEQ ID NO: 21059 - DNA, 850 bp, Emericella nidulans
ggagaaacttcggcgttcttcttgctttccttattgggttcatggccatctacttcctcgcgtcggagctgaactcgtcaacaacgagcactgccgaagctctggttttcagacggggccatgtaccggagtacatgcgtccaggatacaccagacctactgacgaagagaaagccgtcacacagagcgacatcaaaccgtccagcccatcgccgacgaacaccgatctccctcttcccccacaacgcgacatcttcacctggaaagacatttcctacgacatcgagattaagggtgagccacgccgtctgctggacgacgtctcaggttgggtcaaacccggcacgctgaccgcgctgatgggtgtcagtggcgccggcaagacaaccctgctcgatgttctagcgcaccgaacaacgatgggcgttatcacgggcgacatgtttgtcaacggcaagggccttgatgcaagtttccagcgtaagactggctacgtccagcagcaggatctgcatctggagaccgcgactgtgcgcgagagtctacggtttagtgcattgctacgacaaccagcgtctgtttccatcagggagaaacacgactatgtcgaaagtgtcattgagatgcttgggatgggtgactttgcagaggctgttgtgggcacgcccggggagggactgaatgtcgaacagaggaaactgttgaccattggcgttgagttggccgcaaagccaaagttgttactcttccttgatgaacccacaaggtatgttctttgcgtccaagagatcctacgggagaatgtgaactaacaaaagcagcggcctcgactcccaatcctcctgggcta

SEQ ID NO: 21060 - DNA, 552 bp, Emericella nidulans
aatctagccactagtacggagtcgagatgatatgccctccacgcaccagcagtgatcatcccgttcgccatccagatcatccccgcaggcctcctcttcatcggctccctctggatccgcgagtctccgcgctggctctttctcaagggccgccgtgcccaagccatggccaacctctgctggatccgccaactcgacgaaaccgacatctatatcaccgaagaggtggccgctatcgatcaagccctggaggagcaggccgtaacagtgggaattggtttttggaagcccttccaggccgttgccagacgcaaggcgatcttgtaccgcctcttcctcggatgcatgctcttcttctggcaaaacggatcgggcattaacgcaattaactactacagcccgacgatcttccagagcatcggtgtctctgagagcgatgtcggctggatgacgggtatctttggcgttatcaaggccgtcatgacctttgtgtggcttcttttcctggtcgaccagctgggccgtcggaacctgttgcttggaggtgctatc

SEQ ID NO: 21061 - DNA, 369 bp, Emericella nidulans
atagtttattaactagaaattatttaccgagataatgtagatatacaaataatttatttaaatatcttaatgcaatataataaaaaaaattcagagtatttaaaaaaaggtatattaaatgatataaaatataaaagagtatctggggttagattagaagcagcaggaagattaactaaacgttatacagcttctagatcacaatataaatttaaatataaaggtcatttagtaaatacatattcatctattcaaggttatccatcatctctaataagaggaaatgataaacctatattacaatatacaaaattaaattctaaatcacgtattggatcttttggtgttaaaggttgagtaagtggagtt

SEQ ID NO: 21062 - DNA, 504 bp, Emericella nidulans
ccgagagtgaggtcctcgctctgaagaaagggtacgacgatgcaaacgctcgagacactcccggtactcaatgccgttatcaaggagaccctccgcttatacggtgctgctccaggatctctcccacggactgtgcctcgtggaggtgcgactttgggtggatatttcatccctgagggcatgacggtgagtacgcagagctggacggttcatcgcgacgagaatctctttccagacccggacagtttcaatatctcgaggtggctggaggagaacgacgccgggtttccggctgcacagctggcgttttcgccgtttggtgctggtgggaggatatgtttgggtatacacctggcgtatatggagctgcggctcgccgcagcagagttcttcaggagatgtcgaggggtaaggctgtccccggatacgacatggaagattatgaagcccatgaattacttcttgattgccccaactgggaatcggtgtgatattatgcgggga

SEQ ID NO: 21063 - DNA, 352 bp, Emericella nidulans
cacgagcccggctacaaacagcgacgagcaccttgtgcagactgtaatcaaggagatgcaccatgccagtctgcaagacgaaccttgcgtacgcgagcaaatgcccaatggcttcggcccggttttctcaatcatattgcggagtgaggattttgcccgcgctttgccgagcaagttagctctgtttcagcatgcgacaagtctgggtggtgtcgagtcattgatagagtggcgtgctttatcagattcccgggttgatcggaagctactgaggatcagtgtagggttggagaattgggaagatttgaagaatgatctgcttcacgggttcagatctcttttgagggagagg

SEQ ID NO: 21064 - DNA, 653 bp, Emericella nidulans; identical to SEQ ID NO: 438

SEQ ID NO: 21065 - DNA, 850 bp, Emericella nidulans
tcgtcttttatcgtacctgctctggcgcaaatcccaggtcagacgactgtcaatgcaaccgtcaaccagggccggtttggcaacgccacgtatgattatgtgatcgtcggcggcggtacctctgggttggccattgccgcgcgcctggccgaggacccttcactcagtgttgccgtcattgaggctggaggatactatgagctggacggtaccgttgccagcatcatccctggccttgcagcaggagccaatgtcggcaccgatgcaactgaatattcaacggtggactggaattttcaagcgcagcctcttacagtgagtaacctgcaagaaatgcgatcctgactgggctaatgcactatctagtcggcaaatgacaggtctcttcgttataatcgtgggaagacgctcggtggctcctcagctagacattatatggtctaccaacggtagggttattctccgcagtttcagggacaagcttctattgaccgtcgccagcgggaccagaggcagttacgatcaatgggcggaactcactggagatgggtcctggggatgggcatccgtgtttccgtacttccagaggagcgtcaatgtcacgcctgccaacatgacaggccgctttcccaacaccaccgtcacttatgacccgtccggcttcaataaggctggcggtccgcttcatgttacttggcccaactagagtccccgtggtctacctggattgagcaagggctggaagctattgggattctcccagataccgattttaacactgggaccttgaacggctcatcctgggccccaatcaccatcaatccgctgagccagaaacgcgactcgtcag

SEQ ID NO: 21066 - DNA, 829 bp, Emericella nidulans; identical to SEQ ID NO: 10035

SEQ ID NO: 21067 - DNA, 397 bp, Emericella nidulans
tcatgttgctgctggttctttcgataccgcgatgcagcttctcaaccgccaagttggagctgttcactttgctcctctcaagcctaggttcctcgaaattttcaaagcctccaagacctatctttctgcaactcccggcctccccccgcttgtcaactatgttcgacgaactgttgacgaaactgacagccggaaagtgctgcccgccatccccagggaccttgaaactattgctagtgtcgacttgcaagagggttacgccgccatgagagctaacaagttggaggacggtgttaagatcttcaagaacatcctctactcggttcttgtaaacgttgtttcgtccgaggcggaggttgagcaagcaaagaagatcattgcaacttctcgagaatat

SEQ ID NO: 21068 - DNA, 773 bp, Emericella nidulans
cttccaacactaacaaccaactcaacctcgccgaattctacccgtccacagacacagacacataatggtggactgggtcacacttattgtaccgtttgcgtacctcagcgttctaatcggctcccttgcaactttctcatccctctaccgcaagcgcaaggccagtacgtctcgtcaaatactctcaaacaaattcgatcaaatcactaaccgcatcccccacaaacaggaaaggccacatccctagaaccatggtttccgtcacatctacaacgagacatctacttttcccttctgcaccttgacccgcccgcctcagcaacagagaagaaggtcgcggtccccgagtcggtcctcaaggcggcgctactccgccgcgctcaagaagacattcgccgcgtcatgacccttcgcagtcagaagcaggctctttccgtacttcttcagcggggaagtgtgggcgacgacctttggcagaggtttctgcgggcggagaaggagatggaggatgaagtgcgggatgttgttactgaggtaatcgcccttttcgctttttctcggaattttattcagtagatgggatatgctgacgttactgatgaacaggcaaacgcgtacgcccccaactggggccaggtaatcttccagtcggcaaacgaaatggttaacaacgagattgtacgcgagcggttagataaacaccagaagaaacttgatgaggagaaggcttggtgggagaagaagaaggctagtatccaggaagggttcatgaa

SEQ ID NO: 21069 - DNA, 850 bp, Emericella nidulans
tatctcatctcaacgaaccagcgggtactacgtcttctcgagcacctactgaagcttaactaacccgtcgcagttctacaagccatcaagttacgctatgcacagaaagagatatatacatatagcggtatcgttcttatcgcaaccaaccctttcgctcgcgtggattcgctgtatgtacctcaaatggtccaggtttacgctggaaagcaccgcgcatggcaggcaccacatttgttcgctatcgcagaagaagcatttgggtaagttctgtcagtactttcgacggtgaagtattactcattgttggtacgatacagggacatgctacgggatgggaagaatcaaacgatcgttgttagcggcgaatgtggcgctggttaaacagtgagcgcgaaatatatcactgcgtatttcgcgacacgcgagtgttgcgaccagcccttgaagtataccacgagaagagccgatgcaatcagcgaatcggaagaacagatgctagccacaaacaccgtgatggaagccctttgcagtgcgaaactacgcgtaatggcaacgtctcccggcttcggaaggacattgtagtaatgttcggcggcaagaaccacattgtggtgccaaataccgcctaccttcttagagatcccgctagttttaagccctcaagggggaattatacatatttttcacttgtgtagggttgggaccaaaacaaggaatggccaaacttggagggtggccctctattgggggacccttttgggggggtcaaagccattttccccagagtttggaagggccttgacacaggaattggtcagtggtggctggaaaaaaataaaaaaaagga

SEQ ID NO: 21070 - DNA, 850 bp, Emericella nidulans
tacattgcctgctgctttgctgccggagtctgtgaccggagacaagctgtcaaatcggttatccttccaactctgccaggtcctttctgctgttcttggtcagtatgagcgccttgaaattgatatcgcgcagatggaccagctagtgtgggattatgcgtgggagctttgtgcatctggaaacctggcgcaagttctatttgttttgcttcatctgtcgcgcgcctcagatcgtgaaagggctgtaaaggaggtactcgcgcgatttgctgccgaacttcccgagccgatcacgccggaaggctctccggatgcaacttggcagcaattgactagcgatctccaaattccagagaactggatctggatgtccaaggctctttatgctcgaaatattggtgatgctgctcgcgaagtggattgtctggtccgagggaagaactggaacgatgcccatgccactttctgccgcattgttggcccaacggcggtcattgagcacgactacaagactctcgagactttgttgtctggctttggcgagacaccagagcaaaaggtgcagggttgggctagtggtggcggtgtctacgaagacttccttcgtctgattactgcgcgcggacaggaccctcagcgcctgaaccgattggtggatgccttggttaccatgggtgatgttattaacggatctcgagtggaagggttggaagagcgcgtggcgttcaaggagatgagccgtatcgttgctggctggaccacccaggaggacgtgaaggtgagcttttgccatttttcaaaaaccacaaacatgattctaaccttattacaggcaatggagatgtcacgt

SEQ ID NO: 21071 - DNA, 428 bp, Emericella nidulans
aatgtcgacatgaacggggatacagaggccagaatacgggtcatggaggccatgctgcggtggaggtgtgaagtccccacggccccagatacgttatgtatgttgcccattgttacccccattgtctcctaatattcattaatgacacgtacaaagggtcctatccattccaaacgcacgaccccttcgtcatggagtcctgccctcacctcttcttcgcgggcaaccagccccaattcaagaccgccgttattgagggagacttgcccttgagaccggacggcgaagacacagagatgggcgggacggcgcagaatgcagccgtccctaccgttcgcctcatctcgcttcccaagttccgggaaacgggtgagcttgtcttggtggataccgaaacgctgggggtagaagtagtcaggtttgggact

SEQ ID NO: 21072 - DNA, 850 bp, Emericella nidulans
acttgtgtagattatgggcatcagcactaggaacagagcgatgcggtattgatgatgatctgtttaggttaggcggagacagtattactgctttgcatctcgcagcccaaatccaccaccagatcggccgaaaggtcactgttcgagatattttcgaccaccctaccattcgtggtattcatgacaacgttatggtgaaactcgttccacacaatgttcctcaattccaagcagagcagcaaacagtactcggtgatgcgcctctgctaccgatccaaacttggttcttatcaaaatcgctacagcacccaagccattggaatcacaccttctacctacggacccctgagctggacgtgactactctgagcacagcagtcgccgaattgcagctgtatcatgacgccttcagaatgcggttgaggcaaatagatggaaggacggtgcaatgcttcgcagatgacatttctccagtacagctccgagtgttgaacgtcaaggatgtcgacggaagcgcggctattgaccagcaactccagaaatatcagtctgacttcgaccttgagaaaggcccaatctgtgctgctgcctacctccatggctacgaggatcgatctgcacgagtctggttttctgtcctccgcatcatcattgagatagtgatctggagtaatctagcgcacaacccccttatcctgtgccagggtgtatctctcggtggtaagagtagcagcgtcagtcattgggtgtcaggcactactgtagctaccaggggtcggcatcggagagggcctactgggaaggacttcttgtgcaagctgctgcccgcatatcctcttaacccccactg

SEQ ID NO: 21073 - DNA, 844 bp, Emericella nidulans; identical to SEQ ID NO: 6300
  unsure (1)..(844): unsure at all n locations

SEQ ID NO: 21074 - DNA, 850 bp, Emericella nidulans
gatactgacaaccacaagattcctatctcaacctctaatgtcctactgctctccgatttatcggagtttcaggagggctccacacttgtccgggaacaagctggccttcgatcggatatatttcgatctttcactgctgccaaagatacacagggagctattagggcgttgaaaaaatacggccctgaagagcctcagctatacgtggatgcgttgacatactttacatcgagcccgaagatcctggaagaggctggtgacgagctggatgctgtcctgaagagaatctctgaggatggcctgatgtcaccactgcaagtgatccaagcactcagcaacaacgcggtcgtaactatgggaagggtcaagaagtatttaagcgacaatatcgagcgggaacgcaaggaaatatcttcagtatggccatctacctttagctcgcatgaaggccccactaacacgcggcttagaaccgtcgcctgatatcaagctacagcactgaaactgaggcgaaaatgcaggagctagaacagctgggttccaaacccgttgtgttccaggcacgtcgatgtacgtcctgtaacaggtctctcgatcttcctaccgtccacttcctctgcaagcactccttccaccaacgctgtctcaacacaataggagaagatgcccaatgtccagcctgtgcaccggataattcaaccataaaggctattcgacggagacagattgagtcagcggatcagcatgatctattcaaggcagagctccaacggtcgaaagaccgatttggtgtaataagtgaattttttggaagaggtgtgatgcgtccacaaaccacgatggaatagaa

SEQ ID NO: 21075 - DNA, 850 bp, Emericella nidulans
agcaaggtatgtcgcagctgttgctgctgtcactacgctctgttatcatttccccgggcgaaagctgcagtcgtcgaggcaatacgcagtccatgaccagccgaggctaacattcaccagcattctttggtggcaactcaacaaaggccacgtccggtatcaacggtgctctcactcgcacccaggtcgacctcaatatccgagacagtgtcaagcaattctacgatgacacattgaaatccgcccgtgataaggctcgccctgatctcatcaaagtcctcacatacaagtccgctgctgccgtagagtggctgcaagatgtcttcaacctcgaccttacactggtttctcgtcttgggtaagtcgattctggagtctattcggtccagcattgtccgtttgctgactgtcctagtggccactcgcagccccgaacccaccgtggtcacgatgccaaattccctggtatggccatcacatatgctctcatgcagcgcctagaggagctctccgagtcggaccccgaccgcgttcagattatcaagaaggctcgtgttacggctgtcaacaaggacggcaatgctgtcactggtgtcacatttgaggtggacggtgagacgaagacggccgatggtgttgtcatcctggctactggtggttatgctgctgatttcggtgactcgtcgctccttaagaagcaccgccccgacacgtttggtctggccagcaccaacggtactcacgccactggtgacggccagaagatgttgatgtccatcggcgcccacggtattgatatggacaaagttcaagtccaccccaccggtcttgtcgacccaaagaccccact

SEQ ID NO: 21076 - DNA, 758 bp, Emericella nidulans
tttttacccccaagcattgacaaaccccggctcctggcaggcgaatcctacgcacacttctcgcccgctccaccagcgatttcgacacagacaatagccacaaatccagaacatgactatctaattctaggcattgatgaagccggtcgcggccccgtccttgggccaatggtttacagtgccttttaccttcccagctctctgcaccactcgctgctgtcggaagagtacagcttcaacgacagtaaagttctcactgcgggagtacgagcaaatctcatgcgcatcctttgtacacaaggctcaccgctgcacgagtcgtgcggatgggcgacaaagcttctttccgcacgggatatatcatcgggcatgatgcgacctgcagcgggagtgtacaacctgaatgcgcaagcaatggatgcaacgattgagctgattaggggtgttgtggaagagagaaaactgaacgtgcgcgaggtctatatcgatacgataggaaatccagcaagttaccagaagaaactggagatggtgttcccatcgctgaggatcaccgtcgcaaagaaggcggactcgctttatccttgcgttagcgcagcaagtgtggtggcgaaggttacaagagatgttgcgcttgatgtttgttatgaagttctcaaggaaaatggaggagtgggcgatggttgggggagcggatatccttctgatccaaagtgcgtcgggtggattcgaactaacatgagattctgtctttggtg

SEQ ID NO: 21077 - DNA, 562 bp, Emericella nidulans
cccgagtccgaaaaagagaaaatactgcggggaaagctttttcgcgcatttacccccgaactaacggctgagcggacccgttgccggcacgcttgtactcgcttcaacacggccggcgaagtctcgcgccgacgcctaattgaactttataaagagtgagaacggcgctcctcttcaaacctacattaccgatgatggacttgctgataagaactcatagtatactccaagacataacgcctctccccccagccaaagaagactccgctgaaacgacgcgatcctcgaaaaggaaccctggatcgagccgcccattaaagtcgactacggctacaacgtgaaactcggccagggtgtctttatcaattatgactgcgtcattatcgacacccgtctggtaaccattggcgcacgaactctattgggacccaaggtaagcttatacagcggaacgcatcctctagaccccgatttacgcaatggcacatcgggccccgagtcgggaaaggagatccatattggcgaggactgctggttagcagggaatgttactgtgttccag

SEQ ID NO: 21078 - DNA, 592 bp, Emericella nidulans
aacaaaatgtctgtcgctagaactgctggttttgccctcgcctccgcggccatcgtcgccggtcacggttatgtcacgggaatcgtcgctgacggcacatactacggcggttacctcgttaaccagtacccttacagcaacgacccccctgcagttgttggatgggctgaggatgctaccgacctgggtttcgttgatggctccggctacacctctggcgatatcatctgccacaaggacgctaccaacgcccaggcttctgccaccgtcgctgctggtggcaccgttgagctgcagtggactgagtggcctgaatcccaccacggtgagtacaaactttagctctctgaacatcgcattcacttatacatgcaaaggtcccgtcatcgactacattgccagctgcaacggtgactgcacaaccgtcgacaagaccaccctcgaatgggtcaagattagcgagagcggtactcgttgacggcagctctgcccctggcacctgggcctctgacaacctgatctccaacaacaacagctggaccgtgaccatccccagcagcctcaccgacgggggccacgtcctccaccacga

SEQ ID NO: 21079 - DNA, 844 bp, Emericella nidulans
ctgatcggacagttctccttgaaaggccgaacggcgctggttacaggtggtgggcgaggatgcgggcttgcgtttgcgcgggggctcgctgaagccggtgcagacgtggcagtcttcgacatcatcgatccacggccagagtttcacgcgattgagaaggactataatgttcggacggcgtattacaagtgagaactcccgtctccgcggaaccatttgtacgaagctaacgacgcagggtcgacgtctcctctcaggattccttgaaagacggctttgcgcagttccaacaagacttcgacggcaagctggacatttgcgttccctgcgcagggataaaccgccatacctgcttccttggttttacctacgaagaacaccacgatctgctgtcgatcaacgtgttgggactctactttaccgctcaatatgcagcgaagcagatgatagccaacggcacgcatcacggcagcattatcctggtcgccagcatggccagttacgtcgcagtgcgcgaccagaactgctcggcgtactgtggcacaaagggtgcagtgcgcgcaatgtgtcctgctatcgccaaagagttgacggagtatgggatcagggtcaactcaatcagtccggggtacgtgaatacggagatgacagcggcgttttcgcatttggtggaagggtggaaggcggagacgatcaacaagaggatcgcggagcccgaggatatcatgggtgcttgtgtgttcttggcgagcgatgccagtagttatatgacggggcaggatatcgtcgttgatgggggagtgactagaatctcataggtaatttgaaatcgattccggctgtg

SEQ ID NO: 21080 - DNA, 850 bp, Emericella nidulans
ataccaccataaccaccattcacatttattatcgccagatgcttccagatctgagtcgtcgaagaaaccggcagactgccggacctacgttagggtgttggaagatctattgttccagctacgtataaatgttgccgtagccaagggatttgaggagctcaagctgcctgggcaacgtggatcggagtccaaaaaatatatcgatctttggcccatccagatgtctgctgaaataaacgccaacagtgaaacgaaacgaaacattttgactacgaacttcgacacatacacactgatccttcagctaggttgcattctgaatactgttccttcgtggaaaaaggcatataagctgagggtagctgttttcgtcgagtatgaaattgacgttgaggatgagagaaagagggttgaaaccctccttgagaagttacggattgaagcggaaattctggtcttctggctcgcatgcggtgatttgaaaacataccgcatcatagtcaatggagacccccttccagaatgtcaggacgtccacgagacggtccacaaagtactgaagaatgaaaattggtgggaggatgttcagcgaggccgcaggagctcagacgagtcgttaggtttgagtttgatgaacaggtctaggagctcgtcccgttttgatgtctcgagtcaggagcatcgccaggcacgccatccgctggcgggcggggtgcggaagttgatacagtcttccaagcgcaggcgatctatttccagcttcagaggcatggggggtgttaatttaggcatgcaaacacaccgattgctagatgcctcgtcgatgatgacagtagtccgagcgacactt

SEQ ID NO: 21081 - DNA, 850 bp, Emericella nidulans
gccaatcaagctaatgaaaagggatttcctgtcccttgcaagaacccgttgagtatcaatgttgatattgtacgtatcaagtggcctcctctctagatgagatgctaactggcatatgtagtgtaataaggtcgttgcaacagcaaaaaaacggccacacctcaaggtgatgtgcggattctctcggcgcttcgacaagtcctaccgagccgcctacagaaaggttgaaaacggcctcattggacgcccgtctatcctgcgctcccagacgtgcgacaagcacgacccatccgggttttatgtcgagtacgcctcttggtctggcggcgtctttgtcgacatggccgtgcacgacatcgacctgacactttggttcttcgggtctgatattatccccaagtccatctccgcgtacggaatcacggcggtgacgcctgatctgaagaaatacaatgacttcgacaacgccgtcggcgtcgtcgagttttacggcggaaaaatcgcgtacttctactgttcaaggatgatggcgcacggacaggaagacgtgacggagattattgggacggaagggaaactctccgtgaacttgaacccggccaatgacttggtcaattactaccatgctggtgggattacacgtgaagtccctgcgacctactggggccgcttcgagcaggcatttgtgaaagaaacgaatgaatttgtggccgcttgtctggacgatacgcctcttcccatgaagctgagcaacgcggtcaaggcggtgcagattggtgcttggttgcaggaggcactcgttactgggagacagatcaagtttgatgaggcaggaaggagggtggagagt

SEQ ID NO: 21082 - DNA, 770 bp, Emericella nidulans
cctcctcctcctttaccgccgggatggaccgagcacaaagctccctcaggtttgtccatatgatggtcacattaaatggctgttctgacgaaacccaggccacacatattactacaattcacagacgaaacaatcaacgtatactagaccacaagccacccctaatgaaccctctttacccgcgcccattccagaccctgctgccaatgccgcgttccttacgcccgacacgctcccaccattttcctctacaccgtacgcgcctcagggatacggcgcctccccatttggtgttcctggttataatgaaccgcggggcgggtttcgcggagggaagtcctatcatgaccgtcgaccgcgtggaccggaagaccggccgaaatcgaaacatgccctacctgggtgtgaaccatgggtgcttgtgaaaaccaaactggggagaagattcgttcacaacacggaaacaaacgagagtttctggaagttcccgacagaagtactaaaagccgtcgtggagtttgatcgtctcgagcgggaggccaaggaacgccgcgaacgtggcgagacagccgagaccgagcaggcgacgacagctaccggcgatgatgccaaacatcgaccggacagcgctgctgcgactgagggtggtgacgaaagcgacgaatatgaggaggttgaagtcacagacagcgaaggagaagacgagaggaatccatccaaacggcaacgaacagacagcgtagaaaaccaacggcccgttgaattcaccg

SEQ ID NO: 21083 - DNA, 850 bp, Emericella nidulans
ggaagcagtctgcaactttcagactctttttgcttttcagccagggatgaccgagactcaggggcagtcgccgtacggccatcttctcaccgcagagaataaggacaaagtcgaagctgccttctacagctatgccctcacattccagtgctctctagcaggaaccgggataatcaaggtgctcgcctcatatgacgacaagatcatttcgagctcgcaaatgaaacgactggtttttcagttcgagcatatagtatcgcagttgatcagtagcaatggctccaagagattgagcgaaatccagctcatctcgccccaggacctggaccagctcgacatttggaaaagaaaaatggaaagctacgagcaactcttgcccttggatgcgattcaacgtcatatcgacactcgacctgatgcgacagccgtcgctgcctgggatggcaccctctcctacgtggaattagacgctttcgccactcgactagctacatggttagtgcacgagcagaaggtcgggcccgaaattgtgattcccatctgcttcgaccggtcacaatggatgatcgtctctatcttcggtgtattgaaagctggaggcgcctttctacttctcgacccaatctaccctgagaatcgcctccggtacatgatcaagatggtcaacgcccgaactatcctcgtctccgaatcgtgcagagcgaggtttgagggagttcctggtgccatactggccgtgaacgctgcttggtttgaaacccacacccacgcatccattcctatgagggaactcccagtagacagcgcattgtacttgtctttaccagcggttcgacgggcagcaaagggg

SEQ ID NO: 21084 - DNA, 850 bp, Emericella nidulans
aggtcggcgagtaggtggcaaccgtataccccttcacgtctaccatcgactgaccactttatcatcgaatagtagtaacggtgatggcgacgataaatctcagagtcaagagaagcgcgaagagtccctgccgatgcccggcaaggatgcgtttggttatcagaacagcaacaccagcaacaccaacgccatggcagtcaacggtatgcctgtgacaacactcacggaagcccaagccgcccaacaagcctcgcaaaattcgacatacgctcaattcatgaagccgaaatttgcccgcgcgcccataaaggaagctggaagggttgcatacttgggcgagtcatcgaatctttcactcttggttcaagaccgccatggaacgaccgacgtggtccattattcactgcctaccaacatacgaggttctcgcgcgagagtctccgacttggataatcttgagttagatatcctgcaccagcgcggtgctttcctacttccgccgaagtcgttgtgcgacgagttagtggacgcttacttcaaatgggtcgcacctgtcgtgcccattgtcaaccgcagccggttcatgcgccaatatagagatcccaagaacccaccttctttgctccttttgcaggccattcttttggctggttcgagggtctgcaccaatccgcagctcatggacgctaatggctcgaccactccagctgctatgacattttacaagcgagcgaaagctctatatgatgcgaattatgaggatgatagggtgactattgtccaagctttagtgctcctgggctggtactgggagggacctgaaggtgggtgccctaagcagaaaatggtg

SEQ ID NO: 21085 - DNA, 850 bp, Emericella nidulans
tccatatgatacgggactaacatcaaggaacaagtttgataacgagttagttcgtcgacaattggttatcaaccacggtatagagcagaaccttcttatcgagaatctcgaagaggcgtcgtctgtgctatttgacggtgaaaggccgagaaacgctaaacggtgcttttgtatcaacaaaagcgacagacgtcgaggtattcttctttcctacagtagaaatggggagccaagtcaggcccctgtgtcagtttattctggtagcccaaggatgaaatcggatcgggattcgcaaatcaggtaagaatcactgttcccagtccagcatagtattgcggatgcaagttaatcttgtagggtgcacgcgaggcggtagcgaatctcagacaagttctaaacgctcgagaagaagaactgcgctctgcccagtctcacctcaccgctgtaggcaggctttcgaacggaacgaaaggaagaaaaattttcttgtcattgaaagccagagaaaggatgaccgtattgaagagctagaagaatcccttcagaaagagggtagtcaggacggagatcttgaaatacttcaagcgtctctgcgagaagctcaagaggaaaagcttacgcatgagggttctctcgacgatgctgcgaacgccatgacagagatgatgcaaaacttgaaaaggatcaagaaagaactggcgactaaggatgctgagattgctcggttgaaagatgagctcagagtcgctgagagtgagcaatacttgatcgccgaccagcgacgaaaaaggattggcgagaaaaatgcagccggcgagccgggtgccaccccgactacgcagagcacgta

SEQ ID NO: 21086 - DNA, 850 bp, Emericella nidulans
ctcaggcataacaacaattaccataaatcgccctcaccggcgcaacgccattgacggtcccactgcccagaaactcacggctgctttcctagacttcgaagccgatgcatctcagaaagtgtgtgtcttccacggcgcaaacggtaccttctgcgcggggtttgacctgcatgaggtagcgaaatacgaaccccaagctcaaagtcaagacggatccactgcaagtccgcaagacagcgcaaatgttggagacaagtacaccggccccattatgtccccgcacaaccgcgttcaaggccgcaacaccggcccaattggcccctcacgcatgataatcaccaagccggtcatcgccgcagtggctgggcatgccgttgccggtggtcttgagctctcccttcttgccgatattcgggttgtcgaagaagatgccaccttcggcgtgttttgcaggcgctttggtgtccctctcatagacggagggacagtccggcttcaggctatagttggtctgggacgtgcactcgatatgatcattaccggaaggccggttggtgcgactgaggcactgagatggggttggcgaatcgggtcgtgcctcggggggctggggtggaagaggcgatgggaattgcgagacagatcgtggctttccgcaggcatgtttaaacgcggatcgggcgagttgctattatgcggcgtttgaggctaagagtttcgaggatgcgttggctaacgaatttgagaagggaattcgggttctgggggatggggtgaagggggcgaggagattcagggatggggaagggagacatgggaggtttgacgatgggggtaagggaatgctttg

SEQ ID NO: 21087 - DNA, 559 bp, Emericella nidulans; identical to SEQ ID NO: 7745

SEQ ID NO: 21088 - DNA, 333 bp, Emericella nidulans
ggggctaatatccttgaaatcgtagccaataagactggctatgtcaactacaaagttgacacaacgaaccttagactcaaccagacttatcccggccctctctcgaatggggatttgtccgaatactcgccggtatggccaaacccattgaccgagggcgactgttcagcgggtcatgggatccttgacacggtcaaggagacatatgctgggactcagcccacgtataactacaccagccctttcccttacgattctaagagtgggtacaacgaagatgttgatgcgacccgcaaaagctcatagttccatagcaacagcgactccgccggt

SEQ ID NO: 21089 - DNA, 850 bp, Emericella nidulans
ctccgagtgccaagacccaagcccaggcttccggcggcgccgggacgatcgctggcgctggcagtagcactgctcctgttacggcccctcccgctcccgccgccgccaaagcagtaccggctggtggcatgcaagccattgaagaccgacaagcgcaagcttttgagatcgttcgcacattgttgtcgagaatcttgaagatcgccttgacagatgtagtcgggacgcaaagtattaaatccctttccggtggtaagtagatttattgagccctcccgctgctgcaatggattgatcaatctaataacgaatccaggtcgctcaactctggagaacgaaatcatcggcgatcttgccagcgagttcgggtctctccctgaccgcgccgaagacctcacagtcaacgacctcagcgctgctctgcaaaagaccttcacaggccagatgcgcaaggtaatactgaaaatgctccacgcgatgttcgcgtcaaaaatgcccggccaattcaccgttgcaacggcgcgcacatacctccattcccgctggggcttgggctctgggcgtcaagattctgtcctgttattggcgattgcacagcagcccgggagtagacttaaagaggaggcggaggcgcggtcgttctttgatgggctcgtacaattctatgccgatgagcatggtttgacgttgggcgcaaattcgggcgccgcggatgagacatcgggtttgggggggggtttggtgatggatcagaaaacgttggcagctctgacaggggggcagcaggagctgtccaaggcgctgttgaagatctatgccaaacatctggatatcgatctggatggggatc

SEQ ID NO: 21090 - DNA, 378 bp, Emericella nidulans; identical to SEQ ID NO: 10952

SEQ ID NO: 21091 - DNA, 850 bp, Emericella nidulans
ttcccggtactgagggtcctgttgagcgattcgaggaagtcaaggcgtttactgacacctacggcttccccatcatcatcaaggccgccttcggtggtggtggccgtggtatgcgtgttgtccgtaaccaggccgatctgcgtgactcttttgagcgtgctacttcagaggctcgctcagctttcggtaacggcacagtcttcgtcgagcgtttccttgacaagcccaagcacatcgaggtgcagttattgggtgacaaccacggcaacgtcgtccacctcttcgagcgtgactgctctgtccaacgtcgtcatcagaaagttgttgaaatcgcgcccgcaaaggatctccctcaaaacgtccgggacagcatccttgcagacgctgttaagctggctaaatccgtcaactaccgcaacgccggtactgccgagttcttggtcgaccagcaaaaccgctactacttcatcgaaatcaacccccgtatccaagtcgagcacaccatcacagaggaaatcaccggcattgatatcgttgctgctcagatccagattgccgctggtgctactctcgagcagctcggcctgacccaggaccgtatctccacccgcggtttcgctatccagtgccgtatcaccaccgaggaccccgctaagggattctctccggacactggtaagattgaggtgtaccgttccgccggtggtaacggtgtccgtcttgacggtggtaacggtttcgctggtgccatcattactccccactatgattccatgctggtcaagtgcacttgccgtggttccacttatgagatagcgcgcaacaaggtcgtgcgtgccttggtcgagtt

SEQ ID NO: 21092 - DNA, 850 bp, Emericella nidulans
cttggaggagttggaatgctctgtattgttgcaggtacctggttcgtaaccgtaaccctaacttaatgcccaagaatgcgatggctaatagtataatgaaacaggcaaatgattctcagaatggtaccgaagtctggggaggtttttcacagaaaacttctgagcacggttttaaggtgacttgctctttgtaagtcacaagcaatgtgctaacagagacagtgcccctatgcaatacttttccgtgacagatagtggcacaatcttgaacagattcagccaagacttgcagctcatcgacatggaactcccagtggcagtgataaacacatttgccagtaagcttttttcagcagatctcattactcaagctaacatgctcatatagtcctcgttctttgcatcttctcaatgatttttatgggcatcgcctcgaaatacgccgcaatctccttccccatcgttctcttggtcatttacgccattcagaaaatataccttcgaacctcgagacaattacgattcctagaccttgaggcaaaagcaccactttattcgcactttacagactcactcggtggcttagccagtctacgagcatttgggtggcagcaggcactacaggaaaagcagtatcagcttcttgatcgctctcaacggccgttctatctcctctatgccatccaacgctggctcacactcacattagatctcgtggttgctgggattgccgtattactcgttatcctggtggtcacgctacggggacagataagtgccggctatgtcggagttgcattgctgaatgtcatcatgttcagccagagcatcaagctgctcgtgactttcc

SEQ ID NO: 21093 - DNA, 850 bp, Emericella nidulans
gaatcaggctgtgatggccacaccgcagatgggaagtcaatccttcaatcaccagcagcagcaattccttatgcaaaggcagcaactcctcgcacagcaaggacagcatttgaaccacagtcagctcactccgcaacagttcgctcagttacaggcaaatatgcttgcgcagaataacatccagaaccagcagcagcagcagatgatgcagcagcagcagcagcaacaacaacaacaacaacaacagcaacaacaaaatcaccagaatcaacaacagaagtttgccaatccccagacataccaggctcagatgatgcgcgcgcaactcatgcagatgcagctcgcccaacagcagcagcaacaaaggcaacagcaatcacaacagcagcaacaagcgcagccgcaaggccagcaacagccacagcatcaacaaggacaaatgcttcaaaacagccctcagctcaacgcccagcaacagcagatgttgatggcagcggcacaagctaacggcggccaactcccgcaaaacatgcagggcatgggtatgcagccgcgaatgagtactccagcgcggtacaaccagctctatcagcagcggcttttgagactacggcaagacatggctacgcgtctgatgccacagtacggaccacccacgcaatatccgccacaggttgcgcaggagtacagtgttggccttgaaaacgctgctaagggcttcgtgcaagacctcattcgcagggagcgtgtcgagtttgctgctgctcaacagcgacaagcccaggctgctgcccacgcccaggcagtgcagcaacagcagcacaacatgatgcagaatggaatgggcaag

SEQ ID NO: 21094 - DNA, 850 bp, Emericella nidulans
cgtcggtacgctcatggctcgttcatacacgtctcctggcgagactggaacttttctcggtgcgatctttggaacaggcacgaacggtgcctacgtcgaaaaactcaacaagattaccaagatggccaagattgagcactctgattacgacaagtcaaccggcgagatgatcatcaatgctgaatggggtagcttcgataaccatctgagcgttctgcccactacggaatacgatcggcagctggatgctgacagcaacaacccgggtattcaaatgttcgaaaagcgcgtctctggtatgttcttgggcgagattctgcgtctggtcttgctcgacttgcacaagtcccaaggtctctttaagccggcttcggggtcggatgtcttcatcccagagtcgtcttccctctaccgacaatggggtattgacactagtcttctgagtattgtcgaggcagataagagcaaggatttcgagcaggttaaatccgcgctgaaggaccacctgaaggttgagcgggcgagcgaaaatgactgcaaggcagtccaaaccgttgttcatgctatcggcaaacgtgcggcccgcctggctgctgttcctattgccgccaccctcatttccacgggcaagctgaaggaagagctggtggacatcggcgttgacggcagcctggttgagttctaccccaactttgagggctatatgcgtgaagccatgcgcgaagttcctgaggtcggtgatgcgggagacaaaaaggtgcggataggtatctcaaaggacggcagtggagttggcgcggctcttattgctctcgtcgcaagcaaagaggggacaaagcccccgctgtga

SEQ ID NO: 21095 - DNA, 850 bp, Emericella nidulans
tgattgcaagttttacgacctggccgatgctttgactcacattgccaccggcaatgaaaaacgaagctactgcagtgtcatttgcaaacagggtttcgtccctgttggtgttgacggtagcgttaaaggctggcaggaagacttcttggtccaaatcggcctgaaggatctcacagaagacaatttcaagcgcatgggcggcgtcgacggggtggtgagcctttttccatagctccggatactgaaagctgaccgttattttagaatggagattatcttagtgcgggcgaacttgttggcaaactgtgtgaaaaagcagcagcggatctgggattgcccgctggaatcgccattggcagtggcgtcattgatgcttatgccgggtggattggcactgttggcgccaaagtcgaactcgagtcggaacaattgacatcggacgccgcaaagaatgatattactcaggcgttttcccgtctggcggctgttgctggaacgtcaacctgccatttggccatgtcccctgagcctgtattcgtcccaggtgtttggggtccataccgcgacacaatcatacctggattctggatggccgagggcgggcagtctgccaccggagagctgctaaagcacgttattgagactcaccccgcctacaatcaggcgctttctgttgcggaatcttacaacaccaatatttatgaatacctcaatgaacatctgagagagatgatgactgagcaaaaggcgccgagcatctcgtatatggctcgtcatatcttcttctatggtgacttatggggaaatcgatctccaatcgctgaccctaatatggcgggttcgattattg

SEQ ID NO: 21096 - DNA, 850 bp, Emericella nidulans
agacaagacggagatactcctcgtccataaccctgaggaccctttaacaaatgcagcagcatcctctctcatctatcgttccttgaaagaaggaaatggcgttgattctacgcgcattttggcggacattacatcgtctacctcgtcagacgtagacgcacaagaggcgtccgaattttggttaaaattccaacccttggttgaggcactgggtctttcatctggtatgaacggtatcatcgtcaatggtcgagtcatcaagcccagccaggacgtaaccgcagaagatcttggtcaacttttactctacgaagacatcaaccgaattgggcctgtcacgaaggctgcgaaggatctgggactcggctctagaatacccgatccgctgtcatttgcgaaactcacttcactcatggccatttcaacagtgtctgatgttcctgagggtttatatgaaacatcttctgatgtgcgggttaagttcttcgaggagtggaatgaatccagttccgtaattactgttcccggccctgaagaccccgtgataaccatcagtgcgtctcttgacccaacgtcagaaatggcccaacgatggctaccaattctgaaggtcatatctgaccttgacggtgtcaggctgagactcttcatgaatccacgggatgagcttcgggagctccctatcaagcgcttctatcgctatgttctagacgcgcaaccttcattcagccaagacgggtctgtttcacggccgactgctaccttctccggagtgcctgttgaagcattgcttaccctcggtatggacgtcccaccgtactggctcgttgcaccgaaagaatccatacat

SEQ ID NO: 21097 - DNA, 850 bp, Emericella nidulans
ggtcggaaagcggccgctgggcccgatgaactagtcgagatgcgtttctacattcccggaactgcggtcaagacggagaatggtattaaaggggagaacgcggacgagaagaacggaggagaaggcgaggagaacggcgaggagcagaatgctgccaatctgttctacgagttgctcatggaaaaggcagagattggagatgtggctggagacacatttgctactttcctggatgttctccaccttacacccaggtatgttttatgcagcagctttgtctccgaatggtactaataatctgctcagaggtcggttcgacatcgatatgtacgaatcttccttccgattgcgcggaaagacatacgactacaagattcaatattcctccattaagaaattctttctactccccaaaaatgacgatacacacactctcattgtccttggtcttgagcctcccctccgtcaagggcagacccgctaccctttcctggtaatgcaactgaaattagatgaagagatcagcctcgagcttaacatgacagagttcgttgtcacggctatttttaaatggtactttactaatcacgcatagggaacttctcgaaactcgctacaaagacaaactggagccacgctacgaagagcccatccaccaagtcattacgaaaatattccgtgggttatcagggaagaaggtcatcatgccatcgaaagacttcgtcaggttagtgccccggttataccaactagtgcattgctgacaacttccaagccaccacggacacagcggtgtcaaatgttcaatcaaggccaacgaaggtctcgtgtcttcttagaaagagcctat

SEQ ID NO: 21098 - DNA, 745 bp, Emericella nidulans
atgaagctcctcacgaaggaagaagaaaatgcccactccccggaagtcgggcgccaccgcgatgcctcgcaattcaaccagcgacacctaaagaaaaccgtaactaactcttattcatagtgaggtgctcaagggtggctcttttggtacagtcctgggtctcatcggtggctatgcaggtgtcttggccgcatcccgccgctatcacactatccgcaacctcacacttcccatgaaagcatttctcgtcacatcttccggaaccttcggtgggattatcggagccgaccgctcctcccgcagcttctaagctgcgcaaaaccagaaccgacaatggtacgaaaaccgcgaggagcgactgcgcgcccaggaacttcgcggtatgagctttagcgatcgcgccctcgcctgggctagggaggaacgctacacaatcgttttctcgacatgggttgcttcgatgattggtagctttgcccttgtcgggcggaacccttatctttcgggccctcagaagctcgtccaggctcgtgtctatgcgcagggtgctacgcttgccgttcttatcgccagtgctgcattcgagatttccgagaggaggagggtcagacgggagcttgatgcgaagtctgcgagtgctaaggcggactctaagttgagtaacaacactggtgaagataccgagctatggaaggacatggtcgctgctgaggagcagcggttgaagaacaagcaccagtcgctc

SEQ ID NO: 21099 - DNA, 841 bp, Emericella nidulans
cgttcggatgatccccagtaccatgatgatcccgaattccagcggttgaccgagtccctatcgaaccagctattcacactcacttcaaacatcacccgcttgtcggatcagattgccctccttgggacaaagcgcgacactgaacgggtgcgagaaagagttcataatctccttgaacaaacccgtaccggattcagagacgttggcgaggggatcaagaaggttcagaactgggaagacgtcaatgtatgctcctaacagctgccacaactcatcattgcctgggcgctctatctaataaacttctatgagccctcgcaaaaatggacacagcagaaattgtcaacagagttcaaggccaccttggaggaattccagaccatccagcgacgggccttggagaagcaacgcgcttctgcagtcgcggcacgcaccgctgtggaggaggccgggcattcgacagaggatgacgctcagcagcagcagcagcagcagctcctcgaagtagaacagccacgcctagcgaatcaagacgaagttgatttccaggaagctctaatcatcgagcgtgaagcggagatccgcaacattgaacaaagtgttggtgaattgaacgagctgttccgggatgtcgcccacatcgttcatgagcagggagagcaactagacactattagcgggaacgtcgagaacgttcatgctaacactcaaggcgcgaatgttgagcttcgcagtgctagccggtaccagaagaacgctcggactaaggcttgctgtttactcataatccttgccgtcattttggctattattatccttgcggctgttcttggatagacac

SEQ ID NO: 21100 - DNA, 670 bp, Emericella nidulans
tcaaccatgaaagccatcgtcactgagaaaaccggcggccctgaggtccttgaagtccgaacccaccacccggtccccaccgcatcagaaggccagctgctcgtgaagaaccagattattggaatcaattatatcgacacctacttccgcactggcctctacccatcctccaagcctgaaatcctaggccgggaggccgtcggcgaagtcgtggccgtcggtcccggtgccaatccttacaacttccagattggcgatcgcgtggcttggctatccaccggctcgtacgcagagtacactgctgtcccgcaggcgttcgcagtcaaggttcctgaggggatatcgaatgaggatgtcatgggttcctttttgagcgggctgacagtgttgacgctcgcgaaggagacgtatcccgtccagagaggggattgggtgctgcttcatgctgctgcaggtggtgctggatttctcatgacgcaggttctgaagagcattggtgctattgtcattgggacggcaggaggaccggagaaggttgagcttgttaagagcttaggtgcggattatgtgattgattatcgtagtgaagagggcaaagattgggttaagaaggtcaaggagattacgaatggcaggggtgttgatgttgtctatgattcagttggcaagg

SEQ ID NO: 21101 - DNA, 455 bp, Emericella nidulans
cgttgtcgattatggttggcggtgatgaagcggtatttgaacgtgttaaaccgctgtttgaactgctcggtaaaaatatcaccctcgtgggcggtaacggcgatggtcaaacctgcaaagtggcaaatcagattatcgtggcgctcaatattgaagcggtttctgaagccctgctatttgcttcaaaagccgatgcggacccggtacgtgtcggccaggcgctgatgggcggctttgcttcctcacgtattctggaagttcatggcgagcgtatgattaaacgcacctttaatccgggcttcaaaatcgctctgcaccagaaagatctcaacctggcactgcaaagtgcgaaagcacttgcgctgaacctgccaaacactgcgacctgccaggagttatttaatacctgtgcggcaaacggtggcagccagttggatcactctgcgttagtgcag

SEQ ID NO: 21102 - DNA, 850 bp, Emericella nidulans
actggagctaaatatggcaaccaaaccatggtggacggcatcgtgaaggatggcttgacggacgtgggcaagcaggagctcatggggctacaagcggaagagtgtgcgcaggaccacggtttcaacaggcaacagcaggatgattacgccatccgatcttacgagaaagctcaagctgcccaggctgctggtctttttaacgatgagattgctcctattgatctacccggttttagaggcaagcctggtgttactgtaactcaggatgacgagccaaagaacgtaagacttcaagctgtcactctatacgtatacagctgctcacctactttaacagctcaaccatgataagcttcgcgctatgaagcccgcttttatccctggcaccgggacagtgacagctcccaactcgtctcctgttaacgacggagctgccgcagttgttttagtatccgaggccaagttgaaggagcttaacctgaagccggtcgcaaagattcttggctggggtgaggcggcacagcaacccagcaaatttacaactgccccagcactcgcaattccaagggcgctcaagcatgccggtgtctctcaggatgcagtcgatgcattcgagattaacgaagctttcagtgtagttgccctcgctaacttgaagctccttggactttctgaggacaaggtcaatattcacggaggagccgtggctatcggtcaccctcttggtgcgagcggtgcccgtatcctgacaactttactcggagtcctcaaggctcggaagggcaaggttggctgtgcaggtatttgcaacggtgggggtggtgccagtgctctggttgttgagtacatc

SEQ ID NO: 21103 - DNA, 565 bp, Emericella nidulans; identical to SEQ ID NO: 6117

SEQ ID NO: 21104 - DNA, 850 bp, Emericella nidulans
ggattgctggcagaatctacacaaagcgttcatctggtgcgaagctgattttttacgatatccgagctgagggtgtcaaggtgcaggtggtatgccaggctcagaacgcttcgggcgctgtttcgtttgaggaccagcacgagcacctccggagaggcgatatcgtcggtattgtcggtttccccggccgcagcaaccccaagaaccgaccggacggagagctgtccatttttgcgaccgaggtggttctgcttgctccctgccttcacgccattccttccgagcactacggcttccaagacaaggagcagcgctaccgccagcgttaccttgacttgatcatgaatgacaagtctcgcaacgttttcattacccgttccaagatggtcacgtacattcgcaacttcttcgaccagcgggactttgtcgaagtcgagactcctatgatgaacgccatcgccggtggtgcgacaggcaagcctttcatcacccaccacaacgaacacgacatgaacctcttcatgcgtgtcgcccccgagctgtacctcaagatgctcattgtcggaggccttgagcgtgtttacgagcttggccgtcagttcagaaacgagggtgttgaccttacccacaaccctgaattcacaacctgcgagttctactgggcttatgctgatgtttacgacgtcatgaacctaacggaggagcttgtgtctggcctggtcaagcacatcactggtggctacgagaccaccttccacacacagactggcgaggaatacaaggtcaactggaaggcccttggaggcgagtggagatgattccgctctagaggaagctactggcgagaagt

SEQ ID NO: 21105 - DNA, 850 bp, Emericella nidulans
tgcgcataatcccaccagcctggacccatatatcgagcaatggaagcagatatgggacatcatcaaagagcgtcgactattccccatcttcgatgccgcgtatctaggccttaactctggggattatgataaagatgcctgggcgatacggtatttcgttaacgagcaaaaagtagagtgtgcagtctgtctgagctttgcgaagaatataggactttacggtaccgatcctctttatccctcttctgactcgtgttgaaatctagaggccggctaacagagccaggcgagggcgttggacgcataattctacagccgaccccgttttcgcagtcagtgctcgaatcgctgcagcgttcagagatctcgaacctgcccgcattcagagcaaagatagcagaggcaattatgtctgatgacatgctcaaaaatgtctggcttgaggatctgaagactttgagtgggcgaattgcggagatgaggagggcgttctcgacgggctgaccggatacgctatgtgtctgatgtctactgagattttcaaatggcttttgcaagtacggtttgctgagtaggaaactgactgcgactgctgcagcatccgctaacagttgggactatctggttagacagtcggggatgtttggattcttggggctggagaggcaggttgttagaatactcaagggtgagtcgcgtctgccattcgttgacggttgttagactaataacataagacgaatatcacatctacatggccgagaactcgcgaatatcgagtgctgggttggattcagggatcgttgactatgtggcacggtcgatcggagaggttctactgagaatgtag

SEQ ID NO: 21106 - DNA, 850 bp, Emericella nidulans
cgctgcaaatttagatgaaggcagtcgcaagagttctcggcaaaagactacgctcggtggtcgcaaggttggcgaggcttcagaggctattgaagcatacaagagacagcgagagcaaaagggcaagcgtgacgaactgcgccgccgggatacggcgacaaaggaccacaagtcaaagtctcgagtatctgatgaggatgctgatggagagagtgaagttgaatgggatgatcgcgaacgttcacctactcctccaaaggatgacccgccggctgaacttcgagatattcagcgagctcgtgtaggcaggaccaactttgcacaagtgtgcttctatcctggattcgaagatactatggttgggtgctatgtccgtcttaacgtcggaccaaatcctaacggggtaaacgagtatcgccttgcaatgataacaggtgagtcataactaacaatatagtaggggtggcgaactaatggttctattagagatcaaagaaggaaagaaatacgctctggagggagccaacggccggacattcacgacagaccagtatgctgttctcgcccatggcaaaaccacacgcgcgtttcctttcgttgcttgctccgactccccgttcaccgaggtatgccgtagctgtactttgtacatggccttggctgacacatcaacaggcggaattcaaccgatggcgacaggtaatggcagttgaggattgcaaaatgcccacgaaatcccagcttgctaaaaaagttatggacatcaaccgtctgatcaaccatcagttcacccccgaagaactgaatgagaaattgcgtaagcaagggttgctagataccaagacaacat

SEQ ID NO: 21107 - DNA, 850 bp, Emericella nidulans
aggcatttatcacggcgacgtcttccagaatcttgtttcaatccaatctaaccgaggtcggtccctgtgcactttgcgagttgccgatacggcatcctcaatgccgcatggtgttgagcagccttacgttctacacccaacgacgttggattccattttccaggccgtatactgctctctgccaaccagtgcgcttaggagcaacgcagccatggtgccccgagcattcaagcgcatggatttgaggacggtgatgtccagcacacctggtcatgttttccaatctcaatgcatgctgcatcgggccagtccccagggaatggaatcctctgtggtggtttctgacaccactagcgaagatcccgtcctcacggtggacggcctatactaccagtcacttggggctgcgccacaggctgatggtgagaagaacgatatacaacacaattacacgttgcaatgggcaccggatatctccttccccatccctagcactgtgaaggcagcgcttcaattcgctgccaatctggatgagattgatatcattcatgacatccgagaagcgtgtttctactttatacggcgtgcattggccactctcaccgaagatagggtcctgaaactgaattggcaccagcaacggctccgcgcatggatgaaggtgcaaatcaaattggcccagttgaatgaactggggcccgcaagctctgaatggttcatccaaccgctagcccatcagcaaaatctcattaatcgagttcgagtcgccagtgtcgacggcgagatggtctgtcggattggggagaatcttcctttaattctaagcagcgaggtagccccatgcagctga

SEQ ID NO: 21108 - DNA, 514 bp, Emericella nidulans
gctggcactagaaactatgactttctggtaagtgttgctagatgagttattacaacgtcacccgcgctgagactaatttgccacagatcaaattgctgttgataggagactctggtgttggaaagtcgtgctgccttctgcgcttcagtgaggattcgttcacaccatcgtttatcacgacgattggtatcgacttcaagattcggactattgaattagatggtaaacgggtaaagcttcagatatgggacacagctgggcaggagcgatttagaacaatcaccacggcttattacaggggtgcgatgggtattcttcttgtttacgatgtcaccgacgagcgttcattccagagtaaaataaccccatcttacgttctcccatacaccggtcgctaacccaagtcacatcacagacatcagaacatggttctcgaacgtcgaacaacatgctagcgagggtgtcacaagaccttattgggacaaatggactgggagagagagactgtacacgg

SEQ ID NO: 21109 - DNA, 850 bp, Emericella nidulans
cgaggcttgcctgtacacggcaaaagcctgcttttcgaacctcagctcttatggcgtcaagaaaattcttcctactctccttgaaggtctcgacgatacccaatggcgtacgagaagggggcatgtgatttgctaggagccatggcctaccttgacccgcagcaactcgccgtcagtctgcctgagataatacctccactgactgtcgtgttgaacgacacccataaagaggtgcgcaatgctgcgaaccgcagtcttcaacgattcggagaagttatcagcaatcctgaaataaaatcgttggttaatgtattgctgaaggccctgagcgatcccaccaaattcacagatgaagccctcgatgcccttatcaaagtctccttcgtccattatctggacgcaccatctctggctcttgttgttcgcatccttgagcgtggtcttggcgacagatcagcgactaagcggaagtctgcccaaattattggcagtctggctcaccttacggagcgcaaggaccttatcactcacctgcctatcatcgtttctgggctcaatttggccatcgttgatcctgtgcctacaactcgtgctactgcatccaaggcccttggttccttaattgagaaactcggagaagatgcgctgccggatctcatccccaaccttatgtctacgctcaagtcagacacaggagccggcgaccgtttgggatccgctcaggctctttcggaggttctggcgggtcttggcacaacaagactcgaggagaccttgccaacaattctacagaatgtcagcagctccaaggccactatccgcgaaggttttatgaccctctttatctact

SEQ ID NO: 21110 - DNA, 850 bp, Emericella nidulans
attcaaggaaggcttgaagaaagaaaaagtccaaaagcgtattgcaactttggagcagaaattccagggcgtgaagcttatggtaggcgttgaccggctggattatatcaagggcgttcctcaaaagctccatgcccttgaagtattcctgagtgaccatcctgaatgggtgggcaaggtggttcttgtccaggtcgccgttcccagtcgtcaagatgtagaagaataccagaatttgagggctgttgtgaacgaattggtgggcaggataaacgggaaatttggttagtcgtcctcactatatgcagcgagttcattctgactgtaatcaggaactgtcgaatttatgccgatccattttctccacaaatcggtgaatttcgatgaactcattgctctctacgccgtgtccgatgcatgcgtcgtttcttccacccgagatggaatgaacctcgtttcgtacgagtacatcgctacccaggagaagcgccacgggtcgttagtcctgtctgaatttgctggtgccgcccagagtctcaacggaagcataatcgttaacccttggaatactgaggagcttgcagcggcttaccatgaagccgtgacgatgagtgatgaacagcgagcgcttaacttctcgaaactggataaatatgtcaacaagtacacaaggttagtttctcctttcactggtcctaaacagaatcatcttgctaattctaactagtgccttttggggtcaatcctttgttaccgaattgacaagaatttcggagcaagccgcagggaaacttcccaccaaagagactcctgtgaacggagagacgtcaaagctagagattcgtcacag

SEQ ID NO: 21111 - DNA, 345 bp, Emericella nidulans
ctcctccataaacagcgcgaactgttcaatgcaccgtctctggcggctcttggtccgacggaggtggtgcctggtcccgcagtacagactgatgaggacataattaaattaatgagggagatcttgcagccttcgaatgggcatcaatgctgctcagcgcccatgatgccgcgagaactcggtggtgtactctcgcctgagatgaaagtgtacggtactactggattacgtgtcattgatatcagtcactggccgaaggaactctctggtccgcccatggcatctatttatgcagctggagagaaggttcgttttatgtctaaatcctcgtccagtttcctgcta

SEQ ID NO: 21112 - DNA, 850 bp, Emericella nidulans
acggggatccttcaggagaacggcaaagtcaagggggtgaggacgagcagtggggaggacttgtacgccgacaatgtcgtttcgtgcgcgggcttctggggcgtcgagattgggaggatggctggggttgggatccccctgctgccgctggcacatcagtacgcaaagactagtcctatcggtgaactgagcaaccgtgatgcgaacagccggatgaacgggctcaatgcgactctgcctatcctgagacaccaagaccaggacctgtattaccgcgagcacggcgaccgagttgggatcggctactacggacacaagcccatgcctgtcgacgcgagggctctcggtgcgacacccaagcatgttgacgaaaaaaatatgccatcgagactcgagttcacaagtgaggactttgcgccagcatgggaggagacaaagaagcttctccctgcgctgcgaaacgcacaggttgacgacgggttcaatggggtcttttcctttacgccagacggtgggcccctagtcggccaggcgcccaatctcgacggcttctttgtggcggaggccgtctgggtaacgcactcggccggtgtggcgagggctatggcagagattctcacgaaagggtggttgagcattcatgtttcggagtgtgagcgatcacggtttgagcgtgttcagctgaccaggtcgtatgtcgaggaggcatcgcagcactgctttgtcgagatctaggatatcatccatcccctgcagcagagggcacgtcgcccaggaatctgcgagttagtccattaaaagcgcagcagatgcagctcggcgctgtcttcatggagctaggaccctggga

SEQ ID NO: 21113 - DNA, 850 bp, Emericella nidulans
tttaacgcaggcgtcatggactacgcaaagtccatgccagcccagcgacgattcgtccacaacacctccgcgagcacttcccaagtcccgtctgcaacatcgacgcccactcctggtggtagcaacgaacagaagaagaagcgccacgatgtggacatcgtatactctcagcctgcgaatactggaaccgggaaggatatcatgacgcaggtcgtcttcgctattgaacatatgaagagcaaaggtgtaccgcttacgttcaacgatatcgtctcctacctctcattgcagcaccgggcaaatgaccaaggctatgttcaggcgttgcgcagtatcctgcaaatgcacgaaaaggttcaatacgattcctagtggggctaatggagagggtacattcagctttcgtccgccgcataacatccgcactgctgagcagctgctccaaaaactgcagtcacaatctactggggtaggaatgagcgttcgggaactccgggaaggttggcccaatgtcgaggatacgattaacaaattggagaaggagggtaagctgctcgttacgcgaaacaagaaggacgatcatgcgaagatggtctgggccaacgatccttctctgatccagcacttcgacgacgagtttaagcagatctgggagaagatcaaaatacctgagcagcaggtcgtcaaggaggagctagagaaagctggtatcactccaaccaacaaaaacaaggtcatcaagccgcggccaaaggttgaacataaaaaagtgaaaaagcctcgtcgcagcggaaagactaccaatacacatatgatgggagttctgcgtgattactcgcatctcaagcgg

SEQ ID NO: 21114 - DNA, 850 bp, Emericella nidulans
tcagaacttctttggcaagggaaatcgagtggacgttatagggaatcatacgttcgtctctgtagatactgtttcgttgagtgcgatggaccaaccagatccccgtactggaagtacgggtggtggaaacggagatggcgaccggccaaaccaggagatctggcaagagccggaagattttctgaatgccatgaaggtacaccgcggtcgcgccgaggcggacgaactgcgtttcatgggggaaccaagaaagggtcggctgttcaagcatgaagtttccgaagtctcaaagccttcgatataccgagaagatgacccagagattatcggatttccggctatccttctgtcgcacgtgccgttgtaccgcaagccagccacgccttgtggaccactcagagagcgatatcctccctccgcagatggcttagaagaggacgagcaaaacgcgcttaagatcagtggcggatatcagtatcagaatgtcttgactaagacaatctctaacgacatagtgtccaagattgggcccaacctagtccaggtatactctggcgatgaccatgattactgcgagatctcccaccgcgagttcagcggttcgccgaaagagatcactgttaagagtatatcgtgggcaatgggggtccggaaaccaggctttgtcctgacaagtctctggaatcctatcgaccctaccaccgggacctccatcgagtcttccagccctggaagcaccatccaaaaccacctctgcctcctccccgaccaactttccatcttcatctactacggcgtcatcctagcattcacccttaccgttcttctcgtgcgagccgtcatcctcgct

SEQ ID NO: 21115 - DNA, 304 bp, Emericella nidulans
  unsure (1)..(304): unsure at all n locations
cacttgtgtagcataccgcgtatgaaagcggagtggtgtgtctgcntgcatggagtatagcaaggtgtacaatcctttgttcaatgcggtctacaagcagtgtagttttagtgccattcccttgatcggtcagttagtggcagaagaccgtgagagctaccagtatcttgtgtagagtatcgagaaattccccagccaggaggaattcagagggatgatccagaaagctgggttcatgatccctgcacgaggattttagatcctcactggcggtattgctgctattcacaagggcatcaatccg

SEQ ID NO: 21116 - DNA, 500 bp, Emericella nidulans
caatggcagaccgcctatgccagtaaggatgatgcatctaccatgagtaagggcgccgcccgtcgagaagggagtaccggcacacctggcgcaactactgtatatacctcgtccggtactacgccgacctctacaacccccgccgcaggagtcgagtcacaaaagaccgtcgtccgctctggcggtggccagacctggaccgacccgaccctgctcgagtgggatccggcccatttccgtctttttgtcggtaaccttgcgggcgaggtcaccgatgattctttgtttaaggcattctcgaaatacacatccgttcagaaagcgcgcgttatccgcgacaaacgcacgcagaagagcaaaggttacgggttcgttagtttcagcgacggcgatgactacttcaaagctgcaagagaaatgcagggcaagtatattggatcgcatcctgtcctcctccgacgcgcaactaccgaggtccggcccgtttccaatacaaagaa

SEQ ID NO: 21117 - DNA, 333 bp, Emericella nidulans
tatgtatatacacatacgatttaggtgacactatagaatactaggatcagagctcgcgagacgctgcgcgtgttcctgaatcggcagacgcatgagaaggaccagggagttatcctggagatgtgctaccaccctcttccctggacggatattgcgcagatcgcccaggatgcgcggtggaaggttatccttggctcggaggcgctcatctggcagggtctcgagcaggcgaggctctggaccgggaaagatgtagttagtgagccggggttagtggagaaggtgcaggcgtttgttgcgcagacgattgctgagcggtcgaagtcaaatttg

SEQ ID NO: 21118 - DNA, 446 bp, Emericella nidulans
ttgcccacaggcacctggctctcatggcagcaatgaaacttgcgtttactcccaagaatacttgtctgcccacagcttcaccaaccgcatgctggccaatggtggttctgctaagctcttggatcaggttagtttttttattctatcatttgggttttggtttgtctgaattaggttctaactttttattgcaggctaagaaggtcaaggctcaatgcgagcgtaaccctcaggatagtattgagattgaattcgaccagtttgcggagttcgacatttgcgcggcgtcccatacgcctatctatagcggatcccccagcgtctcagatccgttcaccggtgccaaatatcatgaacaatataagggtagcgtcgatcggatatctgaagtgactgaaattggcgcgccggcgagtggactgcggttgtatgtccctagccaactc

SEQ ID NO: 21119 - DNA, 850 bp, Emericella nidulans
gtcggacggatcgccggctcgtcgtttgattattctccgaaatgggtcagaaaaagcgttgccaggagtctgcgtcgtcttcacactgagtacctggacgtagtatactgccatgatgttgaatctgcctctccgagagaggctctggcggcatgtcgcgagtagcgccggattcgtgatgcagagggtacgattcgctacgtgggtatctccgggtacccagttgatgtgctgtgtgacctgaccgaattggtgttgcgcgagaccggcgacccgcttgatgtagtcatgtcttacgccaactttaccctgcaaaacacacgacttctgacgcagggtctaccccgtcttgtcgcagctggtgtggacgttgtcccgaacgcatcccctctcggcatgggtctattgcgaagaaagggcgtgccaattggcagtatgggcgatttccacccagcaccaaatggccttcggacagccatccgcaacgccgcagagtgggcagatacccaaggcgaaaagattgaagttattgcaatccgcttcgcgctcgagtcttggctgcgcgacggtgcaaaggcaggcgctctcggtccccctctcgcgcgcagccctgactcagacccgagcttcctctccgctgcaaacatgggcacaggcgaacgtttgggcgtgagtgtcatgggcgtcagtaacattgaggaattaaccgagactcttcgtgtttggcatagtattgtcgacggcctcgagaacaaagacgacgacgctgaggatcttgaactggtggcaaatgcatccactgtcccctctgcacccagcgcaccagccatcctcacaccctccgatggta

SEQ ID NO: 21120 - DNA, 850 bp, Emericella nidulans
ggcagacgctctggttgcagagttgaaacgatcaccaaaagttgaagtcctcacgcatgcaaatgtcacaagcattctccaagatcatgagagctccaacctcactgtatgttgatttcaaagttcgagtatctcgaagcgagcatttatgcggaaaaactgacctgtctatctaacaggtaaaagtagaagatggtcagagtcgtgttcacaaccgtctcattgctaccaacccgccttgcgacctcgcaagacaacttcagtgttcactggagcccgagaagcagcccacaggaacaataaatgccctacagagacacaactacgcaacaactactatggttgtgaatttgtattactcaaatcctgatctgatccctgtcgaggtttcggctacctgattcccaggtcgataccttttgcgcagaatcctgagcgagcactgggtgtgatatttgcttcagaatctagtgtaggtcaagacacagccaccggcacaaagctcacagtcatgatggggggccattattgggacgggtggaaagaatcagactatccggaccacgatactgcggtctcgatgtctcaagccttactgaaaaggcatctgggcatcctggattctcccaaagtagcccacacccgattgcagcgcgatgctattcctcagcccaccgttgggcatcttgaacgtatgcaagacatttcaacgtctattaagtctgagctcaaaaaccgtgtcactctggctggggcgtggtattcaatgcatggtaccggcgtggtggacagcattcgtcaggcttatctagctgcgaaatatggccctgagctggaatactcaggagca

SEQ ID NO: 21121 - DNA, 850 bp, Emericella nidulans
agcctacgctagcaactccaccttctctggaatggccccttacgtgacctatatgacagcctcagacatcctgcgtactgaagcagggactgtcgcggccgaaatcgctgcacagctcaaaacttgggctgatcaagttgcagaggcaagcgacaacgcgctctccacctccgcacttgaacacctctcgaatccagcacgatcttatctttgcccaagacgtgccctgcgtcgagatcttaactacagcgctaggaacaaacgtcggcttcgcgttcttcactcttctccctttctcgaagggtagggttcatatttctttcgctgaccctactgcatatccagctatcaacccaaattatttaatggcacagtgggaccttattctacagcggaagattgcgcagaccgttgccagattctggaagactgctcctgtgagctcggttgctggggagagtgtacagccgcctggcactgacttacccatcgacactacggaagatgagtgggatgcgtggatttcaaggtcgtgtaagtctatcctgtcttgttctgtttcacggtctgctccgattctcatatctgatagtcagcgcaaaccaccactttctcggtacggcggcaatgctccctgagggagctgggtggcgtagtcgataacaaccttatcgtctacgggacggagaatgtaagggtaattgatgcttcaatactttcggcacaggtcaggggtcatctggcaagcactctgtgtgctattgcagagcgggcggcgggtattatcaagaacaagctaggtaaacagtaatgagacatttataccacattaacaagatatcttcaatgt

SEQ ID NO: 21122 - DNA, 850 bp, Emericella nidulans
ccatggccgcgagtgaaaggtaaaaagcgctatgctgtagtgaataactttagtgcagctggtggaaataccaccgtttgcctcgaagagccaccgctcagggagacagactatgttgacccgcggacagctcatgttgtcaatgtctcggcaaagagcaaaatctctttcaagaaaaaccttgagcgccttgtcgcctatctcgacgcaaatccggatacctccttggctagcctgtcttacacaacgactgcccgacgttaccaccacaaccaccgagcttcagttgctgctactgatatagctcaagtgaagaagaagcttctgtcttacatagataaagttgaagcgcacaagcccattcccgccaccgggccgccccaggttgccttcgcctttacaggtcaaggtgcatcgtacaagtcaatgaacttagagttgttccatcactctccatactttcgatctcaacttcttcatctagacgctttggcacaagggcaaggttttcctagctttattccggcagtggatggcagccacgagaaagactacgctcactcgccggttgtcacgcagctagcacttgtgtcagtggagattgctcttgccaagtattggatttcacttggggtcaagcccaacgctgttgtcggtcatagtcttggcgaatatgcggctttccatgtggcgggcgtgctttccgctagcgatgctcttttcttggttggccgtcgtgcgcagctcctggaggaaaagtgtcagatcggcagccacaaaatgctggcggtgcgtgctcctttggctgatatcgagaaagccttagagggcacgaactatgaagttgcat

SEQ ID NO: 21123 - DNA, 678 bp, Emericella nidulans
tcgtccgaagtgtccccggtgcagcggtcatttcccaatgcccctgacggctacacccctgcgaacgtgagttgcccgtccaaccgtccagaaatccggcttgcgacgggactttcgccgaacgagacttcatggctcgagcggcgccgcaatgtcacgcggtcggctctgagtgacttctttggtcatgtcagcgttggaaattttgacgcggtcggttaccttgatcggatcggtagcaactcctcgaatctgcccaacattggaatcgcagtctctggcggaggatggcgtgctttgatgaacggtgctggagcccttaaggcgttcgatagccggacggacaactcaaccagcgaaggtcaactcggtggcttgctgcaatccgcgacgtacttgtctggccttagcggcggtggctggcttgttggctccatctatatcaataatttcaccaccatttcgtcgctgcagtcgaacgatgatgtgtggcaattccagaattccatcctcgaaggccctgacaagggcggtattcagattcttgacaccgcgggctactacagagatctgtacgatgcggttaacggtaagagagacgctgggtacgatacatcgctcacggattattggtatgaactatttccttggctctctgctcgtgttttttatgctgat

SEQ ID NO: 21124 - DNA, 778 bp, Emericella nidulans
gcacatagccaattctcttactgaacttgcgcagcgcaaggaggaggcgcgtagtggtgggaaggaagttcctctgctggagagcattgtctgcgggcgcaaccggttggaaaatggcagtatggcggcttgggcgcacgcatacaaagctcatgcggctggtattcggtcggtgaagatgacacagaacggaattcgtcaagaaggtatctctcacctgctgaaggagggtctttctcacgctagtgctctcgaggttctcgacctgcaggataataccttcactatcaccggatcaaccgctcttgctggtgtggtcagtggatggccatcccttcgcgaactcggtgtcggtgactgcttgctttctgctcgcggaggtataaagcttgctcaagcccttgcgaaggccaaaaaccaaaaggttgaaattcttcgcctgcagtacaacgatatttcagcagagggtgtcaagcagttcttgcatgctgccaagacagctcttccggccctgcgtcgcattgagctgaacggaaacaaattccaggaggaggacgtaaatgtgaccgagcttagcgaattattggagtctcgcaaagaagcacacggcaaggatgatgaccccgaggatatgtggggcattgacgaacttgacgaactagagagtgaagatgaagaggaagaagaggaagaggaggaagaggaggaagaggaacaaaaggccgaaaaggttgtcaaagatgccgaaattgcggagaacgagaaggttgctcaggca

SEQ ID NO: 21125 - DNA, 548 bp, Emericella nidulans
ggggcaaccatcagttgctaagcatcattaatgtacttcttgtgcgcattcgcggagctatcttgctttgccgatcgtcacttctactcggactggtggaactcttgcgactggtaagtcggccaataatccatttcagtacgctgtattcaccaaaggttcaatgcaggctcgaattctcccgcgagtggaatgtccccgttcatcacttcctccgccgtcacgtctacttttcctctctatcacacttctccaagcccgtcgccatgttcatcaccttccttgtcagctcgatcttccacgagctcgtgatgagttgcattacaaagaagctgcgcggatacggcttcctcgccatgatgctccagctgccgattatcgccatccagaagtcgaagtacttccgccacaaaacaactctcaacgtaagccttgcttcttgtgttcctcaaagaaccatctaaccacgctgttttttatagaatgtttttttctggctttcgatgattttcggtctttccttggtaaggcaattccccctatcactg

SEQ ID NO: 21126 - DNA, 828 bp, Emericella nidulans
ttctagcaactggcgcgtctactggaccgccccttcttcccatggaagaacgtactcgtcggcttttctttaggccagttcattcttgaggggattctctcgttccgtcagtataaggttctccagcgaaccaaggcccctaaggtgcttgaaggcgaagtgtctcaaaaggtttatgatcagagccaagtaagtacctaatcaggtctcccatcgaatagcaacggctcggctgactatcattgtcacgattctcaggcgtacggtcgcgcaaaggcaaaatttggtttcatctctgggttatatggtcaaattcagaatctcgcattcatctacggcgatgtcctccccaagctatggggactcagcggctttttgttggcgcaatacctcccagctcggttccagggcgaaataccccagactctcctgtttctttttggatttaaccttataagtactgttctctccctcccgatctcctactacaacacattcgtgcttgaggagaaatttggctttaacaagcagacggttaagctatgggtatccgacatgcttaagggccagatgttgggtattgttctgggcgcgcccatcattagcgccgttctgaagattgtccagaagactgggacttcatgcttttactacctttggctttttggtgtctttgttcaggttttcgccatcaccatctaccctatcgccattttgcctttgtttaacaagctttccctcttgaacctggtgcgatcaagactggcgttgagaacttgccaagaagctcaacttcccgctccaggaactccatgtgatcgatggtag

SEQ ID NO: 21127 - DNA, 850 bp, Emericella nidulans
ggggggtgattctgggactgtcggtgccgctggtggatttatccagggcggaggggtcccagcctttatggggtatacgtggggactggcggtcgataatgtgcttgagttcgaggtcgtggtcgccacggtacgcgcctgcttccagggcatctctatctccttcaactatctcgaggctacggtatactaacatggagtcaatagggccagctcgtcatcgcaaacgcagatgaaaacgcagatctcttctgggctttgcgtggtggtggcggcggcagctttgggatcgtggtacgcgtgacgatgaggacatatcccgatcttcccactctcaaaggagagctcactgtctctggaaaccgtcatgacccatcattctggaccgaggatatcgcagggctgctcaacgcactccgggctttcaatcatctcgatgcaccgggtgttttccgtctcatccaaacctctgctaagggttccattagtgcggtactggaagtttatctacttaacagaacactggcggaagacctcaccaggatgatggggcctatcctaggaacgtcgcgacgaaagtacaacatctcccccatcactgtaggcaagataagctcgttcgccaacccgaacgaacccacaatcacagagttctttggctcgaccattctctcccggaacttcttcgagtctcccaacggtccgctggtaatggcaaagcgcatggcagccattaacttggacccaggcgacggggctgttgaccagcaatctcgggggaacggatcaacaatgaaaaccagtgatttaccactccacccttgggggaggtcttccgcacacctggtac

SEQ ID NO: 21128 - DNA, 500 bp, Emericella nidulans
aattgaaaaacgaaaaggcaaactcatttccaatgggccagtacggcaacaaacatggttgaagtctttgaagcatggttcctcatgtcatgggggaacggcccgtcaaaagctctatctttacggtttatgtgggctatgcgtaatgctactggtaatggaatttcacggccttgttccaaagtctcaccggacacagtcttcgctcgccaccgggtcaatgatgcttatatgggcactgttctaccagttaacagttggaaccgtggcatactctctcgtcgcagaaatctcgacacgccgtatgcagatcaagaccgtcgttctcggccgtatcctatacaacattgttgccatcatatgcggtgttctcacgccgtacatggtgaacccgacggcttgggactggggcaactttgctggtctaataaagggagggatttgctttctttgcatcatctatacctattttcgcgttcctgaacaacgagggcgcagat

SEQ ID NO: 21129 - DNA, 703 bp, Emericella nidulans
gccaagacatatcgtattgctactattcctgccgacggaatcggtccggaggtgattgacgctggtgttattgtcctcaaggccctggcagacaaactccaatcattctccctcgacttcacacaccttgactggagctccgagaccttcaaggcgaccggcaagtatattcccgacggcggactggaagtgctgaaaaagaacgatgctattttatttggagctgttggtgcgccaggtaaacaaaccccgcaatacacgttattcactataggaaagaaatgaagtacagtactaacaagtggatgtagacgtccccgatcatatctccctctggggtctccgactcgccatctgccagccctttcaacaatacgccaacgttcggcccacccgcgtcctccgcggtacacagtctccgctgcgcaagtgcaacaccggagaccttgactgggtgattgtgcgtgagaatagtgagggcgagtacgctggccaaggtggtcgctcacaccgcggacacccgtgggaggttgcgacagaggtggccattttctcgcgccagggtgtagagcgcatcatgccgttcgcgtttgagactgcggccaagaggccaaggaagctgttgaccgttgtgacgaagagcaatgcccagcggaacggcatggtgctgtgggatgaggttgcgaacattgttgccaaggac

SEQ ID NO: 21130 - DNA, 462 bp, Emericella nidulans
accgacgagacaggccttggacatggcgattgagatcgtcaagccaggtgtgccgattcgagagtttggcaggattatcgaaaagcacgcagcctcaaggggccttgccgtcatcaagacatggggcggtcacggtatcaactcggaattccatcctcctccttggataccgcactatgcaaagaacaaggctgcgggaacatgtaaacctgggatgaccttcacaattgagcctattctcaccctgggtgccaaccgagagaagtactggccggatgattggacgaatgtcacgatggatggcaagcggacagcacaggtcggtgagtacacctttccagcaggctgatccaggcttctatactaacatgaatatcgacagagcatactctgcttgtcacagaaacaggcgtcgaagtcttgacggccagacaggagaactctccgggaggcccaatcccc

SEQ ID NO: 21131 - DNA, 532 bp, Emericella nidulans
atcctcaagaacttccttgccacgctcgccgagaacaaccgtcttggtttgctgaacgatgtcgttgacaagttcgctgctctcatgagcgctcaccgtggtgagattgagctttctatcaccagtgctcaggtatgcttcttgaccctttcatggatttcatggatttcacccggtgatatcatcacctcagatggtcgttgaatgcagatactaatcaggtgccatcaggaactcgatgccaagaccctcaaccgccttgaaaaggccgtctccaagtccgagttcagccagggtaagaagctcaaggttgtttctaaggtgcgttctggttcttttccctctgtatcatcaagttggcaaactaattcacaaacaggtcaaccccgacatcgtcggcgggctcattgtcgaaatcggtgaccgcaccatcgacctgagcgtctcctctaagatcgccaagctcaacaaggctctcactgatgctctgtaaattaaccgtcccgcgtctcttttgttgtcctatatctat

SEQ ID NO: 21132 - DNA, 500 bp, Emericella nidulans
ttgactgaatcgaacagcataacatcaccacaatgtccgcccagaatgaaccgcaagccgaagcacaatcaccatcctcgggagaggaggggtcctctcccttaggctcatccctctaccaaaccggcttgcaaacccgccaatccgtcctcggcagcgcgcacgttaaccgctcattgtccaacagcaacgcattcacattcccaatgcaagaagccatcaccgagtttgcctggggctcgatctggaaccggcccgggcttgaccgtaagcagcggagtctaatgaatattggaattctgatcgcgctgaaccgccagctggaattgggagtgcatgtgcgcggggctgtgagaaatgggctgtctgagctggagatccgagaggcggttatgcatacgcttgtttattgtggggcgccggcggcgatggaaggaatgaggactgttgataaggtgctcgaggagctagaaagggagggggagatcaaaagggagttg

SEQ ID NO: 21133 - DNA, 850 bp, Emericella nidulans
ctgtgcggaagcaatcgcccgacatagccctccaacacttcagaaagtacgcaagtcgacaacttatgtcttcacgataaaggttgtggaagcagaggatctcaaggcttgcgacatgaacggaggcagtgacccgtacgtcgttttgaacgatgagtttcagaagcggattgggaagacgcgcatcatctacaacaacctcaaccccaggtgggatgatacagtggaaattaccacccatggtcctttgaatgtcattgccacaatctgggactgggatgcagtaggcgatcatgattatgtcggccgtacgtcgatcaaacttgaccctgtccacttcagtgatttcctaccgagagagtactggttggacttggatacacaaggcagactcttacttagggtgagcatggagggagagcgtgacgatattcagttctattttggtaaagcattccgaactttaaagcgaacggaaagagatatgacgcggaagatcaccgagaaggtaagccgctatcttgaccaattgctgaaattactgacaatcatctagctcacctcatatatcaaccattgcctgtctcggcggactctgaagtcattactatcgcgaggaataggctctactgtgtctaacttcctgaaccgcagccgcgctcaacaatctacttctgcaccgtcaagcgcagatgttgagaacgcattaacacctctgttcgattacttcaacgacaactttgcaatcatggctgaaacccttactcccgaggccatgaaaatggtcatggctcgcctatggaaagaggtccttgctactatcgagagcttgcttgtgcctcccctttca

SEQ ID NO: 21134 - DNA, 850 bp, Emericella nidulans
tcgtgtccacatacaccgtgtgattcatttggagtgctcactcagcgcgctggatatcctgagtggcgtattggcactaccggcggtggcctactttacattcgtctcgaaaccatggtggttaaccaacttccttggattctcattctgctatggtactctgcagttgatgtcgccatccactttcgtcactggctcacttattcttggttcgctgttcttttacgatatttactttgtttactttactcctttgatggtgactgttgcaaagaaactagacgtcccgatcaaactcttatttcctcgcccgccggcccctagcgaggctcctggtacagtctccctggctatgttggggcttggtgacattatcatccccggaatgatggttggtcttgctcttcgatttgacctgtacctatactacaagacaaagggcatgattaaggcacgatcagaaaataaagggctgggattcgtcaagccactctatcaaccagcgacaggaggatggggtgagcgtttctgggcaccatccgctcgacctaacgaaccggagctagtgcccccatatcgtgacgctcgctcattccccaagacatatttcacagccagcattgttggctacacaatcggcatggttacgacccttgctgtcatgcaaattttcgaccacccacagcctgccctcttataccttgttcctggggttctaatatcactatgggaacttgccttggctaaatgtcaagttcacgagatgtgggatttctccgatgccgaaggtgatgaagatcaaaacagggttgacggcgaaaacgatgagaaagaccgcacaccttcgtca

SEQ ID NO: 21135 - DNA, 850 bp, Emericella nidulans
tacatgttggtctatgtccgcaaatccagggtggatgatgttcttgttcccataacaaaagacgatgtgccatcccacattggtatgcacaagctcctgtgtctttagtatttgctgttaatgtgcctatagaaaaacgccttgtggaggagcgtgccgagatcgcccgtcggagaaaggagaaagaggaggcgcacttgtacacgacggttggggtgctgtctgaggagaccttcaggtgccatcatggttttgacctgactagctacgatccaccggttgtggaggaggcacttccaaaacagtaccggattttgaagactacgactgttggcgaatttgccgaaaagatcgcggaagagaaagggctcaacccgctccaacttcgattctgggtcatggtcaatcgccagaataagacaatgcggccggatcaggtcatccaggatcccgaaatgaccatggatgaggcgtacagcagatatgccaccaagggacacgtgttccgagtatggctagaggtcgcacaaccatctcccgatggaaccgtttcatggccggatagctcaacctcggtgcttattttcttgaagaactttgacgtaccaacccaaaccctgacaggagtcggtgcaacatacgtgcgcaagagtcagaaggttggggagctcgggtcgacaatactcgatctgatgaactggccggcccggaccgagtttgtcctttatgaggagattaaacacaccatgatcgatctcatgaagccccagcaaacgtttcagcagtcagagatccaagatggggacattatcacatccaaaaggtgttcaggagtcagaatgcccgagac

SEQ ID NO: 21136 - DNA, 663 bp, Emericella nidulans
atgcatattctcatcacgggtgctgcgggcttcattggccaattgcttgcgagagaactgctcaatgacccttcatatactctcgtcctgaccgatatcaatgaaccaccgatcccagccggcgtcaagtatcctcagaatgcgcgcactgtcacggcggacctcgtcaaggcggcggatacggtggtggacaaatccctagacgccgtctatgcgttccatggcatcatgtcatctgggtccgaagccaattttgatctgggcatgactgtcaatgtcgacgctactcgcaagctcctcgaggcccttcgtgcaacctgtcccggggtcagggtgatctactcttccagtcaggccgtatacggtcaaccgctgcctgaagtggtggacgatactgtcattccgactccccagtcatcgtacggtgcggagaagctcatctgcgagaccctagttaatgaatacacacgacgggggttcattaccggctttaccctccgtttccctacaatctcagtccgccccggccgtcctaccgccgctgcctcctctttcctctccggtatgatccgagagccgttgaatggtgaagagtgcgtcattcccctcgaagatcggtccttcaagtcgtggctctgctcgcccaagacgctcgtccataac

SEQ ID NO: 21137 - DNA, 850 bp, Emericella nidulans
aagccctgcaacagagggttccgaaaccctttccaatgatgttgaaggtgacattgaggaggatcttggaccgcagcctgcacatccagcacggactagctcctcgcgtctattgtcgggacaatctgcatcgccacgacagtctcagaacatggcaataaacagggagcttgacgaattgaggaccaagctgaaagtgatggaaaagaagcgggttgaagaccgagagaagttaaaggacatggaggccttgcaggccgatcgtgataaactgagaggaatcatccatacactgcaagtgaaatacaagccgcacgagcgtaacttggccgagttggaagcaaagcttaaagaggctgaagcgagagtggaggagctcgagaaactgatagcagaacatgagtcgctaatggaaattgcgagtttggaccgcgaaatggcggtagagatggctgatgcgcataagcttgaatgtgagactctgaagctgagagtggaggagctcgagctggaagtagaagtgctgagggaggagaacgaggaattcgggcagaccatgagcccagaggagaaatccagccatggatggttgcagatggagaagacaaacgaacgactacgtgaagcactgattcgcctccgtgatatgacccagcagcaagaagcggagctgaaggatcagatcaaggaacttcagcaagatctcgaagattacgctgctatcaggtcgaaatatgaggctaccaaagagaaactaatgaagtcggagagtaacctgcaagaggtcagagaacgattggagactggtgagggtaacgagcagttggtggaagaaaatggtcgagaaaac

SEQ ID NO: 21138 - DNA, 300 bp, Emericella nidulans
tcacatggaaaagatattcgcccgttattccattctatcatcaagcccggcgatagtgtggcggcaacaagctttggccctgttgatggaatgccatgggtcaaagctgctgatcccaatgagttgtgtgcttgtgtacaggatataccgagtatcggggaggtacagtcattcggcaaggacatcccaggcgcacttgactgggcatgtactaaggcagacggtgggcccctggttatagcagggagcctttacctcgtgtccgatgttctgcgtcttgttagagaagctaacgactca

SEQ ID NO: 21139 - DNA, 485 bp, Emericella nidulans
ctcaatcagcggccatagacgctattcgcgcctccggtgccaccagccaatatatcttcgcggaaggaaactcttggactggagcctggacctgggtggatgtcaacgacaacatgaaagcgctcaccgatccccaagataagctcatctacgagatgcaccagtatcttgactccgacggctctgggacgaacacggcctgcgtcagttctactatcggcagcgaacgcgtgacagccgctacaaactggctgcgagagaacgggaaactgggggtgctcggtgagtttgcaggcgcaaacaaccaggtctgcaaggacgcagtcgcagatctgctggagtatcttgaggaaaacagtgatgtatggcttggggccctttggtgggctgctgggccttggtggggtgattatatgttcaacatggagcctacttcgggtattgcataccaggagtactcggaaatcttgcagccgtatttcgtg

SEQ ID NO: 21140 - DNA, 637 bp, Emericella nidulans
gaattgtagtctctacgagcagcaagagctgacagcaaaggtcacggaaacgcctactcgctcgacatcgatagcgcctggagcagcatgagcacgattgaaggcgacggtgttgagttgaagaacgtgacaattcgcaactggaagggaaccgaagcagacggatcccagcgaggcccgatcaaggtgaagtgtgcatccggagcaccttgcactgacgttacggttgaggactttgcaatgtggaccgagtcaggagatgaacagacgtatgtctgtgagaacgcgttcggcgacggattctgtctcgcagacggtgacggcacctcgaccttcaccacgactctgaccgcctcggcgcgccctgctggttactccgcacccagcatggacgccgacctcgagaccgcctttggtactgatagcgagatcccatccccaccattccaacctccttctacccaggtgccgcccctacagcgcgcatgcaggagcttcagtctcttcaagtcaagtacccactgcatcttccagtgctgaggccaaattcgtcgccagtcccgcgacaagctctcccaccgcgacttccacggccatctcttccgtcgatcccgtttcaacggccacaacgacagcg

SEQ ID NO: 21141 - DNA, 850 bp, Emericella nidulans
ccagattgggagtagtactggcgccctcgccacacgtcgcatactggagacccttgacacgaacttggtggccagctggcacatcactgagccatcatcggaattattggataatgcgcgtgctcagcttgctgactgggccgatttgctccagttcgagcaactcgatattgagcagagtccattcaagaagaagtttatcccagagagctacgacgttgttgtatccttgcatgctctacacgctatcaaaaacccagccagtgcgctgggaaatgtacgtactctgctgaagccagggggaacgctgcttttggtggagacgactaagaatcaggttgatgtggatttcgtctttgctttacgtccaggctggttgcaggacaagaatccacttacctcctgggacgccgtgcttcaagatggaggcttcagtggtctcgacctcgagatatatgactcagagagcgatattcataccaacagcgtcatcatgtccactgtgcctgccaaggaccagaaggctgacctgagcaaggttaaagacagctttgcagttgtctccagcatcaagacacccccatcatcccccattgtcgatcagttgtgccagcgcattcaggccttgaccggtacagctacgacgcacctcgtcttggaaaagacgagcggcaacacatacaaggacaagatttgtgtttttattggcgagcttgaccggcccattctggcagacctcgatgcagtgcacctggaaggcctccgcgcaatggtcacgcaaaacagtggcctgctctgggtcacgactggtgggactgttaccccgaggctcccgaacgagcatgtgcac

SEQ ID NO: 21142 - DNA, 850 bp, Emericella nidulans
gacgggatcgacttctcggcaagacagtcttggttaaaaaggggcctttcaagggacttcttggtatcgtcaaggatacgaccgatgttcaggctcgagtggaacttcattcgaagaacaagcttgttactataccgaaagagctccttgttgtcaaagatcctgttaccggccagactatcgatattggtcgtggtaggggtggtccccgggtccctcaaaactcagccgctccgtcatctggctggcagggcggtcgtaccccaatggccgctgccgattcttcgaggacacccgcctggggtgcggcaatgtcgtcaagaagtaagtttctcaagctcttgctttactctcaaggttttctaacataagtcctgcagcgcctgcttggagcggtgctggtcttggttctcgcacaccagcctggaaagccgacggcagccggacagcctatggcggcgcaggatcacgcacacccgcctggaacgcaggtgctcgaaccccctacggcggaggcttcggttccggctccggcaacagcgacttcgacgctttcgccgccgggtcccgaacgcccgcctggggcgcagcatccggcagccgcaccccagcctggtcagctagtgctaataccaccagcaggaacgacaacaaggcctacgacgccccgacacctggggcaacatactcggcacccacgcctggcgcatatggcggcgctcctacacctggtctttcagcacccacgcctggagcctgggctgatagcgcgccaacacctggggcgtacaatgcgcctacgcccgccgactttggcgaaggaagtcgtccgtatgatgcgccaacacca

SEQ ID NO: 21143 - DNA, 657 bp, Emericella nidulans; identical to SEQ ID NO: 7948

SEQ ID NO: 21144 - DNA, 850 bp, Emericella nidulans
ctcgcgcatttggcagtatcccctacaaaggcggccatctcttctgctttgcagccctcgcccaatcctccatcgctctcattctccccggctacctcgttctctgcgccagcctagagcttcaatcacgcagcatcgtcgccggctccgttcgcatggtgtacgccatcatctattccctctttctcggctttggcatcacaatcggcactgcgtgtacggccttttagaccgccacgcctcaacagactatacatgccctgccagccctatcacgaacgagtacctccagcgctttccctttgtcatcatcttcactttctgcctcgccacagtcaaccaggccaaatggaagcagatccccgtgatgctcgttatcgcttttgccggatacattaccaactactttggcgcgaaacgcttctactcttccacgcaggtctcttccgccctgggagcattcgttgttggggtcatggcaaacctctattcgcgtcttcggcacggcctagcagcagcagccatgctccctgccatctttgtgcttgtcccatctggcctcgcagccagtgggtcattggtagcgggaattgcatcggcaggccaaattaccacgcagcagacgccgttctcggtgcccagtaacggcacgcagagcttcgtcgacgcggcgaaaaacatgaccgctgagcaccgccagcagagctaccaagagaatcctttccagggtgtcgtcttcgacattggatacgggatggtacaggttgctattgggtttactgtgggactgtttcttgctgctttggtggtttatccgcttgggaagaagcgcagcgggctttttagtttc

SEQ ID NO: 21145 - DNA, 850 bp, Emericella nidulans
  unsure (1)..(850): unsure at all n locations
agcttttatcaagcggccggcngcgatcgatctatcgcttcccatatcgtcgcagattcaggttatgaatcttcccggtccggccgccctcaacaacacccaggcgcagcaaggaacttcgctgtcgccctacgagatcgtacatttgctggtgcaccatggtcttagcccgtactttgaagccaacacccgcaatcaagatggtgcagcgaaagcaaagacggactcggaggtcaaaactggagttccaggcactaagaagaaattcgcggagctggaactcggactcctacacctccagcagaacgtcgagatccctgccttgaatttgcccctgcatgaagttgtccaggcagctctggtcgaagcagaaaagcgaggcgtcaagccttcggtggatcttattgattctactcttctcgagagcagtgcgttcattaacagcattcaaaacaatgtgaacgcttggatcaagtctattcaaaccattacaaaaatgtccgcgatgcggatagtgggtcggcagcgcaggaaatcaacttctggttatccatggaaactgcgctggagggaattgagaaccagctacgtggagacggtgtccagttgaccatggacattctacgccatgcaaagcgttatcaagccaccctcagttttgtcgcagacactggactgcgtgaagcgacggatctagtgcagaagtacaaccaactgatgcgtgatttccctctcgacgaacttctctccgccacgtccttgcaaaaagtgcgggagtctcttgtcctcatcttcaatcatcttaacaaaaagctgaagatctgcccgtatccgatcaagcgtgcccttg

SEQ ID NO: 21146 - DNA, 850 bp, Emericella nidulans
ttacgtccggaagtaccggtaagcccaagggcgtcatgatcgagcatgcctctgcctgttcatcatttacctatcaaggccaagagtttggctacgaccatgaatcacgagtgcttcagttcagcgccttgacattcgacgcctcgctcatggagatcttcaccacgctctgcgcaggcggttgcgtgtgtttccctaccgaagaggaaaagcaaggagacattgtacgcgctatcaacaacttacgcgtgaactcggtcatgctcacacccactgtactccgcatgatccagccagaggatattcccatggtcaagcatgtggtgacggggggcgaagccgtgagccatgatatcgtgcaaacatggagtagcaaggttatcctcaagggcgtctacggccctacagaaacctctatgatttgtatcacggcagaccttgttcccggtagttctccagcaaatattggtgttcccctgggctgccgcagctggatcacactccctgacgaccacaaccatctggcacctatcgggtctgttggtgaactgctcatccaaggacctattgtcgggcgcgggtattacaagaaccaaaaacagacacaggatgtgtttattgagaatcctctctggctgcagaaacggtttggcgagactggcggcggccggctctacaagactggagatttggtctactacgcgcaaaacggtgacctcatgatcgtgggtagaaaggactcccaggtcaaactccacgggcaacgcattgaactgggagaaattgaccacaagatgtggtctcatcctgccgtcagacagtcgtcggtcgtgctgcccagtcaaggccc

SEQ ID NO: 21147 - DNA, 312 bp, Emericella nidulans
tacctccgccacttcttgaacctgaagttcctctgggctgtcctcaccgaattccgtaccgttggaccttttgagctgaactgggagacacagcagtacaagtgctggatcagccagtacatcacctttgctttgctcgctagtctccaggccgtcaatgccttttggcttttcttgattctgcgcatcctcaagaactacctattcagcaacatcaagaaggatgagcggagcgacgaggaggatgaggaagaagaagaaatcgagcagtctaccaacagtaccgcagctctggctactggtaccgagccg

SEQ ID NO: 21148 - DNA, 850 bp, Emericella nidulans
  unsure (1)..(850): unsure at all n locations
gcaggcgcaaatgaagctgaattcgttcttcgtcaaaccaaaggtttctagtgagcagtcttcttcaggaactgtcgaaggctcaccaaaaaagccttcaggtgacggcgtacctgctcgtttgtctgatagaactcgtgaactctctgactacgagcgggagtttccagatttctttctgcatccaaatacgactcttgcgcctccgcacagattcgagagagatgccacagcactggctcatctacgagagaaacttgactcactcttaaggagcgggtccgttgaacaactgactttccgaccgtctgaggtgttcaagctaatgccgtataaaaggagacgcggctatcaaataatgtcagtcagggatatcttgcttcaaatgcagaacttgaatgatctaccagaaacctcggaagccgctcgtaggctccaggaatcattaaaacaagtgcggatgaaatcattaaaatttggggaagatgtaagaccaccataccagggaacttacacgaagcggctttccaaggaggcggctaccaagttgatgcgaaacccatttagccgcgcgctacctgaggtcaattatgactacgactctgaagcagaatgggaggatgcagaagaaggagaagagttagactcggaggaagaagaggagggtagtgaagatggcgatgaagatatggatgggtttctcgacgatgaggatgatcacctggcaaacagtaaacgacgtctgcttgtgggtgatcttgaccagtttgcacgggcataaatggcagacgaggngtctgatcagagttagaggcctacaactcgagatcatctaccctttgtacatttc

SEQ ID NO: 21149 - DNA, 500 bp, Emericella nidulans
aaactccatttcgatcaagatggtgatctctggacagcttcagcggataaaacgacaaaatgtcttattagagaggatggctggaaggcaaacctcacactcactcatcccgattacgtcaaggatgtcgtcgtcgatgagcgagggggctgggttatcaccgcgtgtcgagatgaagaaatccgtgtgtggaaccgatcggtgcgttttctgtttttgttctcccttcgatcgctttttgctgatgccatactcagactggacaattataccacacattttctgggcattacgaggaagtaacaggcctggttttactaggaacaatgctggtgagcgtcagcattgacgccaccattcgacagtggtctctgaaacctgatgacctgcggaatgccgtagcacaggcaacagaacatccaactgacgaaccatcaaccaacccagaatctatgctgacggaggaagaggagcgagagctagcagagttactggaagat

SEQ ID NO: 21150 - DNA, 529 bp, Emericella nidulans
ggcaaccaccacccccggaactaccaacgaaaaccttcttctaaccaccgaacacaaacacaaccggagcgattaaacaaaataagaacccaaaaaaacacaccaccacatcaaacacaagacccaaaacaggctccagaccgaaggaacgaccaaggcgcatcaccactcagccatcaacagaacaacaggccccatgagcaacaactgacgcaacaaaacaacaaacgcccctgccacaaaaagacagaacacaccagacaaaggcgaacgcggaccgcacaagcaccagagcaaacaccccaagacccacccaaacaccccacaaccctcaaaaaaaaagaaacaaaccccccaagcacccgaagaacgccgacaaaacgaagccaaacaaaaacacaaaaaaaaaacgagaaaacgccacacacaagtagcagacacaaacagggccctaaccacagcacaaaacgcaaagacctccaaaaaaaaaacacatcacaaacccaaaacccccaaaagcccaaaccca

SEQ ID NO: 21151 - DNA, 850 bp, Emericella nidulans
gaggcgggcgccgaagaagaactatactgtgccattccaccatcaagttatgattctcacggaaagacagttcaagattatgtatggtgacaagggaactctcattgggaagtgggcgattctcacctttcaggcgctcatcatcggaagtctgttctacaatcttcccaacaccaggtaagtctgaaggcttatatatcatatcagagctaacagacatagtgctggcactttcactagaggaggcgtgatgttctttgtgctgcttttcaacgctttgctcgctctcgcagaactgacggacgtctttacccaccgtcctgttatgctgaagcataagagtttgtaaggaccagaaagtcaacactcacacttctcatgctgactgcgattttagctccttctatcgaccttctgcctacgctgtcgcccaagtagtggtcgatgtacctataatctttatccaggtcacgctgttcgagctgatcgtatacttgtacgtcctctttgtgtcaatgtgtactatgctaacggtagtagcatggccaatctacagaggacagcatctcagttcttcatcaacttcttgttcatcttcattcttacaatgaccatgtattcattctttagaactatcggggctttttcagcgtctttagatgttggtatgtacaaccccagaagcctgaggttacggtgtacgtggatgatgtgagtatgctgactcaaaggccaagccactcgcctcacgggcgtcgctattcaggccctagtcgtatatacaggctatctcattccaccgtgagctttcctttttcgatgcatagatgaaaggtgattactgaccttt

SEQ ID NO: 21152 - DNA, 850 bp, Emericella nidulans
aaagtcttccaatatatatgcggctgactaggagcttgcagatttcgtatctgtggctgaaaaatacgatattatcccgcactgccggttcaatgccatgtgtctcggtttggtgtgggataccgcccgttcactgtgggtgtgcactttccaagacaccagcagcggagagatatacaaaagggaagctccagtggtagtcagcgcagttggcacgctggatcgtcccttcgtccctaatatcgagggctctgacactttcgagggcaagaccttccacagcgcacgttgggatgacacattaaaagcctctgggaagcacatcgtcgtcctaggcaacggagcatctgccactcagtttgtgcccgagttagtgaaggaagttggcccaaaaggaagtgtcacccagtttgttcgaagtgcccattggtggacaaaaagggtaggattactgtcgctgtctcggtgttcttgcgctaaatcttcgagtagggaaacccgaagtactcagaagccttcaaaatgctgatgaaacacgtgccatttgcagcacgcatctaccggcttcttctcgcatgggagcttgagagcgtgttcttttcctttcgcatgaatgcgaacggtagcaggatgcgtcagaagattcgggacgccacgtacgcctatatcgaaaaagatctccgccagagtatcgtgaaactctaaagcccaactacgagccgggctgtaagcgacgagtcaacaccgctacctacctctcttcgcttcattcgccacagatgtgtttgaccaaggatcgggtcgtgaagatcggtcgggaccatgttattactgaaactggtggccgata

SEQ ID NO: 21153 - DNA, 435 bp, Emericella nidulans
cccatgtttttattgcaaggatgctgattggctaggatcaacgtatcctttattgataaggacggccaaaagttcgacttccaggtgtccgagggggacaacttgttggacattgcgcaacgaaacgatctagagatggaaggtttgaacgatgcctcttccccccggttctcttaccggtagtaactcaggaatcctataggtgcttgcggtggctcgtgcgcgtgctcgacatgtcatgttatcgtggaggacccagaaatgtttgacaagatggaggagccctcagatgacgagaacgacatgctcgatttggcgtttggtttgacagaaacgtcgcggctaggatgccaggtgcaaatgaacaaggaactggacggattggtggtgcgactgccttcaatgacccggaatctgcaggcgagcgacttccaa

SEQ ID NO: 21154 - DNA, 457 bp, Emericella nidulans
ctgggacaacccatcgattcacccgcagtgtcaaccggaatatgttggcgttgtgataatcgttaatggaaaagcatggccaagatctaaacgtccgacgtaggaaatacagattccgtatcataaacgcaagcaacgctaggtttttcaagtttttcttctccaacggtctagatggacatcgttgtggggtctgatacagcgtatttgtcaaagccggtgatgaccaaatcgattctcttatctccatcagaaattgtagacgttgttgttgatttctacaaatcaccgtcgagaacggtggtgcttgctaatgacgcaccatatccttaccctagtggtgatcctgtcaacgaagaaaatggcaaggtaatgaaatttatcatcaacaatgaatcagaggatgacacatgtacaattcccaagaagctcatcaattatccgaatggggatcctc

SEQ ID NO: 21155 - DNA, 576 bp, Emericella nidulans
aagcagcaggaaaagctacggtcaacctctaagaatgcgcgagaccgcgtcgttggcgaattgaaacgaagagtgcccaccgccgatgagcagctggagaagtaccgtcgtcggatgaagactggagttgaacgcctgtctcaacgttggaatgcagcatctgcggtcacacttcgtgagaagatctcgttcatagcgggtgttctcaacatcttcatcagtggctatctgcttgggtcgaaccccgaatacttctacatctggttcagtgcgcagctcgcctactttatgcccatccggttttacaggtatcattcgatcggataccactatttcctggcggacctctgttactttgtcaacgtgctttgcatgctctccatctgggtgttcccacagtacaagaggctctttatcagcactttttgcttgaccttcggaaacaacgcagttgcgatcgccatgtggcgcaactccatggttttccacagcatggacaaaggtgttaggtgtgttttttcaccagcccacactctagcttccaatgactaatcgagtatagtctcttattggcgt

SEQ ID NO: 21156 - DNA, 850 bp, Emericella nidulans
gaaaaaaaataaaataaaaaaagaaggaaagaaggaaagaactaatgtacatggtacagttgcgactactgtcgctcaggatcgtacaacctctgcccagacaccgtcttcgccaaaacgccaccccacgatgggacgctgcaaaagtactatatcacccaggcagactactgctacccgttgccctaccacatgggcctcgaagaaggcgctatggtggaaccagtcgcagtggctgtacagataaccaaagtgggcaatgtccggccgaaccagacggtcgtggtatttgggtcgggcctatcggtctcctctgccaggctgtgtccaaggcgtacgcatgcaagaaggttcataggggtggatatcagtcaatcaaggcttagactttgcacaggcgttcggcgcagatggggtctttctccctcctcccaggccagagggcgttgaggagacggcatggagcgagaaagtggcggcgctgatcaaggagaagttcgggctgggcgagggcccggatgtcgtcctggaggcgaccggtgcgcagagctgtatccagaccggggtgcatttggtcaagaaaggaggcacgtatgtgcaggcagggatgggcaaggagaacgtcgtcttccccatcacgacagcctgcatccgggacctgacgatccggggctcgatccggtacagcacggggtgctacccagttgccgtggacttgatcgccagtggcaagattgacgtcaaaaagctcattacgaaccggttcaggttcgagcaggcggaggaggcctttgagttggtgaagcaggggaaggacagtgtgataaaggttgttattcagggataccag

SEQ ID NO: 21157 - DNA, 850 bp, Emericella nidulans
ttgctgccatccaatcagaccaattcatcctcggtcagcatgagaagaatatcgacatcgtcagcggtagccaattttctggcttaaccacgttcgcccatatcccctatgttaactgtttcattgacagcgaagccgaatcaacaccgtatgatatcgccatgcttggggcaccattcgacacggtaagtcatggaaccggtaccgtccatgttgctgcggcctgcttacgtcggttgtgcagggagtcacggctcgcccgggcgcaagatacggacccggaggtatccgactcggctcgcgccgcatccaaggttggaacatctacactgggcagaacgtctttgagagttgggcaaagctcgtggattgtggggatgcgccgttaacgtggttggacaatacggttgcattgaagcagcttgatcttgcacataaggtactttcattttcactttctgtcttttccgggaatgcgaggctgaggttatggcaggtcatctcttcgcgtgcaacgaacagtacggagaatggccgcacaccgcgtattgttaccctgggaggggaccatacgacgacgttgtcggcattgaggtcgacgtataagcattttgggccggtgtcggtgatccactttgatagtcatattggtaagcttcttctgagtatggagcatccgttgctgattgtggtagatacgtgggaacctgaggtactaggtaagctatcttaactcgaaatggattgagcggcattgatagcgatatcaataaactaggcggcgggatctctaatatgcgtaggtgcgcattctattattcagcgctaaactcattgacagtgcgttcat

SEQ ID NO: 21158 - DNA, 468 bp, Emericella nidulans
cgcctaggctcgggaagcttgccgacgaattcagataagacgagtattctgggtatgaaatacatcgaaatatggcgctgaaaaagcggaactatcccttaaaacttgcagaaacgtgttgatcaaagcttgatgctttcttgaataaaacgatggataaattggaatcacatatgccaaagtttgaaagaagagaaagttaacaactgatgatgaaagagatatatacggcgatcagagattctcgttgttcactaattgaagcgggtacaggaacagggaagactcttgcttatttgcttcctagtctttattttgcaaagagagacgaagaacctgtcattataagtacacagacggcacaacttcaacaacaaatagtagaaaaagaaatttcgttattacaaaaccttaatgccattttcatttgaggtagctcttcttaaaggcagaaagcattttgatgct

SEQ ID NO: 21159 - DNA, 730 bp, Emericella nidulans
  unsure (1)..(730): unsure at all n locations
agaaatggcctatacttgtaaaccaggccaatggtcttagaacggggtgcagaacgaaaccctttaacttgaaagggcccaaataacggcgaagacaggngatgagagtaaaactctttttatcgccaatatatctcatgagctcaaaacgcagctgaatgggattcttggtatgtgtgcggtctgcatgggtgagcacgatcttccacggatcaaaaggtcgcttcagactgtatacaagtcgggcgatttgctgttgcatctattgaatgacctgctcacctttagccggaaccaaattgatcaggccattaggcttgaagaaaaagagttcaagctctcggatatccggtcgcagttacagattatctttcagaaccaggtccaggaaaagcagatatcattcagtatcaagttctgtcatccagacactcctccgatcaatgacactccagaagttatatctcgcgcacctggtccggtatatgggccgccgggaaccgccaaattgaaggacatggtcctatggggagatcagcaccggatcttacagatcctgatcaacctagtgggcaacagtctcaagttcacacctgagcagggcaccgtcgcgatcagcatcaagtgcgtcgacgaggacaagaacccttccgccagcccaagaccggtaacaaaagctctctcgcgctgacgatctataggctcatcccatgccatgtggtgtcccact

SEQ ID NO: 21160 - DNA, 547 bp, Emericella nidulans; identical to SEQ ID NO: 13058

SEQ ID NO: 21161 - DNA, 556 bp, Emericella nidulans
atggtgctggcaaaatctaaaaactcggtggggctcggccagagcctcatgaacgatcgctttggtaaaggaaaggcctctaacatgaagaagtcgtctcataatgctggaattgcacgcaaagatatgaatggcgaaacttacatcacgaactccgccaaagaggcttcttgggttaagatgcgcagtatcacggaacaagcggcgctagacgagtttttgaccaccgccgagctggctggcaccgatttcacggctgagaagatgaacaacgttcaaatcatccatacggaccagaagaacccctacttgctctcggccgcggaagagaaatcagccctacgaaaacacaagaaaaacaaaggccgcctaacggttccgcgtcgcccggcgtgggatgcgtcgaccactcggaacgagcttgatgctatggagcgtgagagtttcatggactggcgacggggtttggcggaactacaggagaacaacgatctcttgatgacgccgttcgaacggaatctcgaggtttggcgtcagctgtggcgagtgattgaac

SEQ ID NO: 21162 - DNA, 850 bp, Emericella nidulans
atagtagatagctgtaagagcaattcaggcagatgtactagccccctactacttcagggccctgccaggatactctgctattgacctagtctaggttcttgttcacagggtagaagaggccttctaacagggaaaagatactttactactcctactagatataaaaggggtatttaatactgtaatatactaacagctcctttcttacttatacctgtaaggatagtataaaggcttactccagctacttaaagactagcttactggctgctctgtatctgtttatattaaagaaggcactattatagtactaattaaaggaggactcctccagggatcccccctattcctaatactctttctgctatatacagcaagaatagtctctattttagagggctccttctgctatacagataatataggtatattattaactaggaatactctggaagagagcttataataactagtaagggcttataaataaattactgccctagggacagagacaggcctccctttcttaatagagaaaatagagatataatacttctctagaaagtagtagcagtatcttcctatagttactctacctagtataggagagattatactatttctatatatatattggttaggagttcttctggatacaaagcttatttttaaagcctatattaatttagtcctcagctgcaggaaacaactcgcccagcacctaaagagacttagtaatacctagtatagctatctagtagcctccatgcaggtagtagttatatagtatattctcccaacaactctgtacagtacagaagtcttctatacaggcaaaagataaaaaagg

SEQ ID NO: 21163 - DNA, 637 bp, Emericella nidulans
gcttcgcagacgcctacccaatccacattatttcactttctagcgtgcgcgatgtgaatgcacggtgcgcagaagatattcctgatctaagcgttcggcgtttcagggcaaatattatcgtccagggtccgaaggcgtttgaggaagacgattggaaagttattcgtatctctccagctactgcaaaaaagaaagcacctaaagaggatgatgaaggagacagcgcagaacaggcgttaataatgtacacagcctgccgcacagtccggtgcaaactacccaacgtcgacccggacacagggactcggcatccttctgagccggatcggacgctgaagagctataggaggattgataagggggatttgacgaatgcttgtttggggatgcaggcagtgccggccgttgaaggtgcgttgttaattcttatgataaatggttcagaatgcgtcctagacacttttctcttcccttcttgctgttagtggatttactgacaagctgcagaatcgcagatacaggttggagatgcaatttctgtattttatagggtcgagcagtgctatacgcaatgttagtgccgccgaaagtggtggaaggggtagaaatgtcctcccctatcaagcgagatttgtcg

SEQ ID NO: 21164 - DNA, 536 bp, Emericella nidulans
aggcttattgagaaaattcggggggtttgaaggagccccgaagttatgcggaggcctgtatacaagccccgagaggctggaatcggatggcctagccggggagaacccctcctgttgcatgaggattaggcaagggcgtgcctggtaagaaccgttcctggcggcccgtttaggcagcaatgggctcccaatgccaggccccctcaaacaattcccggaaaggccgggcctaaaccccgctgagggtcaaaaatggcaagtacgtcatccccgtcaactattatgaccaggcaattggtaactcaacctggaggctgttccttgatgacgatcttgttggggagtggaagggcgacttggaatatattttagggcgcgcaccgtctccttacattgatgggcagacggccgcgcggattacgttcaagcacgtccatattaagtcgcgctccacactgagcattgtaggcatcccggatggaatggagcctgcgccaattgactacgtctcgattctgccagagggtgttattgac

SEQ ID NO: 21165 - DNA, 725 bp, Emericella nidulans
agattcaggccctacaaggaaccccaatctctctacggaagctcctgatggcgttgaacgagtgcactgagtggggccgagtcacaatcctcacgacactgtctgagtacagaaccagcgctgtaaacgaagcagagcagatctgcgagcgagttgcaccccagttccagcacgcaaaccctagtgtggttctcgctgctgtcaaaacagtcttcttgcatatgaaaataatcaatgcggagctatcgaaaaactacctcaagaagatggcccctccgctaggtattccgagtgttctctggtgtttaatattgaactgctaatgaatgtttcagtgaccttagtatcatctgctcccgaagtgcaatatgtcgccttacgcaatatcgatcttttgctccaaaagcagccggacatccttaacaaagagctccgcgtttttttctgcaagtacaacgacccaccttatgtcaagtttcaaaagctcgaaatcatggtgcggatagccaacgaccgaaacttcgaccagctactagcagaactgagggagtacgccctggaggtggacatggatttcgtccgccgcgcggtcaaggcgattggccaggttgcaatcaagatcgaaagcgcttgtgagaagtgtgtcaatactttgctcgatctgatcaacaccaaggtcaactacgtggtgcaggaagccattgtggtgatcaaggatctttcag

SEQ ID NO: 21166 - DNA, 850 bp, Emericella nidulans
gtcgggattgaaacggcgaagaagaagtttgagttaaagctggaggatttcgggccttaccgagcagactatacacggaatggccgcgaactgctgttagcggggcggaagggacatatcgcgacgatggattggcgaaatgggaagttggggtgtgagttgcatctacgggagactgtgagggatgcgcggtggcttcacaacaaccagtactttgcagttgctcagaagaagtcagtctatatctatgacagccaaggtgttgagctgcacaatctggacaggattgttgagccctgctttctcgaattccttccctaccatttcctccttgcttcagctgtgagttatacataccgcatttcggtatctcatattctaacgaagtatagcaaatgagcggccatctcaaatacacagacacatcaaccggccaactcgtcgccgagattcccacgaaagttggagccccaacatccctcgcccaaaacccctggaatgcaatcatgcacgttggccaccaaaatggtaccgtgactctttggtcaccgaacacacaaaccccgctcgtaaaggccctcgtccaccggggccctgtccgctcaatggcaattgaccgacaaggccgctacatggtctcaacaggtcaagatctcaaaatgcaagtatgggatattcgaatgtatcgcgaggttcactcctactcctgccaccagcccggtgccgccgtctccatctccgaccgtggcctcacagccgtcgggtggggcactcaggttagtgtctggcggggtctctttcgacgcgcaccgcgaacgttggaaaagtacaatccccctacatgtcctgg

SEQ ID NO: 21167 - DNA, 500 bp, Emericella nidulans
ttgactcttccattgaaccccatcaatcattaacgtggtgcttgtactagtaccaactcagatactgccctgctcttgcaaataaaccaaccggcaagccaaaatcggatgaaggaagcccaaagaaaagatttgaccccttcgagaatccttcccggagcttttgatcgcacattttccgaaagaaaatccaacccacttcctcgttctgaataaattccccgttatccccaatcactatattctggcgacgactgcctggcgagaacaaaccgatatattggaaaaggaagatttggcggcggcgtacgcctgcgtgaaggcgtggaatgatggaaaccagtcgggcggcacctcgtccaagagatttattgcattcttcaattccggttatgaaagtggagcaggccagccacatagacatctacaattcattctcgtagaggcaatggcacaggacgaccagactggcaccttggaagccgtttattcgacacggt

SEQ ID NO: 21168 - DNA, 501 bp, Emericella nidulans
atgacgacccgcaaacacaacgaattcttggacatcggaaccagcgacgacgaagacaacgatgccggatatgactccgaagccgctgaagagagtaaaggtcggactgtgaagcgaagaaagacacaatctcgagaagatggcatagaaagcgcctccgaggacgagagctcaggcggatcagagggagaagaaagcgatacagaagcgggaggtgtacgcctacgtgaaaagaagcgcggacagcgtgatgaatatgagaatgactcagacgatgatggcaattacatgaaccaagaatcccagtaccttgacgtgaccgccgaagtggaaaaagcgaaggccaagaagaaccagaagccgctcgacaagctaaaaaataagccgccgaagaagaacaaaacgggcgtcgtgtacttttcatcattaccgccgtatttgaagccatttgcgctcaaatcgcttcttgaaacccgtgggttcaagcctatcacgaaggtt

SEQ ID NO: 21169 - DNA, 850 bp, Emericella nidulans
tcgtttgcatcctctcgtatagtacattcgcgacatccttcacgagcgccgtgttctcagcgggtatatctgccgtgacagaagagttccacgtcgggacggaagtcggctcgctcggagtgactttatacgtcctcggtttcgctgccggtccgattgcctgggcgcccatgtccgagctggtcggccgacggttaccgatctgtctaggggtattcggatgcgggatattcacgatagcaggcggaacagcaaaagatatccagacggttatgctaacgcggttcttcgctggactgttcgcggcaagtcccgtgtccgttgtgcccgctgtctttgcagatctgttttccacggcccagcgggggatcgtcatgtctgtattctgtatggcagtgttcatcgggccttttgcggcgccctttgtaggcggtttcatcgccatggcgctaggctggcgctggatccattatatctcggcaatcatggtcttcctgggctttgtgctggcgctttgtttcctcgacgagacgtatgcgcctgttatactggtgcacaaggccgcggtcttgcggcggcagacgcataattgggggattcatgcgaagcaagatgaggtggaggtggagttcatcgagcttgtgaggaacaacttcacgcggccgctgaagatgctcatcaccgagccgattctgcttttagtctcgctgtatatctcttttgtgtacgggcttatgtatgcactgctcggcgcgtaccctgttgtttttcagcaggtgtacgggatgaacattggtgtcggtggactggcattcatcggcctgatcatcggcgaactggttggcggcgc

SEQ ID NO: 21170 - DNA, 683 bp, Emericella nidulans; identical to SEQ ID NO: 13296

SEQ ID NO: 21171 - DNA, 394 bp, Emericella nidulans
aggtatagctatgaaccacgtcgctggctcactcaagctctatttagcgcagtaccgcgagatttcttcgttttctcaattcggatcagatcttgatgctgccacgaagcaaactctcatacggtgtgagcatctgacagagctcttaaagcaaaagcagtacgctccaatggctgtgaatgagatggtgcccttgctatatgctggaatcaatggtcttatcgacagaataccaattggccaaatccaaagctgggaagctgacgtcctcgcccatttcaaaagctatgaacctgaggtgctcgcccaaatcgaaaaggatggcaaactaagccatgacctagaagctcgaatcaaggaaataattatagcattcaatgcagccttcctatga

SEQ ID NO: 21172 - DNA, 416 bp, Emericella nidulans; identical to SEQ ID NO: 6631

SEQ ID NO: 21173 - DNA, 850 bp, Emericella nidulans
cccagtataaattcgattttaaagactaacaaggtcctatacgttcgctcggtgctcgattgtttcttcctactccactgagtcgctcccttggctggatgatgaatatagggaatgactttcccgagctaagacagcgctatctcgaaagctggggtgctacaatgatagtaaaggaggaatgtagcaagccatcaacgagagggttgctcgagtacaaggataccacatttggacgtgcaaaatcccggtgtccagtcattcatctatgcaagaatcaaggctaactcatcctcagccaaagacttcatgtacacaacatcaattctccaggttgacgtcagtagcttgaagagtacaccactctcaaggtcgaaagcctatcacttcctcgaatctccggcaaatatcaggagccgagcctcggaaatcttagctcttagacagggtttcggcataccgaacccgctcatcatctgggaacccgcccccctctcctgcaaagcagagaacttgcagccatgcatagaggccacaggtactgtcaatgtattctcaccgaatcacctagagttggcccgccttttgggagaaccattatccacccgctttttagacaaagagaagatccagtctatggcgctggagtttctaaatacaaatgaagggattaggccccacccgaagggggtcatgaacggcccaaactgtatagggaagctgcattggattccaacgctattatccaacgacagggatacggctgtgtgaacgggacttgcatattatgaataagaaaacagctggaacaagtactgactgcaacggagctgttaccattagacacctt

SEQ ID NO: 21174 - DNA, 850 bp, Emericella nidulans
cggctatctggagtatcgaccagttctcgttcaacttctccgtacgccgcacgaaaaggaagtcgtcgaaccgtggtcgtacgcctgctgtcacgcctttatcgactattccttccgtttactttgaggatgatttccgtcttgaaaatccgcgcaccttcgatgtagtgtcagagagatcagaggttgtcacacctcctaaggcgccgagcaaagacaacaaaatggatatagttgagcctgcgccaactgggagaaaggcgctagcgacgaatgcaatactacaggagaaattgtcatggtacatggatactgtagagatacacctaatatcctcaatctcgaccgcgtccaaatccttcttcacggcccttggttcgctacgggaattgcatgctgaggctgctgattctgtccggcgaatccaagtcctgcggaaagaccttcaaaagatcgaccgagaaatggcattgggaggattgaagatagttaacctacgtcgccgaagggagaatgtccgcatgcttgctgatgcagttgcccagcttcgagacgtggtcgagtccgtcacccgatgtgaggagctggccgaaggcggaaatatcgaagaagcagccgatggcctcgaaaaggtcgagaaactgatggccgaagactatactcctgatcaggcagagggcgaacaacggaaaactcttgatttacgaagactcaaagcattagagggtgcatcaagcgagcttgaccgtttgagatatcagattggcaccggctatgagaattcgttttggaacgactcctggcgatctgaggcgcatgttaaagggctccttggctgaactgccagaaa

SEQ ID NO: 21175 - DNA, 850 bp, Emericella nidulans
gtgtgggcagcggcttaacgctacaaatggctgtgtgaactgccggaaatgcggaaagctattttgcgaggagcatacgatgtatcaaatgaagctttctagatctgcgcaacatgagccagtgcgggtttgtggtatagagtctgcgagacttgctataaatcgcgggagggtataatgatcataacggtaggtacctccagcttggttggatggcggattctaatacgcagtaggtctggtcagagatcgcatggacgagttcaaagccataaggaagcctattgtggacaagtctttgctggaagtatctcggttagagaagcgtctgacgaggctcacgcagctattagctagcctttcaccagagcagcttcagtcgaataagctctggcctattccattccagcatgatgagcgcaaggctctcgagcagacggttgttagctggcaggatgatactagcgtgacaaggtgtccattctgccaacaggatttctctagttatacctttcgaaggcatcactgccgcacttgcgggcgagtcgtttgcggtgatgtcttgacgggatgttctgttgaagttccgctaagcgtaacaccatgtacgtgctgccagcattcaagcaatattatgctaacttcatttagtgtcgaaagcctatttagaaaaatcagtcaacgttggttccctgaacatcgacatcaggctctgcaaagagtgcaagtcaacgctatttgacagaagtgatttcgaggctgacgttgcgcgaaaacctgaaaacgttagggcatatgagaatcttcgacaattcgaaagagggattcgactgcttatgcctaattcaga

SEQ ID NO: 21176 - DNA, 850 bp, Emericella nidulans
acgtggcgtgcgactcttaccatcgtacccacgaagatatcgatctgttgaagcagtgtcaagctaaggcctatcgcttctctatctcttggtcagtttacttttcgatatgacatcagatattgggatgctgatcttatccggttcgtgtctaggtcccgcgtcattccacttggaggccgaaatgaccctattaacgagaaaggcctgcagttctacgtcaaattcgtggacgacctgctagctgctgggattacaccgcttgtgacattgttccattgggatctcccggaagagctggacaaacgctatggtggtttgctaaacaaggaggagtttgtcgccgactatgccaactatgcccgtatcattttcaatgcactgagcccgaaggtgaaatactggattactttcaacgagccatggtgcagcagtgtcctcggctataatgtcggccaattcgcccctggcaggaccagtgatcgaagcaagaaccccgaaggtgatggctccacagagccctggattgtaggtcacaacatccttgttgcccacggcaccgccgtaaagatctaccgcgaagaattcaaggctcgtgacggtggtgagattggtataactctcaatggagcgtcttacgcctcttttccataataatagcctcaagttaacggagaataggcgactgggctgaaccctgggaccctgaaaaccccgcggacgtcgaaaccgttccccgcaagatcgaattcgctatcttctggatcgccgaccctatttactttgggcgctacccagaaagcatgattaagcaacttggcaaccgcattccggatggacccccgaagaa

SEQ ID NO: 21177 - DNA, 600 bp, Emericella nidulans; identical to SEQ ID NO: 6998

SEQ ID NO: 21178 - DNA, 850 bp, Emericella nidulans
agccactccgagcgcatcctcatcctcactcctctcactcgcttctatcagggatactgggacaacatcgagaaactcagctacccgcatgagatcattagcctgggcttcataatcccacacacaaaatacggcgacgccgcactctcagccctcgaaaaagcaatcgcgaagacacagacaggccctgaagagaaccgtttcgcatctatcacaatccttcgccaggacttcgatccaccactgataactcagaacgagaaggagcgccataaactcgaaaaccagaaagcccgtcgtgaatctatgtcccgcgcacgcaatagcctcctcttcacaactctgggtcctgctacgtcctgggtcctctggctagactcggacatcgtcgaaaccccagaaaccctaatccaagacctcacctcgcataaccgccccgtaatcgtcccaaattgcttccagcgatactacaataccgacacgaaatcgtacgacgtccgcccctacgacttcaactcctggattgattcctctactgcccaagcgctgggtgatacgctaaagcctgatgaaatcctgctggaaggatacgcggagctcccgacgtatcgcaccctcatggcctatcaagcagatactaagaatccgcgcccgaagcgtgtcattgatctcgatggtgtgggcggcacggcgcttatggttaaggcggaagtgcatcgtgatggcgcaatgtttcctgcgttcccgttttatcatctagttgagacagaggggtttgcgaacatggccaatcggctggggtatagtgtgcaaaagaaccggattattttgaacgtttcctttccgtcgc

SEQ ID NO: 21179 - DNA, 402 bp, Emericella nidulans
tcactatggcgacatcccttctttcgcttgcattgaaccacccgcttgacccaacgatcgcgatgactggagaattgacagtgaccggaaaagtgctgcgcattggaggactgcgagagaagacggtggctgcgcgccgtgccggtgccaagacgattatcttcccagccgataacatgtccgactggctggagctacctgaggtgagtgcttgttttccaagacagcctaacttgctttgtctaacggtctgcgttctagaacattaaatcaggaatcgaaggccacgcagtgagctggtactctgaagtgtttgacatcctgtttgccgatctcgataagcaagctgcaaaccgcgtctggcagaagcagctgtcgaaggagcccaagaagtccaacgat

SEQ ID NO: 21180 - DNA, 652 bp, Emericella nidulans
tggcttctctggatggcgcgactgttgaaccgctggcacttgcctgcacttgtcaggcgccactattcatctcgattccaatctttgcgcattgagaaaacccagtcgcccaaacccctgcccgactcgaccgagttacaatttgggcggtctttcactggcaagtatccctcacagacccgaagtatatacctatttttcctagtacgtagcacttatacttgctacagaccacatcctcaaactcgaatggaccacaacccaaggctggagcgatgcgcaaatcactccctacgataacctgcggctcgaccccgcctcatgcgtcctccattacgcattcacctgcttcgagggcatgaaagcgtataaagacccgcatggcaacgcgcggctattcaggcctgaggagaacctggcgcggctcaacagatccgcagctagactcgctcttccgacattcgaagaatccggcgtactggagtttctagcaaaatatgttgatctcgaaaagagattcatcccgcacttacctggtcactccctgtacttgcgcccgacgttgctaggcaccgatgcgagtattagtgtttcgcggccccggagcgcactgttgtttgttattgccagtccaatgggcgattactttgcc

SEQ ID NO: 21181 - DNA, 502 bp, Emericella nidulans
attaccacttggtttgttagctacctcataatttcaatggacgtactaactcactgtgcaatagatatccccctctcgctcgctggtccggcacttgcgactacgctcgcctacctgaacgcagagtactcgcttttttatgataagaagatcttccatggactctttaaatccattatcaagtcgcgactcgcgcagcgccgggaccgtctgaaccttttctatgtcttggagaactatgctctcgacccggcgtcgaaagaccggccgttcattgtctacaatggccgcagctggactttccacgagacgtataccgtagcattgcgatatggcacctggttcaagaaagtccacggcatcaaaccccgtgaaatcgtcgccctggatatgatgaactcttccactttcatttttatctggctaggtctctggagtatcggagcggtacctgctttcaacaactataatctcaccgggaaaccgttgacgcattcgatcc

SEQ ID NO: 21182 - DNA, 517 bp, Emericella nidulans; identical to SEQ ID NO: 7185

SEQ ID NO: 21183 - DNA, 731 bp, Emericella nidulans
aactcagtctccttatcgatatccgcctctatcgccatgcgttccaagtttaaggacgagcacccgttcgagaagcgcaaggctgaagccgagcgtattagagcgaaatatgccgaccggattccggtatgttttttctttcgttatgtgtttgaagccgtttctttttttttttttcttgtgttatcctcataaggaacttgacagttctggtacaccgcttgttcttgttcaaggcactaaacgatattcattcacaggttatttgtgaaaaggtcgagaagtcatatattgctcccatcgacaagaagaagtatttggtacctgcagaccttaccgatggccagttcgtctacgtcatacgcaagcgcatcaagctgtctccaaagaaagccatcttcatctttggcgacgaggtcctgcccccaacggctgcactaatgcgtagcatttatgaagagcacaaggacgaagacgggttcctttatattacgtatgttatcccagaaccacctggggcttttccaggtgacaaactgcttgtagatccttcggagagaacacatttggcgactggttaacctggccaccggtggattatctcacttaattgtccacgccggcaaaaaagctcgtttttcaaggttctccttacggaaccagtcttaaacttcgcggtttttggacgaggcaataaaaaattcccgggggctttcatttagagccaggcc

SEQ ID NO: 21184 - DNA, 500 bp, Emericella nidulans
accccgtcatgccaaagaactacgagttttcgatgaaatttccccgcgaacgcatctatgcgcgccacccggttcgccctgcaaagcctaccccgggctcactcgtctacagtcgctacatcccgcacctggacaaacacttctcactcatggtcgtggactggcagaacgaagagcacctgaagcggttcaaccgatggcagaacgacccccgcgtcgcgaaaggttggaacgagacgggcacgctggacgaacaccgcgagtacctgcgtcgtctccacgaagacaagcatgtcctgtgtctgttcggacgctttgacgattttccattcgcctactacgaaatttactgggcaaaggtgcgtaatccctaaccgtctggacctcccgtatccctgaactcatctgaccctctccaaaaacaggaagaccactacggtgcccactacgatgccggcgactacgatcgcgggcgacattcccttgtcggtgaagaaagc

SEQ ID NO: 21185 - DNA, 850 bp, Emericella nidulans
cgcaaaacctaatctaatcctaatctcgcccaccgagtcctgcccgtcttcctctttcccccccagagacggcaacctgccgtcgccctcgtcctctgctagttcaggctcggtctactccaacgacgaagcctccaggtcgcagcccgtcctgggtgagccatggccgcactgcggccgggaccactcgccgtattccagccggcccctgcacaccaagacccccggcagcctcagcgccctggatacgctgaagaactgcggtccccgtcaggccgtgaacgagcccatgagcgcgccggccgtcgaggcgccacggcccctatcctttcgtgcacgctcaatgtctttctctcggcctcagacccccgccgcagacgcgcggcggcgcttacagaaggagccctcgcgccgaccaccctcggcccagagcacggcgaccttctctctcttcccagcccagtcccagtcccggacatcgaccccaatcctgactcacggtaacgggcacgaagactcgtgcgccagctccacatactccctgcccctctcctccagccagccaccctctcgcaatgcgagtccgagcccttactcctgcggctcgcccgcctacaaccgctcccgttcggggtctctctacagcgtctccagcatgtcggctgcgcattcccaggccaccgggaagcgtccgccgctgccctaccgcggttcaatctccatggtcaagtccaggtccagcacgatgccgatgggtgggtattcgtccagcagtctgcgagcggagctcaacccgcaaccagaagagcagaagacatcctccaagagcaagagcaagacccacagcagc

SEQ ID NO: 21186 - DNA, 554 bp, Emericella nidulans
atcagtggtgatattcttattgaaaaagcacgccaaatctggagttctctatcccagtatcgtgaccagcccccacctgctttcagtagtggttggctatatcggttcaaacaacgctataatatcaagcagcggacataccacggagaagctggctcagtaccagaagacgttgaggaagagatgaaggctatacgtacgattgctggccagtataatgaggatgatatctataatatggatgaaactgggcttttctggcgtatgcctccttcacagagcctatcttccgttaataggcctggaattaggaaggataagactcggatatctatgatatgctgtgtcaatgcctctgggactgatcgattaccaatctgggtaattgggaaggcacataagccacgagctcttcgcaatatcaatatctcagcaattggaattcgatggcaatggaacaagaatgcctggatgaaccaaattattatgcgtgaatggctcctggagttctatcaacatatcggccagtgatcaatgcttcttacaatggacaa

SEQ ID NO: 21187 - DNA, 655 bp, Emericella nidulans; identical to SEQ ID NO: 6504
  unsure (1)..(655): unsure at all n locations

SEQ ID NO: 21188 - DNA, 707 bp, Emericella nidulans
gcggcaagccagtcccatccgctgaattcaacctgcatcacaacggggcgacttgtgacgggccttacaacacatggcgctggtcgaagaaagatcagaaacgtctcgacaagggccacgatatcgccgtagaggcattcaaggacagcccggattacaagggaaagcggctcgattatatcttcgtcgggggtgaggtcggatggtccgtccgcgacgtcaacatcgcaatgacacagcgccatcctacactcaaatgctcgctaagcgaccatttcgccgtgcaaaccgtcatcacccgcgacgtctcgtcaatggcagccaagcaagaaagtggtggcggcaagtcgaatcgcctaaccctccctgcagaaacatacacccacatcctcgacatgatccacgcctatgttcgccgcgaacgcacgcagcgtcggtggcgcctcattcactttgttgcctcggtgctggtcactattggctgcctggtaggcgtgtggtggaacggtgatcgtccgtatatccccttcattttgacacttatcagcacgcttagtttcggcgctgggattttggatggcttaatcgggggtctgtttgtctccagtgagctgagggcactaaaggagttcgaatgggagataaggaatacgaagaggatagctgaggggcttcagcggtagatggctgcaatagtgactgatgta

SEQ ID NO: 21189 - DNA, 500 bp, Emericella nidulans
agagcagagatagcgctgatgtccggcggtgcttttgccgttacgcaccaccccgtcagtagctgaacaggagggacagctgatagaaacagaagccactggagcacctcaaaaacaccatcatacactaaatcagtaagttggcagcatcacctaagcagacagttttattgttcatgatgatatatttttatcttgtgcaatgtaacatcagagattttgagacacaacgtggctttccccccccctgcagcccgggggatccactagttctagagcggccgccaccgcggtggagctccaattcgccctatagtgagtcgtattacgcgcgctcactggccgtcgttttacaacgtcgtgactgggaaaaccctggcgttacccaacttaatcgccttgcagcacatccccctttcgccagctggcgtaatagcgaagaggcccgcaccgatcgcccttcccaacagttgcgcagcctgaatggcgaatggaaattg

SEQ ID NO: 21190 - DNA, 500 bp, Emericella nidulans
  unsure (1)..(500): unsure at all n locations
ccttcgtcatcttcggttataaccaggccggcttgggccctctcgcgactctcaacagctgggtggcaacattccctgatatcgataccgtccacaccacgggcgtggagaagagcgaaaactcgaccaagaagggtgctgtcattgccgccttccagctcggagctcttatcggagccctttccaccacattcttctctgaccgatttggtcgccgaatgtccatcttcattggtgcgattctcactatcatcggacaggtcctgcaggtggcatcatacagcctgcctcagtttgttgtcggccgtattatccttggtattggcactggtcaagtcaacgttgctgttccagtctggcagagtgaatcgtccgcggccaagaaccgcggccagcatgttatcattgatggaaatgtcatgtgtctccgttatgcccttngcaactggatcgattntggtctgagcccgatcgaagagagcacgacgcattggcgcgtg

SEQ ID NO: 21191 - DNA, 850 bp, Emericella nidulans
tgctatgccttcagatccatcggcgcaacaactaccgcatccagccaatgaaagtgccgctatcccgtcgatagcgagttcgtcctctttccgaaacgtctccgcttgcaatcgatgtaggcagaggaaaaacagatgtgaccaacgactgccacgatgccaagcctgcgagaaggcaggggtccgttgcgtcggttacgatccgataacaaaacgtgaaattccccgcagctatgtctacttccttgagtcgagggtcgcgtacctcgagaaggtactgatggataacgggattgagtataatgaagctgtggcattcgatgaggaggaagctgtcaaaatcgaagcggggtatgaagcatatgcgggctcagcaaacggaccagctgccggcgaaatagccgcgcaggatgggagtaatgacaagtccgtgcggatcaagaaggaaaagaatgggcctcttgggctggaaaaggcttcgcgatatgaccatgacccggaggtgaagcaagactccgacgcagaagatggctggcggatacagaacctcgtttcgaatattgggatggtttcggtccaaggaacctcggatccgcggtatctgggttcaacgtctggaatttctttcgcccgggttgtatttgctgcggtaaagagttcagtgcctggaaactcatcggaacgtggtccatcgcgcccgaaggaacgtctaccgcatagcgccacgggaacggaagggagcaccacgcgggactcgtttttcgggctgcagacaaggccgatgatgaagtgtgcagcattcccggacagggaactggccgagcggctggacgatctcaatttggaacat

SEQ ID NO: 21192 - DNA, 850 bp, Emericella nidulans
tgtcgatatctgatgacattttatagcttcctggccccgatcgatatggaagacgttccttttatccgatgcatgggtcttaactaccgagaccacgcaaaagaagcccatattcccatttccgacgtgccagtactattcattaaaccccgaactgcgctgaacggtccccacccagccatgattaacgtgcccatgatagcccaggatggctcgagcgactatgaggccgagctgtccgtgatcctgtccaggacaggccgcgacattcccgagtgcgatgccatggattacgtgctgggctacacgtgcggcaacgatgtgagcgctcgtacgcagcagtttaagaatagccaatggagcttctccaaaggtaagcggaaaccacattggcactcccagcttgtcttgtccctcttgaggctgatttgcgattgttagggctcgatggctcgtgtccgctggggcccgttttggtggctccctctgaactcgacccgcaccagctcgatatcaaggccattcacaatggtgcggtggtgcaggactccaacacaaggtacggtccttattgtttattttttattttattttattttatttttttgcgagtcctctaacgagaagagcccgtgctgattagaatagagagatgatattcgacatccctaagataatcgcgttcctgtcacagggcactaccctagagcgcgggacggtgatcatgacggggacagggccaggaattggggcaatgcgtgatcccaaggtcgtgctgagagatggcgacgatatgcgggttcaaatccagggaatcggcacgctctgtaaccgggtttactatgaatag

SEQ ID NO: 21193 - DNA, 850 bp, Emericella nidulans
ggctgtggtcggcgagattctcggcctgctcgtcaacgggtacctggccgattactttggctaccgtcgcacaatccttggcgccttggctgtgctctctgtctttatattcctcgagttcttcgctgtgagtacgcgaatgttgctggcggcgcaggtcctctgcggtaaacatgagacgcttcgctgttgtcaatggaacgtttgttctgaccatcatcaggaatcccctggggcatcttccagactctgtccacgacatatgctgccgatgtcatcccggtcgcgctccgggcgtactttctgagcagtgtcaacatgtgctggctactcggccagctttcagccgtaggcgtcgctcggcttctggtaaccagcaaatctgaatgggcatatcgcgggccgtttgccattcagtgggtgctggctgtcctcgtttttattggtgtctattttgctcccgaatcaccatgtacaaccaccccccctcccttcctagccgcaactccagcgttttcagggccgagctgattctaaaacagggtggttgatccgcaaagaacggcctcacgaagccagaaaagtgttgcttcaactaacggagtcacggcacggcggcgtcaatgtggacggcacagtctccatgatgcagcatacaaacgaggccgagaaattcctgggcacgagccgaatggcctacctcgactgctttcgaggcatcgacctccgacgcacggaaatcacatgcatgatctggatcacgcaacaggcgtccttctccacgtccgcaacgtatgcggcgtatttctacgagcaagccggccttgcttcacaagatgctctctcactc

SEQ ID NO: 21194 - DNA, 500 bp, Emericella nidulans
gaccgggtagctccaattatgaagatccaatccgttccctgagcgggactgctgccgctgctactgccgcgtccgttgcagccttgcgaccgccgccagcagtccccggggctgtcactcgaaaagagaaccgaaaaccgcgaacaggtgcccgtaagaagcgaaagggtgcttggaaaaaattgctttgggttaaacagtcatgtacgcataatatgaattggcgtctgtcatgccgccgctcatgctgatagaggaacagatccggacaactacaccgatacggagacgtttcttgaccatttacagcgaaatcctcgagtgcgtccgtatgacttttggccgatggtggccgactcgaccgttatcgtacaacatgtctgttcggcggctattttcgtctgctgtttcgcgggtatcgtccagggccgggtaagccctgtctcggtcgtgtgctggggaagcgttgggactgctgtcggctggatactctgggactg

SEQ ID NO: 21195 - DNA, 850 bp, Emericella nidulans
catcgtttcgaaatgataccatttgttattctcggtatcgtgggcggtctctatggagcgttcctcatccgattgaacatgcgaattgctaaatggcgaaaaacgcggagtttctcccatccaataattgaggttgtggtcgtatctatcctcagcgctctggtaaactaccctaacatattcatgagagctcaaaactcggaacttgtccattcgctgttcgccgaatgcagtgcaggaactcctgaccatttcggtctttgcaagactggggcagcgtcagctggtacagtagctcttttgcttgtagctgctgtcctaggatttttcctcacgacaatcacatttgggcttgatatccctgctggtattatccttccatcattcgcaatcggtgctctgtatgggcgtgctctaggaacggctttcaaaatctggcaggactcttaccctggttttttcctcttcgggaactgtgagcctgatatcccttgcgtgactccgggactctacgcaattgtcggggcggcttcagcccttggcggcgctacaagaatgaccgtatcaattgtcgtcattatgtttgaacttacaggggcccttacgtatgtcatccccatcatgatcgcagttatgttgtccaaatggtgcggggatatatttggaaagcgcggtatctatgaatcgtggatccagctcaacgagtatcctttccttgatcaccgtgaggacaccgctcctcccgatgtacctgcccatgccgtcatgacaaaaacagatgaccttacagtccttaccgccgtcggtcatacggttggctctcttcgaaaccttcttcagactacctcat

SEQ ID NO: 21196 - DNA, 500 bp, Emericella nidulans
tgggagaaagctggaggtcgtactggctgatgaagaacacaagtaagttccagaatgtagtgattgtcactattgtcagttggcttgtgttgtttgtctttctgcccaacctgatgatcattggcaccagctttttgacccgcgacgacgccagttttgtcaaaatggtctttacgctggataactacacgcgtctgctcgatccgctctattttgaagtgctattgcactcgctgaatatggcgctgatcgccaccctcgcctgcctggtgctgggctacccgtttgcctggtttctggcgaagttgccacacaaggtgcgtccgctgctgctgtttctgctgattgttccgttctggaccaactcattaattcgtatctacgggctgaaaattttcctcagcaccaaaggctatctcaacgagtttttgctctggctgggcgttatcgacacaccaatccgtatcatgttcacgcccagtgcggtgattatcggtctg

SEQ ID NO: 21197 - DNA, 724 bp, Emericella nidulans
cgctgtcggttgcaatgtcagcatgctgctacaagatcccccggcgtttgccctgccagccccagctttttggcctggtcttcgaacacaccacgtcggggtcacctcgggacgcaccgcaacggcccatgaggccaatcggaagcgccttcatgcgtatctctctgcgcacccagacaccaacctcgccgacctcgcctacacgacgaccgcacgccggatacacaacgtccaccgtgaggcgtatgtggcctcatctactagcgaccttgtgcggcagctcgagaagccattagcagacaaggtggaatccgcgccgccacccgcagtcgtctttaccttcacaggccaaggcgcacagagcttgggcatggggggtgctctgtatagcacgtcgcccaccttccgtcgcctcttggactctctgcagtcgatctgcgaggtgcaggggctgccgacgaagttcctcaacgccatccgcggtagcggcgccgaaggcgctaccgtcaccgaagtggacatgcaggttgcgactgtcgccctcgagatcgctctcgctcggtactggcggtcgctgggcatccgaccgacggtgctgatcggccacagcctgggagagtatgcagcgctctgtgtggccggggtgctgtctgccagcgatgctctggccctggccttcagacgcgcacgctcatcttcactcagtgtccgccatccgaagcag

SEQ ID NO: 21198 - DNA, 850 bp, Emericella nidulans
caccataaccgggaccctggacgaacaatggttctacctcgtgtccgtcgccatcgaagcccgcggtggcccggcgatatcactcgtactccaagccattgctgcgcgggtcggaaacaccgccgtcgttatagaatacttgcaagctcttgcagagatgattgatgagatcggagccgtactggaaaggatgtatgagcataacgacccttacgttttctacaataagatcaggccttacttggcaggaagtaagaacatggccgatgcgggcttgccgaatggcctactctatgatgatggcaagaagccggagtaccgtcagtacggaggagggagtaatgctcagagttcgttgattcagttcctcgacattgctctaggaatcgaacatcgacccactggagagactcgccctagctcgtcagagaatggtggcgtcgctgcaggcccacgtcacggtttcatccaggagatgcgttcctacatgccaggtcctcatcggaagttcctagaacacatgggcgcggtcgccaacatccgagagtacgtggaggcccggcgctccaataaacctctcagccttgcctacgacgcatgtttgtcaatgctgcaatcaatgcggactaagcacatccaaatggtgtcgcgatacatcatcactccgtcgcaaaaggcacgcgagaagccctcgcgcccggcgagcttgaatcttgccaccgctcgccacagcgagaagcccgatggcagcaaactacggggcacaggcggcactgcattgatcccgttcctcaagcaggctcgaaacgagacgggcgagccgatgattgactcctgggcacgacgtctg

SEQ ID NO: 21199 - DNA, 580 bp, Emericella nidulans
acccaaaatacttgcggcaatcggctcggttagatcccgaaaaagagtgctgaaagtaggcaacgcgttggctcgaaggccctctcgagaatatggcgcgagcagctctgaacacccacccctcttgaactatggtggtgagaacgaacagttcgtcgagtatgacgagactgaagcgttcaagggcgctcccaagaaagcaaccaagtccaaataccctgaagatattctcacgaacaatcacaaatcagtctggggtagctggtggcacaatttccaatggggatacgcttgctgcttctcaacggtcaagaacagttattgtactggcgaggaaggaaagcgcgcattcgaggaagcgcggaacatgttgctactgccaggggatgagaccgagcagccgtcgctggcagtcgagtctgctagtcgccaggaagagccgagcgcagaaagtcacaaccagcagcgagattctaagaagcgaacgctcatggaggtccagtcagggattactgaggaggaattagagtcatataagcgcagccgacttgcagctgatgaccctatggccgcatttatt

SEQ ID NO: 21200 - DNA, 555 bp, Emericella nidulans
tgcacttgggggtgctgacggttctgttttgatatatcatattcaaggttccacgattaagaacccacccaggcgactacattggcatcgagaccctgtcacagccgttcgctggtcaaaagatggttggtcgcctcttacaattcacagaattaaaaaaagctaactgaaataaaggcaattacgtcctatcaggcggtcacgagtcagtcatggtactttggcaactagataccagccgaaagcagttcctccctcatttgtcttctccaatttgcagcatagttgtttccgaaagtggtaactcctacgttgttaggctggccgataatcgtgttgtggtcttgtcggcaagggaattgcagcccatttctacaataactagtctgcaagtcgctcgtttagcaaacacatgcaagacagttgcagctgtgcacccgcagcatccagagcaacttctaatgcctccaccagcttctcgccaactcacacaaagaaaaattacttcagcaagtgcttctgttctgcagacaaatgacactcggtcatgggtcc

SEQ ID NO: 21201 - DNA, 850 bp, Emericella nidulans
aattcggactcatcaaaggatgaatcctcgttgcggtcaccatcagcgcctgtttgatgagtatcgccctcaccagagttagtttgatgcaaattactgagacttaagtcctttgcggagaaaaatcccagtaatccaggttcaccaccgtcttcgtcatccgactcagcctcgctatatccatcgtcatcgctgtcacccatgtcatcgtccatatcggtagattcatcactatcatctatgagcactgggtcaacttcgtcgagttctacttgacccgaagaatctggcggcggagatcggttgacaccgccagaagtgtcgccaggggtattgtcagcagcgatgtcgtcactgtcctcagagtcctcatcggaatatggagattggtctggatgggggttggtatctggtaaatttgcatatttcaatcgcagctcctctgcagtgaggcccacatcatcgtccctgtcatccccgtcttcctcttcggtttccgtcgacatattactctcaccctcctcgtcatcattctcagacccattatcagtctcgacttcttcatcatcagttgtagtctccggggcatcgctccctgtttcgcccaaaatctccagccgtcgcttttcaaacaacatggtggactgcttaatcgcccgatccaaagctcgttgatctttcgctttctgctcctcttcccaccgtgcgagtcgtacccggtcgatctctgctcgggccagctcgaacattttcttgaggtccttggccagctgcagaaacatcccgcgcatttcttcatgttgttccctaagaatatcctccgggtctttattgcgtaaaaccataccgg

SEQ ID NO: 21202 - DNA, 571 bp, Emericella nidulans
caactttattcgcgccaaaaccagcgagccggaccccacagacgtcgcaggtaacttggagctcctgctccagaacaaggctggcgaatgggtcggccccgagacacaatcgccctggcttcgaccatccccgacaggtttccgcaagctccttaagtggctcagcgaccgctataaccgccctaagatatacgtcaccgagaacgggaccagtctgaagggtgagaacgacttgccgcttgagcagctgctgaaggacgatttccgcgtaaagtactttgaggactatattcatgctatggctgaggcgtacacctacgacaatgttaatgttagggcttacatggcttggagcttgatggagtgagttcctggcctcgccaccgacattcatttcgttgaactatcgaaaaatgctgactccctgctatctagcaactttgaatgggccgaaggttacgagacccgcttcggcgtcacgtacgtcgactacgaaaataaccagaagagatatcccaaggcaagcgcgaaggccatgtcagagatctttgcgaagtatatccagaatgag

SEQ ID NO: 21203 - DNA, 850 bp, Emericella nidulans
gctctattcgtcgtaggacccatcttcgaccgcgtcggccccaggatctgcctgctgtttggaggatggacataccccctgtacgctggaagtctcttgtgcttcaaccggaccggaaacggggcctttgttatcgcctctggcgcgattctcggtattggcgcttcgtttctctgggtctcccagggcgctataatgaccacctacgtccgtgaatcccagaagggtcgcgccattgccgcgttctggatcatcttcaacctcggtggcggcgttggatcgctcgccagctttgggctcaactaccactcgaccagtgggactgtctcagacggaacatatatcgccctgttgatcctcatggccgtgggctggcttctgggcatgctcatatgtcctccgtccgccgtgcgccttgaagagcttcagcaatcgtcccggactcagactgctgtggtcgagactgagaagcccaattggaaaagcactctgcgcctggctgcacgcacgatccttgactggcgtgttctctgcatgctccctctcttcttctgtgccaatgtcttctactcctatcagcagaacatcgtgaacgggatgaccttcaacatccgcacgcgctccctcaacagcgccctctactggctcgcccagatgctcggcggccttgtcatgggtctcatcctcgacattcccgctctaacggcccggccgcgcgcgagcgggatggctcttcctcgccgtcacggggctggccatctggggcggcggtacgcgttcgagaaatggtcgagtgaccggtcgcgcacggtctgaagcaggatatcgactacacgcagggcactgtctc

SEQ ID NO: 21204 - DNA, 754 bp, Emericella nidulans; identical to SEQ ID NO: 12552

SEQ ID NO: 21205 - DNA, 850 bp, Emericella nidulans
acatcaagatattgtggagctgcttctggaccatggagcagatgtcaacattcagggtggcaattatggaacagctctacaggctgcttcttttagtggagatccagcaattatgaagctgcttctagaccggggagctgaaatcaatatccagggtggccattatgggactgccctccaggctgcggctgcttcctttataggacaccaggagattgtgaagctgcttctagaccaaggagctgaaacaatagccaggggggttattatggaaccgccctccaggctgctgcatataaaggatacgaggagatcgtgaagctgcttcttgaccagggagctgaaatcaatagccaaggcggctattatggaactgctctccaggcttctgcctttagtggagatcaagcgattgtgaagctgcttctggaccatggagcagatatcaacatccagggtggcaattatggaacagctctacaggctgcttcctttagtggagatcaaacaattgtgaagctgcttctagaccgacgagcggaaatcaatagccagggtggctattatggaaatgctcttcaggctgcggctgcttcatttataggacaccaggagattgtgaagctacttctagaccggggagctgaaatcaatagccgagggggctattatggaaccgccctccaggctgcggcatatgaaggataccaggagattgtgaagctgcttcttgaccagggagctgaaatcaatatccagggtggtcattatgggactgccctccaggctgcggctgcttcctttataggacacaaggagatcctaagcttgggtctccctatagtagtgt

SEQ ID NO: 21206 - DNA, 491 bp, Emericella nidulans
cgtcagccccctcagctaactgcgcagtcgcgaatgagcgtagagtcagatagatctgaggaatcttttgacgcggtcgacgccaccgattctcaattgctcactatcaaaggcgacagcgacgaggatacagtagcagatgcccaagcagatgtcgttgctgacgatgcgccgtccgatagcgacgatgattctacggaagccgggggcacggtgctgcgcacgaccaacactctccattattcccagcgcgaccaaaaacccttactccgctgccactcgacacggttcctcggcggaataacatccctgcaccgacagtgatgccgcctagcttgattgggtttcttcgcaagaacgtcggcaaagacctctcgcaaatttcaatgcccgtatcttccaacgagcctctttccttacttcaacgcgccgccgagatcatggaatactcggccctcctcgacaaggccgcacaaatcagcgatgcaaac

SEQ ID NO: 21207 - DNA, 850 bp, Emericella nidulans
atcttcctcctttcagatcaaccgctcacagaatttaggcacgagggaaagaggccctccgcggtccagcataccatcaacgcctcctcccagcatatactcacctgaaagttcggtgagtcacttcgactgtgttgtgtattatctgggtgatcctgacggaacaagtcaatctggccagggaaccgagggtgaagcagcgcgtcgcgacctgcgcgcggagctgctccaggcagaggccgctcactttgccaagaagaatggagctcccgttcctgaagcatctgccgaaagcactcccaagcgtcagcttgaaggcgcccctgcgaatggaggagatggagaattagaagaagacccggaagcaaagcggcggcggatattagaggaaacgagagagatagatgcagattcggaagcgtcggaagaagatagcagcgaggacgagaggttagtggtatggtgccagtgctctgttgcgagctaacaagcccagtgatgacgaggacgaggccgccgagctcatgcgagagcttgagaaaatcaaaaaggaacgcttagctcagaaagaaaaagaggtatgtcaagagccatatcatgcgtaagcaaatgatgcttacttggtcaggaacgcgagcgcgccgccaaggaggaggaacaacgggaggtggacattgcgcgaggcaatccgctactcaacccttcagactttaacataaagcgacgatgggatgacgacgtcgtttttaagaaccaagctcgcggaacggaggacaagaggggaaaggagtttgtcaacgacctgctacggtctgactttcacaagaagtttatgtcgaagtatgtgcga

SEQ ID NO: 21208 - DNA, 850 bp, Emericella nidulans
caggatgcggagaaattgttgaatggcttggacgcggggaagagactgcaggagcagctcgagggcgcgttttcgcacccgtatagcccgaactggcaggatttcgagtacgcagaaagagtgcgacgagtttgacgagtatcttggtggcgcggacaagttggccgaggcgactgtaagcaaggagcatcatgtaagctaccatggccccatatggctaggatgtcgttgctgggtcagtgctgacggtgtgtagaggttcactggtcctcagattctgagattccagaagaaatacccggatgtgtacaagaaaacgtcgaggatctccctagtgtcgtctttcttggcctcgttgttccttggccatatcgcgcctcttgatatttccgacgtctgcggtatgaacctgtggaatatccacaaaggcgcctacgatgaggaccttctaaagctttgcgcgggcccgcatggcgtcgaggacctcaagcgcaagctcggcgacgtccctgaagacggaggcatcgacctgggcaaggtgcaccgctactacgtcgaccgctacgggttcagtccggagtgcacagtcattccatccacaggcgacaacccagccacgatcctcgccctgcctttacgaccatccgacgcaatggtctcactaggaacatcaaccaccttcctcatgtcgaccccaagctacaaagctgatcctgcaacccatttcttcaaccacccgactaccccgggactttacatgtttatgctgtgctacaagaacggcgggcttgcgcgcgaaaagatccgcgacgcaattaacgatgcaaagaacgagaagaacccgtcaaac

SEQ ID NO: 21209 - DNA, 850 bp, Emericella nidulans
cgatggttttactatatcaaccccttcgggcttggatttgctagcttgatggtcaacgaatttaaaagcctcaatatgacctgtaccagcgagtccctaatcccaaatggtgatggatacaccgatatgaaccaccaagtgtgtacgcttgctggaggtgaagcaggttccccaataattcctggtcagagctatttatcgaccacattcaactataacagagaggatctctggaggaactttggcatcatggtggccctcatcattgctttcttagggatgaatctgtacttcggtgaagttgttaggtttaacgctggcggcaagaccgtcaccttctatcagaaggaaaatgctgggcggaagaaactgaacaaagcactggacgaaaagcgcgctgctcgacagtcgaacgaccttggtggccctggagccgatatattgctgacatcgaagccagtcctaacatgggaagatgtatgctatgacgttcctgtgccgtccggcactcgacgactgctgcacaacatctacggttacgtacagcctggtaaactgacggccttgatgggcgcatccggagcggggaagacgaccctgcttgacgttctcgccgcgcgaaagaacattggcgtaatttctggcgacattttggtagatggtgccaagcatggtacatcgttccaacgaggcacttcctatgcagagcaaatggatgtccatgaacctatgcagacggtgcgcgaggcactgcgtttctcagccgaccttcgtcaatcgtatgacgtcccgcagtcggagaaatatgcttatgtgaagagtttcctaatagtgagtcgtattatcgcca

SEQ ID NO: 21210 - DNA, 850 bp, Emericella nidulans
gcaaggcgtcgtccaaacacaagccatctttgctggacactcgctgggagagtatagcagcctcggtgcctgtacaactatcatgccttttgagtcgcttttatcgttgatcctctatagagggctcaaaatgcagaataccctgccgcgcaacgctaacgggcgtactgactatggcatggtcgctgccgatccatcgcgaatccgatcaggtatctcttttccctgatcatgcgcgacattctgagttaacatttcgtagacttcaccgaagaccgactgattgagctagtgcgacttgtcagtcaggcaactggcgtgttgctggaggtggtcaactacaacgtgcattcgcggcagtacgtatgtgccggccatgtatgttctcgctcaaactccctgtcatactattttctgttttcctatcaggcctaatagcgaacaggtccgctctctctgggtactcagccacgcgtgcgacgatctatcccggtcgacatcgccaaatagcccacaaaccatgagcgaatgcattgctcaccatatccccagcagctgctctgtcacgaatgaaactgaactatcccgtggccgtgcaaccattccacttgccggggttgatattccgttccactcgcagatgctacggggacatattgatggctacagacaatatctgaggcaccatctgcgggtgtctgatatcaagccggaagagctcgttggacggtggatccccaatgtaacagggaagccctttgcgttggacgcaccatatattcgattggtacaaggggtaacgcagagccggccgttactagagctgttacggcgggttgaagagaatagg

SEQ ID NO: 21211 - DNA, 666 bp, Emericella nidulans
ggatctcagcgctttttctggcgtggatctcccgctctgggatcttaaaggtgagagtgtttgagacgaattttatttgagccatggtcggtctgactatcaatagcaagacgactcggtctcccaatatatcagcttctcggcggcaaagtgagggataagctcaaagtgtacgcttggattggtggtgaccgtccaggggatgttgaggcacaagcgtatgaggcactgttgccatttgatgtacggattatgatgttctaacaccttacagccgggcaagaatatcacagggctttaaagctgtgaagatgaacgccccgaagatcttgtcgtggcttgactcaccccatgctttggacctttcggttgagcgattgaagaccgttcaagtccttgggggattgcgccccggtgttgacttccatggcagagtccacaaggcaatggcgcaacagctcgcatacaagcttgcaccgcacgagcccttattcatcgaagagccgctcctgtctgagcatccggaatctgtcgcagcattgtccaaacttgtcccgatccctatcgccctctggagaacggctacatagccgctgggatacaagccgttccttgagtccgcctcagtcagcatcctgccaaccagagatttccagtagcggtcct

SEQ ID NO: 21212 - DNA, 850 bp, Emericella nidulans
ccgaaaaagcgtatcgagtgaatcgtttctgcggacaagccaacttggggactcggcagttgacgaggatgcgtcccagccgaaacggaacaagacacagctgtggaacgaggttaagattacctgtacgttcttcacccctctctgttgcggcaccagtggtgatgatgatgatgatgatgatgatgatgatggcatttttgtctcagagacacagcggcagtcaatggatatcttgtgatactgacttcgtttagccattactcgggcgtttaccctgatatacactctatccctattgacaatcttcacgcgcgtccaactaaacctcctcggccgccggaattatctctcgagcgtgatttctttagccacgcctgcggactcctcgagaatcactttagaggatcatgatgatgatttgacgcaaacgctggggaacgacttcgagaccaaccgacggtatcttgcctttagctggtggctgcttcatcgtggttggaagcaattaatggaggaggttaaggccgcggtagtggaagtgttcggcccactgaacccaagggatgatatttcctttgacaagctatcggaattgacccttcaggtgcggaaaaagatcgaaggtgctacggaggaagagaggaagtgcgtcacctttagaccctatcacttgagcgaaagaagacgttttgctgacagtatttaaagacgtcgaaagtggctgccctacttgcttccgccgagagaagacgaggatcacctgctggaggagtccggcgtcctcggggtcacagaaccctcaaccccccaaacagcagcgacattgcgccatcttctcgacgagact

SEQ ID NO: 21213 - DNA, 290 bp, Emericella nidulans
taccttgactgatgtgatcccccaaggttgtcggattgtgttgcctttgctaacagtgacgcatgttttgtaacctgaccatctctgacgtctacatttccaatatgtacggaacgacatcgtcagcgcgggatccgaacatcggctcaattgtttgctcgagtccggatgtttgctccaatatctatgttgagaatattgatgttgtcagcccgagcggtacaaatgactttatttgcacgaatgtgagtcaacaattcacctcgcccgcctgtgtctgccgaggagga

SEQ ID NO: 21214 - DNA, 502 bp, Emericella nidulans
gtcaacaagaagctcgatgttccgctgaactcgatgatgctgggtatggtcattgaactccttatcggtttgatctactttggctcatcggccgcctacaacgcccttctctggcgtcggtgtcattcttctcactctcagctatgcctgcccgatcgcggtctcgctgctcctccgtcgccgcgaggatatcaagcacggtagcttcgatctcggagcgctagggttattctgtaatattgtagctctaggtacgttcaccccgccccgttaactcctcatttattgatttcatgcagcatggaccgttctcgtcatccccctcttcaatttccccagctacatgagcgttactcttgaaactatgaactacgcctgcgtcgtgttcgttggcatcatcgtcatctctgccgtctggtactggatctggggatacaagaactacgctggtccgcctaccgatgccattgatccggaggctgatcatcccgctgggagtagc

SEQ ID NO: 21215 - DNA, 850 bp, Emericella nidulans
gtctggcggctctagccatcgcaacagtaagcgcgctcgatcagacttggagagaacggcatttgctaacctaggcagtggattaacaactacaacttcgtcgtcgacgtcaagtatgcaatgctctccatcttccgcaatctgtgctttggctaaccagcgcaggtctcaaagccttcaactcgtcgctagcatcaagtctagtcagatcaccagcaatttggatctactcgacacgacgtccaagacaatcatcactcgcattctcatacaatccgccttacagcgctattatgctggtaatacaaccgaggaaaatttcgcctcgtcgatcaccgacgtgcaatcagccctaggtagtcgcgggtatctcagcctctaccaagccagcatctatgcgagaaatgtcgagaacggagaatcaaaagcaaggcgattactcaacgtgaccagcgacgaggttcctgaaatcaggcttccctatgatcatccgaatggcacagcggtgatgcttggggatgaaggattgggatatccaccctcactctatccgaatctgacagaagatgcgaccacgaacaagttatacgcttttgatggtgtgccgataaccacgaaccagccgttacttctgggaccgctcgccacgaacgattctttctcgctgatttccttgtcgctgccgattatcaacaatacttcagctgcggatattctgggctatattacgtatgacgctgcttcttccaggttgactctgctaactcttcagtgtcgttgcgagcgccgcgaatctgcaggatgcgatgagctctcggcaagggcttggaagctccggtcaagtcctcct

SEQ ID NO: 21216 - DNA, 738 bp, Emericella nidulans
atggagccaatcaccattcccaccgaccgcgacggtgtcgcctacctttacggtcacccactgcgcaactcgctctctcctcctcttcatcaaacagtctacaacgcgcttggcctgaactggactcagatccctctgtctacagccactggtacatcgttcacgagatcaccggaaatatccaccttcctctcctccgtccgctccaatcccaaatttgtcgggtcgtcagttacaatgccctggaaggtcgcgatcatgccacacctcgatgacttgaccgaggacgcgcggcaagccggcgcttgcaacacaatatacttgcgcaaggaagacgatgggaagacacagtatgttggcacaaatactgattgtattgggatccgggaagctctgctacaggggtcaccgaacggtgcggaacatttcaaaggaaagcctgcgcttatcgttggtggtgggggcactgcgcgaacagcgatctacggtctgagaaagtggctgggcgttagcaagatctacatcgtcacccggaatgcgaagaaggtggaggcgattcttacgaaggataagcagcgaaaccagtcgccgcaggttgcgttggtccccgtctcagatcggtctgagacgacgacgctagaggcacccgttgctgttgttagcgggatccccaattacccgccgcagacagaagaggagatcctaagcttgggtctccctataggagtcgtgtgatcg

SEQ ID NO: 21217 - DNA, 379 bp, Emericella nidulans
cactgtatccagaagttctatcggggacgggtctgaagtgggcagacatgaggttgaggatgtagagggaaaggagctgaaggatattgtcccgctgtgtgataccgttatctctggtgtccctggggacaagtacaagttcgacactagcttgctgcgagacggtgccgtgtgtatcaatttttcaagcgagaaggtatgtttatctcttcacggccactagctggcatcttgcttatacaggagtaaacagaactttggtcctgaagttaagcaaaaagcctccatcttcgtgccctcaatcgggaaggtgactatcgtcgttttgctccggaacttgctggtaagtcctgagactttattacaaatgcgctcaaaa

SEQ ID NO: 21218 - DNA, 322 bp, Emericella nidulans
gagccaaaaaaatatgaagagcgtgcactcgcacaacacagaaagcacacgggcgagagaatcccaaagcccttacaagcatggaaggcctgctagagcataccgaaatctagagcaatgggaagaagccgaagcattagtggcgcaatactgaaattttcacaagagggtgtcaggaccgaaagatccagaaactctaagtacttcagaaaaacttgctcaggtatatcagaagttggaaaagtggaaggaagccgaagcaatacaagtgccattattagagacttacagatggtgtcagacccgaagatgagggaaccat

SEQ ID NO: 21219 - DNA, 850 bp, Emericella nidulans
cggcgagacaaccagtccgtctggaggaagggtatacaatgcgttccacctcccttcttccaaatcctcaatactgacagctctctttcaatgtgcagcaagaatggaacaacacaacccttcgccccgtaacaatcaaacaaatcctcgacgcaacgcagccctacccggaagcaaacttcacaatcgacggacaagacgtatccagcatcgtcttcataggccaagtccgcaacatcagcacacaagccacaaatgtcacatacaaacttgacgacggcacgggcgaggttgaagcgaagcagtggataaatccgtccgaggcgatggacacgaccgaagatttcggcaaggaagggaaggacctgaatggtgtggagatcaacggctatgcgaaggtattcgggaagctgaagagtttatttggagaccgcaaggtcgttaacacgcattgcgtgcggccgttaacggatatcaatgaactgcatgttcactttttggaggccgccgcggtgcacttgtttcatactagaggcgctccagggcccgctgcaggtgctaccgggaaaatcgatggtggtgatgcggcgatgggagggcttgatggggccggggttggtggcggtggtgggttcccggcgaatatgtctgcaactgcaaggagggtttataacctgctcaggacggagccgcagaataatgagggcctgcatgcgcaattcattgcggcgaagctgggccttcctccgcaagacgttgtgcgtgcaggtgatgagctgatcaatgctggcatggtgttctcgaccgtggacgatcagacctgggttattctggagtattaattgatgag

SEQ ID NO: 21220 - DNA, 850 bp, Emericella nidulans
ccctcaacgtgctgggcttcgagtacatgtcgcccgtgcagcagcgagtcctcacagagcttcccacatggcgcaggactgtctcgtgcaggcaaaaacaggcaccggtaaaactgtggcttttttgctgcctgctttgcattgcttaatacaaggccagagccaggtcaggagagggcaagtggcgatcctcatcatcacgccaaccagagagctcgcacagcagatcgccaagtcatgcgatgagcttacctcacagctttcaagaccgctggaatgtcatattgctgttggtgggaccgcgcgagcgtccgcgcactcgcggttcatgaacggggacccgtccattcttgtagctacacctgggcggctgaaggattacctctctgagtctgagactgcagagaagctcaaggatatccagaccctcgttctggatgaagcggacacgatgctcgagaccgggttcctggcggacgtcaagcagatcctcaagctgatcccgtcaaagagcaccggttggcaaggtatgtgcttctcagccactctaccaccaaaggtcaaggatgtggtcagcgttgtcttgaatccagggtacaccagcatttcgacagtggacaagaacgaaccgcccacccacgagcgcgtgcctcagtactatgtccttatgccctccgtagccgaaacattcacgaccctctcctccctcttggcccacgagtccaagaagaataccaagatcatcgtcttcggcgtcacagccaacatggtcgagctttctcacagcgccttcgccaacggcctcacgccgcttaaggctctttgagatcactcccgcctctcgcagtct

SEQ ID NO: 21221 - DNA, 550 bp, Emericella nidulans
catggaacacaccgcaactcacgcggaggcacatcgagcattatcggcgacgccgtcgtccgcggtgaccttttccgctcgtcatcctcgcaatcgcagtcgcaatcgcagtcacagtcacaatctggtagcggtgccggcaacaacaacatcgccatcagtatcggccgatacacgttcatctcacggagcgcaatcctccgcccgccctctcgtctctcgcgtggtgtccacacgtacacaacgctgcatatcgggtctcatgtttttgtaggggagcggagtatcgtcgaggccgcgaaggtggaagataatgtgacgattgggaaggattgcgtgattgggtcgatggcgattctgaaggaaaggtgtcaggtactagacgggtgcgttgtgccggggggcatggtggtgccgagtcattgtgtggttggtgggcagccggcgcggattgtgggagatacgccaattgcgtacggggttgaggggctggaggggggattgagtcgggagagatatcgaagtatccgataggtactgtacttggagt

SEQ ID NO: 21222 - DNA, 850 bp, Emericella nidulans
cgatcaatcaatatctcaccatggttcacaagcaaagcgtcgacatgataccgttcgagcacacaggcttgcagaacattcgccgcttcgttggccagatcgatcttccacatcttttcgccgtgcaaccagcgcaagaacgtgagagttctgtacatggtaagctcctagcgtacgagcatggtcatgttccagagctcaacctcgacggttatgcccttaccgtcgagtgcgttactagtgatatatccgatatcccagttacgattgaggcgcactttgatgaaagaatgatttcagcttcccagacgaatgatctgctcagccgctttagtcacattgtcactcagcttggtactaacggcagagatcaaacgcaactaaagtattttgatttattgagcaaggaccaggccagaccactttttcagtttaaacaaggtattcccccggtcaagcaagctttggttcatgactagttttttaacatgttttaacccacccctatgccccttcggtattgtgctgggatgggttatctttccccggaagaggttatccctcttacaaacaagctggtcttatcccttattccgttggggtaataccctagacctagggtgctctttttttaaaattaaaaaggctttggttcaaacattgtttttttaaggttcctcttccttatccctttatgctatccctttctgttatcttaccatctttcatcttgtatatttaatgttcttttatgttttttctcatctctatattctcttctcttttctatttctctcctttattatttcactttctatctctctctcttcttcttattttccctatacta

SEQ ID NO: 21223 - DNA, 850 bp, Emericella nidulans
tttgttcccgagtccattactgatactgtgataggcccaagcgcaagcaaagccggatgcctccgcaatttatgtgccaggaagtcagacggcaaaggcgattgaggaagcaattgaagccgagatccctcttgttgttgcagtggcagagcacgtcccgctccatgatattcttagggtacgtacggtttctccatgaaataggttgggtatgtgcttacagttgacaggtccactccatactcaaaacccagtccaaaaccagactcgtcggggctaattgtcccgggataatctctgcgattgggaaatgccgcatcggattccaaccgctgccctgctttgccccaggtaagataggtatagtcgcgaagtcaggtactttgagttacgagactgttgcctctactactcgtgcggggctgggtcagagcctctgtatcagtatgggtggggacccgctcgcggggacgaactttgtcgatgctttaaagatctttgaaaacgaccctgatacagaaggaattatcttggttggtgagattgggggaacggccgaaatggatgcggcggagtggattagagattaccgtcgcaggactacgagccccaagtatgtgcttcgctctgctacactccacaggactgacaggaaagaccgattatggctctagttggcggccgacaagcccctccgggacgaataatgggccacgcaggagcctggacggcacctggtgagcccgggccagaggagaagtatagagcccttgagcgcgctggcgcggtcatggtcaaccatccagagaaatttgggaaggggatgaaggcccttctcacgaacaggcgc

SEQ ID NO: 21224 - DNA, 539 bp, Emericella nidulans
gtttttgatgaaatgaaagagaggaatgttgttacttggactacattgataagcgggtatgctcggaattcgatgaatgatgaagttttgacattgtttatgagaatgcagaacgaagggactcagccgaactcatttacttttgcagctgctcttggagttttggctgaagaaggagtgggtgggaggggacttcaggtacatacagttgttgtaaagaacggtttagataaaacgattccggtttctaattctctgattaatctgtatctcaagtgtgggaatgttaggaaagctagaattttgtttgataaaacagaagtaaagagtgtggttacttggaatagtatgatttcgggatatgcagcgaacgggcttgatttagaagcgttgggaatgttttactctatgaggcttaattatgtgcggttatctgaatcgagctttgcttccgttatcaagctctgcgctaacctcaaagaactgaggtttacagaacagctccattgcagtgttgtaaaatacggggggatcctcta

SEQ ID NO: 21225 - DNA, 657 bp, Emericella nidulans
gtcaccgggtacgttgcatattttaaagcaacaccaataattattgacccttccatagtggaaccggctacattggctccttcactaccctcgccctgctcgaggccgggtacaaggttgtggtcgccgataacctgtacaattcctccgccgaggcccttaaccgcatcgagttgatctcgggcaagaaggccgagttcgcacagctcgatgtcactgacgaagcagccttcgacaaggtgttcgaagctcaccctgacatcgacagtgttatccactttgcggcgttgaaggtacgtcgctgcgtctatatgcaatgctatttggtgccaatgcttagttgtaccctctcaaggccgtcggtgaatccggcgagaagcccctcgactactaccacgtcaatgtttacggcacaatctgcctcttgcgctcaatggtccgccacaacgtcacgaacattgtcttctcctcctccgccaccgtttacggcgatgccactcgctttcccgacatgatccccatccccgagcactgcccgctcggcccgacaaacccctacggaaacaccaagttcgccattgagctggccatcacggacgttatcaacgcccagcgcaacaacgcgaagaagccggtaacgaaactgaggctgctaag

SEQ ID NO: 21226 - DNA, 605 bp, Emericella nidulans
gaacagccgcgacttcgtttctcgcattgaaaaaatcaatcatacaacagaggtgataacagcaatgctccaagaatctccaattggtagggtcccttctatacaacagtcaatccggttctaaccattatatagttaagaatgtgtattaccctaagttcagtcctacactgcctttctacgaggcatttcgcactccaaatggaggctatggtggtttgttctctgtcactttccactccacagcagaggcgattgccttcttcgacaacctagaagtccacaagggacccagtcttgggactaacttcacgctgaggtagcgtttgcaggacaggtgctgtcaatgtttcagacgatttgctaataactgtctagttctccgtatacgctacttgctcactatagtgagcttgactgggtatgtattcatcttccatcacgttggcttagttctggtttgtctaactctacttgctcaggcaagctcatttggcgtagagtttgacttggtgcggataagcgtcggtttggaagatgtcccattgcttcgcgctaaagtgcaacaagcacttgatgcagtcgctaagatatctaaatagaag

SEQ ID NO: 21227 - DNA, 850 bp, Emericella nidulans
tgtgggactacatcaaagatgtagcgcaaggtcgcaggtcgactgagaaagccatgtcgaagcctactaaccaagggctctccagtctagttggcctcattgaatactctagggagaagctccgccagtgcgtcgacagatcggcacctcgaaggctgctggagatcgtgatgaaaagactctcttttcgcgaattcattacggcgacttatgggtcaaatgatgaaaacagatgggcaaacgtggaggaactaatgagccaggcagacgatgcaactgcggccgatgaaagtgaacaggatgagaatcttcctgaaattgctggcctaactcagcaagagtcgcatcctggcgaagaagccttgtccagattcctagccaatgtggctttatcaaccgaggtccagccgaaagaagagactgaaggggaagaccaggcgcaagagaaagttaccatctcgacaatccatgcagcaaaaggcctagagtggcccgtggtgtttattcccgcagcttacgagggtattatcccgcactcacgagcagaagactccgacgaagagagacggctgctttatgtggctatgactagagcgcaggccttgctatacctgagttatccgcttcggcaggcccgagaaaacgcagagactaatgtgacgtcgtttcttccgcaagaactaatcacttcgcgcctgcgcccggttggaccgaaactagacgagaaggttgtttatgggattgcagatatactgcgtcgagaacgaccgtctgcagaaaccatgttggaaggacttgattctctccattctgtctacgacgaccaatgaactgaggacggacgagagtc

SEQ ID NO: 21228 - DNA, 850 bp, Emericella nidulans
cgaccctaccattacgtcgttatattttgacaaccctcaattcgatctctacacgcaaaaagttgcccgcagccctgaagctggttcgctacgactacgatggaccggaaacctcatcgagaagccgccgatttacttggagaagaagattgtgacgagtgacaacttcagcaacgaggtgaaggttcagttgaagcagaagcatgtcaaggagtttcttgatggtgaatatcatttagaaaagcaggttcatcggatggaagatatgggaaatggagagatggaacatgcagaatctctaaaacgggatgtggaagcattgcaatccttcatcaaggaaaacaacctccagcctatgcttcgcgccaactacacccgaacagctttccaaatcccgggcgacgataggattcgtatctcacttgacacgaatttggctctcattagagaagactctctcgacaaggagcgcccctgccgtgatgagaatgaatggcaccgtaccgacatagataatgctgccatggaatatccctttcccgccattaggaatggtgagatagtgcgatttccttacggcctgttggagataaagctgcgtggaagtgccgcgcataattcggaatgggtgaaggacttgatggtgtcacatcttgtcaaggaagccccgcggttctcgaaatttgtccatggtgtcgcgcagcttttcgaagaccatgtgaatagcttccctttctggctctctgaacttgacaatgacattcgacgtgaccctgaaaccgcattccatgaagagcaggaacgccaggcaaagaacgccgaggaagacttggcggttggaagcttcctc

SEQ ID NO: 21229 - DNA, 803 bp, Emericella nidulans
  unsure (1)..(803): unsure at all n locations
aggatgtcctccgaatccgatacacaactagaaacaaccgcctcctccactctctacctgctagagtcccgactcanccgcctcacatacctcctaacaggagacacagcatggaccggcacgcccaaccccccgccgaaaccgtcgtcctatgatgagacagtttcgaggcgcctacagagattagaaagtgagcttgagaatctagcagggaaggttggtgtcgttagggatattctggggttgtgtatgttcctctttcggtttccttcgattgattaaggttggcaacgtgatgaaagctaacgaaggattgaatcgaattgaatgggttagatgaacgctttccagaccttttcagatcaacatcaactttgtcgctacccacctccacaaccgatcagacagacaccccggaaacaacccagccctcagacccggaaacagaaccatcgccccccctccagattatgcttagcataatcctctcctacgcgtctctgatttctgaaacagcctcaaggctaacaagtctaaccgacacgcccattccggacgcgtccttatccgcgagcttgatcgccctgcaaccgcggatgaatcagttagcagcgaaacaagacgagcagagtagggagattgctgaattgcgagtgcgaaccgcgaaggttttgcagagatattatgaggtcagtttgcttgggggtggtgaggtctggggggagtgggaggggcggatggagagggtagaacgggaggtgaagagggtggaggttgcaaggggacgagagggaatctaagtc

SEQ ID NO: 21230 - DNA, 624 bp, Emericella nidulans
gccagacttcattcttcactgtgcgtggttttaccgatcagccgtttgacccagttgccgtccacagggtggaacacatatctctagtgccaatgcatgtatcgctagttgataggtgtattccatccgtccggtcgagggacatcgacattctacgttaagcctcttttaatacacataacacgtgtacaagccggtgtatatactgcatatgctcagcctgcgtagcagcatagtgtgcaatatggtagtgtgggataccgcacttggctcgcgaatgcaagttgcgtcagagtgtaggcgtcagccaggtcatcatgttcccgtaacaatcatatatacgctgtttatgaacctacacgtttcccagcgtcccatggtgggattggtcattctcgcttggttaatgtatctagacccttgtcatatgttcaagtcgtctgaccagtaatttgcccaggtgcataattatattcgctatgtgcagtattatgcatatgagcgacacggtggatgtctacatgttatgctaggctgacagtacaatgataggtcacctgggcgcggccagtatcatcaatgggtaaatgagcgtagagcaatgaggccatactagcatcattt

SEQ ID NO: 21231 - DNA, 850 bp, Emericella nidulans
aagcgcaatgcctttacgatggccatggccgaggacctagagagggtcttcggcctgttcgaccgcgacgagcgcgtgagggttgtcgttttaacgggcgctggcaatacgttctgcgctggcgcggatctggagattgggtttaaggcattggaggagaggtcgagggagcatagggacaggttggtcctcgcccatgaaaggattgtagtaaggtaactgcctcggactgacttggtaattatacagtggtggtcgcgtagcaatcgcaatccacagatgtcgtaagcccactatcgctgctatgcaaggctcagctgttggagttggtatgaccatggttctcccagctgcaatcaggtacacaccctgtcacttactttaccctacagtcgcaactccctacggctaaaaggaacctaacgttgaacaggatcgcacacgaatcaagcaagtacggcttcgtctttgctcgccgtggcattactatggagtcttgctcctcgtattttctcccccggctaatcggccactcgcgtgccaactacctcgtctcaacgggcgccgtttacccgtccacatctcctcatttcgggggcctctttgcagagacgatgccggagcagagtcaggtccttccgcgcgctttggccctcgctactgagatcgcagaaaatgtgagtcctcaggcagcagcgctaaatcgggagcttatgtggaggggacctgagagtgcggaggaggctcatttgttggagtccgaggttatctatcatcggtttacgtcgccgtatgtttgcctttcgtcattaactgcttttgtgtatgtttgaatatggctgacaattca

SEQ ID NO: 21232 - DNA, 850 bp, Emericella nidulans
tcttcgctttacattcccaagatttcaggacaccacactgccaagcagtatgatgctgagtttgagaaacgtgtgatacgtaagatcgacttttggctcgtgggcttctactccttcgtctacattttccgggtgatcgactcaggtactcaccgtttttaagctatttgcccatacaagattattaataacgtctaggtaactacgcaaatgcagcgatcatcaacctcgaagaaggcaacggcatcaaggctgagctcgacttttctccctcgcagtggtcctggtcccagtctatctttagctatagttacatgctgttcgaaccgaccaacaccattctcttaaagaagatcacaccctcaaagtggatgtttattataattctgacctggggaatctgcgccacgtcttcaggcgcagcgcataatttcccagggatgatggtggtgagatttgctataggtctggcagaggctggtttttctaccgtaaaactgcagttacagagcttttctaacaaaaataggcttctacccatcggttctatatcacatggcattttggtataagccatccgagatgccatggcgcgtcgcgttcttctactctcttgggcaattgagcagtgcgttgagtggtttgctagcgtacgcgatcagctttatgaatcgccttggcgggctatctggatggcggtggttggttatccttgaagggatccctgcaatcattctggccttcgtagcactctgggctccagactaccctgagacagcaaagatgctgacacctgaagagagggaatgggtggccaatcgactgttgaacacttctccaaggggaaaag

SEQ ID NO: 21233 - DNA, 545 bp, Emericella nidulans
aggatgaattcacatggagaagatcgtgttgccattattgctggagccacagtgagtacaccaagagcctggggcttgtcgagctcccactaacctgttcgtatttgtagtctggcattggagccgatcttgcccgggatctagccgcgcgtggatggaagattgcctgtataggccgacatcgtgaacctgggcagactcttctgcagacgatccctgacggtaatgcccggtttttccctgcggacgtatccaagtacgatgagtacgcgaatgtcttccgccaagttcgcaagctctggggccgtatcgatgcactatgcgccaatgcgggcattgtcgatacttcgtccgtctatatatacgactggaagaacaggagcgttgatgacattcctccggcccccgagttggatgtcgtggacatcaactataagggagtaatctacggcactcaattggcgactcacttcatgagacataatcctcgacctggcggtcgcattgtggtcactggcagtattggagcggtcttcccgcataga

SEQ ID NO: 21234 - DNA, 850 bp, Emericella nidulans
ggcggcaatattcatttcggccggcttcgatgctagcgaatgggaaggcatgggcatgcaaaggcacaaggtcaatgttcctaccgaattttacgccagattcacagccgatgttgtgcggatggcagaggaggaaggtcttggtgttgatgggcgaatcgtaagcgtccttgaaggagggtacagtaatagggctcttacgactggtgttttgagtcacttgtcagggctaggggataccaagggtgtgcaattgctcgatgatcgtcacatcgaccgtttggcgactgagatgacagaacgcctcggcttgtccgacacccctcctgaaaggccagcttttcaggccgcttatgatcaggaatggtggtctctgcctctgttggaggagctggaggccttagtatacccgcctcctcccagcaagcctaaagagaaatcagccccgacctacttcgccccaacccaatcgtttgctgcaaaggttgtcttaccggcaagggatcggcgctccaccggctcccatagctcagagcaggagtcaccacctctaccaccagtcaattgggccgtggccgcacacgagctgtccaaggttctaataccaagcgaccggcgaaccggcagctgccggcctgaagaactcaatgctgaggcttcacgcttgagacgtgaacgccacgcaacagcaaccggcatcagcgatgcagtgaagacgccgacgggaccagctgcaggagaggagaagatgaaactccgtataaggaacccaagacttcctctcccattgtttcagagcctgcgactcccgcccgtcggactaacaaggacaatcgcagaacaacattag

SEQ ID NO: 21235 - DNA, 850 bp, Emericella nidulans
aaactgacaagcagaccgtcttttccgacctgatccaaggcgacctccctgcttcggaaaaggcagatcgccgattgcaagacgaagcccagctcgtgattggtgcaggtctcgcgacgacaggatgggccttgactgtagggacgttctacctgctcagtaaccccaaagtgctagctcgtctgcgacgcgaactagacgaagcgatcccagcgcgcaatccagagaaccccagcggtgccctcgaatgggccgagcttgagaaactcccgtacctaacaggtgttattaaggaggcagtccggctgtcacattcgaccacttctcgcaatgtacgccgtctgccgaaacctattacgtataaggactgtgttatacccccgcgcacgcccgtttctatgacgattccatttttgcatctcgatgaagacatctaccctgagccgaaatcgttcataccagagaggtgggtgggataatcctaaaacgacgaatggcgcccctcttgagcggtacttcgtcggtttcgggaaggggaccaggtcgtgtctggggctcaagtatgccctccatatccaagtctagtggtgtttctgtgctaaccaagggaatgcagtctcgcttggtgcgagctatacctcgttttcgcggccttcttccggttcttcgactttgagttgtacgaaacagatttctctgacatcgagctccagcatgatttcttcctaccattccccaaatgggattcaaagggcgtccgagtgtttgtcaaggagcggagtgcttgaaggagcaaatacattctcatgaatatctatactactctaaatcaacgtcaacatcgtcgtga

SEQ ID NO: 21236 - DNA, 850 bp, Emericella nidulans
ccaacaagtatgtcgaggaactgcgatccctgcctgacgagaagatcagcgccatccgcgcgcatatcaagaatctcctgggaaagtactcgaccacgctgatcctcctggagagcgacctgcatacgcgcatgctgcagaccaagctgacccctaatctcggctccttcatcgaggtcatcgagttcggagctcctcttcgccatggaccaggagatccccgcgaacctagacgactggcagagcgtcaatgtgttccacatcgttcttcgcatcgtggcgcgcatctccgcacgcgtgttcttcggcgtccgccgcatgctgcaatgaggaatggctccagacctctattcactacaccgagaacgtctttgcgaccgtcatgctgttgcggcgcttccccaagtggatgcacccgattgtgggacacctcctccccagctactgggcaatccacaggaacctgcggaccgcgaagcgcatcatcagtcccatggtgcgccagcgccgcgcagaagaggccaagcggaacccggactatgtaaagcccaacgatctcctccagtggatgatggacggcgcaaacgagaacgacgggcagcccgacaagctggcgcaccgccagctcctcctaagcctggcttccatccacacaacaaccatggcggcggcgcactgcttctacgatctctgccaacatcccgagtactttgagccgttgcgcgaggagatcaacgacgtaattgcccaggatgccggctggaaaaagaccactctcaacaagatgcgcaagctgggcagctttcttaagaaagccaacgcatcaacccgcccagtctctgaggtactc

SEQ ID NO: 21237 - DNA, 850 bp, Emericella nidulans
atcgatcaagggaacagcacgcagccgaggtcgctaatctcaacaacgctgttcaagatgtgcagtcaaaggccgacaaagccgaacagtacgagtcagaaatcgctgagcttcactcaaaactcaagaatctgaattcggaggccgatcaatctagtaaaaggcatgccgctgagatcgccggtctcaactgtgctgttcaagatgctgagaagaaggctgaaaaggctgaacaatatagatctgaagtcgtcaagcttgaatcggaactcgagacattgagatcagaagtggaatccacaaaagagcagcgtgccaatgaagtctccgacttgcataaaaaaattcagggccttcaatcagaactggatagtgcaaggaaacaacatgaatccgaagttgttaagcttgagtccgccaacgagacggtacgggcagaactcaacacagtgaaggaacaatctacacaagaccttgaagccgtgagggaggattactcttcgaagtgctccgcgcttgagaatagagcgcaacaagctgaaagtgaagtcgaaaggctagaagcagaggcacggaaggctgcacacgcgcttgaagaagcacaaaaggcgctcgagaaggcgctccaggagaccaaggagaaagaagaagcccgccagtcagtacaatccgagcttgaggacctcctgattgtattcggcgatcttgaagctaagaggaacgaggacaaggtgagtcagaaatgcatggatagctaggttggtcggaatactaattctaatttttgcttcagaaacggctgaaggagttgggtgaggaagtatccgaagatgaggatgatgagggtgac

SEQ ID NO: 21238 - DNA, 850 bp, Emericella nidulans
ccgctctacccacacccaccaagcaggcaaatcatcaacttcgtcgttgagatccctcgtaatacagacgggaagatcgagatccgccggtcggagccgctcaatccaatttttcacgacgaacgcgatggctccccgcgctacgtagagagcgtctggccgcacaagtcctacccgttcttgtacgggtcgatcccgcagacctgggagagccctaacttcaagcatgactttaccaaagagccgggagataatgaccccgtcgatctgtttgatatcggccaggatcagggctttacggggcaggtgaagcaggttaagattctgggcgcgctggcgctgaatgatggcggcgagacggactggaaggttctagggattgatgtgagggacccgattgcaggactggtggatggtgaggggattccttttttatatacctccactaccaagaacaacgaaactgatgctgacatgtttccgagcagacttcaaagatgtcgaaaagtaccgccccggcctgatcgcttcgtaccgcaactggttcaccacctacaaggtcgcgcgcggcgactctcttatccctatcgtcaacaacacctacgtcaacgcgacctttgcggcatccgtcgtgcagcaaagccacggctactggctagacctggtcagcgggaccgtcgactcgaacgagatcaattacaaccagacctcccgcccagatattgcggtcagcttcgtgtcgaggtccaatgctaccgcgcattttgatctaccagcggtgtcagatgagcgtccggctgaggcaaagccggagcgcttcgagcagtggttttatctggataaggagggt

SEQ ID NO: 21239 - DNA, 850 bp, Emericella nidulans
ttgcccgccgccgtgatcgttctcctgattgaacacattgccatctcgaagtcctttggacgtgttaacaattacacgatcgacccgtctcaggaactggtggccattggcgtgaccaacctgctcggcccattcctcggcggctacccagctactggatctttttcgcgaactgcaattaaatccaaggcaggtgttcggaccccgctggccggtgtcatcactgccgttgttgtcctcctcgccatctacgctctgccggctcttttctggtacatccccaaggcttccctggctggtgtcatcatccacgcagtcggtgacttgatcacccctcccaatgttgtctaccagttctaccgcgtttcaccattggactgtgtgatcttctttgttggtgtcattgtcactgttttcacctcgattgagattggtgtctactgtaccgtgtgcatatccgtggcagtgctcttgttccgcgtggccaaggcccgcggtgagttcctcggccgtgtcactatccattccgtcgttggcgaccacgttttggaagagtccaagcctggcctcggcgatgccgaccgcacgcgttccatcttcctccccctcaaccacgccgatgggtctaacccagagattgagattgagcagccgtaccctggtatctttatttaccgcttttctgaaggcttcaactacccgaatgccaaccactacaccgattatcttgtcgagactattttccagaaaacccgccgaaccaatcccttcacgtacagcaaccccggtgaccgcccgtggaacaacacagggccccgcaagggcaaacaggaagaagatcggtctcatc

SEQ ID NO: 21240 - DNA, 850 bp, Emericella nidulans
atcaacagagcattgtacgcgcggaagatattgacttctagttcttgatggccatggaagccatcttatactagagtttgatcaaatctgtacagattataatattatactactctgcatgccagcacattcctcctatcttctataactacttgatattggatgttttgcagttttgaagcgctcgtacgccagcttggttgatcagaaaatgtggcttggtatcagctatattaacaaacttgatttccttgcagcctatccacaagctcgaatcagcatatttaagctggatacaatcagaaacagtttttaagcagcaggactagtaccattgaatcctgaaccagtactttcaaagcttagtatttaggcttgtaggcctataccccctagaagctgtggcagccaggcaagcactttttgcctatatataccagcaaatattgatgagcttctaaagaaagcttctttactcagagattttctcaaacagtactcaaaaagtccactatcaccgtcccataatgccctaaaccagctaattaaaggctgtcaaattgcaatgcaaaaggtcatactattggagcaagagaatagggtgctacgtgctgaaaatactatacaaaggcaaaagcaagcttgtacacatagatagatagctcatgataatggtctgtctgtacaagaggctacagagctcgaggaagcttataatgtgtcttttcaggcaatacctggtccatgcgggccaccagcagaaggtgcacaaacaccaaaggcatgggcattacctatatatagtacctgccatagaattgggcatagaagaaatgcttgtccaaataaa

SEQ ID NO: 21241 - DNA, 500 bp, Emericella nidulans
tcacagaaaccacgtcgacataccttgaggcgccatcaaaagcgccgccgaacctcgtcgcccccgagcctggtacgtctatctaatcacgctgtcatacgctcgtactaactattatcagaacactgtccaggtcccgaatccgaccaggcaggtcaaggcgatgcctgcgctggctgtcctaaccaatctatttgcgcttctgccccgaacggctgacccgtgacatccctctcataaccgcgcgccttgcctctgtccgacacaagatcctcgttttatcgggcaaaggtggcgttggaaagtccacattttcgtcgcttctcgcacacggtttcgcatccaatccagattccacagtgggaatcatggacacagatatttgtggacccagtatccctaagatgatgggcgtcgagtcagagacaattcacatcagtaacgctggttggagtcctgtctgggtatcgacaacttgggcgtcatgagcgtgcagttta

SEQ ID NO: 21242 - DNA, 850 bp, Emericella nidulans
ccgatcgattttcaggtccgcgaacctgtctcgcccctattcgcccatctatcgcagacggccagtgcagtagagctacaggtcacccaagagtatctcggacagcaatgccatctggtctatcttgcacctatgtggaaagaagttctcgattttgacctccgcgttgacggcaaagactcggttgtcagtgatatcgtcagcggcaggcggttcaacaatactctcggtggctacgcgggagtggttaatgttggcctcaacacgacttggctaggaagtcacttggccatgtcaaacctctacgcttacggccggctcgcctgggacccgtcggccgactcgggggagctgtggcaggagtggatcaagatgacattcagtcacgatcaagaggtcgtcgacgtgatcacgaagatgtcgatggagtcttggcccgcgtacgagaactactctggaaacctcgggatccagacgctgactgacattctgcttggccattacggccccaacccagcatctcaggacggcaacccctggggccagtggacccgcgcggacgccgacagcattgggatggaccgcaccgtctggaacggcaccggcaatgcgggtcagtacccggaggaggtatatcagatgtacgaaaatatcgacaccacccccgacaacctgctgctgtggttacaccacgtgccatacacccagcgcctcaagagcggcaagacggtgatccagcacttttacgacgcgcactaccgcgggagcgcgactgcccagacatttgtctcgctgtggaagactataagggcaagatcggacaggagcgctatgagcatgtgctctttcg

SEQ ID NO: 21243 - DNA, 523 bp, Emericella nidulans
caagcttcatataggcggcactctctttgatctcatccgccagaatcgtcagaaccgccgcaaactcacgatggaccttgcgaagaaatacacataccaacttgcgtgtgctttgcgatacttgcatgaagatgctcgagtggttcacagagatataaagttagaaaattgcctgttggatccagtcgagcttccggatggcacaaagacgtcaaacctcgttctatgtgattttggaatggcggaatggatcaatgctgacaacgaggatgcttcctccgagccgtacggagatgctggggaccggccaccgctgcgaaatattgggccatctgattccagcaccagcgtcgcaggcagcctcgaatacgcctcaccggagctactcgactcgattactggaatcatcgacccgtctgtcgacgtctgggcttttggggtcatcgtattcacccttatcgtcggatctcggccgttccagcactctttccagccccgtctaatatccaacatccggcacggc

SEQ ID NO: 21244 - DNA, 808 bp, Emericella nidulans
tccgccgacgacgccgagcgcgagaccatccgcgtctggcgcacatggcgaacagttttcgaaatgctgcaagaccgcgtacgttattgcgttctgcctggctccagtcgcagggcactaatctcgaccaatagggctatgaagtgacagaggaagaagtcaagattgaccttgacgaatttaagaggaaatacgtcggtgaaaaaggataccccaggtgcgaccctctagcccaccagtatttgctctttgtgtaatgaacacgactgatggagttatcccatagccgcgagaagctaaagattcaagcccgtcccaccgaagccatgaaagcaaaatacacgcctctcccgaccccctcaaaccgcgatccccagccagactgcgggacaatctacattgaattctgtccggacgacagcggtattggcacagagcatgtccgtaccttcaaccacactgatgacgagggaaatttccataccggcatcttcatcacaaagacgcccatctccgcatctgccgttcgtttgcttagcggcatccacggccgaatctgcgagcatttccaggagcaggatctacttgtgaacattacaccggttgaacttgtcccgaacatgtgctcctaagccctgaggagaagagcaagctcttgcagagataccgtctgaaggaatcgcagctgccaagaatccaggtttcggatcccgttgcgaggtatctggggctcaggcgcgggcaagtcgtcaagattatccggaagagtgagacggcaggcagatatgccagttatcgatgggttatt

SEQ ID NO: 21245 - DNA, 850 bp, Emericella nidulans
ttcggattgcggcttatctggctgcatacaggatggtcgggtctggcgtactggaggatggtcggatcaaggagctcgctgggaaccctgtggtcttgctcgacgagatcgataagattggcggccctaatttccagggagacccatctgcagcaatgctggaagtgctggaccctgagcagaaccatacctttgttgatcattacattaacattcccattgacttgagcaaggtcctgttcatagccacagtcaactccttggacaccattcctgcccctctcctagaccgaatggagacaatccagctgtccgggtacacaactgtcgaaaagagacacattgctaagagacaccttcttcccaagcaaatccgagcgaacgggctttcagatggtcaagttgttttgtcggacgatgttatcgacaagaccaccacctcatacaccagagaatccggcgtccgcaacctcgaacgagaacttggttcgatctgccgctacaaggccgttcagtttgcggacgccactgacagtgctaagcttgagtcgtacaaccccgttgttacagtcgatgacttggaagaaatcctcggtatcgagcgctttgacgaggaaatcgccgagaaacacggccgtccaggcgtcgtaaccggcctagttgcatactcaaccggcggccaaggaagcattcttttcatcgaagtcgcagacatgccaggaagcggtcgcgtccaactcaccggaaaacttggagatgtcctcaaggaaagtgtggaagtcgcccaaacatgggtaaaagctcactccttcgagcgtggcatataacatccgaccccaactgcagtaca

SEQ ID NO: 21246 - DNA, 850 bp, Emericella nidulans
ccgcagcagtcagatactgatcaaaaccctctgccagaccgacaaccttggctttggccaggagaagcgccgccagcttaacaaggacgtacttgagaataaggttactttccggtaaatggtggcgtaacagtacactcgcacgagatgctaatagtttgcctcgatagtgattctttccgagaaatgctcgacagcgtccccaatgctttcgatgactgcctcgagatcctcaagaagaacatgcgcctggacccacatttcaaggaattctactactgggctaaggagaacaacgttcctattgtgattttgtcctccggaatgattcccgtgatccggacgttattggagacgctcctgggccacaacattgatgaccatctcacaattgtcgccaacgacgttgaaagtcgcgatggcagggacatcaacactccgggtgggtggcaaataaagtatcacgatgacacgtatgattggcgatcttcatgctctcgtgcagtatgctaacgttcaagctagccacttcggccatgataaatccttggagattaagccgtacgctgcggtgccgttcgacgagcgtccgaccctgctttacgccggcgacggtgtgtcggacttgtctgctgctagcgagacagatttgcttttcgcaaaagccggcaagggtatgtggctcaagttttcctcttcaaagattgcgacactgacttgtccagatttgatcacctactgtgagcgcgaaggaatgccatacacggtctttgaggattggtcatcgattcttgccacaacaaaggatatcctgagtggcaggatgaaggtaaagaaggaacagaaggag

SEQ ID NO: 21247 - DNA, 850 bp, Emericella nidulans
tagtccgcgagaggaacctcaaccttcgcgtcgcatacctatcgggcgacgacgtatacgaccgcgtcggtccaaacatgcccacaacaaaagaagaactccagcatctcgattcaggcaactcctccgccgctccggccgccctaacatacgccttcctccgaggcacagcagacggcaaacctattcctatggtctcggcgcatgcatacctcggagcgcgcggcattgttcacggtctgcggaacggggcggacatcatcctctgcggccgagttgctgacgccagccccgtcatagccgctgcttggttctggcatgactgggcggagacagattatgatgagctagccggtgcgctgatagcgggccatttgattgagtgctctgcatatgtaacgggaggtaatttctccggctttgacaggtataatttggacgaccttattgaacccgggttcccaatcgccgagatcgacgccgacggggcgtgtattatcaccaagcacccgggtacgaaaggaatggtcaccgtcgatacagtgcggtgccaattcctatacgagctgcaggggacagtctacctgaacagcgacgtgaatgcttacatcggagatgtggctgttgaggaagtagaaaaggaccggcacgatctgcttctctctttccaagacctgaccaaactaataatggtgcacagcatccgcgtttcaggaatcaaaggcaccgcaccacccccaaccaccaaactcgccattttctaccaaggcggctacgaagctgagattcttctcaacgccacaggctacgctacgtcgaagaaatgggacctgcttgagaaacagattcg

SEQ ID NO: 21248 - DNA, 850 bp, Emericella nidulans
gggaacacgagtccacaacgacgcagctacgaattttggctgtatcgtgtcggactcacacactaagcgagttcttcactacgtcgagaagccggaatcacatatctctaacctcatcaactgcggagtatatctattcgcgacagaatgcatcttcccctccattcgtagcacgatcaaacgacgaacaactcgccctcgcctgctctcctatccttcttctgacaacctggaagcgtcatttgtcgccgacgatgattcagaacgaaccgaggtcctgcgtctcgagcaggatatcctctccgacctcgctgacagcaaccgtttctttgttcacgagacgaaagatttctggcgtcagatcaagaccgctggatccaccgttccggccaatgctctctacctccagaaagcattccaggcacagtctgaggagctcgctgctccttccgctaccatcgttcctcccgtctacatccatcccaccgcaagtgtagatccaacggcaaagctcggtcctaacgtatcaattgggcctcgcgctatcgtgggtgctggcgcgcgtgtcaaggactcaattgttctggaagatgcggaaattaagcacgatgcatgcgtcatgcattcgataattggctggagcagccgagtcggcgcctgggctcgtgtggaggggacaccaatccccatgggaagtcactccactagcatcattaagaatggtggcaaggggcagagcattacgatccttgaaaggagtgcagcgtgggtgaccaaataccggtgcagaaactgtgtctggttgccgattaagagctcaaccggggtagttatttctgacgcattatac

SEQ ID NO: 21249 - DNA, 595 bp, Emericella nidulans; identical to SEQ ID NO: 14192
  unsure (1)..(595): unsure at all n locations

SEQ ID NO: 21250 - DNA, 831 bp, Emericella nidulans; identical to SEQ ID NO: 15421

SEQ ID NO: 21251 - DNA, 850 bp, Emericella nidulans
cagggtctcagacaatccccgacgaatacgtaagccagattccttcgattgccttctcgataccggatctggatggagtggccaaactggagttaaagtcgaaggacgacggcaaagaggttgcgtgcattgagtctgagttgagcaacggaaagtcaacggaagttcccgctgtgtcttatgctgctgctggtatggctggagctgcacttgctttgagcggactctcagccctgggctcagcgggacacgtcggctctgctacttctagtcccgggttcggagaagttatgggttggtttcacaccatggccaccactggcatgcttagtgtcaactaccccaaagtctacagcagttttgcgaagaactttgcgttcagcactggtttaataccgctggaacagatgcaacactcgattgacaacttcaggaaattgacgggtggtaaccttactcagaataactatgactactggaaaggtgttagctcatcatctggcaccaaccagaagagatctctgaatgcattatacggagcagctcgactgtttgcgcgtgaagttgatgcgtcagtgaacagcacatcttccggcaacgatacgtcgagcggcatagacatttcggtggatggattatcaagaatgagcaaggagctgcttattcctcagtcgaatacgttcatgacagtcctgctgattttcgccattgtcattgccgcaatcaccgtgggaatcttgcttgtcaaggtgatactcgagttgtgggcactcaatgggtcctttctaagaagctcgccaattttcgcgagcattattggggcctccttgcgagaacgatcaccaatttg

SEQ ID NO: 21252 - DNA, 385 bp, Emericella nidulans
ggggggctgcactggtagcaggcaaaactcttgttaacaggaagcagacacctaccgccccccttactaccaccgtaacgcggcatccgagctaatgggtctcatctacggcgattacggcggccgctccgacgcattcaagcccggctctatctcgtttgaatgcgggatggttccgcacggagttgcgtacgaggaattctccgctgcaacggcgggcgagactgatcctcccgctatgcgcatctctgaaggatctatcgcgttcatgtttgagtcttcacgaccgttcacaatcacggactttgcgtggaagagcgagaagaggcatgagcacgagccgaagatgtgggacaacttggtggatcatttcagtgagcatgct

SEQ ID NO: 21253 - DNA, 490 bp, Emericella nidulans; identical to SEQ ID NO: 10948
  unsure (1)..(490): unsure at all n locations

SEQ ID NO: 21254 - DNA, 850 bp, Emericella nidulans
accctttgttccaggccggtcgaaagggtcatttggaagtggtgagatatctactgaagaagggcgctgatgtcaacgcgacgaatggcgagaatgagacctcactgctgctagcactgttgaatgatcgaaccaagcacgggagggaggtcattggcttgatattgcagaagggagcggacgtcaatgctgcggacaagtctggacaaacgccactcgacatagctaccaagcagaacgatctggaattgatgaacgttttaatggaacatggagccgagatcgactccgtaacggaagaaggcgcgaccccgttgcaccaagcaataatcaacgagcgcgaagatatagcggaggtattgctggagcacggggccgaccccgaggcgcaagattcgcacggggatgcgcctctccattttgcagcagcaagtggtcgccgcaagatggccgagttgctcctggacaagggcgtagatatcgacatcaccaactacactggagacactcctcttcataaagccgccagcaacggacatcgaaaaatggtggagttcctactctcaaggggagccacccttgagatacggaacgattatcgacagacaccgttgcacaaggcggttggagctaaacaccatatcttgaggctgctggtcaaccgagatgccgacgtcctcgcaaaagacatgtacggcaagacagccctccatctagctgcggaagctggtctgaaggaggatgtgcactttttgatgggtcatggggccgcaactgacggaagagatggtaacggacgcacagcacaggacttggctcgagtagagggacacgacgatgttgctgaact

SEQ ID NO: 21255 - DNA, 850 bp, Emericella nidulans
acggaagcaatagcacatattcgtgaacgggaactcctgtatggtgcaaactccctgctgtcaaattttggaccattggttgcagagatctgcgccaacaacaacacttactctgaccgtaaccttcaagctgccgcaaccatatgcatggcgaagctgatgtgtgtctccgctgaatactgcgaaaagaaccttcctctcttgatcaccatcatggagcgctccgaagaccccattgtacggagtaatgcagttattgctcttggtgacatggccgtgtgcttcaatcatttgattgacgaaaacacggatttcctctaccggcgtctcaacgacgacgacgcttccgtcaagcgtacttgcctgatgactctcacgttcctcatcctagctggtcaagtcaaggtcaagggacagttgggtgaaatggcgaaatgcttggaagacgatgacaagagaatagccgatttgtcccgcatgttcttcacagaattggccggcaaggacaatgctgtttataaccacttcgttgatatgtttagtcttctaagtgcagagcgcaatctagaagaaggagcacttaggcgcattgtcaagttcctgatcggttttattgaaaaggtaagtttatttctgttcttgagaacataaagcttttccaagcaggaacatgaaactaacatacattgctctacaggaaaaacatgcccgccagttagcggagaaactagctgcccggttaccaagatgcgaaacggaacggcagtggaacgatgttgcatacacactgtctcttcttccgcataagaatgaggagatagctaaaattgtggctggtgggttcaacaaa

SEQ ID NO: 21256 - DNA, 850 bp, Emericella nidulans
tattttaattataccaggttttggtataattagtacagttattgctgctggatcaggaaaaaatgtattcggatatttaggtatggtttatgccatgatgtctattggtgtgttaggtttcttagtttgaagtcaccacatgtatactgttggtttagacgttgatacaagagcatatttcacagctgctactttaattattgctgttcctactggaattaaaatatttagttgattagctacatgttatggtggttcattacatttaacacctactatgttatttgcattaggttttgtagttctattcactattggaggatcaagtggtgtagttttagctaatgcatctattgatgtagcattccatgatacatattacgttgtagctcattgccactacgtattatctatgggagctgtatttgctttatttagtggatgatatttctgaatacctacattattagggttatcttatgatcaatttgcagctaaagtccactggtgaatcttgtttattggtgttaatttaactttcttcctttttcatttcttaggtctacaaggaatgcctaggggaataattgattatcctgatgctttctatggttgaaacttactaagtagtataggttcaattattagtgttgtagcaacatgatacttcttaacaattatatacaaacaattaacagaaggtaaagcagtttcaagatatccttgattaacacctcaattattcagtgatacattccaagtgttattcactagaaataatagttcattagaatgatgtttaacaagtccacctaaacctcatgcttttgctagtttacctttacaatcg

SEQ ID NO: 21257 - DNA, 295 bp, Emericella nidulans
tccagggcgccaatgcacagaaggagccacgtgggatctttgaaagcgtggaagtgaacgcacaggaacgagccaatgtgtcttggatcgaccggtagcaatctgggagctgattgtacgcagtatggtggtgtccaagagcacggaagggccttttcaacgcgaggattccaataccttggttggggtgattgctcgaagcgctggggtctgggacaacgacaaaacggtatgctcgtgctcgggtaagaatgtgtggcaggaacgccaggagcaggtggctcagggaatgctc

SEQ ID NO: 21258 - DNA, 850 bp, Emericella nidulans
cggactgactctaagctagggttgcgatggggcgcacagcactgttcgcaagcaactcggttacaatatgattggtgatagcacggatgcagtctggggcgtgatggacatgatcccacgtaccgatttccctgatatccgcaaaaaagcctccattcggtccaaggcgggcagtctactgattatcccccgagagggcgaaaaccgcaacttgacgcggttctatatcgagctgccagctggcacgaaggctaaagaggtcaagcttgaagacctgcagcaggcagccaaaaatatcctcagccagtataagatagagtttacagagacggtctggtggtctgcgtacgcgatcggccagcgacacgcagatttcttccacaagaactaccgcatcttcctcggcggggatgcgtgccacacccactccccgaaggccggacagggcatgaacgtcagcttgcaggacggatacaatatcggctggaaactggcacatgtcctgaaggggctcgctccgccatcattgttggagacatacgtcttggagcgtgaaaaggtagcgatcgacttgatcaacttcgacagatacttctcgaagctattctcggccaaggggaatgcgtccgctgcggaattccaggaggggtttatcaaatctggcaaaaaaacggctggtctgacagcaaagtatgacgaatcgcctataacatgtgatttggggttttcggattccttttcaaagaatgttgtggtggggatgaggcttcctaaatccaattggaccgtcctgggactggaaccctccagttattaggccctcaaatcgccggccatggatggtttacag

SEQ ID NO: 21259 - DNA, 850 bp, Emericella nidulans
ttgtcgggaggacgatacactctggtaagtggccaccgtaggcctctatgaaggtcatcgcttataaacttatacagcctgttcgaaattacaccggacggccttcttacttctatcccgggtggaagacagccaacaccggaagactacacggtttacggctcgtgcagttaccgctcgccttccaacggaaaacaatacctctttgtcaacgaaaagtctggtctctatctccaatacgaactgacttcctcgcctaacggaactctcgccacaacccttgtccgcaagttcaccggcggttcaggcggccaaccggagggatgcgttgctgacgaagaaaacggctacatcttccttggagaggagccattgggactatggaggtacgaggcagagccaacggggtctccaaacggaacccttatcgccaaggtgggtgatgggactatctacgcggacgtagagggcgtcacgctactgccggggcaaacccctgaacagggtcttatcatcgtctcgtgtcagggggtgagtgcgtactccgtctatagacgggcggaaccgcatgaccatgtgttaacttttacgattggggaatctggcgatgggagcgttgatggggtcaccaatacagatggagttactggggtgtcgacaggattgaacgacgactttccgagggggttgcttgttgttcacgatgatgcgaatcagctatctacaggtgaaacggcggagctggctagctttaagcttgtgagtctcgaagatgtactggcggctgcaggcaagagaacgtggttgttcgaggaagtcgacgagacgtgggacccgagggcgtaacctt

SEQ ID NO: 21260 - DNA, 838 bp, Emericella nidulans; identical to SEQ ID NO: 8145

SEQ ID NO: 21261 - DNA, 836 bp, Emericella nidulans
atgagtgctgacacaccggtacggtcagcgacgcagtcctgtcctccacccgaattgccacaacttgtcgctgagcaacatgttcccatcgctcccaatgataaggagacgcagcggttgattgtggttctgtcacacgccagcttggagacgtttaaagcttctcacggtggacgcaatggtactgctcgcgacgagaaatactctttgctaaacagcgatgaacatattggcgtcatgcgcaaaatgaaccgggacattagcgaggcgcgtcccgacatcactcatcaggttggaccatcttatctctagcgaagacattctgataacacttgatcgctgaccatcctcgtctgatacagtgtcttctcactcttcttgactctcccgtcaacaaagctggcaagctgcaaatctacattcacactgccaaaggcgttttaattgaggtcaacccctcggttcgcattcctcgagctttcaagcgcttcgccggtctcatggttcagcttttgcaccgactctccatccgttccactaactcgcaagagaagcttctcaaagtcatcaagaacccaatcaccgaccatttgcctccaaactgccgcaaggtgacgctcagttacaaagccccggttgtgcgagtcaaggattacatcgagtctctgggccccaaagagagcatctgtatatttgttggagctatggccaagggccaggatgactttgcggactcgttcaaggatgacaccattagtatcagcaactacagtttgagtgcgagcgtcgcatgcagcaagttctgtcatgccgcagaggaagtttgggatatccta

SEQ ID NO: 21262 - DNA, 586 bp, Emericella nidulans
cttgtcgtcgaattaatatagcataaggagttagtctaccaagaaaagaccgctacggaggggggggaagaaacatacatccgtatcgcggttgttgaaaataacgtacaagcttttcttacattagatgaataacatgcacgctcttaatcgaaagaattagatagcaacaccggcgctgacgataatggtttattaatcagtctgccattaggggtaaacgataacattgcgactaacgggtttcggacaacttgtgcgagcataaagatatgcatacttcaatccaatttatgcagactacaagttgggcattagcttaaatttttataccccatttcagtcagggaattaaacattggtcccagttgtcaatgggttcttcaaatgaaaacccaagggttttacgcttcgaaaaaaaccaaagaatctggatttcccctttcggaggaaccaagtggaaggttttttcacagcctgttgcgctctgtggaaggcctattctacttgggtattaccacgggggggtttattctaaatccagtttaaatgggggggtttaggttaaaaccaccttttggccgcc

SEQ ID NO: 21263 - DNA, 850 bp, Emericella nidulans
gatcattgaaggcatccccaccgtcattatcggcatcgcaacctggttctttctcgcggatgatcctgagacggcttactatctcaatgccgaagaaagagcattagttgtcaagtgccgcagtcggcactttggccacaccgcatccgcccaaaaatttcactgggcagacgtcaaagaaggcgcactggactggaggatttacgccttttgtatagcgcaatttggcgttgacactatgctctacggatacagcacctttttgcctaccatcattaagggactaggggactggtccgtgcccgaagttcaagccctgacaataccctgctacgcactaggcgccgtcgcatacttgatcgttgcatggttcagtgaccgtacccaacgtcgcggcctattcatctgcgtcttcgcggcgatttcagtagttgggtacggtatactcatttccgactcctcgtctggagtgcattactttggcgcgcttcttgttgcactgggtctttacgtcgcggtcgggctacctttggcctggttgcctacgactcttccccgctatgcgaaacgtacattcgccaccggcctgcaacttacatttggcaatgtcagtggggtgatgtcgccgtttctctacaaaaccgaggaggggcctcgttatgtgcgcggcaacgccgtgactttggcgttggttggctttgcagggataatctatgggatcatgtgggcttattatctgtggaagaacaagcgtagagaacagggttttgaagacgagaaggctgctggaaagacggatgaggaaattgaagagatgggcgatatgagtcctcgatatcggtatgctgta

SEQ ID NO: 21264 - DNA, 850 bp, Emericella nidulans
attgccctggtatgagctgccttgcgcgaccatatgcttgatgtactacaacagctaggtgatgaactgtataattatcttttgcggatatggccgttgcccattgacaaagtcaaaaagatatttactcagcttgttggggccgtgtcatacgttcacagcaagcagtgcgttcaccgtgacctaaagctagagaatatcttacttgacaagcacgagaatgtgaagctttgcgatttcggattcaccagggaatacgagggaaaagcaagctatcttcagactttctgcggcaccgtgtgctacagcgcccccgaaatgctcaaggccgagaaatacgctggcgaaaaggtggatgtctggagcttaggcattattctttatgcgcttattgcaggagagctcccttacgacgatgacgacgaccaggttaccaaagcgcggattttgaacgaagaaccgaaatttaatgacaaattccccgacgacgccaaggcgctcataaacctgctcctttctaagcggcctcttctccggcctagtttggacgaagttctcgcccacccattcctatccgagtatgctgctgaacagctagcaattctgaagcttcctcggccgccgcccttttcgacatctctagagaaaaccactctacatcgaatgaaaagcgcgggaatcaatattgacgatgttgtagatagtgtcatggctcagcgctgtgacgcgcttgccggttggtgggctcttctaatagagaaggagcagcggaaagaagcgaagagagaaagaaaacgacgagagcgggatgcagaagcaaagaatattcgccgtctaagcgcagcgagca

SEQ ID NO: 21265 - DNA, 698 bp, Emericella nidulans
gcaacgccccggggggactgccactctgctgcacacctcgcccataacgtcggctgaagcggcgcaatgggcactgcgctcgggatcgacccaacagtcgtcgatagcaggggcgagacggcgtttttagtcgccgtagcgcgcggccacctcgcactcgtcaagaccttcctagctgtgggcatggatccagagcttccatccagaggcggcatcacccccttatgtaaggccgccgccgggggacatatgctggtggttcaatgcctcttggatgccggagcagacatccgacgcagagacgacaggggtttcaatgtcgtagatttcgtcaccaccgcacgggaggacacgggatcgatgcttgaattcctccttcaacgaggtgctgatcctagcccacctgctggcactgtccgtatgacagccctgcactccgcagcccggctgggactcgtcaagaggactgccctgctctgctcggcttccccggtcgacgtcgtcgatcagcgcggtcgcaccgcgctccatctcgccgttagagagggccacgccgcgacggtggaggtcttgctacaggctggcgccaatccatctgttgcagatgaaagacagaaaacgccgaagcacgaggcagtggctacaagctctacggatattgtcaaacaactgggtggccatggagcatatgttcgacg

SEQ ID NO: 21266 - DNA, 850 bp, Emericella nidulans
acaactagacgggttgcaactgctgcaagactggcttatagcagtagcgaatgaccagattgcctgcattgacgacaatgacgaaacgggacaatatgggcacttgacgcggttccgacgtgatatcgagcagtacgtcgacccgaaatacatggcgtcccgcgcaattcccgagattgatgctttacgagatggctacgtcgatttgagtacctactgtatttcgcaattcgtgaacgtaattttcgcagtcgacctgcagggcacgattcgcgatttttttacccagagatggtatggagatttcgccgtgaagcgaatcacttctacgttcgacgattacatggccgattactcgcctgtcctccacccctccctcacagacatcctcgtcgaagaactctccgacgaactcctagtccgctacctctcatcggtccgcaacaagggtgtaaaatttcgccgacaaactgacccctacaccgacaaattcaaggacgacgtcctcacagtctttgcatttttccagaaatacccggactcttttgcaggcaccatcaagcagaaatggcggcttgtcgactggttggtccggcttcttgaggcagagaaaggtcctgctgtggttaatgtctatgaagacttcaagaatgagtactgggacctgcagctctcgtgggttgaaacagtccttagggcacgggatgactttgagcggagtatgattactgccgtcaagactaacgcggctgaattgtctgttgaacggagaatggagactctaatgagtagagttcgctgaccttgcttgtttgtgccggtgggcctttgccgggcgtttggagttgtt

SEQ ID NO: 21267 - DNA, 672 bp, Emericella nidulans
tatgcgggtgttactcgtagacttatcactgactttcctagcacatgaacctagtgctagccgatacggaagaattccgtcgcgttaagcggaaagcgaagtcggcacccggaaacgcgccccttgtcgaagccgaagagaaacgaacccttggtcttacaattgtccgcggtactcacgtcgtttcttgctctgtcgatggacctcccccggccgatccctcagcacggcttggaggcggtccgagtgttcccgccgctgccaccctggccgccggccctggaataagcaaacccgctggacgtggtctgcctgtcggacttggaggacctgctgctggtgtcggtggaccgccgcctccaggcggtttccccggatttcctcctggtggtttccctggtgcccccccaccgggctttgctggacgcggaggccctggaggacctcgtaagttgattctaccctgaagtctgatatatgaagctgacaagtgttagccgggttcgctcctcctcccggatttggtgctcctcaagctcgtaagtactcccattggaaatgttaaaactacgtcatctgacttctactctagctggcggtttccagcctccacctggcttccagcctcctagtcagggtcggggttatcctcctccaggctttggaggacgg

SEQ ID NO: 21268 - DNA, 675 bp, Emericella nidulans
acccaaacggaatggcgcaattgggcatcatcattacggccccggttggtaccgcgaaatccctcgcaaaacgcgccgtaactatgcaaaactttggctctcggtcatcgaaacttgcaaggctgcaatgcgcgagtattcacgcaaggagcgggtgtgacggatgagcaggtccctctcttcgcaggcgcaattccaggtagagattacacagttctaacaaagaaaaacatcacttcattgcgcacagaagcagagaaagaaagcatcactggtgcgctcggtgaaggcttgcttcagcagctggtggaattactgggccaggtgccccggatcatgctcctaatccttaaaaccaatgacctgagtaggtctccttattcttacatctagggcagtctcactaacgccttgatagctcgcagtctcgacgagaaccttcacactcggcaaggccccgtacggacgttccttattctcgcgcgctacgcaacccgcacagttttcgaagagcagatggatactatcaatgagagcggtgggttgctgcgcccatcaaacttctggcaatttctttgcgcttggacaaaatttttgcgtgtggagctaaagctttccgtgtacgaaactgtgctcttgttgagaagtcggttaggacttttgtagtccgcggcc

SEQ ID NO: 21269 - DNA, 622 bp, Emericella nidulans
ttttttttttatatgcagcatgtacggtcgaggactatcggcaatttgttaacttgcaagttgtcgacgctcaatacgataaacctgttacattgcggggcaacctggacaacctgtttgtcggcaatcctgccaaagttaaggagtcacagacaagcagcggaatacgctgatgagaatctggattggagcctcttcaaatctgtttctcggctctgatatgacgaattcttgatgatctaggcagatggctcatcacgtccccctcgtctattgctgctgcagacttctgcgccatgtacccgatgcagccgcgaaatcctgggacgggcagcaaccaggccgtgcagttgcaggcgtgtattactggcccgagtgagcacggtgaggcttatgtgttgctgacgaacttgggccaaacctgggcgatggcggctatgtcacggttggtggcggagagcaaaaaatgtccgttacgcttgctgatatgggaccctcaaggtcttctgctaatagattggatctctccctagaccaattcatgttctcatcttgctgtgaacacatctaaatggcctttaaaacagccggagtttttattgtctgtgcaatgaaggtgcat

SEQ ID NO: 21270 - DNA, 500 bp, Emericella nidulans
agaagaaaagggaatgaatgaagaaggagagatggaagagggggagaagaaatgaagtcgtgaaagagggaaggatcgaacaacgtttagggaagatgcagacgagagttgacgattcaccacagctctccgacgtcgaaaaatcctccaaaggtcacgcagcttcgctcggcgcctccctgcaaacatttcagtcaaaccatgaaggtgccattgttgaccgaatccatgccgctcgcgggaacaccgacgcgatcatcatcaaccccggtgcatatacacacacctctgtcgctattcgggatgccctgttaggagttgagattcccttcatcgaactccatgtgagcaatgtccatgcacgagagccgttcagacatcacagttactttagcgacaaagcgtcaggcatcattgtgggactgggtgtgtatgggtacaaggtcgcagtggagcatgttgcgttgaacttcaagcctctggagaaaaaggctgctctt

SEQ ID NO: 21271 - DNA, 850 bp, Emericella nidulans
tcatgcgaaacagcaggctgctttgcgtcagcaggcggaggaaaacgcgcccatgagtaatctccgcggtgatcccaattatgcacctggttcccttacttcgcaaacaccgaaccgtgatgtgaagatgcctccgcttggtaacttcaacgtcaaggactcggcgaaggagggcaaaaagcgtagaactgggcctggcgcaccaactctcggtggctcaagcgttggccctgctgggggtgtggatgctgcacggatggtcgactcgcaggcgggacgagggcaagttctgccagcaggcaatgcaaataaggttagttctgcaacattcctttcatatctaagcatctatatggataagacttcgctttcgttctctttctggctgttccattgtcgcggtttgataccgggacgttttacagtggtcaggtctaacacaacctacacctcttccgtttactccgttcgctctgtatcacttttaaatgatctatggagcatgctgattttatccagagagccaaggttcatcacacaaagccttcacaggcagaagctccggtcgtttctcctactcttgtccctgctctccctgagcctgtccagcctacattctctttgacgccgacacaggaagagtttgcctttttcgatcgcgtcaagaagtacattgggaataaacagactttcagcgagttcctcaagttatgcaacctttactcaaccgaccttatcgaccgacatgtgttagttaaacgggccgctggatacattggttcgaatccagaactcatggcctggttcaagcgattcatgcacgttgaggagccggagataagattgttga

SEQ ID NO: 21272 - DNA, 621 bp, Emericella nidulans
cctatataaagctactaagattatactaaaaatatttagctcttttaaataaaataaagctgagaactactactatatgagaattttatttatataagatatttactagctgcagccctagtatcatttatataaagagggcaaagctacacgcgtattgggagtattatatcttaaatattattattaaaaagaactactatctattacccctaatttataagatactaaactaaattagacaagctagatagtttactaagctaaatatatttattatcctctataaaatctatatagctaaagactaggaataaataattactttctatataaaatataaattttttaaatagctagttactctttttaagttagctaatatactaagtattttctaaaaatatattaactggaccttctagaaatatttagataaattctactctatatatcttaataatatacttatttatgctaataagaaccttgactagtactagaaatatatataaataattttaaataaatcagaaatagcaggcctatacttaaatattaagaaatataaattaaaatataagaagataaaatacttaggctttataatataagcaggaa

SEQ ID NO: 21273 - DNA, 850 bp, Emericella nidulans
tcggtacatgttagcagaggcgctggcttataagcgacaggggttatgacctttcttgcccacgagctcatctacttcggccgctgcattccctggatcgtcgccgatgctcttcccagtgtctttcgtcgtttcaagatccaagaccacaagaccccgtcattcagcgaccaatggacatgtgttaagtacatcctcgccatccacttcatcgtcgagctaccgttgatcgtcctctttcatccgatgatggaagtctgccacgtccaatatacgctgcccttcccgaaactgtctctcttcgctgcgcaagtcgctctctttttcatcgtcgaagacacataccactactggctgcatcgggccatgcattggggcccgctgtaccgttccatccaccgcattcaccaccaatacgctgcaccgttcgggctgacggctgaatacgccagtccggcagagacattcctgctaggcctgggtacaatttgcccgccccttattcttggatccatcactggcgatgtacatctgataactgtattgggatggatggcgctgcgtcagctgcaggcaattgacgcgcattcaggctatgacttcccctggagcttgcgacgaatcgtcccattttggggcggcgccgattggcacgatgaccatcatcgatacttttggggaaactattccagctctttcacgcattgggacagtgagtataggcccaatctctaggtgaattgcgctaactcgtgcagttttgatgggtactgtcgctggtccgagaggaaaggcaatgggacataataagcggcattgacgaggatatcgggttggtaaaaagttttgg

SEQ ID NO: 21274 - DNA, 720 bp, Emericella nidulans
ccatctgttcttctcggctacgccccctcggccgcatccttcttcatcgtctacgatggcgtcaagtgctccctatcaacgaacctcgagtcacagtcccgcagccatacaatcctcgcacagtcgcttgcgtcgtcgatgggcgagattgcagcatgcgcaatcagagtgccaacggaggttgtcaaacaaagagcacaggctggccttttcggcggctcgagtctgcttgccctaaaggatatcttagccctgcggcatccagacccgacgagaggcgcaaggggtggctatggacaggttgtacgggaactgtaccgaggcgcggggattacaattgcgcgtgagattccattcgcggtcctgcagtttagcatgtgggagacgatgaaggaaacatatgctagacggaggcagttggaagggccggtgccggcgtccacgagcgcaatctttggaagcattgccggtgcgatctcggctgggttgacgacgccgctggatgttatcaaaacgcgggttatgctggcgcggcggggcgatggtgcggagggcaaagccggggttcgacttagggaagtcgtgcagggaatctctgcggaaggctttggcgcgttcttcaggggtatccagccccgcgttgcgtggatcggtattggaggtgcagtgttcttggggagttaccagttcgcctggaatactatggagcggaggtcgaag

SEQ ID NO: 21275 - DNA, 739 bp, Emericella nidulans
ccgcacgaacttctacgccgagcagggtgggcaagaaaatgacactggacgaatcgttatcgacggacaggctgagctcgaagttgtcgatgtccaacagtatgctggttacgtcctacacacaggttatatgaaatatggctccttcaaggtcgatgacacggtcatctgtgagtacgatgagcttcgacggtggcctatcaggaacaaccataccggaacccacatactaaacttcgcactgaggggggtcttaggggacggcattgagcagaagggctctctggtctctgcggaaaaattgaggtttgatttttcccacaagtcacctgttacggatgtggaattggtaaaaatcgaggatttgtcaacccaatatatccgacgcaattgcttggtgtattccaaggaggtccctctttcaatagcccgaaatattgcgggggtgagagccgtttttggcgagacctaccctgaccccgtccgtgttgtttccgttggtgctgaattagacgaaatattgaagaacgtcgaagatccgcgttgggcggactttagcattgagttctgtggtggaactcatgtgcaaaagacaggagacatcaaggatctggtcatattggaagaaagtggaattgccaaaggaattcggcgaataattgctgttacagataaagatgcccacgaagtgcagcgcctagcggaggaatttaacacggccatccacctgaggcaatgc

SEQ ID NO: 21276 - DNA, 500 bp, Emericella nidulans
  unsure (1)..(500): unsure at all n locations
cgcaccaaagcagtgatccacattattnncgactttcaatacaatncncctctcaagcacactcggggtgccaccgtgggcgaggtctcatgacctgccaaagctcccccgaagcaccggccatcctcctagtcccccaagcccccccgaccgccacttcatcccccacccatccccctacccccccctcatccattctcccgcgccccaccccctccacccccccctccctaccttactctccccacccaccccacccccactcctcctccccaccccccctgcggggcccttccccaccccaccctccccccatccccccattctcccaccctcccatccttcccctccccccccacaccacccacccacaaacccccttgcccactccccactacacaacactcagccccactccttcactagcacctacacaatcccttacctccgctctactccatcgcctcacctatacatcttcacaccacaccgtaccaccc

SEQ ID NO: 21277 - DNA, 799 bp, Emericella nidulans; identical to SEQ ID NO: 9412

SEQ ID NO: 21278 - DNA, 850 bp, Emericella nidulans
gcaagcggaaggcgcaggcgctcgcgtccgccgttcaatcggcactccaaagctacgcaacttctcgccattcctcatgctagatcactttaccatcggcaagggcgccggcttccccgaccacccgcaccgaggccaagaaacaatcacctacttgctttctggtggtgtcgaccatgaagatttcgcaggaaataagggcacaatcggaccgggcgatttgcagtttatgacagcaggcaagggaatcatgcatgcggagatgccgcatgagaacgaagacggcagccccaacgtcggcatgcagctgtgggttgatctgcctaagaagctgaagatgtgtgagccaaggtaccgcgatttgcgcgcgagcaagattcctgtcgcgacggttgaccagggtcgcgtgactgttaaggttatctccggacagagccatggtgttgattctgtacgtgatcttgcttacacgccggtctggctgctggatgtggcgatcaagcatggtggtcggatcacccagatcctccctgtggggtggaatgcgtttgcctacacattggctgggacgactgtgttcggttcaaataactcgacacagctggtgaagcaattccataatgttgtttttgagcagagtggagatcacgtcgaggcgtcagtgccagataatgcggaggaggactcgagattcatccttgtcgctgggcagccgctggatcaaaaagttgtgcagtacgggccgtttgtgttgacaagtcaggaggaggtctatcaagctatgcttgattaccagactgcctcaaatgggttcgaaagagttcgggggtgggagagtgagattggaaag

SEQ ID NO: 21279 - DNA, 850 bp, Emericella nidulans
cgtatgcaagatcttggagtcattgttatagggcctggctgggaagcattggatcgcacgggagacaagctcagagcgaagcaactggcggtggagaacaacgttcctgtattaccgagcctggaatacgacatggccactccgcgtgcaacaggccttggaaagatcaaatcattcgctcataatgtgggatacccggtcatgatcaaggccgtcgacggcggcggaggacggggcatccgactcgtccatagagacgacgacctggggcacgccgtgcgcgcatctgcagctgagtctccatcacaaacagtatttgtggaaaaagcagccatagacgggtttcaccatatagagatccaaatcgtgggtgatggtaaagacgtgcagcatctgtgggagcgcgactgtagcgtgcagcgacggttccaaaagattgttgaaatcgcgccatcattgatccgcgatagaaatcaggagctggtcagcagaatagccgacgcagcagtacgcatgatgaaggccatccgttatcgatctcttgggactgtggagtttctggtcaacgaacaactcaatgaattctacttcctcgagatcaacccgcggatccaggtggaacacactatcacggaagccatcacgggcgttgacctggtccagacccagctactcatagcacaaggatacttccttgcgcaacttggcttggacacttgccccaaagcccgcggtcactgcattcaacttcggctatgctccgaggatccgcgcgccaatttctcgctgagtgtgggaaaggtgatggactttaacgctcctactggtaatggagccgactcgatactca

SEQ ID NO: 21280 - DNA, 850 bp, Emericella nidulans
gcgtgccatggcatggggtcatccagatgccaaaggacatggactttgtcagcgctgcatcgcttcccctagcttttacagttgcttactttggtctcgttaggagtgcaagcctgacaaccgggcagtcagtcctcattcatgctgcagctggggccttcggacaggccgcaatcatgctggccaagcacctgggtgtcacagagatttatgctacagtcggctcccctgagaagcaagacattctcgagcgcgaatatggcatcccttctgagcgtatctttagcagccgcgacgcatcctttgccccggctattttggctgctaccaagggacgcggcgtggacctcgtgctcagctcactttctggtccgctacttcaagaaagtctcagcacagttgcacctctcggttatctggtgaatatcgggaaggcagacattgagagaaacagcctgatggcactcgagtctttctctcgcggcatctctttcgtatcaatggacgtcccaaccctcttgcagcgccgaggaccagatgtgcaccgtacgcttggtgagatcaccagcctggtcgaacagcaggtgctgaagccggtttaccctgttaccgtttaccccatgcaggatgtgcaggcggctttccgcttcgttcagacaggtgaccagatgggtaaagttgttctttcagctggatcggacgaacaggtttacgtggtccctcgaccaaagggcttaacaactgaatctcaactacgacccgatgcatcgtacctcatcgtgggaagtgttgggggtattgggcgtcagtcgcacactggctagtggctcacggtgcacagcacttgatc

SEQ ID NO: 21281 - DNA, 626 bp, Emericella nidulans
ggaaaattttgataaaccagtgaaagtggattagatttaacgccaaaaatcagtttaaaacattgactatcgaagaagcagagaagttcatggccaagaagattaaagatcctaggtggttcatggagaagcaacaggagcaagcccagcgacaggagctggagagatttgcaaaccaaagaaaagtctacgctgggaagcagggtactccagcggcggagggcctagaagctgacgatatggattttgaagaggaccggttcgccgatgatgaagagcacgacgatctattcggtgagaacgaagatgcgaaggcggcagagaaacgaataaagcaagatcaactcaaggcaaacatatttgacctgaaaaacgagaaggattatgaggaagaggagttaagggagaagagggagaaggaagctcgccgcattcttggcaaaaaagttcgcaaagccctccaaaagagggagaagaattacgactacagcagcggatctgatgctaatccttataccgacgatgaggtatgttggccatttatactcacaatgtgtgaaggatctgaccttgcgtcatacagagctctgacgacaccgacgacgagagggccaggaaggaggaac

SEQ ID NO: 21282 - DNA, 700 bp, Emericella nidulans
gacaacacagcaacatcaaaaaaacaaacaataataaaagaaggggcggcgaccgacaaccccagaagagaaaaaaaaaaaaaagggggggggcggagaacaacacaaacaagacgaacacccaaacattgattccaacgcaaagaccaacaaaaccaggggggacaaaaaagaagggagggcggagcaacaaccaagaaaggacaaaaacacggccaaagcagaacgaacggacaagaggccacaacaagaacaacaccaaccaaacacaacagaaacaccagcaagaacggcaaaacaaaaagcaaaccacaggaccaaaaaccgaaaacaccaaaacaacgagacaagaacgaaacgaaacacagcgaaaaacagagaaaacaaagaaaacaacccaaacgaacaacaaaagcacacaaaaggaacgaaacagcacaaccgagaagaacacaacaaacccaacaaagcgcagaaaggaaccaaagagaaacagaccaaaaaagcgcgcaagcaagcccacaacaaaaaaaaaacgaaaccaaaagacaaggaacgaaggaaaaaaaaaaccgccaacacaaccagaaagaaacacaacgcgacaaccaaaaaacaggaacaaacccagcccaaaaagaaagacaccacccaaaaggaacaaaacacgagggaaaaccaacgaaacccaacaaaagga

SEQ ID NO: 21283 - DNA, 850 bp, Emericella nidulans
ctcaatatcgtatttgccattggatctggaatcatattgaaagacaaaccagcagaagatcagaaagaaggtcgtgatcatttccccctctgcaaccaagagacagcgcctgtcaagtcgtcagtatcagccagaagaatatcatgcctctgccattgtccacttagagtctttcttgtcgacttctccaaccactgatggttttggtgctttggaggagcttcaggcagtcctcctccttgcaagttttgctctgctccgtcccgtggcgcctggcctctggtacattgtcggggttgcaatgcgtcttgcagttgaccttggccttcattatgaagatggagcaggcattgatggacctgaaaatgacaatatgaatcgtacgaataacaaggacggcgaaaaggcgaagctacgcatcgacgaccacgagcgaggtcgccgagaatgggtgcgtgactttcgtcggcgattgtggtggtgctgctacagttttgatcgtctggtcagctgctgtgtcggtcgtccgttcggcatcagtgatcaggccataagtacagaattcccatccatcctggaagacaaatatatcactaaatctgggataatcaaagccccggaaggcgctcccagttataaacattctgcctttcattattttaagctgcgcgtgctgcagtcggagattcaggacgttctgcagcaccagcaggcccgattcgcccgacaacgaggcccacccggcgccaggagctttatgcgccttgatgtcgtgtcacccttccttcaaggctttgactctttccgatcgtggcggagggacgttgatcggcggttgttcatggcagaa

SEQ ID NO: 21284 - DNA, 601 bp, Emericella nidulans
caaggtgagcggactacgttttgcccttccagtgggtttttgggagtttcgtgtcgctgcgcaattccaagggactcttcgcattctacgtcatatacaacccattcgagtcgctgctgccgcgtagaaacaacatagaggaggacaaatgctaacaatcacggccagattcgctgccaccagcaccaccacttccgatcccaataagatccttgtcgagcagcgtctgcgccgccccgtctctccccaccttaccatctaccgaccccagatcacttggtacatgagtgccctccaccgtgtcaccggaatcatcctttctggtcctctgtacattttcgccactgcatacctcgctgctcccttgtttggatggcaccttgagtctgcctccttggccgcttctttcgctactctgcccttggccgccaagttcagcctcaagaccttagctgctctgccgttcacctaccactccttcaacggcctccgacacctgatgtgggatactggccgtggtatcaccaacaagcaggttatccagaccggctggaccgtcgttggtctgagcattcgtagcgctctttaccttgcttatgtg

SEQ ID NO: 21285 - DNA, 395 bp, Emericella nidulans
  unsure (1)..(395): unsure at all n locations
caaagatggggtcttcctgtaatatcctcggtgaaaatcacccccgaattcggttcaaagcctagggaatanacctctttccagaagtcgatgagatcgaggagtataccaggaactatagaccagagcaagcgaggtatgttgatctcttggtttatattcagctcattctgcaaacgcgcagtaaccccgtctcacccctcncccgcaggcagaactggtaggtatgcaagatctctagaattcaaaaaaagcccgctcattaagcgggctaattcgagctcgcccggggatcgatcctctagagtctgatacggtattttctccttacgcatctgtgcggtatttcacaccgcatatggtgcactctcagtacaatctgctctgatgcgcta

SEQ ID NO: 21286 - DNA, 850 bp, Emericella nidulans
caaggccatcagctttgttgacggtaaccgtgctggagagtacatctacactcgcgggtccgccaatggtaagcgtgtgcaggccaaccttggggccaagaatcacgctgccgtgcttcccgacgcaaacaagaaccagaccatcaatgctattgttggagctgctttcggcgctgcaggtcagcgctgcatggctctgagcacactggtcacagttggtgaaaccaaagagtggctgccagagatggcagagcgtgccaaggcgctgaatgtcaatggaggcttcgaagagggcgctgacctcggccccgtcatcagtcctgagagcaagaagcgtatcgaggatctgatcgctagtgcagaagaggagggcgccaccatcctcctagatggaagaggttacaagcctgaaaagtaccccaatggcaatttcattggtcccaccattatcaccggcgtcaccccagggatgaagtgctacaagcaggagattttcggccccgtccttgtctgccttgaagttgagaccctagatgacgcgatcgagctcatcaataagaacgaatatggcaacggtgccgcgatcttcacccgctccggccctacagcctccagattccagaaggatattgaagccggccaggttggaatcaacgttcccatccccgttcctcttcctatgttctccttcactggtaacaagaagagtattgccggtggtggtgccaacactttctatggcaagcctggtctccagttctacacccagcagaagacagtgacgagcttgtggcgcgctgaggatgccgtcagtactaaggctcatgttgtgatgcctacacactcataa

SEQ ID NO: 21287 - DNA, 850 bp, Emericella nidulans
cccgaccaacccgcttatcaagattgtcgatatccctacgattgccgcggcgtcgcacgaagcgaaccctaactgtctagtcatcgtggacaacaccatgatgtctccgctcttgctcagcccgctcgaactcggcgcggacgttgtctacgagagcggcacgaaatacctgtccggccaccacgatgtcatggccggagttattgcagtcaacgacccggccctcggcgagaggctctactttccgatcaacgcgtccgggtgcggactgtcgcccttcgactcttggctgctcatgcgcggagtcaaaactctcaaggtccgcatggatcagcagcaggccaacgcacagcggatcgcagaattcctggagtcgcacggtttcaaggttcggtatccaggtctgcgctcgcacccccagtacgacctgcaccactccatggcccgaggagcaggcgccgtgctttcatttgagacaggcgatgtctctgtcagtgagcgcattgtcgcgaacgcgaagctgtgggctatcagcgttagctttggctgtgtcaacagcttgatcagtcttccctgccggatgagccatgccagtatcgatgcaaagacgcgaaaggagcgtgccatgccggaggatctgattagattgtgtgtgggcattgaagacgtagacgaccttattgatgacttgaggcgagcagtaagtgtttctacgcgtaatcgtgttttctgggttatgctaatattctctagctggtacaagctggcgctgtcaacgtcactctggacggcattgaagcgaacacgccgcagtctgcgtagtcaagtaatgaaggaatatggttatgga

SEQ ID NO: 21288 - DNA, 801 bp, Emericella nidulans
tccaacctatcttggctggtctggctgacgatgtcgacacgattcgtgagacttcgtatcgcgccggtcgcatgctggtcaagaacttctcgtccaaggcaatcgatcttctgcttcctgaacttgagcgcggacttgcggatgatagctaccgtatcaggttgagttccgtcgagttggttggtgatctgctcttcagtattacaggcatcacggccaagaccgaggccgaagaggaggatgaagaagccgctcaggctggacagtcactgctcgaggttcttggagaggagaggagagacaaggtcttgtccgcgctgtttatctgccgctgcgatacttccggtctcgtcaagactgcagcaatgggtgtatggaagtcgcttgtcgcgtctccaagaacactcaaagagatggtccccaccttgtcccagctcatcattcgccgtcttggttcttccaacatggagcaaaaggtcattgcaagcaatgctcttggagatctcatcaagaaagccggagagtctgttctcgccactttgctgcctactcttgaagatggtctccaaacctcccccgatgtggatgtcaagcaaggtatctgtatcgcgctcaaggaaatcatcgcatcttcctccccagatgccctcgaggactacgagaagattctcatatccattgtccgtgtggcattggttgacaacgatgatgatgtccgagaagcagccgctgaggctttcgatgccctgcagcaaatcttgggcgcgaaggcagtggatcttaagattgggtctcacccat

SEQ ID NO: 21289 - DNA, 366 bp, Emericella nidulans
  unsure (1)..(366): unsure at all n locations
aaataggcagcttaagaggaaggggtaacaaagcaggatcatcnaccaatacctcctccgagacctcgtctcccagcgcatgtcctccaccgacgcgataaccaacgggcttgacacccttcacattttgccgtcacgcaatggtgcgggcgcaatccaccccattactggtatgcgaaaggacaaagtgaagcgcgaggtggacacgcgggcctcgaagggccgaaaaatgcgctttgatgtccatgagaaattgcagaacttcatggcgcctgaggagaggggtacttggacgaagagggcgcgtgaggaattctttgcaagtctgctcgggaggagtgcgagtggaatattacgagaggacga

SEQ ID NO: 21290 - DNA, 626 bp, Emericella nidulans; identical to SEQ ID NO: 9641

SEQ ID NO: 21291 - DNA, 850 bp, Emericella nidulans
gccggccacctcctcctctcctctgctgctgacggcaaggccaagatctgggatgtgtatcactcgcgtgaactgctccgcactttctccggccactcaaaggccatcactgacaccgatttccatatcacgggcaaaaccttcctaacagcctcctacgaccggcaaatgaaactctgggataccgaaacaggccagtgcatctcgcgcttttcaaccggcaaaacccctcatgtcatccgattcaaccccaatcccgaaaactcccacgagttcctcgctggtatgtctgacaagaagatcgtccagttcgatacccgcaccggcgagcaggtccaggaatatgaccaccaccttgcggccatcaacacactcaccttcgtcgaccaaaaccgccgcttcatctccacatccgacgataagtcccttcgcgcctgggaatacggtatccccgtgccaatcaagttcattgcagagccgtacatgttcgctctcacgcgcgcagcggcccatcccaacggcaaatacgtcgcttttcaatcgggcgataaccagattgtcgtttacggcgcgacccgacaagttccgacagaatcgcaagaagagtttccgcggccacaataatgcgggttatgctattgatctgacgatctctcctgacggccagtttatcgcgtccggtgatagtgccgggtacgtgtgcttttgggattggaaaacgggcaagatgtatcataagatcatggcaggggggaaggagggcggggccacgacttgtttggattggcatccgcaggagacgagtaaagttgtcacaggcgggttagacggggtaattcggttttgggat

SEQ ID NO: 21292 - DNA, 803 bp, Emericella nidulans
gccgactcgcgcgaggagattctcacggattcgggaccgatgcgcctgaaccgccagtcgatgctgttgctttcagacgtgcaaaagcaggttcttgaggcgcaggttgccatgcccacacccaaggtcgggtactttagaatctacggctacgcaactgggtgggatcttgtcctgcttgtgctaggagctgtctgtgcagttggcgggggagcagcgttgccgctttttactgtacgtccctcctttctttctgcagttactcaaatggtccctcggcgtggaggattgtgctgattggtgaaggtgtttttcggaaacatcacgtccactttccgtgatgtcgcgagctatgcgatgccttatgatgagttttacgatacgctgaccaagaatgtcttctactttctgtacttgggtatcggcgaattcttgaccatcggctttgcgacgtttgcctttgtgcatacggggaactccattacccagaagattcgagtccgctacctgcaggccatcctgcagcagaacatcgccttcttcgactccctgggcgcaggagagatcacgacccggatctcgggcgatatgcacctcatccaagacggaatctcggagaaagccagcctcgtgctgacgggtgtcgccagtttcgtgactgcgtttgtgatcgcctttgtcaagtactggaagttggcgctgatatcgacaagtacgctgggcgctctgctactcatcatgggcattggatcaaccgtctcggtgatctacagcaagcgcagtatcgagtgttatggaaaggg

SEQ ID NO: 21293 - DNA, 499 bp, Emericella nidulans
acggccatgtttttaagcagaacaccctagtgtacaacaccatgctcggaagggctttcacgcaagctggtgggacaactacacacaggcgactataggggcatcgtgtgaccgaggacagctgaacagagcccagacgtgccctgactcacggctgcctcctcagtggatcccgagcccaacagggggcacggcaggagacctccactagaatcaccagaacactacagtatcagtgcgtgcagaatccgatacgctcatcccaccgcgagctggcgcatgcatctgtgcagcgccatagccgaatctcactccaagtcagggagttgtgcatcaagaattggagctatttatagccgagatgcaggcagctaccatatagacgcacgatgaaggacgagtcatgattacagagtgcaaaaggggatggctacggccggggtatgaccagtgcgcttgggactcaactcggaattcgaatatgatgcaggtgccatgg

SEQ ID NO: 21294 - DNA, 850 bp, Emericella nidulans
acggtgtagggccctgcggcccccgaggcttctatggtacccaagatgtccacatgaagaccgaggcggatgttgcttcctatcttggcacagcgtcgtgtatcatctactcccaagcgttttcgaccatatcaagtgtgattccggcattctcgaagcgaggtgatattattgttgcggacaagggcgtgaatttcgccattcggaagggtatacagatctcgcggagtatagtccggtggtacgagcataatgatatggaggatcttgagagggttctggccaagatcaccaaggagcaagcgaggaagcctctcactcgacgatttatcattactgaaggcttgttcgagtcgtatggtgacatgagtgacttgcctaagatcgttagtctccttttcacttccttaatatttcggacatagctgattagctgtgaagattgaactcaagttgaagtacaagttccgactgatcctcgacgaatcatggtcgtttggcgttctgggaaggacaggacgtggtatcactgaacaccagaacgttgacgcggccgaggttgacatgattgtgggctcgctggccggcccattggttgcgggagggggtttctgtgcaggatcggaggagattgttcaccatcagcgtatctcggccgctgcgtacacgttttcggctgcactgcctgcgcttctgtccacgacggctagcgccacaatcaacatcctgcagaacagccccgagacaatctcgcacctgagagacctcacaaaggcaatgtgggcgcagcttgaccctcgcagcgattgggttcgatgtacaagtgcgcccgagaacccgatcctggtcc

SEQ ID NO: 21295 - DNA, 850 bp, Emericella nidulans
tgcctattatcgatcttgagtcgatgtcgagtatccgggaattgctcagggatagcgcgaatggaacaatggatatcaacccgacagcgtacttccagcggttcgcgttgaacacgagcttaacattgaactatggaatccgaatcgagggcaatgtgaacgatgagcttttgcgcgaaattgtcgatgtcgagcgcggggtgtcgaacttccggagtaccagcaaccagtggcaggactatatcccgctcctgagaatcttcccgaagatgaaccgcgaggctgaggagttccgggtgcggagagacaagtatcttacctatcttttggatgttctcaaggatcgcattgcaaagggaaccgacaagccctgtattactggaaacatcctcaaagaccctgaggctaagctcaatgatggtatgccgtccggtcctgtccgcgcttgaaggaaaataaagattaacagagtctagccgagattaaatcgatctgcttgaccatggtctccgccggcctcgatactgttccgggcaacttgatcatgggcatcgcgtacctcgcctccgaagacggccaaaggatccagaagcgcgcccacgacgagatcatgaaagtctacccggacggcgatgcatgggagaaatgcctgctcgaagagaaagtcccctacgtcacagctttggtcaaagaaacgctccgcttctggactgtcattcccatctgtctgcctagagaaaacaccaaggatattgtctggaacggagccgttatcctaagggaactgccttttgcatggtacctcagcacaatccacatgtcatatagacaatactgatttattatgaag

SEQ ID NO: 21296 - DNA, 777 bp, Emericella nidulans; identical to SEQ ID NO: 7558

SEQ ID NO: 21297 - DNA, 481 bp, Emericella nidulans
gatgctgggcaaaaaatatgggtagcccagtgatagtatcgcaaggacaggattttgcatcgtctactctgccaaaagaactagacgacccaagatatccacgcgttcgcggaggagcggatattatggttaaagatagggaccagcgtactccattgcatcatgcagcaaaggaaggacaccttctctcggtatcgcttcttctgagccgcggtgctttggtggatattcctgacataaatgggcagaccccgctctacctagcagccataaatggccggctcgaagccgcacagaaacttttgagcgagggcgctaatttcagaacaactgatcaagctgggcgtgcaatcagtgtgaagttgaaggaggagttggatcgctccggcgacgacgtcaaggagaggttgattcaagtgcagagattatttgagggtttaagccggtcacctgagctatatacgaatccgatacatggcag

SEQ ID NO: 21298 - DNA, 593 bp, Emericella nidulans
tctggtaataccgactccggagacgaggaacctgcggagcttgagcaagaccagcttgatgcattgtacaaaaaggcgcagtccttcgactttagcatgcctgaagcccagcctccctcatcgttcgccatggatctgcgaaaataccagaaacaagcgctttattggatgctctcgaaggagaaggataagaaatccgggagagaggtctcgatacatcccctctgggaagagtacgattggccactgaaagacgttgatgacaaggacctgccgattattgaagggataaaccatttttatgtcaatccttactctggagagctcagtcttgacttccctgctcaagaacagcattgcctaggaggtattctcgcagatgagatgggcctggggaaaaccatcgagatgttaagtttagttcattcccacagaaacctccctccaacacagagtcttggtaatttgaccagacttcccgtgtctggtgtcgttccggctccctatacaaccctagttgttgcgccaatgtctctactcgcccaatgggagggggaggccctgaaggcgtccagaaatgggtcgatgaaggt

SEQ ID NO: 21299 - DNA, 850 bp, Emericella nidulans
agctagtttgtctcagtgcaaacttctttctctcgatgtcggctcactggttgctggaagcaagtaccgcggcgaattcgaagagagattgaagggtgtcctcaaagagatcgaggagtccaaagaaacgatcgttctttttgtcgacgaaatccatcttctcatgggtgcaggcgctagcggcgagggtggaatggatgctgccaatttgttgaaacctatgcttgctcgcggacagctgcactgtattggagcaacgacgcttggtgaataccgaaagtacatcgagaaggatgccgcattcgaacgacgattccagcaagtgctcgttaaggagcccactgtctctgagaccatctcgattcttcgtggtttaaaggagaaatacgagggccaccacggaagcgtgcgaattctcgatgccgttatcgtcaccgcagctacccttgctgcacggtatctcacggcccgtcgactgcctgattcggcggtcgatctcattgatgaggctgctgctgccgtcagggtagcccgcgaatccgaaccggaggctcttgataaccttgagcgtaagcatcgacagctccagatcgagattcatgctctcaagcgtgaaaaagatgaggcttccaaagcccgtcttcaggctgccgagcaggaagcggccaatgttattgaagagctgcggcctatgcgtcagaagtacgaaagtgaaaagcaacgtaacaaggccatccaggatgccaagactaaattggacaacctgaagaacaagcaagaggaagccgagcgatccggtgacaccgaaaccgcagcagatctgaaatattacgctattcctgagacccag

SEQ ID NO: 21300 - DNA, 532 bp, Emericella nidulans
atgtcccttctcaaggctatatcaagattgctgactcctcctgaagattatattgtaccaacctcccagacaagcttcgaaaatatgacctccgactcgccctttatacacttttttccacatatggcaccgttctcgacattgtggccatgaaaaccgaaaagatgcgcggccaagcccacgttgttttcaaagatatccaagcaagtacacaggcaatgcgtgcacttcaaggattcgagttttttgggaagccaatggtaggttcactccaagcgttgactggtggtgactgacgtactggaagaaaattgtctacgctaagggcagttcagacgttattgccaggcttcgcggaacttatgtcgctcctgcaacagctcctggtcaacttccgactgtgtcaacggatcttcaaaaatcgatttttagcggaccccctgggcaaccgctttgcctccaaagccttctggtgagcccaacgggactgctcaaggagtgaagcgccaccaagatgagagtgatgaaggcg

SEQ ID NO: 21301 - DNA, 494 bp, Emericella nidulans
ggctcgagaagcttgttgtcgaattcatatgaaggaattcatattccgacaaaagaagattggacaagtttaaaagagcacgtgcagaagaatggcttatacaactcatatcgtgttgccattggtccaacacaatcaatcagttacggtcaaaatgcaacttcaagcgtaatgccgatcgtaagttaaatcgaatcaagaacatatgcgaatgcgacaacatattatccaatgccgtatttatgaaaagatacgttctggtactataaatttttttacgaaatgaattaggttcaatttaattgatttaatcgcagaaattcaagaacatattggcccaggaattagtacaattttttacgcttataggggaaattttaacaccgggaattaccacggtacttacatttttgccataaaaaaggctttaagaggtctgttttataccagaacacgtttaataaagcggggaaaaatgtgtggattggtcccgt

SEQ ID NO: 21302 - DNA, 451 bp, Emericella nidulans; identical to SEQ ID NO: 10262

SEQ ID NO: 21303 - DNA, 778 bp, Emericella nidulans
atgcgattcacagctctgcttatcggtcttctggcatacctggtgtcctccgtcaccgcaacagccctcacctaccgacttgaggcgaacgagaaagcttgcttctacaagttcgtcgagcaacggaacaccaaagtcgcattttactttgctgtgagatacaaaagcccattttactagactatacaaacactgactcttcggctctgctaggttcaatcaggtggctccttcgatgtcgactatgctgttgtcggacccggcgagaagcctgtcctagacggcaccaaagaacgccagggcgactttgtctttacggcccagagtgtcggcgagtaccggttctgtttcaacaacgagatgtccacatttgccgaaaagatggtcgattttgagattgcggttcgtcctcaaccacagccacatcctcactttccccttcacttggggcccgatctggactagactgactctatctgcgtttttgttgcagcttgaaaacgaatcccgcaccgagctcccatcccgtcagggcgcgaaccctgaacaagcctccgcgatcgaagagtcgattttcaagctttccgcgcaactgtccaccatctcccgtaaccagaagtacttccgaacacgcgagaaccgcaacttcagtaccgtgcggtcgacggaacgccgaatctggaacttcagcatcattgaaagcctcatgatggtttccatggccggactgcaggttttcattgttaggttcttcttccaaggggccaggaagggtatg

SEQ ID NO: 21304 - DNA, 850 bp, Emericella nidulans
cgaaccggcctacatccgcgagacgaaagccctaggctcctactggaacttgcccgacacatcgaacgataaggccgccacaatcgaagaccacctcgattttctcattgagttctacgaaggccaggtcgaggaccgtaggtggtacgggttcctcgattacggcgactacatgcacacgtacgatgaggacagacacatctggcggtacgacgttggcggctacgcgtgggataactccgagctctcgccggacctgttcctctggcagcagttcctgcgcaccggacgcgcggacgtctatcgtctcgctgaggcactgacccggcacaccggcgaagtcgacgtctaccacattggcgactggaagggtcttgggacgcgccacggcgtgcagcactacgccgacagcgccaaacaggtccgcatcacccagccccagtatagaaaatacttcttctacttgtctggtggagacgagcgtgtcggcgagatcctagaggaagcacttgacaccgacaagacatacgaggtcctcgatccgaaccgcaaggtccgcacggacggttggacgcccacgccgggacagtcagccaccatctccctcggtaccgactgggctggactcgctggcggctggctcatcgagtgggagcgtcgcggcccgcgctggcaagaggcacggtacaaactcacgcagacgtcacggggcattgcaaacctgaccaacggctttgtgaccggctcgggactctactcagccacaagtgggagcctcaatgcgcctcccgcagacccaaataacaaaggccttgtctccgtctcacacctcaacgccgtcatcggccta

SEQ ID NO: 21305 - DNA, 500 bp, Emericella nidulans
ttgtctctgtccagcatttctcttctggttcccatgacatgtcagtcttgctgccgatccaagccgtgatccgcagatcgtcattctgtcgcttctattcgacttccatccacctgcctcttcaagatcagtttaaaccaccagcacccttgtcgagctctcctcggtctcttcccaaccatgatcccatattctcacgaacatctccaagaccggccgtttccagcctctgccagacgcgaaagcactgcgaccgtttcttccaccccctcgaccgcgacctcgtcccgctcgtccgtctccggctccctctgcttcgtctctgaaccgcccttctcgccctctctaagcccgtctttgtttccttcgccatcgacctcagcgtctgtgtcgctcgcatcccggccgcgagagggctccctcaatgacgaggtcgcacgattaccgctcaaccccgcggtgacggtgtatgtccacctcaacccgagagcaatgtggcg

SEQ ID NO: 21306 - DNA, 850 bp, Emericella nidulans
aatcgtaagcgacgaatcccagtactgcccagtaggtcctctgctcgaccccaaacacgcctacattgtcaacgagcagggcgagaaggtagaggagggagtttctggtgaactctgcgttggcgggcccatgcttgcaagagggtatatcaaccgcccagagacgaccgccaaggcatttattcccgatccgttttcaaattctccaggagctgtcatgtaccgcactgaagaccgggcgcgtatgttgccgtcgggtcttcttgagatcactggtcgcgttggtgcaatgatcaagctgcgcggatattccgtagtcccgggcaaggtcgagaatgatattgtcaagcacctcgcggtccgacagtgtgccgtcgttgcacacggggagggcttggaaaggcagctggtggcatacattgttgccgaccaggaacactctgaggagcgtccaaccgtggagattaactcctccggccacagcccaggtgcccgaagagccctgaccaaattcctcgctcactatatgattcccgccctatgggtgcaggttgatgaactgcctacccacgaggtgtccggaaagattgatctcaaacgccttcctccgcccccgaccgaagtcctcgccaacgggaacggaaagaaggaagatcccatcggcattgaggacattgcagcaatctgggcggtcgcgctcaaggttcccaaagcgacgcttaagcctgaagacaacttctttgatctcggtggtcactcgctttcgattgcggacctctcttctagctgtcgcggaaattcggtttccgcatccccatcgtacgcctggcagaaaattcaacgctgagcg

SEQ ID NO: 21307 - DNA, 460 bp, Emericella nidulans
cgaaccgacttaacgctagtaccggtgcgtatccatgcatgacgccgtgccgctgttctctactgacctgtaagtataggcattcgcatcaaggccaagtccggcgagaccggtgagatcaagggcgtcacctactctggtatcagcctcgagtccatatccgagtaggctccccttccagcccagttctgaatccagctctaacctcgtccagttatggtatcctcattgaacaaaactatgacggcggtgatctcgacggcgaggtgacctcgggcatccccattaccgacctcaccattgagaacatctccggctccgcgccgttgactcagatggatacaacattgtcatcgtctgcggtgacgacgcctgctccaactggacctggtccgacgtcgaggttaccggtggtgaggattacggcagctgtgagaacgtccccagtgttgcatcttgc

SEQ ID NO: 21308 - DNA, 443 bp, Emericella nidulans
gacgccttcgccgtcattgttttgctctgaatctggctattcctgatatcgactttggcaccttgcatctctatattattgactgtatgtttcattctcctgctctgcttgtcttgcgctaatcagaaatgacattagggggcgtgagcgataactcctggggaaaccaatgggtccaagaccacgccgcaatctgcgatactctcgacaagccgtgcctgtttgaggaatacggaatcaagaataaccattgtaccaacgatttggactggcaggatacttctttggccgcaactgggatggcaggtgatttgttctggcagtttggcgacgatcttagcggaggccaaacagctgatgaccagtacactgtatactatggcaccgatgactggacttgtttggtgacagaccatgttgccgagatcaacggagcctagatt

SEQ ID NO: 21309 - DNA, 850 bp, Emericella nidulans
agatctaaacaccaactgcaggcctcgggagggggctcgtgcaggcatttctccttcgccccaacagcatcgtcatcgccggtctccgcaatcgcacttcgcaggcgggggccttggatgcgctcccaagaggcgagaactcctcgctgatcgcagtccaactggacagtggatcgaagtccgatcccgccgacgcggtcagcattctccagcgcgattacggcattacgcatctcgatgtagtgatcgcgaacgcagctattgcggccaactacggtccagcctcgaccatgcctctcgagtatctggagactcacatgcagattaacgcatacgcggccctgctactgttccaggcgactagggtccttctccaggccgccaaatcgccgcagttcatctgcgtcggggccccgattagcacgattaccgagatggagagctgtgcgcgggcaccgctcacaaattatgcactttcaaagctggccgcctgctatctggtgcgcaagatccactttgagaataagtggcttgttgcgtacattgtcgaccctgggtgagaatgcccggattcgattatgactgtctgaagcgcacttcatcttggctgacgagatcgggccggtagacacatccagtcagatatgggcgcccaggctgccaggttgttcgggcgcaaagaggcccccacgacgatagaggaaagcgtggctggtatctgtgccagggtatgtttccgtttcgctaattctgcatcgaactaatcctgtgaggacagatgaccgaggccgacaagaatacaacgtctgggcgctttattctattttcggacggctcagacgtgccctgg

SEQ ID NO: 21310 - DNA, 850 bp, Emericella nidulans
gcagtgcttgaccaaagacccggaacgcaggcccagcgcaaaggaacttctaaggcacaagttcatccgcaacgctgggaagacggaggctctgcaggagcttattcaccggaagcaggactgggacagtggacgtggtgtttcaaggaatgtgaaatactatgcggaatctttgtatgtgtctttcatatgttgcaaagcctgcgagctaactcattcaggaatacaattacacatttcacagacgatgacggctgggtgttgacacagtcaaagcacctaccatggtttccgagaggactctgatgtctcagacagcggatccatcattcatgaccctccatatgatgagtctgcggagatggtggaaaatcttcgcatctctagcccaccaacccagaagtacgcaaacggtactgccgtccgccgtattccagcacccgaccgcagcccgtctctgcggcgaccgaagcgacggtccagcggtgttaagcaaccactaggagtggacttgacatttggcaatagcccttccacggtccgtcaattccgtcgcgtgtctgataaatcgccaagcgaggatccattctcctcataccagcttaccggagacgaaaatgcgagtcctaagtctatatactcagaaaccaacagcaaagaagctcaactgggacgtcgagcatacagcaaggctgtaggtcacgcttgccaggaggttctgggaactactggagaccaagagaagcgggaagcgatttctcgtcttgctgaggcttggagtgacctagaaatggtggatccagaaggcctataccacatcctccgagccactaatgagaaactgctaagg

SEQ ID NO: 21311 - DNA, 502 bp, Emericella nidulans; identical to SEQ ID NO: 3505

SEQ ID NO: 21312 - DNA, 588 bp, Emericella nidulans
gtgggtattgtgatgatgagaaccaatagcaggggcagcgtcattagcacaagcgaagatgctcttattataagacaaagaggccggagaaaggagcaggagcggtggttccgatgacgctgatgaacatgcacgcgataaaattaggtccggtcggagctccttggaaagcaaatttgaagatctcaacatccccgaagaggctattttaccatctatcgaagacgatttaagccccaggaactcgccttcacctctcgccctggcctcaaggtctgcgctgttaacctctgacaccaagccaccatgctctcggtatatcacgaaaattcacaaacgggcagacagtactgcaagtcttgaatcccctaagcgaggacagataactccccccgtcgtctttcccagtcagtctcagaatcccagcgaggcgtacccgagtactcccccgatcgtgttcgacggcccggccgactcggggccataccaatcaagtctcactcccatcccagattctgacgccacgcctcggcccatgcatacaccttgccccaaccctgatacagagaaaactcctcgaccagggag

SEQ ID NO: 21313 - DNA, 850 bp, Emericella nidulans
atcgatgtccactttgtgcgcaaggcagtccgggcgattgggaaactggccatcaagatcgagtccgctgccaaacagtgtatcgattgtctcctggacttggtaaacgccaagattccgtatatcgtgcaagaggcaaccgtcgtcatccgtaatatcttccgcaaataccccaaccagtacgaaagcatcatcggccaagtcatccaaaacatcgatgacctggacgaaccagaagccaaggcggccgtaatctggatcattggccagtacgcagaccgcatcgagaactcagccgacctcttgcaagactatctcgctacattccacgacgagacaattgaagtgcaactctcccttcttacagcaactgtcaagctcttcatccagcgcccaacgaaggcccagcaactcgttccgcaagtcctaaaatggtgtacagaggaaacagatgatccggatctccgtgacagaggatacatgtactggcgtcttctttcatctgacccaacaaccgcccgtcaagtcgtcatgggccagaaaccacccatctccgctgtgagcgagaaactcgacaaccgcaccctcgaggaactctgcctcaacgtcggaaccctcgcaacggtctatctaaagcctgtacaacaagttttcaggtccgcgcgtacccgtcgtctccagtacagtccggctcttcaaaaacgggttgaagaatacggctcaaactcctggcaatttccggcaccacctctaagcctaaaccccgttacttcgtccactgcggcaaccgcaacgtcagcgaacggatccgcttatacgccaactgggtacacgagcgctgtcttagtgc

SEQ ID NO: 21314 - DNA, 503 bp, Emericella nidulans
atcaatcagacggtaaccgagcgcgcgataactgtatcggactcatgtatgatggactctgtctacactcagccgaaccgccgaaggccgttctatcaaaggccgcagcagtcgaagcggcggcatatgacgcctacggaccagaaacgaaagaaccctaccgtacgaagatccgcagtctattccagaatctcaagaacaagtccaacccaacgcttcgagttcgtgttttaagcaacgaggtcacccctgaacgattcgtgaaaatgacacatgaggagctccgatccgacgaacagcgcgagaaagatcgaaagattcaaaaggagaacatggataaggccatggtggcccaggcagagcgcagcattagtacaagcttgcaatgcggcaaatgcggacagcgcaaggtcacctatactgaagcgcagacccgcagtgccgacgaaccgatgacgctgttttgcacatgcatgcattgcggaaaatcatggcgccagtaa

SEQ ID NO: 21315 - DNA, 850 bp, Emericella nidulans
ctcatccgctacctctgtgtctgacatggaagatgagcgtgaagaaacccctgacctcttccgccactctaccctgggtatgttggaacctcgccacgaagaggaaacaagttcggaggagtcagaagaagaagacgatgaaatgtatgatgatgaatacccagacgaaatggactacgaagaagagatggcggaagacgacggggaagtgatcagcgatgaagaagatgagattgaaggcgttggccctattgaaggccttcctggcgataacggaatggacattgaggttgttatcgatgatgaggatgacgatgaagacgacgaagatgatgaagacgaagacgacgacgaagacgaggatgacgatcactccgaaatggacgacgatgaaatcctcgcgggcgagatcactggtgacagagataatgaaagccttgatgagggtgatgaggacgaatgggaaagcgaagagatgtcagaagacgatgatgaagccgacattatgaaccagctcgaggacgaactagcggatatcagacacacggatcagcggcatgacgggggacgccttgaagacattttccgtgcgttgaatgaggccgctggtggcgttgaagacctccaggcggatagcttgggagatttgcatgatgacattgccgatgacgagctgaacgaagatgatggttcgtatatcctcttcgccgcagtttactccactgctaacatacgtaacagaagacgaagaaattgatgagctagaggaagagcttgatgaagcagatgaagaccaaggttcttaccatggatttgacgacgatgaagactcattgatcattggggatgg

SEQ ID NO: 21316 - DNA, 528 bp, Emericella nidulans
tcgaaacgggaacaagaaggtcttatccgaccttagtgtgaacagcgtgcgtgtgagcattcggataaaacaggcagatgaaattgagcatagtaagcttgataccgttgcaatgtggccttaacagagttacgggctatacgctaacatgaatcaagtccttgtccacaagtttgaacgtttcttgacccaacgcgcggaatctttctttatcttgcgaagaaagcctgtgaaggtacgaagacataaggacatgaactcgtccagccacaccgcatagcggctgacaaatgagcagggctacgacatatctttcctcattacgaacttccacacagaagccatgcttaagcacaaattggtcgacttcattctccagttcatggaggaggtggataaagaaatctctgaaatgaagcttttcgtatgttatttttaaatcttgcccctctggctgaagtccatgctgacactcccaagctgaatgctcgcgctcgatttgtcgctgagtccttcctgacaccggta

SEQ ID NO: 21317 - DNA, 755 bp, Emericella nidulans; identical to SEQ ID NO: 12931
  unsure (1)..(755): unsure at all n locations

SEQ ID NO: 21318 - DNA, 850 bp, Emericella nidulans
ctctccggagcatctggccaccagcgcattcagtttaatgttcgccatgatcacggcgtggatgatcgcgctgggagggacgacagcgctggatacactggccagctcgtcctttaccgggtccgacaaacggaatctggggatcctgctgcagagggggttcttcgttctgggattgttctaccttcccgtggcggttctctggatcttctccgagaaggtgtttctgcttctaggacaggatgcggatctctccaaggatagcgcgcagttcttgactgccctgattcccggggggctgggatatgtctatttcgagctgatgaagaaatatctacaggcgcagggtaactccagccactttcttttatcgaagttgtcgaagacttgctgaccagtatcaggaataatgcggcctggcacctatgtcctcctactcacatccccgcttaatgccgcccttacctataccttctgctacaagctcggcctcgacctcctgggggccccgctcgcccttgggatctcatactggctttcctttgcgctgctcgtactctacgcgatactcgtccgcggctctgaatgctggggcggctggagcagagaagcactcaccaacttgggcaccttctcccgcctggcgatcctaggcgtcgtccacgtcggcacggaatggtgggcctttgagatcgtcgcgctcgccgccggaagattgggaactatcccgctcgctgcacagagcgtcatcatgaccgcggaccaggtcctcaacacgatcccattcggcgtcggcgttgcgacatcggctagggttggcaatctgctcggcgccaaagacgcaaagggc

SEQ ID NO: 21319 - DNA, 850 bp, Emericella nidulans
gggatttctggctggcggtggcttttcatcatcgagggatccatcaccgtggccttgtcgctgctcatcccgtatgtcggccctctaccgtgtctcccaaacgctggactgacagtacagaatcctcctccccaactatcccgccacaacgtcctggctcgatgatgaggaaaaagcctatgcgcagtggcgtctgatcaacgacgcgggcgaggcggacgatacgggcgcttcgaccatcaaggaagccctgatcgccgtgttcgctgacaagcgtatctacctattcatcctgctccaacacgcctccctcctctcgcagaccttccaatacttcttccccacgatcgtccagaccctgaactacagcaacatcgtgacgctgctgattacggcgcccgtctggatcgctactttccttgtttcgctagttgtgacctggacaagcggcaagaccaacgaccgcagtatccacatcatctgtcttatggctgtcagcatcatcgggtgtatcatctgcacagcaacgaccaacctcggcgcccggttcttcggcatgttcctgatgcccatgggcgcagtgtccgcgtaccagatcatcatcgcctgggtcgcgaattcgttcccccgtcccctggtcaagcgctcggcggctattgcgacggcgaacatgatcgggaacacagcgagtatttatgggagctatatgtggccgtcttcgtcagggccaagatatatacccggtgggagtgcaactgctagtgtggcgctcttggtggcgcttatggcgtttgtgattagggttgtgcatgtgaggatgaacaagggtctggaagaaaaggagaacgag

SEQ ID NO: 21320 - DNA, 850 bp, Emericella nidulans
accctgctgagacgcgttatcttttcctgggcgactatgtcgatcgaggctacttcagtattgaggtgagttccctgcctctaatcactcggcctgtctgaccttttcagtgtgtcctgtacctatgggcactgaagatctggtatccgaatacactctggttgcttcgcggcaaccacgaatgtcgacacttgacagattattttactttcaagttggaatgtaagcataaatatagcgagcgcatctatgaagcctgcattgagtcgttttgcgcgctgccgctggcggcggttatgaataagcagttcctctgtattcacggtggtttgagccctgaactgcacactttagaagacatcaaatcggtatgttacgcgatgctgaatacttcaacagggtcaggctaacctgcctagatcgatcgattcagagaacccccaactcacgggctcatgtgcgatatcctctgggccgatcctttggaggacttcggtcaagagaagactggcgactactttattcataatagcgttcgagggtgctcctactttttctcataccctgccgcgtgtgctttcctcgagaagaacaacttgctctcagtcattcgagctcacgaggctcaggacgggtataccgcatgtacgtacgacgtgtaagccagggtatcgtggaatagagttccttatcctctcactcaacttcttagaattggtccccttctcctcctctaacttttgtgccacacttagcaattccgggattgttccagccacactccaccatgtgacgtgctttaaggctgggttgctctcgcggtatagccggaaatgagtatcgtcctttc

SEQ ID NO: 21321 - DNA, 850 bp, Emericella nidulans
attggctgatattatgagaaacgataggcatatcgggcctttgtgggtggcggtccacaataccaatataaattacgttcgattcgctgtcgagcggttagacgacaaggcaaagagtggtgcaaagattcggctgaataaattggcacctggcatacgccttgaacaggatgctgtcaaccagcggctaccaccaccgactatgaaaattgatattcgcgttgactgcgactatagtgatgtgcccaagcttgctaagtacctccctgatttcacggtagcgtctggcgtgagcgcaccgaaaattgttacagctattgcaagcaatggtgttcgctataagcagctcgtaagattcatattcgcgttgttcggccgtggctaacagtatcatagttcaaaggaggcaatgatgacctgcggcaggacgccattatggagcaagtatttgagcaagttagcagtctcctcaaagaccatcaagcgactcggcagcgcaatctcggtatcagagcctacaaggttcttcctctgacctctaatgcgggcattattgaatttgttccgaataccataccgctcaatgacttcttgatgcctgcgcatcaaagatactacccccgagacatgaagcccagcgcctgccgcaaacatattgccgatgtacagacacggtcctttgagcaacgagtccggacataccgccaggtaatcgaaaaattccaccctgttatgcgctacttcttcatggagaagttcaacaacccagacgactggtttggccgacggctatcatacacccagagcactgcggcaatctcgattctggggcatgtgcttggcctgggag

SEQ ID NO: 21322 - DNA, 800 bp, Emericella nidulans
  unsure (1)..(800): unsure at all n locations
tccactgccaaaatgaccactctccactccttctaccccctgggcgtcgaaatcccccattacattgccaatgaactcagtactcctactctgctcgccatatttggaacggcctgtacaatagtgttctctgtgactacctctctcgccaaaaaagccaactcgcagatctcaaattctgagctctacaagactctctggtttgccctgtgtaggttcctcacagctaagcagaagcgcaaccctaatagagaaaaaaacaggcggctctattcatcttgtcctagaaggctactacgccctcaacttcctcactctcgcctcgtccagccacccgctcgctcagctctggaaggaatacgccctgtcggactctcgctatctcaccccgaactctntcgtgatgtgcatggaagtccatcaccgcattgttctggggccctctttctttcctcctagctggatttatagcgaccaaccatccgtantggcatccgctgcagattatcatctcgttaggccagctctacggcgacgtgctatactacgggacttgtgcgtttgagttcctagtcaacggattggagttttcccgaccggagaggtactacttctggggatatttcatgcttctaaatatgttttggattgatatcccgcttggtgagttgctggctccgctcttttggtgagacaaatcctgatgctggatagttctcattgtggacagtgtaaaggcgtgtaagaatgcttttgccgagatcaaaaggatcaagacaggaggaataaatgggcgcctg

SEQ ID NO: 21323 - DNA, 721 bp, Emericella nidulans
tgccggcgcgggcgtagcagttggctacatcggagaaccagcaaagacagctaaaagtttcttccaccttcctgagctgtctcgaaattactcgcagagggcgaaatcattatcgcgcatgtaccggacgggtgacctgatgcgcagggatgagcttggtgtccattactacattggacgcagagataaccaagtaaaaattggcgggcgacggattgagcttgagacaatagaatcaatcctccaagagacgcggcttgttagtgccacatcagttattgaaattacgcctcatgaagtcagaaggagtgccctcttggttgcgttctgtgtcctgacattgcctgaagtcactactgcagctataacagatgcctatgctaagcatgaacctttcttgcctgtgccctgtctagagctcacagagatgttgccattgaaggccaatggcaaggctgaccgcgacaagcttgagcgccaatatatagggaggatcaagtcttctcttacgcagatcaatccagctaatgcacaatctggcagcattgaggatgagctaaaatatctatggcttgacgtccttggcctgcctgattgagacttgcacctgacagatgattttattgctataggaggaaatttaataatggtggcgaccctaattgccagaatcaagtatacttttggtatctccctgcgcgcctcaatgctctacaagaag

SEQ ID NO: 21324 - DNA, 850 bp, Emericella nidulans
ctgttcttgtcgacgttctgcttgccgcgatgcttttcagcttcaatcagaccttccaggaccgctctctgcctgttatttacaacgaaggccatgggcgtgagccctgggatacgtcgattgacatctcccggactgttggctggttcacgactctctaccccatcataattgagcagacaacagatgctatagatgcagttatcagggtcaaggatcgccgtcgacaggtttctgacaatgggcgctcggcctttgcgcgccgggtccttccacagctgggggctagctatgtccacgactgcccaatggaagtcaactttaactatctcggccaacacagagatctccagcgtactgatgggctcttccagctggctcagaaaatggctggtgagactcgagagggcggcggctcagctgactttggccgcgagactcctcgcttctccctctttgaggtctccgcagttgttgtagggggtcaactacgatttgtcttctctttcagcgcggcaatgaatcaccaggaacgcgttcagaagtgggtggagtcttgtaaggagactctacaattcctcgcggcccagctacctgaattgaaacctcgaccaaccctaagtgatatccccttaatgggattgacctaccaagagctcgctttactggagacacagacgctacgtcgttacggagtgcgctcgtttgagcaggtcgaagatatatacccttgctccaaaatgcagcagggtgtgcttctcagccaagcccgagacaaaatgctttataccgtctcgggatcttgggaggtcgagccagctcctgggcgccaagaagattccgcgtagac

SEQ ID NO: 21325 - DNA, 850 bp, Emericella nidulans
gacattgtcaggtaggtgttatcccagaacgcaagtggacagtacttacgcgttcagattccactgtgtttactggccagcgtttctcatggctctggatcttcccctccctcggaatgtccttgttcacgctcattggacgatgaaccgtgagaaaatgtcaaagtcgaccggaaacgtggtcaaaccctttcttcgcaattgaccgattcggaatggacacaatgcgcttcttcctagctcaccgtggcggccttgcatccgactctgactacgacaacagatacatcatccgcgattataagaaatacctccaacagggacttggcaacattgcccaccgcacaattggttgtgcgaaaggaaaattgcgggactatatcatcaatgctacatctggcaattcccccgcaaccgctgacgatcaggcataccagaagactctggagcagctctcccacaaggtagcaaagtgtatggaggcacttgacccacgtgcggcactagaggagatcgtggaagtaatccttctggtaaaatccctcaccgagtcgtagaagctcagtctactgacgcccttcttagacaaacaagtattttcacaactcggagccatggcagaatccggaggagaagcaacgcgtgattttcaatgctgcggagtcaatgcgtatcatgggcatcttactgcagcctttcatgccgaacaaagccaaaaagctccttgacatattgaaggtcgatccttcaaagcgggatctctctgatgctggctatgcacgagactcgacctacggcgaggatgttaagaaaaaaatcctcttccctccccttgccctcgagaactaag

SEQ ID NO: 21326 - DNA, 850 bp, Emericella nidulans
gtcttcatcaaacgtcttgaggatgcattagcagaaaatgatcctattctggccactatcctcgacatcaaaacaaaccactcggccatgtcggactcaatgacacggccgtttaagcctgcgcagattgacaacatgtcggctttattgagtacagccggaatcagcccgcttgaccttagctatatcgaaatgcacggtaccgggacgcaggtgggtgacgccgtcgaaatggagtcggttctgagtctctttgctccggacgagacatttcgaccccgagataaaccgttgtacgtgggatctgccaaagcgaacattggccatggagaaggagtttccggcgtcaccagtctcatcaaggtcctactgatgatgaaaaacgacaccattcctcctcactgtggcattaaaccgggaagccgaatcaaccggaactatccagaccttccagctcgcaatgtgcatattgcttttgagccaaaaccgtggcctcggacagatacacctcgacgtgtgctcatcaacaactttagtgccgctggagggaacaccgctgtcctggttgaggacgctcctgttcgtgatcccgtaactgcatcagatccccgaactagccacattgttactgtttctggccacgttgggaagtccctcaagctgaacttggagaaattgcgggatcatttggtgaagcggccggaaatcaatccttcggagctctcatatacgaccactgcccggcgatggcaccaccctcatcgggtgagtataacagcagctaacactatggaaatcttgcgatgagtgaaagcgcatgagcaagagggcatggagtcaaccgccccgc

SEQ ID NO: 21327 - DNA, 500 bp, Emericella nidulans
gattttcagtccatcgcaagccttttcttcgcttcttctcgaccacctccgtcagaatggccgccaacatcaacaacgccgccgcctggctgactgaagccaaggcgcaccctttccaagttaaggaggcgccctcttacacgcctgaggagaacgagatcctggttaagaaccatgctgtggccattaacccagtcgacggcagcctgcaatccaaggcctggtggcctatgaactatccgaccattctgggccaggatgtcgccggcgaggtcgtgcaggtcggcccaaatgtcgcccgcttccagccgggcgaccgcgtggttggccatgccgtgggcatggctaccaagcgccttcaagataatgccttccaagcctacactattctccagacaaacatggccagccagctccccagcgagatctcctacgaagacgcggccgtgctgcctctgggcctctccactgccgccttgggtcttttcaggacgagtttc

SEQ ID NO: 21328 - DNA, 850 bp, Emericella nidulans
catcatgggccataaggctcgtgtgcttccgaacgagaagacaatccgaatgcattacgctaactgtaacacatataacgccgatttcgatggtgatgaaatgaacatgcatttcccccagaacgaacttgcccgaacggaagctatgacactcgcagatgcagaccaccagtatcttgttgcgacttcgggcaagcctcttagaggtttaattcaagatcacatttcgatggctacatggttcacttgtcgagacgcctttttcgacagggaggactatcacgagctattgtacagttgtttgagacccgaaaattcgcatacagtttctgaaaggattcaagtcgtcgaccccgcaataatcaagccaaagcccctttggactggtaagcaggtgatcacaacaattctcaggaatattatgccacccgggagagcaggactcaaccttaatagcaaatcctcaacgccaggagatcgatggggagagggcaatgaggaggacaaggtcatattcaggaatggagagcttctttgcggaattctagataagaaacagattggacctacagcaggtggtttgattgacgccattcacgaagtctacggccacacagttgcaggaaagttgctcagtatcctggggcggctgctgaccaggtttttgaacatgcgcgctttcacttgcggtattgatgatctccgcttaactgatgaaggaaatcgtttgcgtaaagagaaacttgccgaggcaccgaagatgggccgggatgttgcgcttaaatacgtgacgctcgatcagaccaaggtgccagacgaggatgctgaatttacggggacgcccttagga

SEQ ID NO: 21329 - DNA, 500 bp, Emericella nidulans
aatgcctcgtctcaacaacaaagtcgccatcgttacgggtatgtatctttacaccttcaggtgaaagaaaaacccactgactccgatgacactgaaataggcggtggctctggcttcggcgctgctattgcaacccgcttcgctgaggaaggagcaaaagtcatcgtcgcggacattaacgcagccggtggcgagagcgtcgcagcccagaatcctgagaatctcgtctttcagaaggtcgacgtgacaagccccagcgattgggctgctcttgttgagactgcagtcacaaaatttggaaagctggatatcctggtgaataatgcgggaactacttatcggaataaggtgcaacccagtccccgttcgcaacttcttttggatatggctaatggcgtgcagcccacactagaggtaaccgaagccgagtgggagcgcgtcttcaatgtcaacgtaaagggcatctttcatggtacgcaggccgtcatcgcaagactgct

SEQ ID NO: 21330 - DNA, 850 bp, Emericella nidulans
cttcggattaccacgagatagctactcgtgatattgagagaccacctctataccttgtgacaggcaccgggcctgcaatcacaagcaatcgggtctcatatgtcttcaatttgcgcgggcccagcttcacagtggatactggatgttcgtcaagtttagtggcgttacatcaagcggtcctcagcttgcggaaccgggaaaccacgcagtgctttgttggaggcgttaacctacttcttgacccacaacgctttcactaccagagccggcttaaaatgttttctaaagacggtcgatcttttccatttgatgctcgtgctaatggatatggacgaggtgaaggtgtcacgggtgttgttctcaaaccattatcagttgccctgcgagatggtgaccctgttcgggctgttattagaaactctgtcctgaaccaggacggccggacacctggtatcagtgtgccgagcgctgttgcccagaaagaagccatcataagggcctacagacaggcaaagctggatttgtatgctgactatgtggaagcccatggcaccggaaccaaggttggcgatccaatcgagacgagcgctattgcagcggccctaacgcaaaggaggtcgccttcccggcctctgcccattggatccatcaagggaaatattggccacacggaaagtgccgccggtctcgctgggctgatcaagtccgttcttatgcttgagaacggtatgattccgcctcaggtgaactatgagacaacgaaccctgacatccatctggaggagtggaatttacgagtacgtaagaattctgtcgaaaacatgacaacactgactctaccagatcccca

SEQ ID NO: 21331 - DNA, 489 bp, Emericella nidulans
gttcttttcaagtcggcggcgtttttcgccaggttcggcttgtcgttcggtttatcttccttagggaccgcctccttcagaaggagggcttagccctaaggctcgcgccatgcggcatcctagctaccgaggcctcagcaggtgcaatgcggtttatcccgtcaacctctctatccgccgtttccgccaaattcaaatcagtgcttgcctgcctcgtagccggtaatccggatgaaagcgagcctctcggcgtccgcagggagtctatgggtacctacatcaaatcctgcgccggctactgcgtgattacatacctcctcggcgtcggtgacaggcatctcgagaatcttctccttgcgccggacgggcgcttcttccccgcagattttggctttattctggggcgtgaccccaagccatttgcgcagatgatggatctctgcaaggagatggttgagggaatgggccccccgtcttccccccgtaaaa

SEQ ID NO: 21332 - DNA, 850 bp, Emericella nidulans
aaactctcgcttgtagtcgacctcgaccaaacgataatccacgcggcggttgatcctactattggcgagtggatggcggacaaggataatccgaaccatgcagcagtgagcgatgtgcgagcgtttcagctggtagatgacggtcctgggatgcgcggctgttggtactatgttaagctgcgacccgggctagaagagttcttagagaatgtggccgagatgtacgaactgcatatctacacgatgggaaccagatcatatgcgcaagctattgccaatattatagatccggatcggaagctctttggtgatcgcatcctcagtcgtgacgagagcgggagcttatccgtcaagaaccttcatcggatctttccagtggacacaaagatggttgttatcattgacgaccgcggagatgtttggcggtggagccccaaccttattaaggttataccgtacgacttttttgtcggtattggggatatcaactcgagctttctacccaagaagcaggagctggaaactccaggggaaaaccaggaacaaaacccaacgccaccaatacaacagcaagtcaatgggttggccgaaaaatctgacgcgacagagctatcaactctagagcagctggtgactatggggggtggggataacccaagactcctgcaggaacagaccgaggcgcaagacgtgacgatattgcatcaggttgaggatcgcccgcttctacagaaacagaaagagctagacgctgaggatgaatcggcagattcgagggaatccggcttgaacgagtcgcgagattcggcgaagccacgccatcatttgttaattgacaacgaccaggaac

SEQ ID NO: 21333 - DNA, 585 bp, Emericella nidulans; identical to SEQ ID NO: 9603

SEQ ID NO: 21334 - DNA, 671 bp, Emericella nidulans; identical to SEQ ID NO: 6509
  unsure (1)..(671): unsure at all n locations

SEQ ID NO: 21335 - DNA, 850 bp, Emericella nidulans
ggatacctggggccctggctgcccgacctcttacgcaacggactacagcgaggactgtctcactgtgaacatctggacgggcgcgaattcctcgtctgacagactgcccgtcatgatctacaatcagggcagtgacgagccgagcaacagcgctgtttactatggcggtggcgtggcgcggaaaggcgttgtcgctgtgacattcaaccgccgtgacgatgtctttgggtacctggcgcaccccgaattgaatgccgagtcggagaaagaaaatggccacagctcgtcaggcaactacggaatcctcgacttcctcgagctgctgaagtgggtgcagcgcaacatcgagaacttcggcggcgactctacgagcgtcacgatagtcggacagtccttcggctccgcgcaggtctaccacgccgtcaacagcgggctcttcaagggtctcttccatggagctattgccgagagtggcgtgcgatacccctacgacacccttcttgccgggctcgcagattcgtacgtcaccatgccgaaagctatacagaatggtctcaactacacagcctcgcacaatgccagctcaatcgcggacctgcgcaagctctccaccgaggagatcatggtcggctcgggtgaccgtgtcacagatgccgatatctggtgggtgactgcgctctcctgcatgtacccgctcaaatacaagcccgtgctagacggctacgtcctccctgagaagtacatcgatagcctgcgcaatgggccggctaatgacgtcccctttatcaccaacaacaacaaagacgagagcggtgctgcgacgtcgacagactacacggctagggagtac

SEQ ID NO: 21336 - DNA, 850 bp, Emericella nidulans
aaggaattcacttttgacgtcgacgtctccgagctcccctgcggtctcaacggggcggtctactttgtgtctatggacgccgacggcggcaaatcccgctatgccaccaacgaagccggtgccaaatacggcacgggatactgcgactctcagtgcccgcgggacctcaagttcatcaacggcgtcgccaacgtcgagggctgggaatcctccgatacgaaccccaacggcggcgtcggcaatcacggctcctgctgcgcagagatggatatctgggaggcaaacagcatttccactgctttcactccccatccctgcgataccccgggccagaccctctgcaccggtgactcatgcggtgggacctatagcaacgaccgctacggcggcacctgcgaccccgatggctgcgactttaactcctaccgtcaggggaacaagaccttctacgggccaggcctgacagtcgacacgaacagcccggtcacagtggtgacccagttcctgacagacgacaacacggacacaggcaccctctcggaaatcaaacgcttctatgtccagaacggcgtcgtcatccccaactccgagtcgacctaccccgctaatccgggtaactcgatcacaacggagttctgcgagtcgcaaaaggaactcttcggcgacgtcgatgttttctccgcccacggcggcatggcgggcatgggcgccgcgttggaacaaggcatggtccttgtactgtccctgtgggacgacaactactcaaacatgctctggctcgactcgaattaccccacggacgcggacccgactcaaccaggtatcgcgcgcgggacgtgcccgacggact

SEQ ID NO: 21337 - DNA, 850 bp, Emericella nidulans
tttattctttgatcactggactgtcatttaacagagcacagacatagcatggtaagctgcggcgatgccattaatatggcgtgtcgctgaccagcgtcacaggggtgagataatcacaaaccgtatcacatttctcgtaccgcatattgatgggaaataaagcgggcttgatgctcgatatatgatcacgcatctgaagcccgagaacttcaaagtcttgtcattgacgactattgctactccacataggggtgtgtagatatctgcgctctcaagaaatgttgctaattgcttacaggctccgccgtagcagattatcttcttcagcagataggcggtgcgctcataaggaaccttcattgtctcgtgctaacagggtttgtttctagatgatcggttggcccagctctattacctcctcgagaagatcaggatcgagtcaggggcattctctcagctcacgtgcgagtatatggagaagactttcaaccctcagaccccaaatatcgaagatattcggtatgtcttcgttcggggatcagttttcgtaaggctgatatcgcagatattattcctatggagcagtcatggagccaagattttggtcggtcttccgcttatcccaccgtcttctacaacaacttgaagggtacaatgatgggctagtcagcgtagcaagcagcaagtggggagcttacaaggggacccttatgggggtcagtcacttggacctcatcaattggagtaatcgactcaagtggcttgccggcgagatcactggccagagaccaaagtaagtgctgctgactactggtcatagcttgtggctaattttggaccttctagcttc

SEQ ID NO: 21338 - DNA, 724 bp, Emericella nidulans
ctcgcctaggctcgagaagcttgtcgacgaattcagatatcgtttttctttgtgaaaccacatcttgttttacttgatgtaaacttaccgaaattcgatggtttctactggtgccgtcaaattcgtcatgaatctacttgtccaattattttcatttcagcgcgtgctggtgagatggaacaaattatggcaattgaaagcggtgcggatgattacattacaaaaccattccactacgacgttgtaatggcaaaaattaaaggacaattacgccgtatttacggtgattatgcaccaaatatttctgaacgtattcgtgaagtagaaggtttaaaactattcccagaacgtcctgaaattcacttcggatctgaacaagttcttttaacgaaaaaagaagctattttagctgaaatgttattatctaaaatcccttgtaccgcaaggcctgaagatttattagcttgcccttgggaagaccaaagctttcttgaagaaatccattaaccgtaacattcccgtttcgaaaaaggttaaggcttggattgagactttttgaacaggacgggcttggtatcgttttaccaacttgggtggatagctgaacttttttcccggcaatttgcttttctacggtcgcttaaaatggggtatttctcctttgatgcgcaaggggtcaacacaaattttttccggtaagaattattattttttttcccttacc

SEQ ID NO: 21339 - DNA, 667 bp, Emericella nidulans
  unsure (1)..(667): unsure at all n locations
acggaatactctgctattccgactcctacttcggagaaggaagaatacaaaggacccgacagtccacccgcgtgggatatccctgatgctttcttacttcccaatggctacccggatgtgcgacatgtccctgctgcctacccaaatcgttctaccgctaacaatcgttatctgcagtatcttaaactgattttgacttcccgcgtctacgagatcactaccgagtcccctctccaccatgcagtcaatctcagtaaccgaatggaatgtcgagtgcttctcaagcgggaagacctgctacctgtattcagcttcaaactccgcggagcatacaacaagatggctcatttgaccgacgagcagcgatggaaaggcgtgattgcttgctcagcaggtaagcaactcaaacaagcggggctctacagatcaggctctgatacatctatactgtataggcaatcatgctcagggtgtcgcgtactctgcncgcaagctcaaaattcccgctaccattgtcatgcctccggcaccccagcgatcaaacacttgaatgtcgctcgccttggcggtagtgttgtccttcatggaaacgatttcgacgctgccaaagaagaagctcaccgccgggaaaagcagcacggtcttacaagcattccccccttcgatg

SEQ ID NO: 21340 - DNA, 671 bp, Emericella nidulans
tgctcgccattttccacaagaatctcccttcgaagtagcctcctcgccaacacacggtcaacaatgcgcaacccggctccacaacaccgtcatcttcctcggcgatctccagaattccggcttctttggcgatatttctctgccgaatggaatcttcatgaattccaccctgaatgggtatgcggcccttccgaagtccgtccacacagcggtccgcgcaacgctgcagtctgttttgggcgaatccggcctgaatggccttccagagaactccaaggctgatattacgacggtcaaattgcatcttcctgtggagatattggggtttacgggtacgcatatacccgccaaaaacctcataaattcacataacagctacaagtactaacataggccagatttctccaattcgctcaaccatgtccagaatgccggacgcgcaattctaagcgacccttctcccccaccaggcttcttccatttcccaattggatacacagggcgtgcgtcgacggttgtcgtctcagggacaccaataacccgaccctgcgggcacttctacgaccgcagcaatccggtcgctaggaaggtggtgtatgggccgtcccgcgcgctggactatgagatggaacttggtgtcgtcgttaaaaaaatttcggatggggatccgc

SEQ ID NO: 21341 - DNA, 538 bp, Emericella nidulans
ggccagcaatcccccaccaaccctggtggtcctggttgatgcgaacaatgccatactgtcgacggcaaggttcaactttgcggaagtcgcaaaatatgggacagtttatgtgaaacgggcttatggtgactggactagcacttctctaaagggctggaaaaaagaactccttagtcagtctatccagccattccagcagttcgcatacaccaacggcaaaaattcgaccgactccgctatgatcatcgacgcgatggaccttctatattggaaccgtttcggcggtttctgcctcgtctctagcgacagtgacttcactcggctggctgctagtattcgcgaatctggtctaactgtgtccggctttggggagcagaagacacccaagcccttcgtcgctgcctgcaataaatttatctatacggaaaacctttcgttccatggggaacttgtaccgcatcctgatagggttattgtgcccaaaaatcatgttccagcgcggcacgcccacgcagatggtcacttaaaaactctgctt

SEQ ID NO: 21342 - DNA, 780 bp, Emericella nidulans
ccttcagaaccagcaccgaccaattgtaaggtcatgctctcgaagcatgttgcgaatggcctgctcgcagaagtttctgagggtatcaagaccctagagaagccgcctcatctggtcggattcctggcgaacaatgatcctgcggcgctgatgtacgcgcaatggaccgagaagacatgtcatgaaaagtgagccttcttttgttcgttcgtatcctgctcccctacgcccattggtcgcggcgtagtgttgttcgtgtcatgtccgttttgttgtgttccctcaaaatcacctacatcccgggccctgtatctcgtagctaacgtagatctatctcatggatatagtggattccgatattccctgcgcgaagttcaccgtgataaccttgaagaagcaatcctggccgcaaatgtcgaccctgacgtcgacggcatcatcgtctattaccccatattcaacaaccgtcaagaccaatacctgcagcaaattgtggacgtgtccaaggatgtggagggtctcagccatcgttacattttcaacatgtaccagaacatccgcttcctcgacccggagaccaagcgccagaaatgcattttgccctgcacgcctctcgcaatcgtcaagattctggagcacctaaacatttacaacacagttctgccgtatggtaacaggctacatggtcatactatctgcgttgttaaccgctctgaggttgtgggccggccgcatgctgcgttgttggcgaatgatggtgcctgcgtgtatagcgtcgat

SEQ ID NO: 21343 - DNA, 675 bp, Emericella nidulans; identical to SEQ ID NO: 203

SEQ ID NO: 21344 - DNA, 673 bp, Emericella nidulans
atcatgaaggatgcatcagaaagcgcagcacaaataccgctgcttgcttctataaatgcagaatctcaggtgcatcttattgttggggcgaatcctcttgctgcagctcgttgcaccaaaagcgtgcaagcaggagccaaaccagtagtcatctcgcccgatcctggaagtctgcaatatactttggcggcgcattttgaaaatggcaatgcgaagtgggttcagagggagtttgaggatgccgatttgacgaccttagggagggaagaggtggatcatgttgtggacatggtctttgttacccttggtggaaatcacccattgagtatgtaccgcgccatagcatataaggcacgagtcgtctaatctaaaccacaggctctcatatatccaaactatgccggcggctcaggatcccagtgaatgtttctgatgctccagatctttgcacattcagcttgctttccacctattcggatggccctcttcatgtcggaatcacgacttcgggacggggctgcaagctagcggcacgattgaagagagagatagcagccactctccctcccaaccttggcaatgccatagataggttagggacgattaggagacgtctctgggaggaagattttgctgcgggattgtgtgatgcgtcttcgacatcgacgatgac

SEQ ID NO: 21345 - DNA, 625 bp, Emericella nidulans
tctatccaccagagggcaagaccaagctcagcccagaagatatcccccctgcggacagaacggtggaaactggcacccccagtcttatggctctcaaggccgtcgaatatcgcggtaaagatgggtatgcagtatctcctccacctcccacacccctggcaaaccctattgactgcctattcaatatctgaacggaactaatccccatcttagtggccacatctccttctcccccgtcctgccacctgagggcagctccgcaatggcattctaccgcgatgtcaagccgctttggcgcagtatggctttgactacttcggcggccttcatctgtacccgcgacacttggccatgatcaacatgatctacttcgaccgcacgtcagaactggagcgcaccaacgctaataaactgttcgtcgagcttgtgcatctagcgcggcggcatggatacagtgagtaccgggcacatattgactacatggacttggtggcagaccagtatgatttcaacgggtgtagcctgcggcacgtgaatgagaggattaaagatgccctcgatccaaatggaatcttgagtccctggcaaacagggaatctggccagggaggtctagagagctgact

SEQ ID NO: 21346 - DNA, 551 bp, Emericella nidulans
  unsure (1)..(551): unsure at all n locations
gtcgctctcggttcnacgcagagcgtgcctgttcgggaccccgtttccgcagcggcccccggagccgcacgacatgtctccaaaggtagtgtaggaggcaagattcatgtccaaggttcctcttcgaatgtcacgcacacaatcaacgaagatgaaaggaccgaatttacgagacatatcaatgctgtcctagcaggtgatccagacattggccatcttctacctttccctaccgatacattcgagatgttcgataagtgcaaggacggtctggttctcgcaaaacttatcaacgacagcgtccccgatactattgatgagcgcgttctgaacaaacctggcaggaaactcaaagagcttaacgcattccacatgactgaaaacaataatatagtcatcaactcagccaaaggaattgggtgctcagtcgtaaatattggaagcggcgacattatagaagtgcgggagcatcttatcctgggtctcatttggcaaattattcgccgtggcctattagggaagatcgatatcaaacttcatcccgagcttta

SEQ ID NO: 21347 - DNA, 723 bp, Emericella nidulans; identical to SEQ ID NO: 3281

SEQ ID NO: 21348 - DNA, 733 bp, Emericella nidulans
ggtcagttgtaaagtgtgatgtcgagtttatagcgaggagttggggcccctagcgccaatggaatgtggctatctaactgaagctggcacagttgtcaatgtgaaaaagccaagctcggcgtcaacgatgttgattacgggaatgggtcctgtagaagttgcggcgcttttgacagctagagcgttaggtttgactcggatcgtggctgttgatattgtggacgaaaagttacagctcgcgcttgaactagaagcctcccatacgatcaatacgctcaaaggcccagactccgatttagcagcgactatccgcatgtatttcccaggcggagcagactatatcatagatacgacaggggtaggcaaggtgctgcaggcgacgctgcgagccttggccgttaacggcacatttgcgctcgttggtgccatgccgccagacacagaactgaaggtcaatgcccttgatgtgttgacgggatgcaagaagatcattggagtcattttggcttggtcggatccacagcaggtatgatttcaatcaaacctacaagaaatggttctccgttgtttgggcattaactctgtttagatcatcccccaattggtacagtggtacaaggaaggcaaatttcctgtgcacaagattgtgcgaatctatccggctacggagcttgacaaagccctcgaagatctcagagcaggacaggtaaggcgaattgtagttcgggtatga

SEQ ID NO: 21349 - DNA, 850 bp, Emericella nidulans
  unsure (1)..(850): unsure at all n locations
acttttcgtccgacatccgtcatccccaggaggtatattaatacccgcgggcacaccgccgtctataaggttcgtgatatttctcaagaatttcggttcgtgcacctcacgtgtctaactatcccattttacaggaaaataagtgagaaatacgacaaagttttcgcgacgggctgtcagcccatcaacaccgatacaccccgagcgaacgcggctttcgtcgtgctcgcaagaaataaggaaatcgatggcgttatccagtcaatgaagtcgatcgagcgacacttcaaccgctggtaccgctacccttatgtttttctaaacgacgccgagttcgacgataacttcataaatactgtgaagaactatacaagtgcgcccgttgagtttgggaagatcgatgagacaatgtggggttaccctagttgggtcgaccacgaggttgctaaagaaggcatccggaaacaaggagatgccgcaatcatgtatggaggtatggagagctaccatcacatgtgccgcttctactctgggtaagccaccttcggacagcgcttgccgtcaaatactcatcctgcccaggttcttctacaagcacccgctcctcctgaagtacgagtggtattggcgtttggagcccgagatcaagtacttctgcgacatcacctagtaagggcttatgaatccttgcgctttactatgactcacatataaatagtgatcctttcctcaggatggncgaggccaataaaacgtacggattcaccattgctgtgaaggacttcgcgagaccgtgccgaatatttttttgtacggttagctttcaaacgaagacaatttagatcccagg

SEQ ID NO: 21350 - DNA, 850 bp, Emericella nidulans
atcgagagcgtgttgacatgcatatatcaattgggatgttttatcaagtatgttacatttatagcctatagtctgctgaatagaaactgttgctgacggtatcagttactatggtgaccttggtcatacattcccttcgcactcccagagccaactcgttgggttgtgtacaggtttgctcagctgtgccgcggtcagctgtgcaagtaacattggcgaattactcaaaccagctgttgaagtggttgttgtagccctccggttgggactctgtgtttaccgagtgcgaaaactgtttggtcaagatcaagcagcgccactcagctggtcagctcttgtgtccggtttgagtgaatccgaaggaacgagcttgatagacaaatttacccgccgaaatgtgagtctccctataaggatttcgtaacacttcgatattgaccagctaggttatccctccttcgtctcggccgtacattagcgcagtatgcgcaaacacgttgaccattagtggtcccccggttgttctcaaccagtttctggatactttcatttcaggaaagaataaagctgttatggtgccaatccacggcccgtttcatgcctctcatctatatgagaagcgggacgtggagtggattcttaagtcctgcaacgttgaaacaatccgcaaccataagccccgtattccggttctgtcaagcaatactggggagctcatcgttgttgaaaatatggaaggttttctcaaaattgctttagaagagattctgcttcgccaaatgtcttgggataaggtgacagattcatgcatatcgattttaagtcagtggcgatacaaaccaaaagttat

SEQ ID NO: 21351 - DNA, 850 bp, Emericella nidulans
aggctgctcccaacaacagcatcatccttctccatgcttgcgctcacaaccccaccggtgtcgaccctacccaggaccagtggcgccagattagcaacgtaatgaaggagaagggccactttgccttcttcgacatggcttaccagggcttcgccagtggaaacgccgataccgacgcctttgcgcctcgacacttcgttgagcagggccacaacatcgctctgtgccaaagtttcgccaagaacatggtaggctcagttatctggttgcctcaaggcatgcgcgttaactcaatttgcagggactctacggtgagcgtgtcggtgctttctctctcgtctgcgaatccgccgaggagaagaagcgtgtcgactctcagatcaagatcctcattcgtcccttctactccaaccctcccgtgcacggtgctcgtgtcgcctcgactatcatgaatgaccctgcgcttaacaagcaatggctcggcgaggttaagggcatggctgaccgcatcattgagatgcgtgctcttctcaagaagaacctggaagagcttggcagcaagcacgactggacgcacatcaccagccaggtacgtagttctgtggaatcaaagaagcgcatcaatactaacattcacagatcggcatgtttgcttacactggtctcaagcccgagcagatggaggctcttgccaaggaggtacgcaccacgtcttaaccacaatgtctcatctgtctctaacgcataatagcactccgtctacgccaccaaggacggccgtatctcagtggctggtatcactacgggcaacgtcaagcgccttgccgaatccatctacaaggtgactggt

SEQ ID NO: 21352 - DNA, 500 bp, Emericella nidulans
cgaatggtggtaccaaggggcgttatacgagctcaaactcgctcggtgaaggcgaaatccggcgcagaaaggacctccttatcaacgctcggaaggaaagggatgggttagagaacctgctgaatgcgatggcggcaaagagtcgtgttgataacgcggttgcatcgatcaaggataaagaggcgcttataggggccgcgaatgggacgggagggggaagtagcaggaaaccggcgaggaccgggagggtacttggaaaggagacggagcggacccgcgagctggacaatcagggtgtcctgcagttgcagcaggaaatgatgcagcagcaggatatgagtgtggaggagttgctgaagattgtgagacggcagaaggagctaggtatccagattaacgaggagttggaggtgcagaatgagatgttaaggatggtggatgaggatgccacgaggtatgttttccttcatcgtagtgtcgtgagctgaacttcttgctaa

SEQ ID NO: 21353 - DNA, 850 bp, Emericella nidulans
cgaggcaataccggtcttagcaatttgggcaatacctgctacatgaactctgctctgcagtgcgttcgtagcgtagaggagctgacttagtacttcctgagtgagtgttaatgatcgtgctgcttgagtcactgctgacttgcgaagacgatgtctataagaaagatcttaaccccagcaatcctttagctcataacggcgacgtggccaaagcgtacgcaaatttgcttcggaatatctacgatgaagcaggacacggctcctttgcaccaaggcagttgaagaacaccattggccggtatggtccggcgttctccggctatggacagcaggactcacaagaatttctcttgttgctacttgacggtttgcatgaggacttgaacaggattcagaaaaagccctacatcgagaatgccgactcaacggacgagatggtgcacaataaagaagctctaaggaatttgccgacatgtgctgggacatttacaaggcacgcaacgattcggtcatcacggatctgtttgccggcatgtacaagtcgactcttgtatgccctgtctgcgacaaagtgagcatcatcttcgatcctttcaacaacctcacgctccaactgccgattgagaacctgtggagcaagagtatcttctacttccctcttgacaagaaaccgatcatcatagatgtcgagatcgacacgaactccagcatcaaggcactcaaggagtttattgctaagaaagcaggctctgatcctgagcggctggtcatgtcagagatctacaagtccaaattctacaggatgttgcgcaatgtcagctcgattgcggattgccaaatacgtgattcc

SEQ ID NO: 21354 - DNA, 682 bp, Emericella nidulans
cagatcatcatgcgactgtttcacctactcgtcactaccggcatctctgcctctcttacgtgcgcggcgaatcctaagtcctcttggagtgactatgttattatcggcgcagggccagctgggtacgttctcgctgctcgtctatcagaagatccaagagccacggtgaccctgctggaggctggacctgacggcggtaatgacccaaacatctacacccctgggtttgctggcagacttcaaaacacccagtattcgtggaactacacctcccaaccagacccaaggcgggggaatattcccgtgcgcttcccgcagggccatgctctcggtggcggcacgtccatcaacttcatgtcctactcccgtggcgctgccagcgtctatgaccagtgggcggaagagtcaggaatcgacgggttgagattcgacaagatcatccagcagttcaggctctctagcagtctgaccatcccatccgatattgagtacgaaatagccgccaactctacggtctacgaaaacggtcctctcaaggtgagttacgagcgaaggaacactgggaccgagccgttttgggcagatgccctggccgcaactgtcgcttcttcagcacctcttattgacccgacagatggacgttccattggcaagacaataggcggaccgcatactatcaata

SEQ ID NO: 21355 - DNA, 501 bp, Emericella nidulans; identical to SEQ ID NO: 3252

SEQ ID NO: 21356 - DNA, 385 bp, Emericella nidulans
gccctggatccgtgcgaacaccctcatcgccaacggagggctgattgaagagcatccggacctggagaaacgtatgtacggaaatctaagcaaaggtggcatgacgcatcccttcaagctcaagtcggcatacggtgccattggcgaattgagctttacaaattacacccccgacttcaaggatatactcgactacatctggtactcatcgaatacggtgcacgtctcgggattactaggcgaggtggacaaggactatctacagagggtgcctggattccccaactatcatttcccaagtgatcatatcgcattgttagcggagttttcagttaaaggtaaaaagggcaaggttgtggaagcggattttggaccgcaacgaaac

SEQ ID NO: 21357 - DNA, 457 bp, Emericella nidulans
gcaatgctgctctagatcgtctctttcctcgtgcagggctctggagctggactgatggccatgggcgggtcgatgacgaacgtggcaaaaggtattgttatcgcggggctgatggtccagattgtgatatttgggttcttcatggtcacgtccgccgtgtttgaccagcgcatgaggcggtacccaaccagtcttagcatgagcaggaacggtggtgacgggataggctggaaagagcatctctatccgctgtacgcggtcagtatcctcattatgatccggtcgattttcagagtcatcgagtatgcaatggggcagaaggggtaccttctagcgcatgaatggccgatatatgttttcgacgcggtcttgatgcttggggtgatggtgatctgggggaaggtggcattccgggagcatcaggaccgaggggatgggagcgcagttatttagcatg

SEQ ID NO: 21358 - DNA, 720 bp, Emericella nidulans; identical to SEQ ID NO: 6559
  unsure (1)..(720): unsure at all n locations

SEQ ID NO: 21359 - DNA, 554 bp, Emericella nidulans
atatctcctttgctctggacccaggcatacactacgcacacaatctcacagctctctcttacgtctagagcagagcacacagcatccaaagtttccggtatgcagcagctagaacggcgcatcttcagcgttcacatggatgtcacgataacggaatctatagccgtcactcaggaatgcagttaacaagagtgttcgtattgcagatgcaccatgtcaaggaatcatacttacctagagtgtaagtgagggcaagttaccatcgcccttgtaatacatcatatatcgccccatacataggtatgggagcgacagactatttagagaagatcatcaatcgcagctgttgtatggccagtaggacacataggcaatccaccataagaactcaacaaatttcgtggtcaaacagtccataccagagcaagctccccaccgtatgcgtggagccacccgacaagacaagaaaggaccggtcagcctcgggcaccaactcggcacgtaatcctggtggaccgatccccatcgtggcgccctgccagcaagagcgtaat

SEQ ID NO: 21360 - DNA, 785 bp, Emericella nidulans
attccaacaagcaccgtgtgcaacttcggatagggaaaagcggctgcgcagtgtaatcttccttgcagatcgacattcaacccagtctcctcagcaatcctcacgatgtagccggcaagattcgactcatcatcgtcggcggcggcttgactgttttcacagctgccgccaagctaactgaggacccaaaagtcaaggtccttatcattgagaagggcttctacgaatctagtgacggcccaattatcgaggatccaaccaagtatagcaagatcttcagaaccagcgctgaccagaacttttttaccgtgccgcttatcaacaaccgcacagagctcatcaaatctgagaaaggccccggaggatccacactggttagtggcaattcatggacatgccctgataaggcccaggttgattttgggagaaggtctttggcatggacgggtggaattgggatagcctgttccagtatatgaacaagggtgaacgatcccgtcctcccattgaggctcagattgccactggccattcctttaattcctcgtgtcacggattaaatgggaccattcacacagggtaccgtgatactggcgagccgtggtctccgctcatgaacgcgttgatgacaactgtttccgagcagggtattcacacgcagatcgactttcactgtgatcgacctcgtggcgtttctatgattcacaacaatgttttggaaaaccaagtgcgcgcggatgcagcccgcgaatggcttcttcccaactatcaacgacccaacctaa

SEQ ID NO: 21361 - DNA, 500 bp, Emericella nidulans
cagcccgcaagatgcatatcaaagagaaactcgcccaaaatgaggctgccggtaaaatcggcatctcattcgagttcttccctccgaagacagcgcaaggtgtccagaacctgtacgacagaatggaccgcatgcacgggctcggtccgtctttcatcgatatcacttggggtgctggtggacgactctcagacttgacctgtgaaatggtcaatgtcgcgcaatcagtgtacggcctggaaacatgcatgcatctcacctgcacagatatgccccaggagagggtggacgcggcgctccaagccgcctacaaggcaggctgtacaaacattctcgctctacgcggcgaccctccgcgcgaaaaggaggtgtgggaggctgctgatggtggattccggtatgcgaaggacttggtgaagtacatccgggagaagtacgggaaccatttctgcattggagttgggggatatcctgaaggtgccgatgacaattcagatgta

SEQ ID NO: 21362 - DNA, 617 bp, Emericella nidulans
tttgggaacttcaacgacgtatcgcttctacgtcagccatatgtcgcagcgcagatgctgcatcgcgggttcacatccgtccgcgattgcggcggcgcccagctcgctttcaaacaagcaatcgaggagggtgtctttcctggcccgagactcttcattgccggacacgcactgtcgcaatcaggcgggcacggggatatccgctcggcgcatgaccatgttcagtgctgcgcggggcacacgaacggactcggccggatctgcgacggggtgcctgcttgtatgacggccgtgcgggaggagatccggtctggcgcggatttcattaagatcatgggcagtggcggggtgtcaacgccgacggatcgattggagcagctacagttcacgaggcaggagatccaggccatcgtggagtgtgcagagaacgcggggacgtatgtcacggcccacgcctatacgcctaaagccatgctgcatgcaatcgagaatggggtgaagggtattgagcatggaaatttcgtgactgaggaggtggccaggatcatggttgaaaagggtatctaccttacgcctactctgatccctttagtagggttaattcggcgcgcgatcta

SEQ ID NO: 21363 - DNA, 850 bp, Emericella nidulans
tgggggacagaagcagcggttgaatatcgctcgagccatctacttcaatgccgagcttgttctcctcgatgatcccctgtctgccgtcgatgcccatgtcgggcggcatatcatggacaaagccatttgcggcttgctcaaagggcgctgccgcattcttgccacgcatcagctccatgtactcagccggtgcgaccgcatcgtggtcatggacgacggccgcatacacgcagtcggcacattcgatgaactctctcgagacaacgacctcttcaaacagctcatgtcaacggcttcgcaagactccaaagaagatgaggaggaagccaccgaagtcgtcgaggaagaagctgaaaagcaggctcaacaggaacccactaaaccggcagcagctctaatgcaacaagaggaaaaagcaaccgattccgtcggctggactgtatggaaagcctacatacgcgcctcgggcagctacttcaacgccctcgccatcctcttcctcctcgcctttgccaacgtcgtcaatgtctggacaaatctctggctctcctactggacatccaaccactacccctccctctcaactggtcagtacatcggcatctacgccggactcggtgcgggctccgccctaaccatgttcatcttctcgacctacatgtcgactgccggcacgaatgcgagcaggcagatgttgcaacttgccatgacccgagtccttcgcgcacccatgtccttcttcgacacaacgccccttggccgcatcaccaatcgcttttctaaagacatcggcgtaatggacaacgagctctgcgatgcgatgcgaatgtacgcaatcaccatcacaatg

SEQ ID NO: 21364 - DNA, 809 bp, Emericella nidulans
atcatggccgttgctatcaccaagatcacagatcagttccatgcgctcaatgacgtgggttggtacgcctcatcttatcttcttaccacttgctatatgcaactcctgccctaatcgtttgttagttgagccaaggttctgaaccaagtgtttactagcaattcaactactgtacgggaaatcttataccctcttcaatatcaaatgggtctttctcacagccctgttaatattcgagcttggttctctgatttgcggtgctgcaccgacttcaaccgtgctgattgtcggttgtgcagttgcgggcctaggaagtgctgggattgtcactggagctcttgttacgttggctcacactgtaccactggaaaagagacctatattttttggcctcattggatggatgtatggaatttctactgttgttgtcccactagtatgtcagaagataagagcctcctttggggcgtttccgcacgcagacctctgctgacatttaggctcttgctagttgggtggcgcattcacagacacgcgacctggtgctggtgtttgtatatcagcttacctatcggatctgtgaccactgccggcctcttgacgatgctcaagttgccccagcggtctcctccccagcagtactccttggtgcatacagtgagggcacgcgacccgctgggaaccatgatctttgtgccagcagaatatctgtcttctcctgcctctccattgcagtggtgtcaactctccgtggttaaaagcctggatcatcaccctctattctctgccgggtgtgtgcttttaacgtc

SEQ ID NO: 21365 - DNA, 496 bp, Emericella nidulans
gactaacatggctgtcgttgcctttgaccacctccccccatcgatactgcaaaaagctgtacaagtgatcctgtctgaccaccatttctggggtgggctgcgcaagtcgcaaaccctggcatctatctgcacgatttgggggatgagactgtccatgcacagcaacagccatctagggatcagtctggcagcaatgacacacttggccgcagcgacgcccaacctggactacgcgtgcgatacgcactggccgtggaaaaggagggacgaggacgtcatcgtcgatccggaaagggcgctgaggtgggtgaacgggggcattgaagtgccgcgggcaccggggttgggcattgagcttgatcgagggcagttgtggagattgcatcggcagtatctggagtgtggcattcgggaacgagatgatacctcctatatgaggcggtttgagccgaagtttgatgcgagtataccgaggtggtgacctgaggctatacgc

SEQ ID NO: 21366 - DNA, 850 bp, Emericella nidulans
ctgacgaacacagtgacccccttcgcctctcacactttctgctcgaacaagccgtgtcacacggcgtgaagctgcaccaacccagcagagcaaccttcttagtaacagactcttcaaggatggtcactgccatcaagatctctaaccacgccacaaaaaccgaatcaatccttccctgcaccaacataatcattgcggcgcgctcctggacccctagcgtattctcatctctcttcccctcttcgacaacaacatttccaatctacccgttagcaggatactccctggtcatccgctctccacggtacacagaaagacacgaaaaggaactcaacggtgaaagtcacgcagttttcacgacgcacccgccctcttgcggattcagtcctgaaatcttctcccgtgaaggaagcgagatttacatcgcgggtctgaacagtcgcgaaattccggttccggagcgtgtggaggatttgaaggagcgctactatgatgagaaggagatgcagaagcttaaagatgtcaccgtgagacttatgggcaaactcccgtcgggaagaccgaaacagctgttgaaattcccacctcaaatgatctgtatatcctccacaaaggtctttgtctccggcccgttacggaacgcggcgtgccgtttgtgagcaaggtggatgactctactctgggtggtattaagactgctcagaacggcggcgtgtttgttgcggcgggccatgggccatggggcatctcattggctctgggaacgggcagtgttgttgcggatttagtaagaggggttacacctgctgttgatgttcgtgggttaggtgtgggggatgggaaagtgaag

SEQ ID NO: 21367 - DNA, 850 bp, Emericella nidulans
gttatgatcagtggtaagactcttccttgctttagggcttttgacacaaatccgatggctggtggatatgtctatggtcgattcttgaccggtattaaaccccaagaatactattttcacgccatggccggtcgtgagggtctgattgatactgcggtcaagacttcccgatctggttacctgcagcgttgcttgatcaagggtatggaaggcttacgagccgagtacgactcctcagtacgtgaatcttcggatgggtctattgtccagttcctgtatggagaggatggtcttgatatcacgaaacaggtccatctgcaggacttcgaatttttggcgtcgaaccacgtctccataatggagcaagtaaacttgaagaaacaccacaataatctggagaaagaggcggtggcgaactggcacaaagatgcaatgaagaaggttcgcaagactggaaagctggatgctatggatccggttcttgctctttaccatcctgggggtaacctcggtagcacatccgagtcgttcgcccaagccctcaagaaggtatgtttcgcccctaccaacttattgttccacatagactaataggtttttgtcaacagtttgaggatgaaaataagagcaaactccttaaagataagaagaaaggcatcgaaaccagcttgaccaagcgggcattcaactctttgatgaatatgaagtatatgaactcagttatcgaacccggcgaggctgttggaattatggctggacagtcaatcggtgaaccgtcaactcaaatgacactgaacacgtttcacttagctggacactccgcaaagaacgtcacgctcggtattccgcg

SEQ ID NO: 21368 - DNA, 519 bp, Emericella nidulans
tcaagcagcacgacccttccttgaacgtgctgctacttgaagcaggcgtcgacccttcgaacaacccgaacgtcaagacttacccaccactcttctctctactgggctccgacatcgactggaaatattccactaccccccagccaaacaccgggaacagaattcactccgtccacgctgggaaggccctcgggggtgggactacgatcaacttcggcggctggagtcgaggagactcggccgactacgatctctgggcgagaactgtcagagaccagcgatggggataccagggccttctgccctacttccgccggtcggagtcattcttcgatcgcacggccgacgtccaggagcatggctttgagggccctgtgcgtgtatgcgcagtgtctgcaagtgatcccaacaggcaatatccgatgcgagggccagtccgggatgcgtggattgagattggtgaacaatacaaccctgcacccggaactggccgattgtccggggtggtggaattccatc

SEQ ID NO: 21369 - DNA, 850 bp, Emericella nidulans
atggaatctgcgtcaaagtaccagatgccactgttcgagattcttcgcgctatcgggtctgagaactccccgatatttaacactgccttcagatatagaaaatcctcatcgaatgcggccgttttcaacaacgctgttcttgacccagttaatgaggggctgaatgagtacctcatttctgtcaatgccagcgtctctggttcttcagcagaaatcagtttcgactaccagtcaacgagcctctcagaaacggatattggtcatataatcgactgttttgaatgcatccttaactccattctcactctgcttggaccaagccgggtgatcagagatgttgagttctttggccgacaatcttgccagaaagtgagcgcctggaacgcatctcttcctgaacgaccaaagcggtgcgctcacacgatcatccaagatcgagtaattgcgcaaccttcagcaccggccatatgttcatgggatgagaactttacatattcagagcttgactctctgacaactaagcttgcataccatctcatggattggggtgttggaccagaagtattcgttgggttatgctttgagaagtcagcttgggctgtcatcgcacaagttgctgtcctaaaggctggtggagcctttgcatccttagaccctgctcaccccgaaagccgcctacgaggccttgttgatgacattgcggccccaatcgttctgtgctcgactagatatctggacaaatcgtcgaggatttgcatggctgcactagctgtgagccactatacccttgagcaaattccagattcgccagccacgagaagtctgcccactttaagtgttgagaatgcag

SEQ ID NO: 21370 - DNA, 850 bp, Emericella nidulans
atcatgccatatctaaacagttagcggacacccaggttgctaatcggctgttgcacccagtttcagagatatggtatgctgcgctgaatgtgcttgcccttacccttgctgtcgtcatcatcacggcctggccaacatccgtaagttgttgccacaacgcctctttagattcaaattattgagattgaccttgtatccttgacatgcagacaaatgttggagtcatctttgtggcgttctgtgtttcagcagccttcttggttccagtcggtcagatttacgctctcacagggattgctatcaacctaaagtacaaccatcctcctctcttttcccattgaagtatatggaagctgaccttgggcgcgcatagtgtgctgtcggaatttttagggggcctatggacgccaggaaatcccctttcagtcaactttttcaagctatacgggtacgtaccagaaccctgctgcttcagattctagtccactgatgtgaccgcacccttcctgacaaccagatacaccaccctcgccaatgcgctgccattcattagcgatctcaaactggcccactatgctaagcttccaccttggcataccttttcagcccaggtcattgccacggtcgtatcggcggttgtgtgcacagccatgcttaactatcagatcaatgagattcctgatatttgccaaaggtttgatccaactccacccggcgttatcccactaactctctatcgttcataccaacagcactcagaaggatcgttttacctgccctggaaataatacatattttagtgcctcggtaatatttggtagcacccgcgctgttatcccgtatggcccct

SEQ ID NO: 21371 - DNA, 576 bp, Emericella nidulans
ctctacaccagtatcaaccgtatccccaacgccatgaaaagcccaattcccctcttgcacggtactggctccatccccccaattggcctcggaacctggcaaagcagcgccaacgccacgtgcctcgcagtgaaacacgccctgcaacatggctaccgccacatcgacacggcgctgaactacggcaacgaaaaggaggtcggacaggggatccgcgattccggcatcccaagggaggagatctgggtgacgactaagctcgataaccattggcatcaccgagtccgagagggactggaaagttcgttgagagacttggggctggagtatgtggatttgtatctcatacatttcccgtgctcgacggatccggaagatcgatcaaaacatttgaaggactgggattttgtacgaacttggtgtgttctattagcattcgcgtcctcggtatgacggatgcgggtggtgattaggtgctcattgatgaatataggcaggaaatgcaaaaactcctgggtacgggaaaagttcgccacaatggcgggtccaatttcccaattcccaatagtagttgta

SEQ ID NO: 21372 - DNA, 850 bp, Emericella nidulans
tatgcaacgaaacaatcactgactggtctagccggcattcctaatgtctactactttggccaggaaggtttacacaatatcctcgtgattgacctgcttggtcccagtttggaggatctgtttgatcactgcaaccgacgcttctctgtgaagaccgtcgtcatggtcgccaaacaaatggtgagttttccatgctgacttgagaaaagagaaatgcgttcctgactttcttagctctctcgagttcaaacaatccacgagaagaatctgatctaccgtgacataaagcccgataacttcctcatcggtcgcccgaactccaaggccgccaatgttatccacgtcgtcgacttcggaatggccaagcaataccgggatcccaaaaccaagcaacatatcccataccgtgagcgaaagtcgctgtccggtacagcgcgctacatgagtatcaacacccacttgggacgcgagcagtcacgacgagacgatcttgaggccttgggccacgtttttatgtatttccttcgaggtggcttgccctggcagggcctgaaggctgccaccaacaaacagaagtacgaaaagattggagagaagaagcagaccaccgccatcaaggaactctgcgagggatttccaggtttgttcatcgtcgaaccctccccggctgtgctgaccacgtctagaagaattcacaaagtaccttagctatgtgcgcaatcttggtttcgaagacacccctgactacgattacctgcgggatcttcttactcaggccctcaagaacgctggggaagttgaggatggagagtacgattggatgaaactgaacaacggtcgagggtgggaa

SEQ ID NO: 21373 - DNA, 850 bp, Emericella nidulans
caagcacgaatgtccgctacgaagtccagctcaagggtgctggaaggacgccgtactcccgtttcgcagacgggaaggctgtgctacggtctagcattcgtgaatacattgtgtcagaaggtatggtacaattacttctagatgtagttgcaataagtaacacgtgcatgtacagctctgaacgcgctcgggatccccaccaccagagctttgtcgctaacgctcttgcccaaggcaagggttctgcgcgaacgcatcgagcctggcgctatagtttgtaggtttgctgaatcttggcttagattcgggacattcgacctaccacactcgcgcggtgaccggaacatggtcaggaagttagcaacgtacgttcgcgaagatgtgtttaatggatgggaatcactaccaggcgcagtatcagtaggtaaggaccagcaggctgactcagtcgaagatcctcccaggggtcttcttggggacaaaattcaggaccaccatggtgtggaagagaaccgatttgctaggctttatcgggagattgcccgtcgcaatgcaaaaaccgtggccgcatggcaggcatatggcttcatgaacggagtccttaacacagacaacacatcagtctatggactttcactcgattacgggccctttgcttttatggataacttcgatccacagtacacccctaatcacgacgaccacatgctgagatactcctacaagaaccagccatcggtcatctggtggaacttagtcaggctgggcgaatgccttggagaacttatcggcgccgggccccaggttgacgacgaaaattttgtaagcaaggagtaacagaagatgctgc

SEQ ID NO: 21374 - DNA, 533 bp, Emericella nidulans; identical to SEQ ID NO: 15101
  unsure (1)..(533): unsure at all n locations

SEQ ID NO: 21375 - DNA, 850 bp, Emericella nidulans
acgaaagaaatacaatattcgcaatgtaaaattgtcggtaatgggtcgttcggagttgtcttccagacaaaaatgatgcccagcggcgaggatgctgccatcaagcgggttctccaggacaagcgtttcaaggtatgtgcccattgttggagctcaccgtcgtgctcgcccggccactccccgctgacgctgagcagaatcgtgaattgcaaatcatgaggattgtgcgccatcctaacattgtcgagctgaaggctttctactattcgaatggcgaaagggtatgctccccaattaacagtgtttagctgcatgtcagtgctaacccgtgtatggtatcgccgcaaaaggaccaaagtgtacctgaatcttgtcttagaatatgtaccggaaactgtttatcgggcgtctcgctacttcaacaagttgaagacaaccatgccgatgttggaagtcaagctttacatctaccagctattccgttcgctggcatatatccattcacaaggaatctgtcaccgcgacatcaagccccagaaccttcttctcgaccccgctactggtatcctgaaactttgcgatttcggatccgccaagattttggtcgagaatgagcctaacgtatcatacatttgctcgcgttactaccgagccccagaattgatatttggtgctacgaattacacaaccaagatcggtaaacatccacggcaccttggattttcatggacaagctgacatttatagacgtatggtctactggctgtgtgatggccgagctgatgctcgggcaacctctcttccctggagagtctggaattgatccctttagtgagggttaattcgcgcg

SEQ ID NO: 21376 - DNA, 719 bp, Emericella nidulans
aaggacatgatataccgccgcgtaggcaactcgggattgcatgtctctgcgctgggactgggtggttggttaacgtgagttttcccgacactcttatccaggtctgggctctgacatcttcttcgcacagcttcggaggacacgtcgacaacggtactgttttaaattgttcgcagtgaagcaggggagaaggctgacttatgccatgcagaggttgctttcaaatgcatgaagcaggcgtacgactgcggtatcaactttttcgacacggcagaaaggtaggccagccactggccgggaactgtaaacatacaaagactgacgcacaaagctacgctaatggccaatccgagattgtgatggggcaggcaatcaagaaatatgggtggaaacgaagcgacattgtcatcagcaccaaagtgagttcagaagtcaccgtagaagctggcctgtaaaataacgcgataacacgtcgtcagctcaattggggactggcaaatggggagatccttatcaacaatcatggtctctctcgcaaacatatcattgagggcaccaaagcgtcgctcgagcggctgcagctggaatacgttgacatcatttatgcccaccgcccagatagactcacaccaatggaagagacagtgagagcgttcaatttcgtgattgaaaagggctgggccttttactggggcacatcagagtggtcagcggacgag

SEQ ID NO: 21377 - DNA, 850 bp, Emericella nidulans
cctcagttgtctgtgtctcttcggtcggcacccggattggacgtgtatacatggaggaggaggggtttggagcgaatccagtcatggattttctgaaccgccacggtgcaccccgagtccagagacagccgctcccacgggcaggctggactggcgatgacgctgcatctatatcgtttactgcccctgcccaaagcgagggttatgcaatggtatctggagatacaaatcctattcacgtttgccctctgttctctcgttttgccgggctgggtcagcctgttgtgcatgggctgcacctgtctgccaccgtgcggcggattctggagtggatcattggcgacaatgaacggacccgtttctgcagctgggcgccctccttcgatggacttgtccgggcaaacgaccggttgcgaatggagatacaacactttgcaatggcggacgggtgtatggtggtccatgtaagagtgcttaaggagagtacgggtgagcaagtaatgcatgcagaggcggtactcgagcaggcccagacaacatacgtctttaccggccagggcacgcaggagagaggaatggggatggccttgtatgatacgaatgctgctgcacgagcagtatgggacagagcagaacggcactttagatcccaatatggtgcgttacctcctcaacccgagctcgacagaacgggcaactctaataccgattacaggcatttcgctccttcacatagtccgtgagaatcctacgagccttactgtcaactttggcagtcggcgtggtcggcaaatccgtgatatttatctttctatgtccgactctgatccatctatgctgcctggcttga

SEQ ID NO: 21378 - DNA, 584 bp, Emericella nidulans; identical to SEQ ID NO: 14628

SEQ ID NO: 21379 - DNA, 500 bp, Emericella nidulans
cttccacttcctgacgtcgagtctctggcagactgcgtttcgttcaaccatgccgtgcgaccatttctgtcgcaagtggctgcgctccctgaacgtctccagcctgcgattgcagcaaaagatgtaaatgctcttaaggacatctatctttccaccaatccgcttgcgaccgcgcttgcatttactatcttcctctctgttctcttcatcgtcttctctgagatcaaccgcaactactctcaggtcgatcgcttctggtctatcctcccgtccgtattcaacgttcattttgctgtttgggcacgcctttccggccttcgtactctcaacttggatactatcgcagctatctccgtcatatggagcgtatgttttatcgtctctaccagtctcaactgagttctaatttatccaggtgcgcctgaccttcaactactggcgtaggggtggttacagtatcggctcagaggattacgctggtctattatccggtcccgtgt

SEQ ID NO: 21380 - DNA, 850 bp, Emericella nidulans
tcttgagcgccacgatgcgccggggacagagacaagtagccgcaattcagaggtattttatcattctatcagccacccatatccgcccaccacttgcttttttttttttttttgaacttcatgcagctactgaactatcatctcccaggtaatccacgccggcctttactatgggaaagacacgctaaaggcgtccctctgcatccgcggcaagcaactcctgtattctctttgtgcagagcagggaatcccataccgcaacacgaagaaatgggtcgtcgcgcagaacgaagagcaatgggacgtaacgatgaaggttcacgagctcgcgaaacaactcggcatcccaacacggctaatctcgcaaaatgaggctcgagagcgagaacccgaggtgcgggggcgcgcgggaatcctggagagtacgtccacgggaatagtggatagtcatgcgctcatgacgtatttgcagggcgactttgaggataagggcggcgactgtgcgttccttactgaagttacaggcattgaaccactgggtgggggaagaggcgggtatagaattactgcacgctcaggatcagggccagagagcgaaacgacgtctatcgtcgccgagacggtcatcaacagcgcgggtaactactcctgcaacattaataatatgcttctcccgcccgagcgccacaggacaccatactacgcgaagggcacatatttttcttactcggcctcctttccaacccgggctccctccgtgctcgtctaccccgccaccctcccaggaactggcgggctgggcacacacttaacgctcgacttgggcggccaaatccggttcgggccagat

SEQ ID NO: 21381 - DNA, 765 bp, Emericella nidulans
atcgtccctaaatggagagatggcgtcattactttcaagaatgtctttgtatcgaggcgaccgggtcaagcgacaggccatgtcagtaaaggctcatcaaagactgcagctgccgctgccgccgctgcacatctgggtgatcaatccggggccgacttattagagcagcgcatttcgtccgaggaagaggaggatactaattacacgcaattcgacctttcaatagaaacagtcaacgtaacactatcatttggcaggtggatcaacggcaaaggactccttcgcgacgttgaggtgaaaggggtgcgcggagtggttgatcgcagatcggtgttttggcctgatgaacctcgcgatcctaaatcatatcggcacgagcataatcccggggacttcgaaatcgactccttcaaaatgagcgacttgcttgtgaccgtataccagcccaataactttagaccattctcggtaagcatattctcctgcgatcttccgcagttgaggaaacagtggctcttctacgactttctatcggccaatatgatgtccggatcctttgacaactctttatttactattcatcctcgccaaactcatagcttcactggcgcgcaacttggcaatgaggcagaagaggacggcaaaccgaccccttggaagaaacacagcaggattcgcattgatggattgaatattgatcatctcaaccgtggggtgcagggtccatttggatggattcatgaaggcaccgtggacaatgtgtac

SEQ ID NO: 21382 - DNA, 646 bp, Emericella nidulans; identical to SEQ ID NO: 4972

SEQ ID NO: 21383 - DNA, 310 bp, Emericella nidulans; identical to SEQ ID NO: 10166
  unsure (1)..(310): unsure at all n locations

SEQ ID NO: 21384 - DNA, 502 bp, Emericella nidulans
aggctcgccaggaattagaagattaagttaagtaataatatataaatattagataagataggtctttactagggttaaaatgactttattcctgctagtactccttatataattagctaatattaattacttatcttagatagctatagaagctatctaataccttaatttaacaagttctataagaataatagtataatatctctttatatgcctgctggtttatcttatctattataattattagatattggctggtttggtctgctaaagtatatatatagaggtcttattaaatcaagattataccttagcaaatactatattaataagtttgactttttagaggcctatcccctgtatatattaaaatatttttaataagaaaaatatttagagcagctttgctgctacagggatagagctatataatctagataagattcttagtaaactttatatattactttttatattatctccccccctggtatcaagcagg

SEQ ID NO: 21385 - DNA, 575 bp, Emericella nidulans
atcatggccacctgtcaagccctcgtcctccacggcgcaaaagacctccgcttggtatgtacccctcccccgcccactctataaaagccccaaatctggactaacactttcatcaggaacccagaccggtctcgtctcccagtgacggagaagttcagatcgccattcgctcaacaggtatttgcggctcagacctgcactactacagccacggccgcaatggtgacttcgttgttcgcgagcccatgtgtcttggccacgaatcttccggcatcgtcacagccatcggccccaatgtacacaacctgaaagtcggtgatcgcgtcgccctcgaagtcggtcttccctgccgcaaatgcgccctctgtttgtcgaacccaagccgctacaacctctgtccggagatgaagttccgcagctcagcgaagatattcccccatctggacggcacgctcatgcaactcaccacccaccctgagaacatgtgccataagcttcctgatactgtttcgtacgctggtggtgcgctcgtagagccgttggccgtctgtttacacgctatccgccgctcgaac

SEQ ID NO: 21386 - DNA, 850 bp, Emericella nidulans
gggattcgtcgtgcaatcagggtctactcccgtgagggaactctggatagcgtgagtgagccagttgatggcctagaaggggctctcagttggagaccgtacggaaatctcattgccggcattcagaggctcgatgaccggattgatgtggtcttttttgaaagaaacggcttgcgacatggccagttcactcttcgtttgaccgaagaggagcgatctacgtgggcatcaaacattcatctgagctggaatgtggactcaacagttcttgcagtacagttcaaggacagaattcagttttggacctcgggcaactaccactactacctgaaacaggaaattcctgtgatagtaagctctgagggcccctttgcgtacaaatggcaccatgaaaaagctttgcgtttcgttgcaggagcctctggtatgtcctgtgttctagtgggataagatttaattcagactaatggttctgcagagtcaatcttagacggcgagtttgtttttaaagtttttcacggttcaaccactcctcctaatgatgttggagctgttgctgttattgatggaagtcagtattaggtacactacctgtgtaaggtctcatttcgttaactctcacagaaactctgaagttgacgcctctgaaactatccgcgttccgccccctatggctcacaatgaacttcctcttgatgccaatgctattgatgtagcgtttagcaagtctgggacaaggattgctgttctaatgaacgatcacttctctgtttatctatggtccctcaaatccagaccggtgcctgttccgatcctggagtccagctatcccttatccggtgaaataggc

SEQ ID NO: 21387 - DNA, 831 bp, Emericella nidulans
tcctcagtaaccacggccgtgtccgcccccggcaaggtgttgctcactggtggttacctcgttctggaccggaattacacaggcaccgtctttgctctcaatgctcggattcatgtcgtcgtggaacaattgcgaaaggggcaaaaagtacaaaacggaagcgccgaagctgagaatgacaatgtagacctgattgtcgttcgctcacctcaatttgttggtgcagtttgggaatatgctattcagcgcgtcgacaatggcggtgggatcaaggttgtacagaagaacgatgggtgagcatcccgaatttgattaatgaatatggctaacaatgttaaggcgtgcaatccttttgtcgaaacatcgttgaactacgctttaacttatatcagctacgtggccgattccaaggattttggatcactgtctatcactatccttgctgacaatgactactactcggaacaggcattctcaaaggcttcagagcgcaaggcggggggattcgtaaactttggtgttcctctccatgaggcgcacaagactggtcttggttcatctgcagccttggtcacttcgttggtgtccgcgatggtaattcatcggaccatgcagccggatgatcttggtgcggctcgtgataaattgcacaacctggcgcaggccgcccattgtgctgctcaaggaaaggtggggtccggattcgacgttgctgccgctgtctatggctcttgcctctaccgcagattctccccttccatcttggaatccgtcggtgatgcgggtagccctggatttgaagaaaggcttttcaaggtcgtggaggatgct

SEQ ID NO: 21388 - DNA, 553 bp, Emericella nidulans
gtaaaagtattgccaaaaccctgttacagatttaccaacaatccctaaggaaaacatgccttccttaagcaaagcctccaacgttcttttatacgcgcaccgcctaaacccgaaaacgccgattgaagagaaccataaaagcgctcgccgaagctgaaagaggagggccaagatccgcctataccgggctcaacgaatgcagttccgattctctccgccgcgcttgcaaagtccatcacgttgcagctgtgcaggtagagtacagccccttctcgttggaaattgagtccgagcagattggcctcttgaaaacggcaagggagctgggtgttgcagtcgttgcgtattcgccccttagccgggggatactttccggccagatccggtcacgcgacgacttcgggcccggcgatctgcgtgccatgctgccgcgatacagtccagagaacttcgggaaaaatctcgaggcggtcgataagctggccaccctggccaaagaaaaagggtgtacggtcagtcagttgaccctcgcgtgagctgctatcgcaggaga

SEQ ID NO: 21389 - DNA, 850 bp, Emericella nidulans
aaccgtcccaagggatccaagttgtcatacctcgcatctttcgtcgcctttggtattatccagctttatgtagtcgtcgatgctctgtatctcgtcgtccgcgctttcactggaggggctcccatggatttcaatactgatgatggtatcggtgcgttcctgagctcattcttcggatctagtggagctggtatcattatcattgctcttgctgcaacattcggtctttactttgttgcgtcattcatgtatcttgatccttggcacatgttcacgtctttccccgcatacatggccgtccagtcgtcttacatcaacatcttgaacgtttacgccttcagcaactggcatgatgtgtcatggggtaccaaaggttctgacaaggcggatgcccttccttctgccaagactacaggaggcaaaggagaagaagctgttatcgaggaaattgataagccgcaggctgatatcgatagtcaatttgaggcaacggtcaagcgagccctgactccgtatgtgccacccgaggagaaggaagagaagagtctggacgactcgtacaagagtttccgtacgagactggttacgctctggctcttcagtaacggtcttctcgctgtctgcattactagtgagggtttggataagttcggatttacggtatgttttcgtgcgccctatctattattcgaagtgaaactgacaggattcaacagaacacctctactgagcgtacttcacgtttcttccaagcccttttgtggtctaatgcggttgtcgctcttattcgctttatcggagccacatggttccttggaaagacaggtcttctctgctgttcgcccgtcgg

SEQ ID NO: 21390 - DNA, 462 bp, Emericella nidulans
gcatacaagttgcaaaccgcgcctagccaaatgcttatcatgccgaagcatgccattggctatcaacgagcggagttcgcctcaaagccaatctgggttactcggtatcaagacgacgaactatacgctgccggtgagtttacaaaccaaagcaaacgtgccaacggggtagagacgtgggtgcagagaaatgatgttacggaaaatgaagacgttgtcttatggcacagtaagtagattccttccgtcaagctctagcatcttcaagcaaatgtggcttccagacagaactgacattttatctcagctttcggtctaacgcataacccgcgtattgaggacttccccgtcatgcccatggagcgtatcagcgtgatgttaaaaccggacggcttttttacgaagaacccagcactggatgtgcctcaatcgacgcagaatttcaacaagtcaacacttcac

SEQ ID NO: 21391 - DNA, 850 bp, Emericella nidulans
aattccgaagttcgactaccaacgacatccatttgtgccgaaattgaggcccttgcatcgcaaacacctcaaagcattgctatcgcgagcgagacacttcaattgagttacgctcgactcaatgacctatcgtcggccttggccaactatctgaccaatctgggcgttttgccaggtaccaaggttcccatatctttcgaacagtcggaggccctgtgggccattatctccattattgcgacctggaaagctggtggcatttgcgttccccttgcgacgaacccagtaaatgcagagctcgaaacttggatgatggctgctgatcttcaagtggctctagcttgtccaggcagagcgatgtccttggaggatctggctccgtacgtcattccagttaccgacgagcttctggggagcctcgaaatcgacgtctcaaagtggcatcaattcgaggagtgcgcctatgtcgtattttcgacggaccctatggacccatcgaaaggctttcttcttgatcatggcgcgatcgccgccagttgccggtcatttgcgcgctccatttcccttggtatgtccactcgtatgcttcaatgcgcacatatttcgtcctacgagtttgtcctcgaaatctttagcacattgagtcagggcggctgtgtctgcattccgcagagtagcagtccagccgacttgtccaaggcagcttgtgagatgaggacgaccactatccggatggaccagagtctggctacttctaccaatcttgcagatgcctatggtatgaggcaggtcgtcctcaccggtgatgcgctgccgctaggtgttgagcaactcagggttccgcaggctg

SEQ ID NO: 21392 - DNA, 528 bp, Emericella nidulans
gctctctccatatagtgtgcgtcactcgtgtagcatctccagaccgtctggattgatgtcctctatgtcctctggtaggtcgtactccacctctagtcagaacgtatgcacagtctccagatcatggtcgaccagggccaggtgctgtacctgggcatctcgaacgcaccggcctgtgtggtcagtgcgcctaatacccatgctggcgcccgcggccagaccccctgcagcgtctaccagggtagttgtaatgtgatgctggtcggctttgaccgggacattattcccatggcccttcatttcggtatgtgtctggcgccctagtatgtgttaggtggtggtcgaatccatagcaatcaggctgtgcaggattaacgcaaggctggccagtgagtggtccgcttctttggccgcagggaccggaccccagatgaggccaatctgagtgccgccctagaaaaggggccagcccagccggaaattacgtcggtctcgcccgtccccttggcatctgtccaaaaatggttc

SEQ ID NO: 21393 - DNA, 850 bp, Emericella nidulans
tctgattgatgagtctactcagtctgctgaacccgagtgtatgattccgttagttttgggatgcaagcaggtcgtccttgtcggtgaccaccagcagctcggtcctgttatcatgaataagaaggcagcgaaggcggggcttaaccagtctcttttcgagcgacttgtcatcctgggttgctcgcctattcgcctgaacgtccagtaccgtatgcacccatgtctttcagaattcccctccaacatgttttacgaggggtccttgcagaacggtattacttcatttgatcgccttcgtcgcgaggttgatttcccttggcctatcttagatagccccatgatgttctggtcgaatctcggaaatgaggagatttcggcatctggaacatcttacctcaaccgtaccgaggcagcgaatgtagaaaagatcgttacccgcttctttaaagctggcgtacagccaaaggacattggtattatcacaccttatgagggacagcgcagttatattgtcagctctatgcaggctactggtacgttcaaaaaggagcattataaggagattgaggttgcatcggtggatgctttccagggtcgcgagaaagattttattattctttcttgcgtacgctccaacgaccatcaaggaattggtttcttgagtgatcctcgccgtctaaatgttgcgcttactcgtgccaaatacggtctggttatcctgggtaatccgaaggtgctatccaagcatcctctctggaattgtctcctgcagcacttcaaggaacgacacactcttgtcgaagggccattatcgaatctacaggaatctctcatccagttcagccgtcct

SEQ ID NO: 21394 - DNA, 850 bp, Emericella nidulans
cccatgtagctcagaatccaacggatagtaagctaaacgcccctaaccctttccgggccgcgaaaatatacagtgctaagtcaccctctagttcaatccctcgacgctgatgcctttggcgacgatgcggtgcttggttgtgattttgtcggtactatcgagctgacgggtgacaaagtgagcagagtcaaggttggcaccgtgattgccggtctaatctggggaggtcagtcaccgtcttggaccagacttatttcattcagcatataaactttcgtttgagcaggtgaaattaaggggttgggtggctatagcgagtacaccctcgcagatgagcgtatttgcttccctttgcccgaaggcatcacgcccgaacaggcggcaacagtacccctggccgcgtgcacagcactactcgctctattttccaaggattgccttagcatccctcagaagtctggagaaacagtccttatttggggtggaagctgtgagtctaaatgatgcagtgcaccgtatgtgtagcgtggaaggctcatatattgcagcgagcgttgggctttatgcaatccagattgccaagcactacggtctcaacgttattacgacctgcagtgcccggcatcacgatttggtcaggtcccttggtgccactgtcgctctcgactgccgcgacgcaagagtagtggagagcatcaaggctgctgcaaactgcagtctgaggtacgtctttgacactatcggcaacagctcgtcttccggtactgcatcgcaggcaatctctgagcaagaaggtagcctgtgcactgttcgtccgggcaaggcttttaccgagaatgtgaccaagcaa

SEQ ID NO: 21395 - DNA, 577 bp, Emericella nidulans
cgagatctgtctcgctctgccaaatcgtctgaagggttattacatgattacgacaggcactaaccggactattgccgaatagaaagggttaagatggctgaagacggtggattattggatatttcgatcaaagggggcgtatgtatattgtcgatcgattaaaggtatatcatatgtgtcctaaccccaggatctacaacaaactgacacggatccaggagctcatcaaggtcaaagggctgcaagttgccccggctgagttggagcagtatcttctcacccaccccagcgtcgccgatgcagctgttgttggtgcgaggatgtgagtttgccttcacgttgccttcggacaatttggactgacattgaacccagaaatggcgctgagtacccgcgagcatttgtcgtgcgtaaagatgacactgtagcagaacatgagctgttcgacatggtcaaggcacacttcgctccacacaagtggttgacaggaggtgtgtacttcatagaccagattccccggactggaagcgggaagatcatgcggcggaatttgcctgttattgatgaatccctgccg

SEQ ID NO: 21396 - DNA, 850 bp, Emericella nidulans
ccgcggctgaggaggccttcaagacctggtccgaagtcccttttgtggagcgccagaaggcgctgctagcctttgccgatgcaatcgagaagcacgcggaggatttctcaaagctccttgttcaggagcagggcaagcccgtacgtccatttgtcaagactatagacctgatcccgtagcatcggctgaccgaaacagctccaattcgcagcctatgaagcggtcgcgtccgtccagaccatccgcgcgcaggccgagatcgctgaggggctcaaggatgagatcgtcgaagacagcgccgagaagaagattgtcgtccggcacacccctatcggtgtcgccgcggggattatcccatggaactttcccctcgcgcttgctgtaattaagttggcgcctgcgctgctaaccgggaacgtgatcatcatcaagccgtcgccgtttacaccatactgcgggctaaagcttgctgagctggcgcagcagtttttcccgccaggagtagtgcaggctctgagtggtgatgataggctgggcccctggctgacggcgcaccctggaattgggaagattagctttacgggctcatcggcgaccggcaagaaggtcatggagagtgcaagcaaaaccctgaagcgggtgactctggagctgtatgtgcttcccctggtgattgacatgatacgggtgctaacagatgtaggggaggtaaggatgcagccatcgtgtgcaaaaatgtcgatgtcaagagcgtagcgccccaggtgagtccgctctgccttcgacttgcgatctctccctaatcccaccaggtggtctcgaagggattcctcaactcggggttgatatg

SEQ ID NO: 21397 - DNA, 377 bp, Emericella nidulans
tctatatcctcgagcggtacggcgagttcttcgcgcacctccgagccgcagaagcactcgccgatcgagcgggagaccagttgaccagtctctacactaaatacagctccaaccgcactgccctgacgcctcaggagcgcggagaggtagcagagtgggtggcaagcgtcaagatcgtgacaacagatgtcgggctcaaggtaactagtggggtgtttgaggtcactggggccagagcgaccagtcttagagtcgggcttgatcggttttggagggatgtcaggacgcacacgctgcatgatccagtggcatataagcggagagaggtgggtaggtatgtgcttctaggggagcacccgactcctacatggtatacg

SEQ ID NO: 21398 - DNA, 850 bp, Emericella nidulans
agcttatggtaggtcgtattggtctttcgacaagaaggctcccaactatgccggtcaggataatctcttctcggacttgggtgttccgcttttggataatgccttccaaggctacaacaactgtattttcgcgtacggtcagaccggttcgggaaagtcttactcgatgatgggatacggcaaggagtatggtgtgatcccgcggatttgtcaggatatgtttgagcgcatcaggaagatacaagaggataagaacctcacctgcacggtggaggtctcgtatctggaaatctataacgagcgggttcgtgacttgctcaacccgtcgaataaaggcaacctgaaagtccgtgaacacccgtctacaggtccctatgtcgaagaccttgccaaactcgccgttcgctcttttgaggaaatagagaacttaatggacgagggaaacaaagcgcgaactgttgctgccacgaacatgaacgaaacgtctagtcgatcacacgccgtgtttacgttgatgcttacacagaaacgacatgatgcagagacaagcatggatacggagaaggtgtcgagaatcagtctggtcgatcttgcgggttcagagcgagcgaactcgactggagccaccggtgctaggttgaaggaaggagctgaaatcaacagatcactttctacgcttggacgtgtcattgcagctctggcggatgcggcttctggaaagaaaaagggaaagcaggtgccgtaccgtgattcagtacttacgtggttgctaaaggactctcttggaggaaattctatgactgccatgatcgccgcgatatcacctgccgacattaacaatgacgagacc

SEQ ID NO: 21399 - DNA, 797 bp, Emericella nidulans
catggcaccagttgttgggcgttggagagcgagtagctgtatgggcagtctaacaacaaacttgcatttgctcatggctagttctaccgaccaactactgagagatataagatcatcatcgaagggaaagcttttcccagtgaccatgtatgtctcttgactgtgcagtcgaacatggactaattgactctcctcagtacgcggtcgaatctcagatcaagcaccataatctccagcccaaagatgccatggttctcattgaaccgcaggatcctgaacatccgattctcgaaactgaccgtattcttcgagtcattgacgagcatgcttcaactacggctttacttcttctctctgctatccagtactacacaggccagtactttaacatcgagaagatcactgcacacgcccagtctaaaggcatcgtggtcggttgggactgtgcccatgcagcgggaaatgtcgacttgaaattacacgattggaacgtggacttcgctgcgtggtgcaactataagtacctcaatagtggcccaggcggaatggccgggatattcgtgcatgaaaaacatggagaggtgaaggcaggtcaaggcgacggggaactggaattatttcgccctcggctttccggctggtggggaggagacaaagctaccagatttctgatggataatcgtatgcacaccgaccaaggacactaacgagctctgctgactattacataaatttcgtcccccaatccggggcggcaggatatcaattgtccaatccgtccgtgcttgacatgaatc

SEQ ID NO: 21400 - DNA, 315 bp, Emericella nidulans
gaaggcagctcttgatcgccttcaatggaaaataagaagcccagccctcccggtcaacgcaagcccaacgtcaagttcttcgaggaccgtggcagccaccgagggaatgccggcacttggcagggcagcaaccgaggcggtagcaacacatcacaacgcggtggttaccagagtggaggggctagcgacagtgaaaccggtcgcggacgaggctttggcgggcgaggcggcggccgtgggcgcggtgaccgcggacgcggtggacgaggaggccgcggcgggttcagcaagggcccgtcggattcgtccgctcca

SEQ ID NO: 21401 - DNA, 796 bp, Emericella nidulans
attattctgagattcgagagtcgaaacggccagtttcgcctgaatgtcagcccacaagatatgttcccatctctagaaacaaaggtatgacttaatattactctataccctgtttgggagcgaggtcgtcggaaaatgctgagttctgagctgtagattctggagcatcttcccccagacaccgaaccatcttcgatcaagctttccaacaaaccaattggcgctgctggtgacgagcgtttcttgaatactctggatggagtgtcttttgagcaagttgggcttaggtcagggtaccaattgcaggaagcggacagtcgctgatgctgggaatctaggcacggagacaagctctacatcggttatcaatcaaagcaggatctccaagatggtgccagtaatgggactgccgctggctcgtccgctaggcggttaaacggagctcctataaatcaagagattactcccacttcacgagcacaagccgacagagtcgcctccgttactgtcaagaacccgtgggatgctgttaggcaatcggctcttgacgaccgcttggagaagaaggatgggaaaattcatcgttctcgcgataacaagatgtgcaaacacagtgcgaagggcatgtgcgattactgcatgcctctagagccgtacgacccgaaatacctagccgagaagaagatcaagcatctttctttccattcatatctgcgcaagatcaatgccgcaaccaataaacccgaactcaaaagctcattcatgccacctctcagtgagccatactatagagtaa

SEQ ID NO: 21402 - DNA, 593 bp, Emericella nidulans
tattttcaccatttctttgcatgtgagagtaaattgtgttgtttcagcattcttagacaaatcagtaatgttattttctaatttcctactgctttttttaaggttttctgatggatatggaataatacgggacatagtgcacagccatatacttcagacaatcgcattacttgccatggaacctccgataagtctcgatggtgaagatatccgaaatgaaaaggtcaacctgtactgtaaagaacaaaatcgtcttatggtatatatgtaagttgtgtactcttgttctgtcaagtgacttggtgacaaacctgcttctgcaggtgaaggttttaagatcaattcgcaagatagacccgcgtgatgtcatccttggccagtataaatccagttcccgagacaagaacggtgtgatcttgaacggtgtagaccctacatattgtgcagcagccttgtatattgataatgcacgttgggatggtgtacctttccttgtaagagttggcactggcctcattaaacacaggtaagaataattattcctactcatagacatatccaactgtcataacaattgattggtgggatcctct

SEQ ID NO: 21403 - DNA, 829 bp, Emericella nidulans
tcaacccgacgaggacaccactacaggcatcaaggcccttctcgcacacgaagcttctcctacattccccgcgaagatatggcataaatgcggtccgaagggtgtcaacgagcatgctcagaagttgatggacctatggctcgagaagaacccccatttgcgccatgagctcctcaccgacgagagcgccgaccaatacgtccgagagaactatgcggattggccggacgtgctcgaaacatatatggccctgcaagtgcccattctcaaagccgattttcttcgcgtcctcattctatacgccgacggcggtatctggagcgatctcgatgtccaagacgaagttcctgtgtcggagtgtattcctgcaacgtctaccgaggatacggaggaccccgtaaacgtggggggcggcataaagttcgacggatggcagttcaccagctggaccattatggccaagccgcatctcctacacttcaagaatgtcatcgagtatgtcgtgaaacagctcaagacaacggcaattgaaaaccatgtcagtctgtcacaagtcacgaaagccatggtcggggaggtagtggctgtcaccggcccgcaggctattacgatggcgttgcttcaaagcgtctctgaggagaccggtcaggatatcacgaaacaacacatccgccagctgaaagagccgaagctcctcggtgatatcttggtcctaccacaagccgcctttgcagcgctgcaaggtggcaatccgacggatcagggcccatacctagtatcacatcagtatgccgggtcgtggaagaacgacgttggtggggaagaaggc

SEQ ID NO: 21404 - DNA, 538 bp, Emericella nidulans
ttgttttgcttctgactaccagcgttggtggtcttggtctgaacctgacaggtgcagatactgtgatcttcgtggagcacgattggaacccgcagaaggatattcaggccatggaccgagcacaccgtatcggacagaagaaggtggtgaatgtctaccgattgattacacgaggaacactggaagagaagatcttaaagtaagtaatcctaatcttctgtcttgtaagctgcatactaactttcttagtctgcaacgattcaagatcgacgtagcatcaacggtagtcaaccagcagaacgcgggcctgaacacgatggacacagatcagctgctagatttgttcaatcttggcgagacagcggaaaacgcagagaaaccaacagagataggcggcaaagaagtcgacatggttgacattgacggcgaattgaaggagaagggcaagaaggggtggcttgatgatctcggcgagctgtgggacgaccgacagtaccaggaagagtacaacctggactcgttcttgtctactatgaaa

SEQ ID NO: 21405 - DNA, 688 bp, Emericella nidulans
cagacccaacccaacacaatcgactacatcgccctgaccttcctttcactcgtcgcaggcacatttctcacccggggcatcctctgggaccagccagacccctacagacatcttctttacgaacggcctcagctcaaacacggcattggtactaccgcaaacagtagacagcagacccggaacatcgcccgaaggttggaggagacgaactcgcccattgtcgtcttctggggctctcagtcagggacggcagagtcctttgcacacagacttgccagggaaatcaccctgcggtttggacaaaacacccttacagcagatctgagtgactatgaccccgcttcaattgcggagattccctcatccaagctagcgatcttcatcctctcgacgtacggcgaaggagaccccgccgataacacggttgagttctggaactggctgaatagtaacgaccggaacgcggagaagaagcagaagcagttttccgggttgcgatactttgcttttgggttgggaaactcgaactacaagttctataaccgggttattgatcgcgttgtgaaggtgcttggcgagcatggcgcgaacgcactgcttcctgtatcaagagcgaacgatgctactggctctactcaggaagacttcatatcatggaaagaaagactgtttgcattcttccgtggga

SEQ ID NO: 21406 - DNA, 551 bp, Emericella nidulans
cgcgtgggtctgtgggagatcctcgagagcaaggatgggctggagacgatagccagccctgaactgttctcgcatggtcagaagcagttgctctgcatggcaaaggccatgctgcggcatgggaatattattgttttcgatgaggcgacgagcgggtgcgtatatcctttccttccttccgtcctttcattagtccctcgatgaaatcctaacgaaaaatagagtcgaccccgaaaccgacgaaatgatgcaggagctcatccgcagctgcttcgcccaacacactgtgctcactgtgacgcaccggctggacacgatcattgattacgaccgcgtgctcgttatggataacggcatcctggctcgagagcgacccaccgcggaccctgctgtcgcgtccatcagtcttccgcgagctgtacaagtcctcgcgcggctgggaagaatacgagcgtcaagagcgtgcggaagccgaagctcggagacgtgaaagggtcgagaaagagcgcgccgaagaagagctgcgtggacgcaggggactcattagtgag

SEQ ID NO: 21407 - DNA, 542 bp, Emericella nidulans
tgaaaatcgcatcaaccatgtctctccccaacctttccaccttccagattcctaagccctcgacaccgcctcccccgcgcgacgccccgcacgccgaacaaaccgcctttgccctatcaaacgcgcaagccacggcctcttcactcaaatccgccatttcatcccttgacccctccggtctgggcttcactcgcgtttatgactgcacgggtgtgcccgcttgcgttcagaccgggatttacgccgcctcgccgggttcagtcctcgtacagattggcatggggaaccccgtgcagacgttgccggttggcgcagcggcattgcgtgaagtcgatatcattggagtgttccggtacgatggacatgcgtatccggccgcaattgagctgatggcgagtgggaagatggatgttgttgaaaagtctgttgtgacgcatcggcttgggttgcaggatgggatcagagcgtttgacattgctgggaagggtgttgatgagggaggcaggccagttgttaaggttcttattgaaagcgagtccccc

SEQ ID NO: 21408 - DNA, 591 bp, Emericella nidulans
ctgcccggtctgtgctctcacaagctaagggattggctccagggcggagatatttttcgcgcaattcctggctaaatcagtcgccgtcggcaccgttcaatacgccccagtcacagaagcgaaatgcttccacgatgtatgccagccgcagctcagtcgaagaatagtctaatgcaaaataggtattatacgatcagtataatcctcggcacagtctccctcgcctacggctccgtcccattgtataaaatggtcagtcccgacaccaattgttcccctcaactttccgcatcctttaagcgaatgctgagccagagcctttcactctcagatctgccaacaaaccggctggaacgggcaacctgttctcacacaccgcgcaggagacggcgacacatcatcgcgcgtcaccccggtgactgactcgcgccgcctgcggatcacgttcaatggctccgtgtcagatgtactaccttggaaatttacaccgcagcagcgcgaggtccgcgtacttcccggcgagacggcacttgcattctacacggcgacaaacaagggccctacggatatcatcggagttgcgacatatag

SEQ ID NO: 21409 - DNA, 500 bp, Emericella nidulans
ttatatctcttcagttgaattgcatgcactaaagctgaccaattcccgtgcaataggtcaacgttcccaagacccgcaagacgtactgcaagggcaaggagtgccacaagcacacccagcacaaggtcacccagtacaaggctggaaaggtgaagaccaccgcatccctccgacacgcactgaacgaatactgatatggatgcgactctccaggcctccctattcgcccagggtaagcgtcgttacgaccggaagcagagcggttacggtggtcagaccaagcccgtcttccacaagaaggccaagaccaccaagaaggtcgtcctgcgtctcgagtgcactcagtgcaagaccaagaagcagctcgctctgaagcgctgcaagcacttcgagttggggtacgctctcacatccatacaaacgatccttaaggtgtttcaagctaacatgcttgtccgtacagtggtgacaagaagaccaagggtgctgctcttgtcttc

SEQ ID NO: 21410 - DNA, 500 bp, Emericella nidulans
tgattgaggaagtagttagcagtgtcttttccggaatgtgccatgcggccattgcgttaacgcctccggagagtcctagcaaccccgacactgcctacaaacagggtgtgtctgttgtcttacgattcgagaaccaagatcggtggaaggtgacatccatgaccggggcatggcgacgaattgtcatgaatatctttggaaatgcacttaaatatacagacagtggttttgttgaaatctcggtgtcgctgctggatccgccagtgaaaaccgacccagattctgccgttgcacacttgcgcttcactgataccgggtgtggaatgtctcaggaattcctgaggaataagctgtattcgcctttcgcgcaagaggacgccctagccgaaggtgctggccttggtctgagcattgtgaagcaacttgtctcttttttcaaggggtcaatagacgtgaagagcgagattgatgttggaactcaagttgatatccaaatcccc

SEQ ID NO: 21411 - DNA, 850 bp, Emericella nidulans
ttggttcaatcttcgacgaaatcgcaaacaacgagattgttctggacaccgaaagagagcaagctgcaaatgccgcccatcccgcacctgttcctagcggtcttgcatcaagggctgggcaagtcttcgcaacggttggaagggatatacagggcgagagatatgcgcaagcctctgaggaaatggccaacaaaactgagcaactctatcgcagtttgatccgagctcaacggaagactgcggtgaaagaggcactttcacgctttatcttcgcaacgtccgtccagcacgctgggtccatgttcaatgttacttggatgtcatttctctccggcttgtccgcacccatgcaggatacccaaaaccttaagacaatcaagctctgtatggaaggtatgaaattagccatacgaatcagctgtacgtttgatttggaaactccgcgggttgccttcgtcactgccttggcgaagttcacaaacctgggcaatgtcagggagatggtcgcaaagaatgtcgaggcagtaaagatactgcttgatgtcgcgctttcagaggggaaccatctaaagagctcttggagagatatcctcacatgcgtcagccagctggacaggcttcaactgctcagcgacggggtcgacgagggatccttgccagatatgtcacgcgctggcgttgtgcctccgtctgcgtccgatggccccagaaggtcaatgcaggcaccaaggcgtcctcgccccaagtccatcacaggccctacaccttttcgagccgaaatagcaatggaaagtcgctcaacagagatggtgaagggtgtagaccggatctttaccaacacagctaattt

SEQ ID NO: 21412 - DNA, 621 bp, Emericella nidulans
cgccacacaacagaagggggggaggggggaaagaaaaacagaaccgcaccacccacagcgcctgagccatgagcaaaagcccaaggaggcggacacgacactgagcgcaacacacgcgcccgcagcaacctcccaaaaagacaggcagcagcatacccaggaaccgcgccacaagacgagagccgggcggaaacaagagccacacgcgcaaaagacaacacagctgcaaagcctaccccgggacaaaggccaggcacagagacagaccaagaccgaacggaaaaaagcgcaggagccgccggccaagaacaagcacagggggaaccaagacgtggaacaaaagagacactgcgataaccggacggccagcccaacaacagggcagacaaccggccacccgcatgaaaaccccccgacgggaaatgaacaacaggccaaccgaggaaggaaccgagaaaggcctcaccgccccccggaggcagagaaacgaccacagcccccgggcaagccccaaaacggcaaaaaccaaggcggcccccaaaaacgaaacggggaaaaaaacaagccccggtccccgcatacccgccccaaagcaccaaagaaccgaaaagagggccgcat

SEQ ID NO: 21413 - DNA, 681 bp, Emericella nidulans
tagcaaaggctggatggatggatatactgtgcagatctgccatgttttttgacaatccttaaccagtgcccaaacaatcgtcccgtaaagttctacgagcgattcagagagcctgtgcgcaaatttcaattgcaggcacaggaaaaaggaccttcacctgaatcggaggccgccgagcatgccaaagccgttgcggcttaccagcagctgatcagggagcttccgccacttaacaagcagctactgctttacattctcgatctcctggctgtctttgcctctaaatctgatcaaaaccggatgaactctgcgaatctgtctgccatctttcagccgggattactctctcatccacagcacgatatgtcgccagacgaatataagctgagccaagacgtgttgatcttcctcatcgaaaaccaggaccatttccttgtcggtatgaatgggacagccgccgatgagcaaacagtcaaagaagtcgagtctggcaacgcccgcccgccgacgtcccaatcaaacatccgtcgctctgtatccagtgcaagtgggggagctgatagctttaaaaagtacgaatcgttgcgaagaaacgtttccgtatcctcgagaacctcacgcgcgtccaacaatgtttccaatcccgcaacccctacttccctaggcgcggttggggtgcac

SEQ ID NO: 21414 - DNA, 850 bp, Emericella nidulans
ccagccaagttggctcagctttgtcttctagggtgcgttaagacgtagtataagacccccactgctgcgagagagggagagactatgttaaaccaatccgcataagcaactcaccaggccatgataaaaccgggcctcagtgacggagttcccatcatgatacgacctcgacgaaactggacagcagaagaagacatcatcctgaaaagagaggttaggcgaggttggtttcaaccaacgattccacccctgccgggggacagatacttacttgtgacttaactttgtagtacaagcggagggtgacaacatcagttggcatgagatcgctgcattcctccctgggagaacaaacaaagattgccgcaagcgctggtatggcacagcaggagccaaggtgaaaaaagggccctggacagaggccgaggatgcgcgtctgcggaaggcaattgagcggcatggtaccaagtgggctgttgttgcgtctgtcgtgggaacaagattgccggatcagtgctctaagcgatggagtcacgccatcaatcctgatattgatcgcagtccatggactccacaggaagtaagcatcccaatacacaggccggtgcgacacggagacggttttaacatagacaggatgaattgttggtcgaatatgtgaagaggcatggccactactggcagcagattgtctctctatacttccctggcagaaccagcctggccgcaaagaacagataccacatcctgcaaagacgactgaaaaccgagggcggcggagtaaccgaccagctctacagctgggagcgagtaatggatgctagctcatggcaagggatactttggtctg

SEQ ID NO: 21415 - DNA, 850 bp, Emericella nidulans
cgtaagtataccgcacgacgtttggtactgcattcaaactctgtgcaagccccagtgtcctgcatggacgggcggcagtggcaacggctccacccctgtggtgaaaatctctgatccttctcgcaagcaagaccgcaatggcccaatatatgaaggcagggaaatccacgtttccaatgtgaattggagtgcaagtgaggacgatctgaaagagttgttctccaggttcggcacagtggaattggttcgtcttcctaggaaagtcgacgggggcagcaagggttttggttatgttgtatttagttcgaaggaggaggcaactgcggcgctggctatgcatgagcaagagttccgaggccgcccgctccacgtgaaggtgtctgctcctcagggcgcaaaacggatcgcagcaaccgtggtgacacgcgtcgggaagtcacaatctcccgctccggaggctaatggcgctccaccggcgaccgacttggaagagcctacgggtgagcggagggaccgtacgctgggattgatgaacgttccagacacggtgaacgatgcgcgcatccgggctcttgctgagccatacgggaaactcgttaaagttgtactccgaccggatcaccaaggagcgattgtcgagtatgcggacgtcaaccatgcaggaaaagcggctctggaactgaaaggacaggagatcacgccgggacggaaactgcacattggaaccgtgggcgagatgctgaagcagtccgcagagaaaaaagcgccagtgcaggcgccgaaacccaaggacaaacccaagagctctttccttaccccgacggcgcctatcaagcggccgccccagccc

SEQ ID NO: 21416 - DNA, 635 bp, Emericella nidulans
ggtgaagatataatgcaggtagctcgaattggggaggtttcggttatgcagaagctgtttgacgagaaaaagttcactgcgaactactccgacgaagaagggattactccgttacatgtgcgtcaatcttcccgggacatttggtttaggaaatttcattctaattgtatacttctactagtgggctgcgattaacaaccaatatgcgatgtgcaagttccttatagactctggagctgatgtgaacgcgaaaggaggagagtcagttgcgacacccgcgatgtgggcagctcagcggtgccactattatatcgtgcatctgctactccaatacggcgccgaccctcttcttactgatgtccaaggctacaatattctccatctcgcgacgatcgacgggaacgcatttctgcttgtcttgctccttcaccaagagataccggtagacgtggttgatcaacagggacatacggggctgatgtgggcggcttataagggatatccggcgtgcgttgacctgtttctacgttggggcgcgaacccgaacgcagtggatgatggcggattagcgcccttcactgggctcttgtcaaaggatcattgccgtgtgtcctaaaaatcctcgagtatggtgc

SEQ ID NO: 21417 - DNA, 765 bp, Emericella nidulans
gtgcaacatcaccaccgttccacaacaaagactacgcacaaaccttacaagtctggccatgcttctaagcgtgccttgaaggaccaggctaaaggtatgatcatgatcagctactgatgtgcagcgaaagtgggcgagactgactatcgccaggcaaggtggaaagagcagagcggggtactcgcaagacccctcatcagcaacttatgtcgaaacttgatcgaaggaatcaggctcgtcagaagcagcagaataagcagcaggaaagggctcaggctataagtattttttccggtcaaaatggagcaccgcgtcacgttgccattgttccgctctctatcgatatcgataccacggctattattaaggcgctgaacgaaagtgtcgatgtcaccagcgatgtgtttccagacaccatttcccgtgttcgaattgatcggttcccaccaaatttgcattatatcccggccaatgttgatctgatgagcgcattgaatgcttgccgaattgcaaattttgtcgttttcgcaatctccgaccacttggagcgggaggagccagggctaacttgtctttatgtcatattcaggctatggtgtgcttatctcttttttctgatccgggcttctgaagtacttccctcctatttccttcctgatttctacttccttttttctcttactttttccccatctatctcttttctttcttctcctcatatcgttctgcctttttctcttctcttccctcattttctatgctatg

SEQ ID NO: 21418 - DNA, 850 bp, Emericella nidulans
ggtagacactttgccaaactccttcccaacccgcacagaggacatgctctccgctgaaccgaccatcttcctcaccggtgctaccggtttcttgggtgcccacatcctccgcgacctcctcactcgcaaatcaccttcagcgaaggtaatcgctcttgtccgtggcaagagcgccgagcaagccctcgcgcgcatccgctccacttgccgagcctacggcttctgggacgaatcctggacatcccgccttgagtgcatcaccggctccctcggcgacccccgctttggcctcacagacgcctcttgggacgaccttaccaaccgcgtcgacgctgtcatccataacggtgcccttgttcactgggtctacccctactccactcttaagccggctaacgtgcttggcactattgacgccctcaagctctgtgcaaccggcaagccgaagcagttctctttcgtcagctcaaccagtgtccttgacagcgaccactacgtccaggaatccgagcgcagcattgccgccggcggtgctggtatcagcgaagatgacgacctggaaggtagcagcgtcggcctgggaaccggctacggccagagcaagtgggccggtgagtacctcgttcgggaagcaggcaagcgcggtctcaagggaacgatcgtccgtcctggttacgtcctaggtgattctaagagcggcagtaagttcttctacctcgaatataccactttaagaccatatattgacattctccgcagcaacgaacaccgacgacttccacaaccgcatgatcaaaggcagcatccagctcacggcccgccccaacatcaacaacaccgacaacatggc

SEQ ID NO: 21419 - DNA, 632 bp, Emericella nidulans
ccaaattgagcccttcacattaaccacaaaccggtcaaagtaagttcaaatactgtccccatctccaccatcgtaagggtagcactagccaaatcaaggcatgatcagaatgcacctcctgtctatatgaatgcctgctgcactggcaacatctcaaattccctagatacactctgaggttcagcatgctcaagaaccatgtaaccaagtattagaaacttgcggatccccgtctgtacgcaagctcacgaaaagctagcaaatgactccaaacatgctgcagtatcattgacttgaagggcgttggtattacaaacgccccgtccgtgtacggctatctcaaaatgacttccgccgtctctcaaaactactatcccgagcgacttggaaagctgtatttgatcaatgccccgtcggctttcagcaccgttttcagcgtagtaaagagcttcctggaccctgtcactgttaacaagattcatgtccttggctccggataccaatccgagctgctgaagcaagttcccaaagagaatctcccccagcagtacggtggcacctgtcagtgtgagggaggatgcgagtacagtgatatgggcccgtggcgggaacccgaatgggcgtagagaacc

SEQ ID NO: 21420 - DNA, 799 bp, Emericella nidulans
aaggtaagccctggaactcgagatgttcctttacaactggaaaggagaaaataggagttattgggcacgctaacactagttgaatagcaccgcaacacccccgagaacaacccgtccattcccttcaagttctccgaacagaaccaacagctcatcgaggaaatcatcgcccggtacccccctcaatacaagaaggcagccgtcatgcctttgctggatctcggccagcgtcaacacggcttcacaagcatcagcgtcatgaatgaggtcgctcgcatccttgagatgcccccgatgcgcgtctacgaagtcgcaaccttctacacaatgtacaaccgtgagccggttggcaaatactttgttcagctttgcacgacggtacgctgtatcatttcgcatcgtaaaaatgtgtgatcatgactgacaaatcctcaagacaccatgccaactcggcggctgcggaagcgacaagatcgtcaaggccatcacagaacacctcggtatcaccccaggccacacaaccgaagatggcctgttcacattcatcgaggttgaatgtctcggtgcctgcgtcaacgctcctatggtccagatcaacgacgactactacgaagacctgacccccgagtccatcaaggagcttctcactgcgctcaaagaatcccgtaccgccacctccggccaggttaagatccctgctccaggccctctatccggcagaatcagctgcgagaacagcgctggtctcacgaatttgcacaaccccgtgtgggatcccgagacgatgatgaggaaggac

SEQ ID NO: 21421 - DNA, 850 bp, Emericella nidulans
ttatcacagaccagttaaccaaaggtgtgatactagaaggaatatcagagattaactctaagagcatggcctgggcccttgtacaagtacttataagcaaacataggatcccaaaggctattaccttggacagaggaagccagtttacaagtaatatataggcttatatatataccctgacagggattaactactaactatctacagcctatcacccccagactgatagatcaacagagaggataaacagtatagtagagacctacctctgcatctatacctgctatgactagagggactagaacaggttactcctacttacagagctagtaattaatagctgtatattaacagcaacaggggtcagccccttctacctaagccatagatataacctcagcctatttagccttactgaggaggtagagcaactagctgaagaaccagccaagagtcctatccagaaaggggaagctattgtacagaaagttaaggaagccctagactgggcttaagcctctatagcctattcccaacagaatgtagagaatcaggctaataaatacaggagcccggccacaaactaccaagtaggagataaggtctggctaagtctgaagaacatctgtacagaccgacccagcaagaaactggactggaagaatactaagtacaaggttataggcctggtaggtagctatgctgtacagctgaatacacccccagggatccatccagtcttccatatagacctgcttcggctggctttatcagatccacttccttcccagaagaatgatgataccctagccccctggcatcattatgaacggcgagaaagaatacatag

SEQ ID NO: 21422 - DNA, 833 bp, Emericella nidulans
tggtatatcactttcttcattgctatttcaactaacgtcgagctagctatgagaccatcactgaccttatgggtctacaagatcagattgatgcttttcagaaacttattttctcgcacttccagtcaggaactcacaatgagtgccggatctcggcgttggttcctcttgtgcaagaaagctacgggatttataaattcatcaccagcatgttgagggcgatgcacacaggtaggtttctccgtatcattttgtactcttctactgatcacagttttgttatccagccactggcgacgctgatgcactttcgcctctacatggacgctacgatgctcaacatcaccgcttggtccgattctactatgagtgttcgaacttgcgttacctgaccagcttgattactattccaaaactcccccaggatccaccaaacttactcggagacgaagaagaacgaccagccttgccgaagcggcccacgaaggaggttgaggcagcgccatctcctccaccgaaatctgtggccgctgagccggagcccattaatgatttctggagcaccgaagctcgccggcaacaggaggaatttgaagccgagcagctgcgtcttcagcagcagtgggaggagcagcaacgccaacaattacttgcgcagcagcaagcccagcgtgattttgaggaacaacaacgtttacaagcggagcaacagcgtcttgctcaggaacaacttatgcgcgaacaatatcagagccagacacaaggtcgacttgctgaactagaaagggagaacctgaatgctcgtgcacaatatgagcgggatcagctgatgc

SEQ ID NO: 21423 - DNA, 698 bp, Emericella nidulans
gtccggggttccggctaatctttgaattttccgaaaatgaatttttcaccaacaagacgatttccaagacatacttctataaggaagagaatgggtatgggggcgattttatctacgaccatgccgaaggcaccaagattgattggaagcctgaaaaagacctcaccgtgcgtgtggagagcaagaagcagagaaacaagagtatgcctctgtccatggatgtatatctaacgttagctaaccataacagacacgaaacagacccgtgttgttaagattactgtgccaacagaatccttcttcaacttctttgctcctcctcaacctccggcagatgatgatgataccgttgcgacggatatcgaggaacgtttagagctcgactaccagcttggagaagatattaaagaaaaacttataccccgagccatcgattggttcaccggtgaggctcttcaattcgaggaacttggtgatgatatggaccccgatgagtttgacgagtttgacgacgaggacgacgaggacgacgatgaggatgaggatggcagagggtcggaccaagacgtcgatgactccgatgaagaggtttgtgtttacccgtacacctagtcttatagcacttgttctgagcaactaacgttcggtaggacggtacttccaagccgaagaaagaagcggctgagtgcaagcaaagt

SEQ ID NO: 21424 - DNA, 395 bp, Emericella nidulans
ggccgtgctggtaacaccggtatcgccactgctttctttaaccgtggcaaccgtggtgtcgtccgtgatctaattgacctgctcaaggaggctcaccaggaagttccctctttcctggagagtattgcgcgtgaaggcagcggatatggcggtcgcggaggccgtggaggtcgtggccgcggcgtaacgccactcgggacatgcgtcgcatgggcggtggcatgggtggccctccttcgtatggcggcggtagtggtttcggcgctccagcgagcaactacggtggtggttatggtggtgctccttcttacggcggcgccggctatggaggtggctacggcggtggtggctatggcaacccgtctggttctactggaccttcttcctggtggtaa

SEQ ID NO: 21425 - DNA, 850 bp, Emericella nidulans
ccggtgctgagaaccggcatttcaaatggtaccaagtgcgcgaggcgcttctatcatatcaattttggttcgtattcgtcctctcgcttctctcgagcattggaaggggtgcagtaacgacattcggctcgatcatctttaacgggatggggttttcgacctttcaatctctactactgaatatgcctatcggtgccttggcctttatctgcgttctgggatctgggtatatcggacgcaaggtgcccaattcgcggctttatatcgtgagtggtgcttgtgtgccggttattattgggagctgtttgatgtatattttcctttccttgaagagatacaggggcgatgttcactgttgacttctttagatggcaactaccctcctcccagcgtgccgcccgcattataggcttttacctcattaacttcttctcctcagcctgggtgcaatgtatcgccatgggaacgtcgaatgtagccggccatacaaagaaagccaccatggctgcggcgacgttcatgggctactccctaggaaatatcgtcgggcctctcacctttgatgcgtaagtcgtcccggttttattgaccacatgcaaccaaataccttttgctcctgcgcgactctaacatgcttcgtgaaaacaacagcaacgatgccccccgctacgacccagggttccgtgccacggtcatctgctttgccatctgctttgttctcgcccaggtatttagagcgctcatgttggcgcagaataaaaggaggaatagcaagtatggcccgccgacgcaggaacacgggttggaggacttgaccgatagggagaataagtcgtttcggtatcctctt

SEQ ID NO: 21426 - DNA, 850 bp, Emericella nidulans
ccgttcacctggggcaaaacccgcgaggcatacggcgctcctctgctgactgaagccaacaacggcaatggtgccccgcagaccgaccacaccgaaggcgtcttcattgactaccgccacttcgataggaccaatcagactccgatctacgagttcggccatgggctgagctacaccacattcaagtactcgaaccttactgtccaaaagctgaatgccccagcgtactctcccgcatctggccagacaaaggctgcgcccacattcggcaccattggtgaggccgaggactacgtgttccctgacagcatcacaagggtcagggagtttatctacccttggatcaactctactgatctaaaggagtcatccggagatcccaactacggatgggacgatgaggactacatccccgagggtgccaaggatggatcaccacaagacgttctgccgtctggtggaggtgcaggaggaaacccacgcctttacgacgacctcttccgaataacagccatcattaagaacactgggcctgtggctggtacagaagttccccagctggtaagtcgcttaatctttcccttttttttttttttcagctaggagctaacccggctagtacgtttccctgggcgggcccaacgaaccgaaggtggttcttcgcggctttgacaaacttgtcatccagcccggcgaggagcgggttttcacgacgaccctgacccgccgtgacctgtccaactgggatatggagaaggacgattgggtcatcacgtcttatcctaaaaaggtgttcgtgggaagctcctcacgcaagcttcctcttagggcttcgttgccggcggttcag

SEQ ID NO: 21427 - DNA, 693 bp, Emericella nidulans
ctaatctggaaatgcggaagaagcgttttgagaatccccgaggaggatatgggtcttctccttcatcacgcggtacatctccaacccccgccccaactggtcccgtggtcggaaggtgccaggatttggagaagcgttatttccggttgacttcggcgccaaatccagatacagtccgtcctcttcctgtcctgatgaagacactggatctgctgaagaagaagtggaagaaggacaacaactacacatacatctgtgatcagttcaagtcactgcgccaggatttgacagtgcagcacatcaggaatgaatttacggtcagtgtctacgagatccacgcccgaattgcgctggagaagggagatcttggtgagtataatcaatgtcagacgcagctgcgggctttgtatgcgcaacaattgggaggtcatccgaccgagttcaaggcgtaccgtattctctactttatccatacgcgcaactggacggcaatgaacgatgccctggccgatctaatcccagcagacaagcggagtgcagccgtcaaacatgcattagatgtgcggtctgctctggctcttggcaactaccaccggtttttccagctttatctcgctaccccaaacatgggagcgtacctgatggatatgtttgtggatcgcgagcgaccgtccgccctccgaaaatctgtaa

SEQ ID NO: 21428 - DNA, 850 bp, Emericella nidulans
ccgtacaactggaattcaagtacctagccaaactgacgggcgaggctgagtactggcgcgttgtggagaaggtaatgcaagtggttgacgccaatcaagcccctgatggccttctcccgatctatatctatccagatacgggaacgttcaggggagcgaacattcgcctcggtagcagaggcgactcttattatggtacgtgatgtcaaagcagtgaagtagatcggtgctaataacattcagagtatcttgttaagcaataccttcagacgtcagaagaaatatacaaggacatgtgggacgaggccctcgtcggaattcgcaaacacctcatcacattttccaagaatgccaagttgactgtcctgggcgagcgacaggccggtcttgacggccctctaaccccgaaaatggaccacctcgcctgcttccttcctggaacaattgctctcggggctacagaaggaatccctctctctgaagccaaaaagtccgccgcatggactcgccgtaaggacgaagaaatcctcctcgccaaagaactcatgaaaacttgctgggcaacctatctagccacccgcaccggcctagcccccgaaattacctacttcgacatcgacaccccgcacgtctccgagctagaccggtatcccgactccacgctcgccgcaggcaacgcggacaagaagcccgcggacaaagatctaccgctgaaatcccaagcgctgtaccctctcgcagactcaaattcagaccctaactcctggcgtcgcgacattatcatccagcctcaggatagacataatctccagcgcccggaaaccatcgaatccctcgtcgacagcatggc

SEQ ID NO: 21429 - DNA, 575 bp, Emericella nidulans
aaacgaaaaccttatcgtgactatattgggtatctgaaagtcggccgcggcatatgtccccattgacccaacctaccctgatgaacgagtccgctttgtgcttgaagacactcaggcaaaagtcatcattgcgagcacgcaccttgcagagagacttcaaagcgaggtcatcagcgacagggagctctccattattcgtctagagcattgcttgagcgccattgatcagcagccatcgacattcccgagagccaatttgcgcgacccatctctgaccagcaagcagcttgcctacgttacctatacatcggggaccacgggttttccgaagggcattctcaagcaacacactaacgtggtgaacagcatcactgacctttcagctcggtatggggtgacaggggaccatcatgaagccatcctgctcttttcagcgtatgtgtttgagcccttcgtgcggcagatgctcatggcactagtgaatggccacccgctcgctatggtcgatgatgctgagaagtaaaatgccgaaaagttgataccattcattcgtgagcacaaggtcgtgttcttca

SEQ ID NO: 21430 - DNA, 850 bp, Emericella nidulans
taccaatcccatcctcccgggctggcactccgacccgtcctgcgtttacgtggctgagcaagaaacgttcttctgcgcgacttcaacattcatcgcgttccctggtcttcccctctacgcgagcaaagacttagtccactggacactcgcaagcaatattttcaaccgccccagtcagatccccagtcttgccgtcacagaggatcagcaaggcgggatctatgcgccgacactccgctaccgcgatgggaaattctacctcatcgtctcgttcctcggtcccaatgtcgaaggacttgttttcacatcggacaacccatacgacgacgacagctggagcaagccagtcgtctttccagttcacggaatcgacccggatatcttttgggaggaggacggtcaagtctacgtgacgtcggctgacaacaaccagatccagcactacaccctagatctagcaactggtgaaatcggccctgtaacgtacctctggaatgggacgggcggcgcataccctgaaggacctcacctgttcaagaaagcggacgggtactattaccttctgattgccgaagggggtacagagacaaaccactcagctacaatggctcggtcgaggaaccgaaccggaccctgggagccttgtccggccaacccgatcctgtcgaaccggaatacgacccggtattttcagacggtgggacatgctgatctgttccaggacggccagggccactggtggggagttgccctctctaccagatcaggcccagaatgggtgaactacccgatgggaagggagaccgtcctcacttctgggacctgggaggacggggagtggccagtgctt

SEQ ID NO: 21431 - DNA, 850 bp, Emericella nidulans
aagggcttttagcacagatctgcctctccagggcgaaacggccggtgtctgataaacgaggctcaccactgttatgcggcgctccacaatcaggctgtaaagcactgtccgagcttagagatgaccctgcgttcagagaatttttcaaacttcaagatgggttccaatggaatggtacgtagcctcgttagtaggctgttcttgagtccgtgctgatcaaaatttagtggcaatgcgcttggtgacttgtttagagcacctgcttggtcgcgagaatagcggtaccaacgatcttctcattctgtcaacacttgatttaatacaaggcgtgctccttctccatccgccctcgagaattctgttcgcccgtgaaatttacatgaaccttcttctggatcttttagatccgatcaattgccctgccattcaatccgcaacgcttctcacccttgtcacggctctgctagaccaccctgccaatacgcggacctttgaagagctggatggattgctcacagtgacatccctcttcaagcagcgctcaacagcgcgtgaagtcaagctgaaacttgttgaatttctttacttctatctgatgccagaaaccgccatggtctccaccagtgctccaaatacagccctacaacgcagccccagtaagctggggggtgggcctgtatcaaggagtgtcaatgtttcggggtctcatagcaatggcaggggcagccgcgacactcgaacaacagaggagaaacaatctcttctgggaagatatttgcacaatgtggaagatcttgtggaagatctcaaggaaacggcaccttttggagctacggtctattaatacgaa

SEQ ID NO: 21432 - DNA, 561 bp, Emericella nidulans
ctcgagccccggacagagcatctcgcctgttttgtgggtgggatgtacgcgctcgccgggaagcttttctcaaaccagacgtacctcgacaccggccggaagctgacagacggttgtatctggtactacgataattcaccgctaggtatcatgccggagatgttcaccgtgccggcttgtccgtcagtggctgaatgtccttgggacgaaacaaggggtggtatctacacctacgtgcgtgatgggcactactttctgcgtcctgaggcaatggagagtatcttctatatgtggcgcattacaggggacgaaaagtaccgcgaggctgcatggagaatgttcacggctatcgaagcggttacaaagacggagtttgggaatgcggcggtgcgggatgttatggttgaggaaggaaatgtaaagagagaagatagcatggagagtttctggatggcagagacgttgaagtatctgtatctaatatttggggagaccgatttggtcagcttggacgactgggtgttcaatacggaggcgcacccaatagggtgcagggagtcc

SEQ ID NO: 21433 - DNA, 457 bp, Emericella nidulans; identical to SEQ ID NO: 14634

SEQ ID NO: 21434 - DNA, 743 bp, Emericella nidulans
atgccgcccaagaagaagtctgacgcccgtggaggcgtgcccaagcctgggacaaagcaggcaaaagctgccgctgagcggacagcggagagcgcgaagaaagcgcaacaaccagcggacgagcaaaagaagcctacagtcaagcaggtcattggtggcgcatcatggacggggaaattgccggtcaatttgatgtcagaacattgccagaaacataaatgggagaagcctgaatatactatggtgagagcttgaacaggaaataatcatgcgcgcattgtggtgctgattcagtactaactattgcacgctataggacaaagttgacggagggtttgtctcatccgttatcttgaaacgcatcgactccaagactagagaaacgattacactccctcgcatacggttgccagccagttttaagcagccaacgggcgctggaagctcgtcattatgctgcgacatttgcgctcttccatgtgtgcaacaaaaccaatctacacatgatgctcccaccaaacttcaaaaagctttggaagagcgactttgaagagctaaaggcggcagagttcaagaagggagacggctggctgtatgaggcggatccgtttttggccaagaaggagcgagaacttgcggctacggaggttgaaaagaaacgaaaagagcgtgaagcatcacaggcgaagtcgtccgacggcgcggtgaatccagggttagggccagggcctagaggacaaact

SEQ ID NO: 21435 - DNA, 485 bp, Emericella nidulans
acttgttgttgtcgttgggcgacctttcggatggggatccgcataaggaattcctgctactgatgcagttgtttatgtttttgggttcgtagtgcttaacgattggagtggtgcgtctcgttcaatttcccgcttctctgagacagtgtagcaactaggactaatatggctgcagcccgcgacatccagggtcttgagatggtccctctgggaccgttgaacggaaaggcttttggtactacagtctcgccctggattgtcaccacggacgctctggctccgttcaaggtagcaggtccagaaccgagggttgaacttgaagagcacctgaaggacgaaaaggaagggaactttgatattgtgatgaaggttgagattatccacccacccgccgggcaaagcacgtcttcagcagcaacgaatagcaatgagggtgctggtaacaacactgaagacaaatccgtctctcatatcgccaccagcgc

SEQ ID NO: 21436 - DNA, 850 bp, Emericella nidulans
caccctgcgcagatcctatatctggccaaggttacgggctattttacggctcacccagaatatgcgtctcccgtcagttggcattaatcgcctattctcccagttactcgctcgcatgtctgttgataatacaatgcatggtactttggagctgccggactatgtaatggatagcgcgtccatgtccgttgaggaactctgcgagcgggtctttccggcagcagatatgacccattgtcacactgccgactttcaggcgtctgacccggacttttttgcgggccgtgcaatactctcaatgcgaaactctgccttggttgagttcaatgaccgtattacggactccatgcgcagtcaggagtctatgcggtattccgctgacgaggccttaacggacaacgttgctgaaggggtggaggaaatcacccatgagttcctgcaatctgtggatctgccaggtcttcccccagcaagattacgattgaaggttggtatgccaatcatgttgctgcggaatttacgggctacagagggtctttgcaatggtacgcggatgcagattgtggagttatgccgctatacaatccgcgcgcgcatcttgacgggtgacttcagaggctcagtgcatctcatcccccggattaccctgtattcaaagcctggcgatctgcattatgtgctgtcacgaacacagtttccggtccgtccatgctttgcaatcaccacaaataagtctcagggtcagtctttgcagcaggtaggtgtggatttgcgggtccctgctttctcccatggtcagttatatgtggcaatgtcgcgggttacagatgtgcggcgacttagcgtcttg

SEQ ID NO: 21437 - DNA, 850 bp, Emericella nidulans
cacgttcaagaccgccgccggtatatttggatgtgaagcgcttatacgctagcctacgcagccattactcctggggctcagtctccaatatctggggccggaaacccattatgctcattgcagccgctgtatttcttgtcgggagtttagtctgtgcacttgtgccgcatatggatgttctgatagtgggccgtgcgatccagggattgggcggctccagaatggggataatggtcaacattgttgtcagttttcgatatgttctcgttgtgagatcaggtgttgtatctgcaataacttcacttgtttgggcggttgggagtgccataggactggttttgggtggtgtttttatgacgaggctgaggtaggtgccgccctgtttgaagtgacgacaaggctgacaatgaggtagctggagatggtgtttttggattaagtgtgaggcactttattcaacgcggcggcccgaagctgacaattcgaacgcacagtaccggttggagctgtcttctttcttgtccgactcttcatggaaagtcccgagtcctcgaccacccatcgccgccggtcttagggtcatcgactggacaggcagccttttgattgtagggggctttctgatggtcctacttgcccttgactttggtgatgacgtctactcctggtcctccgccacagtcatttgtctgttagtttttggaacggcagtgatggcgctgttcgtggtgaacgaatggaaaatagccaagaaccctattatcccagtttggctgttcactcgccaacaaagatagcgccttatgttgtcttcgcgtgcaaatcatatgtgtttatttgacaggcatat

SEQ ID NO: 21438 - DNA, 850 bp, Emericella nidulans
gcagatctggaatggaaactcacctacgtcggctctgcaacttcgtaagaacgagatgacccccgaacttcgcgaccactaacatgtctagttctgagtacgaccaagaacttgactcccttcttgtcggacctattcctgttggcgtgaataaattcatcttcgaagccgacccaccagacctccgacggatccctacatcagaaatccttggcgtgaccgtgatcctcctcacctgcagctacgatggcagggagtttgtgcgtgttggatactatgtgaacaatgaatacgactcagaggagcttactgccgaccctcctgccaaacccatcattgaacggatccgccgcaacatcctcgcagaaaagcccagagtgaccagatttgccatcaaatggtattttctttacgtgcgctgtaatgagttgtggatgctaattcttgtttcctagggatacggaggaatctgctccagctgaatacccgccagaccagcccgaagcggatggccttgacgacgatggtgctgcttacggtcaagaggaggcggaacttgaggctgcacttctgaaggagctgcaagaggctgaaaagaacgagtcaaccaagggcgaggaccacgacatggagggcgcagacatggggaagaagacatctccgacgcagaaagtgaggatatcgaagacgagagggatgacgatgaggacgaggtcgacgaagaagaaggtatcgatgccgacgaggacgtcgaaatgggcgatgactcggaaccgaaagacgacaacgcaaacccggccgcgcaccattcgcagcaggaagttatggtccattaactcagggcctgagc

SEQ ID NO: 21439 - DNA, 850 bp, Emericella nidulans
aggagactggtgccaaaattgtcctctgcacgccaaaatactgctctcggtacacgggtaaagtgcccacagtactcggcgttgacgaaccgacagtgtgccattaccgagcaaaacgtgtttcccttcaaggatcagcgacgagtacaaacgttgcgtattcgattttcacttctggaagcactggacgaccgaagggcatcatcatcgagcaccgcgcatttgccagtagcactatggcttacggtcccattatccacctaaagccaggtattcgagttttccagtttgcctcgctcacttttgatgctgcagttatggaaatacttgggacactgatatatggtggctgtgtctgtattcccagcgacgaggagcgtcttaatgatattgccggagctataaggcgactggacgcctcctggctcttctgcactccgtccctcgccagcattatggagccggcttctgtaccttccctcaaggtcatcgtctgcggtggtgagatgatgtcccatgaagccatgaccaaatggtctgacaaggtccatttcatcaatgcttatggcccaaccgagacttctgtatatgctaccttcaaccctgaaattggcagaaatcggaacccggcaaacatcggtagaactataccttccactctagcttggattgtggaccccagtaaccatgaccgtctttaccctgtgggtgtggtgggcgagcttgcgctggaaggaccggtcctcgacgggagtacttgaagaatcccgataagacagccaaagctttcattaccaacccaaagtgggcgcagaagacttatcctggtgcgcctgatcgaagatctact

SEQ ID NO: 21440 - DNA, 715 bp, Emericella nidulans
gatactgactccgtaatagcttctgtgatgaaggatgagcagggccgaccatttattatcgttcgagagtacgccgccgacatcaaacccttttactttccgaacaattcaactgatatacacctccgaatagccagggaaagaagaagagacagcatggcacggatgccgtcaaatcacacattgtcgcagcgaagactgttgctagcatcgtgaaaacgtctctggtaaggaccgtcaccgctggtcaacggcaatttctaagtggccatctagggtccccgcggtcttgataaaatcttgatttcccctgacggcgatattactgttacgaacgatggtgctactatcctgtcccaggttcgttcagcacatatccattccgcttacgagttctaatcggcgtgctatagatggaaatcacgaacaacgtcgccaaactcctcgtcgaactctccaagtcccaggatgaagaaattggtgatggaacaaccggtgttgtcgtcctggccgcggcaatgttggaacaggcttccgacctcattgacaagggcatccaccctatccgaattgcggacggttacgatgcagcctgcgaaatcgccgtggcgcaacttgacaaaatcagcgacgaaatcaaattcacaaaaaaagacactgcgaacctgctcaaggtcgcaaagacgagcttaggtagcaagatgtaaggcgctcc

SEQ ID NO: 21441 - DNA, 533 bp, Emericella nidulans
attcgcgccacacaggcaatatgtctagcttggagtcagcactgccggttcccacggggcaggcacttctcatgggttatgcgcaaataagcgcgtcgttcacagtagacggctcgctcatcaatcaatctgctttcgacgaggttaagcggcaaggtatggttggcggtgcaaggaatggcggcgcagcgaattcgaggcctgcttcgtccagcggtaaaaatcgaaaaggcgggggtttctggggcgctttgaattggaattcgatagaagaatcaatcagtggcttgctttccaacaatgacctcgacggccttcgagatatgcgaggtgtgtcctcatcaagatctattcctttgttgtcgacccctcaatcacttctctttgtggaccttcgactggccccaggcgaggagcagtctttctccttcgcgtttactttacctagcggtcttccggcaagccacaaggggaaggccatcaagatatcctacaatctggttattggaacacagcgacctagtgggagtcac

SEQ ID NO: 21442 - DNA, 850 bp, Emericella nidulans
ggtggtgaatgtagacgtcgcaaatgcggatgcattcctgtccgctctagccctcaactgtcggccggctctgagaggaattatctacgttgaatggagtcccggggcaagcactctggtccagataacgggcgaagatatccactgcagcctcaatcggatgcacagcagcagattgtcgatctcaaaggcagcatgtaatgagtcagtggagttctgtatcactgttgcgtcgcccgcgggcctgttaggtcttgaaggacaaggactatacgccatggggagccctctgggcgtcccatccatgcccaagtccattacattacgcctcgacgctttgggggaggatgaaagcaaactctctgtcgaggctgcagacttagatagtatcctcaattatgctatcagcagcattgcacgtcaagatcgcgaggcggagttgtttggcggtcttgacagggataattgtcgacgagaggatccaattttcagtactgtattcagcactactgacgagatgggcgagaccgaaaaggaaatatcgtcaaacaggatcgatcagcagattacatctgcgggcagcatagagaaagtccacagaattgtgatggaagccgcagtgcagcagctaacctcgttcctcgctatggaccctgatgatatccaggagcagatggccgtcacagatctgggactggattccctcctagctatcgaattcaagaactgggtagtgaggaccatgcaggctcctatgcagacgtctgaggttctggacgcgccgagtctttctcacctggtgaaattgattgtacagaggtccaggcttgtgcaaaaggaatcatcatca

SEQ ID NO: 21443 - DNA, 650 bp, Emericella nidulans
ggaactcctccggcgcgtttgccggactgcacaggggggtcatggaccgaatatcgcgtggctcaatggggttcgttctttcggttcgaaaccctccacagacctccagggggaggccacattcctacgaggctacagctaaccagcccgttcctatcctcccgggctctgaagaagaagccctatacaaaaaacacctcccttttttcacacccccatcactatcatctcctgaagccgaaccaacctactttaacgcgctggacctcatcaaccaaaccgacctccaaaattacggctttatccccgagctcgtaggccgtattccggtcaatgccgctctatcagctctaagccagcccttactcgtccgcattctcaccgaacctcgcaactccctagttgcccaatacaccacactcttctcattgtccgggatcgagctccgctttacaacacctgctctgcacaaaatcgccgccaacgcattcacaatgggcacaggggcgcgtgcgcttcgcacagaaatggaaacaatcctcagcgatgcaatgttcgaaacaccgggatcaagcgtcaaattcgtccttgtcacggaaaacgtggcagagcgcaaggaaaagcccgtgtatcttggccgtggacaggga

SEQ ID NO: 21444 - DNA, 705 bp, Emericella nidulans
atggctaactacctcgcctccattttcggaaccgaacaagacaaagtcaactgctctttctactacaagatcggcgcctgcagacatggcgaccggtgctcacgcaaacatgtcaagccatcatactctcagacgatcctcatgccaaacatgtaccaaaaccccgcctacgatcccaagagcaaaatgaacccaagccaactgcaaaaccacttcgatgcgttctacgaagacgtctggtgtgagatgtgcaaatacggcgagctggaggagctggtagtctgcgataataacaatgaccgtgagttcttttgcctcattgctaatattgtgcaaaactaaccttgcttctcagatctgatcggaaatgtctacgcccgattcaaatacgaagaagatgctcaggctgcctgcgatgcgctgaactcccgatggtatgccgcgcgaccgatatactgcgaattatcgccagttaccgattttcgagaagcttgctgcaggctgaatagtggcgagggctgtgtacgcggcgggttctgcaacttcatccaccgaaaagaccctagtagcgagcttgaccgggagcttcgcctcagcacgaagaagtggttgaaggagcgtggccgggatgctcggagcgtcagccgcagtcctagcccggagcctacacggcgaagatactgaatgatggatttgtttcatagt

SEQ ID NO: 21445 - DNA, 850 bp, Emericella nidulans
tatatcgtccaacaaccggagggcgcctcgttttcggtgacgggaaacaaggtctactggcagaagtggcgtttccgagtgggattcaacaaccgtgatggcttggtcctctacaatcttacctacgacaaccgcaacgttttgtatcggctttccatctctgaaatgaccgtgccctatggaggtgagttcgaactgttccagctggccacattgcatccgggctataagataactccggggggtaatacatgcccgaggctttgtgtctaccaggttactctattgactatctgctgattaagctctacagaccctcgagcaccgtatcataggaagcaagctttcgacgttggtgatgtgggatttggtctgaatgccaatcagctctcgcttggctgtgactgcttaggacacatcaaatacttcgacggttaccgatccgattctaaaggccaacctgttcgtctgaagaatataatctgcatgcatgaacaggataacgggcttcagcacaaacacaccaattacagatcgggagcagccaccgttgtccgcaaccgccagcttgttctccaaatgatctgtacggtggccaactacgagtacatcttcgcctacatccttgatcaagtagcgaatatcgaacttgaagtccgcgccaccggtattctctccacggtgccctttgacaatacaaatggggaaactgtcaagtggggcaccaatgtcggcccaggcgtcatggctcctttccaccaacacatgttctccttgcgcatcgaccctgctattgatggcttcaaaaacactgtctattaccaagacagcgtccctcttccagaagacg

SEQ ID NO: 21446 - DNA, 478 bp, Emericella nidulans
aagcgtaaacgggatgccgatgatggattacaggcgttgaaagcgttcgcaggcgcttcgagcggtgcgcgctctatacccggtgtgccgatcgtgtatgttaagcggtctgtgatgatattagagccgatgagtgcaccttctgagggtattagggagggggttgaggaggataaactccggacggggttgactgatcagagtgtgcagaagagtggtggcccagatggtggggagaagaagaagaagagggaaccgaagaaagcgaaggggccgaatccgttgagcgtgaagaagccgaagaagagggttgaacagaaagctacggcagagagggaacggccacgtgatgaggctgagaaacgggactctgagaaagcagcagaggacggagagtgcgccaaagccaaagaggagacggcgacaccataaaggcgcgaagcagggcgactccggtggagatgagactgaggcgact

SEQ ID NO: 21447 - DNA, 850 bp, Emericella nidulans
ttaagcatcaagggaagcgctacgatgtcgagctcgacccgaattccactggcgaaacattcaaatatcagctatactctcttacaggagtggagccagagcgacagaagattcttgtgaagggaggccagctcaaaaacgatactctactatctactatcaatgcgaagccgaaccagacattcatgatgatgggtaccccttccggggaccaaggcgccggagcattgacacgtcctaaggaagttgtgaaattcttagaggatatgacggaagcagaggctgccaaggcagcaggggccatcccggccgggctgcaaaatttgggaaatacgtgctacctaaactcgacattgcagacgctgaggagtgtcccggagctacacgaagagcttcagagataccgcccatctagaaacatcagcggcgcatcgaacctctcgaacctttctgatttcgggcttggtggcctgggcgcctctatggacctcacttccgcgttgagagatttgttcaaacagatgtccgagactcaggaaggatttcctccaattctatttctcaatgctctgagaaacgtatttcctcagattgctcaacaggaccggaacgggcatggctacgtcaacatggatgcggtagaagcttggtcacagattgtgtcgcagctgcggcaaaaattggtgatcaaagatggcgagggggagtctgcgactggagtatcatttgtggaagcgtatatgggcggaagatttgaatctgtcactgagtgtgatgcaccggctgcacaggaggctggtgaacaacctaacaagacttctgacgttatcttcaagcttgactgccagat

SEQ ID NO: 21448 - DNA, 850 bp, Emericella nidulans
tccggagtagcgttggtggattcggcgggagcaatctctgcaggagtggtctctggtgccttgctctcctcggcaacctcaacctcagatacctcaggtgcagcggcttcatcgggtttctcggtgccaggctcgcccacggtagtctcttccttagaaaccccttctacgggaattttggatacagtttcctcagtggcaaacttttcaatgggcgctgcggcgattgcctccgctgttgtggtggactgagtctcgcctggaacctctgcgtcaactgtttttccagaggcgccatctactgtttccggctgctcttccgcaggtttatcgtgggcagcctcggtaacttcttccgtcgccacggtctccacggtaggcacttcagtgggagcctcacttgctggttctctaggtgattcggtagtagcaggctcagtcgccgatggagcatcagcggtctcggttgcggattcctgagttgccgattccacagcgtacgctgttggcatggtgtccgcttggagcttcagcgacatccttgtcggcttgctcctctgaggattttagcaccgcggggacctcagttatggaagcatctgcggctacctcggcaggtgcgtctttcgactctgttaccgaatctggggctgactcttcgaccacggtctccttacccggcacttccggagattccgccgtagcaatgggctcctcggctttaggctcctcactcacagcttccttctctgcagccggtgcttctgaaacattctcgacggcggtctctgccacagcaggttcggcagcagattcggcggcggcttctgtggcttccttagactcctcg

SEQ ID NO: 21449 - DNA, 618 bp, Emericella nidulans
ctggaggctgaggtcaaggagttcaagcttcaggtaggtcaggccgatcgctatcgcgagcgcaactaaccggcgcagcttgaaaccgttcaatcaagtttgcaggtagacccagataacacggaattacaaagtctcaaagctgagctggaagaacttataaacctcactgaaacatcaatcgccgaactcagacctgcaactccccaaccaaccaccgctccagcaaaattaaagggctcgagagatgacaacgcttcgaaacccggctatcgcaattcgacggccgagcagacagatgacaacacaaactccggcccggcttcgttctccgtgaatgagcatgtacttgcccgctgggtatcgggcgataattctttctacccggcccgcataacatccatcaccggctcgtccagcaacccagtctacatcgtctctttcaagtcatatgggacggtggaatcgctaaccgcaaaagacctcaaacccatttccaacagtgactcgcgaaaacgcaaggctgatggaagcccaggcagttcaaaccactccccagttcctcaacctccccacgcgagcgtcatctcggcggcagcagatatcaacccggcatta

SEQ ID NO: 21450 - DNA, 500 bp, Emericella nidulans
ccccattctcccttggaactttgaatgaataggatatagtggctgaacgccggcactgatgtatgcagacggcggtctaatgtccagcgatgatcattccaccgttagagttggcgagacaataacaatcatcggtctggcggtgcaagttgtctttttcgggttcttcatcatcacagcgatcgtctttcacatccgtataaataaatctccaaccgtcatgtctaccgagacgaaaggccactggtgcgggaacataacagcgcgcaattgggtcacattgcttttggccatgtacgtggtgtctatactaatcctggtgcggtccgtttttcgaatggtcgagttcatcgatggctatggcgggtatatcatgagccacgaggtgtttatctatatctttgatgcggttctcatggttctggtgatggcgattctgaatttctggcatccttcgttcgttattcgagacggaaaaaggtcgacagtaaggggagatt

SEQ ID NO: 21451 - DNA, 760 bp, Emericella nidulans
aacaacgacttctgtcgacaatgcgagaagagcggacggcttctatgctgtgatggttgcgtgtattcgtaccacttctcctgcctgaatccgcctttggaccctgcaaaccctccagaaggagactggttctgcccaaaatgctcggtctcgaaatctctaaacacgctgcttggtggcatggagaagacccccgggcgagacttcgcattgcctaataaaattcgagacttcttcgccggcgtccgcactggtgacgacggaaaatatgaggaagttgcttcgttaccgcgtatcaaccctcgagcagctcgtgggagtcgtactggccgctacgacgaccccttcctgttgcgaatcactgacgcaaagggtaaactaattgtctgcgtaaagtgcggacaaaccaccaacggccgaaggcccatcattcaatgcgacttttgtccttgtgctttccatatggactgccttgacccgccgctagctgtcccaccgacccagcgagttggaagtgatcgtctctatcacacctggatgtgcccgaaccatgccttgcatgacatgtgttaccctgtcagggatgaagaagggtatgaaacaatgaagcgtattcgtcgtccaaagaacccgcgttttatcgacgtcgaggttctcccggagaacgaggaagaggagaaccttgaggacgaagaaaaggagggcattacgtatcgtgtctcagaaaagggaatcaaactcgacttcattgaaagagtca

SEQ ID NO: 21452 - DNA, 500 bp, Emericella nidulans
tcgacgcgattacctcgcgattcggagatcggttcaacagtcttcgctcccaatcactgggatcacggtttgccaatcttcgtccaatttctgagtttctagacttcaagcgactttcaaagcctgccaattttggcgaagcccaaagccgggtcaactacaatctgtcctacttctcgagcaactatgccgccatctttgtgttgctcagtatctacagcctcttgaccaacccgctgctactttttgtcatcttcctggtcagtggtggcctttggggcattggaaaacttggcggccgtgatctcgacctaggatttgcccgatttaatacctctcaactctacactggactgctaattgtcgcggtgcccctgggtttctgggcttctcccattgccacgtttctctggctcattggagctactggtgtgactgtattcggtcatgccgcgtttatggataagcctattgagaatgctttttccgaggaggcggtc

SEQ ID NO: 21453 - DNA, 734 bp, Emericella nidulans
tccacgcaaattctgtcgctgctggccaagtccacgtaccaagatattacctccttcgtatctgagccggagtcggagaatggtcaggcgtacgctacgatgcggtcactgtttgaccacacaaaaaaggtctattcaaccaagaaatcgttcctctcgcccacggagctcgagctcactgaaccttcgcaagtcgacatcatccgcaaagcaaacctggcatcgtttgtctccagcatctttggtactcaggagatcagcttctctgagctcaatgataactttctcgacgtatttgtccccgaaggtggacggcttctcaaacagcaaggtgccctttttcttgagatgaagactcaagcgttcatcgcgtcgatgaacaacaccgaacgtacccgcaccgaattgctttatactttgttcccagataatcttgagcagcaactccttgacagacgacccgggacgcgtcagctggctccgagcgaaaccgactttgtcaaccgtgcacattcgcgccgtgagatattgcttaatgatagcaacaatgaggaggccacgaaagctataccagacaaataccactgggaggactccgtccaggacctcagctcgcatattacagagaactttgataccagcaacaccaacaggttagactctacatatggttttaaacaaatagatcgctaatgcggcttatgcaaagaagatcacagaggacggccaccatc

SEQ ID NO: 21454 - DNA, 850 bp, Emericella nidulans
agagttcttgtcttcgtgccttaaactcggcgccattatcgtcttcatgatcatcgctttggtcctggtttgcggtggtggcccgtcggatggtatgtacaatgaatactggggtgcacgactctggtacgatcccggcgccttccgcaacggcttcaagggcttctgctctgtcttcgtcactgcggccttctctttcagcggaacggaactggtcggtctggccgccgccgagtcgaagatcccaccaaatcctgccgggcgccatcaagcaagtcttctggcgatcaccctgtatgtccccccttgctgcaagcgcccgccatgacgcgccatatctgacagtattcttctagcttctacattgttggtctcttctttgtcggcctcctggtgcgctctgataacgaacgcctcctcggcagcggtcttatcgacaccagacgtcgccctttgtcattctggcttacgatgcaggcttgaagggatacgatcacttcatgaacgtcattattttaatatccgtcctatccatcggtgtctccggtgtttacggctcttcccgtacccttaccgcgctcgccgagcagggtacgctcccaagtttttcgcctatgttgatcgctccggccgccctctctggtccgtgctgattaccatcctgttcggtgttcttggatacgtcaacgtcagctcgtctggtgaggaagtttttgcctggcttcaggctttgtccggtctagccgctctcttcacctggggttccatctgcttggcacacatccgtttccgcagagcgtgggcttacaatggccgctctctcgacgagatcctttagcactggctgccg

SEQ ID NO: 21455 - DNA, 420 bp, Emericella nidulans
agctcaattgtactcgactaaagtctcaaccaaacagctaaagtcaagcatgaggcatcaaatgattggttagaattcaaggagaggtctaaatggcatgacagagctataagagagctaacacacactgtgaaagagctgaaggatcaagtcaaagagctccatgggaaagccaaccaagcaccactcgacatcaaggacgtcccaaatgatgaagttattcctatggttagaaaagaaggatgtgaattcacattagaatagtatagaaaagatgattatccagatgatgaaaaatgagcttaccaagaaagggccattgagtactcaattacatacttgtcacgagagcatgctgaatttgatgttgtatctactaaggaaggagaggagacgtcaattctactctatcaccctcct

SEQ ID NO: 21456 - DNA, 386 bp, Emericella nidulans
caacaacaaagttcctggtcttggaatgagactagatcgcagcgaccttaaccttctatatcgatccaggtacaacaatgcatactactgattctagttttcctatagagattatttatttatattcttttggggttgatagctatccaagagagataccagatgcatatgaaagactgcttctcgatgcaatcgaaggagagaggaggttgtttatcagaagtgatgagctagatgcagcatgggatctattcacaccggctttgaaggaactagaggagaagaaaatcattcctgagctctatccatatggaagcagaggtcctgttggtgcacattaccttgcatctaagtacaatgtgagatggggagatcttggagaagct

SEQ ID NO: 21457 - DNA, 850 bp, Emericella nidulans
  unsure (1)..(850): unsure at all n locations
aggcaggatgaagatagatttcttggacgccaagggacaggaggttatacggaaggtcgctgactagcttgagaagtactggataacacggccgcgggatcgagccgggcgtcgccacagattacctggacgatatcatttatcaagcttgtgtagagtgtgttgagagagcaactctgttcaagatgttttcctttctgacctcggcagtcatattcttcgcccttagaccgacacgtttcccaaatcgctgtgcacttctgcaaataaagtggcttgccacgggaaacccgaccggcggagccttctcgatggcgatatcatcaatctcgaaatttcgctctaccaaggcggctaccatgtcaatatcagggtgatcgagctaaggtagaccccgattcggtcatggtagccgggtaacacgcgaatgcttggatttggcagtcgaaacgtcaagattggcacgcctatacgggcgttctgtcacattaatatgaaactgtaagtagtcacagcttgagtgtccatggctttcattcagaatcccaatccnccccattcataccccattatggcaagatcaagcaagtggcagtgtgtatggccggaatgacttttactattgagcctatacttgctccgggaagtccttgggtaactgttgaccgggtgactggacgaatcactgccgatggcatgcgcacggctcagtttggtgcgtaaggctgcatattagcagtcatcacctgacatacgtttagaacaccccttgcttgtcacgcagacaggtgtcgaagtcctgtctgcgcgaaacgcagattcacctggatgccctgccttgttgccgact

SEQ ID NO: 21458 - DNA, 850 bp, Emericella nidulans
cagtactaattaaaggcagactcccccagggatcccccctatccctaatactcttcctgctatatacagcaagaatagtctctaccttagaaggctctttctactatgcagataatataggcatattattaactaggaataccctggaagagagctcacaacaactggtagaggtctacaagcaaattactgctctagggacagagacaggcctccctttcttaatagagaaaacagagatataatacttctctagaaagcagcagcagcatctccctatagttactctacctggtataggggagattacaccatctttatatatacagtagttaggagttcttctggatacaaagcttacttttaaagcccacattaatttggctttagccgcggaaacaacttgcctagcacctaaagagacttagcaatacccagtatagctgcccagtagcctccatgcaggcagcagttatatagtatattcttctaacagctctgtacagggcagaagtcttctatacaggcaaacaataaaaagggatagttaactccctgctttctctcttctgcacagcagccctagctattatcccagcctacaagactacccctactgcagcactcctctgcaaagcagacctactagacccagaagctctactcaacagcatcctccagagggcagcagtgagatacataagccttgatactaaatacctaattgcctaaatagccgcagagactaccgcgggcaggcccaaaaccaggcttaaaaggatcctacagctcctcctcagccccctgccagagcatactataatagagctgcctctccctctattataca

SEQ ID NO: 21459 - DNA, 420 bp, Emericella nidulans
accttctgagttcctggtatccgcgttacgaactacaaaaacggaatgctgctttctacctcattggtagcacagtatctggatttggaggcattctggcgtacgggctgatgcaaatgagcggcattggagggcttgagggttggcggtggatcttcatcgtacgccactgaacaatggtccggaacgaatatttatctctaaccaaagcagatcgaaggtatcctcacctgcgttctcggcttggggtcatacttaatcttagttgatttccccgagcaatcacccaattcatggcacttcctcaacgagtccgaagccacgtatattattgccagtatcgaaaacgaccgatcagatgtctatgcggaaccgttcacattgaagggttacctccgtaacaccaaggatagcaaggtc

SEQ ID NO: 21460 - DNA, 827 bp, Emericella nidulans
agcacgcttagccctctggagacgcttgctgagactatcagtgcaactgcgaaaatcgttagcgggtactgcaccctggatagaatcccacacccgtcatcgggcccggacagcccctcagtggcgctgcctcaaacggcgcccgcatatgtacgagaggcgcgccagcagcttctctccgcggccaaagaggttctgcagattgccgcagagcccagcgagtatctcccaatgttggcattcaagtaggttccagcacagctttctcccctgtcattctccggaacagaccagaggagctcattaaacccttattaaccctagaccaaatgctgatatcaagagggtgacagtatcaatatattgcgtgcatcaaatggctcgcgcactcccaagtctttgccgcagtgcccttgaccggcgctgttccctactcccagctagccagcatctgcgcggtgccggagcgtcaactgcagagcgtgacccgcatggccatcaccagcagctgtctatgcaagccagagctgggaaaagtcgcccacaacagagcctcccggcagtttgttactacgctcgcctaccttggttgggtccgctttataaccgatttctatatgccggtgtcctcggagagggccgaagcaacggaaaaatggggggagtcagagcagcctaccgagacagtggtcaacctggccatgaagacgtccatatctgcctttgcgtttatcacgcggtctagagagtttaacaggctcttcgctgcctatataaaaggggtaacaactagcgagggcacggcggtacggcatctgcaaaccgcc

SEQ ID NO: 21461 - DNA, 850 bp, Emericella nidulans
cagcctttttttcagccgatcaagaaagtgtaagtgacccgatcaacaatgtggcactcttgttctaatacaacctagatttacacagtcagccgagactgcgccctcttccgatgggagtatgtctccaaaaaagaccctgacacgatggaggatgtggcggaaccgcgctggaggattgttaagaaggatttcttccaacagcctcatgcaacagttaaatgcgcggcattccatgcggcttccaacctgctcgtcgttggtttctccaacggactatttggtctttacgagctcccagagttcaatacaattcacctcttaaggtaagtggcatatgcattgcgtactggcattgacgctaaacgaatttccagtatctcacaaagtaatattgatgttgtatccatcaacaaaaccggcgagtggttggcgtttggttcctcgaaattcgggcaattattggtctgggaatggcagtcggagtcatacatcctgaaacaacaaggccatctagattcgatgaatgcccttgcctactcccctgatggccagagaatagtcaccgctgccgacgacggcaagatcaaagtttgggatgtcaagtcagggttctgtcttgtgacattcacagaacacaccagtggagtaacggcctgtcaattttcgaagaaaggaaatgttctgtttacctcatcgctggatgggtctgtgagggcatgggatcttattcggtaccggaatttccgacgtttacggcgccgtctcgcctttcattctcctctcttgcagttgatccagcggagaagtgatttgcgcggggtcccagattcgttcgataccacgtatg

SEQ ID NO: 21462 - DNA, 850 bp, Emericella nidulans
catgggtatacgccctaaggtttctgccagagctgctggaagaatgggactttacagagcgctatcccagccaggaggaaatccagtggtacctgagacttgtcgttgaccgatacgacctacgcaggaacattaaatttagggccatcgtcgtatcagcgcattacggcgattgtgacaatctctggtcaatcaggacgaaggatgggagtatggccacctcgcgatacttcctccctgctacgggcattacgtctactcccaaggagccatcgttccctgggctgcggcgttcaaaggggagatgcactcaacgtcgacctggccagagcatgaggtcaactctgaaaacaaacgaatcggcgtggtcggcacaggttcgtcaggaatccatgtcatcacgaagcttggccccgatgctgggcagctgacaattttccaacgaacgctaaattatgatattccagcacaaaattatcctcttgacgagcaaaaacagaggaagtcaagaagaattttggcgtgacatcggatattgccaaggtaaatttggcgggccacgccgataagcattcgggaagaactgtctccagtgttcgcgattcagaagagatccgacatgtcttcgaagatggttgggcgcggttgttacaatttccaactcggcacatttgatgattcgttcatggatccagacgccaatgctgccactgcgaacttcattcgtcacaaaatccgttccatcgtgcgcgagcccgaaaccgccgaagctctctgccaggcctatctctttggggcgagacgtcctccctgtgcagatagatactacgagacgtttaatcgttgtcac

SEQ ID NO: 21463 - DNA, 505 bp, Emericella nidulans
gcagtacttcctctttcccaattccagtccgtaccccgcacgcagaaagcaacaaccacgcgcataaacgcaactgccatagctaccccgtgcaacaaacactaaacaataaacagtcccaagccgttaagccaacggccagatctttctctcaggccagattcccgcagacaagaacggcaaccttgtcgaaggtgacatcaggactaagactcaggcttgctgtgacaacatcaaggctatcctggatgctgctggctcatctgttgacaagatcatccgtgtcaatgtaagtcgtgtcgtatgaactgtcatgtagtgtgattgggttggctgatggtagtaatggctttaggtcttcctcgatgacatgtccaactttgcggagatgaacgctcagtatgagaagttcttcactcacaaacccgcccgatcttgcattgctgccaagcagctgcccaagggcgtcccagttgagattgagtgcatcgctcttgcgtaaagc

SEQ ID NO: 21464 - DNA, 437 bp, Emericella nidulans
tcctccctgtgcctgaagtggtccctttcggcttcacgcgcgatttggtagacggaatgggcatcaccaaaccgaagggcgtcttccgacgctgctgcgagttcaccctcgaagcactgcgccaggaatcatacagcatcatgaccatcctagacgtgctgaggtacgatccgctctacagctggacggtgtcgccactgcgaatgaaaaagatgcaagaacaggacaccagtgatgggccgccagttctaccggggtctacgactgatcaacagcggccaaccaatgaaccgagcgaggctgacagagcgctgacggttgttgcaaagaaactgagcaagacattgagtgttacggcgacggtgaatgaactgattcaacaggcgactgatgagaagaaccttgctgttctttactgcggtatgtttactcctcca

SEQ ID NO: 21465 - DNA, 850 bp, Emericella nidulans
accctgaagcagcttgtccgtaaggaaatggctgagatgaagcctttgcccagcgtttactaccctgacttcatcgctgccaaccaggaggatcgtgccgacaacgtcctcgagggcagcaaggcctcgtgggctcatgttgagaagattcaggcggatatccggtaagttacttacactgcaatttgagaaacctcactaactgtagcagcaatttcaaggccgaaaatggtcttgacaaggtgattgtcatgtggacggccaacactgaacgctacgccgacattctccctggcgtcaacgacactgctgagaacctggtcaactccattaagtccggtcacaccgaggtttctccctctaccgtcttcgctgttgcttgtatcctcgacaacactcctttcatcaacgggtctccccagaatacctttgttcctggtgcgaatgagcttgccgagaagcacaacggcttcatcgtgggcgatgactttaagtcttgccagaccaaaatgaaggctgccctggttgacttcttgatcaccgctgggataaagcttacctcgatcgcaggtccaacaccttggtacaatgaccggaggaccttgagtcccaaaagcggttccgttcaaggagatcccagttaacggggcgaagcacgggtgtgcaacctattgtgccgaggatgacccttgacactggtggaaaaacagcctggtgggaacaaagggcttggccacctaccggttttagggggcccaactacttgtaaactcgaggatctttcccctttcttaaacttggggtgtcgaagacccccaacgagagggggcccaagatctacttttattat

SEQ ID NO: 21466 - DNA, 850 bp, Emericella nidulans
aaacgcatctgtgccagactgtatcctggcagtcctattacgcagaccgagcggctagttgactttgtctccatcttgaacgttgctatagtccaagaaaggagactgggagttctgggaggtccctgggaggtcaatctacgtgacattcagagatggcttcaattggctgatcgcgggactttgcaaatacacacgaagaacttcctcgatataatcatctcccagcgatttagatgtcaggaagatcgagagcgggtccgccacctatacgaacgtgtctttgatggtgtctccacggcagccaaaagttattatcataacatgacaacagaatgcatgcaggttggccttggagtgatgcgaagggatatgttgctgcaagaaactcccaatccgcatctcaaggtactgccgagggatctgtctatcctcgaatctctcatgctttgcattgaacagtcatggcctagcattctggtgggagcttcaggatgcggtaaaacaacattgataagaaagcttgctgccattaacggagccaacttggttgaactagctttgagcgcggataccgatacaatggacctcgttggaggcttcgaacagatcgaccacaacagagagacgtcggctcttttagaggatattttgctgttcgtgagacgacatatactctccagctgcccgtccgaaacctctcaagaagagacgtatactttgattgaactgtatgaacggctacagagccctgacttgtcgctggagctagtgtgcacgttattagaaactgctcgccagcgttacgaggaccaagcattagagcgactactcgatcgatcgccaaccc

SEQ ID NO: 21467 - DNA, 850 bp, Emericella nidulans
agccgagagatgcaaaggaatattccgatatctgcgttggatacggggtgagatagcttcctctactataatgggccaggaccacatcggtaaatatactgacagtattagaccgactcaatctggtacccgcaatcggaagcatgtctgaccttgaatgtcattcgcgactcatcagtcgacgaaacctcctctctcccagtaggcgtctggatccatggcggtggcttctatcagggctccggagcagaccagcggtataacacgtctgctatcgttgcgaatgcgcagagaatcggtgcgactcagcccgaacataaacctattatggctagagcaggctgacaagatcaattaggcaaaccctttatcgcagtgacaattaactaccgcctctcaacctggggattcctcaactcagccgagatcagggaagccggcgccacgaatctgggtctgcgcgaccaacgtctcgccctgcactggatccaagagaacatagcctccttcggcggtgacccgaagaaggtcacaatctggggtgagtccgctggaggaatgtcagtgggcaaccagctcatcgcctacggcggccgagacgacggcctcttccgagctggaattatggagtccggcggctcgatcgccgctagccccgggaatacaacggcctaccagtcacagtatgatgacattgttgccaaggctggatgtgctactgccagtgatacgctgcagtgtctccgcgaagtcccctttgagtccttgaacgctatcttcaacaccacgacgggagatccagcgtattccttcgggcctacagttgatggagactttctacgcgagtggg

SEQ ID NO: 21468 - DNA, 301 bp, Emericella nidulans
ttacgtcgacccaactggcgcgcttagatttacgcaagcccactcggcctacatcccgccgggctcctccttagggcccttcgagtacatcctctgccctgagggctcagtattcggacattacatgtacagcggatggggcgcgagcggttttatggcctgcccaacggaggataaccgctggaaggtgtttggggcgctggggaatgcgactgttcccagtggtgatgtggaagactgtcttgggttctcggcaattgcggtgcccagtgagcttgtcgggcagacttggcagtatgtc

SEQ ID NO: 21469 - DNA, 712 bp, Emericella nidulans; identical to SEQ ID NO: 177
  unsure (1)..(712): unsure at all n locations

SEQ ID NO: 21470 - DNA, 850 bp, Emericella nidulans
attgcgtttgctaacgctgcgctagttgccaaacggaagaccctctttgacgacaggccggtcgagatttccgagttgacctatgtcatcaagcaggaccttgcgtcgctaaatcaacagattgcctcattgcaagcactcacactttcacaacatccgaaatccaaccggtcaaaaacggatcaggagggggagcacaatgataatgtacgttgaagtgaggatacaatgatgagttgctaacgtaggtcaggttgtcgtcatgttacaagggaaactggcagacgtgggtgcaaattcaaggatgtcctcgaggtcccgaccatgaacatccaagcattgcgatcacggacagaaaacttcgtctcatccgtttcgtccaagtcacaggctgctcttgacccacagcggtctgattctccgctatatccttctgggcgaagaacaccgcagcccggaggctcctcggatcttttaactctggagccgtcaaatccctctcctctaggccgtccgtccatgcagtctgaccagcaacttttgatgatggaggaggctgagtcaagtaactcgtacatacagtctcgtggcgaagcaatcgacgcaatcgagcggacaatcaacgagctaggaggcatctttggtcagctagcgcaaatggtcagcgaacagtctgagatgatccagcggatagatgccaacacagaagatgtggtggacaacgtccaaggagcacagcgcgaactaatgaagtactggacacgagtatcgggaaaccgatggctaatcgctaagatgtttggagttttaatggtaagtcttctctgtgcatctgatatgcgtaattgct

SEQ ID NO: 21471 - DNA, 745 bp, Emericella nidulans
cgccaaaaccaaaaaagaaacacaagaacacgcgacacaacgagaacacacaaaaaaaaacaaaacaaaacaaaaaacaaaacagaagaggggggggcgccgaccgacaaccaaaaggaaggaggcagcacccagcaaggagggggacacaaacacgcagacacaggaacacgcaagctcgattccgcagcgacgagaggcacaaaggcccggggcgagaaaaaaagccaggggggacaccaaagacggaagcaccccccgccggaccaggcaccagcaacaagccagaccaggcagaggcagcccaaacaagacagaacgaagcgacaggagcgacagacgggaaccagcaggaacagggaagaaaaaaaacaccgggcaaaagaggggcccaaccaaagcccagagacccgaaccaaaggaccacgcgcgcgagaagagcagaaaccaaacacgagacaacccgagcaacgacaaaacggcaacagccaaagaaaggggcagaaccaccacaccccaagcaagacacgcccagccagacggggaagacaccagcagaaaccaccggcacagggagacgaccgaccgaagagacagagccagacgcccagaggaacaagcgggacagaaaaaaagcagacccaacaagaccaccaaaggaaacaggggggcaaaacaacaaagaaacaagggcacggggacacgaggaaaaacccaaccgcaaccacgaacaccaaagacgaaa

SEQ ID NO: 21472 - DNA, 380 bp, Emericella nidulans
attttaccagaatccacacatcagttctgcctaactgatctcccatacggatctttttgcgtctctgggcgctctctctcgcgcaccaacagctctctattgtcctctgggacatgactctcggcaccgcgtttgatcaagaagacggcaccattcgtaccatcatgatcattgtcaccttctacatgtggttcactctgactattgccattctctgtgtgatggagggaaccagtgccatgttgcactcgctccgtctgcactgggttgaggccatgagcaagcattttatgggcgatggtataccattcgctccatttagctttaagaccctactggaggaggatccggttgattgaacggtttagattaagctggct

SEQ ID NO: 21473 - DNA, 629 bp, Emericella nidulans
ggtatgatcaagcacactgtttcttttgcaatatacttaccatactatagtgaccctgcattgctggagaagatcacgaagtccctaggtattaacattccaccgtacatcttacgatcccgcgatccaaggaacatcatgaccactttgttctcgcagtggctaccgctctccacagcacttttggtgtcagtcattgagtaccttcctagtccgcgaacagctcaatcatcccgattaccgccaatgatagaggagtcgccagggtcaaagtacgtggatgccgctgtgaaggatgccatgattcagttcaagactggcccaaaggagcctgtcgttgcatatgttagcaagatggtctccatcccggaaagtgagctgtcttctagcaagaagaaaactggaacgatgtctgcggatgaggcgagagagttagctcgaaggaaaagagaagaaattgctaaaatgcaagcagaagcaagcacgaatcaagcagacgacttctcgcgagtaacatctgcgttcgagcgggtccaaatagacgatgagaatcagcccgcagaacaggaacagaaggaagaccccgagcatctgattggatttgcccgtctctattctggaaccctatc

SEQ ID NO: 21474 - DNA, 356 bp, Emericella nidulans
gcaataacaatccgtcctggtatgtgatcagccgttttaatgtaccaaggaccaatgataccgtgccggctgctgataattatctcgtccggccatgggagtcgtatcgtcgcgctgtgtttcagcaggtttacctaagtaaaattattacaccggctgggtgggagcgatggtcgaccagcagccctaatacggataatgccacatttgcggagtatgctaactacggccctggacctgtcctggaagagggaccgcgagcgagcttcagtgagcaattggatgcgcgaatggagatccagtcaattctggggcataactttcaacgcgagtggtgggtggatactgataacctg

SEQ ID NO: 21475 - DNA, 850 bp, Emericella nidulans
attgccaaaagcagacggcacaggactcgtcgatagcgtctcacgatctccttcaccactcggcctgattcctcttcacacccgctaccgtaccttcatacaccgccatgagattccgcgcaaactgctccacgtctcgattggatttctgacgctccatctatacagccgcggcattcaaacacaccagatcacaccctggctcttcggagctcttgtgcccatcgccgcgacagacttcctgcgtcaccgttcagaacgggtcaacaggttgtacatccgctgcatgggtcggcttatgcgcgaaacagaagtgtccggctacaacggcgtgatctggtacctcgttggcgcatataccgtcctccgctttttccccaaggacatcggcgttatgggcgttctgctcctctcctggtgtgatactgccgcctccacctttggccgcctttacggccgctatacctttagcttgcgcaaggggaagagtcttgcaggtaccttcgctgcctggctagttggggttgtcaccgcggccgccttctggggctggttcgttccctacattggtacctttcccaacgatcccgaggacgcattcctttacacaggccgtctcaatcttttcccagatcccgtgaagcgactcattgggtggacagtaacatcaccagacaccgagtccggctctgttatcaccggcccgctagcgctgggcgtcatgagcgttgtatccggccttgtggccgcaggctctgaatttatcgacttcatgggctgggacgataacctgactatcccagttctcagtggcatcgggctctggggtttcttgaagatttttgggtga

SEQ ID NO: 21476 - DNA, 635 bp, Emericella nidulans; identical to SEQ ID NO: 7403

SEQ ID NO: 21477 - DNA, 386 bp, Emericella nidulans
accctgacatgaccactttcgtatgcgtctgtattgcagagttcttgtctctgtacgagactgagcgcatgatccaggagctgacaagctaccaaattgacacacatgctattgtagtcaaccagcttcttttccctaagcagggcagtgactgtgagcaatgcaatgcacgcagaaagatgcagaagaagtacctggagcagattgaggagctctatgaagacttcaacgttgtcaggatgccgttgctcgttgaagaggtccgagggaaggagaagctcgagaagtaagttaatttcttcgcatacattgtcactactttgctaatcctcctgatcagattcagcgacatgctcatcaacccttatgtgcctccaaactaagcg

SEQ ID NO: 21478 - DNA, 584 bp, Emericella nidulans
tcgacgtctctgccgctctccgcttcttcaggccagaacttgaccctaatttcaaggctagcctgaaagagggaccccccagcgtctggcttaaccgccaaaactttcccgaaaccagcaagactttcaaaggccgtactttcgaaccagaatatgacgtcgagtacgcagacaccctgacttttggtcagctctccaccccgcagcaacgcctcgtcctcttccttcgtgccctcattcataagccagacatcgtcatccttgacgaaccattctccggcatgtcttcctcggtacgcgacaagtgcattcacttcctagaagtcggcgagcggaaccccgtttcaacggctactagacgcgccggcggtaaaaacccctggactgttgccgtcacgggtgacgagggcgacaaagatgtccgttttcagagaaacattctcgctgaaaagcgacacttcggccttacggaccagcaagcgcttataatgatcagccacttgcgcgaagaaatccctgatttcgtccggcactatatccgcctgccctccgcgcaaaatgacgacgccacagggttggacttc

SEQ ID NO: 21479 - DNA, 850 bp, Emericella nidulans
gcaggttcttcgatcgctatctgaaaggtatcgagaacggttgggaacaggcaactccgagggtgcgctggtcggccctgcagtttggggatcgcgaggcgatcgataatatcgtgctcgaggacttccccatgcccaagacgcagtatcgtgagttattcctgtcgaagaataagttgaatgagagccccgggtcagactacgagattgtctcttacaactctgaatcctcgtccgactttgcggaattttcattcacgttcatgcaggattctcgactcattggcctcccaaaggctatcctgtacatgtcctgtgaagaccgcgacgacttcaccgtcttcgtgatcatccgcaagaaagataagaacggcaagccgctgatgcacctgaatttccccttccacgctaccccggtggcatcgatcgaggagattcccccaaaggagcaagcgagcctcaacctccaccccggttctgtcgggatactgcgcgcttcccatcgcgcctttgatcccgagaaaagtattcacccgcagtttccgttccacccccatactagacaggagaaggtgaagcccggggagatcgtcaagctggagattggtatttgggcgatgggagtggactttgaggctggtgagacggtcagcatcagggtgagtctccctcgagaggtccatgcttagttagggttaacgatgtgcaggtatcgggccagtacccgagcatcgcagagtataagacgtggtcgaggccacgacctgagcacgagctgaaccgcggaaaacactttatccattgtggtggggagtgtccgagttctgttattttgccatttatatagttt

SEQ ID NO: 21480 - DNA, 850 bp, Emericella nidulans
agcgtctaacgacgagtaccctggcgccacagtcgatcggctcttcggcgaagactacctgcacaagatctacttcaaagcggattcaggatataaggggcggtactcagttccagtactgtgggatcggaagacggggacgatcgtctgtaatgtacggctcattcctcgaggccctctcaccaacacaagtggggtttagcgatagatgccgtcactgatgacattttatacggtacaggaaagtctcgagctgctccgctggctccccaatgcattcaacgactttatcccgtcctctttggcatcgatagacctgtatcctgaacacctgcgtaccgtaatcgacggtctgcactcctggatcctcccacatctctgcacgggcgtctacaaagccggattcgcatctgaccaagatcaatataacaagaacgtgatccccgtgtttggagccctcaacaaactcgagaagattgtctttgccaacggcgggccgttcattctcggctaccagatgaccgaagtagatgtcacagtttacgctaccttggtcagattcgacactgtctatgtccagcacttcaagtgcaatctcggcacagttcggcatgattatcccgtgctgaataactggttgaaggcgatgtattgggatgtccctgcggcgagggagagcacggatttcaggcatatcaaggagaacgtatgccccccgtctgacattgtccgtctgttgcgacagtggtgaggcttatgaggctgatggaagcagtatacaaagagccattatgatatcaaccccaaggccattacgccgcttgggccgtggccggacgtcgaggaaggc

SEQ ID NO: 21481 - DNA, 519 bp, Emericella nidulans
atgctcggcaagatcgctctcgaagaagccttcgcgctcccacgttttgaagagaagacccgctggtgggcatctctcttctctacagaccccgaaacccacgttaaggaaatcacagacatcaccaagatgcgcattgagcacgcggacaagtatggcgtcggttaccagattctttcctacactgcccctggtgtacaggacatttgggaccccgcggaggcgcaggctctcgcggtcgagatcaatgactacattgctgagcagatcaaggagcgcccggatcgatttggggcttttgcgtacgttttcatccgtgccttctacttctgtgatcatctaggaacaaagacacaaagttgggacgggtaagctaagttagctttgtggtaggacactgtcaatgcacgatcctcaagaagcagccaccgagctccgtcgctgtgtcgagaagtacggtttcctcggcgcgctggtcaacgacactcagcgcgcaggtccagacggtgacgatatgat

SEQ ID NO: 21482 - DNA, 850 bp, Emericella nidulans
ggttctggcttatattcggtggtgtacagctgggatatgtgatcggttttttcgattccaccttgatggcgtccagtcaccctgtcatcacctcacacttccatgcgtcgaactcggcttcctggctttcaactgcattcttattgacatcgacggcctttcttccacttttcgggcgcgtctcagacacgttcgggcgaaaacctgtgtatttattcgctattgccgtctttttccttaccacagcgtggtgtgcaatggcgcagagcatagggagttttatcgtagcccgtgccttttgcggactcggggccgggggtgtcttttcaatgggtatgattctgtccagtgatctagtccgcatcgagtaccgtggcatctaccaatcttatatcaatctctgcctcggattaggtggttgtcttggtcttgcgtttggcggatacctgtgcgatcaagtgggctggagaggtgcgttcttcgtacagctgcccttcatcttcgtttatttccttgctgccgcatggacaacgccttctggtctgggattgaagaaccagacagaggaaagaatgaccttcttgcagcttctcaggagcgtggaccttgtgggctccgcgctcttggtgcttaccgtcaccgcattgatcatgggtctcaatctgggtggtaatgtctatagctggactcatcctctcgtgatttcatccttggttatctcggtcatcctggcaataattttcgttccatatgaaaaacgcgtcgagcgagcagtaatgcctattactttcttaaccaaaaacccccgcgccgttcttatttttaaaacttcatggctctccgaatggat

SEQ ID NO: 21483 - DNA, 651 bp, Emericella nidulans; identical to SEQ ID NO: 14881

SEQ ID NO: 21484 - DNA, 523 bp, Emericella nidulans
gaggatgctccagctcctcagcctgaagttccctctaccgagcctgagcagcaacaaccagcagcagacacacctcaacctgaggttccctctactgggcctgagcagcaacaactagcagcagacacacctcaacctgaagaggcgcctgagctgccaactgcttctacgacaggagaggagcctaaccccctcgctaaatcagaggttacgacccaggttgtcccagagatagtaccagatctcaaaccggtacttgagtctgcgccggaaagagaaccagagccagagcaaacgcagaacatcgagcaatcccagacgccgtctgacccggacattccttctcaaacaccgctcgaagacaatgatttcactgaaataaccaaacacgacacttcgtcaaatcaacctcccggtatgatcgatacccagattgagcacaaccaggaacctagccacgacgatctaggcgtatgggaacaactcgacacagctgaagcagaaaaaaaccacgacggcacgc

SEQ ID NO: 21485 - DNA, 573 bp, Emericella nidulans
taaaaactattataaaaaaagctttatttatataagttattccccaggtacagccctagtattatataaaaactaaaaaagggctatagttctatattaactattatatcttaaatattattactaagagggactattatctattactcctaatttataaaatactaaactaaattaggcaagctagataattctctaagctagatatatttactactttttataagatttatatggctaaagattaggaataaataactactttttatataaaatatagactctttaaatagctagttaccctttttaagttagctaatatactatatatcttctaaaaatatattaactagaccttctaggaatatctagataaattctattctatatatcttattaatatacttatttatactaataaagacctctaccagtactagaaatatatataaatagtcttaaactagaaaaaataaagtacctaggctttataatataagcaggaaaagaaattaaaatagacctaaaaaaagtaaaaataattaaagaatggaagatttttcaacaataaaa

SEQ ID NO: 21486 - DNA, 317 bp, Emericella nidulans
cgtcctcttcgatcaggagtcgaaggcttctagccttactggtgaatgctcggcttttgatgcagacattgaccaatgggctgagtatgttactgagtacttctagcctaattatcatgtggttaggcttgctgtatgatggctagggaacttggtggtgttgttgatgctacgctaagttgtataggacgaagggactgcatgttattgatgggtctatcccgcctacccaggtttcttctcatgttatgactgtattttatggaatgtccttggaaattgctgatgttatcctggttgaccatgcgaaggcttag

SEQ ID NO: 21487 - DNA, 850 bp, Emericella nidulans
agatacgcctatccataacgaagccgtctggctcgtgctcacaacgaagaagcacgttgtcgacaagaacagattgaagcctggcaaaatcagtattccacattcgctgaatgcgtcgccggcgctcagcatttgcttaatcaccgcggaccctcaacgctctgtgaagaacattgtttccgacccatcgtttcccgagcatctctcgtcgcgcattgagaaggtgattggttattcgaagttgaaggaccgatacaagagctttgagagccggaggcaactactctccgagcatgatgtctttctggctgatgatcggattgtcatgcgtctggtcaatacgctgggcaaagtgttctacaaatctagcaagcggccaatccccgtgaagcttgcgcagattgaaaaggtggatgggaagagggtgaagaaagatccgaagcagcagcagaatcagaaggacgatgagaataaggtcagtttgttcgcgagcacggcaattgtcgcgaaggagatcgagaaggccctaaactctgcgcccgtacatcttgctccggctacgaccgcggctatccgggttgggtcgtcgaacttcacacctgagcagctgtctgagaacattgaggctgtggtgaaggggttgacggacaagtttgttacaaaggggtggcggaatatcaaggcgcttcacatcaagggtgccaacactatggctctgccgatctggttggcgagcgagctgtgggtggaggagaccgatgtcgtggagaccattgaagatggagaggccgacggcaagaacaagaagcggaagcagatcgagggtgagggcgagcagaaactcctagaa

SEQ ID NO: 21488 - DNA, 850 bp, Emericella nidulans
attcgagcgggaactatggagaaatgtggtgtcttgctgcgcagccgcggtggcagccggcgaagggacgtgacaacaaaccgatgcccgctgcccagggtgagttcacggggcagcatttggcggctgggtgcgcggatgggtcgattgtgttattgtcgactgcagacgatgatttgaagtttttgcgaacgttgaggccgtcgacgaagaagccgcgcgtgttgagtgttacgtttcagaaccggaatacgattgttgcgggctacgcggatagttcgattcgggtgttcgatatccggaatgggcagcttttgcggacgattagtttgggtaagggtccgacgggaggttcgaaggagttgctagtatggtcggtgaagtgcctgccagatgggactattgtttctggtgattctgctggtgaagtgcggttctgggatgcgaagaactactcactcatccagcggctgcagggccatttggcggataccctggatgttgcggtaagcgcggacggcgagacggtcgttagtggtggtgcggaccaacggactgttgtctacagaaagaaggccggcgagaaaggtgacaagagcagtcgatgggtggaggtgacgcatcggaggtaccatacccacgatgtgaagacgtttgctgtctacgagaccaagaatcttagcgttgtggtttctggaggtatgatctcaaattcctggtggtcaatattggctaattcaagcaggacctgatgcccacccggttgtcctccccctacgagaattcggaaaagagcatcatcgaaatctaccaagcctcccgcaagtacctccggtcgtctccgcgcctt

SEQ ID NO: 21489 - DNA, 460 bp, Emericella nidulans
caatgtctacctgctacaccacgccgttttcatgggcggagatgctggcccctagtcggaaggcgacatctcggccaatccgatcgagcacgtccttccgcaagtgatcgaagcgacgaaccgcgtgcttatcggcaacggtgactacgacatgatcatcatcacgaacggcacactgctctcgatccagaacatgacttggaacgggaagctcggctttcaggaacggccaagcgagccgatctaccttggtgcggacctgccggatcttgagtgggcagaggtccgcgcagaaaacgggctggatgttaaccagccgcaagggacgatgggagtccagcattatgagcgcgggctcatgtgggctgagacgtatcagagtgggcatatgacgccggagtatcaaccgcgcgtggcgtatcggcatctggagtggttgctggggatagtcaaatcgttg

SEQ ID NO: 21490 - DNA, 850 bp, Emericella nidulans
  unsure (1)..(850): unsure at all n locations
ccattcatccccgaagatcaaagaaatacgactacgcgattgcgtatgaccagagctttcgatagatactgatttcgaccccctacccatggtcgctgcggcttaattcgccctaaacgttcggatgactcgatacgcgggactagggagaacgcgccccaaaaagctcactcccaaggcgcctatacccatttaccgtgagcaccagatagatgaccttgaggaagagatccaaaatggcctacagcaggttgaaaccggtgttgagaaggccgaggagtccgtaagtgtttatccgaatcatccctgtttccagtcacgtgatatcagacaacctcatctcatcatgaaaaatttgcacgggtcactacccctttaccagcgcaagctaatgcactgttgcggtataggaataccatttgcaagttgctatcaatgcagttgcatcggggagagttgtaaatgaggcccatattccaactccagagaccgtcctcagtaacctgcaatatgacgagctatatccaccagttttctcgcagcctgcgacatatatccgcttctcttccacggtggaggactgttgcgggtgtccatataacatgactgacgaggatgatgtattcctgaagatcatgaacgagaagcgggaccccgctgaccgatgcacggaggaccagtttgaggaggtcatgaacttcttcgaagagacggtgcgattaaagcagccgtacgcagcggtaggcagtgctccggtcttgagttttgcagaaatgcaagagtccatggatgcaaccgtagaggattatgtaaggcgattgngcaaggacgtatacgaccactggaaaac

SEQ ID NO: 21491 - DNA, 850 bp, Emericella nidulans
tgagcaattcctcgctggtttgaagggcgtgcacgaccccgaacagaagcgcaagttcatcggcggcaagttcatcgacgttttcgaggatgaggcgcgcaagattgaggccaagagcaacggaaaggtcgagtggttcctccagggtaccctctatcctggtacgtctactctgattcatcacccaactccttgttcttgctaacaagttccagacgtgattgaaagtatctctttcaagggcccctcccaaactatcaagactcaccacaacgttggcggcattgccgagcgcctcatgcgcggccacggcctcaagcttattgagcccctccgtgaactcttcaaggacgaagtccgcgagctcggccgccaactcggcatctctccggagcttgtcggtcgtcaccctttccctggtacgcacttatcctaaagtccactcattatcaacaccatccacaaaaccaaactaacaaaaaaatacaggcccgggcatcgccatccgtgtccttggcgaagttactcgcgaaaaagttgaaatggctcgccaggccgaccacattttcatctccatgatcgcgaagcgggcatctacgacgagatcggccaggcttatgcggcactcgatccctcccgcgccgtcggcgtcatgggcgacaagcgcgtctacgcgaacattatcctgctccgtgcaatctccacgaaggacttcatgactgccaccccgtacccattctcgtacgagttcttgtccaaggtgtcgacaagaatcgtcaatgaggttgcgggcgtttgccgcgtttgctacgattacacgagtaaaccgcctgggactatcgagatggaa

SEQ ID NO: 21492 - DNA, 756 bp, Emericella nidulans
attgccgttgaccctgtagccttagtgaccacagaatgtattacggtcacgtcggccatgcggaaacatgcccgttgggcacactcgtccgttgcggccattctcggcagcagtactgtttctcgagtctatgaccgtgatttgtctccttcttccagtccgctcaatggggctacacctacccgctctaggtcgaggctctccgcggacgatgatcacgccctcgcgaatcggtggggtctgagggggaagagaggcaagagtatacaggataaccctctgatatccgccttcactcggttacggaatgacctcaaggactgcaaagatatcaagacctttgacgccccagcgttattacacccgttcctccaggtcgttcgctcctcttcgacgtccgccgcaatcacctctcttgctttgctcgccttgaccaagttcttctcctacaagatcatcgaccgtaactctccgaggatctcgatggctatgcagctgctatctgcagcaatcacccactgccggttcgaagccagtgattccgccgccgatgagattgtcttgttgaggatcctgaaattgatggagggcatgctggcggggccggagggcgaactcctgggagatgagagtgtctgtgagatgatggaaacggggctgagcatgtgttgtcaggtccgtctctcggaagtgctgcggaggtctgccgagatagccatggtcaatatgtgccaggtcatattcatgcgcctgtcc

SEQ ID NO: 21493 - DNA, 671 bp, Emericella nidulans
actgactctgatttatagatggcggtgcctgcgttgccatggtcggcaaggactgcgtcgcaatcgcctgcgatctccgcctcggaatgcaagccctgaccgtctccaacaactttcctaagatcttcaactatgcccccggaacatatctcggtcttaccggtcttgctaccgatgtttctaccgtttcagacctcttccgcctaaaagtgaacatgtaccgcctccgcgaagaacggcacatcgcaccgcagaccctcgccaatctcgtcagctcaacgctttatgagagacgcttcggagcttactttgtaagccctgttattgctggaatcaacaacacaacggggaagccttttatttgcggcttcgatagcatcgggtgtatcgatttcgccaaggatttcatcgtgagcggaacggcgagcgatcagttgtttggtacttgcgagggcttgtgggagccggatatggtgcgcacatttgatctattataatctcttgaccggctgactgacctcatcgtgtagtctcccgaagatctgttcgagacaatctcgcaggcacttctcagcgccgttgacagagatgccctgtctggttggggtgcacaggtatacatcatagagaaggacaaggtgactcagcgactactaaagggacgacaagac

SEQ ID NO: 21494 - DNA, 573 bp, Emericella nidulans
gaaacgagacgaaaagaggatctgaggcgaaagatggaggagtttaagcggaaacgagaagcggaagctcgcgaaaaggagaggcagcgggagaaggagagaatggaacaggaactgcgtgagcgcagagaacagctggagagagaaatggcggccgcgcgagaagcagccgctagagaagcaaagctacaagcagagaaggaagcagcggagcttcgtgcgcggctagagcgcgaggcagctgaagcgaaacttaaggcggagaaaatcgccgcccaggctcgacaaagggaaatagaggctcgaatgcgcgctgcacgagaggcagcggaggcaaaggccaagagagaaaaagaggaggcggaagcaaaggctaagaaggagaaagaggaggcggaagcaaaagccaaggccgagagagaggccgcagagaaggaagcggctgcaaaggcagctgcaaagaaagaagctgacgccaaatttgcggctcttaaagaagcggcggcgaagaaatatgctgagaagaaggcaagggatgcacaggaagcagccgcaaaagaggctgcggcgaca

SEQ ID NO: 21495 - DNA, 850 bp, Emericella nidulans
tccacccgctgagccatattcccggcccctggcttgcggctgccacgtacctccccgaattctaccacgacgtggtcaggggtgggcgttacacgacacagatccagcagatgcatgagaaatacggtaggaactctctaggccgagtagtcagccttgcattgctgacatgcatcttcgtttacgtacaggtcccattgtccgtatcaatccgcatgaactccactgcaatgaccaccgcttcatcaatgaaatctatgccggcgggacccgaaaacgtgataagcccgttcaccaggtcactgggagtgaagcgtaagttgcgccgctgtatacgtcaaaacgggaagccgatgatgatttaaatcttcttgtctcccagagccgcgcatgcaacattctccaccacagaccatgacgtccaccggatgcgccgcaatgcactagcgaaattcttctcccgcgcccaagtattgaggttggagccactgtccgtgggcttgcagagcggctgtgtgataagatctgcgcacagagaaaggacggccgtttcacgttggtgctgcgtatagccagtttacggcggatgtgatctcggggtactgtctgggtgagaacttgggactgatgggccaagaaggatgggaggagcaaattgtggatgaggtagcgacggtgcttaggcttggctgtacgctgcggttcgttccgtggtggaagcacgtcctgggtgtggttctgctgtatgtgcaacgagtttctctaggtcttgaataagcgagctgacgatcaatatagaatccgcaaacagctagtaggaagcccgaaagaatcctctgacgcactgata

SEQ ID NO: 21496 - DNA, 850 bp, Emericella nidulans
atctttccttcctatgatcgtgactcgtggatcggaccaagcacagatttcgtcttcatttcaaatccgaaatgaccctggtgtcgtacgcaactatggaaacatagtccttgagttctctcgcataactcctgacggagtcgtcgtgtttttcccatcctatctatacatggagtcaattatcagcatgtggcagggtatgggcatcctcgactctatttggaactataaattgatccttgtcgaaactcccgatgcccaagaatcatcattagccctagaaacataccggacagcatgttgcaacggcagaggtgccttgctattttgcgtcgcacgaggtaaagtttccgagggtatcgatttcgaccaccactatggccgggctgtgctatgcatcggcgttccattccaatacaccgagtcccgcattctcaaagcgaggctagaatttcttcgggagaattaccgcatcagggaaaatgatttcctttctttcgatgctatgcggcatgccgctcagtgtttaggtcgcgtccttcgaggcaaagacgactacggaatcatggtcctcgccgaccggcggttccaaaagaaacgaaatcaacttcccaagtggattagtcaggcgcttttggagagtgaaacgaatctcagtacggatatggcagtggcgactgcaaagaactttctgcgcaccatggctcagccgttcaaagctaaagatcaagaaggtatctccacatggagtcttgcggacttggagagacatcgtcagaaacagatacaagagcaggagagactacagcgggaaactttcgctcagggggatagaacgaacggttctcgc

SEQ ID NO: 21497 - DNA, 850 bp, Emericella nidulans
gacattgcgacgtggttggggaggaatgccactagccaacatgtcccggcacacagagaacactttggagaagagtttcgcccggtgaagctgcagaagtttgtctatggctatcatttttctggcaataacttcgcatttgacaagctgcttaactcaaagtaaggccgagctcctgtcttcgcgtttattaagtgttcaccatgatatagactttctagtatcatcggcacccactcagctaaaaagcccataatgatattctgctcgacaaggaactccactgtctccactgcgaaggaacttgcacggctgtggtctatgtccagtcgtctagtacggatgtggaagggaccgaacaagccgctaccggtcaaacacgccgatcttaaaggtatcccttctcatagtggttaatatcgtgctgttatgctgacttgcgtgccgtatagtaaccactgctgcgggcgttgcgtttcaccatgctggcctcgagaccgaagaccgacacctcgtcgaaaatggatatctgcaggggaaaatcagtgtcatatgttgtacgtcgacactcgccgtgggtgttaaccttccatgccatttcgtaatcattaaaaatacaataagctggcaagatggctgcggtcaggagtattcggatctcgaagttatgcaaatgcttggccgagctggtcggccacagttcgacgatagcgcaaccgcggtaatattgacgaggaaggagcgggttagccattatgagaggcttgtatctggctccgaaagcgtcgagagcagtttgcatctcaacctcattgagcacttgaacgctgagatagggctagggtacatc

SEQ ID NO: 21498 - DNA, 434 bp, Emericella nidulans
taccaagaacaccttatacttttaagcaactagaaaagcaagcaactactattaaaagacttcttagggggtatatatgcagtcctttaacctctaccaaagctgctttaaatcagcttataaaagactataagttagctataaatagtactactcttctagcccaggaaaactataaactgtatactatatataaaaagaaggcttaaaagaggaagtaatctaatagatagatagctgctatagagggcctttctatttataaaggctagaaccttctacagagctataactaagctagaaaagctatatctactatactagtagaaataatagctgtagcaaaacagcacctactatatactctactaaggtatactaattactatattatagggtatattagaacaagatgtcctaaaccaattactagt

SEQ ID NO: 21499 - DNA, 850 bp, Emericella nidulans
taagggtctaagtatgattgttggtaagtctggctctggcaagagccttcttctcgcctcgatacttggcgaatgcgatatccttgcaggctcagtaaaggttccgcgtgcgccgcctccatcacaaaggtttgaccacctcgcgctgcgtgagaactggattatcgacacagctatcgcatacgtagctcagagcccatggatggaaaatgcgtcaatcaaggagaatatcttgttcggactgccgtatgatcggcagcgataccgccagaccatcttcgcatctgggctggagaaagatatgacgatgctcccggacggagatctaactgatataggtgcaaatgggataaatctgagtggcggccagagatggcgggtttcatttgctcgagctctatactctcgcgccggaatcctaatcatggatgacattttcagcgcgcttgacgcagaaacaggccggcatgtctatgaacacgccttaactggagaactaggccataacagaacaagaatcctggcgacgcaccatgttggcctctgtctcccgcgcacagactactgtgtcctcttggaaaacggcttcgtcacacacgcagggacagttgctgaactgaatgctaccggagagttaacgaacctcatgggtaaagccgaaatcagcagagaaagagccgagccacctcttcgagagttgccgaaaccgaaacgctcgtctgctgctagtactggacggcgttcgtcagcattcagtgcgcggacgataccgaagttaaaccaggaggagaagcgcgagactggtgcgatatcaatgaaggtgtagatttcgtatctgaatggggaggca

SEQ ID NO: 21500 - DNA, 850 bp, Emericella nidulans
atgaaatataacatacaacttgtttcgactgcccagaatgcgtcctttgagcagctcaggtcactgaggccgaacagtcctgtgacggtgaagggcaaagttcaggctaaaaaagcaaaaaatgccgagatggagaagcgggatccatgggagattgtcctcgaggatatccaacttctgaacgactttccaagcgatatctggatggcgccggatatggtccatcctcctaagcataggcatctgcagctccggacaagcagcgagctacgcgaagcgctagagttccgggcgcaagtacgcaatgtctgtcgagaagaattggagcaaggccgaccaccttttgttgagattgagacccctctgttatttaagtcacgcctgaaggagctcgagaattcctagttccgactcggaagcatggtctggcatatgcgctcccgcagagcccacagcaatataagcagatccttatggcaagcgggatcccaagatattatcagtttgctcgctgcttccgggacgaggatcttagggcagaccggcaaccagagttcacccaggtaaatagggattatctcgtcaattgtggtcttgtgactaatgccgtcggttttagcttgatctggagatgtctttcgcaactggtgaggacgtcatgcgggttgttgaaggtattattcgccgactttggtcaaccctgatggataccgaggctccttcgggtccgttccgaaggctatcgtaccaggatgcgatgactcgttatggttcagacaaacccgatacccggtacggaatggagatctacagagttgaacatctactcccagtggacctgatcaataag

SEQ ID NO: 21501 - DNA, 553 bp, Emericella nidulans
catcttgccgctgaacctgaggaaggtatggcggtcgaaattggccaactcgaaggcaaagaccgttagcacgagtaaaaccggaagtcccatctgcggcgacccgacaggcggccatcccattgaaggcggatttatggcttaccacgctccctactactacatgtggtttagctgggggcgctgctgcgagttcaaggacccggctatgcggtcgaatgggaaagagtacgtccatcctctaccaagtcaacctagtatctctattggtaaaactaacaaataaattaggtaccgcattcgcgttggccggtccacaagcgcacggggccccttcgttgataaacagggcattgaccttgttgacggcggcggcgagaccgtctacggctcaaacggcgatgtgtttgcccctggagggcagggaatcctgaccgatgagttcggggatatcctatactaccattatcttaactcatcagtcagttatgactttgctgacgcgcgacttgggtataatcggttggagtatgtggatggctggcctgtagcg

SEQ ID NO: 21502 - DNA, 500 bp, Emericella nidulans
cgccagtcctcgccctcggactctactccgaaaaccgcgaaaagcgagaagaaaaaccacaatgcccccccaaaacacccccgcatcagactccgatgcacctcccggcgccggtacgcctcatacccagcccagcccatcccattaccctccttccatttgagtaaatctgacatatgatacgaatatagttaacatctcctccctctcgaccccgcaactccgcgccttacagacccgcctctcaacggaactcgagcacctcacctcttcacacgcaaagctgcgcgccgcacaatcgcgcttccgagactgcgtgcgctcgatcaatgagggcgtgattgggtccgcaaagaaggggacggaggggaaggatgagatcctcgtgccgctgacgagttcgctgtatgttaaggggcgtttgacggatcgagagaaagtgcttgttgatgttgggacggggtattatgttgagaaggtttgtgtataccctatgggca

SEQ ID NO: 21503 - DNA, 537 bp, Emericella nidulans
gagacccctacggggacgaccgcgacgctcgttcccccatcatgaatcccagcagcttgagtaaccgatcgccttcgcctgggcgaccgctcgacggctaccagctctcagatgcgccgtacggacatcaccatcacatagaaatgccctcgagtgaccgattggccgaacaaccgacggtaagatagtcaggaactggggcggtagatatggatactgaactgttgtgcgatagtattcggtcgagagaatcccgcagtcgtatggccacaacgaagcgtatgaagcgcagaccaacattatccaggttacgagtactcggtggaccccgaagcacaccatgacgcttactatacccaaccataccagcctacagttacaccgggccatgacgattatgacctcggccagtatccaggacatcagcattcttaccaggatgatgagccgatcctccaaccggaagacccctttcaggcccagaacccatacagcgacgactaccaggaggacatgacaattgccccaacgcctagt

SEQ ID NO: 21504 - DNA, 850 bp, Emericella nidulans
gatgccgccgcgagtgtgggcattgcccccgtcaaggccgaacgacccgtcatcctctgcttcggcggccagatctcgcgctttgtcgggctggatcggggcctctttgacgcagttgccctctttcgcaagcatctagatgcggtggatactgttgttaaggcgcaggggctggtcagtatctacgccgcgcccgatatattcagccgcgagcccattgaagataccgttaagcttcagacgatgctctttgcgatgcagtacgcctgcgctcagacctggatagactgcggcctcaacggcaaggtccaggccctagtgggccacagctttggagagatcacggccctatgcgttgccgggaccctgagcctggatgagaccgtccgtttggttgcggcgcgtgcgaagctcgtccgggacagctggggcgctgaccggggcgccatgatggctctggaaggcgatgagggactagtccaccagctactgtccgaggccaacggagcttcagggtctgatggctctgcgagtatcgcctgctataatggcccgcgcagcttcacgattgctgggtccaccagtgctgtcgatcaggtccagcagacgatctcgcggcccgaattcggctcgatcaagggcaagcgtctcaatgtcacgaacgccttccactcctcgctcgttgacaagatcagtgacgggctggactctatcggcaagacgctgaccttcaacagccccctcatccccgtcgagcgagccactgaggtggcctctgccagagcgacagatgcctccttcgtctcgcagcacatgcgccaacccgtcttcttcaaccacgcagtgcagc

SEQ ID NO: 21505 - DNA, 850 bp, Emericella nidulans
ggatcgtcaccgaagaggatcttggagcgcagtttctcgtgaaccaggattgtattggtcaaaatcgggcccaagctgcggccccagcagtacgagcctacaataaacgagtcaaggctctcgcagatgcaagtggcctttccagcaagccgccagagttcttcgggcagttcgacttaacaattgcaaccgagcttgacttcgccatgtacgatgtcatcaattcggcctgtcgtgtagccggacgaccgttttacgcagctggcctgcatggattctacggttttgttttttctgacctaattgaacatgacttcgtgatcacacgagagaaatcaaacgttccatcgcctataaacgaaacatcaactcggactattttgaacataacttcgaagaaggagaatgacaaaatgattgagatggtcacgaaacgagagaaataccatcctctccttctagcaaacacatcaccgctacccgacgaattgacacgtctaccccgccgccgaaagcaagtgacaccgcttctgagctgtcttcgagccctctgggagtttcagaaaatcaaccatggcagattgccaaccttttcacaccaagatcttgaatcattcacgaaactggctcgggatgcgcaccaggaactcaagcttgacattagcaccctcgattcagcattcttgcgaactttcctgtcaaatctcggaagcgaactaagtccagtggccggtttcttaggaggtgctttagccaagacgtgatgaatgtcctgagcgctcgggagcagcctcttcaaaatctccttctggttgatggcgagagatctgttgcccccatctattcgcta

SEQ ID NO: 21506 - DNA, 850 bp, Emericella nidulans
cgtgacgagatgggtgtcttagaagtcttggatcatcccaacatcgtgtcataccatggcattgaagtccatcgcgacaaggtgtacatcttcatggaatactgctccggtggatccctcgccaccctccttgagcatggccgtgtcgaggacgagacggttatcatggtttatgcgctccaacttctagaaggtttagcgtatctccatcaatccggaatcgtgcaccgcgacatcaagcccgaaaatattctgcttgaccacaacggcattatcaagcacgtagatttcggagcagcccagatttatgctcgtcacgggaaaactttttctgcctatggacgccctcggccaccggaggaataaagatggcattaaccctaaagacaaccaggtcgcacccaaccggggcaagaaccagaaaaccatgaccggaactcccatgtatatgtccccggaagtcattcgcggcgacaccagcaagctcgtacaccgccagggcgccgatcgatatctggtctttgggctgtgttatcctggaaatggccacgggccgtcgtccctggttgagcctggacaacgagtgggctatcatatacaatatcgcccagcgcaatcagccagcgctagcgtctcgcgatcaactcatcgatttgggcctcgatttccgtcgtctctgttatgaatgtgatcctatgaaacggccaaccgcggcggaactgctccagcacgaatggattgtctcgatccgtcagcaggttgtgatcgagacgcctacgccgagtagcgagcataacggttacatcagcagttcgaactcgggaagtcgacatagctcagcgtatatgta

SEQ ID NO: 21507 - DNA, 850 bp, Emericella nidulans
gcaccagcgtgaggagccaagggtggcaaccgaagaaaaaaacagcaaaggtgagacattgaaagaaagaggcggttaaaaccccccaaaggaagaaaaccacaccaccgcaccagcgcacaagaccacaagcagaagaagagaaacgcaacagacaagacggcaacaaggccctgcaacacgacagaacaagacggagcccgaagggggagcgcagcaagccacccgcgacaagcagaaacgcaagacgagactggaaacagacggcggcagccccaatggacaggcaaccagagaacccgcaaggacaagcactggaataaaaacgagaagaccaagatacggcacagaaaaaaagaacccaacaaataccccgtaatgacgccagaaagacgactagcgggcacaagagaacagacggaagcaggcaggacgagaaccccaagcagaagagcgccccgggggcacaggaaaaccgacaacaggaagaaaagaccggaaagcaaaagcaggctgggccaaacgaaacggaccccaggggcccgagacccccaagaggaagaaagcacccgggggaaaccagccgaaggaacggagaccccaaaagaccaaacaagccgtgccaggggcggaaaagcaacaggcagagcagaagacaaccaggggggacacaggcgacaaaaacaccaacacaggaaacaaccggcggaagcaccaaaacaggcacggacggaccacccaaacgaaaccaggacgccgaagggcaaaccccaacacaaaaaccccgggaggagaaagaggcaagccacaggacccccccaagagcgcaaagacgaagaacagcgcgaca

SEQ ID NO: 21508 - DNA, 624 bp, Emericella nidulans
gggagttacgccttctgaatgagcgagcctgggctggcgagagtggtactgttccctaaatccttccttcccctcaccccgcgcttcatctaaccgtcgacatccgtatagatatatttcctgtcagcaaatcgctcgattcgtcgctgaaaaagaatacggctttcatcaagcgccttcgcactggtatcaatgctgctgcccagcagacgttactaactgacatccgcacgttgtcgcttcacaaatacctttcggagatcatatcagcatgttacgaggggctttgtaaactcaaatcgcctggagagattactgccggtgttgagattaccagtgccctgcatcagcgatttggtccggcggagttcacccgacaaatcgggtggttgctgggacggggcctgagctcaccggataaaagtcagttgaaaactcttagccaggaactgcgtgagcgcagaggaaaaagaaagactgtctcgccaccgagtattgttaaaggttgtgacggagttgtggctggtcggcgtgttgaggactcttgatgacgttgaacgaccggagatgtgggttctaagggaaaagatggcgcgggattaggcaataaagtggtcgatggag

SEQ ID NO: 21509 - DNA, 493 bp, Emericella nidulans
ccattcacttctggttgaggtactgacgatttttcataggaggattcaccggtcttagtctgaacttttcgcccagttcttcgttgcgcgtgaagcttaccgtcacctcaacacccacggccgcataatcctcatgtcctccaacactgctaaagagttcagcgtcccccggcactccgtgtactctggctccaagggcgcaattgagtcctttgtgcgtgtgatggctaaagactgcggcgacaagcagattaccgtcaatgctgtcgcccccgggggaacggtgacggacatgttttacgacgtggcgcagcattatattccaaacggcgaaaaacacagcgcggaagagctgcaaaaaatggcggcaacggtatcgccgttgaagcggaatgggtttccagtggatattgcaaaggttgtcggttttctggcgagtagagaagcggagtgggtgaacggaaagatcattaccgtcgacggaggcgctgct

SEQ ID NO: 21510 - DNA, 507 bp, Emericella nidulans
ccatggcgttaacgctcgcccactgtccggaaaatgcagctcggcgagaacaacaatcttttcgatttcacatacgtcggaaacgtcgcgtactcacatctccttgcggctttccgcctcctagccatttacaaacgcgtcgaatcaggccagggtgacctcctcgactacgaacgcgtcgacggtgaggccttcctcatcacaaacgaccaacccgtctacttctgggactttacgcatgctgcctgggcgcttgcggataaggtcgtcgaaccgcatcaaacctggcagcttcctgagtggctgctcggtcctattggaggtcttgccgaggccgttctgggactcgtggggaaaacgccaaatctcacgcggcgggcggtgcgttactcctgtatgacgaggtactactcctgtgacaaggctaaggatcgccttgggtacacgcctattgtcccccttgatgagggtcttgcccgtgctgtggggtatttcctcgagcgctgg

SEQ ID NO: 21511 - DNA, 500 bp, Emericella nidulans
ggcgtttagtaatatctatacctcaaccaaagaccccaatggcggactgccgcagtcaatttcgggatcgcctcaatggactccgggtcaatctttggtggattctgcgggatcggtcggatctgccctacatcactcagtcatcttgggaggcacctttgaccactttcacatcgggcacaaacttttgctcacggccactgctcttgtcctgcaacctgcgggaactggcccgaccggccagaataggaccatcacgatcggtgtgacgggcgatgagatgttgaagaacaagaagtacgctcagttcctggagagttgggacgagcggtgtcgaagtacgggcgcgttcttgacctcgatcatggacttcgggcctcccgaaacagagcctgcccacattgagcgaatctataatccgggaccaaacgggagacagatagtgatgaagatcaggcctggaataaccctgaaaatggcgcatatacatgtaccgtagg

SEQ ID NO: 21512 - DNA, 582 bp, Emericella nidulans
agtctcttatcatggcctccatgctctgacctaaccctagcctttatcggctgcggtacattcctctacttttctcctcacccgcccagtaactatgcagcaactaacgtctacgaacaggcaatatgggctccgcaatcctcagtggtattcttgacgcctctaaagtcgtatcaagtccattttcgcgcatattagcctgcacaaaaacccagtcctctgccgaaaaactggacgcccggttcagagaccacggctccccactaactgctagcttttttgcagacaagaacactgccgctgcggaagaggcagacgtcatcattttgggatgcaagccgtacctcgtcgatgcaatgttagcagaggaggagcttgcggatgcactagctggaaagttagtgatcagtattattgcaggcaagacgatcgatgttctgtctgaggggataagccagaaccagacagaaaattccccgtctaaaaaggctgttatcgtccgcgcaattccaaatgttgctgctagcgtgcgcgaatccatgacggtgatcgaactgcatactccatcgccatccaacgacc

SEQ ID NO: 21513 - DNA, 850 bp, Emericella nidulans
ctaggttattacctcaacacatctccctacgtagttggaatcgcatacactgccgcaactgccgaaacaaaactgcccctcgacctactcttggatcgcctcctcctgctcacgctctggtctcttatccttcgcagcgctggctgcgcctggaatgatctcgtcgatgtcgacattgaccgacagatttcgcgcacacaaagccgccccctcccccgtggcgccatttcgctctccgcagcaaccatcttcacagcatgtctcttcgtcctaggttgttcgcttttactctttcttccgcgagaatgcctattcgacgccggcattaaagtcttcttcgcgctgctttaccctttcgggaagcgcttcaccgatcaccctcagctcatcctcattaacatcgcctgggcaattcccatggccatgcacagcctaggtatggagccttcgagccagatcctctcaatgctctgcatgtgcgttttcttctcggccgtgattgtcatgatcgacctggtttattcgcgtcaggacacagaggaggatctcaaagtcggcgtgaagagcatggccgtgcgataccgaaattgtgtagaaacgatggcctattcgctttttgccatcagttccctggcactactgtttggaggcgtgcttggtgggcttcgagtaccgtttgtgcttttttctgtgggtgggcacattgtgggcttttggaggttcctgcgagcatcgctgcaggctggaccggcaggggtggagtcgcgtgccaaatcatcctgcttgatagcgagtgtgttttgggtgctggggttaggtatcgagtatgctgtgcgtgtttagctttgct

SEQ ID NO: 21514 - DNA, 850 bp, Emericella nidulans
attctaatcagcacttgccgtcaagaaggccggatcctcctccaaagcgcaagttcgatgatatggacctcgctctacccaatggaggacctacgccaccagtttcgtacgagcgatctcgcccccagaccccagcagctaccccttctagagagcttccccaatccaccatgtccataccccaaacttcgcctactgctgccaaggatggtctgcctggggctggaaactcgcgcgcaaacacccgaccgacgacgccatttaacgctcagttctcgctacctgcaactcctcctgatttgttccttgtcacacgcacttcgcctaatctttcaccttctctctgggagaactttcagccagatcaactgttccccgacggcaccgctatcttcccagaacttacctcccctcaaaacacgactgttgatccacagcttcagatgcagtcgcaattacatacccacgatatggttcagcagcaaatgccgcctcggacttctctagcaggaacacagggaagccctgagattctgtccagcatgcctcctgcgatcggcatgcaaggccaaccgcaacagatgtacggaatggaccctcagcagtcttggcagatgccaggactcgaccctacagttgctggcgctatggataatgcaagccaagacgataattggagcagtagctcacgcagtggccctactgctccgacaacactcaacgtggaggattggtagagtaccgcctgtcaacaacgaaatcctgcacatactgactttattctaggttccaattcttcggtattaatggcagcttcggcgaaatggcagtttaattggttggcaatata

SEQ ID NO: 21515 - DNA, 850 bp, Emericella nidulans
gccagtttacaagtaatacataggctcgcatatgtaccctgacagggattaaccgccgactatctacagcctatcacccccagactgatggatcaacagagaggatgaacagtacagtagagacctacctctgcatctatacctgctatgaccagagggactggaacaggttactcctacttgcagagctagtaattaatggctgtatattaacagcaacaggggtcagccccttctacctaagccatgggtataacctcagcccatttagccctaccgaggaggtagagcaactagccgaagaaccagccaagagtcctatccagaaaggggaagctattgtacggaaagttaaggaagccctagactgggctcaagcctccatggcctattcccaacagaatgcagagaatcaggctaataaacacaggagcccggccacaaactaccaagtgggagataaggtctggctaagtctgaagaacatctgtacggaccgacccagcaagaaactggactggaagaacgccaagtacgaggttataggcctggtgggcagccatgctgtacggctgaatacacccccagggatccatccagtcttccatgtggacctgcttcggctggcttcatcagatccacttccttcccagaagaatgatgatacccagccccctggcatcattatgaacggcgagaaagaatacatagtagagaaaatcctggacaaatgtcccaggagatacaggagaggtcactggctggaatacctagtaaaatggtcaggctatgctcggccaacctgggaagctgccacagctttggaggaagtacaagctctggataagta

SEQ ID NO: 21516 - DNA, 500 bp, Emericella nidulans
cagggtttacccagtccgtcgttgtatacaacgtccagttattcgagctcggtcccccgggatcgacccagaattaacccccctcctgcccaactggcaacaaattaccgggcagattaggcccattttgcttttattagccggcaacggtttatgcctgttttacagcaccctagggttacccctcacccttttactgttgattgtgcttagtttgatgtttttggctaatcccagggcttaccgtcagggtttcatccgttgtttccccgctttttatcgagcacgggttgatgtaattctgaaggaatcggtaatcttgctagaagattggccccggttggtggtagtcagtcctgtggtggtcccccctgccacttggttcggtttagttttacttcaggtgctgcttcccctggccctagcccttgtggccggtattttaaacgtcattcccgtcaattggcccccagattagtctagtcccccccatggcgatc

SEQ ID NO: 21517 - DNA, 850 bp, Emericella nidulans
tcaaacaggcgctggacgtagtgtggttggcgcaggagaggaggttttgtgctgggatataaagaagggcgaattgctggggagatggaaagattctgcgtgcagggcgcaagtcactgtcattacccagagcaagacggatgaggatattttcgccgttgggtaagggctcaccaagtgcatctggatccggagcaatactgacatcacttttctctctgatttagctacgaagatggcagtattcgattatgggattcaaggaccgagacggtgatgatctctttcaatggccacaaatccgctattacccaactagcgttcgacaatgccggagttcgccttgcaagtggctcgcgggataccaatatcattctttgggatctaatttcagaagttggattgtttaaactgcgcgggcacacagaccaaatcacctctcttcatttcctcgtcccaacactcgagctgttgaatgaagctggattgagcgaacatgccggtttcttaatcacgaccggaaaggacgcattgatcaaggtttgggatttggcatcacaacattgcattgaaacccatattgcacagtcaaacggggaatgctggagcctgggtcttgccccagatcagagcggctgtataacgggcggaaatgatggcgagctgaaggcctggtccatcgacgagggtgcgatgattgaaatctccaaagagaaaaccggttcggagaatcgcaggatcttgcctgataggggatcattctaccgcaacggaaaggatcgaacgactggaatcagctttcacccccgagcagactatgtggctttccatggcatcagaaaaggccgta

SEQ ID NO: 21518 - DNA, 549 bp, Emericella nidulans
gatgcagccgtgatccaacgagtcaaatcagcctccgtcaccgtcgatggtcagctaatctccaaaatcggacgagggctccttgtgctcgctggagtcggtcgagaagacacggagaaggacatagacacaatggttaaccggatactgaaggcaaagctattcccggcggagaatgacaaacaggcaagtaatacgggtctgggtatggactacgctaatggccaacctacagtggaaacggaatgtccaagatattgatggcgaagtactttgtggtatgtctctcgggatcaccctgctacgatctactgatgttctgcagtgtcccaatttacactttttggagagttgaagaaaggcaaacagccagattttcatcaagccgcaagcgccgacactgcgcgtagattatacgattacttctaccaacgcctcggcgagaactataaaccagagcgagtcaagaatggtgtcttccaagcgatgatggacgtcgaacttatcaatgacgggccggtgggtgtcgactaccacagtgaagatgcg

SEQ ID NO: 21519 - DNA, 850 bp, Emericella nidulans
cttgggcgctcagggttcgaagaggaaagatggtctggggtttgctacgaatactagcattaggtcgcaaggattcctctacaactcagaactcatacaggatattcccaatgacctgaagagacaggcaattcgcattgtgtctgcaaagatggtacttgcagttcgagccgacgtttcaaaatacagccccgacggctctttgggagaggatctcaaacagcaatgctttcaacgattggagaagctgactgaaccacctccgaattccggaaccaaagcccttcccgcgcccgatgacaagccttcccgaaagcgaggtggtagaagggctcgtaaggccaaggaggctgtcgcgatgaccgagcttcgcaaggcgcagaaccgcgttgccttcggcaaagaggaagctgaagttggttatggtactggtgaaggtaccgtcgggctaggaatgcttggtcaacagaatgacggacgtattcgagcaacccaaatcgatcagagaacaagggcaaaattgagcaaatccaacaaaggctggggtgcagcaaccccgatcagtggaactgcttcgtccctacgcacattcggccaagggcccagcggaacggcgagcgtgctacaagccaaaggtcttcgatcctcaggtatcggaacctcatttggtggtgcagctggtacagcgagtactatcgctttcactcccgtgcaaggacttgaattggtggaccctaaggtgcaagctgagctaagccgcaagcgcaaggcggaggaagaccgttggtttaagtcaggcaccttcacccaagtgggtgcgcaaaatacttccaaaaattcgtcggagact

SEQ ID NO: 21520 - DNA, 610 bp, Emericella nidulans; identical to SEQ ID NO: 14087
  unsure (1)..(610): unsure at all n locations

SEQ ID NO: 21521 - DNA, 696 bp, Emericella nidulans
tgatccccctagcgttctattgctctatgtttgcaattcacttccggtgcttggtcaatccgggagagggcgacggtttcatgtcctccgagtttcaggctactctcaattcaaaaggcatggcagccgttcccgcagacgttgtcttcggttctcgtcttagtattcgccaccataacacgcaaggcggatatttgcactctcacagtcatatgtaccccaccggaagcaagcagcagcagatcaccctttaccctcataaagatgacaataaccttttcatcgccgagaaccagactcagcctctcgacgccaatggagcagaaatccccggtccttttgcttgggataatctcacgacaaactatatcgaagatggtgcagtcatcaggctacaccatttgatgacccaccgcagggttcattcacataacgagcgtcctccagtgactgatgtcgattggcaattcgaagtctcggcatatggatacgaaggttttcctggcgatgcaaacgattactggcgtgtcgagattgtcaaatccttatcggatggcgaagaggcgaagaagcgattacggactattcaatcgaaatttcgacttgttcacgtcatgactggctgtgtcttgttctcacataaagtcaaactacccgattggtgtttcgatcacaggaagttcatgtgcaagggtg

SEQ ID NO: 21522 - DNA, 850 bp, Emericella nidulans
  unsure (1)..(850): unsure at all n locations
gttacacgctcaactccgtctcgtacgaatttctaggcgagcagaaagaggacgtgcatcatacgatgattactgagctctataacggaacgccggattcgagacgtcgcctggcggtttactgtttgaaagacgcatatttaccgcaacgcttaatggacaagctgatgtgtcttgtcaactacactgaaatggcgagagttacaggtgtccctttcaatttcttgctctcccgtgggcaacaagtcaagttcctcagtcagctctatcggaaagctttgcaacagcaactggtcattccaaatatgaaatcaacggacgaacaagattacgagggtgctactgtcattgaacccattcgcgattattacgacgtgccgattgcaactcttgactttgcctctctatatccttctattattcaagctcacaacttgtgctacacgaccttactcaataagaatagtgtcgctgggatgaagaaggatgaagactacattgtcacgccaaatggtgatatgttctgtacgcctaaagtgcgaaaaggtcttctgtcccagattctggaggaattgctgagtgcaagaaagaaggccaagaaagagctggctcaagagacggacccatttaagaaagccgtcttgaacggacggcagctcgctctgaaggttagcgccaacagtgtttacggtcttactggagctactgtgggaaagttgccgtgtcttgccatcgcgagtagcacaaccagttatggtcgtcaaatgattgagaaaacgaagcaggaggtcgaggcgagatatcncattgcgaacggttattctcatgatgcgaaggtcatctatggtga

SEQ ID NO: 21523 - DNA, 850 bp, Emericella nidulans
aaaatcatacatcacgccggacaatcacgcggaggagatgaagcgctatccttacgacaaggtcatattccacccaggccacagctgtgaaacgtgccactttctcaaaccagcgagaagtaaacattgcagctactgcaagcgctgcgtctcccggcaagaccatcattgcatatggctcaccaactgcgtcggtctgaacaattaccattactttttgtatctcttgctgtcactaagcgtcatgctgacttacggctcatggcttggctactccctcttgtctcagacattagacagactcatccctcccagctcgcccgtgcgcttgagaaaacaaagctggccaacgtttctcaacatgtgggcggcggtagtagcctatgatactcggatcgggggagttacgatgctgatgtttatgacggcaccactggcgttcgcttttctcgtctaccatgtctatctcatctgggcaggaatgacgacgaatgagagcgccaaatggtctgactggaaagacgacataaccgacggaatggcattcaagtttattggcgaccataaaagaagcgattctcctcttcttgaatccgccgaaactgcggattcctggcctgggtacagcgatcaaatacttgtgcttacagagggagaccctccgaaagaagggcatcaggttcacaaaagctctaacgatgttatacaaccaactaatcctgatgcgcctattgatcggaggtatgctcgtgttagaagcatgaaggaaattgacaatatttacgatctgggcttttggaataacctttgtcatgtatttggatactacgctgcgggcaaactcaccgtg

SEQ ID NO: 21524 - DNA, 850 bp, Emericella nidulans
agaccgaatcgcgataatcacgctcaatcaaccaaagaagctcaatgctctgagtggagaccactactacctcctcggggagcggctccgcgaggttgacaagcgcgatgacattaccatcactgtcatcactggcaccgggcgtttcttctctgcgtatgcacccttcctctgatcatattctgcctaggcaagtttctaatgatgtttttatgcctacagaggcgcagacgtaacctccgcccgccccggcgctggtcttggcacaaacgtgcgccgtgaactcgtccgcaacttcgtcgtcaacaacatcgacattacgcacactttctcccaccactccaagatcctggtcgcagctctgaacggccccgccgtaggcctctcagccgccctggttgccctcgcagacttcgtctacgccgcgccccacaccttcatcctaacgcctttctcgtcacttggtcttgtcgccgagggtggtgcttccacagcgtttgtcgagcgcctcggaattgcgaaggccaacgaagcgcttatccagagcaagcgaatcacgtgtgaagagcttgtgagcgctggtttcgtgaataaggttatatccgcgccaagcgggaagcccgaggattcggatggcttcttgaagaaggtgttggaagaggttgaggataggatgggcgcgcatttgagccagagctcgttgttaagaatcaaggaattgattcggcggccaggcagagagcttatggatcgacaaaatacgatcgaggcgttccaaggcctggagaggtttttggcggggattccgcaggaggagtttaggaagttggcgactggcgagaagaggcat

SEQ ID NO: 21525 - DNA, 789 bp, Emericella nidulans
aaaacgatgacactagccaaccgcaagagccggaggatgaccttggcttactgccctctgcacggtacgaccccgaagaaggcttcaagccaagcccccaaaccgctgtccaagcaaccgcagataaatttgccacaatcaagggcttaccatcgacaacgccgggtatcttcgaagcattgagggaacgatcggaaagtcacttaagcactcgagatcgcaagccagacaacttacacctcaatttcttgccgggggaatcatctcatgacgaagtccaatctggttccctcgcggctagtttcaggagccctgcttctaccgccaacagtttcagtacaacaaagagtcccagtgagagcggccgcagtatcgaccagtacatcaacagcctggacgaggcgagctaccactcacggaagacctctggtcatcgtcgtggcaggcgaaacactgacgactcgacaatgctgagcacgcgcaagacaaaatcgagagctgcatccaatgataccacacgaggacgcaacgagaagcgttatgttcagcctgcaaagcgttcaccttcctctcccgtgtccatgtctccagaagaactggcacagtacgctgtgaaacaaacatcaaaggctcgaagtacaagtagggtacggaagccacgatccagatactcgtcggaacgccggcagaaccgttccactagccgacacaaagccagccgtgctgatacgaccgagcagtcgactcgtgggcggagcgcggatagacaaggactacgaaacaattacc

SEQ ID NO: 21526 - DNA, 850 bp, Emericella nidulans
gcgccgaagaaggtcttcaagtcaatatactaccatgtatgtcttacactgccgatgcagcccagaatacttagctaacagaacatgggacagaaacgtaagtcctgcttagtctcagatctgcttgtcgcttctgtctaaacgtccttctcagaaacaaagaacacatggcaccgacccgacccgtcgttcgcttacctcctttccttcttcctgcttctcacagccctcgcctggggtctcgcatacgccccttcattcggatccattatgcgccttttctttcgatttgtcgttgtgcacttcataggatcgtcactccttgtctcaacaataggttactttgccatcggccgtctttttggccccaatggcgccgcggcgtcaataacaggcctacgcatccgcggacgacggcgcggcgcagcgcagggtctttttacgcaacccggtgagaaggatcagttagagttcgggtactgtttcgatgtatgcctttaaaaccgtttaggcgcgtatgcggaaatttcagacagatagctgacatacggaatcttaacaggtttctaatcgcgcgttcttccccctttaccttcacctctacgtcgtacagtttctcctcctcccgctcctcacccgcagcccgagtgatttccttactacatttctcggcaacacactttatctgtccgcattcacgtattacacgtacataacttttctcgggtataacgcgcttcccttcttgcataacacagagcttcttctgcttccgattttgttgttcgcgatcttgtggctcgtgagccttattgtgggctggggcgtggtaatgcagggacacagcgtg

SEQ ID NO: 21527 - DNA, 850 bp, Emericella nidulans
tcttcgaggcgccgggcaatgctttggcgttgtcgtcgagttcgtctttagggctcacgagcaccaggatccggtctgggcgggcttgcttggattctcgctggatcatttagaagctgtctttggctttgccaatacgttagtcgagagcacgaatggggactcggctatggttattcagctgtccagataccccttctcgcgacagggccgcgatgtgggaatcatggcaatcgttttccattacggcgatgctaaatcggccgaaactgtcttccagcccttgttcaacctgggacctattgtcaacacgaccaaggctcagtcgtacgcatccgtcaacaacatgttgacggccgaggcaaaacgcggtggccgcaacgtatctaaaggcgccgcgtacacgacaccccttcgaccagcgtttgtgaaggagacgatcatccctgaaatggaaagacttcacctcgaagtaccggggtcggatcggtcattaatagagtttgaattctacaagccagacaaatggtgtgaggttccagtgacggccacggcacacgggcaccgagggcatgtccagaatgtcatgatcggcctctactggaacgatgagcaggacgacgtgaggatggagatgtggtcgcgccacatcgctggcctagtggctgcagagcgagccagccatggtaggccagccgagggcccagttactgagtatgggaactatgaccatctgtctgcgcatgcgcgcgatgttttcgggatcaactactcgcggctggtccagctgaagaagcggtatgatcctgataatgtcttcaacaaatggtattccttggtggagtagatc

SEQ ID NO: 21528 - DNA, 522 bp, Emericella nidulans
  unsure (1)..(522): unsure at all n locations
ggacagatggacggtctattttgtgtatgatgctgtagctagctttgtgaaattgtacccaggctaacagcggctagatacgagaaggttgaaccttccaccccaacagcctcgtcatattccatagtgggctatgctaccacctaccgatggtggttctacaagagagatcgttcagagaaccctatgcctagagacggtccctttcctccaccagagctagtccgaccgggcgagttgccgtcaaggctgcgaaatgctcagtttctgattcttccgccccatcaaggaaccggtcacggcgtcaacctttacaatacaatccatanaacatgtcttgatgacccaacaatcatggacctaaccgtcgaagatccaatgaatccttgacgtgctccgggactagccgactacaataacttgggccggagttcctcaacacaatatccaatcacccccattcctgagtggattttaaaaaaaaataacgtgtccaaaatcttcttctttcgtaaaaactaa

SEQ ID NO: 21529 - DNA, 670 bp, Emericella nidulans
ctcacgcttatcagactgctgtgttctactgtgtgcttcgcataaacggtctctgcgtcaagactcggattggtctagataactcctctggcactcctgattccggttgtgtagcgtctcaattaaccatcctccggccacaatctctttcgcgattaatcacccgtcacccaacaatcgtccttttgagtgtagcatcacaatgaccaatccagctgcggggaaagaggcggagaccaaactacagacgctttggcctgtacactgtgtccaaaaaactcccggggccgacattattcccgaactcgatgttactaagattgacttattcgtgacaaagggtatgcatccgcgcgttgaaatgtattcagctttcgcagatgccttcggaaaccaagaccccgcaatagtgtctgtaaatgcggatctacgatcttttctacatgacaggggtgtcacggatgtttttgtcgttggagtggcgggggatttctgcgtcaagtacacggccttagatgccgcgaaagcaggctttaggagccatgttgtgcaggacgctaccgaatgtgtggtaccagggtccggatgggaggaaaccgcacgcgaactagcttcagctggcgtgtcaattgttcgatctgacggccctgaaattgttggtcttgcctga

SEQ ID NO: 21530 - DNA, 442 bp, Emericella nidulans
gtcatcggaggactcgtcttgttcagcggatggacaggcattgatgtctccagactgcccctggaccaggatatcacggctgctgactccctagaggcccacaaggtcaccagcaccctccacagctttactaccacgagtgaagatgtcccacgatggactcctcgggttgtcgccgagaaagctgccattggcggcttgggaccagttagtgtaggaacacccgaaaaggtcgcagatgagttggaacgttgggtcagggaggcagacctagacggattcaatattgcgtatgttaccacgcccggaacctttgaggatgtcgtgaacctcttggtaccagagcttcgtcgacggggtatctactctgaagcgccgcaggagggtttaacagcgcgcgagaaggtctatggggtcggccaggccgggctgaggtccgatc

SEQ ID NO: 21531 - DNA, 850 bp, Emericella nidulans
aactgatgaggaaaaccatgaatggccccaatcaattgctgacaagtattttctggggcttcctacggtaagaccttcatactactaccacggcacgtcctaactccatttagggccttccacagctgcctaaagccaagactcccatgcaatgtgctgagaatggcctggaattcttcttcaagttgcagctgcctccaggcaactgggcatgccagtatgggggtccaatgtttctccttccggggctgatcatcacatactatgtcaccaatacacccatcccgccagagtatgcgactgaaattatcaggtatctctttgcccggcaacacccggaagacggtggctgggggctgcacattgaggctcatagctcggtcttcggcacgagcatgaattatgtcgtgctgcgccttttaggcgttggcgaggatgatcctcgaatgatcaaggctcgagggctgctgcatagctttggcggtgccgtctatggacctcactggtctaaattctggctcagtatacttggtgtcatggactgggattgtgtaaatcctgtcccccctgagctctggtttgtgactgtcaatattgcggctcttgatgttagggctaatctcaataggctacttcccgactgggtacctttcgctccctggcgctggtggattcatatgcgccaggtgtttttgcccatgtcatacctatggtctaagaaagttcacggtacccgtttgactcctctcaccaagcagttaagacatgaactgtacacgcagccctacaactcatattacctctgccagtcatcaaacctcgattcactcatggagcaacttcataccat

SEQ ID NO: 21532 - DNA, 850 bp, Emericella nidulans
caaatatagcggcagaagcaggagcaggagaaggtctaatgggtcccccagtagcccccgcttcagcttcaaggagcgcaggaacaggccggcgcgaacgcgaaactttcatcacgcaagaaattcccgtaaaagtgatgcacgaaagcgcagtagagggtctacacgaaccgcactgccgcgatccagacgtccacattatcctgccagacctcttccaactcaaaagcatttcagaacgtttcacgagactagcagcggactctacgcccaagaccgctgcccttgcagccacaacgtcaactacggcagatgccgtgcttggtagcgtcggcgccggcgtgtcacctaaacttgaactctcggcgaacatgcacggctcgctgcgccttgcaatagcaacggatacccttcgcatctccagtgtgtggagtgatcttgtgaatcctgctcttgatccgagtcaactatcgcagactcagatggatcagttgcctagtgagcggatgagggctttacccggggataatgaggcgggttgggctaaggtaaggattgatgggagggattgggccagggttcttagtgtggggaggctgaatcctaaggttgtcgcttgtaagttccattgttgtttttgctgcagctcagttggtaagcagattgcgtgcgggcgggtttgctaatgtacttgatggtcaggcgtcatccatgagacggcgctgatcctctacgtatatcctcccagtgggtatgatgagaggggatcttgcctaacagtgagtagtccctgttcatttgaagacttacggttaacgttggacagtactacatcaactcctatatgaat

SEQ ID NO: 21533 - DNA, 850 bp, Emericella nidulans
tgactcggtcaccgctgatgacattggtgccgttgtttcacgaacaactggtatcccagtcagcaagctgatggctggagaagttgagaaactgatacacatggaagatacccttcggcagtctgttcgcggtcaggacgaagcgctgtcggctgtcgctaacgcagtccgtatgcaaagagcaggacttagtggcgaaaaccggccgctcgcgtctttcatgtttcttggtcctaccggtgttggtaagactgagctttgcaagaaaatggccgagttccgtttctcgacggagaccgccgttgtacgattcgacattagcgagtttcaagagaaacataccatcagccgcttaattggctctcctgctggatatgtcggctacgacgacgctggtcagctcactgaagctgtcagacggaagccgtatgccgttcttttgtttgacgaattcgagaaggctcatcgggatatctccgctctattgcttcaggttctagatgaaggcttcctcacagacgcgcagggtcacaaagtcgatttccggaatactcttattgttcttacgtctaaccttggcgccgaccttcttattggcgctgatcccattcattcgtccaaggcctcgactgatggggaaatcactccggagcttaaaaaggccgtcatggatgtcgttcagcaagcctatccgcctgagtttcttaaccgcatcgatgaattcattgttttcaagagactttcacgggaggctctgagggatattgttgatatcagaatcaaagagcttcagtcaagattggatgaccgcgtatgaccctccagttgacgatgagaacaagactgctct

SEQ ID NO: 21534 - DNA, 703 bp, Emericella nidulans; identical to SEQ ID NO: 6542
  unsure (1)..(703): unsure at all n locations

SEQ ID NO: 21535 - DNA, 850 bp, Emericella nidulans
taaaggggatgtgtatgaacctggagtccaatcatgttggtattgtgctttttggttccgatcgtcttgttaaacagagtgagcctgtctggcggactggcgaaattgtggatgttcctgttggtcctaagatgttaggacgtgtggttgatgcactgggtaaccctattgacggcaagggacccatcgagactaccgaaagaagtcgtgcccaaatcaaggctcctggtattttgcctcgccgttccgtcaaccaacctgtccaaactggcctaaaggctatcgatgccatggtgcctattggcagaggccaacgtgaactgatcattggcgatcgacagactggaaagactgctatcgccctggacacaattttgaatcaaaaaatatggaacaagtcggatgacgaatcaaagaagttgtactgtgtttacgtggccgttggacagaagcggtccacagtagctcagttagtcaagaccctggaagagaacgatgctatgaaatattccattgtcgtggctgctacggcatctgaagctgctcctctgcaatacattgctccttttgccggttgtgcaatgggggagtggttccgagaccatggtcggcacgccattattatctatgatgatctgtcaaagcatgcagttgcctatcgtcagatgtcgctgttacttcgtcgcccccctggacgtgaagcttaccccggggatgttttttacctccattctcgcctcttagaacgtgcagcaaagctgaatgataaacatggtggcggctcactcactgctcttcctattatcgagacacagggcggcgatgtgtcggcttatattcccacgaacgt

SEQ ID NO: 21536 - DNA, 850 bp, Emericella nidulans
aagttcatgacacaatcagcaccgaggatagtttcgtttctgcaaagtctgagattagcgatgatgccagcagccgccaacgatccgaaacgccgatgagtgaagatgacaagccattcaacaaggaggaggcaaaggctaaggtcctcaaggaaatcgttattaatatgaagtgtctgcacattgccctttgcatgctccagaatgttgaaggcaacctgcaagcaaatatgaatctggtgaccatgttgaataacttggtagtacctgctgttcggagccacgaggcgccaattcgagagcgcggtctcgaatgtcttgggctgtgctgcttgctggacaaggtaagttccatccttactaaatacatcttcttctctaacctctctgttagactctcgcagaagaaaatatgacgctgtttattcactgttacagcaagggccacgaaaacctacaggtcactgctattcatatcctttgcgatatgttaactagccatccttcgctgctggctcccgttacccaggccgataaggagacagttgcgccaccggcgttccagaagccactgcttaaggtcttttccagagctctcaaaccaaattcacccgcgtctgtacaaacggcagctgcgacagctctttctaagcttctgctcactggtgtttttactccatctgccgccaatatccccgatgccattcaagagttcaaccaacatgccatcgaaacactgctacagtccctcgttgtctccttcttccatccccgaactcgcgagaatcccgcactccgacaggcactcgcgtacttcttccctgtctactgccactcccggccggataac

SEQ ID NO: 21537 - DNA, 850 bp, Emericella nidulans
aatgttcttcctctgctgtcgagatgctaagatatatgctggcagtctatcaaggtctggcgacaagtttggacacgctttgtgctcaagcatatggctctgggaagaaaaagctcgtggggctgcagatgcagagaatgattttttttttatgggtcatcaccatcccaattgctttgctctggttctttgccgataagatcctactaaaaattgtgccggaaagggaggtcgctgagctggcgggtctgtatctgaaagtggttattctgggagctccgggatacgctgctttcgagagtggcaaacgatatgttcaagcgcaggggattttttcagcgtctctatatgtactgctgatatgcgccccgctcaatgcatttatgaactggctcttcgtctgggtacgttccaagaagttgtgtgagactcaactaacactcggttacagcaattcggctggggatttattggcgctcctattgccgtagcaatcacggacaacctcatgcccctattcctcttcctttatgtttatctcgtcgacggctcagaatgctggaacggcttaacgagacgcgccctcaacaactggggcccaatgattcgacttgccctccctggtctcctgatggtcgaggccgaatgcctcgccttcgaagtcttaactctaggctcatcctacctcggcaccacccctctagctgctcagtctgtcttagccactgtatcttcgatcaccttccagattcccttcacgctttccatatcctccagcatccgcgtcgctaacctaattggcgccacctcgtcgacgcggccaaaacaacagccaaggtcgcaatgtgtg

SEQ ID NO: 21538 - DNA, 705 bp, Emericella nidulans
ctcataatgacagaacctcgccggcgctggacagctgctgaggacgcgctcctctgggatctataccaggtccaggaaaaaggtatgcttgcacgttctgccagtctgccttctgcaggtcaagttgccagtcttaccgtactgacggcctgctagcacctaccggtaaatgtcagaaaatcaactggaacgagatcgcgcgacacatccccggccgcacgaataaggactgtcggaagcggtactataatcggtttacggggggtctgcgaaaggtattttcgcccgcctgtccctctttactgtggaatcaagtcagctgagcaaggtatctattaacagggctcatggacgcaagaagaagacgaacgactgttccggctggtagagcggtaccagtaccgatgggcgacgattgcacagaagatggagacgaggaatgcagaccgtacgtactcaaacccctgtttagcgaccttgctgatctaggagatgtagaatgttcaaagcgctggcatcactgcctgaacccagagctggagcgcagtccatggacggtggatgaggtatgtttaatatattggctgtattctaaaaatgcgacgagacgggacttaacatgcgacccagaatatgctcctgttatcggctgtcaacacccacggcagcagctggaaagatatcaaaaatgcactttccgacgag

SEQ ID NO: 21539 - DNA, 340 bp, Emericella nidulans
tacggctttcgcgggactaaagattgctttactagacttcaatagcaaagcagagcgcgagaagtttgagcaggagacctttgaatgtgggatctgtcttgagcccaagaaaggtgttaactgccatcgtctcttactgtgctcccatgtcttttgcataccttgcctgcaagacttttataacacttgtatcacagagggagatgttgagggcgtcaagtgcctggcgcctgattgtggtcaagaacaaaatccaccagcggccggccagggtaatattcgcaaaaagcgagatcggacacttagcccgtcggagctactgcagatacctcttgaacaa

SEQ ID NO: 21540 - DNA, 704 bp, Emericella nidulans
actcccatggccgcccactttgagctgcacatcgaacaaggtcctcatctgatcactgcaggccagcagatcggcgtcgtaacagctgtccaagcataccggtggttccgccttaacatcttcggcagggacacgcacacaggcaccactgcatttgagcaccgcgccgacgcgctctatgcgttcgcgcgcatgatggtgcgcgcccgcgaagttgccgcctcgcaaggctgcttggcaagcgtgggcatcattgaagccaaacccggcagcgtaaataccgttcccggcaccgtaagctttagtctcgatctccggggtccgaagaccgaacttgtcgaggtcgttgaagcccagctgcgcaaggattttgacgcaattgctgcagaggaaggaaagggcatcggcaagccttgccgtgtggagtggacgttggacttcgattcgcccgccgtcaacttccaccctgattgcatcgagtgtgtgcagcagtctgcggaggcggtcacggctgatgctggtgttgcggacccgaagtctctcgtcagaacaattatgagtggtgctgggcatgatagcgtgtttacctcaaagagggttccgactagcatgatctttgttccgtgcaaggatgggttgagccatcatcctgaaaagttaagttctgccgatgattgtgccagaggaacctctatcatgctgca

SEQ ID NO: 21541 - DNA, 850 bp, Emericella nidulans
atggcgtctaacagaatccgtcgtattgcaaaggagattgccgatattcgggcagacactcattctcagatcactgcagagccgttgggagacgatgacgatgtcacacacctgcgcggttcttttccagggccgcctggcaccccgtacgaaggcggcacttacaaagtcgacatcaagatacccaccgagtatcctttcagaccaccagtgatgaaattcataacgaaggtctggcatccgaacgttagcagtcaaacgggttagtccgcctttcctgagcctttgatagcttcttctaacgatggtgaccggtgactttagggcgccatctgtctcgatactctatcttccgcctggtctcccatcctcactatcaaagccgccctcctctcgttgcagtctctactcagcacgccagaacccaaagatccccaagatgctgaggtcgcaaccatgcttctacggaatcccaaagagttcgaccgcgtcgcacgggaatgggctgtacagcatgcgggggccccgaggagagctgccggagagggcagcggtggtgcgacgagcgagtccttgcgggagctggagcgaaaggagaaagaagcccgagagaaggaggatctatccaagtacgtcctcatcggtataccagctttcaaggaattactgctaacacctcattagatacgatgggtacaacaagcagctgattgatcggtttgttcacatgggcttcgacgtggacgcggtcgtatcggccttcaactattatggtatagaccgtaacggcggcgaggactacgaactggaggaggcttacatgggtgatgtgacggcgcgacttctaggc

SEQ ID NO: 21542 - DNA, 531 bp, Emericella nidulans
ggaaaaccaactgacggatataccatagggcgtctcaccgagtaccaggtcatcgggcgtcatctgcccaccgaggccaaccccacgcccaagctgtaccgcatgcgcatctttgcgcccaacgctgtcgtggctaagtcgcggttctggtacttcctgacccagctccgcaaggtcaagaaggccaacggtgagatcgtcagcctcaacgtggtatgtttcaacggcgcctatgaaggttgaacagactgttgacatccgtatcagatccacgagaagcgccccctcaaggtcaagaacttcggtatctggctccgctacgactcccgctccggcacccacaacatgtacaaggagttccgtgagatgagcaggaccgaggccgttgaggatctttaccaggacatggctgctcgccaccgtgcccgtttcggctccatccacgtacgtttagactgaatttgttctcgctttgataagcgtccctaacactcagtatacagatcctcaaggttgtcgagatcgagaagg

SEQ ID NO: 21543 - DNA, 850 bp, Emericella nidulans
tcgtacttgactgaatactggaatcagtctggattcggtgagttccgctctgactgattaattaagtaatattcttacctgggtagacttgtgggaagatctttacggacgctcgttctttaccctagcagtcacttatcgtgccctgacagaggcaagtttgtttgctcggagtatagggtcttcgtgtgcagagtgcgagtctcaggcaccacaagtcttgtgcttgttgcaatcgttttggacagggaggtttattcgcagcaacttagataccggaagaaccggaaaggacgctagcaccttgttgggggttattcacacattcagtcctcgctcggaatgtgacgatgtcactttccagccatgctctgcccgggctttggctaatcattacagagtggttgatgcgtttcgcgatctatatgatatcaacgcagaccgtagccaggatcaggctattgccattggtcgctatcctgaagaccagtattttggaggaaatccttggtttctttgcacgatagctgcagctgaacagctctacagtgcgatataccagtggactcatcttggttctataacaatcacagcggtatctcttccattttttcagacattgcacccgactgccgtaccagggacttattcgtcgtcaaccgagatatatcaccaactgattgatgccgttcggacgtacgccgacggtttcatgcgaattgtggtaggtcttctaacagctgaagtttcggatcatggaagataaggctgagcaatgtagcaaacttacgcatctcataatggatcctagtattctatagtgtcacctaaatcgtatgtgtatatcata

SEQ ID NO: 21544 - DNA, 850 bp, Emericella nidulans
aaacccgtaaagcgcatcctcccctccgcaccctttcgcgccgcgccctccaaagacgaagaaattgacccgctgtcgcagccaagcaagccgcccaggatgcaaagcactcaacctgcgtaaccatcttcaccgcgctcggcaaccacataatagccggcacctcaaaaggctggatcaacatcatcgaaacccaaacctgcaccacaatacattccacaaaactatgcgccggtgtgatcatcctcctccgcctcgccagcaatggccgtgacctcctagtcaacagctccgaccgcgtcatccgcacaatcctcatgccggacctctcccaactcggcatcgaccttgaaccaaccaacatcaaactccaagtagagcacaaatttcaagacgtcgtcaaccgcctcagctggaaccatgtcgccttctcatctaccggcgaatttgtcaccgcatccacattcatgaacccagatatctacgtctgggaacgcagccacggctcactcgttaaattcttgaaggcccccgtgaagaacttggcgttgtagaatggcatccaacccgcccattcgtcgtcgcatgcggccttgagtccggctgtatctacacctggtccattgtcacgcctcagaaatggtcggcactcgccccggatttcggcgaggtcgaagaaaatgttatttacgtcgagcgcgaggacgagtttgatattcacccggcagaagagatccaccagcgccgtcttgacgctgaagatgaggagccagatgtcctaaccattgagccctctaaaagcggcgacgatattgagtccttccgtatgcctgtcctgttggatatatct

SEQ ID NO: 21545 - DNA, 703 bp, Emericella nidulans
tccccccgttaatctccttccagggtttccgtgtcgaaatccccgtcaagtcttcccgccagcgtggaatgcgtggttcctaccctgttcgcctgttctacacctccaacatgcccattatgctccagtctgccctgtgctccaacattttccttatcagccagatgctgtactcccgtttctccgacaacatccttgttaagctccttggtgtctgggagccccgtgagggttctgcccagctccacgcttcatctggtgtcgcctactacatgtctcctcctctgaacttccgcgaggctcttcttgaccctatccacacagctgtctacatcactttcatgctcgttgcctgtgccctgttctccaagacctggattgaggtctctggctctgctcctcgtgatgtcgctaagcagctcaaggaccagggtctcgtcatggctggtcaccgtgaacagagcatgtacagggagctcaagcgtatcatccccactgctgccgctttcggcggtgcttgcattggcgctctgtccgtcgcttctgaccttctcggtgctctcggtagtggtactggcattctccttgcagtcacgtaagcatgtcgttcttctctcttcttcaaagtctaacaaaatcgcgcagtattatctatggctacttcgagattgccgctcgtgagggcgatatcggtggaggtctc

SEQ ID NO: 21546 - DNA, 850 bp, Emericella nidulans
  unsure (1)..(850): unsure at all n locations
actacattgccgtatctggcgttttgtcaatgcttgggcgcgctggcgagaaaccatatgcgccaggcaatatccttggagattttgccggtgggggcgccgtctgtttccagggcattctactggcgttactgtcgcgtgcgacaaccggccgaggccaagtcgtcgaagccaacatggttgacgggtccgcgtacctagcggccatgccgcggttgaacatgcagacgccgctatggagtggcccccgaggaacaaatatgcttgatggagggagccctttctacgatacatacgagaccaaggacacaggcaaatacttctcggtcggcgcattggagccgcagttctacgcggccctgatcaagggtctagggtttcaaccggatgaactgccgtcacgcgaagaccgcagtaactggcctgcgctcagggcagccttcacaaagcggtttaaggaaaagactcgtgcggaatgggaggccgtattcgacgggacggatgcgtgtgcgacccctgtgctggaacagtcggaattgcgggaggccggctttgagcagcgcccgatcgtgcacttgtcggatacgccagcccggccgatcgctgcggacgacggcgcatgggcctgggggattcttaagccaggaactgaggggagagagacgctgaagacatgggntgggtgggagcagggtccggaatttgtgtgaggagtgatggggctttgaacaaacgatggcaaatccaggttgaacggatattcaatattagtgatgaacttgcatcgcaggttataagttcagcaaaatgatatgactcagagccttaggggtgtgctacgccaactttg

SEQ ID NO: 21547 - DNA, 459 bp, Emericella nidulans; identical to SEQ ID NO: 12910

SEQ ID NO: 21548 - DNA, 500 bp, Emericella nidulans
ggcatagtttctcggagggcccccccggttgctgaggaacataatagctcgcaagtcatacaccgtctatctagtacgtacgcttcctgccgatccccctcctcttttctccatctctcccagctctctttctctggaaacgccagagacgactcgaaggcacgagtacaccgatagacacaatatgcgtctttctctctcgcggctttcgccgagagacctcaagccatacgcagccgaattcctcgggaccgggttgataattgtcatcggtgacggtgtggtcgcccaggctttgctttccgactaccagtatggcacctggctttctattaacctggcctgggcggcggcagtctgcttgtccggctatctagccactcccagtccggcctgcaatccagctatttctatcatcatggccttgaaaacaaccgcagcctgaccagtggaagaaaattccaggcaagttgcttgctcagttcttgaagacttcgtgg

SEQ ID NO: 21549 - DNA, 315 bp, Emericella nidulans
cgggagaagaagtgcaaaaagtgggcacaagaaacgttagagaccatgtcgcagcggtcgccgacctccctcaaggttgctctgcgccaaatgcgtgtgggccaggcatggggcatccgcgagacgttccagcgtgagtacgagattgctgcacgattcatgcagcaccccgacttcgtcgagggcgtcaaggcacgtctcatgtcgaagccgccccgccaggcgtcgtggcagcctgcaactcttgccgaggtctctgagaaggacgtggatgagtttttcaagatcccgcaaggcaaggagcgtatccaactt

SEQ ID NO: 21550 - DNA, 369 bp, Emericella nidulans; identical to SEQ ID NO: 9083

SEQ ID NO: 21551 - DNA, 384 bp, Emericella nidulans
  unsure (1)..(384): unsure at all n locations
gtaccgtacccagcactgatcttngtcattattaattagggcatctacccggtgacaagtatctcgaaggaggactgnaagacacttcagaatcaaccggtggccaacgacaccaaaacatccgagtctgactctggaactaatgctaaaactaagggtctgcgctcgactagtctgctctatgagacgaggtatgagatgcttgctacaatgtgtggtgggaaggggtatttcgtaaagagccaggaagagctggagagagccacgaaagagggcttcgtgagtgataccgttacaatagtgaatgtcattgttgagcccgggattgggaaggagattggttttgcgtggcagaatcagggcaaagaaagcaagccaaagctg

SEQ ID NO: 21552 - DNA, 850 bp, Emericella nidulans
gcacttgggcaagttggtgccgaatggcatgacctccaattcggttctggttcactcaaaattagcgtgtcttttgttgagagcaagcaccgtagcctaaaattggaggactttgatttgctcaaagtggttggcaagggcagcttcggaaaggtcatgcaggttatgtgcgtactcatcaaaatcttcctgctcattgatttgtcgtcaagttacacattcacaggaaaaaggacacggcccgcatctatgctctcaagaccattcgtaaagcacacatcatttcacggtcgcaagtcacgcacactctcgcagaaagatccgtacttgcgcagattagcaatcctttcatcgtgcctctcaagttctccttccagtcacctgagaagttgtactttgttttggcctttgtgaatggtggagagctgttccatcaccttcaacgagaacagcgattcgacgttaaccgtgctcgtttttatactgccgagctgctctgcgctctcgagtgcttgcatggcttcaaggtcatctaccgcgacctgaaacccgagaacatccttcttgactatactggacatatcgctttgtgcgacttcggactgtgcaaactcgacatgaaagatgaggatcggacaaacagtaggacattcagcgtcccctttgcgttctaagtagctaatgaggtacagcattctgcggtactccggagtaccttgcaccagagctcctcctcggtcaaggttacaccaagactgtcgactggtggactctgggcgtacttctctatgagatgttgacgggccttccaccgttttatgatgaaacacaaatgatatgtaccgaaaga

SEQ ID NO: 21553 - DNA, 850 bp, Emericella nidulans
agatttcgaaaaggtacaaacaaggacccagtacggctattgtgaaatgttgctaacgatcgcctttgtcgtttaggccatcgctgagcttcaggttaaattgggagaagatgcgattagcacggatgaagacgacctacaacgacatggcttctcggagtggtcaagcgtcaatgcgcagcgcttaccggtcgccattgcctacccatccagtacagaggacgtttcggagattgcaaaaatctgcaacaaatacaagatgccaatggttccgtactccggtggttccagtctggaagcaaacttttcagctgcctatggcggcttgacgattgactttgcatacatgaacaaaattctggacctacatgaagcagacatggacgttgtggtacaaccgtctatccagtggatggatctcaacgagaaaatcaaagacactgggctcttctttccggtcgatccaggtccatctgccatgattggcggtatgattggcacaaactgcagcggtacaaatgctgtgcggtacgggactatcaaggattgggtgatcaacctcacagccgtactagcggatggcactgctatgaagactcgaagacgtactcgtaaaacgccagtgggatacaaccctactggcttggttggaggggtaaaaaggaacattcggtttggcacccaagcttcccttaaggttgcccctaattccgacggaaaacgggttggcagtggtttccttccttacaatgcgcgatgatgcatccaccggaaccacttgaaagggaaagggcttcctgcccggggaatggaaatttggacaattccaagggatgttataacacagcgg

SEQ ID NO: 21554 - DNA, 331 bp, Emericella nidulans; identical to SEQ ID NO: 7019

SEQ ID NO: 21555 - DNA, 500 bp, Emericella nidulans
ggtatgaggcaggaggaagtctgtgagagtgccaagagacatgatagaagaggcgagataggcgagtgagggatcaaaggagtgccgtgagatcgccggaggcaacagccagcggcaagaatatgttgccattgcggcggaatatacgagattggtaggatggccacgatggcagaagcttatgatgtagcattggccccccattgtccgttaggccctagtgccctcgcggcaagtcttcaggtcgatactgttagtgccaactttgctatccaggaaatgagcttgggcatccgctataatgctggatcagcggatattgacacgtatatcaagaatccggaggtttgtaaggtgcagggcgaattgatcgaccttctaaaaagaccaggcctgggtattgagattgacgaagagataatcagggcagctactgtggacgctgtcgcatggcgcaaccgcacttctgggacctgagagaactaaggggggatgaattt

SEQ ID NO: 21556 - DNA, 697 bp, Emericella nidulans
gccgggtcgtattcgaacccgttaaagaaattcaagtgcgttaacttggcaaggctggttgtgtttgactttatgctgactcgaactaggctcgtcttcctcggcgaacaaagcggtgcgcatacactcagtttgcattcacaaacaggcgcacgatttctaatgctatattacagtgggaaagacgtctttgatcaccagattcatgtatgattcgttcgacaacacataccaggccacaattggaattgacttcttgtcgaaggttagtagaactcgctctgcttaaggacaattagctggctcatccagagcattatggcgattgcgctccatggaaatgctaacatctggtgttgtagacgatgtatcttgaagaccgcacagttcgactccaactttgggacaccgccgggcaggagcggttccggtccctgatcccttcctacatccgtgactccagcgtagcagtggttgtctacgatatctcaaatgcgaaatccttccaaaacactcggaaatggatcgaccatgtgcgcggtgagcgtggaaacgatgttattatcgtacttgttggcaacaagaccgacctgagccataagcgagaagttaccacagcccagggtgaagaagaggccaagaagaaaggactgatgtttatcgaaactagtacgaaggattggccataatgtcaagc

SEQ ID NO: 21557 - DNA, 543 bp, Emericella nidulans
tttgtggacattggtggcaatactggccatcaggctgctgaggtgctgtcccagcatccagagcttgccggccgagtgactgttcaggaccgtggtgaagtcatcaaaagcgcacccgagatgaaaggcattcagtggatggagcacgacttctttgatgttcagcctgtgaaaggtaagctttatcggatgagaaatcaagcatgattcaatcttactaagacttgtcttgcaggggccaaatattactatctgcgagccattctccacaactgggatgatgaccacgccgtgcagatcctggccaacattgtgcctgccatgtctgccgactcgctggtggcgattgatgaagtggtcgtgccggatcgagacgcccacttgtggccggccgggctcgatctccaaatgtacactatctttggaaccagggagcgcacagcagcacagtgggatgcgatcctcgacagagccggactgcgtgctgtggcagtcaagaggtatgcgcctgtcatgcaaagctcggtcatttttgcggctgcc

SEQ ID NO: 21558 - DNA, 850 bp, Emericella nidulans
cattgggagtcatttttttcgagatgtgccatccattgccaacgcttatggaacgcgatcaaacattacgagctatcagggaaagacatcatgtgctgcccagcaccttccaggattccgagaaagtagttcagggggagatcatcaagtcgcttctaagtcatgatccagccgaacgaccatctgcgtcagaattgctccatagcggtcagattccacttcaggtcgaggaggagactttcagacgcgcaatcatgcatctgctctctgatcctagctctcccgactacaagaagatcctctccgctatattttctcaatctccaaaaaaggtcgaggatattgcctgggacatgcattcacgtgccccaccggcagcgaacgagcttctcatgcacggtcttgtcaaagaaaggcttacatcgatcttccgcaagcacggtgccgtggagactacaagacagatgctgtttccgaaatcccaacattacaacagcggcgacgtaaggcttctggacgcatctggtaatatgcttcaattacccttcgatctaacgctcccgaacgcacgtgcaattccccggcaagacccttcactcgaaaagacctttgcttttggtactgtctacagggatacacctcacggtggtgaaccaagaactcataaagaagtggatttcgacattgtgtctcgcaataccttagacctggccttaaaggaagcagaggtgattaaagttcttgacgagatcattgaagaatttccaccattgaaggccagcgctatgtgtttcctgataaaccattcggacttgcttcagctagttatggagttttgccgcatcaaacc

SEQ ID NO: 21559 - DNA, 850 bp, Emericella nidulans
cctcactgccaccaaatcaaccttcacctgggataacctggaactgtttgtccgtgttggaaaggaaaatcgcaagctattggacggtgttagtggatattgcaaaccggggaccctgactgctttggtcggagcttctggagcgggcaaatcgacttgtgagtgaacctggtctgtgtttttgctcatcccaggattgtgtcctgacattcttagtgttgactgcgcttacccagaggcaaagctctggcgaccttacaggtacgatgtatgtagacggaagacctatcgactcttctttcaaatctagaattggctactgtgaacagatggacattcatgacgaaagcagcaccattcgcgaagcattcgagttctctgcactgcttcgtcaagactccactgtacctgatcaggagaagttggcttatgcaagaacggtgctagagacgttagacttggtggaattgcagaacgccattatcggctctttggacatcgaaaagaagaaaagggtcaccatcggcgttgaactttgtgcaagacctgagctgctactattcctggacgagcccactagtggcctagacagccaggctgcgtctagtatttgtgccctactaagacgactcgccgaccagggtctggcaatcctttgcacaatacaccaagcaaaccaggagcagttcgagatgtttgatcgagtgctggctctgagtcccggtggcaagacctattattttggcgaagttggagaggcagggcactctatcttcgactactttgcgaaatacgggcagaagcctgaaaatattaccaacgctgcggactacattattgaagttgttgt

SEQ ID NO: 21560 - DNA, 815 bp, Emericella nidulans
ccccgtaagcccggcatgacccgtgacggtaaggaggatgactgtgaaaatctacgaataggcactgatcttttgatgacagacctcttcaacaccaacgcttccatcgttcgcgaccttgctaaggccgctgccaaggcttcccccgaggctaacatcctcgtcatttctaaccctgtatgcgtcatcggaactcggagacatggaactcgtgctgattcttccaggtcaactccaccgtccccatcgtctctgaggtcttcaaggccgctggcgtctacaaccccaagcgcctctttggtgtcaccacccttgatgtcgtccgtgcttcccgcttcatctctcaggtccagggtaccgacccctctaaggaggccgttcccgttgtcggtggacactctggcgtgaccatcgttcccctgctttcccagtccaaccaccccaacattgatggcaagacccgcgatgagcttgtccaccgcatccagtttggtggtgacgaggttgtcaaggctaaggacggtgctggctccgccactctctccatggccatggccggtgctcgcttcgccgagtctctcctccgcgctgcccagggcgagaagggtgtcgttgagcccactttcgtcgagagccctctctacaaggaccagggcgtcaacttcttcgcttccaaggttgagcttggccccaacggtgctgagaagatcaaccccgttggcgaggttaacgaattcgagcagaagctccttgaggcctgcctcgttgacctgaagaagaacatccagaagggtattgacttcgtcaaggccaac

SEQ ID NO: 21561 - DNA, 562 bp, Emericella nidulans
ccacccaagactacgataccagcgacgatgaagctaagtcccggttctcttgaaaaccatgaccttgtgaaacgcgcattcgccggcgatgaggtcgttcaagagttcgagcaggagaaacttgacactatcgaggacgagggcgacaaggtcatcgacgagacactccctggctggggcagctggactggagacggcattagcaggaaggaaaggaagcggcagaagcgcgttttgacaaaggttgagggagtgaagcccgaaaatcggaaggatgcgaaactttctcgtgttatcatcaacgaaaagcgtattaagaaggtaaaggcttttatcgatttcgcacccatcgacgtgaatactaatatctggcttcctgcagaacaacaagtaccttgcgacgcaactgcctcacccgttcgagtcgaagcagcagtacgagaggtcgcttcgtgtcccgattggtcccgagtggtctacaaaggagactttccagtcttctaccaagccccgtgttatgatcaaacagggcgtcatcaagccgatggagaagccgatggtt

SEQ ID NO: 21562 - DNA, 850 bp, Emericella nidulans
tggcatcctgtggcttgaggaggatgactctgacctcaatgactacggcaccgacgggggcgatggcacagatatgcaggctcggctgtggaagcgcgagagtgccatgttccctggcacggccgggccaaagtcgagacgattctcgctctggacgctggtcaagttcatcgccagcttcaacaagaaagagaagtacattatgggtttagggctgacgctctcgctcttcgctggaggcgtgcagccggcacagtcggtcctgctggcaaaggccgtcaacgccatctcgactcctgtcagccagccggagaagctgcgacatgatacaaacttctgggcctctatgttcctcatgacaggtctggtgactatatttctgtttggcacccagggcacgctgttcgcgttcagcgccgagaagctcatccgaagagcccgaagcagcacattccgcgtcctgctgggccaagatattactttcttcgatgaagaggataacaccgccggcactttgacgtccatgctggcgaccgagatcaaaaacctcgccgggatcagcggcgcaacgctggggaccctgctcatcgtgaccgtcaacctgtttggctccctgatcgtcgcctacgccctgggctggaagctagccctcgtctgctcatcggccgtcccattactcctgctctcagggttcctgcgcacctggatcctcagccgattccaggcgcgcggccgcactgtctaccaaaagtctgccagcgacgtcagcgaacgcgtcacggccatccgcaccgtcgtctccctgacgatggagcaggtcatctcaacgcgtataagaccagacagcaag

SEQ ID NO: 21563 - DNA, 850 bp, Emericella nidulans
ggtgaagcaggtatgccatcaacaggggcttgtgtcccagattgaagaaggatagcgctgatctctgtcacttgcagttcggcttcggtcagtcgaacccgacgtaccaactcattgccgccgatgggcagaaattcgtcatgcgcaagaagccgccaggaaagcttctgtccaagacggcgcataaagtggaacgggaatacaagatcattcatgcactggagcagacggacgtacccgttcccaaggcgtactgtctctgcgaggacagcagtgtaattgggaccgccttctacatcatggagttcctggatgggcggatattcacagacccgactttcccagatgtcacagcggaggaacgaactgaattgtacgggaaagtggcccgcataggtattcgcagctaactcatcgcagatggaaagacgccgttcgcacccttgccaaattccaccgcgtcgtccccaaatccgtgggactcgagacctttggcaaaccaagcggcttctatgaccgccagattgccacattcacgactgtctccaaggcacaggcgcaacgtgcgacgtcgaaaccaaagaaccggtcggggatcttccgcacttcatggaaatggtgcgcttcttccaggacaaatccgcgcacgccaaagaccgcggcaccctcgtccacggtgactacaagatcgacaacctcgttttccacaagaccgagccacgcgtcatcggaattctggattgggaaatggcaaccgtcggccacccgctctcggacttttgtaaccttaccagcccttacttcttagagggcacggagtataagttggaacacttcaggccgggcgctg

SEQ ID NO: 21564 - DNA, 850 bp, Emericella nidulans
aacgccctccggcttcgtgagccgccttcgcaaatacctcaaatcccgccgcatcacttcagtaacccaaatcggcactgaccgcatcatcgacttcagcttcagcgatggcatgtatcacatgttgctcgagttcttcgcaagcgggaacatcattatcaccgaccgagactacacaattatcgcgcttcttcgtcaggtaccaggtggtgagggaatggaggaagcaaaggtcggtttgaagtacaccgtgacgaacaagcagaactacagcggcattccgccgatcacgcgagaccgaattcgagagacgctggagaaagcgaaggctcttttcgcgcaggaaaacgacgcgcccaagaagtcgaagaaaaagagtacagacgttctgcgtagggctctatcccagggattcccagaatacccaccgctcctactggatcatgcctttgcaactcgagccgctgaccccgcaatgccgctcgatcaggtcctgggcgatgcgggtcttattgatgtggtcttaggtgttctagaggaggcacagaacgtaaccaaggatttgtctgcggataaagcacatcctgggtttattgttgcgaaggaagatacacgtccaaagccgccaggaccggagtctgaaaaaaacgactcgccctcgaagcctgctctactctacgaagatttccatccattcaagccgcgacagtttgaaggaaaggacggtttcaccattttggaatacccttctatgaatgcgacggtcgacgaatattactcatccatcgagtcccagaaactagaatcacgattgacggaacgggagagtcgctccaagagagagcctgag

SEQ ID NO: 21565 - DNA, 850 bp, Emericella nidulans
cacgttcacgttcaacatcccactttatttcatgaccaatcttcgtcgcgaacccggcgcgttcttcatcttcctgctattctcattcgtgacgactttgacgatgtcgatgctgtttcgtacaatggctgctacttcccgtaccttgtcacaggcacttgtcccggctgccatccttattctcggccttgttatctataccggtttcactattcctaccaggaacatgctgggctggtcgcgctggatgaattatatcgaccccattgcctatggattcgaaagcttgatggtgaatgaattccacggccgcttattcccctgctctgagagtgaactcgttcccagctatggtgatactgccaaccgagtgtgtgctgttgtgggtgcaactcctggtgaactgatggttaacggtactacctacctccgcgaaagttatcagtacaccaagagccatgagtggcgaaatctgggtatcatgtttgcgttcatggctttcttcctgttcacctacttgaccgcgactgagtacatctccgaggccaagtccaagggtgaggtgttgcttttccgccgcggccaggctcctcccagcgtcaacgatgtcgagacccacagcccagcaacagcaggtgaaaaggttgatcagtcgactcaagatgttgccaatatccagagacagacagctattttccactggaaggacgtttgctacgatatcaagatcaaaaacgaacccaggcgcattctggaccatgttgatggatgggttaaacccggtacttgcactgctttaatggaatgtttggtttccttcatcggggctattgctaatttgatagggagt

SEQ ID NO: 21566 - DNA, 754 bp, Emericella nidulans
cttgccctcctccctaacattcaccctcaccccaccacctcagagcacaccgaaccgaccgacacccaatattgttctcctccttcatgggctcggcgatacgcacacgccattcacaaacctcgcatctcaactttccccttccgagacaacagtactgacaattcgcgcgccgagttcactcccctttgatctgcccgggttccactggggcgacgacattaattttgactcacgcagtgggggcgttggacatggattgcggtatttgaaaagtctaccaagctactcttgaatacagggaacagagatgttcttgtcaagcaagtgcgggaatagacaacaggaaattctaatttgggggtttggacaggggggtatggttggacatgagcttgctcagacactgaacgagcagtccgaatctggttttgagcgaggggaactgggcggaatcatttcagtaggggctccatatcccctctcactgaccggaaaggtccagaatgatgggacggggaaaagccggacgcctatcctgctggttcacggacgggactcggaagtcgtgacggagtctgcggtgaaaaggacaaaggacgtctacagtttcgtggaggttcatgaatataggaggcgcggggatacgatgccgcggagccgggaggagatgataccaataatgcggtttctgggaaggaggttgcgcagttggcagggtgttccagagggggcagtggagctttcctgattt

SEQ ID NO: 21567 - DNA, 850 bp, Emericella nidulans
ttggtgaagagtacggccatgtgaaagtgcagcttggaaagacaaggtttgttttccatcgcccgtatgttagcactgctaactttctcagccttgtcgttaggatctccgccgaagttgctaagccccacgatgatcggccgtttgacggcatcttcaatattgccatggagcttactgcgatgggctcgccccgctgggagaacggccggtatggatgccgatatgtgtatatggatggagctaatgctttcgcaatagacaaggagatttagaaacctacgttacgaacgtgttagatcgtgttattcgccattcgaacgccttagatccgagtcactctgcatccctgaaggcgtcagctgctggacgatacgcgctgatgtacacataacggactacgaccgcaatctgatcgatgcatcgtgaaaggcgtcatggctggactccaacatctctgtcgtcccgacgctgtggtcaagaacggccaagtgatcgtttccggactggatgaaagagttcccgcgcccctgaacatcgctcataagcccctttcggttacgtttcatacattcgacgacggaaagcttgctattctggatgcgacgcggaaagaagagcaggcttcgaaagcggacgttgtgattgggatgaacaatgccggagatgtctgctacctgtctaaattccagggctccccggtggatgccctggtgtttatcacaaagacctcgctcgcacttgagaaggtcaagtacatcaacggcattattgacaaagctctgcaggctgatcttgcgaaacggtctaagggtgggctcgcggagcaagccagagcagagaacgatcg

SEQ ID NO: 21568 - DNA, 850 bp, Emericella nidulans
acaattgcccatgtacatggttcccgcggtttggctctttgttgagaatatgccatttctcccttctcggaaactggaccgtaagggcgttctccagtggctagctcgactagatagagatccctaccggacagggtcaacaacaatagtggcttccttccaggataagcctctgagtgatgcagagctccagattgcccaggtttggagtcggctgctcaatatccccgtcgaggagattccaccggatgaaagtttcctgagacttggtggcgattcgattgcagctatgacttgcatgaaccagtgcaaaaagcatgggctcacaatgaccgtgcaggatatccttcgcagctcctccattggggacctcgcctctcgcaccaaaacaacctcaacccccgcccccgtgagctatgacgaaagagtcgaagagccttttgacctttcgcccattcaggctcttcacttccaggtccgtcaagagggccaagggcacttcaaccagagtatcctgaccaaaatcaaccgacgtatcgatgccacaaccctccgtcaagcggtagagacactggtattgaggcattctatgctgagagctcgtttcgaagtaatcggccctggatctgtgattcgacagcgtataacaaacgaggttacaacttcttaccgttgggcggaatatgaagtcgattcggagagtgcaatagacgagttcgtcgcggcgagtcaatcgtcgctctcttgcttcacgggaccccttctcgcggttgacctttttgatgtatctgggaacgcacaactcctatccatgatcggccaccatttagtcgttgatattgtctcctgg

SEQ ID NO: 21569 - DNA, 850 bp, Emericella nidulans
aaggcgccttcctggagcatttagagctgctgaaaaaggcagcggcctcgctgggctcgcaacaatctttgccgcagtgggaatttcttgagatccggaccccgcaagaactcaagagatgcgatgcgctcgtcctgcctgggggtgaaagtacagcaattttcattggtggcagctccggcttatttacttgagcctttgagagattttgtgaagtcagttgtttttaaaaatggtgattctgagtgtgcaacgactggcttatatttttctttccccctggggtccaccgcaaaccaacatggggaacctgcgccgggttaatattgctcgcggaatcggcgaaccggactaaaaaaggtggccaggagttgatcggaggattagatgttcgagttaatcgcaaccactttggccggcaaacggaaagctttcaggcgccgcttgatctgccgttcctcagcacatccggtacaccccagcagccctttccggcagtcttcattcgtgcgccggtagttgagaaaatcttgccgcatcacgacggtattcaggtggacgaagctaagagagtcgagaccgttgttgctccttcgcgacaagccgagagcgaagcgtcccggagggcaatgtcacgcgacgttgaagtattggctagtcttcccgggaggctgcgcatttagctgtcagtggaacacctattcgtgcggatgaggaaactggtgatattgttgccgtgagacaaggcaacgtctttggtacaagcttccaccctgagttgactggtgacgaaagaatccatgcctggtggctgcgccaagtggaagattctgtaaaacgattgcaatga

SEQ ID NO: 21570 - DNA, 850 bp, Emericella nidulans
agggttgggcgcagccatgcgatcggcacgtgctaaggcgacgaagaactttgagactgaagcgagccggtaccacaaaggtgtctatcagcggaagcgggcggagcttgagggaaaggttgatacccgtttgaaggcccttttccagggtcaacttaacgccgcgcacaagtccggcatcaatgatttcagtgacgcagtcactgctgaagtgaaagcgggacagaaaaagggcacaggctatgactttgccgagatagtcaacgatgaggtgaagaaagctcttcagaaatatgaagaagtcgcccgtgccactgtggtagagggcgcaccctggagtaattatcagcaagaattggcattgtacgaaaaagagctttcagaggtcagcgcccgcctgagaagggatgagatgagacggttagcgacccgtgttgagcgatgggttcaatctcgcttaggtgaatctgttggcttggagtttaacgctctgggttctggacgtgccggtggcgctgcgcccgaatcgggcgagaagccgtctgaaaagaagttctgggatcgtgtgtggaacctctttgttgagacagtccttgacgccgagagaagatttacagaccgcgcaagcagctttgatgccagcttggaggaagtggatgttgggctatggaggctgcgaaggaagtcttggggtgtcctgcgcgccaagattgaagaggaaatgactgagggaaacttgttactcaaactgcgggagaactttgaagacaaattccgctacgatgaagccggcgttccgaggatttggcggccgactgatgacattgagggcatctatactcgagctcgc

SEQ ID NO: 21571 - DNA, 651 bp, Emericella nidulans
agatcatcgccacagctcaagttctacctaaacgggactcccatctcactaaccagcccacatcctcgctggacactgctcgactttatcagatcgcaggacggtctcaagggaacgaagctggggtgcggtgagggcggctgcggtgcctgtacggtcgtccttcagacgagacagcatggaaagaagattcgccaccttgctgtgaatgcttgtttatatccattaataggaggtattgcctgctctacatgaccgagaatcaaagtacagtggatactgatatgtacagtatctggaaagcatgttatcacaatcgagggcttgggcaccgttgaccacccccatccgctccaagaacggatcgcccaactccacggctcacaatgtggtttctgtaccccgggtatagtcatgtcattatatgctatgatccgaaatgcgtacgaccctgtgacggggaagttccagctatccgcggatgatatcgagagtaaggggcatctagatgggaacctttgccggtgcacgggctacaaacccatcctcaatgcagcgaggacatttatcgaagatgatctgggatctgtgccgagcattgtcgagtcagagttggtaggcacggaggaagagacggagagtgatatgggc

SEQ ID NO: 21572 - DNA, 575 bp, Emericella nidulans
atccaaaaactgaaaacaatccttacttgggattcatatatacttcttttcaagaaagagctacattcatctcccatggaaacactgctagactggcaaaggatcttggagacttgacacttgggaagatttgtggcaccattgctgctgatgagaggcgccatgaacacgcctacaccaagattgtagagaagctctttgaaattgatcctgataccacagtcgtgggctttgctgacatgatgaggaaaaagatctcgatgcctgctcatttgatgtatgatggtcgtgatgataatctatttgatcacttctcgtccgtggcccagaggcttggtgtctacactgccaaggactatgctgatatactgcaacatcttgtggaaagctggaatgtggagaagttgtcagacctttctagtgaaggaaacagggcccaggtaacaacattagaaccatgaaaccgtttttgttttcttgtttttgacttgacatgaaacatccaacttctattaagtttgtttactttgttaaaaaacctcaccttgcattaaggaacttacagaacggggatc

SEQ ID NO: 21573 - DNA, 850 bp, Emericella nidulans
tcgaaaggcatcggcagagcgacagcgcagcgcctggctagcgaaggcgccagcctggttatcaactacaacaccgacgccgcctctgcccaggcgctcgtggacgaaatcggccaggaccgcgctctcgcggtgcaggcagatgcctcgaaactggcagacattgatcgcctggtggacgcggccgtggccaagttcggcaagatcgacatcctcatccccaatgccggtatcctgcctatgcgcgatctggagcacaccaccgaggaggactttgactttacctataatctgatggtcaagggaccatactttctcgcccaggtgggttcatgatttgcttattcttgttcattccaatcttgttctattttatgctgcttttgttctatttttactcctttcattgtggtccacgagttggttgtattctttatgttatttggatatcctggctcgtgtctaacaggcacagaaagcagcaaaacacatccccgctggtggacgcatcatcctcgtctcgaccggtgtgaccgtgctctccaacattgccccagcatatctcctctacgcctccgccaaagcagccgtcgagcagatggcccgcgtgatggccaaggacctcgcacgcaatgggatcctcgtcaattgcgtcgcaccaggccctacgactacagggctcttcctgaacggcaagtcagaccagatgctcaagatggtcgcgggattcagcccgttcaaccgcatcggtgagccggaagagattgcaaatgcggtatacttcctctgtagtaaagacagcagctgggtttcgggacagaccctcagggtcaacgggggaatggcatag

SEQ ID NO: 21574 - DNA, 822 bp, Emericella nidulans
atcctctggcctttagtgggcttctgtctctacgttgccatcattacaacatggtataccctcttcagtcctctccgtgtcatcccaggcccaaagtcatggaccttcttccccattttacggcacatctccgccatcctcggccgctttgacaccgatatgcgccgcttccacgcccaatacggcccggtcgtacgctttggtccgagagaagtctcgtttataactgctgacgcctggaaaaccatctatggtcatggacacacccagctgccgaaatatatgcactctgctgcagacccgcagtccatcatctctacaaacgacactgaccactcacgctaccgcagggctctatcgcatgcattctcggccagaggactgcaggagcaggagcccctgatccagagctatgtcgataagctgattgtacgtctgaaaggcgttgcggaatcgggtcgtccggaagacatggtcaagtggtttaatctcaccacttttgatatcatcggtgacttggcctttggagagccatttggtggtctcgatagcgcagagtatcaccactgggtatcgacgattttccaatctatcaaggtgaatccgtttatactactcaaagacaattaccctatgctcggctggctcctgcttcgcgcctttgtaccagagaccctcaggcaggcgaaaaagagacaaatcgagcactcgcgggttactgtgcagaagaggctctcctcagatatccacacccggcctgactttatggactcgatgctccgcagtcgccactatacttacaaccagaacgactggaaaaag

SEQ ID NO: 21575 - DNA, 807 bp, Emericella nidulans; identical to SEQ ID NO: 10578
  unsure (1)..(807): unsure at all n locations

SEQ ID NO: 21576 - DNA, 716 bp, Emericella nidulans
ataccgaacatggcccatgaagccagaaagctgtgtttcgttactgttggagctacagcgtccttccatctccttttgaaggccatcttggatcctatctttctagtgactttgaatcagcacgggtataccgatcttcttattcagtatggcaaggacggacagcagctctttgacgactttgtcgcaaactatccacctggcgaccccagacgtcatggtatcatcgtgcaaggattcgacttcaaccaagcaggcttggacaatgagatgcgtctagcgaaggccaatgcctcagagaaccgaagcagtggactggtcattagccatgcaggtaatacctacctcatctttttctcactctagtagctgacagctgccgaaggttccggcagtattctagcagcattgagacttggtgtcccgctggtcgtggtgcctaatccgactcttcaggataaccaccaggaagagcttgccgaggtacttcaggacgaaggctacgcgatatggagtgactacaggtatgatattcctgctccaggccctttcctgataattactgatttactggaagagaaatgcccactgctctcgagcgagctgaggctctgcggactaagatgctaacttggccgccagttcatggtatgcacgagggacagccacgagacttggaaggcgtagtttcagaagaaatgggctacttggattaa

SEQ ID NO: 21577 - DNA, 676 bp, Emericella nidulans
ttcgcagcggggccgtctttatttacgaggagaattcatccgggatcaagcgatggacggacggcgtaacgtggagccccagccgcattctgggtaacttcctcgtctaccgcgagctggagaagccgtttcccccgggtgaaaagaaacgggcgatgaagaaaaccacccggcgccccctcacgtcagggaggcccggggaaccgtacgcgcgacaggatagcaacgggggcagctactctccgtcaccaacagccagtggttatggagcagagaggacgcatcagtcggaaatcgagagggcgctggtcggctcgctggtggattcgtatggtttcaaggagatggggttggtgaagaagacgatgagcgttaccgtttctggcgtgacacatcaccttgtttcttactatagcgtggaggacgtgacgcgaggagtgctggcgccgccgtcagcggtcgaggcgctcaaatatgtccggccccgtccagagctgacgcagaagcaaagcttccgcgccccaattgacgagctggaacatgtgggaatggaggttacgagtgatccatcccatccgttcttcccttatcgctcgcagatggtgccgactccgccgtactcaataccggctcctcaacaggatttctatatgcagcagcaccactacgcaccggt

SEQ ID NO: 21578 - DNA, 850 bp, Emericella nidulans
agtaagcgtatgggtatcattgttgagtttgacaaggacaaggatgtcctcaattcccccgcagaggaggagatctggttctaccaaaagggagcggacactgttatgacctctattgttgcggctaacgactggcttgatgaggaaacagcgaacatggctcgcgagggcttgcggacgctcgtggttggacgaaaacggctttcgccgctgcagtatcaggagtttgccagcaagtataagcaggcatctctttcgcttcaagggagagatatcggcatgcagaaagtggttaatgagtatcttgagcatgacttggagcttcttggtgtcactggcgtggaagatcgtctccagagggatgtgaaaccgtcgcttgagcttttgcgcaacgctggtgtcaagatctggatgcttactggtgacaaggttgagaccgcacgatgtgttgcgatttctgcgaagctggtagctcgcggtcagtatattcatactgttgccaaagttaaagacaaatcggccgcacaggaagcattggacttcctgcgaaacaagactgattgctgtctcctgattgatggcgagtctctggctctcatgctcaatcagttccgatcagcatttatttcggtcgctgttctcctccctgctgtgattgcatgccggtgctccccaacacaaaaggctgaagtggccgatctgatacgtcttcataccaagaagcgtccctgttgtattgagaacgcccgccccgatgtgtccatgatccaagcggcaaataaaggaattggtattgttggaaaggaaggccgtcaggcctccctcccagctgatttcagaatcactcagt

SEQ ID NO: 21579 - DNA, 850 bp, Emericella nidulans
ggtcaagtggtctgccaaacggggtcgccaactgcagatctgtgtgtaaaaggagtctggaaccattttagcccctgtggttaacgacatatgttctcggttcgcaagtaagtcacacggacacatttttttgccttgccggacccatcacgggcagggttcccagcttgtgggcacccactagccctgaccgtccaaacgccaccctcaaagtttcggtgacgttagcccgacccccagaaaattagaatgggacatgttgcctgagcttagcattgctatccggtttgccgaatcgcatctcgcagatcttcttcagcagcatgaattccaagtgcttgatttcaagggattcggaaagaactttattacctcaatgggattctcaccggacgcattcgtccagatggcgttccagtcggcttactacgggctttacggacaagtggtaaatacctatgaaccagcaatgaccaaggctttcctgcatggacggaccgaagccattcgatctgtcaccaatgaagccctcgacttcgtgaagacattttgggctgaaaaccctgctgaggataaggtgaatgcccttcgaaaggctactgagaagcactcggcaatcacgaaggaatgctccaagggacaaggacaggaccgccacctctatgctctttacaccctgtggcagcgacaattcgacgaagcccctagctcccggaacaacagcgtcgatgaagcgtcgaacgggtacacgagtcctgctgagatcgactccatcgctgggtctcctctatccccgtcctctgtatctgaggtggatgggttgtcatccactggcagctatggccgggct

SEQ ID NO: 21580 - DNA, 398 bp, Emericella nidulans
tgggcatccattcggatacttcgagatatactgggttaaagaagaccctttaggatcattgattgggggaactgataattacgaccgaggcattcatgttcttgttggcgagcaaaagtaccgcggtccgcaccgggtttcggcatggctgacatcgctggtccatttctgttggttggcagatatgcggactcagactgtgatgttggagccaagagtagacaataagaagtgcgttaccatgccagcttcattgccgcaaaatgctaatcaaacgcaggatgatcagctatctcgagagcgcagggttctacaaagacggcgaggttacattccctcataagcagtcggcgctgatgaaaatccggcgtgatacgtgggaggctccttctatctaa

SEQ ID NO: 21581 - DNA, 525 bp, Emericella nidulans
atgttcataacgacgtcatgcttgcttttggtactcccgaaaaacaaatcttgatcgaacctatatttgcccaatggatacaatctgctcatgggaaaacttcatatggatttgatgtacttttatcttcgacaagtggcccagcatttaatgcgggtcgcagcatatggttgcctggctggttaaatgctattaatgagaatagtaattcattattcttaacaataggtcctggagatttcttggttcatcatgctattgctttaggtttacatacaactacattgatcttagtaaaaggtgctttagatgcacgtggttccaagttaatgccagataaaaaggatttcgggtatagttttccttgcgatggtccgggacgaggtggtacttgtgatatttcggcttgggacgcattttatttggcagttttctggatgttaaatactattggatgggttactttttattggcattggaaacacatcacattatggcaggggatcctgatcctctagactgcag

SEQ ID NO: 21582 - DNA, 667 bp, Emericella nidulans
tctccctgtctctttcaacgagccgacatcacttctccagcgcgtggccgaagatctggagtatacggatcttctcgacgttgctgccgatcggactgactcgatggagcgattggtgtatgtcgccgcgtatgcagcaagtgaatacgcttctacaatcggacgtgtcgccaaaccattcaaccccctattaggtgaaacttttgaatatgttaggccagataagggctatcggttcttcgttgagcaagttagccaccatccaccgattggggtagccttggctgaatcgccaaagtgggactactgggtatgttccgactgccatatatcagtttaaggatatgtcgttagctaaccgtggtagggggaatcatctctcaagtccaaattctacggcaagtctttcgacatcaatctcctgggaacgtggtttttgaagcttcgtcctgtatcaggaggcgaagagctctacacttggaagaaggttacgtcctcagttattggcatcatcactggcaatcctactgttgataattatggtctgatggagattaaaaactggaccactggtgagatatgctatttggatttcaagcctagaggctggagagcgtcctcagcatatcaggtgacccccgaggttgttctaaatcgcctcctgttt

SEQ ID NO: 21583 - DNA, 850 bp, Emericella nidulans
ccgtggttagagccttttcgggaggctatcaagcgccgattcgattatgttgagagctggatcaagaccgttgatgaggtggagggaggtctcgataagttcagcaaggtgagtagactatcaactatccagttgtgttccccattttctctataacttgtgtgcaacggctaattggagagcttcttccatggggacgatagggctatgagacattcggcttcaatgtcagcgagacgggcgacatcacctacagggaatgggctccaaacgccatagaagcggcgctggttgggtgacttcagtacgtctgtctggcacctggggtgggtaaaatcgccagttaaagcacgttactaagactggcagacaattgggataccaaggcgaatccaatgacgagagacaacttcggtgtttgggagattgcccttcctgcgaagaatggcacgccggtcataccgcatgatagtaaggttaaggtatgtttacggcatgcagcttcaccaccgtgggggttctaatgctgacttcctacagataactatggtcacccgcagcggagaacgtatatatcgtattcccgcatggatcaagcgtgttgtgcaagatctgaatgtatcgcctatctacgaatctgtcttttggaacccaccaaaggcagagcggtataactttcagcatgcgcgccctaagaaacccgaaagcctacggatctatgaagctcacgtcggtatctcgtccccggataccagagtagcaacatacaaggagttcacagccaacatgctccatcaaattaagtacctaggctacaacgcaatccagctcatggcggttagtcctcata

SEQ ID NO: 21584 - DNA, 850 bp, Emericella nidulans
taccagtatgagcagagtttgttcgtccgcatgcaatcgaatcaccccaacgatgtccatttgctggatattcaataccgtatgcatccagcgatcagtatgttcccgcgtacagcattctatgacggcaggctacaagatggtcctgatatggctcggctgcgtactcgcccatggcatcaaagcgagctcctcagtccgtatcgattctttgacgtgcagggtcttcaccagagcgcgccgaaaggtcactcattggtgaactttgcagaattgaaagttgcgatgcagctatacgagcgcctactaaaggatttcaaagaatatgactttagcggcaaagttggtatcatcacgccatataaaggacagctgagggagctgaaaacccaatttgccaacaagtacgggaatgctatcttcaacatgatcgatttcaatactacggatgcccttccagggtagagaagccgaagtcatcatcttctcttgcgttcgggcctcgaacaaaggaattggtttcttgtccgatattcgtcgtatgaacgtcggtctaacccgcgcaaaatcatccctctgggttcttggtaactcgcagtcgctggtccagggcgaattttggcgcagtttagtcacggatgctcgtcagaggaatgtctacaccgatggtgacatcctgaaactccttgagaagcctcagttcaccggttacaagaacgttgagatggctgaagccgatgcgtcagattctccagcaccatcaaggcctctttctgcttcgtctgtttctcgaccgccttcggtgtctcttgagaatcttccgccggagtcgcctgtctctgcaggtgcg

SEQ ID NO: 21585 - DNA, 850 bp, Emericella nidulans
tgttatgccttttagtttggctaataccccaagcaccttccaatagtatatcaactggatgttacaagacttccttgacaagttcacattggcatacttggacaatatacttatctttactgatggatccctatattaatatagggaacatgtatactgagtactagcctgactacaggaagctggcttgcagatagatatcaacaagtacaagtttgaaactaaaagtactaagtatctgggatttattattgaagcaggcaaaggaatacagatagatccagagaaggtcaaggccattgttgattggcaaacccctatattaacctatggagtatagttattcctagggtttgtaaacttctactaacactttatataaggattttctgatttaatatatcccttagtggccctaatacagcagggtatactatttaactggaccaacaggtacatgcaagtatttgagcagttaaagcaaatatttaccactgcaccagtactaatgcagtttgaccctgatcaagaaatagttgttaaaacagatactttaaactgggctactggtggagtgctcttacagtataataataatagcttactatgaccttgtacctacttctccaagaagaactcaccagtagaatgtaactatgagatctataacaaggagctactggccattattaatactttaaaggaataaaaggtagaacttattagactaaaggaattccttattattacagactatcagaatttgcattactttatgataatacaacagttaaataaacaacaaatgtattaggcagatatcctaagctgctttaactacaaagtatat

SEQ ID NO: 21586 - DNA, 501 bp, Emericella nidulans
  unsure (1)..(501): unsure at all n locations
actgggtaaaagctcactcctcgagcttggctaaacatcgaccccaatgaggacatcatgagganccgcagtttgcatgtgcactgcccgtcgggtgccattcccaaggatggcccgtctgccggcttcgcacaccaccacgcttgatttctctgttctctggtaaagctgtacccccgaagcttgcaatgaccggtgaagtctctcttcgtgggcgcgtaatgcctgttggcggtatcaaggagaaactcatcggtgcgctacgagccggcgtaaccactagtgcttctaccgcatcagaatcggaaagatgtcaaggatgtcccggaagaagtaagcaatggtctcgaaatcatctatgttaagtatgttcttgtatccctccttctcatataaagttactaacgtaaactacgtaggcacatatgggaagctattcgacacatctggcctgatgctcactggcctggccagcaccatatggacttcgttgaaagccgt

SEQ ID NO: 21587 - DNA, 533 bp, Emericella nidulans
ggcgtgagtatccttcgcgcaggggcgagctttgaaactgccctacgaagggcttacgggtacgttacgacctttggtcaggtgggggtttggtgcgaggtatacagtggttgtttcattcgctgacccatctatcatgtctgtgtccagcgagaacctaagcatgggcaagctcctcatccagcgcaacgaggaaacgagtctccctgtccatctgtactcgaaactgccagcgggtatcgcggagcagtgtatgtccctttcttgaacttgctgttacctgcctaactgaaatgtctgatggccagccgttttaatcctggaaccaatgctcgcgaccggcggttccgccataaaagccatcgacgtgctgaaagagaaaggcgtgtgcgaggaggatatcgtctttgtgaatctggttgcgtcgaagaaagggctcgagacgataatgcaacggtttccgcggttaaggcttgtaactgcagcggtagacgaggcgttgacagtgtcaaagtaagtatattacgatttgg

SEQ ID NO: 21588 - DNA, 773 bp, Emericella nidulans
gacgcggcatctcgcttcgccatcactggcaatgccgtggtcaccggtggtgccgggaccctcggcctaacagcatgtactgcgctcctcgagcacgggctccagggtctcatggtccttgacatgaacccgtccatggcagagactgaaatcaactcactacgagcccgatttcccgctgcaaaaatcataactgcaaaagtcgacatcaccgatgaaaacgccgttgatgccgcctttgccgaggcatcaagtgttctaggctccatcgacatcctttgctgcttcgccggcatagtcggctgtgccgacgcgctcaccatggccccctcgcaattccgccaggatcctcgacgttaacacaaccgtgcctttatctgcgcacaggcagccgcgaagcacatgtttgcgcaggtgacaggggttcaatcacgttcattgcgtccatctcggcgcacagagtcaactacccacagccgcaggtcgcgtataacgtgtccaagacagggctgctgatgttgaagaactcgctggcggcggagtgggcacggtacgggatccgaacgaacagtataagtcccgggtacatggatacgatccttaatgagggagaagggctgcaggggcataggaagatctgggcggagagaaatccatttgggcggatgggggtccctcatgaattgtcaggggtggtggttttgcttgctagtcgggctggggggtatattaacggggcggatattgtggttgacgggggtggaattgttttc

SEQ ID NO: 21589 - DNA, 333 bp, Emericella nidulans
tagtcgactaaaaaaattgaagttagattaaattttcaaattgatcaaaaaaaagaatatattttactattaattaaagaatttttaggtggtaatattggctatagaaaaagtcaagatacatattactatggatctactagttttggttcagctaaaaatgttattaattattttgattactttcatttattatctagtaaacatgttaactatttaaaatgaagaaaagcatatttaataattcaaaataaagaccatttaaacaatgatggacttgaaaaaattataaaattaaaaagtacaatgaacagagtaaatgatactacaatt

SEQ ID NO: 21590 - DNA, 542 bp, Emericella nidulans
gcccaacaccatttttcgcgaagaagttcctccctcagctgcagcctcagggtttccgtccgcgcacggcacagaacttcgcacccacgaccccagcatcatcaaggtcggaagcatatactactcttacagcgttggcccgagcatcacaatccaccaggcttttagcctcgacggcccctggacggaagttggtgctctgctctctggcgaaagtgtcataaaaaaaggcgaccgaaaagccccctgggccgcgaacacaatctacatcaacggccggtactactgctactactccgttagcaattcggggtgtcgtgacagcgcgattggcgttgcatcaagtgcgtttcccggcccgggagagtggacagatcatgggctcattatccagtcgggcactggtgagggaagtgatgtgtttccgctgaaccagtcgaatacgattgacccgaatgtatttgtggatggtgacggcatgcgtacttgaattttggcagcttctggacgggtctttggcaggttcctcttaatcagtatca

SEQ ID NO: 21591 - DNA, 499 bp, Emericella nidulans
ggcggtgggggctccacctttttgaagactatcgctggtgaaatgaacggtatctttatggacgagaagtcccagctcaactaccaaggtattccggcaaagcagatgcgcaagcagttccgtggtgaagctatctacacggcggagaccgatgttcacttccctcaattatctgttggcgatacattgaaattcgctgcgctggctcgatgcccgcggaatcgtctccctggtgtctccagggaacagtatgcagtccatatgcgagacgtcgtgatggccatgttgggtctgtcccacacgatcaacacccgtgtcggtaacgatttcgttcgcggtgtcagtggtggtgagcgcaagcgtgtcagtattgcagaggcgaccctgagcgcaagtcctctgcaatgctgggatacagtactcgtggcttggatagtgccaacgctttggtgagccgtgttcggaagttcagtcgggatatatgtgctaattgaccgac

SEQ ID NO: 21592 - DNA, 670 bp, Emericella nidulans
aagcggcaggaacgcccgacgttctgtcgggagtacgtctgatcttcgaacccaagagtctaacaaaatcgtgtcgaagtcgctctgtcataagagcgaaccgacatcacgtcagaaagtctcgacggagctccgtacctgctcgcttgctttgacgaggcgttcagactgtacccgcccgtcccgactggcctgcagcggaggacattagctcctacatttatttctggatatgagatgcccccaggagtaaacctcaccttccaactacctctgaaaaccatggccgggtactgattgacatatgcagaccattgtttccgtccaccaatccggcgcgtacagatccgaaagcaacttccatctccccaacaacttcatccccgagaggtggctcccagacgcaaagaccaacccgtcctcccaattctaccatgataaccgggcggtcgtgcagccattttccgtcggcccgcggaactgcattgggcggaaccttgcctttgcggagatgcgtgtgattcttgcccgggtgctctggaacttcgaccttgagctatgtaaggaaagcgagaactggagtgatcagaagtcgtatgtcctttgggagaagggagctttgatgtgtaggctgaaggcaagagagggcatttgactagacatgtgacta

SEQ ID NO: 21593 - DNA, 645 bp, Emericella nidulans; identical to SEQ ID NO: 8218

SEQ ID NO: 21594 - DNA, 735 bp, Emericella nidulans; identical to SEQ ID NO: 13985

SEQ ID NO: 21595 - DNA, 621 bp, Emericella nidulans
atttcgagcccgcagattgatggaaggaggtacatctcagcgtacggatatacccaagctaaagcgctcgtctactccaaatacggggaaccaaaagatgtcttaaggtaagtagttgttcggcgtccattatcgacttgtttttaacaggagtttctcgccgcaggcttcacacacattcaatctccgctcccaatggcacacaagtcaatcttcgccttattgctgcgcccctgaatcccgccgatgtgaaccagattcaaggtgtatacccaagcaagcctcctttcgaaacgaagcttggtacactggaaccctctgccattgccggaaatgagggtgctttcgaggtcattgcaactggagccgcggtgaagggcctcaagaagggtgactgggttatcatgaagcgaacggggcagggtacgtggcgcacgcacgcccaaatggacgagtcgcaattgatcaaaattgaggaccaaacgggattaagtccactgcaagttagcactgttagcgtgaaccctgttaccgcataccggataataaaggatttctgcgattgggactggttgcgcgctggcgaggaatggctgagacaaaatggcgcaaacagtggtg

SEQ ID NO: 21596 - DNA, 850 bp, Emericella nidulans
gccacagacgactcaaccgctgaggttcccgtcgccgcgaccactgcagacaagcccgaagtctctcctgaagccggtaggggtgctgaagatgctgtcgcaaatccccaggatgagattccgaccgaggacgcgcagcgtggtgtgcacgaggtcgaggctgtcaccctgacctggagcaaggcgtcgctgattgccgttttcatcaagtatactcaccacccctttttctctcttcctttaggaaaacgggaagagtaaaagtcattatattaatgctttgtgtgtagtatctggtgcctctacttcgtcaacgccttccagtcctccatcatcagtaacctgcttccctacgtgacttccgactttgaatcgcactcgcttctgacgaccatctacgtcgtcggcgactgcttttcggcagcagtcttcatcccgctgtccaagatcctagatatctggggtcgcgccgaggggttcctgttcatgaccatcctcgcgacgctgggcatggtcatcatggccgcttgccataacctggcgactttctgcgccgcttatgtatgtctccttaattgttagtccacgcgccattctcatgagatatgaaaggtcttctatacaatcggattcagcggcatgacctactgtattgatgtcatcaccgccgactcctccaagctcaagaaccgagccctcgcctacgcgtttacgtcgtccccctacatcatcactgctttcgccagcccgaaggcctccgaggacttctatgcgctgtacggatggcgctggggtttcggtgtcttcagtatcgtgttccctcatcatccgcggcgccgctgtacgtcct

SEQ ID NO: 21597 - DNA, 850 bp, Emericella nidulans
aatggacctcctatgtctgatatggcttactgacggcactttttctaggcgatgctagagcgcgtaggtccgttgttacctcttcgaaccccttcctacatccgagcccaacgttcttacaaatttgaccagctaccgagcagatattgttttgatgctcaaccgaaaactacgtcgcctgattgtatggtccccttaactataattgcattggcgaaattcgaataggaccctaatcgtttcgcatctaggtcagcattgatgagatccgagcacacaaccgggagatggcagatgggtaagcggctatgcctatacatcacagtacttatcttgcttacatctgttgtagcctccttacatctccttttgactggacacaagccttcgacagagccctgaaagatgttatcaagactctccctaaccgcccgtcaagcgaaaccgccgacgaagtggtgagtttcctctttcacagccgtttacccatctaatgcatgctagaattattactgtgcttacgttggcgcatttggggaattctcatgtaaccctagaactctcggatcctcacaccttaaccgaatggtttctcttgaggggattgtgacgaaatgctcgttggttcgaccaaagatcattcagagtgtgcattacaacgagcgaaaagacagatttgttacaaggaaatatagggatcagaccatgacagccactggcgcaacatttatgaacatataccctcaggaggatgaagataagaacccggtaagtgtttcgattcaatccaacatatgtggctaactctccactttgtagctcattacagaatacggttattgtacgtaca

SEQ ID NO: 21598 - DNA, 850 bp, Emericella nidulans
cagcatttttggctttgattgaattagcggaaatctgccccaaaatgttcaagggcctgtttaacaacttggtcaaattcagtgtcagcgttgtcgcgaacaaggagctcagtgatcaggtcaggcagaacgcgttagagctgatggctacatttgcggattacgcccccgcaacttgcaagaaggatcccgatttcacaacacagatggtgacccaatgtttgagcctgatgaccgacatcggtgaggacgacgatgatgcgtctgagtggaatgcatcggaagatgtatgtctctccctcattatctggcatcttctaatgtgctgacaatcgcagttggatttggaagaaagcgatttgaaccatgttgctggtgagcaatgcatggatcgccttgccaataagctcggaggccaagttgttcttccggttactttcgagtggattccaaagttgatgtcttcggccgcctggcgtgaccgtcatgccgcgctcatggccatctcagccatctctgaaggctgccgggatttaatggtaggtgagctggaccaagtcctccgcatcgttgttcctgctctgcaagatccccacccacgagtccgctatgcgggttgcaatgctttgggtcagatgagcacggattttgcgggcacgatgcaggagaagtaccaccaggttgtgcttagcaacatcattccagtccttagcagcgctgaacctcgtgttcaagcgcacgctgccgcggctttggttaatttctgtgaagaggctgagcgtaatatcctcgaaccctacctcgcagatgcctatagtgagtcgtattatgcggccgcgaatgtcatgtt

SEQ ID NO: 21599 - DNA, 494 bp, Emericella nidulans
caaactccgcaagcctcacagacatggttattctgcacgaacaccgtggtacccctactgcgatgacgatctcacatcttcctcatggcccgacagccagcttctccctgcataatgttgttctacgtgccgatattcccaacgctgcccgcgggactgtgtcagagagctacccgcacttgatctttgagggtttcaagacaaaactgggcaagcgcgtggttcaaattctgaagcatcttttccctccccgagaagctggaaaagttggaaaccgcgtggtcacctttgtaaataaagaggatagcattgaggttcgtcaccacgttttcgttaagacgggatataaggatgccgaactagcagaagttggaccgcgcatgacgatgagattattcgagatcaggggaggttcgctcgaaaaaggctcgagtggagatgtggagtgggcgcttacacagtacacgaggacttctagaaagaaggattacctc

SEQ ID NO: 21600 - DNA, 646 bp, Emericella nidulans; identical to SEQ ID NO: 13091

SEQ ID NO: 21601 - DNA, 500 bp, Emericella nidulans
actatacaaagaccgcccaaacaaagcagatcagcctcgccggaagatgacggagtgacagagaatgtatacctctttgctccaaatattattggtaagaaacgcaatccatgttgctggtcgctgactcccactgacagcggaaatttcataggttatgtgagagttgtcctggcgattgcgtccctctactatatgcctcttcacccgcgaacatgctcgcttctctacagcgtctcctgcttgctggatgccctggatggatatgcagcgcgttattacaaccagtccactacgttcggcgctgtgcttgacatggtaactgatcgttgcacaactgcttgccttcttgtctttctaagttctgcctggccacgatgggcgctcgtcttccagtcgttgatctccttagatatggccagtcattacaacacatgtacgcgactctcagtatgggcggggccaaccagagccataagaaaatcgatacctcgcgaagc

SEQ ID NO: 21602 - DNA, 681 bp, Emericella nidulans; identical to SEQ ID NO: 6074

SEQ ID NO: 21603 - DNA, 850 bp, Emericella nidulans
tttcatccagtgaatatgaattatgatgtgcccaaggcccgcttacgccgcaggaatcaatcagcgggtgggaccatgtaaatcgctattcttcgtggatatctttcggcagctgtcgcatctcgcaatggggtagaggggagcatgttggcagctggtttgtcagagtcaaaagcgaacaggcatttggccaacattgactgtgcagatgagtaacaatcgcctgcattaatagcccacgcagtgtcaccttttcaggctccaagccatcgattgccgccctacacgatgttctaagtcgggatggcaaattttcacgtatcctccgcactggtgtcgcctaccactctgcctatatggcggtcattgcgccagatctggaccacgcgctgactcgattaccggaacgcactctgtcggccacagtgcccatgtactcctcggtaacggaagaagccgttgggagtagtggcctcagcaggggatactgggtaaagaacatgcttcagcctgtacgctttgcaggggcgctgcagaccctcctttcctctggtacacaatacagcgccatcctcgagattggccccacgaagacactacagggtccgattcaacagatcctgagcagcatcggcccaaacattccgacacagccgccgtataggtcgatgctggtagctggacagcacgccggacgcgcagctcttgaggcagctggtttcctttgggcaactgggcacgctgtcgatcttgaccgtgtcaacgggatatcgacgcaggatattacattagctacccttccacacctgccatcatatccgtggaaccatgagcatcgcttctggcatga

SEQ ID NO: 21604 - DNA, 631 bp, Emericella nidulans
gcgtctgaaactatggcgcatcgcctgttcatcatcttaagcttcctcttgtcggctgcgagtgctgccgtacttgcgaattaccctgtcaatgcgcaattacctcctgtggcccgaatatcgaagccttttcatttcgtcttctcacaaagcacctttagtggaagcggtccccagacggtatactcgctctccaacgctccgtcatggctctcagtggataatacatcccgtaccttgtctggaactcctcagaaggaagatgccgggtcaccggagttcgaccttatagccactgatccatctgggtccgctagtatgcaagtaactcttgttgtgactggcgacgacggaccgaaagtcggcaaacccattgtaccgcaactccaagccatagggccgacatcttctccatctaacgtcatcgtacattctagcgcctccttttcgatctcttttgaccaagagactttttccaacacacgcccctcgacagtatactacggaacttcataccctgacaatgctcctttaccctcatggattcgattcgaccagtcaaacctccgcttttatggtacagcaccgaacattgggccccaaactttcagtctcaacttagttgcgtccg

SEQ ID NO: 21605 - DNA, 713 bp, Emericella nidulans
  unsure (1)..(713): unsure at all n locations
aactaccacaaaacgcancgagggcggngagatgagcgaggacaccaaagccaccaaccacccaaatttcaacggccggaacaaagaggagcacgagggggggccatagaaaaacagccacaacccagagccccaaggcgaacgcacggagaaccggaaccggaacaagacgcaaccgcgcccgccggacaaaccgaagcgcgggccagccgccgaccgccgacgggcggaaaacaccagccagagaacggaacacccggaggacngngagacacaacagccgaagacccgacaaaaaagaacggaacgacacacaggaggaacaacaagaggaagcagcaaggaacgannnaccccagcaaccccaaccgaaaaggcaccgccccggaccaggcaacggaaccaccaacagccccgggaccgacccgaacacgaacaccccaaaacgagaacaaaccccaaggacgacgaccaccaaagaggcacgaaaacgcccaaaggcgcaagggcccggaacacacaaaacggaccaagagaaaggcaaaaaccgacgagcacaccaggagacacacaagagccaaacgaaccccccgaacaacgcccccgccccagggcaccgaccacaaccaaaacaagccaacaccgcaagaacacccaggggaacgaacgggcacaagcccaccaacgacacccaaacacgaaaaaggccacaa

SEQ ID NO: 21606 - DNA, 850 bp, Emericella nidulans
atatcttcgatagtggcgctgcgaagacatttggccgtcctatccttctaccggaagatagcgttatggatgtaaagcatgttctcaacattcatgacgaagcgctcacctcgacgaccacggttgtgcctcccgaggttaatgagccaactttgtacacgggaatgcttgcgcaggctaaattccacatactcacaaacagtgtctaccaacgtcttatatccgggccgaaccccacaccagaggagacccttagccttcagaaaccgatggaggaatggtataatagtctacccgattatatcaaaaatccggctcccggttcaatgtcagacaatttcgctctagtccgcagtcgactattgtggcgggattggaacttgagaatcctcatttaccgcccgatccttctaagatgggcttcgaaacgatggacgccgaatacgcccaccgagccagaagacccttacgaggctgagtgccggatgctctgcttccgcaatgccaaactgactatatcctccatcaccgatttcgtgaacaattatccgtgcaccagggttggtgcatggtatatgctgtgcgttcccctattttaccaccaattaattctctagatgtgacctcaactaacactcgctccctcgctacagttacttcctcttccaagcaggtttaatcccaatcatcctcctgatgacagatccaactagcgcagaagccccaagctggattcaggagatcgaagcaactaaagccctactcatgtacccttcattgagcaacaacaaccttgccggtcgttgtctcgacgtaatatatcgactttgcgcccctgtatatccgtcaa

SEQ ID NO: 21607 - DNA, 850 bp, Emericella nidulans
  unsure (1)..(850): unsure at all n locations
tgctagccctacccccgagaacatggcatatgcaatatttacttctgggagtacgggccgtcccaaaggcatcattatagagcaccgtgcagtatgcagcagtgtcattggctttgccccagttgtggggctaaacaaggaatccagggttttccaattcgcttccctcacatttgacgccgccatattggaggttcttggtactctaatgctgggaggctgcatctgtgtgcctagtgatgacgaacgtttgaatgacataccaggtgctatgcaacggatggaatgtctcatggagtttcttgacgccatctgttgcttgtatccttgagccctcgactgtaccttctctgcagattctcacgtgcggaggcgaagcactctctagcgaagtggtaaagaaatggacaggtcacgtaaagttttacggagggtatggtcctacagagaccgttgtgtttgcggttgtggcccgcgattttgtggaccatgacttcacatgcattggttatgaagacccgagtaccttgacctgggtcgtccagcccgatgaccatgacaggcttgctccgttgggagccgttggggagcttgtactggagggcccagctcttgcaagggaatatttgaagaacccctcgaagacaacggatgttttcattaacgaatccgcttggattaagagctttccgagttccataccttctcccatcagaatatacccttttcctcctcttgttattggtacccctaacgcctcgatagagtacctagggcccaaagatcaccaggttaagctgcatagacnacgcatgtagctaagcgagcacgaacaggagctacatgcaca

SEQ ID NO: 21608 - DNA, 781 bp, Emericella nidulans
atcatcatgcaagctgctcaactatcctggggttagtaatgaggtctttcagtttatgatccactgatgcttacgtctcgtagagctagagaatgctgttaccctgattgatccccaacgagactccctctacagatacgacgaggaaacccacaaataccttagtgatacccgtccatggaccaaagaccctcactattttaaatcagttcggatctccgccgtcgctctcctgaaaatggtcatgcacgcccgctccggcggttcgctcgaagtcatgggtctgatgcaaggctatatcctccccaacacattcgtcgtaacagacgccttccgcctccccgtggagggcacagagactcgagttaacgcgcaagacgaagcaaacgagtatatggtctcatatctccagtcgtgtcgggaagcagggaggatggaaaacgcagtggggtggtaccacagtcaccctggctacgggtgctggctttcgggcattgacgtttctacgcaggatatgcagcaaatgagcgggccatttgttgctgttgtcattgatcccgaacgtacgatctctgcgggaaaggtagacatcggtgcgttcaggacgttccctaaggactataccccccccaaggaggagcaagaagaagacgaataccagaccgtaccgcttaacaaagccgaggactttggagcacacgcttcccattactactcacttgaggtgtcactttttaaaagcgcccttgatactgagattctctccgatcctctaggatca

SEQ ID NO: 21609 - DNA, 850 bp, Emericella nidulans
gccagtttctttgcggtataccgtggggtgtatttgctactatggcacctgcctatgcctcagaggtctgcccccttgcgctccgaggttatcttactgtctatgtcaacctgtgttgggcatttggccagctcatctctgcgggcgtgcaatcgggcttttctgagaaaactggtcaatggtcctaccgcatcccgttcgctatacagtgggcctggccctgcctactcttcccgatcctctggtttgcccccgagtcgccttggtactatgtccgcgtcggtaaccacgatctggctgaagcctctattaatcggctgggatcagcctcacaaagggcgcacagcaaggaaaccctcgcaatgatgatccatacagacgagattgagcgatcaattgatgaaggaacctcatatctcgactgctttcgtggcgtggacctccgccggaccgagattgcatgtatggcattcgcggcacagcccttctgcgggagtgcaatgggcggaacgccaacatatttcttcgtccaggctggccttccggagtctatatcctttcgcatgtcggttggtggcttaggtatcgcttcagtgggcacgatctttgcatggttcttgatgcgcgggtgtggacggcgcacgttgtatctatgggggctgggcttacttacgctggttctcctcgctgttggcttttgcagtgttgggagcaattcgaacgcgagcaattatgcccaggccgggctgatgctctgctggctaggcgtgtattactcgactgttgggcccatatgctatgctgttattacagaggtttcgaccacgccgctgaagaacaagagtgtatg

SEQ ID NO: 21610 - DNA, 850 bp, Emericella nidulans
acctgcaccgttcccaacattggctcgcgttcgctgcaaggagatgctcgtttcgctgtcgaggttttgaggcctatggggtgtactgtggagcagactgaaacttctactactgttactggaccgtcggacggcatcttacggccacttccaaacgtggatatggaaccaatgaccgatgcgttcctcggtgcttccgtactggcagccatcgcccgtggaaaagagtcaaaccacaccacccgtatctacggtattgccaaccagcgtgtcaaagaatgcaaccgcattaaggccatgaaggatgagcttgccaagtttggtgttatctgccgcgagcacgacgacggtctcgagattgacggtattgaccgctcaaacctgcgccagcccgttggcggtgttttctgctatgatgatcaccgagttgcattcagctttagtgtactctctctcgtgacaccccagccgacacttattctcgaaaaggaatgtgttgggaagacatggcccggctggtgggataccctccgtcagctattcaaggtgaagcttgagggcaaggaattagaagaagagcctgtggctgccagcgggcccgatcgggctaacgcttcaatttacattattggcatgcgtggtgctggaaagtcgacagctggcaactgggtttctaaggctctcaaccggccattcgttgatttggatacagagcttgagactgttgagggcatgactattccggacatcatcaagacccgcggttggcaaggctttagaaatgcggacgtggaaatcctgaaacgtaccttgaaggaacgctcgagaggatacgtttttgcttgtggtg

SEQ ID NO: 21611 - DNA, 337 bp, Emericella nidulans
acaccaccatccctcgatcttcgtcctcgggccataagaaggatcggcaaaaactgcaactgacgccgccgcagaattattgtcaggagcaatcgccggccttgtttcccaaacatcttcatatcctttggaagtggtgcgccggcgaatgcaagtcggcggagtcgttggtgatggccgccgtttgggcatggcggaaacagcgcgaataataatgatggaaagaggatttcgcgggttctttataggcttgacgattggttatcttaagatgatacccatgacggctactggtttttttgtttatgaacggctcaaatggtcactagggatttag

SEQ ID NO: 21612 - DNA, 486 bp, Emericella nidulans
ccgataatacgacttatagggatcgggatcagcatttctcatcaaaacgaggagctggacagtcaaattgaagagaaactgaccaaagcatacaaggatgcaaacatccaagacttcatccaatccctaccagaaggtcagcagaccgatcctggcacccgtggactagccttatcgggcggccaacgacagcgcatcgcaattgcgcgagcactcatccgagaccccgaactcctcctgttcgacgaggctacgagcgcgctagacactgaaaacgagaggcttgtccaagaggctattgaacgtgtttctcatggtcccggaagaaccacaatttctgtggcacatcggctcacaaccgtaagacggtgtgatcgcatactagttctgcatgagggacgagtcgaggaagaagggactcacgcggaactgatggcgagagggggacggtattatcaaatggtccttgctcagggccttgacaga

SEQ ID NO: 21613 - DNA, 586 bp, Emericella nidulans
gggcctgcccggggcacaggctttccctcatcccctggcaaacgtacaatcgcaaagtacgaaaccgtctgttgccaacttcgcatcgtatgctattgttgaaattatgatgtgggagggactcggagatctgattaatcgatttcgaaagcgcgaactcgggttggacccattggatgctattcgcgcaccgagcctcgcccaccggttgcaggtgccatacacgtatttatggtattcctggcaaagcagatacacaagaataagtgcgaaagctaacatgattccaggtctcccgccctgctagaaaaacccctcgactggggcgacaacattgacgtggtcggcttctcaaccctccccacagcgcaagactacaaaccaccccaggacctgcaaagtttcctggacgccggtcccgcaccagtatatatcggcttcgggtcaatcgtcgtagacgactccaaagcactaacggatatcgtcttcgaggccgtggagaaagccggagtacgcgccgtgatctccaagggctggggtaacatcggagccaatcacgcggcgtctgactcgatcatgatgattg

SEQ ID NO: 21614 - DNA, 664 bp, Emericella nidulans; identical to SEQ ID NO: 14902
  unsure (1)..(664): unsure at all n locations

SEQ ID NO: 21615 - DNA, 850 bp, Emericella nidulans
cttccggaggtggcagctcccgagaccaaggtgcccttcaaccagaagttgatgtggactggggtaagttctctggtggccgccgtgcgagattcagccagctcatcgatacttcagttgactcttttgatcttcttggtcatgagccaaatgcctttgtatggtattgtgtcctctgacacatcggatcccctctactggcttcgtatgatgctggccagtaaccggggaaccttgatggaattgggtatcacccctatcatctcctccggcatggttttccaggtaagtcttgcaggccgtacaatcgatttccaaagaattgtgatttactgactcaattgcgcctgaatagctccttgctggtacccacctcattgacgtcaaccttgaccttaagaccgaccgtgagctttaccagaccgctcagaagctcttcgctatcattctctcgttcggccaggcttgtgtctacgttttaactggtctctacggccagcccagcgacctaggtgctggtatctgtgttctgttgatcgttcaattggttgttgctggtctcgtcgtcattttgctcgacgagctgctccagaagggttacggccttggtagcggtatctctcttttcattgcgactaacatttgcgagtccattgtgtggaaagctttcttcccaaccaccatcaacactggtcggggccctgaattcgaaggtgccatcatcgccctcttacaccttctttttacctggtccgacaagcaatgtgctttgcgcgaggcctcttaccgcagaacctcccaatgtcatgaacctgctgctaccctcggcgtcttcgccgccgttttctat

SEQ ID NO: 21616 - DNA, 435 bp, Emericella nidulans
acaagaacgcacaacaccaacacagaagaaatctacacaggaaagaagaagaaggctctagaaagaaaagacgacagaccataagcagagaggaaaagaaacgcatgcggtaccaagcagagcacagggcggtcgaagatgccggacaaggacagtcatgaataaagaccacgcaaggagcgaacagcaaagcagaaaccggagggagaacatccacgcacagacaaggaacaagaagtggcagagataacagaaacaagacggaaaggcagaaagcgacaagaagaacacaacagaacaacaaggaacaaaaaataagaccaagaattaaaacctcgacaaaaacaaacgacaaagccacgaacgcaacggacgaagaacgagaagggacgaaaacacataaacaaaaggaaaaaagatgccaaccacggagga

SEQ ID NO: 21617 - DNA, 850 bp, Emericella nidulans
tatcaagggcgttgatgtttcagacgggaaggtgacgctcttctccgagcttatcatgcagaaactaggcatatactgtggcgcattatcgggtgcgaacattgcgcctgaggttgcggccgaaagactatgcgagacgacaattggatacgaccccccgcctatggatcttacctctagtgacggctcgcctgaggataacctgccccatgtagatggccagcgccagaaggacctgagctcgacggatataaagttggagcgtgtgccgcaggattatccgcatgtgaatgatgaactcctcgagaagatgttcgagcggccgtacttcctcgtacatgttatcaaggatgttgcaggggttgcgttgggtggagcgttaaagaacattgttgccctggcagctggatttgtcgccggaaagcagtggggtgaaaatacgaaggcggcgattatccggcagggtgtaggagagatgatccggtttggacggacgtggtttccttcctcggtcaatgagaagacatttacagaggagagcgcgggcattgcggacctggtagctagctgctatggcggccggaacgtaaggtccgcaacgcacgctgtggagaaaggggtgagcgttgctgagattgagaagacagagatgaatggacaaaagttgcagggggtttcgactgctcagaccgtgtccgggttcctggagaagcacggcaagacagacgaattccccttgttctgtgctgtgtacagtaagttggccgtcttctgctcacctgaaccttggtggaggctgactgggtccagatatcatcgaaggaaaagcacaggtggatgatcttccggc

SEQ ID NO: 21618 - DNA, 850 bp, Emericella nidulans
aggagaccgagtactacatcaacattcactccgtgcgtgaggtaaggaacattcttccgcactttctgaaactacgttcatagtctaacttttcttagggtgactggatcctcttcacccacgagggtggtgtcgatgttggtgacgttgatgctaaagcagagaagcttttgatccccgtcaaccttaagaactacccctccaacgaggaaatcgcttccgcacttctcagcaaagttcccaagggcattcacaacgtcttggttgactttatttctcgtctctacgctgtctacgttgactgccagttcacctaccttgagatcaaccctctcgttgtcatccccaacgccgatgctacttctgccgacgtccacttccttgacttggctgccaagcttgaccagactgctgagttcgagtgcggtaccaagtgggctgttgctcgtagcccggctaaccttggcctggccgctcttcccacatccgacaaggtcaacattgatgccggtcctcccatggagttccccgctcctttcggacgtgaattgagcaaggaggagaagttcatctcagacatggatgccaagactggtgcctctcttaagctcactgtcctgaaccccaacggccgtgtctggactctcgtcgctggtggtggtgcctccgtcgtctacgcggacgccattgcttccgctggtttcgttagcgagctcgccaactacggtgaatactccggtgctcccactgagactcagactttcaactacgcccgcaccattctcgacctgatgctgcgctctcccatccaccccgacggcaaggtcctgttttcgcgagtatatgccgc

SEQ ID NO: 21619 - DNA, 739 bp, Emericella nidulans
atgggaggatcactatcgcggctttggtccctattttggtctaagaaggaaattcggattctcattcttggacttgtgcgtcaatgatttctgttgcaatcgccatttctggggtcaaggagctgagacctcttcttcgcaggacaatgctggaaagaccactcttctctacagattaaaggtatgtttccgcagtctctgtgtatagtatacatgacttcaacttcgccgctaacactcgaatacatagatcggcgaagtcgtgactacgataccgaccatcggattcaacgtggaatcggtgacgtaccgaaatctcaacttcaacgtctgggtacgtacttcaagccactgttcgggttaatgagctccgctcatattatttgttcaggatcttggaggtcagacatctatccgtccatactggcgatgttactatgccaataccgctgcggttgtttttgtgatcgattctacagacgtcgaaagacttggtacggccgcagacgagctcgccgccatgttgaatgaagaggaactccgcgaggcagctctcctagtatttgccaacaaacaagatcaacctggtgcgaagggcgcaggagaaatttcggaagcactaaagcttggtgagctgcgggataggaactggagcattgtggcttgctcagccattgacggtaaaggtctgaacgagggcatggattggctggtggtaagttcatctctttcttcgacg

SEQ ID NO: 21620 - DNA, 850 bp, Emericella nidulans
ctcaattgctgaaggctgctagcgctccgctcatcattgtcggtaagggtgccgcatatgcgcgcgcagagctcggaattcggaaattagtcgaccagacacaggttccgttcttgcctacacccatgggtaagggtgtagttccggactcacaccccctgaacgcatccagcgcgcgaagtgccgcattgaaacatgcggatgtcgttctcgttctgggagcgcggcttaactggatcctgcattttggtgagccgccgaaatggtctcctaaagtgaagataatccaggtcgacatctgcgcggaggagatcgggcggaacgctgggacatcagagcttgggatcctaggagatataagtctagttgtggatcaattcagggcatctctttctagctggaaatactcgtcctcagcgaagttcccattgcttctcgccgaatcagccaagaagaatgaagacaaggctcaaaaggctgcccttagacaaacgcccgccggcaagccacttacctatcaacgagcctaccacatcatcaaaacagcacttaatgccttgacacccgtcgaggatggaaatattgtttacgtctctgaaggtgccaacacgatggacatctcccgctccatcttcccgctctaccacccccgccagcgtctcgatgcaggcacgtacgccacaatgggcgtgggaatgggttatattgtcgccgcgcacgaagcattcaatgctaaccccggagcaagcacatcccgccccaagaaaattgtcgccttcgaaggcgacagtgcgttcggcttcagcgcgatggaaatcgaaacgctcgcccggtaccgtatccagcactg

SEQ ID NO: 21621 - DNA, 787 bp, Emericella nidulans
tttttaaaagatttaaggggaaatcaatccgggaacacgcggggtaagtctcttcaaacctccaaagcacagcggagtctcattgcctctgtaggatgttgaagtatggttttttcatcaaaaaaggtaatatacctatgataggtatgatttcaattaaatgtcaattatttcaaataaaaaattttaggaattgtatgtaagtttaggaaagaaatgaatagaatggtagccttagaataagagacaaaaacatttaaaagtttcattttacctatattgaaaaatatcccatgttttctaataagcattatgactatttaagatttagaaatgcattacttacaggtattatttctttaaagatttacctgattatactagaagtgatgaacctcttaattctatagagtctattattaatacatcttatttttctgcttgattagtaggatttatagaagctgaaggttgttttagcgtttataaattaaataaagatgatgattatttaatagctagttttgatattgctcaaagagatggggatattttaatatcagccatacgtaaatatttatcttttactactaaagtttatttagataaaactaactgttcaaagttaaaagttacaagtgtaagatcagtagaaaatattattaaatttttacaaaatgcacctgtaaaattactaggtaataaaaaattacaatatttattatgattaaaacagttacgtaaaatatctagatattcagaaaaaataaaaataccttcaaattat

SEQ ID NO: 21622 - DNA, 644 bp, Emericella nidulans
cgcatcctttgcttgtgggaatttcctcgcaacgattcgcctgctgaaatagtcctcgctgtgataatgctcctctcacttttcgctgcgttgggttgggcttcattcaaggtcatcagcctagcgaaacggtcgatcgcactgcacaagaaccccgcctatatcctttactccgacccgacttgcttgaacaagtggggcttcctctatgtgcaatatcgagcaaccgcttactactttgttattcccgtgctgggctatctcctcgtcaagggcatgttcatcggcctcagtcagccggctcctgtggtgcaaaccgtcgcctatgtgatcattgaagcggctatgttgattgcagttagcgttctgcggccgtggatggacaagaagactaatatctacaatatttccattgcggcggtccaatttttgaacgccatcttccttctcttcttttccaatgtcttcaatcaaccaggactggtgaccggagttatgggtgtcgtcttctttgttattaatgcagttgctgcgttggttctgttgattttggtgctcattggatctatctatgcttttgcttccaagaaccccgacacccgctatcagcccatgagggatgaccgtggctccttcatcaaatc

SEQ ID NO: 21623 - DNA, 850 bp, Emericella nidulans
gataggtggcagcaccgagacgcagatcgagatcaaattcaagcagatgcgttatggagcatctgtctaccttggagacctcgctgaactccggcaatttgcctttcatgacaactacttggaaattggtgccaacatttcattaactgatcttgaatctgtctgtgatcaggccatcgagcgctacggctcagctcgcggccagccctttgccgctataaagaaacagcttcgctactttgctgggagacagatcagaaatgtggcttcgccagctgggaacctggccactgcatccccgatatccgatctcaacccagtttttgtcgctacaaacacgactcttgtcgccaggtcgttagataaggaaccgagattccaatgacacagttcttcagaggttaccgatctacggcccgttccgcagacgctatcatttcaagtctacgtatacgtacgcatctgagaaaggcgagtatttgcgggcttataaacaatctaagaggaaggatgatgacattgcaatagtgaatgccgctttgcgggtctcactctcgccatcgaacgatgtcactagcgtgagcctagattgtggcaggaaggcgcctcagacggaatctgcgcagaacgcggaggtcttcctcaccgggaagaacttactgatcacgtaactctaagaggtactactggtgctttgggagcaggattcaaccctgaagttggtggttccaggcgagatggggacttaccaaatgtcactggatcttggatttttttaccagacctactatgagcgctatgtccgaaatcgaggcctggagaagtgacctgaataacagtgtggccactg

SEQ ID NO: 21624 - DNA, 850 bp, Emericella nidulans
ggctaactttaaagcagcgcaccgcctcgaaattccgtgaagcgagactcggaaatcgtgtttctcagatccctcctctccgtcttcttcattctctcgatgacgagaacgtgccggtggaaagcaacatctttggctcttcggctgtccgtgaactcgtggaagaattaagctgcaaagcgaacttcctcgttgcccgcaagttggttgcagctctgcctgacaaagctttccttcgccgccagcaatcaccaaacccccgtcgcctccactcatttgtcgatcgcatgaacagactcgggtttgggtttgacgaatctagcagcggaagcttgcagagtagtctctgcaaggttaaggacgatgatttgcgcaaggttagccatcttactcaagaccgtcccttggttattcggttgtatctaattgacgacagggaatggaaacaatcttcgtgaaatccatgcagcgtgcgaagtactatgtggcaggcactgtacaggatgaaatgcgccctcactatactctcaacttgcctgtgtatactcacttcactaaccctctccgccgctatgctgatgttattgtccaccgccaactggaagccgttctgtctgatggtgctatcgagttctcagacgacgtcgaatccctcagcaagaccgctgatatttgcaacaataagaaggattcagcgcacaacgcccaggagcagagcgttcatatcgaagcctgtcgcaatatggacaaactacgccaagagattggtggtgacctcattagcgagggtattgtgctttgcgtctacgagtccgcgttcgatgttctcattccagaatacggcttcgag

SEQ ID NO: 21625 - DNA, 431 bp, Emericella nidulans
aagcattagcagtctcttgttctattggaattggaccatcggctggaatagaagattttggaacacctaacaatcatcgcagaaccaaagcctggggcacaacccttgacccaacaggcaagagcggcgtaagagatttgccattattgctgttcgtttgcttttactgacatttctcaagatccgcttcttgggtgatcccaccgggaagttctccgaggcattggatgttacattcgacagcacgacgatcttcggcaaccagcgtagcaagcgctatgcgctcctcgtcgaggatggcaagatcaaggaggcctttgttgagccggacaacacgggtgttaagggtatcatttctagccctgctgccatacctccagcatgctaacaagtgaacagtttccactgccgagaatgtgcttggatagata

SEQ ID NO: 21626 - DNA, 513 bp, Emericella nidulans
ctacatctcgtggactttgaagtgtcaatgagcaggcgagattgatcagtacggccttccaagagatcacccccacgtcgcgctcgttcacctacacatcctccggtggtctgctgcacgagacgatcttcacacaaccggcgctggtggttatggacgtggcgcggttccacgacatgcgcgctcgcggtctaatcaacgaggacagctgctatgccggacactcgcttggcgagtatgccgcgctcgctgctatgggcgaggtcttcacagtagagggagtcactgccgcagtcttctaccgtggactgaccatgcagaaatccatcgaactggaccgatctggccgggactattccatggtagctgcgaacccgagccgagtatccaagagtacgtccctcgttcctccccttaccccttcactattccgtgcatggactgacagatatagacctctccgaatccgatctctgcgctattgtggactcgattgaagctgcaacagggggt

SEQ ID NO: 21627 - DNA, 510 bp, Emericella nidulans
atggcatctcaagcagcatgtaagcagcgccgtggaagagccggtcgagttagagctggtacttgctacaaactctacacgcgcaaagcagaatcaagcatgccacagcgaccggaccccgaaatccgccgcgtccctttagaacagctgtgtctttccgtccgctcgatgaagggaatcgacgatgtcgccactttccttgccaacacgattacgcccccggaaaccattgccgtcgaaggagccctcaacttcctccaccgtgtcggagccctcgatcacgacagactaacagccctaggccgatacctgtctataatcccggccgacctgcgctgcggcaaactaatggtctacggctctatcttcaactgcatcgacgccgccatcacaatcgctgccattctaactgtgaaatctcccttcgtgtcaccccgcgagcgtcgcgaagaagcaaacgccgccagagctgctttctctaagggcgatggcgaccttctcactgacctt

SEQ ID NO: 21628 - DNA, 454 bp, Emericella nidulans
atcgtgaccattgttatggctggcatcctaggcatctacggcctggtggtctcggtgctgattgccaacaacctcgcgcagacggtcgctctgtacacgagtctgcttcagctgggcgccggcctggcggttgggctttgcgggctggctgctgggtaaggaaagccagctgagccgtccttttccagttagctgttggctgttggctgattaatgtcaggtttgcaattgggatcgtcggcgatgcaggcgtgagggggaccgcgcagcagccaagactttacgtgggcatgatccttgttctgatctttgctgaggtcttgggtatgtaactctggtctctttttctctgaggaacggattaatagctaatgcacctggcatggtaggcttgtatggactaattgtcgcgcttctaatgaacgccagggcgggcgttatcgacttcaaatgc

SEQ ID NO: 21629 - DNA, 850 bp, Emericella nidulans
tagtggatatcaaagtggccaaagttggattgctgtggcgtaaagacccaaagaagaagagggcacgttccccttggcaggaatggggtgcccttcttaccttgtcgcacctttatttcttcaaagatgtaaattgggtaaagtccctcatggctcagtgcgatgcccatcagaaagaaggtcgccggcgggccgtggtgttcaaacctccacttaatgattttaatccggtttcgatgatgtcgacagacaatgctgtggctctgttagattccagctacaagaaacacaagcatgcgttcctctttgtacgccccaactcactcgaagaggttttcttagccaacagtgaggcggatatgaacgactggctagcaaaactcaattatgctgcagcatttcgcacaacaggggttgggacaaagggtatggttgtcaccaaatacgatgctcagaggaaccgaatgagtcgtcggctctcgtttcagtctgaaatgtcccggttttcttcggataaagaacccgcatcaccaagttctggcatgggtgcagccgaagagttgatggcagcccgaaccaggcttatacagcaaaaggtcagggaggcgaacgaaacactttttatctcccagaaacaactggacgatatcttgaggaatgcgagacatcttcaagtcttgacccctgtccacacacgcgcaagggaacagctgatcatggctgcaggccgcatgtcggcgaacgtcaagtgggtaaggcaggacatttggcgcacaaaaagtcaccgggaggtgcctagtgcgcgacttgggagaagagaatgaccaggccgtcactgcgcctgaaccac

SEQ ID NO: 21630 - DNA, 850 bp, Emericella nidulans
tttcgaagcacatatccgtggtacagagcaggaaacacccgcccgcgagggcgcagcagcactccgcctccttgtctctggctctgccgccctcccgacccccatcaagaccaaattcgccaccatcacgaaccaaaccctcctggagcgctacggcatgacagaaattggcatgggtctcagctgcgggctcgatgtagcgcagcgcattgacggcagtgtcggctggccccttcccggcgtccaggtccgcctcacagacaaggaaacaggagccgtaattgaggccgcagacgtcgatggcatgatcgaagtgaaaggcgacaacgtcttctccgagtactggcgacggcccgaggctacggccaaggagttcactgcggacgggtggttcaagaccggcgacgttgcgcgacgggatgaacgaggcgcatactacatccagggccgcgcctcagttgatatcatcaagtccggtgggtacaagatctctgcgctggaggtagagcgtaagctgctgagcgctggatgagatcgcggaagtagctattgttgggattgccgatgaggaatggggtcagcgtgttgctgcagttgtaaagcagaggcctggtgtaagttaatcaccctttccctgatttcacagaagccgctcctagaaaaaaggaagaaaggaaagcaagatactgatgggataaactagacggaaccactagaattgcaaaccctgcgcacacgcctgaagcaggagatggcgccgtataaaatccccaccgtgctgaagatcgtcgacggtattgagcggaatgccatggggaaagtcaataagaaagacgtcgtacgaaaatat

SEQ ID NO: 21631 - DNA, 850 bp, Emericella nidulans
atacagccggtctcatctttggcgcaactttggcattatcataggcttctttgtcttcttcgtcgccacagcgatgatcgggatggaactgcagaagccaaacaagggcgggagctcggtaacaattttcaagaggggcgaggcaccgaaggagattgaaaaagcggttgaacagaaggagaagccgaatgatattgagtccgggtctcgtaatgacaccacagataccgtgggctcagatgacggccaagcggttgaaggcattgcgcgaagtgaatcagtctttaccttccagaatgtgaactataccattcctgttagtggcggaaagaggcagcttctgaaagacgtccaaggatatgttcgtcccggtcgtcttactgcgcttgttggagcttctggtgcagggtaagtgtactcgagcctatagcaaagagttcaagctaagcatcctaggaaaacaactcttctcaatgcactcgcccagcgattagactttggcgttgtcacaggggacttcctggttgacggaaagtgagaaacccctaactatttgtgtcactcttgtactcacaatcccagaccccttcctcgcagcttccagagagcgactgggttcgccgaacaacaagatatccatgagccaaccgctactgtccgagaatctctgaggttttctgctctcctgcgccagcctcaagaagtccccatcgaagagaagtacgattactgcgagaaaattatcgacctgctagaaatgcggcagatcgctggggccacagtcggtgctggcgggactggactgaaccaagagcagcgaaagagacttaccatcgcagttgagctggcg

SEQ ID NO: 21632 - DNA, 556 bp, Emericella nidulans
tatggagctcagtcttccgcgcagaacctccaattttacccatctagctattcctccgtatcagggcacacgactccttctcaagcatcatatggcggatttggtgcaccaccaaatacaacggcacaagggtaccccgttggaggggctggatacggcggtttcgggtcccctagtggtggtgtgagcgggaggatgggcgaacagggcggcttgcggaccgggtggcttgctgcatttggaactgagggctatgacggcgaaccgccgctgttggaggagctcggggtgaattttgagcatatccggaccaaagtctgtactcacctttcaacatcttcggacaataggctaacctaatgcatagacgttaacggtcctcaatcccttcgcgcgcatagaccagcacctcatggacgatagtgacctctacggcgcactcctctacatcgttttatacggcaccttcctacttttatcgggcaaggtattctacggctatatctacggcgtcgccgtcttcggtactgtcgcgtctccatctaattatcagccg

SEQ ID NO: 21633 - DNA, 850 bp, Emericella nidulans
gctgaaagaggcagagaagatgtatcagcgagcattggcaggcaaggagaaggcactgggtcctgaccacacatccacccttgatacagtcaacaatcttgggattctctactctgatcagggcaagctgaaagaggcagaggaaatgtatcagcgagcactggcaggctatgagaaggcactgggtcctgaccacacgtccacccttgtgacagtcaacaatcttgggaatctctactctgatcagggcaagctgaaagaggcagagaagatgtatcagcaagcactaaaaggctatgagaaagcactgggtcctgaccacacatccacccttgatacagtcaacaatcttgggagtctctacaagaatcagggaaagctgaaagaggcaaggtaattgtatcagcaagcactggcaggcaaggagaaggcactgggtcctgaaccacaacatccaccttgatacagtcaacaatcttgggattctatacaagaaccagggcaagctgaaagaggcagaggaaatgtatcagcgagcactggcaggcaaggagaaggcactgggtcctgaccacacgtccacccttatgacagtcaacaatcttgggagtctctactctgatcagggcaagctgaaagaggcagagaagatgtatcagcaagcactggcaggctatgagaaagcactgggtcctgaccacacgtccacccttataacagtcaacaatcttgggaatctctactctgatcagggcaagctgaaagaggcagagaagatgtatcagcaagcactggcaggctatgagaaagcactgggtcctgaccacacgtccacccttgtgacagtcaa

SEQ ID NO: 21634 - DNA, 576 bp, Emericella nidulans; identical to SEQ ID NO: 6462
  unsure (1)..(576): unsure at all n locations

SEQ ID NO: 21635 - DNA, 850 bp, Emericella nidulans
catgcatgcggcactatcttgagggaggcattgaagttcgacgtaatcgccgctatcattctttatgatcagtcaaaagagggggagccagctatcagactgaccgaggtccagcccaacgttcctcagcgcggaacaggtgttttctggaggttcttccattggattgaccgaggtacctttgagctcagcgcagatgcattcacaacttttagggcaagtgcacaaagaaatcatttctaagaaactatcctaacacgaaactgtttcctcaggaaatcttgacgcgccacaaatcccttgttacaggatatctagcgacaaacttcgattactttttcgcgcagtttaacactttcctcgttcagtctgagtcatatgtcactaagcgacagagcatcaaactcttaggcgagattttactcgatcgcgcaaactacagtgtgatgatgcgatacgtcgagagcggagaaaacctcaagctttgcatgaagctcctgcgtgatgatcgcaagatggttcaatatgagggatttcatgttttcaaggtatgtgaaggacgcaacctctatgaccgcgtaggatgcgtcgtgctgacaaagaatgtggttaggtatttgtcgccaatccggacaagtcagtggcagtccagcgaattctgatcaacaaccgggatcgcttgctaagattcctaccgaaattcctggaggaccgcacagacgacgaccagttcacggacgagaagagtttcctagtccgacagattgaacttttacccaaggaacccattgaaccatcacgttctgcgcgtgaaccgtctcgttcgactgccaacaccacgactgttgcg

SEQ ID NO: 21636 - DNA, 717 bp, Emericella nidulans
  unsure (1)..(717): unsure at all n locations
gacaatggacctgaacatcctcatgccacgcgtccccgtcgcaagatatctggccattaatacgtttgcctcggggtgccgttgtcgctttgactgccgcgtgcgtaaactatggcggcctgctcgtagtccgatttttgctgggtgtcgcagaggcaaccataacaccggccttcatgttcatcaccaccacttggtatacacgcgaagagattcccgttcggaccggtatctggttctcaggtaactccgtcggcgggcttcttgctagcattttggcgtacgggatcggccatatcgaccaccctctccagccgtggatgtggttattcatcatcctcggaactgccaccttcctctggggcttcgtcatcctagtctctttgccagacagcatttcgaaggcagccttcctgaccgctgaggagaaagcgttcctgtcaagacgcgtcgtcattgccgggacaggacgcacagagggaactgtgtggaaacccgaccaagccgtcgagtgcttncgcgaccctaaaacatggcacctgcttggaatcgctgctctaacccagatacccaacgggggcattcagaacttctcgaatctggtcatcatatcgttcggattcacagccttggaatctaccctggtaaatatcccggtagtatcatcagcgctgcacgatcacccttacggatggctcgcggtcgtttcaggtctca

SEQ ID NO: 21637 - DNA, 534 bp, Emericella nidulans
gtccggtccatctttggcttgacaaagatggtacggtattcaaatggcaccctgcaacgaacgagtatcaggaatcttcttcgtctgccgatgaggtggctgccagtcccgacggcagtttattcgtaacaagcagcagcaacggaaccgtcaaagtgtggagctttgaatatatgtcggtcatatatcagctctcgtctggtgatctggttagggagctggcatttgctccggatagtagacggttctatgacatccgaggctctttattaaacgcgtggcaatcaaacactctactacgattccttgaggtagatgaggctttcagtgatacatccagccaggatcaaagatcaacatctatttcgcatatatccgaagcccataccgtgtcttatgaagcagtgtctgtgatcagagtcagcccagagcacggcttgtactgcgctggtaacgaggaaggaattgtgacactgtttgatgaaaagtcagaggaactggggaaaattctggaatttcccaattttgtcagca

SEQ ID NO: 21638 - DNA, 850 bp, Emericella nidulans
acgatatgcggagcagtgattgggtggacaagaggcacagctataatgcaaacatcaaacgctgtggctgaagaggtagagaaactgggagtcatcactttcacgcaggcagaaatggccttcaatattcttgcgttgatgacgcctgccttgactgcccttgccgaagatacaccaatatatgccgacttgaccggaggtctaggatcgatgtggaatatcaaacaggaaatctcagccgctcgaaaaaggatatcagagaggcagatcctacaaatcgcaattgcggaggaggatgcgcgtgagcaggctatgatatgttcagcaagcaccgatgtcgaatcaggtttacccacaactagacacgccaggttaggcctacagtttccgccacttccggatgtgaacgaagggtaccctaatattgagggaatgatcgatcttacccgcatcccagttattgtaggctactccgaactaggtccatggggcaatgctcgcacgcggtgggagattgagcatcggggagatttcagcctggaaggctatattgagatggcctggattatgggcctcatcaagcacgtcgatggacacgcgaaaggtcggccctatgtgggctgggtggatgcagacacagagacacccattcaagactatgaggtgccccataagtaccataaacacattatggctcatgccggtctccgtctgataaaaccaactaaactagacagttacgatccgtctcgcaaggatcttctccacgaagtagcagtggaagaagacttagctcctttcatatcatcgaaatcaaccggtgaagcctttccaactacggcatggagag

SEQ ID NO: 21639 - DNA, 500 bp, Emericella nidulans
atatataggtcgtcaaaatccaccggcacgaaccagggcatccccccggtccttcataacaaagccgcgcaaggtcttccggtacaccagtgcccacatgcacattccgctggtgagccagcagtatcccctatgggttcccccgttcatccccggatccctctcctccgtaccctaacgtggcttacctttctgacctgggacgatgtttcctggctgggatccttacggggcttccggacattatgccaatgttcgcgccgactgtcaactcctacaagcgcttagtggagaacttctgggccccggtaaccgtgtcttggggcttagagcaccgggccgcatctattcgtcttattacgccgccaaccgcgagcccgaaggccactcggctggaggtacgtgtgcctggagccgatgcgaacccgcatttcgtgctggcagccatagtcgaaatgggatggttgggtgtggaaaaaaaaccccagattccctggtcc

SEQ ID NO: 21640 - DNA, 850 bp, Emericella nidulans
cgacccttccgcttgcgcggcttcaaaatatcgcgcagcaggtgggcgcaaagatgatgttgtcatccagcaagcagcacgatctggctacgatgattatgccggatagcaacccttttgttgttggggaagagacatttgccgacgcttctaagctgcagagtattccggaattggcaccagtgccttcatccgccctgatgtatatgatctttacatccggtagtacggggactcctaaaggtgtgtactcatggtagacgcttcaaccccatccgtgtgtccatcgttgaccctccttaggagtcaaactctctcacgaaacgtatacaagcagcgctatccctcgagctagagaggtcggttacacggagaactcgagggtccttgatttcgcgtcctacgctttcgacgtcagtatcgacagcatgcttctcacccttggaaacggcgggtgtctctgcatcccctctgacgaggaccggatgaatgacattaacggtgtgatccgcaacatgcgagttaactatgcgggtcttaccccctcggtcgcacgtattttagatacagacgtaatctcgtcacttgagggtcttggtcttggaggcgaggctgtttcggcaagagactgcacggtctggggtaaactcgcaagaattatcatcggatacggaccttgcgagtgcacgattggatgtacagtgaacggcaacgctgcaactggcagggattatatttccattggcaagggcaatggagcagctatgtggattacggaccctaacgaccatgaactgctggtgccagtcggtgctgtaggtgaactgcttgttgaagggccaatcgtcgg

SEQ ID NO: 21641 - DNA, 467 bp, Emericella nidulans
ggtgattagagctgatgcttcggtagctgttattggattaacgaagctcgtatgtcctaccctcccaatatgatatcccccacccattaatggatctacgattgatggatgtaacgaacaggacgcaaaaaactacgccaaagacggtgtccgcatcaacgccgtctgtccggggtaagtccattatacttttattttatatttccggcataattccctgcttgttgcccatgtgtctgtctccacgggcgaaatatatgcctaaacccggtaccagcttcgtcgacacgccccttacccaccgcaacctcgaagaaggcgtgctttcacccgagattgaaaacacggtgctgaagcgcccggcgaggccagaggagattgcagacgcggtgctgttcctgacctcgcggatgggcagttatatgtgtgcggcagctttagtcgttgacgggggttatactgcttga

SEQ ID NO: 21642 - DNA, 588 bp, Emericella nidulans
atgtcttcccaagaatactacagcgacagcaaataccccggccatggccagggctatggcaatcagggtcccatgcctccaactgggtatcccgcataccctccagcttcaacttcatggccagcacctgcaaacgacacagcatatttgtcacaaactagcaacggatatcaatacccgcaggaatactacggcggctatcagcaacccccgcctccgtactatcaacaccctgaatcgccagcgccagcgccagcgcaggctccatactcatacccatacccaccgcagcagcagtctcagccgacatatccgcaacatactgaccaagacgttcacgcccgtcaagactacaatgaccgtggggtcctaggggccctaactggaggcgcggcaggcgcatacgcagggcatcaagttaaccatggggtgcttggaacaattggaggtgctatagcaggctctttagcggaagacgcaataaagaaacacagttcacacgggaaggttgacaagaagaaggaaaagcggccgtggaggtttcaccggcgccgttcttcgagctcatcgtcttcatcttcctctgat

SEQ ID NO: 21643 - DNA, 837 bp, Emericella nidulans
agcaaaatgttatccatattgagaaaagcgaggctaaaggataaggagatgcgaatcctgatgctgtacaatccactttgaccagaaatcttggggaaggtcgctaatcagcagtagagggctggacaatgcgggcaagacgaccatcgtcaaacgaataatgaaagaagatgtcacgactgtaagcccaacgctgggatttatcatcaaaacaatagattttgaagggtattttctggctgtttaccgtttttgttcataatcactgactgtctctagataccgattgaatatttgtaaggagcccgacagtgtggccacccagccgctaacgcttgcccaggggacgtcggagggcaaaaaacactccgttcatattggaaaaactactttgaaaagacagacactttagtttgggtagtagatgccacggaccgactgagaattggtgattgtcgcgacgaacttgctggtcttttactagaagaagtaagctgatgcccgcccggaaaacttttatcgactggcgttctcgatgagcttaccacaaccgagcagcgtttaatgggcgcgagccttctggtatttctgaacaaaactgatgtggaaggatgtatgacccaagacgaggtcaggaaggtgggttgcttttttttccccattgatctgttcaaggatccggggtctttctgactctccgtgcagaacctcgctttagattcgatcaagactcataagtggactatactgccttgtagcgcgatgacaggggcgaatcttcatgagggtctgaattggattgtgcaggatgcaaaggacaggttattcctatactga

SEQ ID NO: 21644 - DNA, 631 bp, Emericella nidulans
gctcatgtgctataacgtcagaatatgctcgcttccctcccggacaatcaaatttgagatctgggataccgccggtcaggagcgctttgcttcgctcgcccccatgtactaccgtaatgctcaggcggcattggtagtctacgatgtgaccaaaccctcttctctgaccaaggccaagcattgggtggcggaactccagcggcaagccagtcctggcattgtgattgctctcgtaggcaacaagttggatttgacgaacgacggcggggagacaccagctgagaccgaacgcgaggcgggtacagagggcgacgacgctgacgacaaccaagaagagcaggaggataatacacctggagatgctcgcaaagtacccacacgggaggcgagtacgtatgcagatgaggagggacttctattctttgagaccagcgccaagacgggcctgaatgtgacagacgtctttactgcaattgccaatgccattcccgagagcagtctgaagagtggacgaggcgctggcgcaggcaccggtcagactacgctagggggtggcggccgatctactgacgactcaagagtcaacctgggagatcgcggcgccgcgacagccaaggagggatgcgcctgt

SEQ ID NO: 21645 - DNA, 768 bp, Emericella nidulans
ggccaggaagattgcgcttccgtactggagcagttcgtccacgatgtcgcgaaccttcctctagagatcaaccacttgatggaagaaattcaagcaaaagacaaaatcattcaggagtgccgcgctattattaactcgcgcgacgccagcatccagaagttcatcaaacttaacggcagtctcaccccgaaccctaaagaagaacaatactcgaagatcgtcctccagaatctcgacaagtcaagccagctgcaggatgagaagatccagttgagcgagaaggcgtgcatcctcctggaccggcagatcaagaaactcgatatcaagatccgcgacctgcaaaacgacggcgtcctttccaatgatcctcccataccctctctcttcaacaataaagaccagtaccgcgacccgcccaagatcttctttcccgactcctccaacgactccgcctcctacacatctcctctcgctgcatcctccggcaacgcaaacccgacaccccgactcagcctctccctcaaccgccctcattccgcggccgctctatctcagactgcacgcagctccgcgcccgcgaccccagccgcaaccgcgcacttccagcagcgtcagcgtgaatcatctgccggcgctatcgatagcaagcgtcgtcgtctaaacgcgacgctcggctcccttcctgctgcctcttccaacaacacaacaatcatccctcggcccaggaactccgaaagcaggaactccggcctccagtcgtccggaaga

SEQ ID NO: 21646 - DNA, 850 bp, Emericella nidulans
  unsure (1)..(850): unsure at all n locations
tcgaaagttcaaaacccgcttgaaaggaaagaaccgcaattacattgctcaagtcatccgcttgatcagctctatagcagatcatctccagtctcttatagataataaacaagcaagtgaaggctctgttctctcatctgacttgatggcagggaagggggctgatcagatcaatccgtacaaactctgccgatatctgaatgagagcaaactagcaaggaaagtcgacgggtatattgatttttcacaaagcaaagcgaatgcccaagctgagcccaagtctacgattcctgttctttttcatatacaaagctttctcctgccattaatgaatctttcttctgaagggagactgttcttcacgaaaacccccggggatattcagcttcattatatgcttcttgacccaacaaatcattttcgggagatcgtcgaggatgcgagggctgtcatactggccggagggaccatgtctcccgtaagattcttgtgcctttgcttgacaacgttcgttctctgacggccttacagatgtctgactacttaaaccatttattctcctatgtcccaaaggatcgtctaaatactttcagttatggccatgtcattccatcggagaacctgactgcgcacactctggctcngggcgttacaggttgtgagtttgactttacatatgccggtcgtgatgcagagaagatggtacggacccccccggccttccctgcagcatgccaatagtttttaacttcggtactagatacttgacctcggacggacattcactcagttatgtcgtgcaataccagaacgcattgttgcttttttcccgagctacgagtatttaacc

SEQ ID NO: 21647 - DNA, 850 bp, Emericella nidulans
tttccgaagtctcggtgccctcggccgagaagccacctgggatgacttccctaacggccgttggggtgatgctcgctctccagcattcggtgaaattgacggctatggcccatctcttcacgtcgctccatccgttgctcatcgaatatggggctaccctgtttctaccgacgatatcagcaagcttttcaggcgccatgtatccggtgatcttcatatggtcccgtggtctgaaggtggcgctgaagaaaacaccagcggcctcaatgccgaaacagaaacaattcgtcctgaacttctcgctcttatcgacaagaagggctggtggacctcgcttcccagccggccgtcaacggcgtgcgcagcgacgaccccatcttcggctggggtcctcctggcgagggcttcgtcttccaaaaacccttcgttgagttcttctgcccagcctccgactttaaaaccaccctcaaacccctcctccagaaacacggacacgaaaagctcgcctggtttgcaaccaacgctgctggcgattttgagtcttctcttcccgccgaaacatcagacaccgagcccgttgagatgaacccgaacaatgtcaacgccgtcacgtggggtgttttccgcggcaaggaaatcgtcacacccaccattattgaggaagtcagttttccgcgcgtggggcgactgaggcctaccgtatctgggatgaattgcgccgtatttatcccatgagttcggcttcagagaagttcctcgagaagacaaagaatggatgttggctagtttgtgttgccgacaggattttggagctgcgccggaggtagggtcgagggagaggtattttaaa

SEQ ID NO: 21648 - DNA, 850 bp, Emericella nidulans
gctggtgaggcgggaattgcagaagcgtgtcgcagtttcggggggatgcacattatgtttaacaacggctccatgacttcggagcagattgtcgaaaatgctgctgccgatcaggtgttcggatggcagttgtgtgggcagaccaatcgcaagaagagtgaggcccagatggcgcgtgtcaacaagctgaaggtgataaaatttgtggtcttcattctcgacgccccagttcctggtaaacgggaagatgacgagcggggcaatgctgcaaccggtgctggccaaggcgagagcggcgttggtaagcagtttttccagggaacggacccgacgctcacctggagggacaccctaccttggttgaaaaagcataccgacctacccatcatactcaaggggctccagacccatgaagacgcatatattgcatcgctccacggtccccaggtcaagggtatcattctttccaaccatggtggacgagctcttgatactgcgcctccggcagtacatactctgctagagatccgcaaatattgtcctgaggtttttgacaagcttgaggtcttggttgatggcggtatccgacgcggaaccgacgttgtaaaagctctttgccttggcgcgaaggccgtgggaattggaaggcccgctctgtggggtctgggagctgggggtgtcgccggtgtcaagcgcacattacagagtatgactcctttcgcattaaaagctatagcgaacttcctgactgtgtttagttctggccgacgagacgtccaccgctatgcgcctgcttggttgcgagcgcgtagagcaattgggacctcaccatgtaagcttccggctctta

SEQ ID NO: 21649 - DNA, 850 bp, Emericella nidulans
tgcaacgccgagtgattctgtctgggacgcctattcagaacgacctttcagaatattttgcacttctcaatttcgccaatccagaccttcttgggtcgcaaaacgaatttcgaaagagatttgagatacccatcctcaaggggcgagatgcagcaggcacggaagaagacaggaagaaaggcgatgaacgtctggcagagctttccagtatcgttaacaagtttatcattcggcggacaaacgacattttgtccaagtacttgccagtcaagtatgaacatgttgttttctgcaatctttcacaatttcaactggacttatacaaacatttcatcgatagtcccgagatcaaaagtcttctcaggggcaaaggcagtcagcctctgaaagcgatcggaatactgaaaaagctctgcaaccatccagacttactgaatctttccactgatcttcccgggtgtgagcacgcattccctgatgattatgtccctgtggaagcaaggggtcgagacagggacgtcagaccttggtattctgggaaaatgatggtgcttgaccggatgctggcgcggatacgccaggatacaaatgacaaaattgttctaattagcaattatacacaaacactagatttgtttgaaaagcttgcaggtagagagcatatgtttgcttgagactggacggtacgatgaccgttaagaagtgacagaagctggtcgacaagttcaacgacaccgacggcgaagagtttgtattccttctcagcagcaaagccggtgggtgtggtttgaacttgatcggtgctaatctacctgtcttgttcgatcccgataggaactcggcatcagac

SEQ ID NO: 21650 - DNA, 560 bp, Emericella nidulans
acagaacaacgcatcttgccaagtgagaggccattcgcgacttgtgctcttccggtccctccatctttgttgatcttccctagccctggggccggtctcgagctcgccctttgcacgcatctccgcgttttcggctccaacagccccgtcgccctaccgagacgaagctggcgatcatccctggcgcaggcggtacttatcgccttccgtcgctgattggtgtgaaccgtgcccgggacctcatacttaccggacgccgtgtgacgggacctgaggcatactttatcgggctgtgcgatcgactggttgagatccttccggaagaggagcagaaggagggtgctgcgcgtgagaaggtactgcgtgagagcatcaagcttgctctggacatctgtgacggtggtcccattgccataaagcaggcattgaaagcagtcaacgggtatgagcagggtgaggcggcagagaacgaggcgtatgatggtgttgtcgagacggaggacaggcgcgaggctctgattgcgttcgcggagaagaggaagcctgctttccggggccga

SEQ ID NO: 21651 - DNA, 850 bp, Emericella nidulans
ccgctgatgccgattttaatgccgagtatggagagctggaaccaggtcctgcagtttacgctgaagcaagtgaactcgcggacgagtttagcacgggacggggagctcgataaaggcgacctggaggaggggaaggatatgctaagccggtggatggcgatccatgtcgctgatccagagaagatgagcacccgcgatgtgattgtgcatctgtcgaccaacgtctttgcgggctcggatacaacggctattgcgctgcgggcgattatgtatttccttctgaagaatcccgacaagatggaaaaggctgtgggggagatcgaggccgctgatagcgcgggacgcttgagcagccctatctcgtacaaagagtcgatgacgcacttgccttacctgggggccgcgatcaaagaggccatgaggcttcatccgaccgtggggttgatcctggaacgacatgtgccagagggtggagtcacggtctgcgggaggtatattcctgccggacgaccgttggcatcaacgcttgggctctgcaccacgacgagaaggtgtttccgagccccggggcatttatgcccgaacggtggctggagagcccgcctgcgaaattgaaggagatggagcagagcttctttgcctttggtgctgggtcaaggacttgtgtgggtaagaatatctcgctcattgagatgcacaagatcatcccgcagctgctgagggatttcaccttccggttgcatagaccaggcgacgagtggaagacaaagaacgcttggtttgtgcagcaggagggtcttgttgttgatcttgagaggaggaggtgatatccagacattcattgtgcatt

SEQ ID NO: 21652 - DNA, 850 bp, Emericella nidulans
  unsure (1)..(850): unsure at all n locations
tgaagacgaggtggattcctggatttcgggactggggtctcggagagaagaatcacttgggttatttgcgtaccctgcgcagtcgaacatgaatgggcgtcgtgttccaatgcgatggtgcgagcagatacgtgcgcaaaaggaaaatgcagacaacatgatctacacgcttcttgatgcggcatccttcgtctcaacatctnccattgatttaagcaaaatagcggccgccccggattttacagtactcagcttctacaaaatattcgggtttcctgacctcggtgcgttgatcgtccgcaaaagttctggagatgtgttcaagcaccggaagttttttgggggtggcacggtagacatggttctgacggacgggaatccgtggcatgcgaaaaagcaatcttccatccatcagagcttggaagatgggacactcccgtttcacagcataatcgctctggattcggcatttgagacacatggtcggctgtttaggtctatggagaacgtcgcttcccatacgcgtttcctagccaagcgactgcgtgaccggatgaatgcgttgaagcactacaacggaacgaaagtctgtcagctgtatatgtcgcctaactctagctacgacgatgcctcttcacagggtccgattcttgctttcaacttgcgaaacagtcggggcatgtggatcggtaaatcagaagtcgaaaggctagcgagcatcaagaacatccagatcagatccggaacgctttgtaacccagggggtacagcgttaagcctaggttggacaggggcggatatcgtcgccacttctcagccggaatgcggtgcggagatgaccacgacatca

SEQ ID NO: 21653 - DNA, 500 bp, Emericella nidulans
caaaatcttgttaatttacaaataaattaaatgtgaagtaagataatttatccttgggtatagggtgggtaattaaaaaattaaccaaaaatttacatgccaccaccaactttttttatttttaataccagtattagcaataatcttgctagctgttaatttaatattttccacctcatatccatatcaagagaaagatagtgcatttgaatgtggttttcattcctttttaggacaaaatagaacacaatttagcatatctttctttatatttgccttattatttctactatttgatttagaaatattattagtatatccgtatgtggtaagtgcatatacaaatgggatatatggtttagtaataatgttagtattttttctagtattaacattaggttttgcatttgaattaggtaaaaatgcattaaaaattgaaagtagacaagtttataatatacttataaatcttaagtggttattcattaatatataataaa

SEQ ID NO: 21654 - DNA, 300 bp, Emericella nidulans
tgatctgcaggtgaatgcccagtacaagcggtgggtgcagagtgatataatggggtatcgcggatattgtcccgggcgagagggggagtgctgcaccaacatgggaagccggttgctgtttacagagaccaagacgggaaccagcacaagcttagcgcaatctgcccgcacatgaagggagtagtgtgctggaatggggccgagaagagctgggactgcccggtacagtctgttagagcaacggaagctgccaacagtatagaccaggatatcgtgtagatgctgaccctgtgcctgctg

SEQ ID NO: 21655 - DNA, 611 bp, Emericella nidulans
gttgattcaaaagtacttgaagatggtcccctttggtacgacaggtcttacaggaagcggccgaacatgagccgtcaatggtcttcattaatgaaattgatgcaatcggtacgaaagttaatgattcaacttctggcgggaaaagagagatccaccgaacgaatgcttgagcttctcaaccagttagatggattcgacgaccgcggagacgtcaaggtgatcatggctacaaacaagatcgagaccctcgaccctgctttgattcgtcctggccgtattgaccgaaagattctgtttgagaatccagatcgtaagtattaccttcagatccaatatagtggtgatgctgacgtaaaacagaaaacaccaagaagaagatcttcactctccatacctcgaagatgtccctcggagacgatgtcgaccttgacgagttcattaaccaaaaggatgacctctctggtgctgatatccgcgccatttgcacagaagctggtttgatggccctgagagagcgccgcatgagggtgcagatggacgatttccgtgccgctcgcgagcgtatcatgaagacgaagcaggacggcggtcctgtggaaggcttgtatttg

SEQ ID NO: 21656 - DNA, 850 bp, Emericella nidulans
cttacatgcaagacgatcgtgatgttcgtgatgagcgcaaggctcagggccttgagcctgcctacagcttcatgattcgttgccgtctccctggtggtgttgctactccctctcagtggctgcagatggatgccatcagcagcgcttatggtaacgagaccatgaagctcaccacccgtcagaccttccagttccacggtgtcgttaagcgcaatcttcgtggagctatgcgtgcgatcaacaaggctctgatgacgactattgctgcctgtggtgatgtcaaccgtaatgtcatgtgcagttcgctgcctgagctctcctactaccatcgtgaagtgcacgccgtgtccaagaagattagcgaccatttgctccctgccaccactgcctatcacgagatctggctccaggatgagaatgacaagaaggtccaggtcgctggggatgctgttgttgaccaggagcccttgtacggtcctacctatctccctcgcaagttcaagattaccattgcaattcctcctcacaatgataccgacgtatacgctcacgatattggtctcattgccatcaagggtgccgatggacacctggaaggtttcaatatcctcgctggtggtggtatgggtaccacccacaacaacaagaagacgtacccccagactggtcgcatgtttggttacgtgcccgctgatcaagcccacatcgtttgcgagaagattatgcttgttcagcgtgactatggtgaccgcaagaaccgcaagcacgcccgtctcaagtacacaattgaagatatgggcgtccaggcgtacaagcacaaggtaaaggctcttcctcgtgatggtaaccg

SEQ ID NO: 21657 - DNA, 845 bp, Emericella nidulans
ctattggttgtggtcactattatcgcaacttcgcgctggaagggtgcctcagaaaatggcccctgcccttctgataccgcgtgaaagtgtggaaaagcatcgccagcatggccatcgtgatgaggaatctcagtccaacgagaagacttctacgaaaggcaagagcgagggtgtacaggactctagcgatatagacaaccaactcgtccggaacacgtctgtctttacttggaaggacctctgctataccgtcaagactccgagtggtgatcgtcagttgctcgaccatgtctatggctgggtgaaaccgggcatgctgggcgctcttatggtatgtagtctttatttgacttgaagccactgctaacaagtctagggatcatccggtgccggaaagacgacactcctcgacgtccttgcccaacggaagactgccggtacaattcagggatcggttctagttgatggtcgtcctcttcctgtatcgttccaacgttcagccggttattgtgagcagcttgatgttcacgagccgtacgctaccgtccgtgaagctctggaattttctgctttgttgcgtcagccacgtacaacaccgcgggaagaaaagctgaaatatgtcgacgttattattgaccttcttgaacttcacgacatcgccgacacgcttatcgggcgcgtaggtgctggactcagtgtggaacagcgcaagcgagtcaccattggtgttgagctagtctctaagcctagtatcctgatcttcctggacgagccaacatctggtcttgatggccagtccgcaaacaacaacgttcgcttccaccgcaagttggctgatgtcggcc

SEQ ID NO: 21658 - DNA, 850 bp, Emericella nidulans
cccggtccgcacattgttgagcgcattgagcatgaccccggacggagtgctcatattgcgcttcttcgcagtaaagaaactgggaagctgagctatatcctggctgcagacggtatgagggcaggagatgttgtgcaaagttacatggctgggattcccgacgacctttggcagagcatgggaggaactgttgatcctggtgtgatggctgccagaactgcctggagaggaaactgcttgcctttacacatggttccggtggggtcgctcatattcaacgtcgggttgcgtcctggcggaggtggacagctgtgccgtagcgccggtacgttcgcgacggttatctccaagggtgtcaatcaggtggctgcagccgatcaagagagcaaagaaagccaagcggctggcgaagagaagaaacccatgacccagcgcgagaagcaagcccgtgagcgcactctccagcatatcaccattcgcctttcaagtggggaggtgcgccttattcacaaagattgctgtgccaccattggtgtcgctagcaacccaaacaagaagtatgcccaactaggaaaggctggaagatcacgctggcttaacattcgaccaacggtgcgcggtcttgccatgaacgctcaagatcaccctcacggtggtggacgaggaaaatcgaagggtaacgttgatccaaagagtccttggggtctgccggtacgtaactcgtcctttgtatgttcctgcaagttgctaatgggttatacaggccaaatctggctacaaaactcgccccaagtggaagatcaacaaagctgttgttgttccaagagtccggaaccaaggcaagcgtcgc

SEQ ID NO: 21659 - DNA, 500 bp, Emericella nidulans
ggtgggagaagagaggaggtattgggatgagagcagcgagggggggagaagagatgcaacagcaggaaagagagggatgaaaaaagaccaaaaaagtctgcaaaaacttgggctcaagcatatcctcgatcctaggaagtagacatcccagacaatgtccacgggttgaccgacggcgtcggcgcggatgtggtcttcgacacagcgggcgtggagaaggcgcttgacggagccattggtgcctgccgcgtccatggtacgatcgttaatgtcgctgtgtgggagaagaaaccgcagatcaaggtcaacgagatgatgtaccacgaggtgaaatatcttggctcggcattatacgatgagaagtcatttcaagacactatcgacgctatctcgaagggcctactgaaaccggagtccatgattacggataaaattaaactggaagatgtggtggagaagggattcaagacgctgctgcaggacaggaatacgcactgcaa

SEQ ID NO: 21660 - DNA, 383 bp, Emericella nidulans
aggatcaaatggctcatgaaatggtccacgcctatgaccacctaaggttcaaagttgattggacaaacaacccttaggcatgcagcttgcacagaggtagcaatggcgtccctttgtggatgtcctatacttgcagacgtggaaggactaatggcaaacagattcgagccagttcactcagtggagaatgtcgatgggctcgagagttcttccgacgcggtcagtggaagcttacacagcaacaccaagagtgtgttcgacgaagggctgttctgtcagtaatggcaaggccgggatgtcaggataaaggccatgccgagaaggttgtgaatgaagtctgggatagctgctttagggacactcgaccgttcgacgaaatcttc

SEQ ID NO: 21661 - DNA, 497 bp, Emericella nidulans
aagctattccggacaccacgcccagttgtatagtccttcatacggttcaggcgtattatgccagtcggccgtagagtatgttctcgggcagggcgtccatcgcaagaaactcctcctaggtatccctgcctatggccggtcgtttctcggcagtgacaatatcggacagcgatatgcaggctgcggtggcgaagatggagtattcgattactgcgagctcccgcgcccaggtgcgacggagtatcatgacgaagaggttgcagcagcgtactgcgtcggcggggatggtgggttcgtaacgtacgacacgccgaagactgttcagcagaaggcgaggttcgtaacccgagagcagctgggaggattattctactggcatattgggggggacactcgaggcccacggagtctcatcgagacggggtataacacgctgcatgaaatgtagatctaaggctggatgagcatgcagctgaagggaacgaagggggatggaa

SEQ ID NO: 21662 - DNA, 850 bp, Emericella nidulans
aggcgaggggtgctgcggcttcgaatatgaggagggcgcagaatttcccgacaatctacgactatggcccgtcaaaaatccctaagcctcagctccaatttgaacatcaagtcgatcctacggatacgtcgcctttcagacctctgctgaagacgaaaccgcatgctatagagccgttggagcagtcgctgacaccttcaattgacgcgcctcacggttctcgtaatccgtacgagacggagatccgtgctgcaaagtacccaagctccgtctataccgtatcgcccccgattgactatctgccctttgagacgacagctgcgactttcgtggatactttggacggtgtgaaagagatgctggcggaactgaaatctgcgcgcgagatcgcgattgatttggaacatcatgatgtacattcttatcacggtcttgtatcgctgatgcagatcagtacccgcgagaaggactgggtggtggatacgctcaagccatggagggaggagctgcaaatgctgaacgaggtgtttgcagaccctaacatactgaaactcttccacggatcgagcatggatattatctggctgcaacgcgaccttgggctctatgttgttgggatgttcgacacgtatcatgcagcctgtgctctcaactacccgaagaagagcttgaagtatctgctgcataaatttgtcaactttgaagccgataaacagtaccagatggccgtctggagaccccgaccgcttcaaaatggcccctttaacgatgctcgctccgaccaaagagacgcctcgacatatgcgacaatcttcgctacgagctgccccgggggtattcataagttttt

SEQ ID NO: 21663 - DNA, 850 bp, Emericella nidulans
cgatcttgggcccatgatcaccgagcaccctgggatcgacaagatctcgttcacaggctcgacggctactggtaagaaggtcatggccagcgcgtcgaagacgatcaagcgcgtcactctcgagctgggcggcaacgacgccgcgattgtctgcgacgacgtcgatatcgacaaggtcgttcctaacgtgtgtatccccccgaccgtttcccttatagcatcgtctcctgcccgaatcaacctgcttgagaagatgcttgaccagccaagcccgacccttcccttaccgcgttgtctcagcccgaactctatccctccacccctatagtagtctctagctaacaatggcggcagctcgctatcctctccttcctgacctcctcgcagatctgcatgatgatcaaacgtctctacgtgcacgaaaagatctacgacaagttcctgcaaaaatttgtcgcgtttgtctccaacttcaaggtcggcgccggcacgcaggaaggcgtcttcatcggccctgtgcagaacgagatgcagtataagaaggccaaggacctcttctccagcatcgagtccgagaagctctgcgctgtcttgggcggcacaatcaccgcgtctgacggctactacatcgcgccaacgatcatcgacaacccgcccgagagctcgcgcgtcgtgcaggaggaaccgtttgcgcctattctgccggtgctcaagtggtccgacgaggacgacgtgattgcgcgtgccaacggaaccgacagcgctctggcagcgagcgtctggagtgtggatatggagcgggcgcagcgtattgcggggcagctggccggagggtcagatgaacaactgt

SEQ ID NO: 21664 - DNA, 850 bp, Emericella nidulans
  unsure (1)..(850): unsure at all n locations
tactcgaaaccaacggccacgcgcccgggagatcatctctttgaggtatagaaacttaggctgtgtcacgcgcggctggtgggcgcctttgtggacttttatttttatgatttattactatgttcttgtaggtttttttccttttcctttacttttttcttactttgtggttttttatttgtttcttcatttatatgaatttttattattttttacatttctttgtttgtttttattaactaatatgtctatttcttgggttgatgttttggttgctatagtctgttctgacttttatcttttattcggtattgttatactgctttatatgtttctttgtatttattttgtgtattattctaagtttttttgacattcttccaattatgttgacctttgttgctgatttttactgttttttattcataataacatgtgtttaatttctcttttccatttctattttatattttttgtttattgctttttctactctttattatgtcgtcttttttgcttttacattgtttatcagatatattgtatctattttttttatatattattaattttatagtatttaattttcttactttgttatgtttcatttttgaggggtggttttttcattttttgttcttcattaatatatttttcacttatatttattttattccatttttttattatcgttttttttttttttttttatttttttcttttatacttctttatatcttttctttacttacccttttcactttacccttattttcctgtttctcntcctttctacttctcatctatctcctctattaatctttactttactattgatggtaggtgggtg

SEQ ID NO: 21665 - DNA, 850 bp, Emericella nidulans
ccgactggcatcatcccgatgcggctgatttctgggccaacgagctcgtgacttggtatgagaaagtcaaattcgatggagtgtggtacgacatgagtgaggtatcgtctttctgtgtgggaagctgtgggtctcgaaaccggacactcaaccccgttcacccgcctttcagattgccaggtgaaccgggcaacgttgattacgagtatcctgaaggatttgagctgtccaacgcgacagaggctgcttcggcatctgcagcttcttcgagccaggccgcaaccaccgccacagagactacgacatccaccagctcttacttgcgtacttcgcccactcctggtgtccgtaatgtcaactatccaccttatgtgatcaaccatgtccagacgggccatgatcttgctgtgcatgcagtctcgccaaatgctactcacgttgacggttatcacgagtacgacgtgcacagcctctacggacatatgggtatccaggccacctaccgaggtttgactcagattgcgcccaggaagcgtccattcatcattggccgctcgacgtttgctggctctggaaaatgggccggccattggggcggtgacaactactcccggtggtcatccatgtacttttcaatctcgcaagcgttgcagttttctctctacggcattccgatgttcggagtcgatacgtgcgggtttagtggaaataccgcggaggaactctgcaaccgctggatgcagttgtcggctttcttcccgttctatcgtaaccataatgttcttgggacaatccctcaggagccttatcaatgggcatcgaaaattgatgccaccaaaaaggcgatgag

SEQ ID NO: 21666 - DNA, 742 bp, Emericella nidulans
atggttgggactttgccagcggggcacaccccgtcgcatgtgcaatcgtcactcccctcattaccagcccatctacaatccgatacccatcttaccgcacatttagccagtcggtacgtggtctttctattattctaggtagaaactagctgatttgactgtctaccagcttccatgtcggcctacccaccgcgcggctttcctcccacgcactaatcagcttaaacaactacacctcatcttcgaaaggtcctgatggcgggaaagaaggtagtgctatgggcgagaccgaggacctcgctcggagggcttatactcggctcggtgctcgaggagagaaccaagcgattgttttcctgtaagtttccccggcgttgtctctgattcaagcagcatttactgaatatatccagaggcgagagtggcgccggtaaaacgactcttcggtctcaccttctctcatcattcctctccttttcgtccactccgctgtcatcaaaactgtcctatgccgctttcattttcgacaccctcaccacaaccaagtcattgacgacacctaccgcgtcaaaagctggattgttccctggaactgcaatatgatgcgtcctcctccgttaacccgactctaataggtggaaagatcatcgaccacagacttgagcgtagtcggattgcttcggttcccacgggcgaacgtagcttccatgttctatattatctgcttgcaggaacaagcgcc

SEQ ID NO: 21667 - DNA, 850 bp, Emericella nidulans
atcacctcggtgagtttagcctggcgactattgaagaataatttagaggcggtcggaccggcgactaactagaactctcactttcaggtccttatcgcgaataacggtattgcggccgtcaaggagattcgatctgtccgaaaatgggcctacgagacattcggcaacgagcgtgccattcaattcacagtgatggcaaccccagaagatctggcggcgaacgccgactatatccgtatggctgatcaatatgttgaggtatggaaacgcctttcggatgattcggagtgtatataatataggtcaaatttgttaaatctcctcgcaggtccctggtggtacgaataacaacaactacgccaacgtcgagctgattgtggatgtggctgaacggatggacgttcacgccgtctgggccggttggggtcacgcctctgagaacccccggttaccagaatctctagccgcttctcccaaaaagatcatctttattggacctcccgcctctgcgatgcgatctcttggtgacaagatttcctctactatcgtcgctcagcacgctcaggtaccgtgcattccgtggtctggaaccggtgtagatgaggtgaaggttgatgagaacggcatcgttacggtggaggaagaggtttacaacaagggatgcacattctctccggaagagggtctagagaaagccaagcagattggattccccgtcatgattaaagcctccgagggtggcggtggtaagggtatccgtaaggttgagaaggaagaggactttatcaacctgtacaatgctgcggcgaatgagattcctgggtcacctatcttcatcatgaagcttgcc

SEQ ID NO: 21668 - DNA, 850 bp, Emericella nidulans
gcacacgaaaactgctccgaacgatcactcggttcgatgacactgcgcgcggcacagacgttcgtcctgatggcaggattctagtagcgggtgatgataccggtacattacaggtgttcgatgttggttcgcgagcgattttgaagacgtggaaggaccacaagcagccggtttgggtagccaagttctcgcctagcgatccgacgtgtgttctgtccgcaagcgatgaccggactgtgcggttgtgggatctgcccagtgagaacagtatcaaatcattcgtgggtcactccgactatgtgcgtactgcggcgttcatgccgggttcgctggcttcgtctggctcgttagtgtctggtagttacgatcgaacagtgcggttgtgggatccccgtatggagggccggtctgccatgactttcaagatgggcgcgccgctggaaactgttctccccatgccgacgggcacgacagtgctggccgcggcggacaacaagatcgcggtgttggatatcgtggctggaaagccactgcatatgattcagagccatcaaaagacagtcacatcactctccttagcatcggacggaacgcggttactcagcggtgctctcgatggccaccttaagattcacgaaacaactggctggaatgtcgtggctggcttcaaataccagtcgcccatcctctccctctgcgcaatcacctccggcgctgcacgcgaagacaagcatattgccgttggtatgcagtctggactgctgtcaatcaagacccgtctctctggtcagaaaaaagcgcgcgagcgcgagcgcaagaaggaaatggaggcccttcttagggaaagatt

SEQ ID NO: 21669 - DNA, 503 bp, Emericella nidulans
ttgaatgcagctataatgtgatgttctcaatagctccttcaagaaatcgaatcccgcgtgataacctcgcagcaacagattgggatcacgaaggcacaaatgacaagcaaaaaccgtgatatccgaatgctagagctcacatcaaaggagctaagctctttgcccgccgatactaatgtttatgagggcgtcggaaagatgtgagtgccatatcttgccttgcggacaaactttggggctgaaacgggccgtgctatattacgggacctggtatacaaataagacaagacggattgggtgaataagagtaaatgaaacggatactaatgtcacttaggttcgttgcggtccctagagccacagtggacaagcggatatcgacagagaccggagagttgaagggggagatagagaatctggagaagaggatgaattatttggagatgacgtttaagaacagtcgggagaatctggaggctattttgaagtctggacgggcgtga

SEQ ID NO: 21670 - DNA, 690 bp, Emericella nidulans
gttcactatggatatggaggcggaaatggtgtgtctagaaatctcctctgcttgtggttgccagttactgacaacctgacaggtctcgggagtcaaaggagcgaagagctgcttcagctacaaagccggccgtctctggccgtacaagttcatttgtggcctgctcaagaagtgtatagccaagggggccaacttgcagacgaacacccccgtcgtagatgtatctgagtcaaacaacggctggatagtgaagacagagcgaggattaattcgagccaaacaggtggtcttcgccactaatgcctatacctctggcattgcgcccgagtatgcagacaaaatcgtccccgttcggggcatttgcagccgcgtcgtggtaccgaacccgccacatcctctgagcccgactttagattcctcatacacggtgcgcatcaaagagggaatctatgagtatctggtccctcgcccagacggaagcatcattattggtggtgccagatcagtctatgtacacgacctgaagaactggtataacgtcacagacgacagccgtttgattgagccagcagcgcatcactttgagggctacatgcaaaagtatttccacggatgggaggatacaggagcatacactgaccgggtatggacgggcagtaagtgaaatgatgtctatcatatattgagaga

SEQ ID NO: 21671 - DNA, 825 bp, Emericella nidulans
aacagacgggggttccaaaaacttggtgaaggcaagcacacggacaaggttctggacaatcaaagggaccgaagaaaggacagggaggatctgtcgtttcgtcgcttttctcgaaaaatccgcgaccccgcaacgctgtggaggaagacaagaacgacgagccgatggaagatgcgaagccgactaacgccccgctcattgacggactggacacattcacgaatcttgggttgtcgcctaccctcgctgcacacctgctcacgaaactcgaacttaaagctcctactgctatccaaaaagcgtcaataacgcagctcctgaaggaagagacggatgcgttcatccaggcggagactggttccggaaagacactggcttatttactcccactcgtgcagcggattatggctctttcgcgcgcaaagaacgaaggtgatgcgaagggtgacacgagcgtccatagagacagcgggttgtttgcgattatcttagcacccacaagagaactgtgtaagcagatctcggttgtcttggagggactgttgcgctgtgcgcattggatagtcgctggaacagttattggtggtgagaagaagaagagcgaaaaagcgcggttgcggaaggggctgaatattcttgttgcgacacctggtcggttagcggatcacctagaaaacacgcaggcattggacgtgagcaatgtacggtggctggtgctcgatgaaggtgatcggttgatggagcttgggtttgagaaggagttgcaggagatcattagcaaacttgatgcgcggcagcggccgagtcggattcctggtgttccag

SEQ ID NO: 21672 - DNA, 385 bp, Emericella nidulans
gatctacgtggttactcggattcggcttgatatggcactggccattagagcccttgccctctgtgtactccgagatcatgagctctgccctggcggaattgatgcattggatcagcttttgcatgattatctgaccgaggaggtgttcttggcacaagcgggaaccggggatgatattcatttttctgacacagctggcattatatggctgtgatggctacatgcgtgcgggcatcgaaatgcactaacgggggacatgcttgtggatactgaatgatactactgggttgaggcgatgctattattgggcatgaagtctgatatggcggcgctgatagctgaggatacatacataggtaagaatgcgaaaggcgaccgcttgacg

SEQ ID NO: 21673 - DNA, 430 bp, Emericella nidulans
cgtgtagtctgtatgagctaatggatgtaggcgcgaggatcctcgtaacaaactcggatcaaatgtgcgagaatatcattgtgggcggcctcttcgtgcaaataatcttcttcggtttctttgttacctgctcgttcatattccagcgtcgaatcagcagcaacgccaatgcgctcgggaacgccagcacaacaccatggctaaagcacttgtatgcgctatacggctccagcatcctgattttgattcggtccatcttccgcgtggtagagtatctccaagggtgggatggctatctgttgcggaatgaagcattcatatacgtgttcgatgcactgctgatgtggttggtgctagtgatcttcgtggtcatccacccgagcgaggtgaattgtcttctgggccgggggcgtgttatgataaccaaagg

SEQ ID NO: 21674 - DNA, 850 bp, Emericella nidulans
tgctcagcctatatcgacgatgtgcttgtctataccaatggggacctccgccagcaccggaagcatgtatgaatggtcttgaagaaactggaagaagcaggcctatatttggatattaagaagtgcgaatttgagtgcaaggagacaaagtacttgggctttataatataggcagggaaggaatttaaatagacctagagaaggtaaaagcaataaaggaataggaaacccctactattataaaaggtgtccaaggattcctgggctttgctaacttctactaaaggtttatccctaacttctcagggatcatatacctactaaacaacttgacaaagaaaggaatacccttcttatagactaaggagtgccaggatagctttaatctgcttaagaaaaagtttattactagacctatcctagcaaccttcaacctttcctactatatagtagtagagactgactcctcaggttataatacaggaggagttctttcttaatataataaaaaagggaaattgtacctatatacctacttctctaaaaggaattctccagctgaatataactacaagatctatgacaaggagctacttataattatataataccttgaagcctgggatgctgaactgtacttatatagagaattctaagttattataaattataaaagcctagaatactttttctccctaagaaaattaatagaataatatatataatagtccttatttcttagctagcttgattttaaactagtatatagaaaaagatcagctaactaaaaagctaatatatttttataaaaaaattaagttatacctaataataaagataacaggcttaa

SEQ ID NO: 21675 - DNA, 850 bp, Emericella nidulans
ggaactcactcccgaagtggaacgtcgagtttcagaactcaacttctacgacgcctgtgtcggatggaaaggaggtcccttttgtgaacttcatcgcctatcgggatcctcccttcgcagccaagggcgatgtgggaagattgaccctcgtcgcccattacgatagtaaatacgagcctaaaggctttatcggagccattgatagcgctgctccgtgcgcgatgattatgcatgcgatgcgcagtatcgacgaggccttgacaaagaaatgggaatccggctctcctgacgattatctcgagtaccacggaatccagatccttttctggacggcgaagaagcctttaaagcatggactgacactgattctttgtatggggctcgctcacttgcgcaacactgggattctgaagtaaatccagcaatatcggtctacaaaacgccgctttcatccatatccctgttcgttctcttggacttactgggttccaaaaacccaataattcgctcttattatcgaacaacgcactgggcctatcagaagctggcgaatgttgaacgtcgccttagggatctaaagatgttcaagtcgaacggcgagacctggtttcctgacagctcaacaaatgagcggcaattatcttattatggtagcttgggggatgaccatgtcccattcctcaaacgtggagtggacgtcctgcacgtcatcgactactcgcccacgcgcggtggatttccaagtgtctggcacaccatcaaggacgatgctgaacacctggatatcgacacggtagaggattggagtcttctaattgctggttttgctgccgagtggatggaactggaa

SEQ ID NO: 21676 - DNA, 850 bp, Emericella nidulans
tttcgatgctagcccactaattacagcacagctttcccccagtattgcacgagtggttcgtggagatgttccctgagactggtgcttggtttgccgctaggcttcgctatactcggtcatgtgctgtaatgtccatggttggatatgtcctagggtatgttgatcttattgaatcaagcttaccttgctaaccgtccactctacagcctaggagaccggcacggtgaaaacatactctttgaggaaggcactggtggcatcctgcatgtcgacttcaactgtctttttgacaaggtggattgtctcgatcttcttggactgaccgaagaccataactaatcacgtgcatttagggggggacgttcgataagccagaggtggtgccatttcgcctcacgcagaatatgattgacgcctttggtgcttacgggtataatggttagtcttcactaatgcagattaatgtccttttttatttaacattcataggtccattccgaaaaacatgtgaactcagtctcgatctcctgagacagaatgaagacgccctcatgaccatactggaaacatttttacacgacccgacgactgattttattggcaaaaaggtacgtatctcacctttgcttattaaggcatagccaatattaacaccatcaagcgacgaactcatgcaaatgtcccggatactcctgctggcgtcctcgaaaatgttcgtaacaagctccgcggccttcttcccggtgaatcggtcccactgtcagtagatggtcatgtcgatgaactgatcatccaagcgaccgatgaacggaatctcgcggcgatgtacattggttggtgtgctttcttt

SEQ ID NO: 21677 - DNA, 597 bp, Emericella nidulans
tgctactgttgttgcggtattctttttattgttgtttcttgtgttttttacaatattgttatactttagcgtttgctttcctttctgttgttggaacttttttttggttcattcatgtgtgtagatattttggatgtttatagtttctgttttttttgttatgacttttattctgtctttcttgtcattattgtattttgattttggtgtattattgtatctcttcctcttttcttaattactctattttccctgtttgttttttttttcttactatatttgtttatttattttgttacttattttttcctctgtctattttatatcttttatctaatttttttattttttctattctcttctttatcatattctttttgctttgtttttctcgtgtttgtaattttttatatttgttctttctttattatttctataattttcaagtatttattattattttattatttctcatctattttaatatttttttgtttgattttttatttttatatttttataagtgtagatattttttttttattattatgttttttttttttttatttttatgttctttcctcacacactctttat

SEQ ID NO: 21678 - DNA, 793 bp, Emericella nidulans; identical to SEQ ID NO: 8401

SEQ ID NO: 21679 - DNA, 597 bp, Emericella nidulans
cacactcaatcaacgccgacagacgcaagcaatgacaacgataataccttcctcgctgcatcaatagacggtactattagggtgtgggacagacggcagccatccgccatcgcccgcatcactccccgcaattctccgccttggtgcatgaacgcctgctggtccccagacgggaattacatctacgccggtcgccgcaacggtacggtagaagaatatagtcttcacaagggtctccgtgagccagaacggaccttcaagtttccgcagggaagtggacctgtgacggctctcaaggcaatgcctaatggtcggcatctcctttggtaagtagccatccataataatgaaaatggaaggacattatctaacaaaaccagcgcatcccatgatatcctccgtctatacgatcttaagcacgaacaggcaacccgccactcaaccgttcctttcctcatcattcctggtcaccgcaccgggacagtctcgcagctatatgtcgatcaagcgtgtcggttccttgtctcaactagtggtaacagagggtgggaaggtagcacgacggaagtgctgctgggatatgagattggtgttcct

SEQ ID NO: 21680 - DNA, 850 bp, Emericella nidulans
acaagacgctctggatatacaatattggatgtgagttcctgccctccaaggacggctcgattcgtcgccgctaacagctatgctcttgctccagttgtcctttccatttccacgtttattgtcattactgttgcttgtccagctcgctcggaagtccacgttgactcgaaggaaatatgggcgataatgacgaatggatccggttggtcagacggcatatccttcttaaccggcttgtcaacgccccagttcatgctgtccggcattgatgccacgctccatcttgcagaggagtgtcttgaccccgaacgcgtcgtaccaaaggcggtgctggccaccgtcattgtagggtttctgactgctttcccctttgctatcgcgatcagctatagctaccgcgacgttgcagagtcgttgtccaccaacactgggtgagtatgcagtcgacctcttgcccatatacctcccagaaagttcctaattggcggccaatccaggttccctatcttcttcatctgggaaaaggccactcattccccagccgccgcaactgtgttcatggcttgcctatttgtcatctcatgtgttgcatttaacgctgtgcaccagacagcttcgagacttacctggtcctttgctcgtgatgacgccctcttcttctcaaagaaactctcacccgtccaccattccctcggtgtgcccgttaatgcgcttgtgctcgatggaatacttgtcttcctcgtcgggattgtctacatatgctcctcaacaggtacgccagtctctcacaacctactgtcccagaaatcgtgtaagttaacagtgaatatagccttcaattccttcatca

SEQ ID NO: 21681 - DNA, 769 bp, Emericella nidulans
aacttattccccacatggatgggctggtcaactacatcattatgcaacagcagagccagatcgacccggaactgaaccttgatgcggccgagttttggctggttgcgggtgaacaggctgcgttacaacaacccctggcgcctcatatgcccaagattgttccggtgctactacagagtatggtatatgacgaggaggaagctattcggcttgccggggaaggcgaggacgctgacgtggaagatcgtgaggaagatctgaaacctcagtttgctcggtcgaaggccagccgtatggatgtctccaaagccggcggacagcagaacgggaatgcgtcggcgcaggcgccggaggatgaggacgatgatttgagcgaaggcgaaatcgaggactccgagtttggagacgatcctgaggatgaatggactttacgcaagtgctcggccgctgcactggatgtcttctcgaacgtctaccacgagcctatttttgaaatcatcctgccttacttgaaggaaaccctgcgtcatgaacagtgggtgcagcgagaggccgctgttttgacgctcggtgcggtggccgacgcgtgtatggatgccgttactccccaccttcctgaacttattccgtacctcatttcattgttgaacgacacgcagcccgttgtgcggcaaatcacttgctggtgcctcgggcgttattctgaatgggcttccacatcgcagacctgcggacgtgctaggtttttcgaaccatgatggagggcatt

SEQ ID NO: 21682 - DNA, 368 bp, Emericella nidulans
accacgtgttctcttttatctttcctttgcagaaggcggcctatgtacttctatttggattcatcaacatctggaccgttatgattcacgatggtgaatacgtcgccaacagccccgttatcaatggagccgcctgtcacactatgcatcatctttacttcaattacaattacggtcaattcaccactttatgggatcgcatgggtggcagctaccgaaagcctaacgaagagctcttccgccgtgagacaaagatgggcgaggaagagtggaagcgacagaccaaggagatggaaactattctcaaagatgttgaaggtgatgatgaccgcaaatatctcgctgaggaagatagcaaaaagaacctg

SEQ ID NO: 21683 - DNA, 850 bp, Emericella nidulans
  unsure (1)..(850): unsure at all n locations
tacctattcagaagcgatcaagcatctgacggagctcctatacttttcgctcacgacactcactggaaaccgaacgctaggagaagagtattgtgacctcgttcagttagaagatgacacactacgactaccatcaattggaagacgtgtcggatatatcctcagcagcataatggtaccatggacacttcagcgaatccttcctggcttccggcaacgtctccgcgccaaactggagcgcagcattgccaggcaacaattgaaggcacagcaggcgaaggattcgacaaaactccgttaagaacaagtcgaacagccccctttcttacgaactacgaattcagaatacattctagagcatctagattcgatcacttctctgtcgccaatatatgccctaagcatagcgaccttctacttcaccggctcatattaccatctgtcaaaacgtttctggggactccgctatgttttcacgaaaaaattagaagagaacgaacagcgcgtggggtatgaagtgttgggagtcttactcgtcctacaaatagcagttcagagtattcttcacgtcaagaaggtcagccacagcctgcagtcggaggaccaagacgtacactccgaaacctctggatccagcagtaaagaagatactttgacccgctcgatcgaacatccagccttccttcctgtcctccccgtgtctaccgcgagatatgacctctcggaagatccgaacgcaatcccttggatttcagatggacagcaggcaagtgtacactctggcttgagtcattcaggacccgagtgtactacttgtgncacgtgttttgctggcatgcttgtgtgactg

SEQ ID NO: 21684 - DNA, 850 bp, Emericella nidulans
agggttcggacgttcacaattctcaaccgtggtgagcgacagtacatgttgtctacggaaccggcgaggtgtattgggtttagggactcgtatcttttcttccaaaaacacaagctactgtacaagatcattatcgacgacgatgccaagcgcgatttgatcgagagagacattatcccccactcctacaaaggtcgcgctattggtgtggtgaccgctcggtctgtgttccgggaatttggggctaaaatcatcgtcggtggccggaaagttattgatgattatcaagctcaagctgccagagaacgtggcgatgtggagggtgagctcgctgtgccggaggacaagctccccccgccaggagaaccctacaacaagaaccaatatgtggcatggcatggtgctagtagcgtttatcataccagcacgcctgctgttcctatacctggtactggaaaggtggtggattccaagaaacggagggttactgttacaggagacaactggatgttggaacacgctcgggaagctgcgtaagtcaatttattcccaattctatccagaacggtttactaattatatacagcaacttcaatgccgtcctatcacatacacgccagcagaacctcggaggcgtctatgacattcacacgaacattatacactatcccaagattatgcaaccaacgcacgctcgttgggagagagtacctccttccgacgctcggggcgccaataaacttacgaaagaaatgtcaacgctcacgttgtcgaacggcgttgtcgaacaggagaacgctccggcagaaccagaaacggaaatccaggacagcaagccggccggagagac

SEQ ID NO: 21685 - DNA, 850 bp, Emericella nidulans
cgcgagcctacgtcgaccccacaacccgtatgtctctcattcttgggaccgggacgaatgtggccatacatttccccgttcacgctattgggctcggaaagtttggcaagaggccacaaggctggttcgactacgctaagcatgtcatcatcaacagcgagatgagcatgtttgggggtggagttctgccaatgacacggtgggacgacatactcaaccgcacccacctcaggccagactaccagccactggagtacatggccacggggcgctacctcggcgagattgtccgactcatcattgttgacgcagttgagactgcccaactgttcggcggagaactgcctcattcaatgcgggatgcgtattcattagatactagcatcgttgcctttatcgaagccgacacatcgcccttcctaacagcatcagccgcacttctccagaaagaacacacaatgtctaggccgccatccccggaggacctacggtttctcctgcgagtatgccgaaccatctccaaacgagcagctgggtatctcgccactgctatccacagcatgtggtgcctgcgaaatgaagccgaaatctcccaggggcctccgtcgccttctttcaaggggcctcgggacgttaccgtcacggagagcgggagcaactctgactgcctgtccattgcatgcgacggcagcgtcatcaataaatatcccggtttcagagatcgctgccaagcgtatctggaccaattgacgcaggagacaaatacgtccaaggtatcccagatttcagaggaaggctcatgcatacgtctggagcctgctcctgaaggtgccatattcggcgcagctgt

SEQ ID NO: 21686 - DNA, 739 bp, Emericella nidulans
ggtcctcttagcggcaaagtagcagtcgttactggcgcttcgtctggtatcggagctgcggtcgcgacggctctggccagagaaggcgcccatgtcgctctcggtgcccgccgtttagatgcattggaatccctgaaagagaagctctctgctagcggcgtcaaggttgtcacttgcaagaccgatgttactgacaggaagcaggtcgagggtctcgtgaaggcagcaaccgaggagctaggtccagtggacatcctcgtggcttgcgctggcgtaatgtactttacaatgatggccaatacccaaatggacgagtgggagcggacagtcgatgtgaactgcaagggtattctcaactctcttgcatctactgtacccggaatgctggcgcgcggtaagggtcacgttgtggcgatttcttcagacgccggtcgcaaggtctttccaggactgggagtatattcggccagtaagttcttcgttgaggcaacccttcaggcactgcgtttggagacggccggtcaaggcttgcgggtaacagccgtacaacctggaaacacagccaccgacctcctgggcatgtcaaccgatgcagaggccatcaagaagtacggctgagccatccggggcacagatcttggaccccgaggatgttgccaactccattatctacgctctccgccagcctgaacatgttgccatgaacgagatcctgattgagccgcgagacgagccaatc

SEQ ID NO: 21687 - DNA, 850 bp, Emericella nidulans
ctgcaacaactctctccgcacattgccgcattctcctaacctacaatgttggcggtcccgaagaggcaaaaactacaaattaccggataaagggttcgtggggtaagattctcattcggcagcctgcggaaacaatagaggaaatggcggagattcggatggcagtggtagggaatgttgatgctggaaagagtaccatgctcggtgtcctcgtgaaaggaggcttggatgacgggcgtggtaaagcacgagtgaatctcttccgccacaagcacgagattgagagcgggaggaccagctcggtcggtctagagattatgggctttgatagccaaggagagatcgtgagcagctcgcagggccgcaagctttcttgggaagagattggcaaacggtccgctaaagtcatctccttctctgacctcgccggtcacgaacgttacctgcggacgacagtctttggcatgctgagcagcaatcctaattattgccttctaatggttgcggccaacaatggccttattggtatgagcaaggaacatctgggcatagccctggctctgaacgtgccggttatggtcataatcaccaaaatcgatatctgcccccctcagattttgcaagagactatctcccagttgactaagatcctcaagtcgcctggagctcggaaaatccctatatttgtgaaggacatggaggagacaatcaacactgccacgcagtttgtctctcaacggatatgccctatctttcaggtttctaacgtgactggagagaatctggagcttgttcggacgttcttaaacatccttccttaccgcggacagtataatcctgacgcgccctt

SEQ ID NO: 21688 - DNA, 627 bp, Emericella nidulans
aggtctgggtcagtagccggcaaccatggccctcgaaccgttcaaagaccaacggcttcggcctgggcggcaggaaattggatggataagcaacggcaattcttacaggcatatgagtacctttgccatatcggagaagccaaggagtggattgaagaggtaatccagcaacagattccgcccatcgtgcaactagaagaagccttacgtgatggtgtcaccctggcggagatcgtacaatcaatgtaccctaaccggccgttgcgaatatttagacacccgaggctgcaataccgacactcagacaatatagccttattcttccggttcctcgatgaagttgagctaccggagctcttccggtttgagcttattgacctgtatgagaagaagaatattcccaaagttatacactgcatccacgccctgtcgtggttgcttttcaaaaaggggcttgtcgactttcggatgggtaacctagttggccagctggaatttgagcaccatgaacttgagcagacccagaaaggcctagacaaagctggcgttagcatgccgagctttaccggcaaaaaaccaattttggcgctgagcctgaaccatgaacccgagccggaggcggagttt

SEQ ID NO: 21689 - DNA, 569 bp, Emericella nidulans
ccaaatgaagactttccaacacttgacgaggtgacgcgcagaatagtcattgacgtccacaagaacgtcagtgaccggaccatctggctcaagaacgggtatgactgggtggaatcgtttcccaagtctccatatttggtcgacatctaccaggacaggctcgacctcgacgcgagctaccaccgggccctaactcgcggcaacggcttcgacaacatcacccgcacctttccggcccgggtaggcgaggttctcgagatcgtctggcagaaccgaggaacagtcgagaacggcggcgtggacgcacaccccttccacgcgcacggccggcacttttacgacatcggcggcggcgacggtctctacaacgcgacggcgaatgagatacggctacgcggaacccatccgatccagcgcgacacatcggtactctatcggtaccgctcaaagaccagccagctcgtcccctctggctggcgagcgtggaggatccgggtaacaaacccgggggtttggatgtaccattgccacgtgctgcagcatatgataatggggatgcagacggtgtt

SEQ ID NO: 21690 - DNA, 850 bp, Emericella nidulans
aatgatttggatacctgtatgtccaattttgaggatgcaagggctcagactaactgatgtttctagatggtcggccctgcgctgatcgacaatgggtggaatgctacgcccagcttgtcgggacagtcctgtcccttgggatgccgctgcgctggacgcagcaggcgatgcagcggaagtccccgcaacattcgttaatcttgcagatgcttcgatcagatcggtgagttgagagtcttttcatcgatgtcattgacggtcgttactgatcattccagattgaaaacctccccacacaaaaccaagcaggcccacagtctctgcagaacgtcttgagcgtgtgctccgccggtcaaaatcggtatctgctccattttgactcgtatgactctttgatacattgggcggcagcgattcgcctggctatgtacgaacatacctgcctctacgaagcgtatactggctccattattgccgcgaaaggcagagaattgaataacatcagaactatcctggagcggagccggtttaaacatgaagattgggctcgtgtgaggtttggagccggaaccccctggcggcggtgctggtttgtgatcactccgccagatgaaaaacagctccagaaggcaaagaagaccatgaagaaaaaatccgcctatgaccgtgcgccgaggctagtaatagggaacatcaaattctatgaaacaaagaagacgaagaaggtcaagcctatagcaacaatcaccgatgcctactgtgcatacgccatctatccccaatcgaaagccttgatcgaccagtcaacgctgatcaagattgaggggaaggtcatccctcataacagtag

SEQ ID NO: 21691 - DNA, 850 bp, Emericella nidulans
cgtctaccgatggcagcctgatccgcttcgatcttcgaggacctaaacaccttacatcagccctcagcttcgaccttgagctatagtgcgcaggagccagcggacactgcacgatactacccaggatagcgaggcaaagttgagacgattctatgcgtcttgttggtccgtcgatgctgaagagccgactaaagattcgattggtgtaaagctcaccacgggtcccgttgtactctcttcccaagttgtacttaattttgtctctctgatatcgagggccaaaggtcattaggttcgtccacatgttctcaacatggcctcccttgatgttggtatcattgttgcctgggaggcgctattaaggtcacttctaagcccgggactagggggggacctttctcgcttgttgcacatctcgaacacctttgaacccgtcccaggtatggaaccgcttcgcgttggcgatctactgaagacaacattacgcattaccgcggtaacaataaagccactgggaaaactggtcgaggttaccgtggtgattaaacgggaagaggcatccatcatgaaaatcacgtctgaattcctcatacaaggtcaatttccccatcatcatcagagcttcccatcctcagaggccaatgagtgggctctacctttggactccccgaaagcagtggttttactacgaagcagaccgtggttcaagccagatgcaaagtgtccagagcttcttgacaagactctcctattcaggatcacgtctcaatcgagcaagatgtcactttgaatactagtggtgcggtgtcccttgtcgtcaatgggagagagcagactcttgcattggaaa

SEQ ID NO: 21692 - DNA, 794 bp, Emericella nidulans; identical to SEQ ID NO: 92

SEQ ID NO: 21693 - DNA, 653 bp, Emericella nidulans
ctgggaatggactggcagcagaaggctcagcgcaagcgagatgagcttgcaggaaaaattccttcgggatggcgaatatcgtcagacctgttaaagaaggccgatgagctggacaatattcttgatattcctcgacagagcggcatcctgaccgagcgcgagatcgacatcacggaaagctcagatgctaccgctctgatctcgcgtctgaaggatggtgaaatcagtgcttacgaggtcgcagtcgctttctgcaagcgagctgccatagcccagcagcttacttgttgtctgacggaaatcttcttcgatagggctattgagcgcgcaaaggagctagatcgtcaatacgccgtaactggagagctcgtgggacctttgcacggtatcccgatcagtctgaaggactcctacaatgttactggtgttcagtctacccttggctacgtttcgttcctggatcgacctgccctgacgttcaacagcccgatggtgaatatactcttggacgcgggcgccgtaatctacgtgaaaacccacctgccccagacgatgatgacggccgattctcacacaaatgtgtttggccgaacccgcaatccatatggtcgaaacctgacggataacggtagttgcgacggcgagggcgctca

SEQ ID NO: 21694 - DNA, 558 bp, Emericella nidulans
tcatgggctcattatttctctacatctagatatccgtcataagttcgaagagctggaatacatgcaaggaactcgaatcttggaggggtcccgggcgaacgacccctcgcaccgttgggcgctcgacgcggatcccgaagtcagggctaggaatcgatatgcgaatgtacaagcgtgggcgaattctcgcatacacctacgggttcctgaaggcgaatgtgattttataaatgcatcgcctatcgtccttagggattcggtttcgcaagaggaaaggaaatatatcgcaacacaggtaaatagcgacattgtctggagtggaagaataatgctcaatcgacgatagggtcccaggctagacgacctctaccacttttggaatatggttttccatgaaaccggagaagtggcagtggttgtcatgcttacacaaacgatggaagcgggtcgcgagaagtgctcccagtactttccgctcgagatcgaaaatccgatgtatctacggcaggacaacagcaatccccatcttgaaagtgaacagcaagagttggaagcttt

SEQ ID NO: 21695 - DNA, 850 bp, Emericella nidulans
ctggctcataggggaagacaaaactctcaaccctaaggactatttcattatcatcctgctctatttggcaatggccagtcgacttcgccgtcctgttaccccgtagaaggagagtggccggaagtttctttctacgacaacgtgcgcgcccagtataagcttgtcactgggcactttgggataacacacctgcgtgcggtaatcgggtggtcaatgggcggagcccagacttaccaatgggccacgcaatatcctgactttatggacctggcggtacccttctgcgcttcggcgaagacgtctcttcacaaccaggtattccttgaaggcgtcaagagcgctttgctagcggcaaaaggtatccaatctgcggggtctggtcaaggtggtgtccttgtgtctgggcatactctgaggacatggaacgatgctgaaaaacgagtcggcctgaaagcatttggcaggggctatgctggctggtaagactcgtctgcttgagccggtgtgcgtgattctaaccctcagctactataaggggtttctctcaagcgttctatagggaaaagctgtatgaaaccgccttgggttatgcagacctcgaagactttatgcaaaatttctgggaggcgtgggctctatcgaaaggttcaacaagtctctcacggcagattgacattctagctaactgcgaattctcaatttagacccgggcaacctcctagcaatggcgcaaacttggcaaaatggcgatgtcagcaagcaagagccatacaatggtgactttgaggcagccttggcagcaatcagggctaaggttttggtgttacctgcaaaaaccgatctatacttc

SEQ ID NO: 21696 - DNA, 850 bp, Emericella nidulans
tacttttttgataaccggctgctcctccggcttagggctctctctaacccgtgtcgcccaagcggccggccacagagtcatcgcaaccagtcgtaacccctcacgaacacccgagctagtcgacgaaatcgaaaacgagggtggaaaatggatgcggctggacgtggacaatccggacagtggtaatgtaatcgacgagctcgaaaggagcggcgagcagatcgacgtcctggtcaacaacgccggttacgctatttacgcacccatcgagaccgcaactgaggaggaggtgagggcacagatggagaccatgtactttgggcccctgcgtctgattcgtgccgttctgccgtatatgcgccggcgaaaatctggtgttattgtcaacatcagcagcggagcttcgctggacgggattcccaccatgggtgtgtatgcaggggcgaaggctggcttggatggtatgcgcaatcaggcacaaataatgcactttttctgtgatctgtagctaatcgaatcttatacgaaagcctcaaccaggatcctggcgaaagaagtcgctcctttcaacgtccgcaccctcaccgttgttcttggaaccttcaacaccaacatgctcagctcggtagtgacgggcaagactccacttccggacgactacagtgcgacaatcaccgaacaagtccaggggctgctggcaagcgggaagatcaggcccaacggcgacaaggacagagcaatgaatgctttgtaccaggttattgtgggcaaggaatttggtaatggtcgcgagactgagaaactccttcctctggggagcgatatggctccgaggttcaagggagttcag

SEQ ID NO: 21697 - DNA, 729 bp, Emericella nidulans; identical to SEQ ID NO: 6224

SEQ ID NO: 21698 - DNA, 500 bp, Emericella nidulans
aaagatcagagggctccctcggtgccgtcacgtgggaagtctcccgctcaaatggcatccacgtccactggcagttcctacctgtgccagcagacctcatcaagcgcggcctcgttgaggcagccttcaaagttgaggccgagaaccttaagtacccaaagttcgaatcaccttcggcctcgtcatcgtcactgccgcaaccaggatccgagggcctagaccccagcgctgaaccaggcgacttcttccgcctttggatctggaatccttcgccttctcctgaggttgaaaagagtaatgacagcaccgggtccgaaaagaccctgctcctcccccttggcaatgacttccgcttcgacctgcaatttgggcgccgcgttatggcaaaactcatgcagcttgagaagagaatcaactggaaagatgatgtacagtcgcaggaggaagaggaggctgattcggcggcatttaaagaggcatttaaggcgtttgattttaca

SEQ ID NO: 21699 - DNA, 850 bp, Emericella nidulans
cagctgcagccgcactctactcttctatggggaagcctttagtggatcttttcgttttcaactaccaactctaccgctcgttggggccattagcccttagtggaattctcactggatactttagcaccgctgttgtcctgcgtaaactttcgccaccgtttggaaaattgaaagctgtggagggcaagaaagaaggtgattttaggggcttgcattcaagattgctcgcaaatgcggaggaaatatcgttctatggtggtgccgatatcgagcgtgtattccttgccagaagctttaaggaccttcagcgatggatggaagggatctacagtttaaagatccgctataacatgcttgaagatgtgattctcaaatactcctggtccgcatttgggtatttgattacctctttaccggttttccttcctgcatggggcggtctaggcggcgccatggagctggcagacacatctgaagtcagtggccgggaacgcggtcgtatgaaggagttcatcacaaacaagcgattgatgttgtctcttgctgacgccgggggtcggatgatgtacagcatcaaagacatctctgaactggctggctacacctcgcgggtgtatagtctcgtttccgcccttcacagggtacatgcaaatgcctattacccaccacatgacgctggctcagagctatattcactagaggatgtccagggaacgattcacattggttttgatggggtacgctttgaacaggttactgtcgttgcgccgtctctttatccccgaggtggagacgaacttctcgagtcgctctcgttcgttgtacattcgggcgatcacctcctcaattc

SEQ ID NO: 21700 - DNA, 850 bp, Emericella nidulans
gcggcagctgagtcggatatgcatgtttttgtcatgggtttattacttggtacgtcgtccgcgcattccattacttgctttgcgattgggttgaagacgtgctcatatggttaatggtgaagccgaagcaaaaggccttcggtacatctaccgcaccggcgccgcattcgtctcaacgcgccttggcatccctcacaaacctcccattacaaaagcggaactgcaacttcctaacccccagcaaacaggcggactcgttctcgtagggtcctatgtgcccaagacaactgcgcagctcaaggtcctcattgagcgtcgcggcgatcttctctccgtgattgaaatgcgggttgaagatctcattgagtcgaaagaaaaggcggcagaagtgattcagagtgtcattacgcagacagagagctatctaaatgccgggaaggatacgcttgtcatgacaagtcgggcgcttgtgaaaggtgacgatgagatttcgtcgctgaagatcgggtcgagagtcgcagaggccctagttggtgtcctggaggggatagaggtgcggccaagatatgttattgctaaggtatttgttctccactcgaaacccatgaagtaaactgacgcgggattcggaaaatagggtggtattacatcctccgacgcagctacaaaaggtctccggatgaagcgggccttgattgttggccaggctgcggcgggtgtgccgctttggaggtgctacgaggagacttcccgccatcggggcgtgccatttgtggtctttccgggaaatgttgggagtgaatctacactgtatgaattggttgaggcttggagctgagtagacaattag

SEQ ID NO: 21701 - DNA, 585 bp, Emericella nidulans
atcggccgcaattaaccctactaaagggatcgacctctcgagaccctgctgacctggcttgattcgactagacaatccggccgcattgcgtcaacattgcgttccgctttccaatcgcaccttcacacatatctgtacccacatagtacaatcagcattcacgtctctgttttgtcgtcggacggctcggttctcgccgccgcagtcaatgcctgcacgctggcactggtggacgccgggataccgatgcccgggttgctgtgcggatgtacagcagggatgagtggcagtgcctcgacgccaagagatccgatgaacgacaccctggaccctttgttggatgtctccttaccggaagagcaagagctcccattccttactgttgcaacgacctcggctcctgccgttatgacagatggcgatgaagatgacatgaaagtctcgatgctgacaatggattcaaaagtgcattacagttatatcgagacgatgctgggctgtaggggtgaatgggtgtaacaggtccgtaaaatcctcgacagtgtgatcaaaggatcgagccgaaggtgatgtggctttgttgtt

SEQ ID NO: 21702 - DNA, 500 bp, Emericella nidulans
cctagtttaccgccgtaaaaacaaacctccttaagatcagcagaatgactccgcaccgcttcgatcccaaattcacagacaatgtcgtcaacgctatgggcaaggatgtcgacccgcggtttcgacaactcatggcctcgctaatccggcatgtacacgatttcgcccgcgagaacgaactcaccgttgacgagtggatggctggggtacaacttatgaactgggccggccagatgagcaccgcaaagcggaacgagggacagatggtttgcgatgtaatcggacttgagtcgtacgtcaaatctatctcccctcccttaccgggacttctgtacaagcctgtagggacaagcgttgattgaaacatggatagcctcgtcgacgagataaccttcaaactagctgacgaagccaccgacgcaccaacggcgaccgcaattttagggcccttctttcgcgctgacaccccttccgctcaaacggcgaaagatcgtcaagac

SEQ ID NO: 21703 - DNA, 557 bp, Emericella nidulans
gtctcacaacgccgtatgcgcagacgagagagctggcgtttagttttgcgttccttgccacggcagtgaatcatacccttgctaaagctagaaaacgcgccggagaaacaggcttatcagatgaagagcgtgtctttctagcccgcgaggtcatgcgcgtgacgttcgagcacctcgcgtcacggactatcatcgcactggaatcgctgtgccagtgggttccgctcgtcccaaataatcctaatgacaagcggcaaaagccgctcccgagcagtgtccccgtatcaacactcgtcgtttccggcggtgttgcggcgaataagttcctaatgcatgtgctgaggacgtggttggatggacggggctttgggcatgtaggtgttgtggcgccgcctattagtctatgtacagataatgcggcgatggtgggctgggcggggattgagatgtttgaggcagggtggaggagtgcgttcgaggcgagggcattgaggaagtgggggcttgaggagggtgatgagagtgacgggggtgaagatgggggtcaagggatactg

SEQ ID NO: 21704 - DNA, 850 bp, Emericella nidulans
tcgaatgaacaagccactgacgccgagtctgctcctctgctcaacgatacgcaaaaccctgataagctatttcagcacgctcttgatgtagagttggataagatatgcgctttctaccggtcgaaagaaagagaaatctatgaagacgttgataatgttatgaaagatgcggaggaatacacggctaaggccgacggggccgagatgaatcccatgcaggacagcatgcacaaaggaaggagagtgagcactggatccattcaagaccattctgccgagtttggtctaggtaggcgccaaagcatgggaagcgaaccagctgccgacgacgacgaagatagcgatgacgagcatcctacgacacgccctacactaggccagtcacggagcgcctaccctggccctcctgatgataaccgtacagaggatatgaggagttcaatttggacagattctaggtatgctccaaacagccaggcggtcgttcggcgaggcaaccagaatgagcacctcaccgatcccgcgctcctggacctttacaactcggctgcttcccttaaaaaacggattatcgcagtctatgtcgctctctgcggacttaagtcctatgtccagcttaacaagactggattttccaaagctttgaagaagtacgacaagatcatcgaccgcaatctccgtcgagagtacataaactcaagtgtatccccagcttacccttttctgtcctcaactatggaaaatatcgagggttttattcgtcagatcgagactttatatgcggagttgaccacaaacggtgatctttctctggccagacgcgagcttcgtttgcatctgagagagcatg

SEQ ID NO: 21705 - DNA, 850 bp, Emericella nidulans
cagcagtatctccaagatcatcgcgaagatcatctcaggtactgggctggtatcgtgaatcagattgaagagcgttgtgacatgaacgctttgctgaacgaacgcagtcggtacaagattcaactggcggactatgacaaagtggaggatcaacaacaattaactttaacagtccctgatgcttcctggctaagcaaattgcgccaaacatgctctgcgcaaggcattacattgcactctattctgcagtttgtttggcacgcggtattgcatgcttacggtggcggtactcatactgtcactggcactactatctcagggaggaacctgcctgtgagtgggatcgaacgatctgtgggtctctacataaatacgctcccactggtaattaatcagttggcctataagaataaaaccgtcttggaggctatccgtgatgtgcaggccattgtaaatggcatgaacagccggggaaatgtggaacttggccgtctacagaaaaacgagctgaagcatgggttatttgactcgctatttgtgctggagaattatccaatactggacaagtccgaggagatgcggcagaagagtgaattgaagtataccatcgaaggcaatattgaaaagctcgactatccccttgctgttatcgcgcgcgaggtcgacctaactgggggattcaccttcaccatctgctacgctcgagagcttttcgatgagattgttatatctgagttgctccaaatggtccgggacacgctcctgcaagtcgcgaagcatttagatgaccccgtccgcagcctagagtatctgtcatcagcgcaaatggctcaacttgacgcatggaatg

SEQ ID NO: 21706 - DNA, 728 bp, Emericella nidulans
  unsure (1)..(728): unsure at all n locations
gacccnagcttcggatctactgactgcagtgcggtggcgctccgactgctaactcgaggtactggaactgtccgatcaagagtaactatttgctggcatgacatgctaagaggatcgaaacggctatctgctagcgcctcgcgatggcacctcttttttggcgcgcaggagataccagtgcaaggctggccaacgcgcaacctattcttgcgccaattaaagagaaaatgttgaatgctgctcgttctggaaaccaggttgaggcacaaaagtggagagcggagatggctaagaccaacgccaatcttggtatcgtaccgcgcaatacgttcatgccgttagtattccagctccctatcggtttcggttgcttccgtgttatcgagggtatggccggtttgcctgtgcccggcttggctgcggaacagttcgcgtggatcaatgatttcacagtcgctgatccgacctatatcctccccattctctgctgtactgtccttcatctaagtattagggtacgtggccccccacatacgtctgagtccattgctaattcgcccctgtatagaaaggaggtgaaacgggaagcagcatgtctggcgacatggcgacaatccggaagggtatgatgtacggcattcctgcgttctctttcttcttcgtagctttcttccctgctgcgttgcaagcgtacttcctcaccaccggtttcctcggtctgctccagg

SEQ ID NO: 21707 - DNA, 850 bp, Emericella nidulans
ggtttgtttttagggctttgccaatctgcaagcgcgtcttgagcgtatggcacaagcgctgcgaccgctattcgttacagttacttggggtgccggaggaagcactgcagcgaggtcgcttgagttggcggagatctgccaacgccaactacagctgacaacatgcttacatttgacgtgcacgaatatgagtcgagctttagtggaccaagcactggaggaagcaaaggtattggggattaggaacattctggcgttgcgtggcgaccccccgcggagtgaagagtacaatatgcatggggaggacgacagcaacaaggacttcacctttgccgtggatctggtccggtacattcggaaaaagtacggagactatttctgtgtcggcgttgctgcgtacccggaaggccaccctgccgattctttccaggatatccaggatccgaaggtcgatttgccgtggctggttgagaagacacaggctggcgccgactttatcatgacgcagttgacatacgatattgacgcctatacggaatttgagaacctgctgcggaaccatgaatccggcacttttaagacgattcccatcattccgggcttgatgcccattcacagttataaaatattgacgcgagtaacgaagcttagccacgtcaagatcccgccgcctattcttgcgaaactggacgaggtcaaacacgatgatgatgccgtcaagcgtctgggtgtggatatcctcgccgagcttgtggatggcatgaagaagctgcccactccaggcttacgtggattcgatttctataccctgaatcttgagaagactgtttccttcattctagaacgatgc

SEQ ID NO: 21708 - DNA, 850 bp, Emericella nidulans
cgtagtcatcggctgcgatgggatccattccaaggtcaaacagtttgttctcggtgcggacgagtacgcagctactcagcctcggtactcgggaatgtatgggtaccgtgccgtgctggacatggagacgatggtggaagccgtcggcgaccatcgcgcgcgcgtctcaactatgtatgttggcgacggagcgtatgcggtcacatacccgatcaaacgggcaaagaaggtgaacgtgggcatctaccccttacactcggaatgggaccgggagagctgggtgcggccggcgagtaaagaggacatgcacaatgactttaagcatatggggcgcttgataaacagcttaatcgaggtgagccgttccccagtttgtctcgtcggcaaatgccagtccaagctgggcgagatcaggatatgagctaaccacggcggggtgttgaagtacatgcctgatccaactcagtgggcgctctacgagcacccgcacatctcgacgtatgcgagggcccgagtggccattctgggagacgcggcccatgcctcgacgccgcaccagggggccggagcgggccaggcaatcgaggatgcgcatgtcctggccgagcttttgggggatgccagagtagcgactgcagacgatgtggctgccgcattcaaggcgtacgaccaagtgcggcggccacgcagtcaacgagtagtaacgagcagtgccgagaacgcgtacctgctttgtctgcggctagatggggtgggtagcgacgaggagaagttaaagaagacactgcaagagaggctggcgtggctctggaatgaggatgtacatgagcaggccgagagggcgaggagg

SEQ ID NO: 21709 - DNA, 483 bp, Emericella nidulans; identical to SEQ ID NO: 6068

SEQ ID NO: 21710 - DNA, 850 bp, Emericella nidulans
aaagcatgtgatcattaaatgcctcaggcaccaacacagtctcaacattacatcagttgcttctcattatccggaagacattctatccaaaactgttccaatcagtataacgacccatgaaccagtctgaatctcaatatgagcccgactttccttggggaattggtgtcttcgacgctcattgccaccctactgacaccatggcgagcatcgccgatataccccgcatgaaagcaacgacacttacaatcatgtccacacgagctgacgaccaagacctggtctttcaagtcgcaactcagcttgccaaagaatcaggcgatgggaatgaggacgcacggcgcgttcttccctgttttggctggcacccgtggttttcgcacctgatcatggacgacataacaccgtccaaagatgatcaaaaggaaattgacgagaacaccaaaaagtcacactatagccgaattctaaaaccatccccagatgaggctttcacatcttctcttccaacccccatacccctctcgcagctcctatcagaaacgcggtcaagactacaggccttccctgctgccctcgtcggcgaaattggtttggatcgagcctttcgactaccccagccctggacgcaagaggagcacgacgcccgagatggcgcgatgacgcctgggtcgcgcgagggccgccggctttctccctaccaggtcaggccggagcaccagaaagctgttctggaagctcagttgcgtctggccggagcattgcagcggccggtgtctgtgcatagtgtgcaggcacatggggccgtgattgaggtcttcaagggcctttggaaagggcatgagcggaa

SEQ ID NO: 21711 - DNA, 850 bp, Emericella nidulans
accagacgatgtccagctaccgccaaaatgggttctacgacttcgagaccaggaagccgcttcggaggatgtcagtccccctgatgcaatgggcgcggcagtaacaggggattttcctgactcgtaccgtctcgacaatgaccatcggccactacacgatagcttgacggcaactctcgtccagaacaaacgtgtgaccccgcagacgcactggcaagacgtgcgtcatctgattttgactgtctccgatcccatttcatatgctccaggggacgtattaacgataaccccgaagaacactgctgaggatgtccaaagtctcattgagatgatgggctggcaggagcaagcggaccagctcgtctctttagtccctcgcgatagcactcgttcgacgaatgaactgcctagtccgcccatccacagcctggattcctacccgcgactgaccctgcgcgaactacttatcaactacttagatattagagcaatcccccgccggtcattcttcgcagcaatcgcacactacaccacatatgagatgcacaaggagcgattgctcgaatttaccaatccggagtatcttgacgagttctgggactacacaacgcgcccaagacgtagtatccttgagatcctgcacgagttcgacaccgtcaagatcccgtggcagcatgcaacgtccacgtttccaatcatccgagcgaggcaattcagcatcccagtggcggagaactgaagcgaacttcagtaggcggggcaagattcgaacttttaatcgccatcgtcaagtaccgaaccgtgatcaagaagatacgagaaggagtctgcaccaaatatatttccaatc

SEQ ID NO: 21712 - DNA, 850 bp, Emericella nidulans
catcctttgtggatgacctcatatcgtcatccgccgagctactgcagtctctttcccgcgagccagacgccaacaaactgtatccgaagggtctaaatgtcatgcagtggctccgggaaccagacactcagcccgatgtcgattaccttgtgtcagcaccggtcagcctgccgttgatcgggctagtgcagttggcgcattttgcggtcacctgtagggtgcttgggaaggaaccgggtgaaattcttgagcgatttagtgggactacaggtcattcgcagggcattgttaccgccgctgcaattgctacagccacaacctgggagagcttccacaaagctgttgccaatgcattaacgatgctcttctggattggtctgcgaagccagcaggcataccctcgaacatcaatcgctccatccgtgttacaagactcgattgagaatggggaagggacaccgacccctatgctttcaattcgtgatctaccgcgtaccgccgtgcaggagcatatcgacatgaccaaccagcatctcccggaggatagacacatctcaattttactcgtcaacagggcgcgtaactttggtggtactggtccccctttctcgtttatggccttaaccttgtttgcgcagggtcaaggttctcacggcctggaccaaaatcgctttcccttatccaaggaaagtccgtttggtaacctttcttcgatacggcccttttcaatgccaaaccttcctggttttgtgtttttgggggttgggggagtggtttcccgaattctttcatttcgtttatttccaaatttttttttgggcgaatttttcaaaagctcgtttggtttatt

SEQ ID NO: 21713 - DNA, 714 bp, Emericella nidulans
ggtttcctgttagaatcctgctaatcctaccagatgggccctaataaccatatgctcacatttcccgtcaatggcggtaagaccctcaacatcgtcgcctttcatacaacccccgacacctggaccgaccgtactcgcctgactcgcgacggcacacgcgaagaagctcttcgcgacttcgcaggttacggacctaatgtcaccaagctcctcaaactctgtgaccccaagctcagcattgtacgtactcccacccccgcaaataccctcgatttcggccacaggaaacaggaatcactaacagcgaaatagtgggcaatctttgacttgggcgtccatcccgttcccactttccacaagggccgtctcgccatctccggtgacgccgcacatgccacatccccgcaccacggcgccggcgccggctactgccttgaagacacagccgtccttgctacgctcctctctgacccgcgcgtgcaaaataacagcgacattgagacagccctggctgtcttcgacgcctgtcgccgcgagcgcacacagtggcttgtacagagcagtcggttcatcggcgattgttatgagtggcgcgctgagggggtgggacgcgacttccggaagattgaggaggcgattaatcgccggaacgcgatcatcacggatgctgatgttggcggcatgtgtagggaggcgaaggagatgttggggcaa

SEQ ID NO: 21714 - DNA, 346 bp, Emericella nidulans
tgtgtcgaatgtaagatcttttctttccaattttgctctctcgtttcttgaagggaaaagaaaggctcacagtcaccggcaggctacaaaaggtcttgcggcggagtacggcccacacaacatccgagtcaacacagtgtcaccacttctctcggggacaggcctgtttagcatgttcactggcatggaggacacggaggagaaccggcagaaattcattgggaatgtgcctctgggccggttgactgaccctgccgatgtcgcgaatatgtgtttgtatttggcaagcgatgaggggagcttcatcaatggtacggagatgctggttgatggaggaaagtgcgtc

SEQ ID NO: 21715 - DNA, 850 bp, Emericella nidulans
cgtgtcctacggtgaggcgtaccatgggtactggccgctcgatctgtacagtctaaacgaccatttcggaacgcatcaggatctgctggatttgagtgccgccctccacgagcggggcatgtatctcatgatggacacggttatcaacaacatggcgtatatgacggatggagatgaccctgctaagaacatcgactattcggcgttgaccccgttcaacaagagcgagtactaccatccgtattgcaagatcaaggactggaatgactaccatgatgcgcagtggtgccaagccgaaaacaataaggttgccctccctgacctatacactgagcgtaaagacgtgcaggacaccttgatcagctgggcgaaaggtattgtgaaaacatactcgattgacgggctgcgcattgacgctgccaaacacgtcaacaccgggttcctgaagacatttagcgactccgtcatatgtacgtgaccggcgaagtccttcaacgcgaagtcgacatcatctgcaactacacggagaactacattgacagtgtgcccaactacccaatctactattccatgctggacgcctttacccaagggaacactacctcgctgtaccaccaggtcgagaacatgaagaagtcctgtcgcgatgtcaccaccctcgtatccttctccgaaaaccatgatgttgcgcgcgtgccgagcttcaatgatgacatggcggtacgtaaccctccctcaccgccactcatgccctctatctagaataagaaggaaaaatagaagaaaggagaatcattacactactaaatgaggacattccatgcatatacagctcgccaaaacatcctca

SEQ ID NO: 21716 - DNA, 467 bp, Emericella nidulans
gagagcgttcattcccacgtcgagcatggtgatcgcgaaagcccattcagctacgagtacggcagatgaatcggagaggataatctgcagaagaaatacctggacggtggaatgcagctcgctcacccatctgggaaacctgttgatgtcctacttagcccgacgatgccacatgttgccgtgcctcaccggagcgtgcgctgggttgggtataccaagatctgaaatctccttgattacccggccatcactttccctgtggacagagttagggcagataaggatgtccttccgccagactatcggccgagaaatgaccttgatgcatggaattggagtctttatgacgccgaggctatggagggtcaacccgttaacctgcaggtaattgggaaacggctagaggaagagagcttactgggggctgctacagtgattgagcggatttggcggagttagtcactttc

SEQ ID NO: 21717 - DNA, 606 bp, Emericella nidulans; identical to SEQ ID NO: 6569

SEQ ID NO: 21718 - DNA, 778 bp, Emericella nidulans
tttatcgtgattaattacccaaatactcattgcttccagaactcagctcccggcatccgatgacagcgaaccaagacgaaactacttcactggccccgcccgcacattaggtggtgaggacacaccaagcagagtgattgatactccgagtgggcctgctcagcctcagattcctcgacgtgtgcggcggacgctccatttctgggcggatggtttttccgttgacgatggtgaactatatcgctccgacgatcctcagaatgccgagattctgaatagcattcgacagggccgcgctccgctgtcgattatgaacgcgcagcatggccaggatgtggatgttgagatcaaacaacatgacgaaaaatatgtcaggccgaagcctaagtaccagccttttgcgggcaagggacagcgactgggtagcccgacgcccgggattcgagcacctgcaccctccgaaccagccccagcgcctcaatccagctctggacctcccaagccaaatgtggatgaatcccagcctgttgtcactttgcaaattcgactcggcgacggaacacgtcttacctcccggttcaatactactcatacaattggcgatgtttatgattttgtgtccgctgctagtccccagagccaggctcgcccgtgggtgcttttgacaacattccctagcaaagaactcactgataaggcagccgtgctgggtgacctgcccgagttcaagcgtggaggagtggttgtacagaaatggcaataaaccacggcaatgggc

SEQ ID NO: 21719 - DNA, 587 bp, Emericella nidulans
agggaggttctacttggcatcacaggcagagactttgtcattctagcagcgtcaaaggctgctatgagaggcccgactattctcaaagctgaagatgataagacaaggcaactgaacgagcacactcttgtcgctttctccggagaggcgggagacaccggttcgttcgcgcttatatatttttgagcttcaacaccagaaaactaatcgaggcccccattacagtacaatttgccgaatatgttcaagctaatgttcagctatacacaatgcggaatgataccgagctgtccccgaatgccgtcgcgaactttgttcgaggagagctggcacgaagcctacgttcgcggaacccctacacagtcaatctccttttgggtggtgtagaccctatctctcagaaaccacacctttactggattgattatctcgcgtcattggccagtgttccatatgccgcccatggctatgctcagtactactgtctatcaacccttgacaagcaccatcaccccgacatcaccctggaacaaggcatgaagaatgttagaaatgtgcacagatgagttgaatcggcgccaaccgct

SEQ ID NO: 21720 - DNA, 772 bp, Emericella nidulans
atgaagctgcttgctctttccctggcctcgttggcctccgctgccaccatcactcgccgtgccgacttctgcggccaatgggacactgccacggcgggtaacttcatcgtatacaacaatctctggggtcaggacaatgccgatagtggctcgcaatgcactggtgtggactccgccaatggcaacagtgtctcatggcatacgacctggagctggtctggaggctcctccagtgttaaaagctacgcgaatgctgcgtatcagttcacggcgacccagttgagcagtctgagctcgatcccgtctacctgggaatggcagtaagtcatgtaaacttcgtctccggcttttagcggttattaatgcggtcaacaggtactctacgaccgatgtcgttgccaacgttgcctacgatctcttcacgagctccagcattggcggagactctgagtacgagatcatgatctggctggccgctctgggcggtgcgggccctatctcctcgaccggctcttccatcgcaacggtaacccttggcggagtcacctggaacctgtattccggccccaacggaagcatgcaggtgtacagcttcgtcgcatcatccaccactgagagcttctcggccgatctgatggactttatcaattacctcgtggagaaccaaggcctgtcgaacagccagtacctgactcacgtgcaggccggtaccgagccattcactggctccgacgccaccttgactgtttcctcttactcagtctctgtctca

SEQ ID NO: 21721 - DNA, 850 bp, Emericella nidulans
gatgacatgttcaaacttgatgttgaaaagagagaatgggctctcaagcctatgaactgcccgggtcactttgtgctattcggccaccgcgagcgaagctaccgagagcttccgctgcgaatcgcggactttggtgttttgcacaggaacgaggcgtctggtgctcttcacggtctcacccgtgttcgaaagttccagcaagacgatacccacatcttctgtacccacgatcaggtaagatgctttgcaaagaatgtatcctacagacctgctgacgaggacagattgaatccgaaatcgaaggactctttgacttcctgcagtccatatatggactgttcggcttcacctttaagctcaagctttccactcgtcctgaaaagtatctgggtgagcttgagacgtggaactacgccgaagagcagctcaagaaggccatgaccaagttcaagggcgacgactgaactattgacgaaggagatggtgctttctatggtcctaagattgacattacgattgctgatgctctcaagagagagttccagtgtgccaccatccaactcgattaccaggcaccccttaacttcaagctcgagtacatgactggcgaaaagacccaggctacccaggaggaagcgaagaaggaggctgaccccaagtccaacgagcccgcacccggccgtgcccgccccgttgtcattcaccgcgcgatcattggcagtttcgagcggtttttgggtatcatcaccgagcactttggcggcaagtggccgttctggatcagcccgcgtcaggtcctgattgtacctgttatgccggctgtcaatgactatgcacgggaggtccagaa

SEQ ID NO: 21722 - DNA, 589 bp, Emericella nidulans
caaaatatggatgatcctatttcccacccctactatcccatcgatgcgcgaatcatcgactacacgcccaatgaaacttctgtgcttggcttaatatgtactgcaggcgtaagctgcgcagtactattaggagcagtattactgctgagtatatgggtgcggcccaatctgaggaaggcggaccggtttgccattttatggtttgccctctgtacgagtataccgaacccctgttgtcgatgtcgccctaaccgttgaaaccacgcagcgggcactcttcactgcctatttgaaggctactttatgatcaatcatggtcgtatgggatcagctcaggacttctttggtcaattgtggaaggagtacgcgctctccgattcgcgctacttgacgtctgacaccttagtgctatgcatggagacaatcacagttgtaagtcagttcataccggcttccgtaaaatatcttgctgatattatctgaaagcttctttggggaccattatgctttggggttgcttattcgatcctttttaatcactcgatgcgtcacccgctgcagataattcgtttgcatggcccatttttac

SEQ ID NO: 21723 - DNA, 850 bp, Emericella nidulans
gcaactggctctcgcgcgcaaagggggtccgggatgaaatgtgccagctttacgggcagtacctggaccttgtggactcgcggcgcaaaaaggttggcagcacgggctcgttcatggatacggtgcttgaccagaatgagaagctcggcctcacgcgccatcagctctatttcctcggcggtgtcctcatggagggtggctctgacacgtcgagttcgatcattctggcgttcattcacgccatgacaaagtggcctcaggttctgaagaaggcgcaggctgagatagatagtgtcgtaggcgaagacagaacgccagtctggtcagactatggctcgctgccctatgttgcggctacagtcaaggaggccatgagatggagacctgctgtcccgttggcgttcccgcatgcagctgctgaaggttggtcctccacttctcccacacccttcagcttcgttgtcgatcgtaatgctgagaatgtgaaccagatgactgggttgacggccatttcatacccaaaggcagctcggtcatcatcagtggctggggcatgcaccacaacgaagcccggttcggcaatccttcagtcttcgatccagaccactacaagggtcagacggcccttgcgcctgaattagctaatgcttctgattacactgcgcgcgaccactatggttacggcaccggacgccgcatctgcccgggcatccatgttgccgagcggaacctgtttctggccatttcgaaactcatttgggccttctctatcgagcccggagtggatgagagtgggaaactgatcgagccggacttgcatccaacgaccggatatagtgaagggtttttt

SEQ ID NO: 21724 - DNA, 850 bp, Emericella nidulans
ccaggctatcgaaaagtcgaacttactcctcaaactaggcgcaatagttgaccgcgtgcctccagcacctatagttgagaaggacaacttcgttaaccgggcaagagcacttgcgcaacgacataccaattcgacagcgtcagaatcatcagttggtacagcctcccaaaggggaaggggttactttgcggaccaattcgagaacgaggcgaactggcgagcccactacaatggcaccggcccggagatctacgcccagtgcaatgggtcccttgacgcctttgttgcaggggccgggaccggaggcacaatctctggcgtggctctatatctcaagccgaggatccccaacatgactgtggtagtagccgatccccaaggtagtgggctctataatcgggttcgttacggagttatgttcgacactaaggagaaggaagggacacgtcgtcggaggcaggttgatactatcgtggaaggcattgggatcaaccgcgttaccgcaaatttcgaggcgggacgggaacttgttgacgacgctgttagggttacggacgcgcaggcactggcaatggctagatggcttgttgaaaaggacggcatctttgcggggagtagcagtgctgtcaactgtgagtttcagttagattttcaattcctcgcataattaacctcaaaaccaggtttcgccgccgtcaaaactgctttgaaactggggcccggccacagaatcgtcacaatgctgtctgattcaggctcaagacatctctcaaggttctgggcaaaagctgggaatgtgggcggcgctgtggacacaaagttggaggacgtcctgaatgcgaaagaagac

SEQ ID NO: 21725 - DNA, 466 bp, Emericella nidulans; identical to SEQ ID NO: 8777

SEQ ID NO: 21726 - DNA, 571 bp, Emericella nidulans
ccctgctggtggacttctgccgacgtaaggttgcccgcaagcaactcttcgagctcgccaccttcttcgctttcgccggcaagttcacctacatgcgggattcttgcccttggaccaacatttccggcaagttcgaggttgctctcccttctgccactcagtacgaattctccggttaggatctcagcacctcatcaagtccggtgtccgctatattgttgagggttccaacatgggttgcacccaggccgccatcgacatctttgaggctcaccgcaacgccaaccccggcgatgccatctggtacgcccctggtaaagccgccaacgctggtggtgtcgccgtctctggtcttgagatggctcagaactctgctcgtctctcctggacatccgaggaggtcgatgctcgcctcaagggcatcatggaggactgcttcaagaacggtctcgagactgctcagaagttcgctactcctgccaagggcgtcctgccttccctcgtcaccggttccaacattgccggtttcaccaaggtcgccgaggccatgaaggaccagggtgactggtgg

SEQ ID NO: 21727 - DNA, 621 bp, Emericella nidulans
cactacttccccaatctctcgcacgatccgtcatcgctcgcctggctgcaaccaccatcctctgaaccagacgaacctggcgcccctccttcctccgcttaccaccctggcagcagcgctgaagccgttcatcccgcatctctacggttctctttagttggcaccattctatccccctcaacatccctttctctaccaacaacactgggactccatcatcacggtaaagatcctcatgccgccgggtacacaattcccgaactcgctatgctcagccgctcctcgttccccgcgcaacgctgcatcgcatggcaggttctgggccgcattttatatcgtctagggagaggacagttcggcgaacgtgggagtaccttggttgaagggctctggtctgtcattgaacgcgaaggggtcgtcgctggtatgttacaggaggcggattcgtcgaatgtttcgtctactcgtacagacaggggatttggagccgagggagacgaaccacaagagtactctggtgtaaataggagtggcgttggacgtcacgccagcgcttcggcttgggctgtggaagccgtttggttatggcaaatgggcggtgctggcgataggggaatcctg

SEQ ID NO: 21728 - DNA, 850 bp, Emericella nidulans
gcgaagaatacaaaaagttcttgctccagtccatgggtatctcgcacactgttgacaccaaggtactttgaatttcttacatctcttttaatttgtcatcctaacgaatgcaggtcggtaacgaatttattcgcggtgtttccggtggtgagcgcaagcgtgtctccatcatcgaatgtcttgctactcgtgcatctgtcttctgctgggacaacagtacccgcggtctggacgcgagcaccgcgctcgagtggaccaaggctatccgggccatgaccgatgttctgggcctatctacgattgtcactctgtaccaggccggtaatggtatctacgatctgttcgacaaggtgctggttttggatgagggcaaacagatctactacgggcccatgactcaagccaggccctacatggaggctctcggctttgtttgccgggagggttcaaacgttgctgatttcctgaccggtgtcaccgtgccaaccgagcgcaagatccgttcagggttcgaggcgcgtttcccccgaaatgccgacgccatgttagaagagtataacaaatccgccgtgaaagcagatatgattagcgaatacgactaccctgactctgaatacgcaaagctacggaccgaagatttcaagcaagcaattgcagaggaaaaggcgaagcagctgcccaaaagcagcccatttaccgtcgactttatgaaccaggtcaagatttgcgttacgcgacagtaccagatcctctggggtgacaaggccacattcattatcaaacaggtctcgacccttatccaggctctgattgccggctcgctcttctacgatgctcccaacaactctgg

SEQ ID NO: 21729 - DNA, 850 bp, Emericella nidulans
actccagacagcttgaggtcggtcaaggttcggatgcgaatgaccaaggttcctcagattggagacaagttcgcgtctcgtcacggtcagaagggtacgattggtatcacctaccgacaggaagacatgccatttacccgcgagggtgtgacgccggatctcatcatcaacccgcacgccattccctctcgtatgaccattgcccacttgatcgagtgtcaactcagcaaagtgtctgctttgcgtggtttcgaaggtgatgctactccgttcacagatgtcaccgtcgactcgatctctcgtcttctccgcgaacacggctaccagtcgcgtggattcgaggtcatgtacaacggccacactggacgcaagcttgtagcccaagtcttcctgggaccaacgtactatcagcgtctgcgccacatggtggacgacaagatccacgcgcgtgcgcggggtccgacgcagattctgacgcggcagccagtggaaggtcgtgctcgcgacggtggtcttcgcttcggagagatggagcgtgactgtatgattgcgcatggagctagtgccttcttgaaggagcgattattagacgtctcggacccgttcagagtccacatctgcgacgactgcgggctgatgaccccgatagcgtaagtccccctccgttcctgaattgttccgtgcattgctaaccgagcgcaggaaattgaagaaggggttgttcgagtgccggctctgcaacaataagcaccggatttcgcaggtgcatattccgtatgcagccaaacttctgttccaagaattggcggcgatgaatatctcggctcggatgttcaccaatcggtccggc

SEQ ID NO: 21730 - DNA, 850 bp, Emericella nidulans
ccgactacgagtatcccaaaaaagacattgatgaaatgtgggaaggggtccttctctgtcagtttcatgactgcttgccgggtagctccattgaaatgtgttatgacgactcagacgagctatacgcccagatattcgagacgggattgcgagcaagggaggcggctttggaggcgctaggatttagcatggcggggagagttccagtggcaattaacaccctgccttggaatagatccgaggtggtcagactccctgcagacatggccacaaatggctccatgcatgctctactgaacgggggtcctggagtcattccccactcgcaagccatagcgagggtccccgaggtcagcgtgaccgagatcaagccaggcgtgttccgtcttaacaacggaaaactgcgcgttgatgtagaagacggtctcatcacgtctctatatgatattgaagcagaccgcgaggttattgctgctgacggcagagctggccagctggttatcttcgacgacaagcctctttactggcaagcctgggatgtcgaagtcttccacctcgattcccggaaagaattgcagtctggcaagaccaccatcgcggagaacgatccctaccgtgtcagtgtcgttactgagacaaaaatcagcgaaaagagctgggtcaagacgaccatcagcctcgccgccacagaaggaaaccgaccatcctacgtcgagctcgaaagcgaagtcgaatggcaggagactatgaagttccttaaagtcgagtttcccgtcgacatcacaaacaccgaagcgtcttacgaaacccaatacggcattatcaggcgcccaactcactataacacaag

SEQ ID NO: 21731 - DNA, 850 bp, Emericella nidulans
  unsure (1)..(850): unsure at all n locations
acgaaacaggacaaaacgggagagcacaaagagcaccgaaaaggacacagaaaacaaagcacaacccgggaaaacaaagccggaagccaaaaaacacacaagaccgaaaccaagacccaagccgaaacaaaaaaggcgaaaggcccgaaccacgcaaggaaacgccgacgccaaactgcccaaaccaacaaaagccaacaacaagaaaagaagccgaaaaaaagaaaccgaaaaaagaagccgcaccacaaagcagaagacagcaaacccgcggggcaaccacaaagccccgaaaaaacaaaaaaaccacacagggacagaaagagcacccaaaccaaaacaaggagacagatcccgggggcacaaaaaccgcgagcaaaaaaaaaggaccaagacagaaaacgagaaaaaagaaagaagaacccccgaggaacggaaaaacccccggccccaaaacaccggcaaaaagccgaaaccaaccaaaaaacgcaaaaaaacgaccagggccacacaggacacgagaactcgaaaaagaaaaccacaacaaaacaaaacaaggcaaaccaaagaaggacaacccccagggcccggaaaaaaaaaaacagcaccaccaaaccaaaaaaaccaacagaaaaaccccgaggaaagcaacacaacacaagaaagaatccccaaaaagaaaaacgaaaaaaacccaacaaaaaaaaaagaccccgaaaaaacaacaacagcaaccaaaagagccagaaaaaaagaagaaagaaaaaaaaaaaaaaagtataaaaataaaagaagaaaaaaaannngggggggggggggggggggagannaaaaaaccnccacccccccc

SEQ ID NO: 21732 - DNA, 514 bp, Emericella nidulans
tttcgctgcgttcaagggcaatatggacaggctgaagtttattaagtatcccaggtcgccgccaaactctcaaggcgtcggcccccacaaagactcgtccgggctattcaccttcctgtcgcaggatgatacgggtggattgcaagttctgaataagaatggcgagtggatcgacgcgccaccgatcgaagggagtcttgttgtcaatattcaacaaggccttgaagctattacaggaggcatctgtgccgctacgacacaccgagttatcgtatgttctttgtctgcgcttggtctcttccggggcacactactgatatcgcgccaggctccgacgacgaaaacacggtatagtatcccattctttctaggagtccgaatggatcttacaacggagcaactccgggaaagtgcagcgcacattgtcgcccgcatcccagtctcggacgacaggaagaagcgcgccgtcgatgttcccagcgagtttctttcgcctttgtactcatgtgtgagt

SEQ ID NO: 21733 - DNA, 610 bp, Emericella nidulans
aagcgctcctgggaaggcttacccctccacaacgacggcaagtcacagcggtttccatcaacgacaatggtagaatcagcctctttcgacgtcctctcaatgttcgagggcttccgcgacgagctagatcaacaccacgaccgtcgtgagcggctgatcaagataagtcgtgatattacagcacttagcaaaaaaatgtacgccgcgatttatatcctcttttcatttactaacaagctaatacgggtcatctcagtatcttctctctccaacggtccgtctcactccacactgatcgaacaggcaaacactgcagagtcctaaccacagccattccagagtccgaacggccggcgcccccattccgccatcaattctcaaagacgtccaatcccgcttcacccagataaatgacctcttcctctcggctgtcccagaaacacagggtctcaataactaccgctacctgcgcaacctcagcggcggaatccaagaattcatcgaagccctctccttcaaacactatctcgagactcagaccctcataacccgcgagcaagttacatcacatttgcctccggatatcctagtcacggaagatgactatgtg

SEQ ID NO: 21734 - DNA, 850 bp, Emericella nidulans
  unsure (1)..(850): unsure at all n locations
gggcccggctcctccacagctaccacggaaagaaaaccgaannatcacggttccgctgttcagccgatgggaaacagcattggatgacttgacttctgcgctggacataacgcaggaggaagttttctttatggaagccaagtctacctttgttcaaattctgcgttctctcccccctcactcgtccgtggctcgtcgtccccttcgtctggatcgcattgctgaagccgccgcgactttgaagaatgacgcggtcatggttcgcaagggtattcgcactatggagctcctgagccagttgcaggagatgggagtcattgatcggtcggatgagttcagcctcctccgcgacgaggtcgaacaggaactcgtccacttgggttcgttgaaggagaaagttatggaggagactaggcagttggagtcggtgtacgccaccattcgtgatcacaacgcgtatcttgtgggccagttggaaacgtacaagtcttacctgcagaacgtgcgcagccagtctgaaggcaagtcaaggaaaacgcagaagcagcaagaattgggcccctacaaatttacccatcagcaactcgagaaggagggggtgattcacaagagcaacgtccctgagaaccggcgcgcaaacatttacttcatgttcaagagtcccttacctgggacttttgttatcagtctgcactataaaggtcgtgcccgtggccttttggagttggatctcaagctcgatgatttgctcgagatgcagaaggacaatctagaagaccttgatctggaatatgttcagttcaatgtttccaaggtgctcacgctcctgaacaaacgcttctctcgcaag

SEQ ID NO: 21735 - DNA, 850 bp, Emericella nidulans
ccaggttggatgcgccgaggcctgggacaggatccaatgtctccgcgaggtctctttcctgacgctgaacgctacatatgactcgatcaacggatccttcgcacctacaattgacggcgactttattcgcacctacggcagcaaacagctcctcgatggccaatttgtcagagtacccatcatcacgggcaccaacagcgacgagggtgcctctatgagccccacaggaatcaatacaaccgaagatttcaaagcgactctttccagcttcctccctgtttcatttcaagacgccatcctaaaagcctacccggatgacttgtcggtcaatgtcattgccagcctaggagaccagcgaccagtggctccttacggggcacagttccggcgcagcgcctccttctggggcgactactactttatcgcatcgaggcgacaaaccgccaagacatgggctgcgcatggcatccccgcgtatgcgtacagattcaacgctattcccgcgggtgttcctcccgaagttggcgtgggccattataaggagatcgggttcatgttcaacaatctcgagggcgtaggctacagaccagatatcaaacccttcgagggcaagggacagaactatatcgatctcgcggacttgatgagctcgacatgggcgagctttattcatgatctggatttgaataactatacagggcgagacacgaatatcccggattggccgaggtatgatgtgctggagccgcgggattttgtctttgacgcaaatgtcaccagctatacggaggatgacacgtatcgggcagagggtattgccttgattaatgaccatgctgcgggggttttg

SEQ ID NO: 21736 - DNA, 500 bp, Emericella nidulans; identical to SEQ ID NO: 10893

SEQ ID NO: 21737 - DNA, 567 bp, Emericella nidulans
gtatatgagccagcgaccaagcttctctacctagaaccatccaaatatgcatacctgagcgcttggcctcggaacaatatctaccgccaattcttgagtttctttttgattgtctggtatgccactgctcatgatctccattgcaactccccagtctccagttgctgatagtttgcgctgtaggatcttcggtttcattgtctactttatttctgccaccctgtcctatatgttcatctgggacaagtcaaccgtcaagcacccgaagttcctaaagaatcagatcccattggagattgcgcaaaccatgcgctcaatgcccatcatgtctctgttgactgcacccttcttggtcgccgaagttcggggatatgctaaactttacgataccttcgacgaggaaccattcccttactacagtatcctgcagttccccctgtttatcgcgttcaccgatttcttcatctactggatccaccgcggcttgcaccaccccctcgtttacaagactctacacaagcctcaccacgaagtggatcatgcctagtcctttcgcttccatgcttt

SEQ ID NO: 21738 - DNA, 724 bp, Emericella nidulans; identical to SEQ ID NO: 6526
  unsure (1)..(724): unsure at all n locations

SEQ ID NO: 21739 - DNA, 850 bp, Emericella nidulans
aatcggtggttagactactcctgcagcatggtgctcaagcagactctaagaacaacactggtcagacccctatttcatatgcagcatcaaagggccatgaatctgtggtcaggttgctcctaacgcacggtgctcaagcagactctaaagccaactggggtcagacgcctctttcacgtgcagcatttgatggccatgaatctgtggtcaggttatttctggagcatggtgctcaagcagactgtaaggatggggatggcgggacacctctttcatctgcagcagcaactggccatgaatctgtggtcagattactcctgaagcatggtgctcaggcagactctaaggatgacgattgtcggacacctctttcgtacgcggcatcaaatggctatgaatctgtggtcaagttactcctagagcatggtgctcgagcggactctaaggatgacgattttcggacacctctttcgtacgcggcatcatatggctatgaatctgtggtcaagttactcctggagcatggtgcacgaacggactctaaggacaaagacagtcaaacacccctttcatatgcagcatcaaggggctacgaatctgtagtcaggatacttctggagaacggcgctcgggcaaactctagagataaagacagccacacacctctttcatatgcagcatcaaagggccatgaatctgtggtcaggttgctcctgcagtatggcgctcaagcagactccgaaaccagttctggccagacacctctttcatatgcagcatcacatggccacgaatttgtggcaaattaccctggatacggtgacaaactgaatctaggataagtatggtt

SEQ ID NO: 21740 - DNA, 767 bp, Emericella nidulans; identical to SEQ ID NO: 85

SEQ ID NO: 21741 - DNA, 480 bp, Emericella nidulans
tctctacctcccgtcacgcactcccccaacttaagcagacccgtcgtgagggtgtgataaagggcgcctacgtccttgaagaggcttccaatgcagacgtaaccatcatcggcgtcggcgccgagctctccttcgcgctggacgtcgccgccagactcaaagaggagaagggcgccaccgcacgggtggtcagtttcccctgccagcggctctttgagcagcaatctctcgagtacaggcgtacgttctgcaacggcataaaggcattccggcggttgtaatcgagccgtatgcaccgaacggatgggagcggtatgcggacgcggggatctcagtgaggcggtttggacacagtcttcctggcaaggcagcgtataagttctttggctttgatattggggtcatgacggagaaggttggacattaccttcagcagctgaaggaagatgaggcgctgagaggcgaattcgttgatctatg

SEQ ID NO: 21742 - DNA, 850 bp, Emericella nidulans
cacagaggcgcgatggagcgatgaagagaaaaaatggaaagtcagcaccaaagtttctggcgacaaggacaaccagttcacacgttcctatgtcctgagcacggatttcctcatctctgctgttggacagctgaactttccccgagaaccagatatccctgggctgaacgatttccgtgggaaaatgatgcattcggcgcgatgggattggacctataactacgagaataagcgaattgctatcatcggaaatggtgattttcccaaggtcggccattcaatagtggcctgctactcaggatgctaattatttccatccaggggcgaccgctgcacagattgtccctgaagtggctaaagttgcttcgcatcttaccgtataccagagaactccgaattgggtaatccctcgatctgataccgccatatcgcccctcgaacaagctctgctaacgtaccttcccccactgcgtattcgaaaacgctcccttgctatggacttccgtgagagcttccatgaggttatcagggactcgcagtcccaaaccgcgcggctggcccgcgacatcaccgcgcaacgtttacggacacagctggcgaacaagcccgagctatgggacaagctcacaccgaaatatgcccctggatgtaaacgattgatcataacagacgattattacccagcgcttagtcgagaaaacgtggatctggagaccaggcgtatcctgcgcatcacagagacagggattgctgtagaaggcgactctcagcaagagtatgatctgatcatccttgcgactgggttcaagaccgtagaatttatgtgtccgatcaagatccacgggtcaaa

SEQ ID NO: 21743 - DNA, 551 bp, Emericella nidulans
ctggcctgcgcttaggagcatgctgtacgtggccgttatgagcaacgtcctgtccgcttcccagacggttgtgctgaacgtgctcgcgtgcctcacaagcggtttttgccagtagtgcgctgtctatgtgtgcttgtggatcatgttcattgtgtgtccagccgacactgttgtccgtattagcgggcactttcgaggtagatcaggctgtttcgcgctatttgtcccttgtctttcccttgcctctcatcctgggtatgcagttggatgtggtcccctgccggctggctcttccgctctccgtgctggttcagggtttggtccttttgcctagctagtgggttattcacggttcaggtgtgtcttccggccgtcgcttggtgtgtttgccgcctgtccgtcctcggtttgctttctttcccccctgttggcccattgctggaggcatgtttttccctgcgtcgagccagtggcagtgaccgggtctttatggatgtggtggtaaaatatgagcctcgtgcatccggagtcggtccgtttgggtcggtttg

SEQ ID NO: 21744 - DNA, 850 bp, Emericella nidulans
gctatctagcgcaagcaaaccgcgccttcgacccgcacctgctggagatgttcttcccatggcgccatggcatggccactgtgactgccccgcggcctatgatccttgatgatatcgggacgactctatccaaatggagcattacacacgccagtttcgttcccagtctcgtcgaccagagcgacatcacgccccagcaatgccccaacctgcggttcatgacagtgggcggggagaaaatcacacagaaagtcctcgacacctgggcctcagcaccgaacgtggctatcgtgaacgcctatggtcccacggaggtaacgattggctgtacatttgcgcatatcaacccgtccacaaacctacgcaatatcggcccccctcttacagcttgcacagcgcatgttctgatccctgggaccatgaagtacgcacttcggggccagactggcgaattatgtttcagtggtgatcttgtggcgagaggatatctgaatcgccctgatgccactgccgcaaattttatcactggccccaacggtgccaagatgtaccgtaccggtgatatcggccggcttatgtctgatgattcggttgagtaccttggacgtggagatgaccaaaccaagatccgtgggcagagactagaactcggcgaggtttccgaagtactaagagcttcttcgccagttgccgttgatattgtgacgacggtagcgaaacatcctgacctcggcaaggtacagctgattaccttcgtgtcgagagcaaagaagcgcactgtcaatgaggaggtgcagtttctattctctgatttcggtacctaggccaagaactgcgcgatatttgtgcg

SEQ ID NO: 21745 - DNA, 465 bp, Emericella nidulans
ctttggaaaacgcgggctgatcaatgtgctaagcgtggattacgaaatccaaaccagtttttggatacaattagggagtataataaggctgttgcggcttttcgagatgagaatccgaaccacaagtgggacccagccatcaaggatggtctatctacgcagtcaagccgtaggaagctggccctgccaaagtcgaactgggccacgccgcttacgcgggggccgtatcttgctgttaaagtgacctgcggtgtgacctttacttttggcgggttagctgtcgactatgaaactggcggtgtcatctcatcggctacagattcaccggtgcctgggttgtactgtgccggtgagatgttgggtgggctgttttgggataattatcctgggggaagtggtcttacgtccggggccgtttttggtcgaagggccggacgtgcagcagcagcacacgctcgtaaatag

SEQ ID NO: 21746 - DNA, 598 bp, Emericella nidulans
gggaattccgagcagcggcccggccgctttttgaggcaacagaggcggtaagcccaagctgctcttctataacatccgagaccccccctaccctccgcgatgccgacaatgcctctgaacgcccgctcaacgccatcaagcccgcacgcaacttcacaaagtatgtagaatacgacttcagtaagatgacagacacaaagggcggcttcctagccgaggaagacgatcccttcaacaaagctttgcacgtaaaggatggcaaggacgagaagcccgcaaatatgacgcagaaggagtgggagcggcaacagctgctcaagaatctgcgtcgggatcgtgcaggtcccttcgagccggggatcagtgtgctggatgagaagagcgaacagaaggtctgtcgcgagtgtggctccctcgagattgattggcggtgggaggaggaactacgatgtcgcgtttgtcatgcgtgcaaggacaagtttccggagaaatatagcttgcttacaaagaccgaggcaaaggaggattatcttctgacggatcgtaagttatattgtcctgtcttcatgggagtcttagactgtgggatcgacgcttc

SEQ ID NO: 21747 - DNA, 734 bp, Emericella nidulans
tgtaaatagagagttaggtgagatgtggagaagaaaaaaggaaagaggaataaagagatagaggaaaaataaagatggagaagatatcaagataaagtaaaatgacgaagaagttaagtacataggaaactatgcaggaaattagagaaaaaagtataggacacaagttagagggcgtcaagagccaatataggacaacacatctcggacacttcctcctcacgaatctgatcattggaaagattctgaagtcggacacaccgcgggttgttaatgttagtagtgatgggcatagattaagtccaatcaggtgggcggattataattttcaggtaagaagcctgctattccgagcacaatggagcaaatagatgctaacagatagtataggaaggagagatctataacaaatggcttgcgtacggacagtccaagactgctaatatgctgatggctgtctcgttggcggagaaactaggatctagggggcttctggcgtttagtctgcaccccggtgtcatcattagtacttccatctcaggtggacttgataatatggatgaagatcttgctgcattgagtacgcatcgcaaataacatggtgctctgctggcgttcgattgctgatcggtaccatagaagctcttgacaggatgctcggaaatgcagaggctggcgcgatttcaaagtgaagacgagacagcaaggagctgcgaccacggtatatgctgcat

SEQ ID NO: 21748 - DNA, 580 bp, Emericella nidulans
  unsure (1)..(580): unsure at all n locations
tttgggccatttgtaaattagggaagaacctacactatgttcatttgggccactgctccaacatcaacgatagtgcagtgattcaattggtcaaatcttgcaaccgaatccgatacatcgatcttgcatgttgcagccgcctgacggacaggagtgtacagcaactggcaactcttccgaaactaaggagaattggcctggtcaaatgccagttgattacagatgctagtatattagcacttgcgcggccggcccaggatcactcggtgccatgcagcagcctggaaagagtgcatttgagttattgcgtcaacctcaccatggttgtaagttttgtcgcgtccttgtttctggttaaattcgtgattgtctgacttaagtatagggcatccatgctttactcaacagctgtcctcgtctgacgcacctaagccttaccggagtcgcagcattcttgcgggaggaactaacggtattttgccgtgaggctccccccggagttcaccgacagcagcgnnaggttttctgtgttttcagcggtaaaggcgtcaaccgctttcgcaaccattctgaaccgaga

SEQ ID NO: 21749 - DNA, 850 bp, Emericella nidulans
  unsure (1)..(850): unsure at all n locations
aaatcaatcctagacttgccggacaagataccgataagatcaaagagatggtagctgcgctggaccaagagatcgacacaatgcaacatcttgagcatccgaatattgtacagtatcttggttgtgagcgcggcgaattatcaatctctatctaccttgaatatatctctggtgggtctatcggcagctgtcttcgaaagcacggcaaattcgaggagagcgtggttaagtctcttacgcgacaaaccttggaagggctatcctacctgcataaccaaggtatcctccaccgtgatctcaaggcagacaatatactgctcgatctagatggaacctgcaagatttccgactttggcatatccaaaaaatcaaacgacatctacggaaacgactcctcaaactccatgcaaggatccgtattctggatggcgcccgaagtcatccagtctcaaggccagggctatagcgcgaaagtcgacatctggtccctgggctgcgtggtgcttgagatgttcgctggacgacgacnctaagcaaagaggaagctatcggcgctattttcaaacttggaagcctgagtcaggcgcctcccattccggacgacgagtctatgaatgtcacaccgcctgcgctcgctttcatgtgggattgctttactgtgtatgtctcatgcttccctctttactttcaagagacaagtaactaacctgtttcctgtgcaatagagacacatctgaacgtccgacagctcaaacccttcttactcatcctttctgcgagcccgatccgaagtataatttccttgacactgagctctacgccaaaatccgtcctgtgcttgagaattaaa

SEQ ID NO: 21750 - DNA, 850 bp, Emericella nidulans
tcgaccaaatcatacaaattcacctactctgccaagattgtgcctatctgcaaggacgatctagttgccctaccgattaaactcgcaaagcagcttggcaacatatcaccgctgcttctctgcaaccgaattggtacctcaattagtttcctggatcccaacacacttcagagcgccgacctaaattcccggatatactggcgatcaccgttcacatctctagcagaagcgaaagatcttgttgaatttattgtcttggatgtagagccaacagggcattccagggggaaatggttccaatctgaggtaacggtcgcccgagcgtccgacttcagtggcgacaaacaatactttacgaggacgcatctcggcagcatcatccacccgggcgattccgtgctaggttacatgttgactggaacgaatttcaacaacgcccagtttgatgaaatcgagtcgtccaatacgtacagttcgaccattccggacgtcattctcgtcaagaaattctaccctagacgctcgaagcacaccaagcgcaactggaagctcaagcgcatggccacagaacacgacccctaccttctacccaacaataaagaatcagtggagaatgactttgagatgttcttgcgcgatgttgaagaggaccaggagctacgggcgacgttggcgttatataagaacaagaagaaggacgacacgatgagtgtggcggacaccgacatgatgaacgacgacgacgatgaagttcccaagatcagtatggacgagttactggacgactttgatgacctcgaaattgacgacaacatgcaagattgaacgtacatagtatgaatcaaaagcg

SEQ ID NO: 21751 - DNA, 820 bp, Emericella nidulans
atgtttttactattttttatcgttcattggttaaaaattatgttgcctttttttgctcaggtggggttagaagaaaatctccatgaaaccctagattttactgaaaaatttctctctggcttggaaaatttgcagggtttgaatgaagatgacatccaggtgggctttacccccaaagaagcagtttaccaggaagataaggttattctttaccgtttccaaccggtggtggaaaatcccttacctatcccggttttaattgtttacgccctggtaaatcgcccctacatggtggatttgcaggaaggacgctccctggtggccaacctcctcaaactgggtttggacgtgtatttaattgattggggttatccctcccggggcgatcgttggttgaccctagaagattatttgtctggatatttgaacaactgtgtcgatattatttgtcaacgctcccagcaagaaaaaattacgttgttaggagtttgtcaggggggcacatttagcctgtgttacgcttctctattcccggataaggttaaaaatttggtggtgatggtggctccggtggactttgaacaacccggtactttattgaacgcccggggaggctgtaccttgggagccgaagcagtagatattgacttaatggtggatgccatgggcaatattccaggggattatcttaacctagaatttctcatgcttaaacccctgcaattaggttaccaaaagtatcttgatgtgcaaagatattatgggggatgaagcgaaattgttaactttcacgcaggagaaatgattttaatagtccgat

SEQ ID NO: 21752 - DNA, 850 bp, Emericella nidulans
tggctacaacctcagcccatttacccctaccgaggaggtagagcatctagctgaagaaccaaccaagagtcctatccagaaaggggaagccatcgtacggaaagttaaggaagccctagactgggctcaagcctccatggcctattcccaacagaatacagagaatcaggctaataaacacaggagcccggccacaaactaccaagtgggagataaggtctggctaagtctgaagaacatccgtacggaccgacccagtaagaaacttgactggaagaacgccaagtatgaggttataggcctggtgggcagtcatgctgtacggctgaatacgcccccagggatccatccagtcttccatgtggacctgcttcggctggcttcatcagatccacttccttcccagaagaatgatgatagccagccccctagcatcatggtgaacggtgaggaagaatacatggtagagaaaatcctggacgaacgtcgcaggagatacgggagaggtcaccggctggaatacctagtgaaatggtcaggctatgctcagccaacctgggaagctgccacagctttggaggaagtacaagctctggatgagtggctggatcgtacgaaacaatatagacttcaggacggctcactaaacagagatgcatatataaaggctaaagcaacatgacctaccctgtgacctgtacttcctacatagagggaggggggggtactgttatgggtcctttgcctatacaaggaccttagaccttagtgactcggccaaggcctgcgctgtcctgaaggcggtgagccacctacaagacttccttgcaacaacaatccttctttctca

SEQ ID NO: 21753 - DNA, 850 bp, Emericella nidulans
cacggcgttctcgctcgagacgcccccgtcaagcagcaacttcgaatgggacgagagggcgggcgtggacaacaaattcgttgatggaatggccagtttgaccagccggtcgaacgagggtggttaccttggtacgtccattcgccccgattcactgatgggagtacagtgaggattgacggccgtaggctctgcatccggtgcggccctgctccgtcttacagaaactagggatgatgacgctggcgacagcaatggccaagttcacgagtatgaatgcagagcaagcatccccttcgtgttgaacaccatgtcacagctcgaacccttcgtggatgcgtttttccggctataccattgctcctacccgatcgtacacgaagcaacctttcgcgcccagttcatggagatcatcccgcgtccgccagggaatacgtggcaggtcctactgttcgtgatctcagccttgggcgtcttcacttcgtctaccgcaaccagcaccagcgatgtcgaccttgccctcttcgacgccgctaaagaacggctgtccatcgacgtgctcgagacaggaaacttggtcctcgtccaagcgctgacgctcatatccaattatctccagaaacgcaacaagccaaactccgggtataactatatggggctcgcaaggcgcgtcgcgatggggatcggcttgcataaggagtttcctacatgggatgcatccctcttaacgcttgaaatgaggaggcgggtctggtattgtctttacatctttgacattggggcaatgatcacattttcgaggccgctggatttccccgtagagggtgttgatgtgaagcttcccatgaat

SEQ ID NO: 21754 - DNA, 500 bp, Emericella nidulans
ccctggccttatagactgccacgtgcatcttactgcaacgcccggcaaccctgctctcagagacatgttttctgccagcccaaccagcctcgcccatcgcgccgcatacgtcgcgcgagagatgctcctccgcggattcacgacggcgcgcgacacgggaggtgccgacgccgcgctgcgcgacgctattgctgaaggccttgtgcctggcccgcgcctcttcatcgcaggaaaggcactctcgcagacgggcggacatggcgactcccgcgccgctttccaaggcgaggaagagaaatgctgcggtgggcactcgccgtctctagcacgggtgtgtgatggcgtacccgcctgcctgagcgccgtccgcgacgagctgcgccggggcgcagatttcatcaagatcatgtgtggtggcggcgtagcgtccccctctgatgcgttggatatgcttcagttcacggcagaagagattgaggcgatcaccaaaaaatctgcgc

SEQ ID NO: 21755 - DNA, 614 bp, Emericella nidulans; identical to SEQ ID NO: 12527
  unsure (1)..(614): unsure at all n locations

SEQ ID NO: 21756 - DNA, 850 bp, Emericella nidulans
tacggacctgcagagtgttcagtttactgctcggcgaacccgccagcaacccagcagagcaaccccgctgtccttggacacgccatcggcggcctgatctggcttgttgacccagtcaatcatgataagctgactcctgtcggctgcgtgggtgaattagtcgttcaaggtgcaatagttgcccgcggatacctgaatgaaccggagaagacgcagtcagcattcattcaagatccagcctggatgcctcagacatttcccagggagtaccgacgcatttacaagaccggagacctagcgcgctttaatccagacgggtctctcagcttcgttgcgagaaaagacactcaggccaaggtccgaggtcagcgtgtggaattggcagagatcgaagtccacttgtccgaaagtccagagatccaacatgccatggttgctgtccctgcggcgggtccttataagagcagacttgtgtgcatcctgtctttacaggaacttgctcaacgcagcgatggcatctccagagatagcagcagggtcgcactgattcaagggagcagcgacagatctcacgctgctcagacagcttccgtggtagagaaccgactcgcagagaagcttccgccatatatgataccagctgtgtggattcccttaaagaagatgccgctgaacctttctgggaagattgatcggaagctgataaaagggtggctcgaggatgtggacgaagccacgtaccagtctgttgccgcgatggccgagcagaaggaaccagcttgcagcagcccacctcagacatagagaagaaggtgcaggccgctttcagcgcaacccttaacatccccgt

SEQ ID NO: 21757 - DNA, 850 bp, Emericella nidulans
aagccctggcggagcattatgcaataagcaaaacgcctcttgcaaggggtttaaaggtcataaataccgacagggctacagtgccgatgcggtgggtgcgctttcatgggctatatgatggggggctaattcctctagggaaaacatatccgtcgaaggcggtattctgagtgtcacatccaggatactagtcgtggatcttttgtccagtatatccctcctcagtcgtccccgatgtcaagctgctgacccgttcagagctacttgacccagagagggtgactggattggttgtactccatgctgacaagtaggccttgcctcccggttgtcttgggccagctgacttctggtagaattgtcgcgacgtcgactgaagcatttatcattcgaatctatcgcaatgccaacaaaagtggctttctgaaagccttctccgactcgccggaaccttttactacgggattcgcgcccttagccaactctttgcgtaaccttttcctacggaaagcttcattatggccgcggttccacgttactgttgctgaatcgctggagggccatcggaaagccgaagtaatcgagcttcgaggtccccatgagtgataaaatgcgcgagatacaaaacgcagccctgagtgtggtgagcttttacttgggaactaagaaagcgaacacggattagacatggccattggaaccttgatagcgcttttgatggagctttgacattttcatagacgccagttgccctagtgcattgtgtgagctttagaccaacaaatggagcgtttaaggacctcggcatactaaaaactacatgcccatttaaagcattatctacacatag

SEQ ID NO: 21758 - DNA, 500 bp, Emericella nidulans
tggggaccgccatgatggaaacattgccaacaaaccagaccctcctcgaggacccgtccctctgcaccctcgacacatgcccgctttccatggcctccttcgaatatatccccaagctgtgggcgcagatcctgttcatggcgctgttcggcttggccttcgtcgtccaactcttcctcggcatccgatacaagacatacacgtttatggttgcgatggtgctaggcctggcaggagaagtggttgggtacggcggccgagtctcgcttcacgataacccgtttaacgacgacgcgttcttacaatacttggtctcgctcacgatcgcccccgcgttcctgacggcggcgatctacctcacgctctcgcggatcgtcgtcgcgtacggcgagcgtatctccttcttcaagcccagaacatacacgatcaccttcatcacgttcgacttcatcgcccttcttcttcaagcggtcgcggcgccattgcttctactgccgacg

SEQ ID NO: 21759 - DNA, 500 bp, Emericella nidulans
gagactcttcccaatgacctgtaaactacgcctgccatcggaacgtaacaacattcagcagagtaaccatcacaatgtctaaattcggggttctagtcatgggtccagcaggcgctgggaaaactacattctgcaacgccctcatccaacactgccaaactacccgccgcagctgcttctatgtcaacctcgaccccgccgccgagagctttcagtacgaccctgacctcgatatccgcgagctggttaccctcgaagatgtgatggaagagctggggctcggtccgaacggtggattaatctattgcttcgaattccttttgcagaaccaggatttcctcactgaagcactcgatccgcttagcgaagaatacctgattatcttcgacatgcctgggcaaatcgagctctacacgcacgtaccgctgcttccgtcgctcgtccagtttctgtctcgtgctggcccgctaaacatcaatctctgtgctgcgtatcttctt

SEQ ID NO: 21760 - DNA, 787 bp, Emericella nidulans; identical to SEQ ID NO: 13232

SEQ ID NO: 21761 - DNA, 418 bp, Emericella nidulans
gcgccgcgtgagggtggcaagccttaccactttcttaaggatgactccagctccacccgcgagaccgttgctgctcgcctcaaggccgttgcagaggaggccggttccacctctggcggttccaccacctactactgcaccgacaccctgggttactgtgagcagaatgtccttgcctacaccctgccttcacaggaccttattgccaactgtgatatctactactccgaactccctgctcttgcagacacctgctatgaccaggatcaggcaactaccactcttcacgagttcactcacgctccgggcgtctactcccccggtactgatgatctgggctatgggtatgatgctgcgacagccttggatactgacgatgcgcttaacaatgctgactcgtatgcgctctatgctaacg

SEQ ID NO: 21762 - DNA, 767 bp, Emericella nidulans
atccaaaaaatgaaagagctgctaaagaaaagggacctttaagggacttccaaatgagttttgccaatacacggcccttaaccgatttgtcattcagacctcgcaagctgttgacctgatcggaggcggcgtgaaaatcaacgctatgcccgaagtcgtcacactctccgtaaactaccgcgttgcgcatcaccaaagacccgtcgatgtccagcacagggccgtacaaataattgccgacgttgtcgacaagtacggcctgcgggtcgatgctttcaatggggacaaggaataccatgactatgtcgccgggctctatcgcagcgactcgctctatcgtaacgacctcaagcgtcgtgataaggtcgactataacggaaccctcgtggtcagcgcctttggcaaaggcgaagccgctcccatctctcccactagtggtgctgtatgggagactttttccggaacgattcgacatgcttttgcgtcaggtactaaaaccgttgttcctgttggagacataatgaccggtaacacagacactacgcattatctgagtaagttttgctagggctagttgacaggaaacatagacactgacaataaatcgggcaggcctttcccgtgatgtttacaggtggacgccggctattgctagggcagaggataacatccacactgttgatgagcgtgtgagtatccatgatcatctaaacgcggtaaggttctactatgactttattcgcaattttgatgctgcggatatatag

SEQ ID NO: 21763 - DNA, 500 bp, Emericella nidulans
gcggggatgtatatatgaacacacaggttgctatacggtgagtacctcgcagagcatacatctcttctcaagctatgaagatatggcaagcattgcctttcctctactcgccaagagcttatcgctcacgacagcccatacatacagctatgcctacaactcgcctataaacccgtcgctcccaataatactctttctccatggcttcccatcatccagttacgactggcgtcatcaagtccagttcttctctgcacaagggtttggagtactggcaccggatcttctggggtacggtgatacatccaagccgtggacgctggagagctacaaagccaagacaatggctgctgaaatcatcgagatattggaccatgaaggcattcacaaagttcatgctgttgcccatgatacaggctgcaccctgctatcccgccttgccaactacttcccaagtcgccttctatcttgcacgtttctagacgtgccttattccaggc

SEQ ID NO: 21764 - DNA, 464 bp, Emericella nidulans
tccaacaggctttgaagaccagccatactatgcccatgtgcaccaaccggttctcgcaggcgctctctttgccgtgggatcagttctcgtcatgtcaagcatgtatgccctaggcgtcacaggcacgtatctcggagattacttcggcatccttatggacgcacctgtgcccgggttccctttcaacgttaccggctccccaatgtactggggagtaccttgaacttccttggtgttgcactgtacaagggcaaggttgcgggtatccttctcactgcgctggtctttgttctgtactggtttgctttgaaatgggaggagtaagtctcgctacctctccttagtcccctgatctggatgcttggaaccgtatagagctgtggcttcgtcctgctgaccacgccatctgtagccctttcaccgcagagatctatgcaaagcgcgaacgcgaacgtgcaaagtca

SEQ ID NO: 21765 - DNA, 850 bp, Emericella nidulans
cctggaaaaccttcggacttcaaggttaaatgagtgtgcgatcatgatacaaaagaccctacggtgcaagtactatcgacgcaggtatcttgaggcgcgcttgtcagtcctcgccacccagtcgttagtcagaggattcctcgctaggcagcgcgcagccgaaatacgtcgcatcaaagctgccacaactattcaaagggtgtggaggggtcagaaagaaagaaagagatataatcagattcgcgataatgtcatccttctccagtcgctgtcaaagggcttcctttgtcggcgcaacattttgaactcgattcatggcaatgcagcgaaaaccatacaacgtgctttccgttcttggcgccaactgcgtgcatggcggcaataccgccgacaagttattattgttcagaatctttggagaggcaaaaaagcgagacgggagtataaggtcctgagggaagaggccagagacctgaaacagatttcgtacaagttggaaaataaagtggtcgaattaacgcagtacctggaatcactgaaacgcgagaacaagtctctcaattcccagctcgagaattatgagactcaactcaaatcctggaggagtcgtcataacgccttggagaaccggtctagagaactccaagccgaggccaaccaagcgggcatcactgctgctcggctcacggctctggaagaagaaatgagcatattgcagcagaaccatgctgatggacaagccactattaagcgccttcaggaagaagaaagaatctcccgagactcgatacgttctgcaaaccaggaactggaaaagctcaagcaactcaatgcagaaactaagagtgag

SEQ ID NO: 21766 - DNA, 850 bp, Emericella nidulans
tcctaatgaatggccctaaccccgaactatattttcgacccacgtttgccggactacctgctggaacagtttgggttatgacaaccgcttcagatatgcgggtgcctgttcatgaatttattctgacaggccgcagttcagtccttcgaagagcactacacgactatcggcatcaacatagcgcttctgtgcctgaaatcctgactatagaaaaagattataatggagattgtcaaatacttctccaaggcatggacgttctgtctgtactcaatcttactttctatctctacacggacgctcttcttgatgtctggcagcatgctcggtcttctccagaaaatgcttcccgctaccgtcaggtccgaacagaagtgatgcggattgcctcgcatctggaccttccagctctggagcgggctgccgcacttatggtccgacctgccaaaagcatgaagactgatttctcaaccgccttcaatgatccttctttttttgagagctgtgatgttgtgattgaactaaatggcgattgcatggttgctcatagtcaagtcatccgtcaaagatgccccttcttctacgctctattcgtcggtcgctctggtggtatttgggtacagtctcgacgtaaatcgcctcaagacaaagtccacgtcgacctcaagcatattgacagatctatcttcgagtttgttcttcggtatatgtatgcggatacagatgatcggctctttgatgacgttcggacaaaaaatactcaggattttgttgatatcatcaccgatgttgccttcgtggccgacgagttgatgattgacaggctatcgcagatctgccagagggcact

SEQ ID NO: 21767 - DNA, 850 bp, Emericella nidulans
cggcgatttccggatccccgcggtgcgcatccgtcaaacggctggatatactgtcagcgacctgcagtatcagggccatgaggtggtcgacggtaaaccggcgttgcctggcctgccggcgacattcggtgaggcgggggatgtgacgacgttggttgtacatctgtacgacaattacagtgccgtcgctgcggacctctcgtacagtgtgtttccagaatttgatgctgtggttagaagcgtcaacgttacgaataaaggaaagggcaatattactattgagaatttggcgagtctctctgtagacttcccgctcgaggacttggacctcgtcagtttgaggggtgattgggcgagagaggcgaaccgagagaggcggagagtagagtatggcattcaagggtgagcattctctctctcttttcgatctatttgacgactagtcaactatgaacgtggagccagatactaaccacgtaccttagattcggaagcagcaccggctactcctgccaccttctcaaccccttcttagcccttgtgcacacttgtacaaccgaatcccagggcgaagcatggggcttcaacctcgtctacaccggctccttctccgctcaagtcgagaagggatcccagggtttgacccgcgcgttgatcggcttcaaccccgaccaactctcctggaacttgggacccggcgagaccctgacgtcccctgaatgtgtgtctgtgtacagcaaagacggaatcggcggcatgtcgcgcaaattccaccgtctctaccgcaagcacctcatcaggagcaagttcgcgacatcggatcctaaggcttggtcctccctatagtgag

SEQ ID NO: 21768 - DNA, 615 bp, Emericella nidulans
cgtccgcaatcaagatggtctctacagacagcactgctcccgttgccacagcccccacagcatcaacacccacccccgcccttctcgtgaaaaagctcacagacactgcccgcgccccaacccgcggctctgcattcgcggctggctacgatctctatgctgcaaaggagaccatcatcccagcgaaggggaagggcctagttgatacggggttggcagtcgctgttcccgaggggacttgtatgtttacccaatttccgctctttccctttgctgtccgctcgacgtttagctaattgacgagcttatagatggccgtgttgctccccgaagtggtctcgcctccaagcactttatcgatgttggtgcgggggttatcgatgcggattacaggggtgaagtgaaggtgttgttgttcaacttttccgatgtggactttacgattaaggagggcgaccgcgttgcgcagcttgttttggagagggtatgacactatctggctagattgatggctggacgctaacgtacttgtagatttatacccccgaggttgcggttgttgaggagttggcggaaagtgtgagaggagctggtggttttggaagtaccggcact

SEQ ID NO: 21769 - DNA, 548 bp, Emericella nidulans
ccgtccttgggtattgagatcctccatgcatatgggcgcaacgtatgtttcaaaagctacctctttcatgaagtcacaaaagttcctgggtatttccggattcttctcccgccttaaggataagggtactctcgcaaaagaagcctggacaaccatctcgactgtcatcgacgcacaattgaccatggaggagatggctaaactcgaagaaaagggcggcgagaattggacggatgagatgagggccgagtattccgtaaaggtaacgggcaagcttctcgcggccgcctggcgtggtagcaaactcgagattcaaagcgtccttcgcgacgtctgtgataaggtgttgggcgacaagaagatcaagttggagaagcgcatcgagcgggctcatgccatgataattgccggcaatatctattctaaggtatgagccatctctttcctaggctggtattcttcatactgattctcttcaggccgagcgtgaccccgacgacgagggagattacatggccttcgagcagctcatggctgatgcaacggca

SEQ ID NO: 21770 - DNA, 630 bp, Emericella nidulans; identical to SEQ ID NO: 9236

SEQ ID NO: 21771 - DNA, 581 bp, Emericella nidulans
tcctcttgtcatatctactcatccatctcccggcgactcctcgtcattccagcgttttccagctcttctagcatccagtcatggcaaagtcagtgcaagaaaaggcggccgcgactgtggcggcggacagtgaggtcggccaggtggtcgactaccaggcgcatgaccatggagccgactccgggctcagtcgtaccctggagacgcgccatctcctcatgttctccatcggctcgtctattgggatgggtctctggttggggtccggcacatcgcttgcctctggtggtccagcagctattttcctgggctactggatagcggggctccatcgcgtggttactcaaccaggccgtgggtgaactggcagtcctatatcccgtcccgagcgcctttcctcagtggtctcgcaagtttattgaccacgctgtagcactcactgtcggctgggcgtactggttctcgggctcgatcacgctcgccaacgagctgcaggccatcgtcactgtgctccggttctgggacgacaccgtgcccaccgccgatggctgtccatcttccttggacatcttgtcataaac

SEQ ID NO: 21772 - DNA, 850 bp, Emericella nidulans
agttatcctcccatcaagcccaaactctcaaggagtagttcgagtcagtcccagagactaaaggactcccaagcggctgagcctgaaagcgaggcagatgtggatagaatccgcgttcgtcgcatcctcaccctcgtaggcgggctggacgaaaaggccaaaaaggtgttcttcgccatgcagaagcgccaggtatccctaagaacagctgtcacagtctatttacaggcgtgcgaggagtacaatgtaagtaacaacaggaccgcgagccagtgacggtagctaacagcgagcagggtggcgtgatggaaaagaataaggaccagatcaaggctcaacttactaaaattgttgacgctttagcgaaaacctttcccgatccagcaaggacatctgcagacttatggaagttcgcaaaaatccatgaccgacgaggctatcaacttatccgctttgcgatggctgctgtgagtgactatcgcacggttatcaaagctatcaaggagctggcgagaaggctacaatccagcaataacacgatcctgcatgagacacttactaccctgttatatcgctgcagctcgatcgtctttaaccgaagtcatattcccgccattatgagcatctcccggtcagatgagaatggattagcggctcccgcgcatgagatgctgaaagaaatctcttcactcaaccccgaggttttggaggctcaggtgcaagagatatgcaaagatcttgaggcccaagccccaaaggccaccacggtgagcgctgccggtactgaggagatctcaaggcctgctccgggtttgcgaagaagctccctcgaagttacgaagagcggaag

SEQ ID NO: 21773 - DNA, 657 bp, Emericella nidulans
gaaaattctaaataaggacaagaagtacgcgttcatgctatgtttagattcaaagtttattaagaaagcacaagcatacccagacgaaggttggtgtcaagattttcaccgcagacattatctaccacctgttcgacgatttcaccaagcacatggccgaactgacggaacgcaagaaggaagaggccaagctgctcgccgtcttcccctgtgttcttaagactgtcgccgtctttaccaagaaggaccccatagtcatcggtgtccatgttgtcgagggtagcctccgtctacacacgcctatcgccgccatcaaaacaaacgcaacaacgggtgctaaggaagttgtcgaactcggtagagtgtaagttttccattcacttttactttctcaataaacactaaaccatatgcagtgccggtatcgaacgtgaccacaagcctgtcaacgttgtcaagcgaggccaaccctccgtcgccgtcaagatcgaaggcgccaatcagcccatgtacggccgtcagctcgaagagtcggacacactatactcccagatttctcgtgcaagcatcgacaccctcaaggagttctaccggtcggatgtctccatggatgaatgggctcttatcaagaagctcaagcctgttttcgatatccct

SEQ ID NO: 21774 - DNA, 561 bp, Emericella nidulans; identical to SEQ ID NO: 14468
  unsure (1)..(561): unsure at all n locations

SEQ ID NO: 21775 - DNA, 850 bp, Emericella nidulans
ttcttccgtgggctccaatctttccgtctcgagggcttagaagcctgcaaaaggcggatgtcgtcatcaacaacaactccgaggtgcagagggacttacaagccctgtccaaactcgttgatgcctttgcaccaaagagtagtcgactccagactaacggagacctgggcgacttggtggaccaagagctttcgaaagccgcggacgccattgatgccgccgtccaaagacttgcgaagcttaagagcaaacctcgcgatggcttctccacctacgaattgaagattaacgacgtgatcttggaggctgcgatcgccgttacgggtgcaatcgcggagctcatcaaggccgccaccgcgtcccaacaggagattgtccgcgaaggacgtggtagtgcttccaaaacagctttttacaagaagaacaaccggtggacggaaggtcttatctctgctgccaaggctgtcgcctcctcaaccaacacattaattgagactgcagacggtgtgatttccggccgcaactcgcctgaacagcttattgtggctagtaacgatgttgctgctagcaccgcacagttggtcgctgctagtcgtgtaaaggctactttcatgagcaaaactcaagatcgtctggagactgctagcaaagccgttggtgcagcctgtagggctctggtacgacaagtgcaggatatcatcgccgagaagaaccgcgacgacaatgaggcggtggactactctaagctcagttcgcacgagttcaaagtacaggaaatggaacaacaggtattcttccctcgccttcctgcttccgctatccgcaacattgaacatgtggatgattatct

SEQ ID NO: 21776 - DNA, 838 bp, Emericella nidulans; identical to SEQ ID NO: 15778
  unsure (1)..(838): unsure at all n locations

SEQ ID NO: 21777 - DNA, 850 bp, Emericella nidulans
gggtgagccggtcagcgtttacgatcttgatgactacgaggagcgctggggatacgtttacaacatgtttcaccggcagtacatgcacgcgatgctcaaggactgcgcgctgcaggaggaaggcaagggggtgcctgtcaagctgctggttaaccactctgtacgccacaggatctattttgtagggcatcgctaatgtcaacagtgccagaaaatcgacctcgagtccggcgtggtcaccttcgagaacggcgtgacagcccagcacgacctcatcgtcggcgccgacggtatcggatccgctgcccgccgcattatcggcctcaaccccgagaagaaggctgctccctcaagctgcctgcatgcaaacgtcatgaccgaagatgccgtccgtcttggtcttgtcgactactccaaggactctgccctcgagtactggggtggccaggaaggcaaatgggacaaaatcgtcctgtccccttgcaacggcggaaaacttctctcgtactactgctttttcccccgtgaagtgggcgactacacgtcgcacacctggggcggcgaagaccgccctgttgaggagctgctcgcaccatacccagaactggacaagcaggtcaaggatcatctggccattggcattgaagtccggccgtggcgtctgtgggtccaccaaccatacgaatacatcagcaagaacctggtctgcctgctcggcgacgcaggacacccggtacgcttctccttctgcactacccttccgccaactaacagctgtgctcccagatgatgccccatcaaagccaaggcgcgtgcatggccatcgaagatgccgctgctctaggcatat

SEQ ID NO: 21778 - DNA, 850 bp, Emericella nidulans
caacgacggcgggtttcccacccaagggctgtcctggttcgtcggcatgacgggctgtgttttcgcttttgctggaggtgatgccgctgtgcatgtatgagcctgaccctcttgctcctcaaggaggatatgataataccagatctgacaaaatgcacccatagatggctgaggaagtgcgcgatgcgtctgtggcaatcccgcgcgcgatcatgctttcggtcctcatcaacggatcgctcggattcggcatgttgatagcagtcctcttctgcctgggcaacctcgaagaggccctaaataccccgaccggctacccatacatggagatcttccgtcaggcgacggattccgtctccggcgccttgggaatgacctcaatcatcctcattatcggcatctgcaccatattcggtcttctcgcagcaacatcccgccagttctggtcgtttgcgcgcgatcgtgctgtccctggttggcgcatctggagcaaggtatctgcctacctacctgactgcttgcttgtttatgacacttaactgcctactaacacgtcgtctcttcattcaggtctcgcccatcaactgcctccctacctactcgatcctcctcacaatgagcgtcacctgcctgctgggcctgatcaacatcggatccagcgtggccctgaatgcggtcgtctctatgaccgtgtcgggtctgtacctatcctacctgaccgtcggcagcctgctgctttggcgccgatgcacgggcgcaatcacgcatttccagaatggcgaagacgaaagtaaataacgtccccggcgcaaagcaggtctggggcccgtttcatatcggcggtatttgg

SEQ ID NO: 21779 - DNA, 850 bp, Emericella nidulans
atggtatgtcatatgtacctaacgaacgattggggccggtaggggagtatgccattgtttccgcaacgattgacgatgacaagttcaacctaacccactattacatcttccaaaacggcctcagtgcaatctacatgggcacgaattccctatctcagcctgcagtgggtgaactgcgctacattgctcgtctggtgaatctgcccgaagcatacaaggagggcgaggtctctgatatccgaaatggcgaggccatcgagggaagtgatgtctatctcgtggatggtgagacgagaagcaaagtatacccaccctctctacttggtgtttgaattgttgttgaccaaggctggatggcagttctactcctcccaacgtttcatcgacgactccgtttactgcgcctattccaccgacagcagcgtgcacgcctgtttcctgtctgacacgcgctcgcgcgaaaagtcctctggcggccccttcttcagagacatcgaccttaacctagtcagcgactaccactccttgacatactacatgaactcgggccacgtacagactgaagagttccggaccgggttcttcgggccgtatattctgtccttcagcggatcttccatcccctcctggtctgattttgacgtctccttcttcgacgagctcgagttggacggctacgtcgggtcctctggacgtggcgtcgtgacagggacagtgagcgggacatcatcttctttacctaccatcgtccacttctacaacgacgactatcagtcctgggcgaatgcctcggacgacggctctttcacgtctcctgagttagtggaaggctcctacacgctcgccttgt

SEQ ID NO: 21780 - DNA, 602 bp, Emericella nidulans; identical to SEQ ID NO: 9657

SEQ ID NO: 21781 - DNA, 635 bp, Emericella nidulans
acaatgcttatttttcgggctccttggaagaagcacatgtcatttatgattccttgattaagaaagtgagcttagagggttgtcgctgtattgagccacgagttgggccactggagcttcagccactctacgaagcttttcggcatcgctcaagtatgttttgctaccgctaccattgaaaaagtttggaggatctcttactgactttcacagttccacatgttctatatctttgctctcttctcggcgttcgtgaataacagatcactctaccagtcgttcggcttccacactgaacagcctattatgattggattcctcctcttctctgacgccctcgcgcctatggatgctgtcgttaaacttctgatgaatatccttagtcgcaaatttgaatttgaagcgggtatgtgctaggtcttagaagcgttgcaatctcaactaacggattcaaagatgcatttgcagtcaacctcggatactcggaggagctctcccagtcccttctcaagctccagatccagaacctgagcactatggatgcggactggatgtacgccagctaccactactctcatcccatccttcctgagagactcaaggctctaggctggaagggcagaaaagttacagac

SEQ ID NO: 21782 - DNA, 782 bp, Emericella nidulans
atgcctacccgtctctctaagacaaggaagcagtgagtcgccagctccctatttttattttgccccctttcgaattggtccgacgatgcggcgagaagtggaaatcgatgaaattcgcgacaagtctccgctggaatcacgaacattaccgccagaatgagcacagggactgacatatatcgtttttttcctagccgcggtcatgtatccgccggttacggtcgtatcggaaagcaccgtaagcaccccggtggtcgtggtatggccggtggtcagcaccaccatcgcaccaacctcgacaagtaccaccctggttacttcggtaaggtcggtatgaggtacttccacaagacccagcaacagttctggaagcccacaatcaacgtcgacaaggtacgttctggcagcacatgaaatggagtatcggtagtcgcggatggaatttgcagaacacttcgacggtgaatctttacgaggttctatcgttggatgggttcaggcattgtccaaaagcggctccgaaccgcgtcacttggtgttcaaagctgatggtcctactttattagctgtggtccctcgttcccgccgagcagcgtgatgcctacattagcggccagaagaccgacactgcccccgtcattgaccttctctccctcggttactccaaggttctcggcaagggccgtcttcctgaagtccccatcgttgttcgcgcccggtacgtcagccgtgatgctgagcagaagatcaaggaggctggtggtgttgtcgagctagttgca

SEQ ID NO: 21783 - DNA, 396 bp, Emericella nidulans
cttttatcgaaagggctgatgaaaacggtaacctgctcgagtctaccggtgcctttaacgtcattgacgtgaatatcaaggggaccctaaatagtaagcgttcatgaagaccaagggactgcatactcacgacatcacagcgctacgtctagcaatccactatatgcaatgctccccagacaggccagccggacgcaagtcgattgttctggtcgcctctacatcaggctattttggcgggacaggcgtgtcagcgtacgtctcttcgaaacatgcaatcatcggactgctacgaagctcgcatatcacagccagcaaaaacggtgtcgctgtcactgccgtcgcacccttctttacatacactaatatcacagccaaggcaggagcgcgatggca

SEQ ID NO: 21784 - DNA, 850 bp, Emericella nidulans
acagctaacgtatgagggtctcatcgatgagttggtaggaatcaagcacaaccaagcggacattgatacgacaattgcaggggccagctcaactccccaggcccaggagtcttccaaagcatctcaacaggctaagcaaggtcaaaagcggaagattcagttggattcgtctgaccaactgttcagtcaactccgtgacgcgaattttgctatagtcggcgatatcctgaataaggtagcacgtcgattagcaacagattatgagagccgtcatacagcaaaaacgacaactgaacttcgcgagtttgtgaataaactaccatcatatcaactcgaacatcaaagcttgagagttcacaccaacctcgctaaggaaatcatgaaaaacacgcgctcagacactttccgcaagatccgcgaagtgcaacagagcgacgctgcaggcgccgacccaacttaccaacatcctctcattgaggaactcatcgcccgggatattccactgaagacaatcctccgtttgctttgtctcgaatcatgcatgtccggtggcctacggcctaaagacctcgagagttttaaacgccaagtcgtccacgcatacgggcaccaacgcctgctaacattcagtgctttggagaagatggagcttctccagccccggtcgtctgcaaccacaatgctaattcccggcacgggcacccaaacgggatcgaaaacaaactacgcctactttcgcaaaaatcttcgcctggtcgtcgaagaagttagcgagaaggaacctgaagatatcgcttatgtctacagcggtttcgcccctctcagcattcgccttgtgcagtgcgtcttg

SEQ ID NO: 21785 - DNA, 645 bp, Emericella nidulans; identical to SEQ ID NO: 10649

SEQ ID NO: 21786 - DNA, 515 bp, Emericella nidulans
gccgggtacgggaaaaggataaccaacgtatgggatatcagcctcgaggagttcgagtacatgttaaacatcaatcttcgggcttcgttcgtcctggtcaaaggagtggtggaacatatgaaggcgcagcgatggggccgtattgttttcatgtcttcgatcgctgcctctggaggcgggatcaatggatgccgtgcgtttttctgactcggtcatacttgcacttacttatcagcttagattacgctgcgtctaaaggcggactgactggcatgatgaagaacctctctacgcgtttggctgagtacaatatcagcgtcaacgacgtcgcgcccgctatgataggcgatactggcatggttccatcggccacggctattccgggaattgcatcgaatatcccgctgggtcgattgggaacaccggaggaaacggcaaatgtggtgacgatgctggtgaacacgggatatatgacggggcagagtctgttgctagctgggggattgaagtagaaa

SEQ ID NO: 21787 - DNA, 850 bp, Emericella nidulans
tgatgttaggtttgacgacaatggtattatggtactgggttctggtgtctaccgtatcggatcttcagtcgagttcgattggtgctctgtgaggacaattcgaactctccgtgagcagggacacaagactgtcatggttaactacaaccctgagactgttagtaccgactacgacgaggctgatcgcttgtatttcgagaatatcaatctggaaacggtgctcgatatttaccagctggagtcctccagcggtgtgatcatgtccatgggtggtcagactcctaacaatatcgctcttccgttgcaccgcctcaatgttcgtattcttggtacttcgcctgaaatgattgacggagccgagaaccgttacaagttctcccgcatgcttgaccgtattggcgtcgaccaacctgcttggaaggagctcaccagcatcgaagaggcccgtgagttctgtgacaaggtcggctaccccgtgcttgttcggccttcatatgtgttgtcaggtgcggccatgaacactgtctactctgaacatgatcttgccagctatctcaaccaagctgcggacgtctcccgtgaacatcctgttgtcatcaccaagtatattgaaaatgccaaggagatcgagatggatgcagtcgctcgtaatggtgtcatggttggccatttcatctccgagcacgtggaaaacgctggtgtccactctggtgacgcgactctgatcctgccaccccaggacttggaccctgagaccgttcgacgaattgaagaagccacccgcaagattgggaacgctctgaacgtgactggacccttcaacattcaattcattgccaaggacaatata

SEQ ID NO: 21788 - DNA, 703 bp, Emericella nidulans
agcacaatcggtatcccgatcaagcttttgaacgaagcgcaggtacgcttgactgtcgcccttgcggatatcgcaacaagaccctggaagattcaatttacagatgagctaacggtctatagggtcacgttgtcaccctcgaaatcacctctggtgtcgtctaccgcgggaaactcctcgagggtgcggcccatccaacccaccttacaccgtacatttgaagactgacaggtttcgatagcggaggataacatgaacgtccaactgaaagacattaccgtcacagcgcgcgatggccgcgtctcgcatctcgaccaggtttacatccgcggcagccacgtacgattctttattgtgccggatatgctacggtgcgtccagtctattcttctatgatccgtattcggcagcttcgagcttaaagctgatcacttactcgttctatagaaatgcccccatgttccgtacacgaggacagcgcggcagaggtgtcggtctggcgcgtggtaaggcgacggtgcagagggcccggggacagaggagaggataggtgtattgaagatgaaaaggggtcaatcggatcagggctcagcgaggtaggtaaggatactaccggactcgaaaagacggattttctgcccgtcggtaaaagtgtccgtcagggcggggatgcggccgttggggtttatttcgaggaaccagc

SEQ ID NO: 21789 - DNA, 641 bp, Emericella nidulans
gtactatcagtctatcgagcgcacgcgtatccaggtaaatgcctgctttgctggacagtctggatcgtttgcattgaagtgtgtgcggcgaaaggaagttcggaaaggcatggttgttctcaaaaaattggatcaacagcccaaagtctaccgagagttcattgctgaaggtacttatcatcatagaccatggttggattcttgctaacttatatagtcctcatcctgtctcatgcgacgactataaagcctcggtatcaggctatgctccatgtcggggcggtgagccaaacatgctctgtcatcgacattgaccgaccttacattcgaactggtgatcgtgccctagttgccttccgtttcatgcagcggcccgaattcctcgctcctggtgatcgggtactcttccgagagggtaagacgaagggactaggcattgtcaagagcgttggatacgattcaagcaatccattgagccccgaagcaagaaaagagtatgagcggaaagaaaagcactgatctttctgctggtgctgttcgactctctcaatacccctcaaaccctggccgagaagtcagcggcttacgacgcgtcactatatgtctgtctttctgcatgcgagtggatctttgagtcattt

SEQ ID NO: 21790 - DNA, 443 bp, Emericella nidulans
ctcacacttcaaatcttctagcctcagcgatggatgatgggacggtaaagatctgggatatggagatatattcccttcgacacacattcgatttggaccatgagattcaaaggattcagttcgacaagagcatgtcctccctgattacgaacgtcggccgtattcagttagacgccaggagtaaggctaccgagggattcgcttcgtctcaagtcctggatcgaagtcaagcgcaaggacatcacccgcggcgccaaggctatggtttgagtgacgacttttcttggattacgtggaacggcgataatgtattgtggcttccaccaggttacaggccttgtatctcgactgtatccgtgccaccgaaagaatctggaacctcggtgattgggctaggtactaaatcagggagagtcgtgtcaatccgactttcaggtttaggg

SEQ ID NO: 21791 - DNA, 637 bp, Emericella nidulans
tgccctcggtatttcttggtctactccttaacatcctggatgctctctcatacgggatgatcctctttccgttgggcgagccgatcttctctcatctaggatcagatggtatatcgatgttctacgtgagtacgatcattgctcagcttgtcttctcctgcgggggctcgatatttcgcgggggaataggaagcgagatgattgaggtcgtcccattcttccaccagatggcgtttacaatactaaaccgcgttgggcaagataatccgaaatcggtgatagccaccacgatcctagcattctcggtcagctccgtccttacaggcctggtatttttcctcatggggacgtgcaagataggctcgcttattgggttcttcccccggcatatccttatcggatgcattgggggtgtaggcttcttccttattctgactggtctcgaagtctcagctcgattgcctgggtcttttgagtttgatatacctaccatgcagaagctttttaacctggctgcactggccctctgggtaacgccgctgttgctcgcgattggtcttcttgtcaacaagcgtttcgtcagatctaactatctagttggtgcttatttcattggcgtcgccttatgataaatatg

SEQ ID NO: 21792 - DNA, 609 bp, Emericella nidulans
gcctgttctctttgttcaggccaaaggagcatgggcgcaagcaagctaaaatccttacacgcagtcaaacgatcgctccttcgataacccaagatctgagacagcaagatggaccctactttgaccatgattcttatgatactggcttcaccgcgcccccaagaacaactgtatttgaatcagctggtgacatccttatgccaccccttcccccagtcgactacatagtcaatcccgaatcaaggccacgtacgatcttgcacgaccgtgtttaccaccctaaggacattccccctcccattgtgaaccggcgcagtgtagcggcacgtacatcccaggttagggatactgctgcaggttacgatatcgcgaaggacttttcaaataacgcggggctcaaagtggaggaaaaaatcgctcgggcttaccaccgaggactctcgtggcgaaaggtccttgttcgtttagaacctgacgctcacaacaacataatcgttcggcgtatgttcacaaatgcctacggctggccagtcgtgcagcatctagtagatgcccacttcgggccaagctcctcagacccagagtatctctgcgaagacagcccgggag

SEQ ID NO: 21793 - DNA, 827 bp, Emericella nidulans
cagcgtgatgtcgagaattctggatccgtgacgagcttcgcgtcaaaaataagcaataatgccgccgctgcagtgctcgcgtactgcctctcctccatcagcatgaccctggtgaacaagtacgtcgtttccggcgccagctggaacctgagctttctttatctcgctatccaggtgtgttgcttgtcttgttttggtaaaaacaacaataataaatttaaaaatttattatttctatgacttctactatttctttacgccataaaagcaagatggacgttaacttgacgagtccttcattggcactgtagcgataatggtttgcaagaaggctggccttatccagaacctcggcctctttgacttgaagaaggctcagacgtgtaggagacttccacccaaggcccagcggtatgcaaacgctgaccttttcaatcgcagggttgccgatctccttactgctggtcggaatgatttatacgggcaacaaagcgctgcaattcctgtctgttcccgtttatacgatcttcaagaacctgacaatcatcgtcatcgcgtacggcgaagtcttcatggtcggaggcagcgtgaagcctcttgccctgctgtctttcggcttgatggtgctcagctccgtggtggcagcctgggccgacatccagatcgcaaccgccgcaacgcgaaaagccagctctgactcggcagtggcgaccctgtcggctctcaacgctggttacgcctggatggggacgaacgtggtcttctccgcgtcgtacgcattgggcatgcgccgggtgatcaagaagacgaattttgacaactgggac

SEQ ID NO: 21794 - DNA, 533 bp, Emericella nidulans
acgcaaccccgcagagaattgttcattagatcgcttcctgcctcagcaacgaatgagagcctcgccgaacatttttcgcagtcctacgtgattaagcatgcagttgttgtcgtcgacccaaagacaaagcagtctaaggggtacggttttgtgacgttcgcggacgtggaggatgccaaggctgcgctggaagaattgaacgggtcgacattcgaaggaaagaaaatcaaagtcgaatatgcgcagcctcggcaccgagttgttgatgagactgttgggaagagtgtaccatccgctgaggcactggagcgcaagaaacagagggagcagcaaaaggccgatacgcagcccccaaagctgattgtacgaaatctgccgtggagtatcaaaacgcccgaagatctcgcggcgcacatccggagctttggaaaggtcaaatacgttactcttccgaagaaggggagacagttggcaggctttggatttgttgtgcgtcgaggaaagaaaaatgcggaagcacctcaggaagctgt

SEQ ID NO: 21795 - DNA, 850 bp, Emericella nidulans
  unsure (1)..(850): unsure at all n locations
gaccgagccacctgtcttggactctcaaacctggtgagacatttgactcgcccgagtgtgttgctgtctactccagcactgggattggagggatgtcccgtcctctccatgggctgtatcggaaacacctaatgaagagcaagttcgcgaccgaagaccgccccgtgctcttgaatagctgggaggggctgtattttcatatcgaccaggaccggatgtaccgtctcgcacaggaggcggcggcgttgggcgtcaagctgctcgtcatggatgacggctggtttggggacgagcatccgcggacctctgatgatgccggcttgggcgattggatccccaatccggccagattccctgacgggctgacgccgttagtgaacaggatcactgcgttaaaggtcgcgaattcgcagagaaacatgcgcttcgggatctgggttgagccagagatggtcaaccctcgatccacgctctaccagcaacaccccgactgggttcttcatgctggcaattatccacgcactgagcagcgcaatcagcttgtgctcaatatgagtctgccggagtgcaggagttcattatcagcgcgatgtcggagatcctaaacgccgctgacattacatatgtcaagtgggaccacaaccgcggcctcgaggacaccatctccatgcgcaaaccacgcctatatgctaggcgcctaccgcgtgtttgatgtcctcaccacccgctttcctaatgtcatctgggagggctgccatcgggcgggggcgcttcgacccaggaatcctgcagtacttcccacaagtatggacatccgacgacagcgaccggtcgagcgantcttcatcca

SEQ ID NO: 21796 - DNA, 775 bp, Emericella nidulans
cagcccattctacaaggtgaagatagtccagatgatgttcgtcattcttagtgggtatatctatagcgtatcgctaagtaccatataaatagacctatagaagccgcaaaactatcaaacgttacttgatcgttgatattgccgaatctacctattttacacagagaggacgcgtacaggcagagaaggtttgacacttcctatcccgatggcccttgtcccggattaacaccataaaggttttgtcagtgcaagacgaagttacgaagcataaaaaggtcgttgtactacgagaatcttggtacgacagtccatgcgataaggatcattatatacacttgatcggtgaattcgatatgaacggccactgcatcgtgagcgatgctcagaatatgattataatccaccctgaccaccttatatccgcaacggttatagcggactcgatcagctgtcaacgcagggccgtgcttcaagaacgcacaaagcgaacgtcggaccttgggaagccacaagtattcggtaacatcttccatgagttgttccaggaagccatgaaagtggaatcgatgggatacagcgtttttgaggacattgattgaagatattgcagtgagacatgttgaagagctatatctgatccacatgagcatcaacgaggccgtggaccatgtgatgagtagaataccaggaatacagcgttgggcagagctctttcttcgtcggaaaccaggtgtaggtacgatcctaagcttgggtctccctatagtgagtg

SEQ ID NO: 21797 - DNA, 642 bp, Emericella nidulans
tcacctcggacttttgcggcgatggctgtcaaaagaactccaacggcgttggatgtggccagccagagtaggttgacctcatctcctcctgggagttgaatgctgacgaagatgtagccgtccgtcatgctccgcaaatacagacgccatgtccttcaagcggcgcattgggtattatgagctgttcaactactacaagggttgcaacgtgatcgagcccgagagtctcatcatcgagcctttcacacacatcaatctggcgtttgtcaactttggcgacgactacacgttgattgacgaatatggcgatatcgtcgaccgcgtctcgttcctcaagttctccaaccctggtctgcgcgtgaatatcgctgttggaggatgggcatttagtgacgccccgacgcagcacctgtggacgcaaagtaagtggccatccgcctgccattggtgcatcttttgaagatatattgatttcgccgtatagtggctcgctcgcacgagaaccgacagacattcatcaactctgtagtaaagtacctccaggactaccacctcgatggtatcgatatcgactgggagtatccatctgcatcagaccgcggcggacgaccgcaagacagcgccaactttgtgacactgctc

SEQ ID NO: 21798 - DNA, 693 bp, Emericella nidulans
atcatgcgttttaccaacattcttctgctcttagccgggtccgcctgggttggagcgagtcctgttgcttctggtgagaccgagatcgttgcgagacagtcgtcgtcggagtactgggtgggcactatagagaaccgtggggcggtgccatttggggacgacgccgactaccaagtacaccgcaatgtgaaggatttcggtgctgttggtgagtctttccaggctcatgtacttgtatgagtgacttgagtgactaatagagtaggtgacggtacaacggacgataccgatgccatcaataaggccatctcttctggcaaccgctgcggtcagggctgcgactcgtccaccacgaagcccgccgtggtttacttccctgccggcacatacctcgtctccaaacccattgttcagtactactacacccaaatggttggtgatgccaacaaccttcctgttctcaaagcgtctgccgacttctctggtatggccgtcgtcgacgcagacccatacaccgatgacggttccaactggtacactaaccagaacaatttcttccgttcgatccgtaacttcgtcgttgacctgactgccatgccccaatcctctggagctggtattcattggcaggtcggccaggctactagcctgcagaacattcgctttaaagatcaaagcgagactcatagaaca

SEQ ID NO: 21799 - DNA, 850 bp, Emericella nidulans
cactcttgtgtcctcaggccaagaagctttaattgagacgcaagatgccctgttcaatgtccccgttcagcatgccttgtttggcactccttcgaaggccatggaagagcaaattattgagcagcagctggatcctacaccttactctcttcctccgatgttgcctgagccaatttcaactaagggtcgctatacccatattgaagtaccctctatgcgacgattcgtcacggattctggcaagttagctaagctggatgaactcctgcgtgaactgaaggcaggcggtccccgtgtgcttctttacttacaaattacgcgcatgatcgatctcatgtaggagtacctaacctaccgccactacaagtacttccgcctggatggaagcacaaagctgcaagatcgtccagacacagtggcggatttccagcaacgtcccgacatcttcgtgttccttttgtctactagagctcgtggtctgggtatcaatctaactgctaaaaactctgtcattttctatgactctgattggaatccgacaatcgactcgcaagccatggaccgagcacatcgtctgggtcaaaccagacaagttacagtttaccgagtcatcacccgctccactatcgaggagcgcatccgcaagcgagccttgcaaaaagaggaggtacaacgggttgtcatctcaggtggtgcagccggcggtgttgacttcaacacccgcaaccgcgatagcaaaacaaaggacattgctatgtggctggccgatgacgaacaagcagagcttatcgagcaaaaggaaagggaagcccttgagcgaggtgaaacattcggtgcttcaaaaggcggc

SEQ ID NO: 21800 - DNA, 850 bp, Emericella nidulans
aggagcagaaagcatcgaccctgatgaacggtattgggttaaaacgtcctcttgaacttggtccggatggcttcccgattctcaaaaagcgaaagcgtgcaccgaaggcagcaccgaaagctccattaaatgagataccatgggagggtttcgattccgacgacgaggataaggaagaagagatcggacctggtatcgacgcaaaaagcgaagaagagggcacgggctccgatgattcttctgaatcagagagtgaagttgacgacaacggcgatagtggtagtgatgaagatgaagacagaaaagatgaggaggatgaagacgaagacgaagacgaagacgtagatgatgatgaggacgaggatgaagacgacgagaaagaggatgatgatgacgaagacgaagacgaaaataacactgatggacgaattaagccccgacaatcagccttcaaatcatgggccagacaacaaatcaatgaagttgtaggctttaagcccacatccggtccaataacgactgagccacaagtcatccccaaatccgcacttccagtcagagctgtggaggaagagccactacctctagaactccaagtcacaaagggcaacccgtaccggaaagccttcagtgttcaagtcgaccgtcccgaacatattcaagaagcccgtctcaaactccccgttgttggcgaagagcaaaagatcatggaagcaatccataacaactctgccatcgtgatatggggagccacaggaagcggtaaaacaacacacgttccgcaatttctgtttgagtctggctatgggaatcctgagagcgggaatcctggtatgattggagtcacttt

SEQ ID NO: 21801 - DNA, 850 bp, Emericella nidulans
agaagagtgttgtacgaactcagagcccggaacggtcctatgaggcccaggattctacgccgatctcgaactaccaggatgatctgcactccctctcctcatcgcagaactcagaacactcagaaccagaacacgcaacaacgccaggcagagatgcggaggaccaagttccagcgaaatccgcgctggactcggaatcagaagaagccatgaaggtagtcccgcggctctcgcgccgcggcctctttggccaaatcaccctgctggaggagatcgaaaacccaaagtgctacccgcgcagtaagaaatggttcatcacctttgtcgtcgcagttgcgggctctgtcgcgccaatggggagttcgatcttctttcctgcgctttcacaagtagcagacgagctcaacgctacgacaacagtcacgaatctgacaatctcgctgtacatgctgagcatgtctattttcccgctgtggtggtcgtcattcagtgaacggcttggaaggcggacgatttacatagcctcattcgcgctcttcgtcgtgtttaatgtcctctgtgcagtttcgagctcaattgctatgcttattgtcatgagattgcttagtggtggtgcttcggcgtctgttcaggctgttggtgcaggcacaattgctgatatatgggatacgcgggagcgagggcgcgctatggggatattctatttgggacctctgtgcgggccattgattgcacctatcgtgggaggagcactggcgcagcggtggcactggcgaagcacaatgtggttctttagcgcgtatggcggtgtcgtcgtcgttctcattcttcttggtcttccagagacgct

SEQ ID NO: 21802 - DNA, 850 bp, Emericella nidulans
ggttggtcgatggtgtcgttcttgtcgttgatgttgtagagggcgtgcaggcgaacaccgaacaaattatcagacatgcagtgctggaggatctccctctgacactggttgtgaataagatggacaggttaatactggagctgaagctaccgccgaacgatgcctacttcaaattaaaacatgtgatcgaagaggtcaacacaatgattgaaaacgtcatgcctggccacggtgagaaacggcgattgagtcctgagaaaggcaatgttgcctttgcctgtgcttcgatgaaatggtgcttcactctacagtcgttcgcgaaaatgtacgccgatacttatcctaatattgagacagctgattttgctatacgtctctggggagatattttcttcaacccaagaagtcgaaaattcacccggaaaggggcggaggataattccaaacggacctttgtcaagtttgtcttggaacccatatacaaactttactctcacacgcttagcgaaagccctgacgacttgaagggaactctcgccagtgtaggcatcaggctaaaaccctcacagctcatgtcagacgcgaaggtgctgctcgacctggtatgcgagcagttctttcggcctgccgagggttttgtggacatgggtttacagcatattccctcgcccgggagggtgctaagagagttttggaacgtattatactggcctctagacaccaattggaaccgtattgccaactggatccggttgacccttggtggccatgtacaaaatttggaaaaccatatcctgcgttttatgctttggaaatctgatgccctgttggcagatgcaaaccggtcctt

SEQ ID NO: 21803 - DNA, 663 bp, Emericella nidulans
acaagcttagaaagccacgaacgcaccaacgccgccggcaatttagggcccttctttcgcgctgacacccccttccgctcaaacggcgaaagcatcgtcaagacagcaccgaaagagaaagacggtaaaggcgagatagcctacatggctggccaagtgatggacttagtcaccaaaaagccgctggttggcgcggtggtggaggtgtggcaggcttctacgaatggactgtatgagcagcaggatcccgagcaggaggagtttaacctgcgcgggaaattcaggactgatgaaaatgggaggtactcgttctattgtctgcggccgacgccgtatcctgcgccggatgatgggcccgcagggatgctgttgaagttgatggataggcatgtgttccgaccggcgcatattcatatcattgtatgttctaccgtctcctcaggtttgtgcctaagggcgctcaggatatcgtggctttgcgtgttatgtatactaatgtttttgctgcaggcaacacacgacgggtacaggcctctcacgacgcagatattcgaccgacaggacccgtatctgacgagcgacgcggtatttgccgtgaaggaatcgttgattgtcgatttcattgagcgcaagggtgacccacaagctgggcttgagctgaac

SEQ ID NO: 21804 - DNA, 850 bp, Emericella nidulans
agcctcagctaggttcgagggtggatatttgattgaagggactccgtatttcggtccgacgctgaactggcccgcgactactgtattctggagacagttgcgcaacctcattctagacactacggacgtcgccgcggaaacgcagatcagtggtatccactagccgactgcgcaagcgactagcctacagaatcttgttttcgaactgaatgtcgaggaggggacggagcatcaggggatgttctgtgagagtggttagtccttgcctcccggcggcagctaagaaactagcaaagagatactgactgcaaacctcaaaggttctgctggattcgccggtaatatcgtcttcaatggaggcaaaattgcggcagccctgggaaaccagcagttcaccatgcgcaacctgaccttcaaccacgctaaaactgccatcaaccactcttggaactggggctggacataccaggacctcagcaccaacgactgcgaggttgggattgatatttcgactggcggcagcgacaacaagcgttggctccatcacggtttttgacagcttcttcggaacacacccgggcgcagtcgagtcgccatgccgacatttagcagcatatactgaaacggattgtgaaacgtgcattgcgaagggcccgtggctggtctagggtgttaggacttggttggggctgggccgggacatcctcctgtggccaccattgcgtgcaaagggttgggctgagatgtgacgggagtttaactcagccagacggtttttgttgtttcacgcggggggcccgtggaccgccactcgccaaagttttgttcccttcagcttaaatggtaaagg

SEQ ID NO: 21805 - DNA, 500 bp, Emericella nidulans
gtttcttgacattatcccaagctaacagccgcgagactcgacttcacaatgtgtaatccaccattctactcttcccaagacgaaatggtagcctcggcaaaggacaaggatagacctccattttcggtatgatcctggattcgttagaacgcatgctccactacaactaattccggaaaaggcatgcaccggcgcagagatagaaatggtcacacgcggcggcgaagtatccttcgtatcccgcatagtcacagagagtatcgctctccaagataaagtcctctggtacacatccatgctcgggaaactaagcagcgtctctacacttatcgaaaggcttatcgaactcggtaacacaaactacgccgtaacagagtttgtccaaggaaataagaccaggagatgggcaattgcttggtcatgggcggatcgtcgtccagctgtggtatgcaccccatatttcaataaagaaaggatttgaagcccaactcatactgctg

SEQ ID NO: 21806 - DNA, 592 bp, Emericella nidulans; identical to SEQ ID NO: 6181

SEQ ID NO: 21807 - DNA, 850 bp, Emericella nidulans
ctagaccatcatgagatcaacaaccagccgaaagggacaaacgtccattacccatttgatgaacttttctcttcccccacgaccagagtaccacccgccgccccggaatcctcgccggtataactcatggggtctcggctctggctaccatgcgatggacaaagctcgctatgtgcatgcaaactaccgttttatcgtcgccccaaaccgagcatatcatgcccaagcagcgaatgctgatgtccacctggactgggactcggttcttcaaattctcgtgtctgcccagacccagtcgtccagctgcccaatctgcttgtctacgcctgtagcaccgcgaatggctcgatgtgggcatatcttttgtctgccttgtctaattcgttttatgcactcgacagacgacgatcatccagtccctgagaaaaaggcgcgctggaaaaagtgccccatttgctgggacagcatttacatttcagaaacacggcctgtgagatggttcagcggccaggaaggcgttctgcctttcgagggcggtgatgtcgtgctaaggctcgttaagcgggatcccggtagcactcttgccttgcccagggatggcgctgaaagccttgcccctggggaagatatcccctggtatcatgccgcggaggttgcagactatgctcgtattatgaaaggcggagaagattacatgatctctcaatataacactgagattgaagacttgcgcagacaggagcaagaagatgaagttctgtttggagacgacacaacatggacaaaaaaggcagtggcggctataaacgatgcaaaacagaagttgcaaggaatagggaatcctcctgag

SEQ ID NO: 21808 - DNA, 539 bp, Emericella nidulans
tactactccaataccaaggccgccgagggagactatatgaagagaaaatggaggcggatgcaagatgtacgttgccgtgctatgttattgtgctagaaattgtattgaacaagtgcagtctaccgctcctgcaaagatgatgatgccatgttcaacacgaagaaacgtgaagctgaaggagtcatggaaatggccaaggcttatggtgcccttattgatgtcctcgggggccctgatgccttccttcagtggaagatgattgagactggcatgtacgagagactggctctggcaaacggtcaagccatccaaggccttcaaccaaagatcaccacatggaataccggaggcaagtggccaaggctcttcaccattggaccccactaacagtgtagacagatggtgcaagcggttctggtgatgcgatgggtccaatccgacatataatgcagggtctgcctccgctattaagcacgatccacgatcagactggcatcaaacctccacaatggtttgctcagctaccagataacgaaagt

SEQ ID NO: 21809 - DNA, 573 bp, Emericella nidulans
gttatacactgaagccacggagccagcttcgaaaccaaaactaacagagccaacagagccgattctcaaggtctcttcgttaccaataccaaagccaatttcagggtcaatattcacgcccatctcagtcatcgccgcatctatcaacgccattaccgactccctctcatcgtcactcaaagaggtcattccccgctccctcaccaaaccaagctcaatattttcgtcactgcgtacggagcctgtaatagagactatcccccggccagccacagaaacacctccaaagcccgctttatcgttcgtctctgtatccatatccgaatgcatcgactccgagcttgtatcagaagagacctcgacgtccgtgggggaaacgatcccagactcggcttctgagtctatctctgaaggatcagactcggtgtccgttaggacatccgagtacatctcatcgccggtttctgcgtcggttccaggaaacgtttctgaatcggtgattgaattcgaatccatagtccaatctgggtcatcgggcgaatcagtcggtatgtgtataatccatgggtcttc

SEQ ID NO: 21810 - DNA, 407 bp, Emericella nidulans
ggaacgccgaaccggttggagctgatgatccatgtattcactttatacattccgaccagtctacataaaacccagctggtagctggtggtcgtgatatcctagtgtggacaggatttcaaggcacaattggcatacttgtgccatttgttagccctgaagaagtcgacttttttccagagtttggaaatgcatctggcatcgcattgcccgccgcttgccgggcgcgatcacctcatctaccggagctactactcgccggtgaagggagttattgacggggacctgtgcgaacagcacttccttctgcctaacgatactaataagatgattgctgcgcaattggatcgctcagccagggagactgagtgaaagacctcggtctgtacaatcgtgtcgttatcccttt

SEQ ID NO: 21811 - DNA, 573 bp, Emericella nidulans
gaagaaggattctttcagcagccgaacggtggttcggtgctgttggatgaaataggggaaatgtcaccacggatgcaggcgaaattactgcgtttccttaatgatggcactttccgtcgggttggcgaagaccatgaggtgcatgtcgatgtgcgggtgatttgcgctacgcataagaatctggtcgaactggtgcaaaaaggcatgttccgtgaagatctctattatcgtctgaacgtgttgacgctcaatctgccgccgctacgtgactgtccgcaggacatcatgccgttaactgagctgttcgtcgcccgctttgccgacgagcagggcgtgccgcgtccgaaactggccgctgacctgaatactgtacttacgcgttatgcgtggccgggaaatgtgcggcagttaaagaacgctatctatcgcgcactgacacagctgtacggttatgagctgcgtccacaggatattttgttgccggattatgacgccgcaccggtagccgtggtcgaagatacaatggaaggttcgctgcaaaaaatccccaaccgttttgaacgctcggtatta

SEQ ID NO: 21812 - DNA, 850 bp, Emericella nidulans
tgtgcgttgtaacattccaatggtacttctggggttactcgcttgctttctctcccaccgctacaaatggatacattggaaacctgcgcaatttcggtctgatgaaggttctggcggaccccagcccagggtctcctctggttcctaacctcctctacgccttctaccaggtattcaccaccagaggccttgcactggttttccccttggctgacagtcctagatgcaattctgtgccgtaactgctgctatcattatgggagcggttgccgaacgtgggcgtcttcttcctgccatggtctttactttcgtctgggccacaatcgtgtactgccccatcgcttgctgggtatggaatgtcaacggctgggccttcaactatggcgtgctggattatgctggtggtggccccgtcgaaatctgctccggtctttcggcgctcgcatactctatggtcctcggtcgtcgccaggagcgcatgatgctcaacttccgcccccacaatgtttccctcattctgctcggtaccgtctttctctggttcggatggcttggattcaacggtggctcgtcattcggtgcaaacatgcgcgctacgatggcatgctggaacacaaacttgaccgctgctttggcgcgatcacttgggttattctcgattggcgcctggctcgcaagtggtcgatggtcggttggtgttccggtacaatctccggtcttgtcgctgctactcctgcttccggtttccttcctccctgggctagtgttgttctcggtattgtgaccggcattgtatgcaactactccacgaagggtatgctcgtcaattaatcctgcatgtcgtttgaac

SEQ ID NO: 21813 - DNA, 500 bp, Emericella nidulans
  unsure (1)..(500): unsure at all n locations
aaatatagatataaataaaaaaaagaaaaggaaagagacgaagtanacaagacagattaaagaaaaaaaagaaaacagaaagagtagaaaattagtaataaaaantaaaaaaaatataaaaaaataccggattcaagaaatagataacgggtcaagaatgtaatnggagagcaccatcccgtccgttaattgcaaaactggaannnacatgaccgccgccgatagcatgaagatcaccgttttcgnccnannggaccatggctccctcccgcacacaactgtcgacccggtgctccttgcagcgcatatcgtggtccgattgcaaggcgtcatctcgagagagcttgaccccgacgacgtgggcgtccttaccgtgggaagtctgcaggctgggcagacggagaacgtcatctctgataaagcagagatcgggatcgactttcgctccgtctcgctcgaaacgagagagaagatcctaagctgggtctccctatagtgag

SEQ ID NO: 21814 - DNA, 850 bp, Emericella nidulans
actcgggttctcatccatgatgtcgatccaatttgcactgagatttgcagtccaaattcgcaggcaccatgggactacgagaaagactccaagtaaaacaaggcgacgccagcctggccaccgaagccgttgcctccaacaaagacctcgacccgatcccgctcgactcgcccaaacgcacgtggagatggccgtcactactggggttctgggtcgccgaggcgtttagtattagcatgtatcaaggtactgtccgctcccggtggaggactgttttagggctcgattaggctgactcgcgatgctagtgacctcgacttcggtcagtaagggcctaagtgctccaatggccattgcggctgtggtggtcggacatattctcgtttgtattccggctatgcttgatgggtatgtattgcccgttccccttctttgcattaaatgatgcgtggagaatgggtacaggttggatagcggttaacgttggataatagctacgtgggtgccatctttggcatcaacttccccgtctacactcgagccagcttcggtatgaaggggagctacttcgccgtcttcggtatgcttcctccagactctcctcttacacccacacagccaccgcctctaacaaagggcatgcagttagagggattgtcgctattatctggtttggcacgcagacgtaccaggccggccaatgcgtgtctaccatgctaagcgccatctggccgtccttcaaccacttccctaaccacctcccatcctccggcccaatcacctccgccgaactcctctgcttcttcctcgccatcatcctgcaagcgccactgctatggctcaaagtgtc

SEQ ID NO: 21815 - DNA, 675 bp, Emericella nidulans
agctattagacatggtgaaagttgtcagctaatctctggagaagccgggatatggaagaatttaaaaaattttgcacaatccaaacaccaccccctactgccttgttcaggttattagatttggcagggctcataacgtcgtctgtaagtttgcatctttctacgatgttgtgctattccgagtaaaagtctaaccttcccgaaggcatgcgccaggataaagtgctttcaagattgccaagcaagtaaagagtgagtccaccctcgagctaagcagttcttgaagctgctgctcaaaagccccgacgcctcgcaaaacttcaaatttgccttccctgagaaaaaactgacaaccacagactttgccgtcatctacctctgtgatattgacgaggtgcccgagttcaatacaatgtatgaactttttgatccaatgacgatcatgttcttcttccggaacaagcacatcatgtgcgatttcggaaccggtaacaacaataagttgaactgggtccttgaagataagcaagagttgattgatatcattgagacgatctacaagggcgccaggaaaggaaggggtcttgttgttagcccgaaaggtgagtaacgtctcttgtaatgaatgatgaatctggctaatgattgatagattactctacaagataccggtat

SEQ ID NO: 21816 - DNA, 850 bp, Emericella nidulans
tctgcagtgaagtgagcatgatgctaatggattgttcattgatagcttagtgagaactcagagttcgcacgaaaatgtacagaagcagggctggtctttattggaccgccgtggaaagctatcgaggatatgggagataagaggtgcgtctacttccttgaggcttctctacgatatactaacattgtacttctgcagtcagtctaagcatatcatgactgccgctggagtgccctgtgtccccggctaccacggtgaaaaccaagaccctaatttcctcgaagcggaggccgataaaatcaaatacccagtgctcatcaaagcaatcaagggcggtgggggcaaaggaatgagaatcgctcgttcaaaggaagagtttcaagcgcagcttcagtcggcgaagtcggaggctatgaactcttttggggatgaccatgtcctagtcgagaaatatatcacaacaccgcgacacattgaggtccaagtctttgctgacaaacacggaaattgtgtagcgctgggagagcgagattgcagcatccaacggcgacaccaaaaaatcctggaagagtcaccggctcctcacctgcctgatgccacaagaaaagacatatgggcaaaggctcggtcggccgcgttagccggttcgctacgaaggcgccggtacagttgagtttatcttcgacaacgatacgggagagttcttcttcatggaaatgaatactagacttcaggtggagcatcccgtaaccgagatggtcactgggcaagatttggtgcaatgacagctgaaggtcgcggagggcgccgagcttccattaacgcaggaagaagtggaaaacaatatagc

SEQ ID NO: 21817 - DNA, 407 bp, Emericella nidulans
gctctcctttaagctgggcttcagtcgtgaggacggccacaccaaggtccagcgcatcgctttggtcgcgggtgaactcacccgcgccggtgccgcttgttatcgctgcccccattgctccctacgagcactcctgcaaggcggcccgtgaggctgtccagagcaccggtggctctttcttcttggttcacgtcaacactcccctcgaatactgtgaggccactgacaagcgcggtatctacgccaaggcccgccgcggtgaaatcaagggcttcaccggtgtcgatgacccctacgaggcccccaccaacgccaaccttgtggtcgacgtttccaagcagagcgttcgttccattgtccatgagatcatcctcatgctcgagagcgagggctactttgagcgtctg

SEQ ID NO: 21818 - DNA, 850 bp, Emericella nidulans
gtatacattatggtatgtcgtctccatgaatgcgctttgatgggctgctgactgacaacccagtgcttggccatgaatcggtctttgactaacgtcctgtttggtggaattgctgcccctcaacaagcccagaagaagattgagggcaaggtcacccagaccagcgtggaagagacagtggactctctagcaaacgcagaaagcgtcattattgtaagtatcaatccttggcacaaggcctctgctcataccggtaggttgtcggatatggcatggctgtcgcgaaggcccagtatgcgctcgccgaaatcacccacatgctgcgcgccaaaggcattaacgtccggtttgctatccatcctgtcgctggccgtatgcctggccaatgcaatgttctactcgcggaagcttccgtgccttatgacagttagttacctggccacccaaccctttcttcgtgctgactagtacagttgtcttggaatggacgagattaacgatgactttgcggacaccgacgtgactcttgtcattggagccaatgataccgtcaaccccatcgcactggaaccagactccccaatttctggtatgcccgtgttgcaggcgtggaagagcaaggaggttattgtgatgaagcgtggcatgtctagtggatacggtaggccttcgccttcccttcttggtttcaccatactgacttaagatagccgatgttcccaacccgatgttctacatgcccggcaccaggatgcttttcggagatgcaaaggccacgtgcgacggtaagtgtatttcttgttcggtattgagtcctattctaacttctgcagccatcaaagcaaacctc

SEQ ID NO: 21819 - DNA, 506 bp, Emericella nidulans
ttcaacgaaaaggaatttgctttctcatttggcataatgtctggagaaatggaaatcgaccctccggtctcgcaagagcaagccgagccgcagacaagcaacagtggcaccgatgctcgaacacacgacggcgctgttgccgtgcgcagtatcgaaggatggattataatagcgacgaacattcacgaagaagcttccgaagaagacgtgacggatctctttgcggagtatggcgagatcaagaacttcagcctaaaccttgaccgccgaacgggttacgtgaaggtagacttatgcaaccctctgtttctgaagcttttagcattttggtttggttctgcccgggtattaatatttctcttgtatagggatatgcattgattgaatattcgacgctaccagaagcagctgaagctatcaaggaattgaacggcaccaagttgctcgatcagacaattgaagtcgactacgcatttgtccggccaccgccatccaacaaagggaag

SEQ ID NO: 21820 - DNA, 850 bp, Emericella nidulans
gcaacgactccacccggcgagcaccgcagaagctctctggaaatcgagaagtgggcttctttgccgcaggacacatgaaggaccgtacgcttgttatgtacaagaagcgtgatggcctgtcgtcgacgttcaaggtttgtttgagtagaatcattgatgaacctgactaaagtgaaatagattctggaacctgttctgcagaaatctgcctcaagtcgaagtcgatttttcagttctcgccgatcgaacactgagtttttccgtgaatatgacgagttctacatccccgccgagagttacggcattaacctgttccattcgtcccttgctatatcgacccagaaaggcatcgagattctaacgctcgataaaaaacagacttggtctgtccctgagttccgcaccgacgcccaggaagcccaggctcacctcagtgagattggccgccggattagtggtcttcgaccgctgggtatgttccgtctcagcgacacggagtttctggttacctacaccgagtgtgcggtttacgtcaatcagcacggcgacgtctctcgcagtgtggtcctagaatttgtcggtcgcgctcactcggcttgtctttacggcaagttcctgattctcttcaacgacgactttgtcgaggtccgcaacgccatgaatggtcggttacgccaggtcattcccggccacaatgttgtctgccttgatgatggtagccgcctccctggctcgggagtgaacagtataccaaccagctctggcgacaccgtcaatctctccagtggcatctcgaatggagctccgttggctaaccaaggccgcacggtcaagatttgcatgcagcatc

SEQ ID NO: 21821 - DNA, 462 bp, Emericella nidulans
agcggtcaaacttgcaagcccaaccgactccggtctcagactagttgcgtctacactggccgtaacttgttctagcgtcgctacaggcttcttgattacatggtccaaacgcctgaaaccaactattatgattggtgacatatttctgctcctaggaggcttggccgcagcgatgatgggcgccaacacccctgacatcgtggccatgacctgtgtttctctcgcaagtctcggtcaaggatttgctttccctacgctgatggtatctgtcctcgccactagtgaaacggatgagcaggccgtggctaccacaacattagggctcttccggaatctaggatctgttatgggagtcgcgacgagcagctgggtttttcagaatgcactgaatttaacagctagaagagaaggtcacgcaaccggacaaggacgcggtcattcagcttgttcgaaaatccgtcg

SEQ ID NO: 21822 - DNA, 500 bp, Emericella nidulans
cgtttaaaggattaatcatgaagttgaattttaagggattttttaaggctgccggtttattcccactggcgctgatgctttcaggctgtatctcgtatgctctggtttcccataccgcaaagggtagttcaggaaagtatcaatcgcagtcagacaccatcactggctatcgcaggcaaaagatagtaatggaacaaaaggctatgtttttgtaggggaatcgctggattaccttatcactgatggtgccgatgacatcgttaagatgctcaatgatccagcacttaaccggcacaatattcaggttgccgatgacgcaagatttgttttaaatgcggggaaaaagaaatttaccggcacaatatcgctttactactactggaataacgaagaagaaaaggcactggcaacgcattatggttttgcctgtggtgttcaacactgtaccaggtcactggaaaacctaaaaggcacaatccatgagaaaaataaaaacatgg

SEQ ID NO: 21823 - DNA, 850 bp, Emericella nidulans
ctttggacaaaaacgaccaccgaggaaacatgaagctagcctttgatatcgccgcgaacgaagtcggtatccctgatctactcgatgtcgacgacgtgtgcgatgtcgccaaacccgacgaacgatccttgatgacatatattgcgtactggttccacgccttttcccagctggagagggtagaaaatgcgggacggcgtgtggagaagtttgtgaacaacatgcacggcgcatgggagatgcagaactcttacgagaaaagaatgagggaactcttacgattgattcgcgcccagcgtgaagagtggaaaaacgcctcattcgaagggacatacaaggacgcaaaggagcaggcctcccagtttgccatgtataagcggaaccagaaacgtcagtgggtagcggagaaatcagacctcgcagctctcttgggaaatatcaaaacgaagcttagcacgtatcgccttcgtgcttatgatcctccgccagagttgtctcccgaagcctgtgatcaagagtgggaatgtttgacccgtgacgagcatgagcgcagtcagctcattaacgaaaccattcgagatattaagaacgctctgcgccgctcattcgcagataaagcgaacgacttcgcgcttaccttgaagacgctgtctcttgcaatctcaggccttgacggagacgttgaagatcaacttgcccacgtcaagcgactgaacgacaacttaccgccgctcgatgccttcttggaaactattgcggagcttgatgagcaatgccaggaagcaaatgttgaagagaatgactacacaacatatacattggacgaactggcttatgagttgagcctggt

SEQ ID NO: 21824 - DNA, 547 bp, Emericella nidulans; identical to SEQ ID NO: 7141

SEQ ID NO: 21825 - DNA, 850 bp, Emericella nidulans
ttgaccagaatatgctgaacactgtcgtatcgaacaacgctcgttatggagtgatgggagctttgggagcaaaagatgcgatcatatctgatggcgccgcgacccagtatgacaccggatctcctatgcaagaaagtgcctacattggaactcctgatcccgactcgaacttttctccaattcgccaggcgggcgccgaaacccccggtgggttcaccgaataccagccttctggtggctttggtggattcagccctgcagccaccagcccagcaggttactcgcccagcagccccttcagtgccaaccctacatcgcctggctattccccaacctccagctactcccccacctctcctggcatgggtatcacaagcccgcgcttcatgacatccccgggtttctcccccgccagtccgtcatttgcgccgacatccccggcctactcgcctacatcgccagcttatgggcaggttcgccgacgtcgccatcatactctccaacctcgcctgggttctcaccaacgtcgccgaactacagccctacatcgccaagcttcagtccaacttcacctgcatttagcccaacgtcgccaagctatagtccgactagcccggctatcggtggtgctcggcatttatctccaacttcgcctacttctccgaagtacacacctacgtctcccgggtggtcacccacgagcccccagacgtactctcccacgtcacccaactttgccggctcgccgacttcgcccggtggaccaacatcccctggttacagccctacgtcgccggcattcagccccacgtaagtcaataccttcaatacctcttgagattgttccgct

SEQ ID NO: 21826 - DNA, 850 bp, Emericella nidulans
aacacgctggatttcatgaaagacaccctaatttacctgagtaacgttggcggtgccatcaatctaccaagtaaagaggaagcgctctgtcttctacactttcttctgtcctttgctccattcccggccccaactatgtcatcggatggtgttatgttcacggcttacaatccgtcggtacacaaatatacaccagccgctgttgatagtctggctaaacttctggcacgagatgaaccaaatcggactttcttccggactatattttctagcgacggggcttccaccgctcaacaagagcttctgacccgcgcatttggtcttgcgatttgccctgttcccaaccagcctaggaaaccttttgcaatcgcggatattcgcaaagtggttctaatgcaggggcttttagctgcagatattctggcaggatttgctgaagggtcgaccgccaaatcttggctagagtctgtggatggttttgccattcatctgcttcgcctctcatgtcttttgagcacagaacgtgtccctccaccgctccacaacgtccgtcaaacgcacgctgtgagggcgcaggctgaagaggctgaagtctacggttcaatcatcaatcggggactagcaattcttcggcgtctagctgagaaatcgaaatatgccgatacagactcagctctgcggtttccgtccggaattcttcccaagaaggaaagcttacttggcgcattgctgatgccaaacgtcgatcctggtgtcgtccggcaattgataacgtatgcacggctcgccgaatgatgaaccagatgaaccgcgtccttccttttttggtctactttctagcgatggcatt

SEQ ID NO: 21827 - DNA, 850 bp, Emericella nidulans
agcttttatactaaggattctggccaaggctcccctggtgcaccttcttctaagcgctcgttcctgggaaaactccgccgacccaaccttaagcattttccagggtcaaaaggaccgacagatgctattaggggcacatcaaagcttgcacggcgtgatgcttcccctggacgacgaggacggcaaggcagtctggagggagcaccttctaagggcgctgaaaatggggaacatgaacgaaagaaagatggcaaaggcctaggaattgcgactggtaagctgcgaggccgccgcggtgctggtcacgaaacccccatcggaaaggagacgaacccctcagaagcacccggtgtctgggctttggacacggatctatcgcacatggaaggcatcgttcagccagctgcagatgatggggataagacgaatgaaggaaagacggtacgccatgatgagaagaggctgggggaccagctaggtgccggaaattgggacgctcctgagagctggcatgtcaaacgccaaagaaatgaggttttggccaaagttcccaagatgaccaacgatgctgctcgaacaatagctgaacctgatggtgttccgtattttatccgtgtgttccgcattgatggaacatttgccacactctcgaatgggttacatgctacggttgccgatgtacttctgtcactgggaaagaagtcttttctaactgaccacctcaataactacgaaatagtcatgcgcaaaaatgatatctctcgacagctggatcccaatgaacagcccattctcatgcagaagaaattactcgaacagatcggctatactgagaaggacaggattgaag

SEQ ID NO: 21828 - DNA, 416 bp, Emericella nidulans
ctctcctcagcgtgggctctgaaatggcttataccatggcagcgcgcgagatccttgcggccgagcacggtatcaaagcgcgtgtcgtttcattcccttgcgcacagctcttcgagcttcagtcccgcgagtacaagcactccgtcttgaaaccacgcgcgggcaaacccgctgtcgcgatcgaggcgtacccttctgttggctgggagcggtatgctgatgcggcaattgcgcagaaccagtttgggaagagtctgccgtgtaaggaggtgtatgagcactttggatttagtggaaaaatcattgcagataaggtgaaaggattagtggatgaggtgagacgcgatggtgttgaggtgttaagaggtgactttcgggatctgaatgggggtcctagtgtcggtgtggagcatcca

SEQ ID NO: 21829 - DNA, 537 bp, Emericella nidulans
ttcttagcgacgatgacaagcgacatctctatgatacacatggcatgggcccttcaacggctccggtgagccggggatgaacgacgggccccgacctcgatgatatcctcgcgcagatgtttggaatgggaggcatgggcggtatgcccgggatgggcggcatgccgaggccacgacagagcccggacgaagagcagaaatacgaagtcagcttggaagagctctacaggggcaagacagtcaaattcgcgagcacgaagaacgtgatttgcagtttgtgtaagggcaagggtggcaaagagaaggcgacggcgaaaaagtgttctacttgtgatggccacggcttcaaagaagtcctcacgcgcatgggtcaattcttgaccaagtctacccagacctgcacaacctgcaatggcgatggccagttcttcgcaactaaggacaagtgcaagaagtgcaagggcaagaagacgaccgaggagagaaagatcctggaaatctacattccccggggagcaaagtacgtccttcggttgc

SEQ ID NO: 21830 - DNA, 674 bp, Emericella nidulans
gctcttggacctcttgccctcttcgctttcgcgactgaggtgatggccacccctgtggcctatccaatgaccaccgcgtctccaactctggccaagcgggactcttgcaccttctcaggctcggacggtgctgcttctgctagcaggtcgcagaccgactgcgcgactatcactctgtccgacatcaccgttccatcgggcactaccctcgacctgagcgacctcgaggacgataccactgtaggttgatgttcctccagtcagctgtttggatagggctaactccagtccaggtcatcttcgagggcaccacctcctgggagtacgaggagtgggatggaccgctgctccagatcaagggcaacggcatcactatcaagggcgccgatggagccaagctgaaccccgacggatcccgctggtgggatggtgagggctccaacggcggcgttaccaagcccaagtttttctacgcccacgatctgaccgactcgaccatccagaacctctacattgagaacacccccgtccaggccgtcagcatcaacggttgcgatgggctgaccatcaccgacatgacaattgacaactccgccggtgacgatgcgggtggtcacaacacagacggcttcgatatcggcgagagctccaacgtggtcattaccggcgccaag

SEQ ID NO: 21831 - DNA, 850 bp, Emericella nidulans
gtcgacaaatgctcgaacagaattaattacgactcggacaagctgtgcattgaacccgcagctgcaaaggacaagcaagaaatccttgagatcatagagtcatatgcaaagaaatccttgcgtacgattggattggtctacaaagacttttctgcacctacctggcctccacccgaagctgtccgcgttcaggatgacccagactctgccgaattcgacaccatttttcatgacatgacgtggcttggagtgatgggcatccaggacccccttcgcctgaggtccctgctgctatcgagcgctgccatgttgccggtgtccaggtgaaaatggttacgggtgacaatatcaacaccgcgactgccattgctgagtcgtgtggcatcaagaccgaggatggcatagccatggagggtcccacattccgccggctttccgaagaagaaatggataaggttatccctcgacttcaggttctggcacgctcttctcctgaagacaagcgtatcctggtagctcgcctgaagaagctgggtgaaaccgtggcagtgacaggtgatggcactaatgacggaccagccctgaaaaccgcagacgtaggattctccatgggtattgcaggcactgaagtcgccaaagaggccagctccattattctccttgacgacaactttaagtcaatcgtgactgcaatcgcttggggccgtgcagtcaacgacgctgtcgcaaaattcctccagtttcaaattacagtcaatattaccgccgtcgttctcactttcgtctcctctctttacaactccgacaacgagagtgtgctcagcgccgttcagctccaatgggtgactct

SEQ ID NO: 21832 - DNA, 850 bp, Emericella nidulans
ttgcgcacgcgccaaaacgccctcggccgccgtgctgaatggtgccctgtatcacagccaggttcaagtgaaagagctcggctgttgggcagccgacctgagctgtatcttcttcgtaacgcctatgcttattattgcctggtatatcacacaagcagtcatcgatgaagcatacgctgttgagctcgtgaactttatattgggagttcagaatgcggacggtggctggcccacatatagcggcgaaagcactacgcttatggggacgattcttacctatgtcgcattaagattgatgggactgccggcggatgaagatcacttggtcaaggcgcgcctctatcttctcaagatgggtggcgccgtttatctctctggctgggccaagttctggctggctatgttgggcttgtataaatgggaaggcactgacccctatcctgttgagatgtggctacttcctgaatggtttccaatcagtccctggaaatggtacatcattccgcgacaggtttatctggcgatgagctacttgtccgcgaaacgattcactatgcccaccaacccactacttgacgagatccggaaggagatctttgtgcagccatatgagaggatagacttcctcgcctatcgcggtgtcagcctgcagtgctctcgggagctacgcaagccctggccgctaatattgctgaattggatcctacagaatatctggatcccctggctaccggccatattgctcgcggaggaaaggcacagcacaaagtgggacattatctaagactctcatgaattggcctaacttcccgggacaagtaaaagtttacacctttcttaaaattaaccc

SEQ ID NO: 21833 - DNA, 422 bp, Emericella nidulans
acaacgttaaagtcggacaagacgtcttcataaattttaattgcgtgatcctggacacttgcaagatcaccattggttctcggaccctgataggtcccaatgtctctctgtttagcggaacgcaccccgttgacccgaatctgcgcaacgggacgcaggggccagagtatggcggacctatcaatattggatctgattgttggattgcgggcaatgtggttatcctgcccggtgttagtattggcgatgggtgtacggttggcgcggggagtgtggttacaaaggtatgtatcgatttacctaagaaatgtctcaacagtttctgggcaatatgggctgatgaagtgtcaatgtaggatataccggcttatcatgttgccgctggcaatccggcgaggattctgaggaaaattgagcgagga

SEQ ID NO: 21834 - DNA, 850 bp, Emericella nidulans
ttctatcgctctagccatctcgcactaatgatcatcccctttcccttgaaaaagcgatctacttgtacgacatgagcgcctagtccatccagccgaggcggcagccaatcgagagaatcgcaaccatagccataccaatcatgaggtctctcaaacccaagcatcaatagttcaaccatcccaccatgaattttgaatgctcgagttagtcgatgctattccgcttcagacccagccagttcctcctgctcctgaagttcaggttcagccccctccaatcgtggagacggcccatttcaacccttcatggggatatgatttgaaccttctttctcatgccgcgagtcatgtcgctcttgagggacaacaagaaagtctagagactcttcggaagccttggcaaaacattcaagcgcctccgacgacgccgacgctttgtgatataccagaaagagggatcactgataactatggtgttgagccttcgattctagaccttacagatttaggtgatccggttcaggactttaccgtcttcctagaaagcgtcggtctctcttcggactgggactccggcatcttctctagtgtagaagagcccttattgccaactagcctacccatggactcgaaacccccagcccgtgagagttccaggctgggccctgacttaatgggtgaccccagacctgctgccgatgagcctccatcattctctaactttgggtctcgactgccatcgctccagccggaagcccacgatgtggatgatcggctgggttttggcgacgaaggtccacgaccggcctgggatatatctaatgcggaccggcaggtttttatttctaaa

SEQ ID NO: 21835 - DNA, 850 bp, Emericella nidulans
agacgccgctgtttatgacggatatcagcaaagcgggagatgagagtgagtttacgtctttcgctcatctcgaaatatgggagggaccgtgggatgtgagtagattgctgacgggtgtaatatagacggcgaaaatatcatgttaggacttgcgcgcactacagaacgaaggaacgcgcggcgacgttgcgcagaatttccgcgagcaaggcaatgaagctgcgagggagaagaggtggattgacgcaaaggagtactatacaaaggggatcgcggtattgcgctcaaaggagcagaagtgggataagccggaggatgagaaggaggaggagaggcttctgcgggaggtcgaggaggcgtcgtatataaatcgggcgctgtgtaatctggagctgagtacgtttacttttttttttttaaacatgttggcgtcatgtgggagctggatggctaacgataaacacagagaactaccgttcaacgaccctcgactgtgccgcggttctgaagctgaaccccaaaagcatcaaagcctactatcgttctgctatggcgctatacgcgctcgacaagatcccggaggctgaggatgtcgctactcgtggcctatccctggatccaaacaacaaatccctccaaaccatctcgtccaagattgcagaccgaaaagcctctctcgaacggatagctgcgaagcgtagagccgaggacgagcgagcacgcaaagaaaaggcccttttgagcacagcccttcgtgcgcgccaaatccgcacccacaagaccggccagccgcccgagatggaagacgccaatatcagactcacgcctgacccgctttaaccggagagca

SEQ ID NO: 21836 - DNA, 469 bp, Emericella nidulans
tgaatgatatgacgctggccaagcacatggacgtggaggtcttgtcccgtcacgaatcgcgatcgaaggtggtcgtggatctactgggaggagaaggtgttatccaagatactttcaaatctccgcgtccgatctcgccttctaagcgagcacaggaaaatgcgagtgctgggtctccccgcaaactgttccggctgagtgatgcctcgggcgagctctcgttcagtctcgttaaggccggagagccggttcgacgacaggacttcgacggcaacgatgtcttcttgtatgatgtcggcactcagctctgggtgtggcaggggctccgagcaagtcaggcagagaaggctctgtggctcaaggttgcccaagcttacattcggcacctccagagccgggaatccaatcccgttgtttccacaattcccatttcgaaagttgtacaagattacgaaagtccttcttttct

SEQ ID NO: 21837 - DNA, 850 bp, Emericella nidulans
ctgtctgggttatgaagggggtgttccgacacctaccgcctcatactccaacagtgccccgatcgagatcgctgcaggccagacctttgatgccggctgggcccggtacgaccgcggatctggcgcttgcaccgatggcgagggcggtaacgacgatgccgtcttcatcctccggtctggcgctaccctgaagaacgtcatcatcggaaagaatcagaaggagggtgtccactgtgagggtccctgcaccctggagttcgtctggttcgaggacgtctgtgaggacgctatcactgtcgtacgtctctgactctgtcccaaacactggttttcgtgtactgaccgttggcaagcgaggtgactcggcgggagaccatacatggatcatcggtggtggtacgttcctattcgcgaaagtgactactcgtttttctctgaccatggcaatgaaaaggcgcatatcacgcgtccgataagatagtgcagcacaacgggtgcggaacagtcaacgtgagtctttctattcttatatctttattctttatcttctctctcttcttcatagagggatgccgcacttactgaccattatcttaagatcatcaacttctacgccgaggactacggcaaggtctaccgctcctgcggtaactgcagctcccagtgcaagcgcaacgtctacattgagggcgtgaccgcgtacgacggcggcgatatctgcggcatcaactcgaactatggcgatacctgtactctgaacaacgtctgcactgacgccgaccacccctgtgtgctctacgagggatgcgccggcggttgcgagcccgagaaggtcggctactgctccggt

SEQ ID NO: 21838 - DNA, 850 bp, Emericella nidulans
caaacgatgaaagtgaagatgacgcttacgaagacgatctatactcttctgcgcctgctgccatgacagacaatcctcaaaatcaaccgagcaattcgtctgtcgctgcgtttggtgatttgcgaattcacgacaggctttccagccctggtcctatcagagacattgtgctcgggaggagctctgaagcgtcttcgcgtgacacaaaagacggcgtgctagagctagtggcagctcaaggctcggatgaaggtggtacaatggtgattatgaagcgggaggttgatccgtatcttgtagcatcaatggctgcagacacagcaaactccctctggacagtctctttgctaccggataacaatgatcaaaaacgtgactatgtcatactgtcaaagcaggagaaacctgacaaagaggagtccgaggtgtttgtgctagaggataaactcaggccaattacggcgcctgaatttaatccgaaccatgaattgaccgtagaaatcggtaccttggccagcaagagtagggtaatccaggtattgaggaacgaggtgcgaagttatgatgctggtgagtgcctgtcagtccgaagaagagacatactaattgagtagatcttgggctggctcaaatctatccagtatgggacgaggacgatagtgatgagagagtagctgtcaatgctactctcgtggacccttacttggcgatcatacgagacgattcaaccttactactactacaggccgatgacagcggagaccttgatgaagtgaaaatgaacgaggatgtcgtaagtcaaaagtggctgtctgcctgcttctacagcgataatgctagtttcttcacc

SEQ ID NO: 21839 - DNA, 793 bp, Emericella nidulans
tgtccaaagccgttgttaagacgacccttcgaggcgtctcgaacgcttcgtcctatctataccgggggaagcaccgcgctcgatgccagcggccgcctactggttgcttgtgtcaacgaagatgcgctcgtcgtcgaccttgagactggcaaccagctcgctacgcttgacggagtatggcttggtctcattttgagtgtctattcatgtgctaattcaagttgtaggatggagaagttatcactagcttggccagtacgttcctccattctgagacctgtccaagaatagtgcactaacgaggatatcagttactccctcggcttcgcacgttatcctttgttcccgatccatgtcaatgcgcatatactccctctcccaatacgaagatacaactcctacccttgaaacgaagctcgttcggagtctaaagcctcacacagcgccagttgtgacaaccgccaccgactccaccggtacgttactagcgactggagctgcagatggctcaatcaaagtctgggatatccgaggtggctacatcacgcatagctttcacggccatggtggtgtgatctcagccttatgcttcttccaaccacccacggcggagcacgacggaaaactgtcctcgaaaaaaaaaccgaaacggaagactgggatggcaggcgatgatgatgacaacgagatgatggacctagattctgcctccaactccaacggtgcattccggcttgcctccggtagtgaggagggtaaagtgcgcgtctgggatttgaataaaaagaagtcc

SEQ ID NO: 21840 - DNA, 584 bp, Emericella nidulans
atccggccagttcaacgaatcgagcatgtggagaggactcggactgcatcaaccgcgcgaccaagattgagtgtatgggcgactgcggctgtgggccagattgccagaaccaacggtttcagcgcagggagtacgcgaatgtggctgtcattaaaactgagaagaagggttatggtctccgcgcggaagaggacttgcgaccgcatcaattcattttcgagtacgtcggggaggtcatcaacgaaggcccgttccaccgccgcatgaggcagtatgatgcagaagggatcaagcatttctatttcatgtccctcagcaagggtgaattcgtcgacgcaaccaagaagggcaatctcgggcgtttctgcaatcactcgtgcaaccccaattgttatgtcgataaatgggtggtcggagagaagctccgcatgggtatctttgctgaacgacacattcaagcgggtgaggaactcgtctttaactataatgtggatcggtacggtgcagacccccagccgtgttactgcggcgaacccaactgcacaggctttataggcggcaagactcagactgagcgggcgact

SEQ ID NO: 21841 - DNA, 500 bp, Emericella nidulans
accaagcacaaacacggaatcgtggcaacccacaaaatagaccagggcagacacacgaattaggccaatccgattgcaaagacctctggcccataagggagaatgctgctaaggaaccaagagacgctacggcaaacggatttatgccttcaacaaccgccaccccgacgacagccgctgcgcagacagctaagtccgcctctgcgccttcgtctgcggccactggttctgtccctgctgcccctacaactgcaactgtcagcacaacgacatccattgccaccagcgtcggtaccaccctcacccgcacgaccctggccaccacgactacggccgcagccgctgagccttctgcgtcggctcctgcgcccagcggcaacagtgctagtggttctaaccccttgtacgctcagtgcggcggcctcaacttcaagggagcgtctggatgcgtcgccggtgctacctgcaagaagatgaacccctactactcgcagtgtgtc

SEQ ID NO: 21842 - DNA, 500 bp, Emericella nidulans
tgaaccacttctgtcgccattgtgaaagttaacaaagtgttatagcattcgtccgccccatctatgcgggcaacgcaattctaaccgtgcagtcgaccgaccccatcaaagtcatcacagtgcgcggcaccgccttccaagatgccgaagccactggcggcaacgcctccataacagacggaacggaccccaacgcccccgcccaaaccgaatgggtctccgaagagctctcgaagtccgaacgccccgacctagcaacagccccccgcgtcgtctctggcggccgtggcctcaaatcaaaggaggaattcgaccgcatcatgatccctcttgctgattccctcggtgctgcaattggtgcttcccgtgcggccgtggactctgggttcgcggataatagtctgcaggttggacagacgggaaagaatgttgcgccgcagctgtacctgagcgtgggaatcagtggggcgattcagcacttggccggtatgaaggatagt

SEQ ID NO: 21843 - DNA, 850 bp, Emericella nidulans
tggtgcaagcctgtttggtagctcaactctcaccaagagcgtctctgcgaacgcaaaccctttctcgtcaaagccggcttcaggttctacacaatcaagcaatccgttcgctgcccctgttgctagccattcacctgctcctctcgcgtcagccacagaattcaaatcaacccccaacaccctctccgaatcatttgcagacaaagtccgcgtctcctcgccgcctccgtccactcaagccgccgagccagctggcccaccaactccctggccggcacgctctgagttcccagagccttacacaaacttctacatcgatgcagaaggcgaaactctctcgcgcccgccgacccccaaaatccctgacaacgtcacaattgatacgagcgaagacgccgaggggggtagcggcggcgcagatgcaaaagacgcgttcgagtcggatctcgacaaggccttcctcaagttctctacccgcctcggtcataatccagagcaagttctgcgttatgaattccgcggtacccctttgctatactcgcataccgatgccgtgggaaagttgttgcatgactctaccccttctgctgccaaagtcagtacgaagtcgagcggtgcgagtcgtatgccacggtgtcagtattgcagcagtgaaagagtgttcgaactgcagcttgtcccgcatgcgattagtgttcttgaggaggggagggagggggttggacttgggaaggatgatggcggaatggagtgggggactatcattctgggtgtttgtaataggaattgtgggccggaggaaattggagcggttgggtacagggaggaatgggctggcgtgcagtgggaa

SEQ ID NO: 21844 - DNA, 850 bp, Emericella nidulans
gccgactactttgagcgcaaccagattgaattccgtttcttttccgcacagatggctaaagaggctaatgaagcccgcgagaatgaaggcgaggatgaagataccaagtcgctgacagaaggtacggagaatttgaatctacaggagtccaaggagaaggaagccgacggaggcgtcgatcttcccagcggcacaaaagccccttctcccaagcgaaccaacatactagatgtggatgagcttgaggaacttttcctttcaaacgcgccagatgcaacaaaagacgatgaagatgaacaagatggtgattccaaacctagaaagacagtcattggtctagtcggatatcccaacgtcggaaaatctagcacaatcaacgccctgcttggtgcaaaaaaggtctccgtttcgtccactccgggtaaaacgaagcactttcaaaccctctacctctcacccgaaatcatgctctgcgattgtcccggtttagtcttccccaatttcgcctccaccaaagccgagctcgtcgtcaacggcgtcctccccatcgaccagcaacgcgagttcaccggcccagccgcactcgtcgccaagcgcattcccaaacacttcctcgaggacgtgtacggcgttaccatccatactcgcccgatcgaggaaggtggcacgggtgagccaaccgcccacgaccttctccgcgcctacgcccgcgcccgcggcttcgctacaacaggacaaggtcaacccgatgaatcccgcgcagccgttacatattaaaggattatgtcaatggcaaacttcttttctgccacccgcctcctgccaatgaagcagagggcgaagaacaaat

SEQ ID NO: 21845 - DNA, 713 bp, Emericella nidulans
gcatccgactggagtgccagacaataccttaagtttgaggctgaacgcacacgacctgctcgtgatctgctcgcccaggttccactcgattcaccacatcgcgtcgtggatctaggctgcggacctggcaactcaacagccgtccttgtatcccggtatccagatgcccgagtgacaggaatggactcgtctccagatatgattggaaaggctcgcgaaaccctcccgggaatcgagtttacagtcgatggcctcagtacgtatacacctagagaaccggtagacctattcttctccaacgccgtcttccagtggctaccgcgggaccaacgtctggaaatcatcaaacgccttattcagtcgcagccttcaggcggcgtctttgccttccaggtgccggataatttggctgagccatcgcacgtcacaatgcgtgaaattgccgccaatggtccgtggtcgagcacgctacaatccgttgctcgcgaaagctttcaatcgccacatgaactgtacgatgaactgaagccgctctgtgctgaggtgaatatctggcatacctactataaccattcgctggagaaccataaggctgtcgtagaatgggtcaaggggacgggcctgcggccgttcattgaccctttgtcgcagccggatcgggagtctttcttaaggcttactgggtcgtcggagcaattatatctgagagcaca

SEQ ID NO: 21846 - DNA, 528 bp, Emericella nidulans
gtgaaacgattgaagcaggtttgcgacgcagaacaggtcaaatacacggaggatggactcgcagcgctggttttcagcgctgagggagatatgcgccaggctctcaacaatttacaaagtacctggtctggattcggtttggtcagcggggataacgtcttccgtgtggttgatagccctcatccaatcaaagttcaggcgatgatcaaagcgtgctgggagggaaaagtggattccgctctggagacgctaaatgagctatggtataagagcctttccagcggttactcgaaaatagctaatcctcctctaagggaccttgggtactccgctcatgacattattagcactatgttcaaggtgacgaagacgattccaacgctttccgaacattcgaaattggaatttatccgcgagattggcttcacgcatatgaggatcctcgacggtgtacaaagcctactgcaattgagtggactaatagcaaaaatcagcaaagtgaatatgaagccacaactattcgagccc

SEQ ID NO: 21847 - DNA, 850 bp, Emericella nidulans
ccccgagcgtgtgatgtatgctaccggtgcgccgaaagacaaattcgaacgccgcgaggcccgtgttgagcgcaagaaggccgtggagaccgaaaagaaagaggagggcgagggcgaggaggccaaagagggcgaggaagcagaagctaaggaaaccgaggaagagaagcttgacacgcgcgagacgctgaagcgcctcctttcccaggccaaaaacatcatgggaagcaacaaggacgtgctacccgccaaacgcaagcaggaactgcgtggcttccaaaaagccgtccgtcgtgtcatgtccaagagtggtgcatccacatctacgctgaccgataacctcgagacccaattcgccgagcttctgaagctccttaaggccactaagatccagcccaaagaagagaaggagtccaagaaggaaaatgcagacgccgcagccaagtcagaaccagcagaaacagaagccactgccaacgcgtccaaccctgtggacaccaaacccacagaagcccttaccgaggccttccgccaggccacgcagaatccagaaggcgaagttgatacatcagagctgactgaggaggaactcgacgtgctcaagcgcgccctcgtccagatgcgcgacaaccccatcgatcactcaaagccctacgctaccccttggcggccacgcgattacatgagcgccttcgctttcatccctcgatatctggaggtcaaccagaacatctgcgcagcggtataccttcgacacccggtcgctcggcccggacactcagaagtgcccacgccgttcgggagagagcatttgaaacgcgcatgttgtctctaattgaggccactgtag

SEQ ID NO: 21848 - DNA, 850 bp, Emericella nidulans
ccgcgattgagatcccaagccagaatgcgattaccgcggataatgttacattggagcttgatggggtgctgtatacaagggtttttgatgcgtacaaggcaaggtatgctaccactatcgtctcgtgttttgaaagctcatgttccaggattgtactgactttcgagggatacttagctacggagtggaagacgccgaatatgctatttctcagcttgcgcagacaaccatgcgatcggagatcggccagctgactctagaccatgttttgaaggagcgtgcaatgctcaacaccaacattacacaggctatcaatgaggctgcccaagcgtggggagtcacttgtctgcgatatgagattcgagacattcacgcgcctgacggtgtcgttgaggccatgcaccgccaggtgacggctgagcgatcaaaaagagctgagatcctggactctgagggtcaacggcaaagtgcgatcaacatcgccgaaggtcggaagcagtccgtcatcctggcatccgaggccgacagaatcgagcgtatcaaccgggctaatggtgaggccgctgccattcgagcaaaggcagaggccactgcaaaggcgatcgagaccgtggctcaggccattgaggccggacaagcgaacgcgcatggcgctataagcctgaacatcgctgagaaatacgttgaggcatttgggaagcttgctcatgagggcacagctgtcgtcgttccagggaatatgggggaccttggtggcatgattgcaaatgccatggcagtatacggcaaagtgagcggtagccaggcgcggactattgcggcgaaagctcttggggtgcaagatccacag

SEQ ID NO: 21849 - DNA, 850 bp, Emericella nidulans
tcacattcaactttgtctgcgcgcttgcgccgcttttccttgccccgttctgtgaactggtcggacgacgagtcatctacgtcagcgccttcatctgcttctccatcatgttcatcggtcttgccctcggcaagaacattgcaaccatcatcgtctgccgtggcttgctcggtctctttgggtctgtcggcacgatcctcgtcggtggtaccttcagcgacatgtacacccctgataaccgcgctatccccatggcgaccttctcctacgtcgccattctcggcaccgtcggtgcccccatctacgccggatttattgacgagactatcggctggcgctggatcgaaggtattcagggtcttgccaacattcccctcatcctcgtcgtcgccctctgcctccaagaaacccgcggcggcgccatcatgcagaaacgcgcaaagcttttgcgcaaccaaaccggcgacaaccggtacaagtcgaaatccgagctcgaagcgccaaccctcaagcacgccctgcacaactcttctgtcaaagccgtacacatgctcatcaccaagcccgcagtcttcgccttcggcatgtggatcggctttgcgtggtttgtgacttttctctttctctccgtcattcctatcactttcacagagaagcgtggctggagcgaaggtgttgccggtttgccctacatctctctttgcatcggcacaacgatcgggtttgcaaccaacttcatccagatccgcaagtacaagtccattccagcttccggtcgtcctgtgactcccgaatagcgtctttacggcgcaatgtttggcgccatctggcttcctatgaggtgttcacc

SEQ ID NO: 21850 - DNA, 569 bp, Emericella nidulans
tgtggagggtgaagctaaaaaaacggatatagaaacaagcggtctcttccgcctcctcacgcggctgatggcgcagattgcaccggtccagagggggtatgtaaccttacccagcgttgcctatccaatatttctagcagccagagcagaactaactgacaggtattgcagactggatagacgactctcaaacttgagcgatagcctcggcgagttcttccagatccgcgacgactacaagaacctctcctcggagtacaccggccaaaaggggttctgtgaggacctcgacgagtgcaaattctcctttccgctgatccacgcgctgaatacgcagccgaaaaatgtccagttcgcggaatcctgcaacagtcgcggagcccgggaggtcttgatatcccgcttaaggagacggtgctgcagcacttacgggatgctggaagcctcgagtatacagataagaagatgcaggagctgatggaaaggatcacgggtggaattgtggatattgagaaggcgagtggtgtgagcaactggatggtgagactgctgattcaccggctgaaagt

SEQ ID NO: 21851 - DNA, 760 bp, Emericella nidulans
  unsure (1)..(760): unsure at all n locations
cttttcattttcttcaggagggctaggttaagtcagttctggctcatttccttctatttcattctttgttctctgttaaattttgtctatataattttacccttttctgtttgtcttatttattaaattttaatatttttctctttctctcattttttgtcttacattttattctattctttcttttatttttctttctattacttatttatcctatttctctttattttttacttatagtatcttctatgttatgtttatgtggtgtggtttattttttatatatttatgataattattatttatttttaaanccattagactcattatatctcttttttttcttcacttactatcttctgttctatcccccccccccttctcccatttttaactaattatatttaatttttataatttttttatttattatttttatattttatttatttctattacttcttatttatcccccactcccctatctttttcttgactattatcatttcaattttaatcttcttctaatcttggtaactaatacaagtataagtgattattattctgtattgtataattatactcatatgattatttatattctttattttttgaactatgttgccnccctctttcccattctattctatctttcaccttaatattatataagttattatttattttatattgtttagtaattaattttttgattcctcccactccttcctcttttatatctcctctctcctcctccccc

SEQ ID NO: 21852 - DNA, 521 bp, Emericella nidulans
gaaaaattctccgagacgctggaaaaagaccttttgaggcagtttgatgatttttatcgtaaggctaactttgaaggtatgaaggattgtgctactgttctccaggatttcaatggcggggcgagcgttgttgcactatttgtgaatcaacaccaattcttcattgataggagccaattagtcactgaggaagttggcggagatccggagtcatgggagaaacttgccgacccagatgcagaaccctctggagttgaaccgagcctccaatctctggttgacgaagtcagggttgtggtacaagaagagtcagctatcatccggcgggctttcccaaattatgagcaggttcttggaaaattcctacagcgggtattccagcaatcgatccaacaaaggctagagatggttttggaaaaggcaaatagggtttcatcactagcttttttccgatctctgcaaagctctcgcagctgcatcaatcccctagtcgaccaactaaaagccacgggttggctgga

SEQ ID NO: 21853 - DNA, 500 bp, Emericella nidulans
ctaattggttttcaacccgcttgcccctaattccctgattagccacattcagctagctcttgccatagcggggcttatgcagacgatttctaagcagcgagcgtcccactggaatggcttccctgctaaaagccaacgtcagccgccaaactaacgccgccaccaatcactgtacccatcacttcatctctgcttcaccagccacaatgtcacgtattggagtcttccctgctgccggtggcctcggatccagcatcaccaagcacctgcagactctcgtcccagcatctcaactcgtcctgatcgctcgcaagccggagtcgctcgcgaaagagttcagcgctggggctgcagtacgccgcgcagactatgacgtttcttcgactctggaaaaagccttcgaaggtatcgatgtgcttatgctgatttcatatgcttcgttcgagatcaagcatcgtgtcaatgtatgttccttacttcgaggtccctttaacctatat

SEQ ID NO: 21854 - DNA, 500 bp, Emericella nidulans
gaccaggtgcgttgaaattccctatcctttgccgggttgcgaccaagtactcgtttcactaactacccacaggctgaaacagaactctctgaaatcaaaacgcaaagctaagatgatctttcgtcgattgagtcgcaactcagcgccccaagcgagcattgaatcgggccaatataacttacagtatgtccttcttgctcggaatttacagaccaaaaagggtgtccggctgattaaaggatagttatttgattaaagatgacgtctgcttcctttgcatatgcgatcggtcatacccggccatgtaggcttttaatcttatacgatttgtgcaaccgaatttcacaacacctacccagcctcacagtaccagtccccgaccctgcggccatatgcatctgtggagttcgacacattcatccagcgcagcaagaaggtatctcagaaaaaccgagcttcggccaaccttgccggttagtgtcgagcttcggagagtccta

SEQ ID NO: 21855 - DNA, 417 bp, Emericella nidulans
cgagcccgacgtgaaagcatatcgcatgcattgcagggggtaccggaattgccccgatataccaggtaatgcgggcatggcctggagaaattaccctcctctatggaaatgaaacatgggaggacatcctttgcgggagtagctggagcaactggtccttcagtcacccagaagaattaaagtgcaccacgttctggtcaaccaaagtcggactggaagggccttaggggctggataacgagagagatgattcaggacttactgccggaaccatcctcaagcactgggttcttggtttgcggacctgacgggatggtgcgggcaattcggggacattttgaggctattgatgcgaatggcgaggagaaggccaatgtgttcgttttctagactaggctaggcggtctatataagaac

SEQ ID NO: 21856 - DNA, 546 bp, Emericella nidulans; identical to SEQ ID NO: 13257

SEQ ID NO: 21857 - DNA, 545 bp, Emericella nidulans
tctgcactcgaaaaaacaaatgaagctttcgatttcataaaaaaactcctaccggaaccactcaaagctcctcgtgtagctatcgtctgcggctctggattaggtgggcttgcaaacacaattgacaatgacctaagagtagaaatcgattattctgatattcctcatttcccacatttgaccggtcagtccgaatttgccttacaaccccattttcgaaggcggtccgttcgcttataacctataaagtcgcgggacatgctggcaaacttgttttcggcctcatcgacaagaaagttccggtagtcttaatggttggccgcgctcagtgagaatgcccttataatagtaaaaatgaattggttaactaagatatgtcaactgcttagctactatgaaggccattccatagaccaagtgacgttccctatccgggttttcaagttactaggaatcgacactgttgtctgtaagctaacatcaccgtgcgcagaggcagccaccagactaaggacaatatgtaggagtgcgcacgaaccggagga

SEQ ID NO: 21858 - DNA, 804 bp, Emericella nidulans
ctccaccgcaacacaaccacttccttaaccctcctgtctacaaccatcgacgccccagatagctctaaaatttatatagctaacttccgaacctctcaatctccttaatacggcacagcgaacatctcaacgcaaccatcaagtcgatcatcaaaatgtccacgctaaactatcgcaccataaacattgtcgcccatgacccaaactcaacccaaatttccctctaccacgcttctccagtccacccttcctccaccccaaggctcgagcgacgccacaaatacagcaacacaggtgcggcaactcctgcgctcgggcgaccccgccgcggcgctgattcacgtgcttgacacggcgcccctgggcggcgacgagggcgcgaagcaggtccatcttgcaacggtcattgatgtcctgcaggggattcggcagggtgagatggggagggttctgcaagctgtgctggatggcccgggcggtgtggagaggggggattgtttgatgaagtacttgtatgcttctccccatgtctcttttttgattcgtgaagcgagggttcaggctaattatatgcgctggtttaggtacaagggtatggcggctggagggccaagtaacggtgctcagagtcccaggaagtcggtgtcgccgcagagcacggggttctcgcagatccaggcgcggaatcttggtgagggaggtggtgggcaacaaatgagtgtgcttttgaactggcatgagaagctggtcgagttgacggggacggggtcgattgtgcgtgtcatgacggaccggaggactgtt

SEQ ID NO: 21859 - DNA, 843 bp, Emericella nidulans
gcacacgcgtcccctcatcccgggaaagcctatcacaacagtccagcagatcccctccggagtctccctctctaccgtcctctcacagtccctcaagacaaatgacaccgacatgttggaagcctgctttcacacgggcgactcgggcaccatccgcaccaccatcaacgtctcgattctcccctggctgcaacccttttgcaaagacttgccgagcgcctctccgcccgccctggtcgatatggccacttgcttgtctgggtacaatggacttgtatcgcgcacggaggagccttggcaggaaacaaggatctcctcaagcagatgtccactctattcaaagtaatggaccagcgctcctcaaccctctcctctcttctcttgctcaagggcaaactagacatgttagacgcccagcttggcctccgccagtcgctccgcgaaaacgcagaccacatggacagcgaagacgaggagaatgtaatctacgttgaaggctatgatgaggacgaggttgaagatagcgacgctgaggcaacaaagaacattgacacgccccggacaaaggcaattcgcgaccagaccgatatctccatgatcgacgaagacgaagatgcaggaagcgaggacgacgaagaagacgaggaagaagaagacgaagaaggccctagcgccattttcgacgtcgaagctgaagagtccgccggctcttcagatgccgaggaatcccctaatgacgacgaggacgatgatgaagatgaggatgcggacagcgccgggtccattgcggatttcatcgcggatacggaggacgacgactcagaggtagataatctctcgcgg

SEQ ID NO: 21860 - DNA, 777 bp, Emericella nidulans
gtggaaagaatttattatatcgtgggagagccctaaaaaggcttaaagattgcctgaggcacttttaaggccaaaggcccaagaaacggggcagtttaccaccggaaagaagagcctgttgcgtaatagaatggcaaggcgttctttcacaggatcaggaagccctgttgggcaaataaaaacgttaataacccatttgggattgcaccagtcgctgctgatgctggatgggaatctacaaggatggtttatgaagtctttgcatccaaaaccgtagacattgtcggcaagccagttcatttcgcaattctggtctacaggggtccatctcttgcgcgcgcatgctattgagcgatcgcagacccgaggctcttacaatgtgttggtcgacgctaaagccacggacggaagataacgtgacaaagttgaatatcagcaaggagcagatacaactgatttttaatcagcacccgctcgtcaaacgggtgtatgatgagaacgtaccgaagctgagtgaatcgcagttctggtcgcggtttttccagagcagactatttaagaaactgcggggagaacgtatatctgaggcagatgcgacggatgctatattggataaatatctcaaagccgacgagtctgggaatctgccgcgcgacatacacatgccgcacttccttgacttagaaggaaacgaagtgaatcgcagtcaacgccggggtaatagaccaaaaatagacatgcggccgtccgcggtggagaaggatgccaattattcgc

SEQ ID NO: 21861 - DNA, 850 bp, Emericella nidulans
ctacacctccctcggcttcggcttcagcaagcgcgccgatggaagcacaaccagctaccagcctgcccagaatggcactgttagtaaggagggtgtcgctgttgcgcaggctatctataacggtttgcacagcaccagcggcgaacgtgcttacctctcctggcagattggttctgagctctctgacgctgataccacctacaactctgacaccggaaagtgggagcttactattcagtcaactggaggcgtcttcgtggccaagatggtggagcttcttcaattggacaacctcgagagcctggaaaacaccacctacgacactctgatccagtggatggagaccggtatggtccggtacttggactccctgcagaccactctccccgaccttaccaccttccagagcagcgggggtaagcttcttcactaccacggcgaatccgacccctcagtccccgctgcgagctcggtccactactggcaggcggtgcgcagtatcatgtactcagacgtttcatacaagaagagccttgaggaaatgcaggactggtaccagttttatcttatccccggtgctgcccactgcggttcaaactccttgcagcccggcccctacccagagaataacatggaaatcatgatcgactgggtcgagaatggtgtcaagccatctcgtctcaatgccacggtcagctccggtacctatgaaggtgagactcagatgctctgccagtggcccaagcgccccctgtggaaggataacagcgacgacttcgagtgtgtgagcgatgcgaagtcgatcgagacttggacctactctttcccagccttcaaggtgcctgtttac

SEQ ID NO: 21862 - DNA, 804 bp, Emericella nidulans
ccatccatctcactctcgaactcagcagcgcctaaccttcctctccccgcgaaagtcgaaaaagtgacggaaacggaaaacagaatgccttcaattccaataacaatcctgaccggcttcctcggttccggcaaaacaacattattattgaaccttcttccacaactcccgaaatcatacaaactcgccttgctgaaaaatgaatttggcgacgtagccattgactcccaactcgcctccacttccgccatctcaggcgtccgcgaactcctcaatggctgtatttgctgcaacctggtagggcaactctctgacgctctctccgaactcgaatcaactgtggatccagaccggatcatcatcgagacaagcgggagcgcattccccgctacgttggcgatggaagtgaatcgactttctcgagaatcaccacacaatgaagacggaagcagcaagtatacactggatggagttgtgtctgtcatcgacgtggagaattgggcgggctacgaggacacgagctacactgcgaagatacaggctaggtatacggatcttatcgtgtttaataagtgggaacatgtgtcagagcgacggtttgatgaggtccttgatcgggttggtgatctggaggttcaaaccccgtgggtaaaaagtgacaaggggagggtggagaaggatgtgctgcttgggattgatggggcgctgtttgcaaagcaggttatcgagaacggacatgaacatggacatgagcatgcagatgggcatggacacgagcatgggcatcagtccgaggtagaagtt

SEQ ID NO: 21863 - DNA, 850 bp, Emericella nidulans
tggcgttacagataacaatatattcgatctcccaatgtccgactacaaggttatggttctggtgactatagtagccgccgtggtgcggctgtttaggatctaccagccgactagcgttgtctttgatgaagtgcagtacgtattgatcaattccagtatacgtaccccgtcaggcatttctaattggcgatgaacagtttcggtggtttcgcaacgaagtacattaagggtcgtttcttcatggacgttcacccccctctcgccaaactccttattaccctcgctggatggcttgctggattcaagggcgacttcgactttaaggagattggaaaggactatcttgagcctggagtgccgtatgtggcaatgcgcatgcttcccgcaatcttaggagtcctcacggtgcccattatgttcttgactctgaaggctaccggatgtcgtactaacactgctgtgctgggagccggtgccatcctctttggtatgccctctttatggtgggaacagaaggtgcacttactgacttctgccagaaaacggattggttacgcaatctcggttcatcctcttggattctcccctggtgtttttcacagccctcactgcactgtctttcacttgctttaccaatcagcaggaattggggccatcacacgccttccgcgggccctggtggttttggctggttgccactggattcagtttgggtgccactttgagtgtcaagtgggttggtctgtttacagtcgcctgggtgggttctttgactattcttcaattgtgggtggtgcttggtgatacaaataatgttactcccgtatgtcagcctttatccctgggactt

SEQ ID NO: 21864 - DNA, 499 bp, Emericella nidulans; identical to SEQ ID NO: 277

SEQ ID NO: 21865 - DNA, 670 bp, Emericella nidulans; identical to SEQ ID NO: 12786
  unsure (1)..(670): unsure at all n locations

SEQ ID NO: 21866 - DNA, 548 bp, Emericella nidulans
taacgcttgaaaggtaatggccgatctttacgatcgattggaagcgacagtcacctcgaatcgatacacagaggattcaaggttccacgatttgacgcatatcgacgagagcaagtccagcgactccaggcgtttcttagttacagacctgcgactccaccttaacaatgtgagggcagttgttcctttattcacacgagatctctcttacatcaacaatgccttaataagacccattgtcgcgtacataaattcgcggcgcactttcatccctgtcaactgtcgcctggtgaaacgggcggcagatttcgacggcagctggactatctatgacagcggcctcatggatgatctctcggcagctgtaagtcatcccttttttgtttgtctactttccagttgttgatttgttatcccatcaggtatacgatgcgtttgctcgtgatgtcgttgatgaacaagcacgtaagcgacgctttaagaaagttggattttggtcgcttcagttggctgcccaggctatcttcatgggaatggctgggaatata

SEQ ID NO: 21867 - DNA, 500 bp, Emericella nidulans
atgaagctcgttcggtgcgtaaaatcccgtcgcagctccacgtcgaagctctgcttcattgctgcaagaacactactaacacgtcgaaaccaggttcttaatgaagtgcgccaatgagacggtaaccatcgagctgaagaatggtttgtcttctttcattctaattttacctctgcccatattaccgctaacattctcatccaggcacaatcctccacggaactatcacctccgtcagcccgcaaatgaacacctccctgcgaaccgtcaagatgacacccaagggtcgggacccaatttcgctggacacgatcaacatccgtggctccacgatccgctactatatcctgccggacagtctgccgcttgacactctgctcatcgacgacacgcccaagccgaagaacaaggcgcgtaaggaggccgatcgtggccggggtggtggtcgcggtggacccagagggcgtggcaggggccggggacggggccggggtcgtggt

SEQ ID NO: 21868 - DNA, 355 bp, Emericella nidulans
tacctgcccgacaagatcctctggcgccagaaggagcagttcagtgacggtgtcggctacagctggatcgatggtctgaaggaccacgctgagcttcacgtcaccgacgagatgatgaagaaccctaagcccgagtggggtgatgatattccaactaccaaggaagcgtacgtctttcccattctattggcgtaaattgagaagttaacatggcaacagttactggtaccgcatgatgtttgacgagcacttcccatcctactgcgcgtccacagtcgagcggtgggtccccacatggtcgaagcagagcgaccccagtggaaggtacgtcgattcgaggtaaagctgcctgctc

SEQ ID NO: 21869 - DNA, 632 bp, Emericella nidulans
caagcatcgccttctttcagatcagagcacagcatcagcatgacaggagtacttcttgccggtgccaatgccagcctgtggatgcaaatccctgttgtgtttgcggtccttctgctgtccaaacttatctgggatgccttcttctcatcgttgagggtctttgacggacctctacctgcaaagtttaccgatatatggcgtgcatggcaggccttcgatggccacattgatcgcacgtacaccaagctgcaccgcaagtatggttcagtgatgcggatagggccaaatgcgttgagcatctctgacccgagcatgatccgcgtaatatattccacaagaaacccctggaaaaaggtaccttctgtcatcatcgaatgtgatgtataagactaggcatttaatttgctgaattgcagagcgaagataccgccccaacgacgttgtcttgaatggtcaacgagtgtccaacctcttcaacacgcaagacgaaaaatggcacaatcacaacatccttccgatccgtcatttgtggcaaatgaccaaggtcctcgaatacgagccgcttattgacaaaactctgaataagttcatggataagctcgctgccaggtttggtggcggcgaggtctgtc

SEQ ID NO: 21870 - DNA, 850 bp, Emericella nidulans
actaattgtcctcaaattcagtcaccggcaccttctcaatgatatgacctcattacttcctcacacccacaaagaaagcaagctggattcgaggaagaaggcagccggttacaatctgctcctgaactccctcgccgacctccactcctgcaacgtgattttcttcctcgaggccaagaagaatggtcaagatctatacctgtggctttcacggcctcctaacggcccaacggtcaaattccatgtcaacaacttgcacactatggcagagctgaacaccgggttcgctggtaactgtttgaagggtggtcggggtattgttgttttcgacaaatcattcgacgaacagggtcctgtcatgagccagccaggcaacgagtaccggggactgattagagagatgctccgcagcgtcttttgtgtgccgaagcgtggcgtcaagggtatgaagcccttcatcgaccgcgttatcggaatctacggtgtcgacggtaagatctggatccgggtttatgaaattcgagagtcggaaagtggaaacaaaaagaaggatggcgaagaggtgaccgaaaagcctgcgcacaaccccaaggacggtccagagatttctctcgtggaaattggccctcgattcgtcctcacccccatcgttatcctggaaggcagctttggcggtccggtcatttacgagaacaaagagtttgtcagcccgaaccaagttcgtcgcgaaatacggatcagtaaggctgcacggtatgcgaagcggagagacgtacaaaccgagcggctggccaagcggtcaaacttgcagctgggacagggcgagcgaaaaccgggtgctcttgatact

SEQ ID NO: 21871 - DNA, 799 bp, Emericella nidulans
actatgttagcgaagaacgcgagagctacgtcaaggaacgactaggcgagtggatttcgaggcgcacgagtttaccgacgatgaactggtttttgccgcccatgcgatgcttcagcatgcattcacgatacccgagctggaggagtggaagttaacgcccggcgagctccagacatttttgctggcttgtcgcgcgtcctataactcatttgtcctctaccacaatttccgacacgcgatagatgtcctacaatccgtcttctgctttttgctacatatcggcgctctgcccagctatggatcgattggcgccaacgctgataaaaactgcccgatcgcgtctatgctcaagccgtttgatgctttgacattactgatagcagcgatcggccacgacgtcggccatcctggtgtgaacaatttcttcttggtcaagctcaacgcgcctctggctcagctctacaatgacaactcggtgctggaagccttccactgtgctgccttctcgcagatcctgcgccgctactggcccgcagcattcaaagacaaggcactgcgcaagctgcttatcagttctatcttggccacagacatgggtgttcaccagaagttcatggaacgactgggggctttgcaggaaaaatactcggaaaataaccggacaacagatggctggaagcctcaagatatcgatatgtacaagactttggtttgtggattgttgatcaaatgtgctgatatcagtaacgtggcgcgtccatgggaggtggctgagaagtggaccaagatcctgagaaga

SEQ ID NO: 21872 - DNA, 850 bp, Emericella nidulans
actacccagtgcagtagaagcaggcatggattgtggtcctaaggaaacctagtaaactagactatgcagtacccggagcataccaacctatctctttgctaaatatactaggcaagctactagaagcagtcatggtttagagactaatattctgggccaatacctacaagctactccctaatacacaatttaaggcagaccagggtataacacagaacaggtacttcttatactagggaataccattgattaagcatggctttgatccaaagtggtgatacttattgcattcgaccttaaaggagcttttaatggggtgaaggaagcaagccttaatgcccgcctgtaggccaaagggatcctgatagtagccagaaagtagatcagcagcttcatggagaaccagtataccagtattacctttgataactttcagacagaggttgcccctctaggaaatgcaggccttgctcaagggtccccattgtctcctatcttgtttagatttttcaactctgacccggttaaccagccagtaaattaccatggggttcttctgcatttattaataactacttctgatagtaagcagggccgacggccgaagacaatattaagaagatctaagaggaagatatcccctgtatagaatcatgggcctggaagactagattattatttgctgcagagaaaacagaacttatatacctaactaggtccaaaaagcaacatgaaacagggcagattactataattagaaagataattacaccaacacaacacagcaaagcttctgggggtggtctttgataaagagatataatagagaggacatgtcaaaaacagttaa

SEQ ID NO: 21873 - DNA, 850 bp, Emericella nidulans
tcaagaaatacgcccttgtcggcaccggcggccgggccatcttcttctacacggcaatcgtaaaagacttctctcaaacagcccagctcgtcgccttttgcgacactaatcagacgcgcctagactatgccaattcacgcctcgaagcacttggccatgcccggatcccaaccttcctggcctctgactttgaccgcatgatcgcagagacacagcccgacgaagtcattgtcacgacaattgaccgcacgcacaatatctacatcgtgcgcgcgctggaactcggatgcaacgtcatcactgagaagcccatgaccatcgacgcgcctcggtgccggcagatcttcgacgcagtcgagcggacaggcaacagagtgagagtaaccttcaattaccgctacgcgcctcacaacaccaagatctacgaactgttgtcatccggcgtgatcggtcaagtcaactcggtgcatttcgaatggctgctcaatactcagcatggagccgactattaccggcgctggcaccgcgataagcggaacagcgggggcttgctcgtgcacaagtcgactcatcattttgacctggtcaacttctggctgcagtccaggcccgagacagtggtcgcaatgggcgacctcaagttctacggaagggagaatgcagaaagacgtggtgagacaaagttctactctcgtgcgtatgggagcgagaatgcgaaggatgaccactttgcactgcatcttgaccgcaacccgcagctgaagtcaatgtacttggatgcagagaaggaagacgcctacttccaggaccagtctgttatcagcgacggattcagcatcgtggatacgat

SEQ ID NO: 21874 - DNA, 850 bp, Emericella nidulans
agaactttatctgactggaccaggagctttatacctaatctatcctagaagagtttagaataactaaatcaatatctcaagacacactgcttgatcctagtaccaatctggataattaattatctaggaagctaccttgagacctgtataataagtttaggaagattattaaacagcttacctacctagctggcagaactaggccagatatctagttctctataaactgactaagctaatatcttacagatccctgagaggtccatcttagagcttcaagatatctcctttactatatcaaaggcactgttatatatagaataacctacagtgcaaaggggagtacagataccaagaccctgataggatattcagatttattatataggaattccacaaagcagagatcgaccagtatatatatctttatgctagctaatagaccagttagttggtatagccagaagcagcctattactgctatgtcaataactaaagcagaatatattatagctgcagaggcagcaaagcaggctatctagatcagatactttctagcagctatatcaaagcatcctaagcagccaacccaactgggaattaacaatcaaggtactttgatgctatcatccaacccagttaatcatctacacagcaagcatatctgcatacaatatcatgccatctaggacttcatcgagtatggagatatcaagccaatctatatccctacctcagaaatggtggcagatggtctaacaaaggcaataaaggctgataactttaagaaagcacttcaattgctgcagctgaagtcaaaataaggttctataatataatatcaagatcc

SEQ ID NO: 21875 - DNA, 484 bp, Emericella nidulans
cgtggagcgacggacatgtttggatctctccagagcagcacgggaatctggtacgttaccccttgttgacagaatcaccatcgagtttccgcttagtctcgcaaaccagactggagtattcaagatccaaatcgactggatcccactaagcacggggagcattcgtccaactcaaggccgaacccttgctattgggcaggtctgtggtgggtcacaatcattcaacgcagtcaactcgctgcggattctgggacgctggatgcgcatgttcaccataccaaaccagtcgtccataccgcaagcgtatacacatttcccagaagagggagaaccgggcgaccagcggctcaaggcaagcagtaacagagatcgactggtggattgtatggaggaatttgtcaagtatacgatactaatgaggccacacaaggacatcttcggggatcggttcagcgagcgtgaggagaggaggttgaaggaagct

SEQ ID NO: 21876 - DNA, 850 bp, Emericella nidulans
ctctcgaagcgtattcctacctacatgattcctgcagtatggctatgtgtcgaagccttgccactgctgccctccgggaaactaaataggagagaaatcataagctgggctacgaacaaaacggatgacttccagggcggagcttctgagtccagtggtgtcgagactccgaaagccgcccactcggaggtcacagtagaggatcgattaaagtcaatatggagtcgcgttcttgccattccccgtgaccgaatcagtcttgacgaaagctttttggctttgggcggcgattcgatagctgcaataacctgcatgggctattgtaagaaacagggaatgggtgttacggtgcaggacgtgctccaaagcaagtcaatccgagatctggttacccgcgttcaagagatcaagcatcttgtgaaataccaagaggaaaccgaagagccttttggcctctctcctatccagaaacttcatttcatgatccgaaaggagggccagggttactttaaccagagcgttcgtacccggctgagccgacggcttagcgcagatgatttaaggcatgcgatacaggtgatcattgagcgacactccatgctccgagtacggcttattaaggatactcttgtgggaaaccttcgacagcgcatcactagagatattgactcgtcataccggttgcgagttcacaacatcaatcaccaggctcaaatggagagtgccatctcggtcagtcaatcgtgcatcaacgcatttcagggcccaatcatggctgtcgatattttttacacagaggatgattgcttcctatcaatggttgctcatcatctagccattgatattgtcg

SEQ ID NO: 21877 - DNA, 837 bp, Emericella nidulans
gttaccattgtggttgaacacttagatcccgaattgggtacatggtctgccctggagtatggctgcatcgcccgagaatctcatgcagcaggtagcagatttctcctgagttcagttcccaagtcgctgcaaatgccggacgacctggcggctacaaaagggctcgaggttgagcatcgcagcgtcgaagaggtcttctcagaccgacaatccaagatatgcctgttggacccttctgctaaggtcgaacttagccccgctgatggtgatacctttgaggtctttctctttggagggatactgggtacgcaccctcaagaactacgaatctagattacttctaggctgaccgcgacatgcaggtgatgaccctccacgaggtaactaagactcagatagctgcatgaatatgttgaactgaccagctggaaccagatcgtacttctgaactgaggaaaaagggttatgaaggaaggcggctaggacccgtgcagatgacgactgatacagctgtacgggtcacccgcatggttgtccacgaccgaggtaaccaccataagatgcagcttcagagatcgcttgcgttaagtcactgacctctagcagttcccttagaagagattcagtacatcgacaatccagagatcgtgatcaatgaacatgagcggactgagatgcctttccgctacgtaaaagacagcaagggcaagcctatcatgcccgaggtaggtcactgtagcccaaactcgctcacagcctgagcatactaaccggcaatagggcatggtggaactaattaaaaaggatgctgagaaaagtattgaggatcttttttag

SEQ ID NO: 21878 - DNA, 771 bp, Emericella nidulans
ctcgaaagacgcagctctgaacgctgctgtaccggaagggccgatctcttctccgcaagtgcagcagacaaacagttcatggacgcacttggtagctggcgcgtgagcatttcttccgatcaactcatcctattaccttgtctcttatcatgtatgctaatgttctccagcgctggcggcatggcaaccgccctcctcacatctcctcttgacgtcctccgaacgcgccttcaatccgactactaccgctcccagctcaaatccaccacaacttcctcacacgctcgcttttccctcgcccgttccttcattcagcattttagcgaaactttcgaaattctcttttccatccaccgcgtcgaaggctggcgcagcctgttccgcggccttggtcccagtctcacaggtgtggtcccggcgacagcaatcaaattttacgcatacggcaactgtaagcgcttatacccggaggtctttggtctggacagagatgcgacgtcgacacatgcgctgtccgcggccaccgcgggcgttgtgacagggacagcgacgaatccgatctggctggtcaagacgagattgcagcttgatcggacacatgtaaatagtgatgggactacgagaccgccgcaatatcggaatagctatgattgtgtgaaacaggtcattcggcaagagggtattaaaggtctttatcggggtttggcggcgagttatctcggcgttattgagacgactttacatttggcttcgtatgagcggataaaggtc

SEQ ID NO: 21879 - DNA, 850 bp, Emericella nidulans
cgccgggtacgacgccttcaacaacgactacgactcgatcgtcctcaagggcaatggcagcgtcgactgggatgccacccatatgttcggctaccaggcgctcggcgagatgaccctgcttggtaaggaactcacgcgcggtttctacggtatcggctcggacgagaaggtctacacctactacgagggctgctcggacggtggccgcgagggtatgtcccaggtccagcgctggggcgaggagtatgacggcgttatcaccggcgccccggccttccgctacgcccagcaacaggtccaccatatcttctcctctgtcgtcgagcacaccctggactatgccccgcccccctgcgagctggccaagatcgtcaatgcgactatcgccgcctgcgacccgcttgacggccgcactgatggcgtcgtcgcgcgtaccgacctttgcatgctcaacttcaacctgacctccatcatcggcaccccctactactgcgccgcgcagacgtctacctcgctcggtttcggcttcagcaagcgcggccaccacggcaggaaccggaagcgcgacgaccacagctcaacctcttaccagccggcgcagaacggtaccgtctcggctaagggcgtcgctgttgcccaagccatctacgacggcctgcataccacgcagggtgaacgcgcctatctctcatggcagatcgcctcggaattgtctgacgcgacttccacctacaactccacgagcggcaaatgggagctctccatcacctccatgggcggcgagtacgtccgcaagttcgtccagctgctcgacctggataacctctccaccctggacggcgttacctac

SEQ ID NO: 21880 - DNA, 474 bp, Emericella nidulans
cgcttctattttgcgtgctaatcctcgtaagcatggcgaacggtttcgcgtactggcagggccaagacatcgacaatgccactgctacctacttcgatgacatggcacaagccaaggcccacatcgagaaggttgccggcgacaatgcgaagaaaatccgatttggcaacggcgagagcggctggcctaccggtgagcttcatgcacattaagtctagactcgtactaacggctgtagatggcggatctgactacggcgctgccaaggccagcaccaagttcgctgaaaaatactacaagaatgccgtctgcgccatgctcacctggggcatcgatgttttctacttcgaggcctttgacgagacctggaagcccgacaccaagggcgacaacggcgagctcaaggacgagaaacactggggtctctttaccgatgatcgcaaggccaagttcgatttgtcgtgcccgaactag

SEQ ID NO: 21881 - DNA, 850 bp, Emericella nidulans
  unsure (1)..(850): unsure at all n locations
gacggccngaccccgcaggcggaggagccgccagaaacgacgggaaggccagcggccccgagacaaggcccaggggcgcccaaccaggagggggcgaggaagggcgcggagaggaacgcgcggagcccggaggaggcgccagggaaacgaacgcaaggcaaggacgagaagcgcgaggcaacggaagacgagcggacgaaggagcgcccctgcgggccggggaaacgacccgccgaaccccccgaagcccgaaagggcaaccccatgaggaagcactgcgcaacacgaaaggcaaagacaacaagccgggagccaaaacgcccgacggccccgaggcacgagccgggcccacgacccacaaaggggacgaaaggccagagacccaacggccacacaggacaaggcacccccaagggagaaaacaagaccaagcgcacaagaaagacaaaacccccccaaacccggaggcaacccaaacacccacaaaacccagcagacccaacaaccagccagcccaaaaagccacaccacccacacatgagcgccccggagccaaaccagggcagcaaccccaccaccgagccagaacagggccagaacaacccacgcccaggaaacgaagaccaacggggccgaaccaaaacccccaaagagctcacacggaacccccgacccccaaaaaggaaggccagaaccgccaccaagcaagagaaaagccaccggaagggcccagcaccacccaccacacccagacacccagaaccacaaacaccaagacgcagaacaaccaaacaacaaaaatagagagaaaaggaagaaaaacggccccccccccccccccccccaacac

SEQ ID NO: 21882 - DNA, 850 bp, Emericella nidulans
cgtgcatcaacatggaatggtatatggcatgtattgggcagcacagagcaccattaccggatgtctcaatctagctgcttcctacgaagtggcagctcttggatggaggtggtactactgggtctttgcgatcacggtcgccgtcggccttctccttgtcatcgtcttcgggcttgaaactagctaccagcgcacgtcccagtttgtccatggtcgcatggttgtcacagaccagttcggcgtaactagggtgcttagcgaggacgaaacacgacagtatctcggcacccatggccacccatatagtcgcgacgacggccatataccggaagagctccggccaaagaagacatactttcaaatgctaataccatgggcatcgccaaccgaaagtcctctgatcctcatcccccgaaccacgcttcagatcttctcagccttcttgtcccccggcatcctgtacgcaaccctcgttgcctctgtcgtcctcggctcctcaatcggcatgtccctctcctacaacacagtcctgcagtacaactaccattggcccgcaaaatccattgggctaatcaacctcggtggtgttttcggtggcttcggcggcatgctctacgcaggcttcttcggcgacaaattcatcgtgtggatggcgaagcggaatggcgggattcacacacccgaacaccgcctccctctccttattctccctggtatcctgggagtggtggcccttctcctctacgggctcacagcggatggaagcgcaacttggagcgggccatatatgggtggacgctcttccaaatcaccttcgtgtctgtgcttattctgtccacgtcatttgcgg

SEQ ID NO: 21883 - DNA, 850 bp, Emericella nidulans
  unsure (1)..(850): unsure at all n locations
tgaagaccccgaccaccggggcatgaagaagccgcgggctgtcagcgccgtcacagaaaccctcagctcgcaggtgtacgagcactccaaggagggcaagttcacgctaaccctaggcggagaccactcgatcgcaattgggagtatcttccgcaatgcaaggcgacncgcgagcggctgggacgggagattggtgtcatttgggtcgatgcgcatgctgatatcaacattcccgaaatgagtcccagtgggaatatccacggaatgccgatggcattcttgacgcggttggcgacggaggagaagaaggatatctttggttggttgcaggaggagcacaaggtcaacctccgcaagctggtgtatatcggactgagagatgttgatcgcggtgagaagaagttgctccgggagcatggaatcaaggcgtttagcatgcatgatgttgatcggtactacccccttcctatccgcatttgccctcgtttagccctcggcctcgtctgggttctacgccctggagataaatgttgctaacgttggctttagccacggtattggtcgagtggtcgaaatggccctcgctcacatcggaaacgacaccccaatccatctgtcctttgacgtggatgcactcgatccccaatgggcgcccagcactggaacgccggtgcgtgggggtttgactcttcgcgagggagacttcatctgcgagtgtgttcacgagacaggaaacttgatctccatggatttggttgaggtcaaccccagcttggaagctgtgggggcttccgacaccattcggaccggttgctcgttggtgcgtagtgcgttgggagataccctgctc

SEQ ID NO: 21884 - DNA, 850 bp, Emericella nidulans
ttgccaatttgtgtcgcaaatcaaaccgcatggggttagcggaacgttctctcgcctctctagaaactgtcatccctgacggcaacggcggcactcgcactatctccccaccagaagtcacatatgctcgcttgaagtttagctgggcaactggccgccaacgcgaggcccttcatatgctccgtgaatttactgccaacctaacagaagacttcactcgcttcaatgcacttgttgcctcacaatctgaccataacggtatcaacggcgttaatggtatcgcagaaggaaaccataccgatatcatggcccttcgagagcgcgttggtgatgtcaacaagtttagaaagctccttgcaaagagttatctaagacttggtgagtggcaaacggctctacaacgaggggactggcggccagagcatgtccgcgaagtactcaacgcatattcagcagccaccaggtacaaccgcgattcctacaaagcctggcactcatgggccctggccaactttgaggtcgtgacgacaattgccagccaggcaagtaaggacggcggaaatctggcattggttccagggcatatcgtaacagaacatgtgattcctgcgattcgcggcttttttaggtccattgccctctcttcgacgtcgtctcttcaggatactcttcggttgctcactctctggttcaaccatggtggtgaccaggaggtgaactcggtcgttacagagggtttcacggctgttaatatcgacacgtggctcgccgtcactcctcagcttattgcccgcatcaatcagcccaacttcagggttcgcagcgccgttcatcgcttgcttgctgaagt

SEQ ID NO: 21885 - DNA, 850 bp, Emericella nidulans
accccctgaccgatccagttaccgtgcccgggggaccgagtaaggagttgtactttagcccaccatgttatccaagagctccccatttctttcgaaatcggttcaagattccatccagaacccttcgctagatgatacagacctccctgtgcaaattcgcccagattctgaccgactgcaacttctccagccatttcctccctgtcagccggggtgcgctcatggtatggaattgctgatcaaggtaaagggagaatgcaccaccgaccacatttcccctgctggaccgtggtacaaatatcggggccatcttgagaacatctgtaacaacatgcttacgaccgccaccaatgcgttcgtaggccaaggtgaccctcgtctgcttggccacactcgccatcctataacctcaaaagtggaaggcgctccgcaggtggcacgcgatcttaagcagcggggtgtccggtggtgtatcgtaggtgatcacaactacggtgagggcagctcgcgcgagcacgcagccctcgaaccacgttatttgggcggggtggcagtcattgctcgctcattcgctcggattcacgaaaccaatctgaaaaagcaaggcatgcttcccctgacgttcgccgaccccgccacctatgagcgcattgctgaagctgatcggatcactttgattggtgttgaagaaggtgagctatgcccgggctcgtccgtgacgatgcgagtcgagcccaggcgaggagaggtctgggaagcggaactaaagcatagctaccacagcgggcagattccatggcttcgcgctgggagtgccctgaactacatcaaagccacggctctggctcaa

SEQ ID NO: 21886 - DNA, 642 bp, Emericella nidulans
aaccacctcatcactgtttcttcctcggggctgttgacttgcgctggaggaaagtggacgacttaccgccagatggctgaagaagcagttgatgaggccatcaaagaattcaatctcaagccctgtgaattgcacgatgtccccgatatcagtggcgttggcggacgcggtttggttgccgacaatgcttcgctcgatggctcatgccaaactcaccaggttcgcctgatcggagctcatggctggtccaagactctgttcatcaatctcattcaacattacggccttgagacagacgtggctcggcacttaaccacgtcgtacggagaccgagcatggcaagtggcagcactgtcttctcccacacagacacgcttccctgtccgcggacagcgcatttcagccctctaccctttcattgatggcgaggtccgctttgccgttcgccacgaatacgcacagactgcagtcgatgtcatcgcccgaagaacccgcttggcattccttaacgcccaagctgccctcgaagcactccctacagtgatcgacttgatgggcgaggaacttcattgggataagaacaggaaagaagtcgagtggaaggacagtgtgcaatttttggcttcaatgggattggcccca

SEQ ID NO: 21887 - DNA, 368 bp, Emericella nidulans; identical to SEQ ID NO: 10109

SEQ ID NO: 21888 - DNA, 850 bp, Emericella nidulans
cttcaagtaggtgaccaagttggcgcaccactgtggcacggcatgtgcctgcagtgtatacattgttaggagcgcaacgtcagatcttatgtcctacaaagatggtgaaaaaggccttactgcgccgaggggtgctttgcgaatattacgcttgtcgatggcggccagtgcagtggtcatcccaaagtatgtcatcgcgtcccctgcatcacatgcacctcatttatgtgctggccttactgtttggaatgcatcctagcgagcgagattacaggttacagacgttgtcgccactgttgtaaccggtggtcttggacaggtcgcctgacagtgcgcccgcgcaatgggagtgcgggtgattgcactagacatacaaggctagcagctgaaaactgtcaaggataatggaacatcccaagtgaccaggttgcgagtcggcttgctgccctcattgatggacggctcgttgatacagtcgttgtgacttctggagcagttcccggcatatgcaactaccttgagttctgtccgggcagagggacgaattgtggcggttggtattcccagcaaagatatcccgatcgccattagccagcttatctctcgggcgctgcagtatgtcagtcttccgtaacgctacatcatatactgatcagccacaggttgatcggcgccctagtccctggccggactgcagctagcgagtgcctcgagttttcgctgaggaaaaacatcctctctaaaagtcaatcccagaaaattccgcttggaggatatcaatgagatgatcgatcttatgaaagctggcaaggtggagaagggaagaatggtggcgcagttcttttaggag

SEQ ID NO: 21889 - DNA, 850 bp, Emericella nidulans
  unsure (1)..(850): unsure at all n locations
ngaaagaaagaaaaggggggggtttaataagaagacgggggagaccccccaaaaacaaaaagntaaggaaaaaagcaaagggagaaagaacactccgggctaataaaacgccgaaagaagaaaaacaagcgaagaaaaaagagccaataacaaggaatagaaaacccaccaacccaacaggaaagaaatagtcagaaaaaggagaacaaacaaatattaaggcaaatgttaaaaaaaaaagatccacaagtatgaggacaggaacgaaacaccaaaaaagagaaacctaagatggacagagttgaccagttaaaaaaagaggatatacaaccccaggaaacacaaagggaaagaataaaaatcaacccaacgcttaagagcgaaacaaaaaaaacaagaagaacgagggaaagaaataatcgtaaaggaaaaacacgagagaaaaaatcaagtaaaacaaaaaaagcaaagaaaacgaaaaaaaactaaaaagtggtaaaaaaggagaaaaaaggaaaaaaaaaaccaagcctttaaaaaaggaagggaacaataaggaggagaaaaatagcaatatcaaaaaaaagaaattaacaaggacggaaataaaccaaaagaaaaggggaaaaaactaaaactaaaaaaaccaaacacataagaaaaacagtaatttaagcaaacaaccaaacttgaaaaaaaataaaaaaataaaaataaaaaaaaaaataaagacaaaactactaagaagaacataaaaaaaaaaataaaaaaaaatgacgaaaaaaaaaantaaaaaaataaaagcaatataaacaataacaataaaacactaaaaaaaaaaaaaacatca

SEQ ID NO: 21890 - DNA, 850 bp, Emericella nidulans
cacctcgccaagtccggagaacttgaagactttgtttgaattcatcttcaagggctttgatgctctcgctatgccgaccacgccgattacaccattctccagtctaccaaccctgatttcaacaaggctattgttcgcgtcaacatccatcgccaacatcgccagacaattcaatacattcaacctcaggacgctcatgtgctaggacaggcagaactcctggtcattgatgaagccgcagccattccgttaccgctcgtccgaaagctgatgggcccgtatctagttttcatggcttccacaataaacggttacgagggaactggcaggtctctctctctaaaactgatccaacagctccgcgaacaatcaagaggcggtgcaaagattgccggggatgacactgatgttgcttcgcgagcgactggaaagattgagaagaactccgacaagggcttaggtggtcggtcactgcgagaaatcactctgtccgaacctatcagatacgcccctggtgactctgtcgagaagtggttgaatagggttctatgtctcgatgcgacactaccgaagtcaaaaatgaacactcagggatgccctcatccctctcaatgccagctgctccaggtaaaccgagacactctgttctcgttccatcctgtctccgaaaagttcctccagcagatgatggctctttatgtcgccagccactacaagaacactcccaatgatctccaactgatgagcgatgccccagcacaccagctgtttgtgctcgtcccaccgattgacgaggacgccgccaagttaccagagccactttgcgtcatccaggttgccctggaaggtc

SEQ ID NO: 21891 - DNA, 382 bp, Emericella nidulans
ctactcccgatcagttcatccggatatgtggaacgcgactctcgtgcattgcgtcgcgattaggcaagcccctgccgccatctgcagttcgcattacaggaggctgaacgcagaaggtggcggagacaagagtgatcagcaagaaaaaatcacagcggtcgtcaacgtgccgcagtctaagtacaactacgtggcaatcgagccaccagtgatagagacgccgcagctgcgtgacatgggcgaggctacgccaccgctagagtggattggccttcagcgggacaagctccccaatgtcacgcatcagatcataattgttaccttgctggaggtggccaaggaggtagaggacgcttacgccaagatactgtggtcttcttga

SEQ ID NO: 21892 - DNA, 850 bp, Emericella nidulans
  unsure (1)..(850): unsure at all n locations
caataaaaacaagaagctcgtctccgtaaattcatacaaaaagcgtgcacaagatgcctggctctccatcctccgcaacgatctctcccaaccgctccgcaaaacccttcttcgcatcatggttcaccacatcgagccctggttcaaccgcccagaatacctgatggacttcctcacagactcttataacgtcggcggcgctacctcactgctcgccctatccggcctcttctacctcatccaggagaaaaaccttgactacccgcaattctacccaaagctctactccctcctcgacgccgacctcctccattccaaacaccgttctcgcttcttccgcctcctaaataccttccttgcgtctacccatcttcctgcaacgcttgtcgccagtttcatcaagcggctttccagactagcgctcaatgcanccaccagcggccgtcgttgccattgtcccttttatctataacctctttaaaaatcaccccacttgtacattcatgcttcaccgcgttattcgagacaaagagttccaggccgagctggaagcagaaggcatggatgacccttttgaccccgaggagtctgacccagatcagaccggcgcgatcgaaagtagcttgtgggagattgagagcttgcaatctcattatcatccgaacgtagcttctatcgcgcggatcatatctgagcagttcacgaagcatagttacaatctggaggatttcttagattatacctatcaaggtatgttgcaggcggaattgggtacgggggagaagccgctgaagaagattcctgttgtggagtatcaaataccaaagcggatatttactgatcgtatgtt

SEQ ID NO: 21893 - DNA, 850 bp, Emericella nidulans
acccggcataagaccgactaccgggctaaggcggcagaggaggtggccaaagttcaggagaaagccaagattttggaagaaatgctgcagagccaggcgccgggtgatcggatcgcggagggcgatgtgtttaaggtaggatgaagaatccaccgtaatgaagaagtcttctaacaaagccgcaggaacttgcgaatgcccttcagagtgcgcatcccaagatccagaagatgtgtgaagaggagtcggatgacccagaagctgtgcgcaaactgttggagatcaatgacagcatacaccgcacaatccagcggtataagctcgtgaagagtggtgatttcgacgctgcgacgaggattcccaagggcacgttgggcactactacaggggtttctaagaatgccaacaacgagctgtctctgatcgatttcgacccagagcctagttccaacggcgcaggacagccggcacaggggtctagctctatcgagaatgacttgcttggactatcaatcgacgagcctgttccgtccggtggaatctcgttaggccagagtatgtttttctgtcctttgcacaagttgtttactaacattcgtgaagcgagctctccggcgccccaaataccccagaatcctagcgcattccaagcaaattatgatatcctcggttcgttaaattctagccaacctgcgtcgttctcgtcgacacccgctcctgcatttcatcaacctccagttactgcaaccccaccccctgcagtggacccatttgcgtctttagtatccgctagccctcgaaacaacagcccgctcccttccagctctgcaagccctcgaccgcccgcatc

SEQ ID NO: 21894 - DNA, 500 bp, Emericella nidulans
tgaaagaagactcgccattgaaagcaattacaaactcaattggcgggaacgggggtgctgtcagcggagacttctcaaagatggcgtcggagttggaatcagttattctcaggcgaccttacagcgaccaaactcctccgcatcacatccacgtctattcgcaccgacacaatacgatacttacacttacacgaccaaacggtagtcctttgatgtcgtttggcaccggagtcctgggcttcaccaagtctcgtcgaggcggctatgacccggcataccaattgacgtcgcatctcttcgcacagatccaggaacgtggtctcttgatggatatcaaagccatagagattattttccgtggcttccaccaaggtcgaacagccttcaccaaggcattgttaggaaacgaggggaggaatattcggggcttggtttgtcgggtagcagattcgaccaggatcaaatttggtggaacaaggagcccgagagtccgtagactc

SEQ ID NO: 21895 - DNA, 500 bp, Emericella nidulans
ttccgggcggacgaccggtgttgttttggattcaggggatggagtctcacatgcggttccggtgtttgagggcttcgcaatccctaatagtattcgaaggatagatgttgctgggacaaacgcgccgacacaccgtctttttgacgagatctatcggccccattccggcgctctatgtctatctagacaatgagtggagcgagatcctggccaaggtcgaccaggctggcggtgggtttgcgctgacggggcccgtctttgccacggatcggagagtgatctgggaggcggaggatgcattgggatactcggctgggaacttttacatcagctgcaagaccactgctgcgctgatcggccagcagttgtttggtggtgcgagggccagcggcacaaacgacaaggctggaagctccgatattctgagacggttccccagcctgcgcatgatcaaggagttctttctgttggaggggttcaaatatccaagtaaccagtag

SEQ ID NO: 21896 - DNA, 850 bp, Emericella nidulans
gtggctcatggaccggggttattgacaagttggactacatccaagagctcggattcactgcagtccaaatatcgccagtggttgagaacatcccagataataccgtatacggagaggcataccatggctactggccccagaacatgtacgctttgaacgagcattttgggaccgcagatgaactccgaaaactgtccaaagagcttccaagcgcggcatgtatttgatggttgacgttgtgatcaacgacatggcgcaactgtagaacagttcagtagacagtgggtcaaacatcaactggtcacgtctgattccgttcaatgagaagaaatactaccaccctttctgcagaatcgaagactggaacaaccccgacgagtccaagaactgctggttcagtacggaagtagttgcccttccggatctcaagaccgaggacgaaagtgtcgtctccatgattgaaatctgggtaaagggactggtgggcaactactcaattgacggtctgcgcgtggacgctaccaagcatatggacgaagcctacctgaccagtttcagcgacgtcatggcgtgttcacgatgggggaagtctacaccgaggatacagacgccgtctgtaaatatgaggaggttttatcgggtctcctgaattaccccatgtatcggccgatggtccaggctttcactgcgggaaacatgcccggtcttgctgaaaacgtccgggctgttaacagcaaatgcaaggattttactcggctggctacgtttactgaaaaccatgatactccccggtttgcgtctctgatcaatgatacgactgtatgctcccataatcttagaactgctgcat

SEQ ID NO: 21897 - DNA, 850 bp, Emericella nidulans
atgatatctgagcaagcgtctgtccctcctgctttggaggacatctttaacgcgcctgatgtcttagagaagcttctctggatagactctatctgcggtcgatttgggagttacatcgcaaattgttctgctgagagcttttccgatatccaaggtgctttctacgaactggaaccggttgaacgtacgttgaatttctggctcgaaggcctaaagaagaacgagataaacatgaaaaagtgtgcggtggaattacagagatccattgctctactttcgcatctggcagagacacttctcccaacttccttggagacatttgctgatgaactctgtatgagcacgacattgacccagtcatacattgagaattcagtgtcctcaatgtcgcgattgctctcattactgcagtcgaaacttccgaaagccgaggaaggcgatgaagaagcctcgtttttgtttaacaagatggagggctttatctctcaggctcgcagcttgaaagttgctacagtgaagatcaaccgtgccgttgatgatttaaggtcaaggtccctggctctttctcatgatgcgtgtggtcctttcaagcaagcagagaatgctgccaaagatcttgcaagcttatcgcgacaaatgggtgagaatattgtgcaattaattagcgatgacagtcgtgcggagcccatttccttgcaagaggttttgacgaacatgtctcaaatatctgcattgtaccagtcagaagccgcagagaacaacgatggcatgtcgctcattttcaccatgctacgcagcctgagcggcactctcgaagaactcggttctatttcgtctgacttatcaatta

SEQ ID NO: 21898 - DNA, 850 bp, Emericella nidulans
tattgaatgggtatacattcacaataacacctctgtcattcaagatgaggtgcttgcacagcggcttggtcttatccctcttcagggttcagtcgaaggcctcaactggatgcagtggtacaacaagggcagcgaagatgagcctggcagcggtagcgacctggcagattacaacaccgtcgttctgcgtctcgacgtcgaatgtaccaagaacccgaatgcatcccgtgacgaaacagaccctcgcaaactgtacaagaacgcacacgtctacgccaaggatatccccttccaccctgtcggccgccaagaagagttcttcaccggtgaaggcgccattcgaactgtgaaccccgatattctcgttggtaagcttcgccctgggcaaaagataaagttggaaatgcactgtattaaaggcattggagcagatcatgccaaattctccccggtagcgacagcgacttatcgtctgatgccggtcatccagattatgcgccctatcattggagaggacgcgaagaaattcgccaaatgcttccctaagggagttattggtcttgagcccatcaccgctgaggatgagcggcaaaacgctgaatatcgtggtcgtggcggcgagcttaaggccgttgttcgcgatgctttcaatgataccgttagcagggagtgcttacgacatgatgaattcaaaggcaaggtcaagttgggccggattcgcgatcacttcatcttcaacattgaaagcactggacagtttgacagcgacgttctcttcctcgaaagcgtgaaggtgctgaagctcaaatgtgcacggtggaagcggggcttgacggacctcatgcgatag

SEQ ID NO: 21899 - DNA, 500 bp, Emericella nidulans
cattaagtccagatcttggtggtgcaaataccctcacagaaccaaacaatgccttcctatgcggttctgggggctacgggtaatactggacgggcgatcgtccaggtactacttgatcgagcagacaccgacaccagaattcacatctgcgcctactgtcgctccaaggaaaagctcttccttgtctgtccggcggccgagacttttaaaagcctttcagtctttcaaggacggctggatgatgatagcctcatcgatgaatgtctcaggggcccccatgccctgtttctggtagtcgccattgtcgacaacatgcctggctgttcggtggccatgcctactggcaaggcggttggagcgttctttaaacggctttgcgctacaaaacctgcaataagttttccgtgattagggatttctttttcgccttcctggagcccaactttctgaacgatgttccctcccggtgacttggtcctcatactgccgtttccattttc

SEQ ID NO: 21900 - DNA, 850 bp, Emericella nidulans
cgcacggaggacgagaacgacagcgggggcgctaccgggaaggaatccccggacacccccccggacagaaaagagacgggataggacacacgaccagaccgacagaggccgcacgcgaccaacgcaaccataccccaccagcacaccgaccgaaaccccaagcgaatgcgcaagaaggcgacgagccccggcggaccccaaagggctgacaaaaacacaccacgcgcgcgacacaaaacggccggcgactaaaccacacaaacgctcgacaccaagaccagaggcaggaaaccggagaaggacgaccccaaagacgccgacaagcggagccccgaagcgggccaacacgcacaggcgcagactgcgaacgcaagaaaggcggacacaaccagcgctgactgccgcgaggacggaggacaacgagcgaaagacaagaagccaccgggggcaaaacaggcacgaccggaacggccacgaacaggaagcgagaggcgcggccagtacgaaaaccagaaccccagaggcacgccactggccacacacccccgagaccgaaaccaacgaacaacaacagaacactgggaccgaaccagcaaagccaaacccacccccccaaaaacaggcagcccagcaggccacccgagaagagggaccggacgggccctggccagccccaaagggaccaccaaacccccacccccggcggcaggcggaagcaaggcagcaacccaaaccacaagaaaacaccccaaatgagaagcaagccggaacccccccccaacaaaagccggaccaaagcccgcatacgaacccaaaaacgtggcacacaggaaaacgacacacaccacca

SEQ ID NO: 21901 - DNA, 605 bp, Emericella nidulans
atgccatgaaaagcatgtaaaacaaaacaagaattgattgagcaagagggcaggatccaatgcgcgataaataatttaaaaaataaaaaaattcctaatccttgtcaagctgtattaatttacaatctacctccctaaatcttatataattagttaaagagactttaatctcaagcagaactctgcaactatagatataggctatccctatattaggaagaggtattagtagtatagatagtattacttgatatatatagagtaccccctaggtacttctaagtataagatatagtataaattatcctagaagctgattcctctacctcctcttaactagttagaaagaactaggttatagagtttactaagtactgcccagagattaaaagcaggtttacttaaaaaataaattactaaagaactctttataaagatcctaaagttattagtaaatagtttactaagttatagagggttaaagcttagtaagagatctagaataaagatatctataattttaataaaactggctttgctatgggacttattataataataaaggtagttactagagctaaaatatctagtaaactatagcttat

SEQ ID NO: 21902 - DNA, 490 bp, Emericella nidulans
ccgcatgctcgatgcgaaccacggccagcccgtaccggaatggcgtctcactccggccattgtcgggtccgtcgcgttctcggccggcctgttctggttcggctggtgcgggtacagggacgatgttcactggatggcgccagttgcatcaggggtgctcactggtctcggcattttctgtattttcttgcagtgcttcaactatatcgttgactgctatcctacgttgtaagtccgtcgccgtctcctgcccattcttctctggactaaccataacagcgctgcgtcgacaatcgctgcgaatacgatcctgcgctctgcgttgggatgtgcgtttccgttgttttcaaggcagatgatggagaacctcggcgttcagtgggctggcaccttgctaggatgtatcgctgctgccatgattccgatcccggtgctgtttcgtatgtacgggccgtggctgagacagaagagcaagctggcttgcgcttcg

SEQ ID NO: 21903 - DNA, 587 bp, Emericella nidulans
accagactgcatatgagcttacctgctataatcgctacaccgattggattgcttgtctttggtattggcctagcaagagtaagttaagagcttaggtttgggcctagtcaaagtggtggctaatggtagcagggttggccgtggtggtcccttgctctaggtagtgcagtctttgctttgccatgttctgcatcggcgcctgtgcacttacatatcttgctgattgctaccaggaagtatgctcgtctagccttttgcctctatgttctgcatatcctgacgaagcgtgagtagataattggtgatgccctagtgggtgtcgcattcgtccgcaacggcttggcgaccgtcttcgtttttgcactgacaccgtggatcgaagcttcgggtttaatcaatatgtttattgtggtagcgtgtattgcgacggccatgacgctgacgattatcccaatgatcgtatttggtaagcgcctaagggtctggacggaggtgggatatcgacagatggcagcgttgcagcctggaattaggaggctttagttggtgtaagcccttaagggccaatttcaggtattttggtgagg

SEQ ID NO: 21904 - DNA, 850 bp, Emericella nidulans
aggatgccggcatgagtgtctacttggacttgcatttgagtgatacgtgggcggacccgggagaccaggtatatctatatccattctatacttccaagatgagctaaactgagacgactactgtacaggcaaccccctctgggtggtcaacaaccgacatcgacaccctggcttggcaagtgtacaactacacactggacgtgtgcaacaccttcgcagagaacaatgtcgccgtcgagattgtctccatcggaaatgaaatccgcaacggcctccttcaccccttaggatcgacagaccactacgacaacattgcgcgcctcctgcactcgggcgcctggggcgtcaaggactcttcgctctccacgacgcccaagatcctcttccacctcgacaacgggtgggactgggatgcgcagaaatacttctacgacaccgtgcttgccacgggtacactgctgtctactgattttgaccttattggcgtatcgtactaccccttctacaatgcggatgcaacgctctcctcactgaaaacgagtttgacgaacctgaagtcgaattacggcaagaatgtgcttgttgtggagacggattggccggtgcagtgtagctcgcctgagtatgcatttccgtcggatcttagttcgattcctttcagcgccgatgggcaggagacttttctgggcaggttggcggacacctggaggatgtcggtggtgtgggaatatattattgggagcctggctgggtggacaatgcggggctgggatcgagctgcgaagataacctgatggttgactggagggacaggactgtgagggaaagtataagtgtttttggtgatctg

SEQ ID NO: 21905 - DNA, 850 bp, Emericella nidulans
tcccgctcaagagcgccttctattcattcacgagcttgaaggtggaggcaatgcatataatatcgatgctgcctttgagctacctccatacattgatcaatctcgagtcgaagaggcattatataccattctttcaagacacgaagccttacgaacatttctgctgcgggaccaggcaactggcacgttctaccaaaagatattgactaccgatgaggccaagtgcatgttgatcattgagaaaagtgcagtgagcaccattgatcaaattgattccatagtcggacgcctatcgcagcacattttccgtctcgattctgagcttccctggttggcgcaaattgtcacgcacaaaacgggcaatctttatctgaccctgtccttccatcacacttgcttcgatgcatggtcattgaagatcttcgagcgggagctccgcgttttttgcgcgtcaaacgaaaaaggcggcaacatgccaatcctaccaatgcctcaagtccagtacaaggagtatgccgagcaccatcgtcgacgactaggtaagaatcagattcaaaaattatccgacttttggctgcaaagactagacggcctggagcccctacagctcctaccggattatccgcggcctgcccaattcaactacgatggaggtgacctctccgtcattctggacggtgtggttctggaaaccctcaggggcattgcaaaagaccacggagtaactctgtacgcagtgcttctcgctgtttactgcctgatgctttcgacatatacacaccaggtagatatcgctgtgggagtccccatcagtcaccgaacccaccccctgttccagtctattgtcgga

SEQ ID NO: 21906 - DNA, 473 bp, Emericella nidulans
tacaccccaaggactgggcgaatccagggcgagttcgtgtgcaattacaggacgagaacggggaaccggttacttcacacatcaagaatagtatgtctactttatggcgcaccttcaatctcgccggtttcttcgacaaattgagccccgcgacttattgctaaccccacccagagcaccacctctatatcctcatcgcgcagtacctcaaagcccacccgacaacggatcaatcgccctaccgtttgcgcattcgaggactcccaatgcctgagaaactaccagatgccccccccgcgcctcgcggctggaaaattggtaaaatcctgcccatacactccgccgcatatagtggtggtggggttagcgataaccctctaaaagacgctatggccgagatgcagaatatgcagggaatgcccggtatgccgcaaatacccggaatgggaaacttggcaggtatgatgggcgga

SEQ ID NO: 21907 - DNA, 502 bp, Emericella nidulans
tcagttgatgcgcggaggatgtccaaggcggaagcagaacgtgcccatgctgtccagctcatttctcaaacttgtgttcggcttctgcgaaagacgttactgcaagttcgagttgctgttgaggtgatacattgcaagagtcccaagaatatgatcacggaagctggacgtctaataactttcggcatttgataccgtccaaactgacaccttgactttagatacgatgggctggaccctacgctcgtgggcggtggggctaggggaccaggggcgctgaaagggtaagattagtattcgccataacttgtaccttgataaccaactaatatgttcttctagcgtactcttggggtctttttcaaactatctggttcagaattcgtctgttccagttatggttgcgcggaagaaaccaaagaagaaatccaagaacaagacaaatgtacgcctttccaacaatctgacgacgccgaagaagctggcggcggcaagggtagac

SEQ ID NO: 21908 - DNA, 587 bp, Emericella nidulans; identical to SEQ ID NO: 2030

SEQ ID NO: 21909 - DNA, 372 bp, Emericella nidulans
tcaaccgtcgcaccctgttccagccgtaccgagactcaccgtcgccccgaaggcgtggatacgtctgatatgtcgaatcaacatatttacgaccatcatgagcgggtaatgcgggagcaggacgagcagctcgatcgattgggcgagtcgatcgggagacagcatcagctgagtattcaaattggagacgagctcgacggccatgtggcgctgctggacgagatggatggcactgttgaccggcatcagagcagattggataacgcccgtcggcgcatcgacaagatccgcaggagtgctggagagaattggagcatgatgacgatcatcggattgattatcatccttgttatcttgatcgtcctgttaaaa

SEQ ID NO: 21910 - DNA, 500 bp, Emericella nidulans
ggtggacttcgtattgcgattcgtattgcgatataggtatcaaaccacgtggacgtgactgtggccgtggctgtacactgggtacgggacaccataaacgaggagatacgaggcaactctgtcatcactcctgcatcgtgtaaaggcgattccagtccttccatacacaattttccggtaagcccctgcgatggcgctcacgaccgaagaaactgcgctggtcgaaacagccactgtgacaatcaacagcatcccagtttctgaagactacagtgtcgcgagcgccgccctctcctccgatggacgcatcttcaccggtgtcaatgtataccatttcaccggcggtccctgcgcagagcttgtagtgatgggtgttgcagccgcagcaggagtgacgcatttaaaacacatcgtcgccgtggggaacaatgatcgcggggtcctgagtccatgcggccggtgtcgacaggtcttgctcgatctgcagccgggagtccgag

SEQ ID NO: 21911 - DNA, 500 bp, Emericella nidulans
gtcctccgcattgattctgacccaagatacctcacagtctgatgggatccggccaatttgacaaagccgccatcctcagccctgacttctccggcgttgaggcttcgtctcccggcttcacggtacgcattccatatccccggccagcttccgcggcgagcttccgcctcctttccgaccggccggatcgtcttgtctcgactatcatcgctgaccacaaagacagatctcgccccaggaaatccaaggtatcggatctgcctttggtgacagcacctgggccatgcagaacggtgtcacaatcggtggagagaagttcctcgctattaaagctgatgaccagagtgtttacggcaagaaggtaactccttgaccataagatactacccatctggcttgggcagtactaactgagataaattctagggcaaggagggcgttgtattggaagacactttcttgatatgatcggcacacaccgaggcgtcagacaccacgcg

SEQ ID NO: 21912 - DNA, 512 bp, Emericella nidulans; identical to SEQ ID NO: 6855

SEQ ID NO: 21913 - DNA, 850 bp, Emericella nidulans
agctgggctctgatgtcctaggggaattctgtggtaagttcaacatcacgcctgctaatatttgccaggtagcatgggcactagtgctcaggtcctacaccgggttggaagatgtgtgtttctcgtatgcaacgtcggggcgggatgttcctcttaaaggaatcaacaatacggttggagccttcctaaacgcagtggtctgtcgcatcaagctgccgcctactgcaacagttccgcaggctttggtgaaagctaggaacgacttcgtggaaagcctctcacatcagtactacttagccttggatgatgcgcaatctggggactttgcccgtttcaagagcaacacattaatgtcatgccaacgaaaagctgcaactgaattagcgggatctgggcttgcttttgagcttgttgatgctgccaaccccaatgaagtaagtagtgattatatcccttacagtccattcgacgctaacaagtgcgcaagtatgacatgtccataaacatccaagtagggcatgagggattggaagtaatgattgattactggaactcacggattggccagcgcacggtggagagtgtggcacaatccttccggcaggcgctcctgaacatcgtcaaagaagaagatgccgtgctgggagagattgatattagtaccactcaagaaatcaatcagcttcgtgaatgggccaaggagatcccaccaaaggcagactatcgtatccacgacaaagtgtatgaacagcgactccgccgacccgatgcttgggctgttcagggctgggacggcgacttaacatatcagcagctggacgacccgccgaagtagttgcaacaacctcat

SEQ ID NO: 21914 - DNA, 850 bp, Emericella nidulans
tagcgctgagataagggatgctcatgcgcgggatacatggaccagtgggattgatgtcagtgcagatggtaggcttgttattaccaagggtggggacgacacaattaagctatgggatacgaggaagttcaaacaaccgatcacgactgtctcgcacccgtccatctcttcacgatatccgacctcaaacatcgtcttctcacctacctcggcaaacgttgttactggttcagagactggacatttacacattctgaacccagcgacactgaagcctgaattggtcacgccagtcacgccaggatctcccttgatcacagtccaatggcacgagaaacttaaccagatcctcactgggtccgcaaacgcagaaactcacgtgctatataacccgaatatgtcaaccaagggcgctgccttggtcatgtccaaggcgcctaaacgccgccacattgatgatgacccaaccttaactatgaacctttcgcaaggtatctccggagactcggtggtggtcggatcgaacggcgtgccgcactacagctccgctacgtggtccgcacggcaccctaccatcggcttgacggcttcgggccgttcaagagatccccgtcggcctcacttacccgcacaaacaccgtttgcgaagtcgcaaccggacgagagacacatcagggagaatatcccgcttagttctatgcgtgatgaggaccctcgtgaagcgttgctgaaatacgctgaaaaagccgagaaggacccgatctttacaaaggcgtggaaggaaacgcagccgaagccaatttatcgggatatcagtgatgatgaagaaccggaaccggataggaagaag

SEQ ID NO: 21915 - DNA, 850 bp, Emericella nidulans
  unsure (1)..(850): unsure at all n locations
cgcagcgatcatgttcctgctcgccctcgaatacggcgggaacgagtacccgtggtcttcgtccagggtgatcggtctctttgttggagctggtgcaacggccctcgtcttcctgggttgggagtaccgcaagggcaaagaggcaatgatcccattccatctgctgacgattcgcatcgcatacacgagctatatcgccacgggtgtgatgttcgggctggcgatggcgatcgcttactacgtgcctatctatttccaggctgttcgagacaactcgncgctcatgagcggtgttgatttcctcccatatgttcttggccaactcgtagcggctgtcatcacaggagttctcagtacgtaactccatcatcgcactgttcttggtttgttgcgtgcaaaggctcatagttgacactcgtatcagttggccgactgggctactacctccccttcgccattgtcggtgcaattctcagcgcagtcggctccggccttttctccttgctatcccccacaacctcaactgttgcctgggcggcataccagatcatcctcggccttgggcggggagcatcaacgcagcctgttcgtctactctcacccaaatcgaacctgagccctacccttgaacccttacaagactaagaggtgtatgctaaccagagcggccatgctagacccttctcgctgtgcaaaatggggtagcagccgacgacctctcaacagccatggcaattctcacattcagccagacatttggaggaagcgtgttcctcgcggtagcaaaagtcatcttctccgaggggctgaaatcgcagatcccgcggtacgcggggggtgttataacacg

SEQ ID NO: 21916 - DNA, 783 bp, Emericella nidulans
ctcttcaatggacagggcagcgccccggctccctttgacgtgctgacctcagccttgtcttttcccaccagagaccaggagcaatggtggcgcaagaccggcccaatgtttggtcagatgctcgcctcgtctggctataccctcgatcagcagtatcggcacctcaccttctactacaaccaactcgttccccgcctcggccctcacccagcaacattccattccagtctgactgtcagcgggttacccatggagttcagcatcaactaccagcaaaagggtgcgcatccaatggtccgcattggcgcggaacctatcgactccttttcggggacggaacgggacccatttaatcagatcccgccggccgagatggtaaacacttctccagagcgggagttaaaggattcgatccggagctttatgcgtacttcgagccaaagcattctctaactcgtgagcagcaagccagactaccgaaagaagtacctggtggtgacaagttaaagacgcaatatgctttcgggttcgattttaagggtgatgaggtttcactgaaggggtatagctatcccgggctgaaagccacaatggcaggccaggaagttgcgaagctcgtcggagacggggtcaaggacctgaaaaaccaaggcaaactggactgcaccgaggcctgggcagctgtggaagcctacatgactgaactcaacaactggggctaccacaacctctgggcatgggattacgtcacgcctgcgaaatcacgtctcaagttgtattccc

SEQ ID NO: 21917 - DNA, 850 bp, Emericella nidulans
cgatcttccgccgcgccttcgcgtcgcgtatcttcccacctgatattgtgcagaagcttggtatccagcacgtgaagggtattttgctcttcgggccgccaggaactggcaaaacgctgctagcgcgacagatcgggaagatgctgaatgctcgagagccaaagattatcaacggcccggaggtactgaacaagtttgtcggacagtcagaagagaacatccgtaaactttttgccgacgcggaacaagagtataaggagaagggcgacgaaagtggactccacatcatcatcttcgatgaattggatgctgtatgtaaacagcgtggcagcggagcaggaggcggcaccggtgtcggtgacagcgttgtcaaccaactgctatctaagatggatggtgtcgaccagctcaacaatattctacttatcggtatgaccaataggaaggatatgattgatgatgctttgttgcgacctggtcgtctggaagtgcacgtcgaaatctcactgcctgacgaagctggtcgagctcagattctcggcatccacacccagaacatgagacagagtgatctaatggatccaagcgtcaatttgtcggaactagcgacgttgacgaagaactattcgggtgctgagattgctggcctcgtgaaggctgctacgtcgttcgccttcaaccgccacattgactccggtaagacagttagggttaaggacgatgccgcggaaatgaaggtcaaccactccgattttattcatgctcttgatgaaatccagccagctttcggtgtgtctgaagatgaaatcaagagatgcattgaacataaaatcataaattattcggacaa

SEQ ID NO: 21918 - DNA, 396 bp, Emericella nidulans
ctcgaacgcgtgtcttctcaagcggggttcctgagtaaccatcatccggtcgtctttactgaagcgcatgcctcgctacatccaatgaccgcgtcccactccgcttcaaagccagatagcctctcaccaccaatacctctagcgagcaaaccatcattgtccgctttggcgggtaagaaaaaacccccgcctcctcctccaaagccgcgcagtgcgtcctcgaacatgttcgtaacagcgctctatgatttcggtggacagggcgaaggtgatctggtgtttcaacagggcgatcgcatccgtgtcctgaagaggacggatagtacggatgattggtgggagggtgagcttcgtggtgtcaagggcagttttccggcaaactatgtggagtaattg

SEQ ID NO: 21919 - DNA, 850 bp, Emericella nidulans
tccctcctccaacccacgctccgccagcgcggcggcgtatgtaccccgcctcgtagaactagctatccgcggcgccgacgccgtagacaacggcagtgaaaacacataccgtgtcatcatcagctctttactcgatagctccctcctatcttcaatcctcgaaggcctctactccgcttatgaatccagccaaacaacagggccgaacaaaaaacaaacgagcatctacggtggcgttgaaacagactacttctctgtccttgcacgtctcgccctcgcacacccgacgctcttcgtttccggcatcacacccgcttactccaatagcaacatcagcaacaacagtcaaactccagaacaggcgcaggaacatctcatcacctggctcctaaccgaatggtttctgcactacgacaacatcggcaccgcaacgcagaagaaactgcacgcgctggctttaacccagcttctcaccctcagtgggcctaatacccagccaccggcctatatcctaaaccacctgcaatcgtacctcaatgtttggacggatattattaccgagttggcggagggcacgacggagggtgatccaagtgatcctcgcggtggggattatctcatctactggaataatgcgcagacggggacatatgaagataacgagccgccagaaaacatgcgacggcgtgagtgggaaagctcggatatcgttcacaagacaaacattcgagagtttgtgcgcgacgggctgcagtccttgattgtgagttgtggtggtgaacagcggttccaagaggattggctgctcaatgttgatcgagatgtggttgcggcttttgccgcgctgcgg

SEQ ID NO: 21920 - DNA, 549 bp, Emericella nidulans
acaccatacctgatatacaggcgattactgcgatgtctacctgacgcacgactcaatgagcgtgcgcaaggcgcacaactccggacgaaaccacctaaggaacgttgtggaatattatcaacgtatgtcgcctgacatgccaatactaatctgtggtggcctgcaaactcaagctcacaactgcattgcagaaatcggacaggaaaaggcacaatcagtcatcgattccattacgtcctcatacgccgctgaagggcaggctgtgccaaacccagctatggttcccccgggtgcttacccgccttcgtttgggttcccaggtgcgtagtctctttgaccgcgaaaacatgagaactaatactgatacccttcattaggccaatttccttcttccccaattggaaattcttcttctgggccaaggggtgccgtcatgccaacacttacgttttgggctctttggttttaaaccaaaacactaaccttataagccccggagccgaaaccttcctttccttcaccgtttccacgtcgttcggtccatgggga

SEQ ID NO: 21921 - DNA, 507 bp, Emericella nidulans; identical to SEQ ID NO: 14641

SEQ ID NO: 21922 - DNA, 331 bp, Emericella nidulans
cacagttcaatgggccgcaacaatccttccacagcttgcttctccgtctaagaacctctctcaacgccgcgttgggttcacgattgaaaagggctcacctgcgcgtgagggtgctgtcattatcgacttgaacgatgagtctaagactcagattggcgttatcacttctgggttgccgagtccatcgcttggtggaacgaatattgctatggggtatataaagcagggattgcataagaaagggacggaggttggggtcgtagttagaaataaggtgaggaaagcgacggttgttgggatgccgtgggtggagagtaagttttaccgcaag

SEQ ID NO: 21923 - DNA, 746 bp, Emericella nidulans; identical to SEQ ID NO: 14089

SEQ ID NO: 21924 - DNA, 801 bp, Emericella nidulans
cacagagacctcgatcatggttctcaggccggataatggtgacttcgctgcagagttccgcaggactcacctccgcgagttctcgttctgctttccggataagaagcctatatatgtcgatgatgtccgagtccgcggtatcggtgcgagcgaaaggaaggactgggagggagatcagctgggacagcagttgcgtgagacgaccttcaggcctcctgcaaaggggtaccttggaaggctcttgacgaatcaggtatacttccccaaactgggatatcaagatacgcccgtctatttggtgcagaatcttccagcgggtctctcaatagatggaccggccatcatcgtcgatcagacgcagacccttgttgtggcaccaaacacggtggctaaggtgttgcgctcgcatatcgttatcgaagtcttgtctacggcctctgctgtgacagaacagccaacaacagtggaccatattcaactctctgtatttgggcaccgatttatgagcattgcagagcagatgggacgggcgttgcagaagacagcggtttcattaaatatcaaggagcggcttgatttctcgtgtgcactgttcggaccagataggtagaatcctctccagtatcacatccccctttccttctctctaatagatgaacaggcagctgattaagcaggtgacgtcgttgccaatcgtccgcatgtcccagtgcacctgggctcgatgagctatgccgtcaaacatcagcacgagctccacaaaggcaagctcgtcccaggagacgtcttggtgacaaactc

SEQ ID NO: 21925 - DNA, 573 bp, Emericella nidulans
tttagtcccgaacaggacacaacaccgccaggcgggggccccagaaaaaacccgggggggaacacaaaccccaatcacaagtaaaggaaacaaggagaaccgccgcgaacaaccaaaagaagaccaccgcagaaaccgccatggcggaaccacaccaaaagacgaagagaccgcacaacacaaggcgcccgagcgccgggggtgaaaaaacacagggaagagcgaaacagaaagacccaggccagagagaggacccacaaacccgaaacaccacggaaggccctggtcagaaccagaacccccgaaccactaacccccacaggcaaccctcgcagcaacccgagaaccacacccggtaggaaaagcacgacgaaccccgggacgaggaccagcactaacagaaggtcacacaactcagccaacccaaggaagcctggccaacaacactccaagagccaaccttaagaacacaaaaacaggggcaaacccgggaaacaggaaacagcaaagccaccccccaaaaccccggcaaccctctagaaaggccctaaagccaaaccccagcgcggccaa

SEQ ID NO: 21926 - DNA, 662 bp, Emericella nidulans
catacagatccatccttttcttttcgatcaccagaaaaccggggtccaatggatgtgggagttgcaccagcagctagttggaggtatcatcggtgacgaaatgggtctcgggaaaacaatccaggccattgcatttctggctggcctacattatagcaagaggttgacgaagccgatcatcgtcgtctgcccagctactgtaatgaaacaatgggtcaacgagtttcaccgctggtggcctccattccgtgtttctattctgcatacttctggcagcggaatggtgaacataaagagtgaaagcagccgcgaggacgcacttatgtatggaacctactggtctggtggctctagcagcggcttgaaagcggcgagaaaagttgtcaagcgagtagttgaagaaggacatgtgctagtcaccacttattcgggcttgcagagctacgcttcacttttgatacctgttgaatggggaggtactatcctcgacgagggccacaagattcgcaatcccaacacttccatcaccatgcatgccaaagagcttagaacaccacatcggattattctttcgggaacgccaatgcagaacaacctgaccgagctatggtcgctattcgattttgtcttcccaatgcgtcttggcacgttagtgaattttc

SEQ ID NO: 21927 - DNA, 850 bp, Emericella nidulans
caacgcgacgtaccttggcctgctacctccccagactaacaatgttgccagcaactcctatgcctaccgtgggtaccatgaaacagcctggatcatcaatcgctttgcccatgtctcccgcaaacaccaaatgcccgatgtttgtattgcccagctcagccgcatatacacgcttccaaacatcgaaatccaagaggcgttcttgaagttgcgtgaacaagccaaatgccactaccagaatcccaaggaactcaatagtggtctggatgtgatcaacaacacgaacctcaactacttcggtgcgcagcaaaaggccgaattttacacgctcaagggcatgttcctcgcaaagttgaaccatgtcaacgaggccaatgaagcatttggtgttgctctttattacgatttgaggttggctaaagcgtggtctgaatggggtcagtacagcgaccagagattcaagaacgatcccagcgattatgagctcgccagcaacgctgtcagctgttacctggaggctgctggcctttacaagaattctaagtccagaaagctactcagtcggattctttggttgcttagcttggataatgatgagggagcagtcgcaactgccttcgagaacttcaaaggcgacacacctgtttggtattggatcacctttatccctcagctacttacaagcctatcccaccgtgaggcgcgcctgtgcaaagctgttttggtcaagactgcgaagctgtaccctcaggctctgtttttcttgctgcgtaccaacagtgaagatatgcttaatatcaagaaacagcatgaccagaagcaagagaagctagcacgagcccgggggcgt

SEQ ID NO: 21928 - DNA, 850 bp, Emericella nidulans
tgaagcacccctctagccgccctattcgtgttctttgcctggacgtcggcctgaagttcaaccagctgcgttgcttggtcgctcgcggcgtcgaggttctcgtcgttccctgggactatgatttccccacacttgctggcaaggactacgatggtcttttcgtttcgaacggtcccggtgaccctgccaccatgactacaacagtcaacaacttggcgaagactatgcaggaggcgaggactcctatctttggtatttgtcttggacaccaattgattgctcgctctgttggcgctcagacgttgaagatgaagttcggtaaccgtggtcacaacatcccttgcacgagcttggtgactggaaagtgtcacattacctctcagaaccacggttatgccgtcgattcttccactcttccaagtgactggcaagagctcttcgtcaacgcgaacgatggtagcaatgagggtatcaggcacgtcagccgaccttacttcagtgtccaattccaccctgaaagcacacccggtcccagggatactgagtacctctttgacgtttttatcaacgctatcaaagacaccatcgcctcgccagaggcccttcagaagcctgtcaacttcccaggcggcgctgtggccgaaaatatcaaggcctctccccgggtctcagtcaagaaggttcttattctgggaagtggtggcttgagcattggtcaagccggtgaattcgattactctggaagtcaggccatcaaggccctgaaggaggaaggtatcaacacaattctgatcaaccctaacatcgctaccatccagacctccgagggtttgcggataaggtgtattgc

SEQ ID NO: 21929 - DNA, 850 bp, Emericella nidulans
tttggcgatgagccgaacgatgcagacttcgtcatggacggcctaaccctctcagaccataccccgatgcccagtcttctcgaatacgcaaagattatccagcccgtctcggtgaatctgacggatgactcaagcagcatggtcataacaaaccactatgccttcgtcgatctcagcggtctcgatgtttcttggcatattgtccaggatggcgaaaccacagaggcccaagagctagatctgcctcctgttcctgccggagaaagccgcactgtggacttgccactcgatccgtcaagcctttcgaaagagacatggctcaccatcgagttcaagctcaaagaagacaaagcttgggcagttaggggccatgtcgtcgcctgggaccagctatattttcccggctcttctgcttctacttcctcaagcaagcgctccactccgatctctcgccagacttcgggaggcctggaagtcaaacaaaaccaaacaagcctccgaatcataaccggcacatcaatctttggcttcaacctgatacaaggaaacgtcacttgggaagccaacggcgcaagccttttccagcgcgggcccgaactctccttcatccgcgccatgacccaaaacgatgaaggccaatccggcaacgaggccgagtgggacgacgcatgggtcggcacgatgcacacccaagtccgcgatgtcacctggcggagctccgacactgaagcaatagtgcacttcaaagtccgcgtcgcgccgcaagtcctcgaatggggcgtcgaagcagacctcatctacacgatatccacagaggactctgtaccaacactccacattcacgccaccg

SEQ ID NO: 21930 - DNA, 818 bp, Emericella nidulans; identical to SEQ ID NO: 7743

SEQ ID NO: 21931 - DNA, 850 bp, Emericella nidulans
cgaactggtactctgccgtgccaaccatccaccaaattctgctcaagtcgccgctgcccaaccctattcctcaaatccgcttcatccgctcctgctcctcgccgctgtcaccaaaaaccttccaggatctagaaaaaaccctcaatgccccagtacttgaggcctacgccatgacggaagcggctcatcaaatgacgagcaaccccctgccccctgcaaagcgacagcccggtagcgtgggtattggtcaaggcgtcgagattaagattcttgatcaatccggaaacgaagttccacagggacatgaggcagaaatctgcgttcgaggagaggaatgcacgaaaggataccttacaatccagctgccaataagtcatctttcaccaaagacggctttttccgcacaggtgaccaaggcaagaaggaccctgacggctatgtaattatcaccggccgcatcaaggaacttatcaacaagggcggagaaaaaatcagcccaatcgaactggacaacacgcttttgcaaaaccccaacgtcggcgaagcggtctgcttcgccattcctgaccccggtcactacggcgaagacataggggccgcggttgttttgaagagcggtcagaatgctactgaagatgaattgaagtcgtgggttcaagagaaactggctaaattcaagaccccaaaacaggtaagccagctatctctctgcccctgaccgggctgttgcatctttactcacatcaatgccttgaagatctggatagtacagcaaattcccaagacggcaaccggcaagattcaacgacgcaaggttgcagaggcgatgctgaagcccaaggctaagctg

SEQ ID NO: 21932 - DNA, 850 bp, Emericella nidulans
cggctccgagactgttatcggaggctcttatgcagatatattcgaggctaaagcaagggggagagcaatggcgttttatatggccgtaggtccctcaaccctaatagctcgctcgctgctgactgtgactaggtagcgagctttgggcctatcatagggcccattatatctggtttcgcatccgagcatggctggagatggagtttctgggcggatttgatatgcgctggcgtcaccctggttggattgatcttcttgccaggtacgttttctgaccacgccctgaaattataactgactggacactagaaacattcggcccggccatcttgaagcgtcacgctgcagaattgagcaaaatatctggcagggagatgtcggcccccgtatcgaagttcgataaagacctcaaaaccatcttcctccggccgatgtatatgttgatctttgagccaatcatattgttcacgtcgctatacgtcggcatagtctatgctcttgtatttttctacttccaggcctacccgatcatcttccccgaggtctacggctttaccatccaaacagcctctctcacgttccttccacgtatgctttaccaatactcctaagctcacccatactaacgtggactcttcagttggaatcggcgcggcctcgactgccctcgttgccataacctgggactccaagtattcgtccgccctactccgcagtaaacgcaaaatctggttcttccccctatccttcagtcccgaaacgcaccgtctaccaatatcctgtgttgggagcatcgcaacaacaaactcgcacttctggcttgcctggaccgccaatccaacaatccact

SEQ ID NO: 21933 - DNA, 622 bp, Emericella nidulans; identical to SEQ ID NO: 8280

SEQ ID NO: 21934 - DNA, 850 bp, Emericella nidulans
ccatctccgttggtatggttggcaagaccactggcttcagcaagtcatggaggctcgtaatgtcgagttaagacttcgcgtcataactaggctatggggtcttgccattacctttgtcagtacctttgctagcggcctctttcccgtcgtggctctttatgcctatacgctgttggccggccatccgctaagcattgacattatatttcccgcactacaactcttcactatgcttgaggctcggcttagcgaaataccgagtttgatcactgtgttaatcaatgcgtctattgctatggagcggatagaagactttatgactgagcctgataaggaaagcagggctgtcacatcgttcggagattccgctccactacggctgcagtcttgctcctttgcttggcctggaaaaacctcacctgtcctatctgatatcgacctgagcttctctccgggtctcactgttatctacggtaaggtgggatctgggaagacagctctcctccaagcgctcctgggcgagctagacagaacaaaaggaacttcctgtatatccagtgaaatgatgggatattgtgcgcagacaccttggctgcagagtatgagtatccgggataacattttgttctcctctccgtacgatgagcagcgatacaagcgagtattagacgcttgtgcactacttccggatctgtccaatttcaagcacggcgacctgtcatttgttggtgagaatgggatagggctttctggaggacagaaggcacgcgttgccctcgctagggcggtttacagcacggctaggatattgctgcttgacgatcctttgtcagcactggaccataatacg

SEQ ID NO: 21935 - DNA, 850 bp, Emericella nidulans
atgaaaatcattttttctcttgcattctcaaggctttagacagccactgatacgatgcaggcctcccccaccccacccttttccctctccacactgcgagattcgactgtcttcctccctcatcgtcaataccagaccctgacaagggtggaacacctgatgacccggtatccctcatgctaggtcgtaactcgggtcctggcgaactcgatttgacgcagttcctgcaatatggtaaccacttctctcatcctcattggtgataatgtgttgaaatattgactctaataactaggctccggcaccggaaacgaacacctcatatccctctgtaaagaaataacaaacaaggtccattcacccccttgtgaatacgagtgtctcctgcaccccggcaacaccaacgcctgggccaaggttgtcggcatgctctgcgaagatgacgattatattctcgtcgaagaatacacatacccgtctgcgcaggtgctctggatccctttgggggtaagggctgttcctgtctcggctgacgcacagggaatctcggccatcgtgcttcgggatgtgcttgcgaactgggatgaaaagagcagaggggcgaaaaggccgacggtgtaagtgccgactgcgaccagtctagttgagctgggtaggtagactaactgtgcaggctgtaccttgttgccgtcgggtccaatcctacaggtctgtcaatatcagggagagaaggaaggagatctacgaggtttgcgtcgagttcggtatgtcctacatcccgaataagcgcctatctaacagaatatcctactccagatatcattatcgtagaggacgacccctactactt

SEQ ID NO: 21936 - DNA, 538 bp, Emericella nidulans
atgcgaggtagaggactaataactaacatggtctcatcctgcagctgtcttacgggccgggctccgccgaaagagatctcttaaagtcagctttggctgagatggaaagtgtagtcaccgatattcccagtatcatcaacggcgagcgcatctacaccggccgcaagggcaaacaggcaaatccgtggaacaaccatggccagccgttggccgaatactacgaggtggatagcaacactgtcacagagaaggcgatcccaggcgctctagaggcaaggaaggtctgggccaacatgcctttccgggaccgggctgcaatctacaaacgcgcagccctgctagtcgagactcccaagtaccggtggaagctcatggcagcggcaatgatcggacagggcaagacttgtggacaggcagagggcgactgtatcaccgaagtcatcgatacgctgaacttccacgtctacttctgcgcccagctctaccagcagcaacctcctaaacagtttgcttcatcgtccagcaagctggattacag

SEQ ID NO: 21937 - DNA, 850 bp, Emericella nidulans
acaaaattaccttccttcatgggtattgttcccccacaaccactcgcatctggcctcctgagctctgaccgattaaggtgattatgtcgacccgtggctactacttctgtcgagactgtaacactccatgtttgcttgaaaatccgctatccccagcgtatcaccatcctccgcggaaaccacgagtcccgccagatcacacaggtgtacggtttctacgacgaatgcctgcgaaaatacggcaatgccaatgtctggaaatacttcaccgacctcttcgactaccttccccttaccgccctcatcgagaaccagatcttctgtctgcacggtggtctgagtccgtccattgacactctggataacatccgatctctagaccgaatccaggaggttccccacgaaggtcccatgtgcgatctgctctggagtgacccagatgatcgttgcggctggggaatatctccccgtggtgctggatacacatttggacaagatatctcagaggctttcaatcataataacggcctgacacttgttgcacgagcacaccagttggttatggagggatataactggtcacaggaccggaatgtcgttacgatcttctttggtacgttccctgggtttgtgtctgatgatgactaacggtgtgagcccctaattactgctaccgctgcggggaaccaagccgccattatgggaattcgatgaacaccctgagtatacgttgtatgtgtcccccattcagccttgacatgacagcactgactctgccagcttacaattcgacccttgcccgcgcgcaggagagcctatggtctcgagacgtaccccagactacttcctg

SEQ ID NO: 21938 - DNA, 850 bp, Emericella nidulans
cggagctgacggtttcgaaggatgcactaagcgctggtgtaatcccgtcgagttttcggtcatactataatggtggtggggtgtttgtcgatgcgccgttgtatgcggatagaggcgttgaggttcttgcgagctacgcggagcgtctcaacgtgaatccgggttctggcgctgcgagagtggtgtattgtcctgttggcgatggcgcggcaattttgactgggccacatcctgagtgagtttttgtcaccatatcgagacgagtgtagctgatgtagcagatttgcggccgttaacctcaatccgaaagctggaggtcccgaatacgctgaagtagtcgaggctttggcagcggacgacaaggcccgtaccgacttcctgaaggcttgtctgtccaagctagggttgcaggtggcgcaggaaacaacgcatgtaccctctctatcgtctctgcatttctcgtctttgtcatctggtgatgcagaacgagtgctaaaatcgcttgaagaactagctggcgacgagggccttttcaaagacgagtacgacacctttagaatcgagaagtggggtacgtataatatgggggccctcacagagtcacttcctgaatccaaggaagcctcatcggaacttcatgagagtgaaggaattgtggattaccagtcaatcgtcaaacgcatcattgttcatgaagatgtcccgtcgtcaaaaacaacgccatacttcaaccatcatgccttttacagccatctgcgggactatcaggcgcagtcgaaggaagaaacttcgcttttcggctcaaatctcttatatggcgaagtcgtaccaggacatcactatattaaag

SEQ ID NO: 21939 - DNA, 850 bp, Emericella nidulans
cattcttggttttcactactgggaggatccaggggctaccaaaacgtggctggccgagggagcaacagggaggttcatcgccttcgtcggaaccctagtcctctgtgcatttcccttcaccttcagccctgaacttctcatttccacgagcggtgagatgcaaaaccctcgaaaagacctcaagaaagcagccaatcgcttcctacttagactggtcgtcttctacgtaggcgcggcattagcgatgagtgtcatcagtccgtcgaacgatgaagccctttctaacggaggcaacaacgcaaagtcctcgcccgtttgtcgttgggatcaggcatgccggtatccgtggtttgagcagcgtggtcaatgcgtcaattcttacaatggcgtggtctgctggcaatgcgtacctctatatgagctctcgcgctctatatgcactagcgatttccggtcaagcacctaaagtctttctgcgctgtactaaaggcggagttccttatgcagcagtgctcgcatgtggcttgtttggctttctagcttacctgaactgcggtaatagcagttctactgtattcacttggtttgtcaccatcactaacacctccggattcgtctcctggatttgttgctgtatcgtgtacctgcgttttcgagcggcctgcaagcgtcaaggtgtgcatgaactgccgtatcgcagttggctgcagccatacggcgcatggtttggcctcgtcttctttattgtcctagcactgatcaacggcttcaacgtcttctttcctggccagcttacagcgtcaagcttcttaactgcttatattggcttaccgcatttgctatcatttat

SEQ ID NO: 21940 - DNA, 850 bp, Emericella nidulans
tgagaccgcgcatgagcgatttcaagcggtacgctgtcaacagcccagccctcgacatggtactgatttatttccgtcaccagatcggagaagcatatcaagtcctcagcgatgccgaacttcgcaagcgttatgatacccacggcaaggaaggggctgtcccggaccaaggtttcggtgcgtggtcagaggactattctcctttacgactcgcgctaataaatcgcagaggacccgaacgagttctttggtatgatctttggtggagacgcgttttacgatctgatcggcgaaatatctttgctgcaagaccttacgactcgcatggaaatcacaacggaagaggcggaagaagatctagctgcgtcgacggaagagaagctgaacatcaatgagcaggaaggcacgtctgtaggtgaaaccaccagttcaggtgcgggctcaagagccagcgcagcctcgccgtcccccgccgcctccggtacaagcactcctcggcctcgcttgggacagcaggctatcatggataagtccgatgaggaaatccgaatgcaggccgccggtgtaacagaggaggagcgcgagctcaggaaaaaggagaagaagaagggcggtcttacacgtgaacaggccgaaagactccaagccttcgaactcgagagacaaaaggcgcgagaagagcgagtcgacatgctggcgacgaaacttatcgacaagatcagcgtgtggacggaaactgacaagggtgccgatgtgactcgggcctttgaggagaagattaagcttgaggtggagacctgaagatcagtccttcggtattgagatctccatgctattggcgctacgtatg

SEQ ID NO: 21941 - DNA, 370 bp, Emericella nidulans
gcgacggtagtatacagagactctggtgcatgtctactcggctgcgaaggccaatccttctctttcactggtatgggcatggcaaccggaagttggtttaccaaagccggatctatgtctgttcctcagcatatctcccgaagaggctgcaaagcgtggtggattcggtggagagcgctacgagaacgaagccatgcaaactcgtgtacgcgagctgttcaataccatcttcgaccttcagcgcgctaccgatattcgaataattgatgctgggaagtccttggcggaagtgtcgcaggatattttaaacgttgtaaccgagcgcattgcaggtgtcgacacggccagtccgctgggaaagctaacatca

SEQ ID NO: 21942 - DNA, 416 bp, Emericella nidulans
agtcaaggcacacctccaatgctccctttcgacgatattcccaaaggtggcacgtcgttctatccatccctctgccctaaaccaagaaattcaccttccagctctccgacataatacgcgcggaatcctctccatggcatctcgacccgtcaagaaccagacaggaccccggttctcagggtgctacaggccctacgatcaatggaagccagttttttatcacatttgctgcagcaccgcatttggatgggtcgagcactgtgtctgtgaaagtgttgaatatgacggcagaagatgagggcgataatgttttgagtaagctggagaaggccaacgttacaaaacacaagaagggaaaagttgttgacccccttgagaatgaggaaacccgagttgaaactcttggcatgaacggg

SEQ ID NO: 21943 - DNA, 817 bp, Emericella nidulans
aagatgcagaacctcaagttcctcatcgccgccgtcagctgcctcgggcgggccttgcagctccgactcctaccagcaactttatcaacagcaacttcaacaagcgtgcttccgttgaagatgtacgtttcaaaccctctgatagtgtgtataggtcgttctgaccatgtttagtccgcctttggctatgccagcctgaacggcggtactaccgacggtgccggcggtaccacaaccaccgtctcctcttacgccgagttcactgccgccgtccaaggcgacgaccccaaaatcgtcatcgtcagcggtcccatcgaggagaccgccgaacaggtcgatgtcggctctaacacctctatccttggtgccgactcttccgccgtcctgaccggtttcggtctccgcctcaaggaggtcgagaacgttattatccgcaacctcggtatcgcgaaggtcttggccgacaacggcgacgccatcggtgctggtatgtatcatgcgataatcacgtaattcagtccctgggctgggatagcctcacccgagactgatctaggacaagcatcacagactaatattgctcagaatactccaacaacatctggatcgaccacgtcgacgtctccagtgaccgtgaccacgacaaggactactacgacggtctccttgacttcaagcgcggctctgactacatcaccgtctctaactcctttattcacgaccactggaaggcttcgctcgtcggccacagcaacagcaacgaagacgaggactctggaaagctccacgttacctacgctaacaactactgggtttg

SEQ ID NO: 21944 - DNA, 850 bp, Emericella nidulans
caaaggtgtcgctgcgtcctgggaagtgaccgagcagatgatgaaagatgccaatctcgagaaactcgagcacgtcaccgtgaccatgaacgtgaatcacacacgccgtggtgatttgagcgtggaactgcgcagccctgaaggcatagtcagccacctcagcacaccaagaaagaatgataacgcagaggtcggatacattgactggacgttcatgacagttgctcactggtatgtaccttctcacacgcagcacctaattctcattaactcataaccaggggtgaatctggcgttggcacatggaccgttattgttaaagactctactgtcaatgacaacgtcggagaattcatcgattggcgactcaatctctggggtatggccgttgatggtgccaagcaaaagttgcaccctctaccggacgaacatgacgatgatcatagcattgaggatgctattgttgttaccactagcgttcagccagcacccaccgccacagaagctccagttaaaccctcacataccgttgatcgtcctgtgaaggtcgagcttacttggacaggctctgcttccgaaactgaaaccccaacgcccaccccgaccccggcctcggacagcttccttccctctttcttcccaacctttggtgcctccaagcacacgcaagtctggatctacgctgcgattagttcgatcatcgtcttctgcattgggcttggaatttacttccacgtccagcgacgtagacgtcttcgcaacgaccgtgacgattacgacttcgaaatgatcgaggacgaggatgaggcgaaggccatgaatgggtcgtcccgtcgccgtggtggtgaac

SEQ ID NO: 21945 - DNA, 850 bp, Emericella nidulans
cgtcggcaagcttatctcctctgccatggagcgcgtcggcaaggagggtgttatcactgtcaaggagggcaagacccttgaggacgagcttgaggttactgagggtatgcgtttcgaccgtggttacacctccccctacttcatcaccgacgccaaggctcagaaggttgagttcgagaagcctctgattctcctttccgagaagaagatctctgctgttcaggacatcatccctgcccttgaggcttccaccactctccgccgccctctggttatcatcgctgaggacattgagggtgaggctcttgccgtctgcatcctgaacaagctccgtggccagctccaggttgctgcagtcaaggcccccggcttcggtgacaaccgcaagagcatcctcggtgacctcggtgtcctcaccaacggtaccgtcttcactgacgagcttgacatcaagcttgagaagctcacccccgacatgctcggctccactggttccatcaccatcaccaaggaggacactatcatcctgaacggtgagggcagcaaggacgccatcgctcagcgttgcgagcagatccgtggcgtcatggccgaccctaccacctccgagtacgagaaggagaagctccaagagcgtctcgccaagctctctggcggtgttgctgtcattaaggtcggtggtgcttccgaagtcgaggtcggtgagaagaaggaccgtgtcgttgatgctctcaacgccacccgtgcggccgtcgaggagggtatccttcccggcggtggtcccgctctccgcaaggcaacacgccgatggccctcccccaagcgtcctgggactattgtgggaccggcc

SEQ ID NO: 21946 - DNA, 550 bp, Emericella nidulans; identical to SEQ ID NO: 6852

SEQ ID NO: 21947 - DNA, 434 bp, Emericella nidulans
acccgaaacttccaaggcacagagatcgcgtccgggttcttcctccctgagatcctaccatggatctgatgtttgaagccaaggataaggagcaggctgttttggagctgatgaggacgtataagctaccaggacatgatcttttcaataatattctgccttatgtgcgcaccgacgagaataagccgttcaaaccgccgcggaagtcgaagaagaaaaatggcgactttgtcgaccttgaagcacaggtgccgcccccaaagactgttcccgaagaggaagtcggcatgggtggcccggagcggagggtctactggcctccaggaatggaagaatggttgaggccaaagaagattgtgcgaaccaaagctctaaagacccccaagtctaacaagaaggccccaccacgagagccagacggggagcttgatgct

SEQ ID NO: 21948 - DNA, 828 bp, Emericella nidulans; identical to SEQ ID NO: 2658

SEQ ID NO: 21949 - DNA, 850 bp, Emericella nidulans
tgagaggaccgtgcggtctaaggaattacacattgcggatccagaggacgtgactatcattttcacggaggctccaaatgctttgccggcactacagaaaaatgcagatgagattataatggaagagtgggggttcgggggctatttgagatgtgttggtaagtctaaatatcttattctttattattgagtgggcatggctaaaccgttcgcgctgaatacaggcccgtcgctgaatgcctggaacgagattcaatccttatttgaagattcggtactatcacaacctcgagccgttgcctccccagccgagtgtctactggtggttgactctgggtattctcacacggttatcactccggtttatagaggcagaccacttcaacgtggaattcggcgactcgaccttggcggcaagcacttgaccaattacctcaaagagctggtatctatgaggcagtataatatggtggacgagacttatataatgaacgaagtcaaagagtcggtgtgtttcgtgagcaatgattttatccgcgacttggagcggacgtggaaagggaaccgcaaacgtggacaaccggatcccactgatggtgttgtagttgattacgtcctgccagatccgaatggaggcaaacgaggttttataggcctcatgaccctttgttaggatccaagaaaagaaagcctggtactggccggcgctagcgccgagcagctaaatgaggacgtcctagttctgggcaacgaacgtttcactgtcccagaaatcctctttaccccaagtgatattggtaaaaagacggctggtataccggatatcatcctgcagagtctctcggtgtgc

SEQ ID NO: 21950 - DNA, 850 bp, Emericella nidulans
cttcactaaacccagcaagcggatcaacgaaagtcaagatgtagctgaatttctatcgtcaaaagcttacgtcgatctcatgaccttcctcctccagctcaaccgctctctatttccgacaaaactacccgatgggcgggtcctaacttgggagctgaacagcgaacgcgttgaatactctgcgcctgtgcgtcagtccagcaactgctctccaaactcgaagcgatcctcgacgaagcgccccccgacactggtccgcgcaggttcggcaatattagtttccgaagatggtacgagatggttgagagtcgtgctgcaagtctcttggaggagtgtctgtcaaaggaaattctacagatgccttcatctgatcctggtgcgccgacgggcaggttgagctgctggcatactttttagggagttgggggagtccacaaaggctggactatggaacggggcatgaactgagctttctcgccttcctggcgggtatttggaaactgcatggttttcccgagaatagcccaggtgtggaggagagggcgatcgtcttgggtgtgatacagccgtgggtatctttcaaacattcttgttgggctatcgaaactgaaagcagtcttccacagatatctggaacttgtccgaaccattattaagcgttataccctggaacccgccggttcgcacggcgtctggggtctagacgaccactcattcatcccgtacatcttcggctctgcacaattggcgcccgcaatctcagaatcagaccgcatcccggaagaaggctcgttatccgatgcacctgcaccaggtggtgtcactaaagcaaatgtggtggacgagaaag

SEQ ID NO: 21951 - DNA, 589 bp, Emericella nidulans; identical to SEQ ID NO: 15169
  unsure (1)..(589): unsure at all n locations

SEQ ID NO: 21952 - DNA, 500 bp, Emericella nidulans
tgccattttctttaccggctgtatatactaaacgtccaagatgtcgggcggtttcgagggctggaaagcctacctctatgacccctccacggcagcggccgccattttcatcgttctctacggcatcgtgacaggaattcatagttactacctcttccggacgaggacgcggtttttcataccgatggtgctcggaggatactgtcagcgccctcccagtgttctgtcaagcactctctaactggagcagttgagtttataggatatatcggccgagcgatatcatctgcccagacacctgactggacgctggggccttatataatgcagagcgtgctgctgttggttgcacccgcgcttttcgccgcgagtatctacatgtacctgggtcgcatcatcgcgcttgtgcggggcgagaaattctcctttattcgcgtcagctggatgaccaagatcctagtattctatagtgtcacctaaatcgtatgtgtatatacata

SEQ ID NO: 21953 - DNA, 850 bp, Emericella nidulans
gtctggtgaaccacttcgtcactgaatttaagagaaagcacaagaaggatctttccacaaatcgcccgtgctctccgccgtctccgcaccgcttgcgagcgtgccaagcgcaccctgtcctctgctgcccagacttccattgagatcgattctcttttcgagggcatcgacttctacacctccatcacccgtgcccgttttgaagaactctgccaggacctcttccgtggtaccatggagcctgtcgaacgtgtcctccgcgatgccaagatcgacaagtcttccgtccatgagatcgtgctcgtcggtggttccacccgtatccccaagatccagcgcctcgtctccgactacttcaacaaggaggccaacaagtccattaaccctgatgaggctgttgcctacggtgctgccgttcaggctgccattttgtctggtgacacttcctccaagtccaccaacgagattctgcttctcgacgtcgcccctctgtccgtcggtattgagaccgctggtggtgtcatgactccccttgtcaagcgaaacaccaccatccccaccaagaagtccgaaaccttctccacttactccgacaaccagcctggtgtcctgatccaggtctacgagggtgagcgtgcccgcaccaaggacaacaacttgctcggcaagttcgagctcaccggtatcccccctgctccccgtggtgttcctcagatcgaggtcaccttcgatcttgacgccaacggtatcatgaacgtctccgctgtcgagaagggtaccggtaagaccaacaagatcaccattaccaacgacaagggccgtctctccaaggaggacattgagcgcatgc

SEQ ID NO: 21954 - DNA, 850 bp, Emericella nidulans
gcaatggctccgagaggctgatgcactctaaggtcgtgatggtgacggtatgctactgctcattctatagtagctcaagcactaaactaacgttactaacttggtcagggaggcacctcgggaattggagccactgtcgtctacgaactcgcatcgcgcggcgcccaagttatccttcttacgcaacacgctcaatcggatatatttctcattgactacattgaagatctgagaaaagccacaggcaaccagcttatttatgcagagcaggtggatctctcttctctccattctatacggacctttgcgacgaagtggattgacaatgttcctccccgccgactggacatgctaatcctttgcgcgaacacggcaaaccccacggaaaagataacggtggatggaatagatgaggaatggcaggtcaattaccttgcaaacttccatctactcagcatcctcagcccagcgctccgagtccagccaccccaccgggatgtccgcgtgatcatgacaacgtgttcaagttacatcggtgcgccgaaactcgacttttcgcagctcgacgtgaataccatcccgatccacaaaaaaacggcgggtacaaaaccgctacgcactcaagcatcaaggaaggcagagcccaaacaaaagcgccaatcgcaaattcagaggaaacacatctatggccttagcaagctatccctcatgattttcgcgacgtccttccagaaacacctgaacgcctttaaacggcctgatggccaacccccttcactcgttgtgatcctcgtcgaccctggtctcactcggaccccgggcacccgccgctggctcactgggggctcgg

SEQ ID NO: 21955 - DNA, 850 bp, Emericella nidulans
gaccggcttctcagggtcttgttggccaggagaaggctcgaaaggcagctgcagttatcctccagatggtcaaagaaggcaaaattgctggacgggctgtcctaattgcaggcccgcccagcacaggtaaaacggctattgcgatgggtatggcacagtcgcttgggcccgatgttccgttcaccatgttggctgcctccgaaattttctccatggaaatgtcaaaaacgaaggccctgacacaagctttccgaaaatccatcggtgtgcgaatcaaggaagagagcgagattattgagggtgaagtggtagagattcaaattgatcggagcgttactggggtaagtcacttgagggaaaggcgttaagactgtactgactcgttccagggcaacaaacaagggaagctcaccataaaaaccaccgacatggagacaatttacgacatgggaacgaagatgatcgattcgatgacaaaagaaagggttatggctggagacatcatctcgatcgataagtcgtctggcaagataaccaagctggggcgctcctatgcccgatctcgcgattacgatgctatgggcgccgacgtcaaattcgtccaatgccccgagggagagcttcaggtccggaaggagattgtacacacagtgagcttgcatgagattgatgtcatcaactcgcgttcgcagggcttcttggcgctcttctctggtgacactggggagattaggagtgaagttagagatcagatcaatgttaaagttgcagagtggaaggaggagggtaaggcagagattattcctggtgtcttattcattgatgaggtgcacatgctcgacattgaatg

SEQ ID NO: 21956 - DNA, 850 bp, Emericella nidulans
ctcggtttgaaggtgctccacgagaaacgggtggctaagattcatactgatgacgacaacaatgtgactggtattctcttcgaggacggccaggagcttgattgttgctgtatctgttttgctgtatgcttccaagactttcatcctgcttgtatggtgctgacttaaccatagattggcattcgaccgcgagacgagctgggaggaagcaccggtattcaatgcgcaaagcgtggcggcttcgtcattgacgaaagcttgcgaacatcggttaatgacatttacgctattggcgagtgtgctagctgggaaaaccagacttttggtatcattgctcctggtattgagatggccgatgtgctatcatttaacttgacaaacccggacaaggaaccgaagagattcaacaggccggacctaagcaccaaactcaagctgttaggagtcgatgttgccagttttggtgactttttcgccgacagagatggaccgaaattccttccagggcaacgacccgtctgccgaatctattggagctgcagaccctaaccgtgaagaagaacctcaggtcaaggccctcacgtatagagatccttttggcggagtctacaagaagtacctgtttaccatggatggaaaataccttcttggcggtatgatgattggcgataccaaggattatgtcaagctgaaccagatggtgaagtcacagaagcctctggaagtaccacccagtgaattcatcttgggtgcccagagcggtggagaagaaaatgcagacgatctgtaagttcgatgtcgagttgcgcaaccgctcgttcgctaacaggtccaaaggtatgaccgaaga

SEQ ID NO: 21957 - DNA, 744 bp, Emericella nidulans
aagctttacgttgcagccacactacttctaagggctagcattattttagcccaggatctacctgacttaccttcctgctctgtgagtcttcaaacgcatacgacctctttcatctggccgatgctaatcatcacaatagctgcaatgctttctcagcgccatgtccaatgatggctgcccctctctaaccgatttcgcctgccactgccgccaacctgcgctcgtttccgaagtggccccttgtgtcgaacaatcttgcagcgagcaagaccagtcctgttagtctcagtgtccaaaaattcatcttaaaataactgtacatacccgttcctctcgatgtactgaccaactcaactcaaagccgtctccaacatcgtgatgactgcatgttccagtgccggcgtccttttctcggtcccacctgtcgacggtggcacaactacaatcacagaaagcggccttgccccgtcaccaacaggtggtgagcatgagactatgattcctccaggaggctctgtgagcccatccggtccgatgatgacgcttcctacttcgaccgatacgactccgccgacgttgtctccaagttcccctagtgtttcgagccagctgagtacgccgaatgtcattagtacttcgccaccgttccttggaggagctgagtctttccgcaccggagggaggttagctggggcggcggctgccattgcagctggttatttgatgtaaaaggtcatgatactg

SEQ ID NO: 21958 - DNA, 850 bp, Emericella nidulans
gctatttcatcaaggcgttctcagcctcgcccaaggcagttgtcccaggatacgcgattggaggcgccatgtacttctctattccatgggctctcgggacggtgatgagctctgttgccctggggttggagaaccagcccaatttcccaacctaccctcgagtcagtgtcgcttggaccattatagctatatcgtcttccttactgacatgtgctatagagaatgacttcctctgaggtcagtggtggtcttgttctcccgtacgccgccatgaccattgcaggcaaaggaggagctgcagcggtccttctcatgatcttcatggctgtgacatcgaccctatctgcccaggtgattgccgtaagctccatcctgagttttgacgtatatcgcgagtactttaagcgatctgcgacggaccgagatgtaatccgtgccagccaccttggcgtcatctttttcgcggccttctgcgctggattcagtacgatgctacactacgtgggcgtcgatctcggctggacactgtacatgcttggtagggcattcaaatcccaaagctagacctcactgactgacgatgactgctactattacaggcgtggttacctgcccaggaatcttccctatggtcttcaccgtgctctggcgccgacagagcaaagctgctgccattttgtcgcctatcctgggattagcaactggtctagccgtctggcttaccactgccggtcatttcggaggcgaggtgaccgtcgctaccactggccaagtgccaccgtgcgtctatggcaccgtggcctcggaaatctcgaaaatcctctactccgtcctgatcacgcttattcgc

SEQ ID NO: 21959 - DNA, 850 bp, Emericella nidulans
gaagccctcccggtcgaaaaagagtttccggaaggatcgcgcgccttcttccttggcgagtttaactacggaagacctgttcatatcactggtcacgatgatggtaaagttaacggacttattgctgttatcaagggccgggagcccgagtttggaagagaacgtgcgcgaaacgcggaggctctttctccctacatgccagcctttgcagttgcgcggatcctgcagctgaatcccttgactttggctaaaatcacgtcttcattctcagtggacgtcgatggtcaacgtgtcaacttgggtctcaaccttaaatttgaggctaggaagcagaaggttcttggttattcccgccgatctgagtcgggctgggagttcagtgcaaaggcaattggactggtagagcagtacatgctcaaattccctcaatttatcgcgggtatccagcgtaaccctcgcaatgacagatatcagcctaccgatttctatcctcccgatatcgctcttgacaagataaatgagatcaaagcttggctcaaggaaattgagtcgaagaatttcgaacgggtccctctagaagcggagcagctcgattcagatgttgtgaagcttatcgagcaagacgccgaccaactagtgaaaacccagccgcctatggaagccaagaaaattcgtgatattcctcggagtgcgcttcttcggccagctgacgttgaacatcgacttggaaaccaaactttcaaacttggagatcgtgttgtgtatgctcaggattccggcaaagtgcccatagctacctcgaggaactgtggtcgggcttactcgaacgccaagagccattttgcttgat

SEQ ID NO: 21960 - DNA, 708 bp, Emericella nidulans
atgccaccccaaatcaaacaggatctcaatcggtcaggatgggagaccaccgacttcccatcagtctgcgaaaactgcctccctgagaacccatacgtgcagatgctcaaggaggattatggcgccgaatgcaagatctgcacccgccctttcaccatcttccgctggaaagccgaccggacggcccgcaccaagcgcacgaatatttgccttacctgcgcccggttaaagaactgctgccaatgctgcatgctcgatttgtcgttcggtttacccattgtggtccgcgatgccgcgctgaagatggtggcgcccggtccgcagagctcgatcaaccgtgaatactacgcacagggccacgagaaagagattgaggaaggacggggtgctgtggaggaatacgaaaagactgatgagaaagctcgcgagttgctgcgaaggctcgccaacagcgaaccttactataggaagccgaggcagctggaggcgccggaggaagatggagagacgcaaggcccatcagatgctacggtggtcaggagccgttatggtaacgggccagggccggtacgaacaagtgagagcagaagaggtacaccactacctgggcggggtcgaggaggtgtgcgcggcgggcgaccattccctggtaccgcgcagttccgccatcgcaggcagatatactcccacccgctgaccccaacatta

SEQ ID NO: 21961 - DNA, 530 bp, Emericella nidulans
tcccctcggcgtcttttttaatcggaatgtcaattgtccggttcattttttggccaacggtagttatcgtggcagccggggacacccctatctctggctattcccaattagtgcggcaagcaaccatcctttacatccaacagactcctcgggatctccgacacctttcttcgtcttcccgcgcccctggcttctcaaggccaccacggcccgcaaacccaccacgcttcatcctcgtcgacagcactgcgaacttcaaaccggactactggcagcgcctcgtcgccgtcttcaccactggtcaaacctggcagtttaagtcatacaagtggtcatcaccaccggaactcttcaaacatgctcccggtatttacgtcggttggcgtggcgaggatattccccgtgaagtacgcggttggggtcgtggcgtccgcagcttctttgttgagcgctgggatgaaaaaggcggtgttaacgggtcagggcgctggcgggatcgggaagtgtggagggaatcaaacggctactgt

SEQ ID NO: 21962 - DNA, 500 bp, Emericella nidulans
aaacactcctgcgaacctgctgagtttgaccggtgaagaacgcaatcatggcggcagtagacttttcaaacgtctattccgctacatatagcagtgtacgctgtgaatactggtttgctgccttggcgaactgctctttcctgcattctgagttggtctgactccattctctaggttccggtgtatgagttcaagattggcaccgacagtgttatgcgaaggcggtctgatgattggatcaatgcgacacatatacttaaagtagcagggtttgacaagccggcaagaactcgtattctcgagcgtgaggttcagaaaggagtccacgaaaaagttcagggcggctatggcaaatatcaaggtaaaatggccctggattttagcatatcgtcagttctttaacactcccttttagggacatggatcccacttcaggaaggtcgccagcttgcagagcggaataatatactcgacaaactcctgccaatattcgactatgt

SEQ ID NO: 21963 - DNA, 850 bp, Emericella nidulans
gttgggtactctattcgatttgaagacaacacaagcgacaaaactgtgctcaaatacatgaccgacggcatgctgctgcgtgagctccttacggagccggacttgggacagtattcggccctgatgattgatgaagcacacgaacgtacggttccgacagatattgcttgtggcctcttaaaggatattgcgaaggcacgcccggatttgaagttgctgatctcttctgcaactatggatgcgcagaagttccaaagttattttgacaatgcgccgattttcaatattcccgggcgcatgtataatgtcgatatccactacacgcagcaaccggaagccaattaccttgctgccgctattacgacagtctttcagattcacgtttctcaagggccgggtgacattctcgtcttcctcactggccaggaagaaatcgaggctgccgagcagagcttacaggaaactgcgaggaagctggggaataagataccggaaatgattatatgtccaatctatgccaatctaccgtccgatctgcaagccaaaatctttgagccaactccccccaaggcgcggaaggtggttctggctacgaatattgccgaaactagtctgacgatcgatgggattgtttatgtgattgatccggcttcgtcaaggagaacgtcttcaaccctagaacgggcatggagagtttggtagtgactccctgctcgcgagcatcagcaaaccagcgagctgggcgacgcggtcgagttggtccaggaaaatgtttccgcttgtatacgaaatgggcgtattacaacgaactggaagagagcactactcctgagattcagcggactaattt

SEQ ID NO: 21964 - DNA, 850 bp, Emericella nidulans
cgaaacgcaaagcatcggaacctcctgttgttaaggtggacgcatcagggccctctaacggcaagactcttgctcccccgttggatgatgagcgatcaactgacagttctcacggcattgggcctgacaatgcgagtgtcatggaagaaagcttcgagatgatcagtgatccagcggcggatctcgaagactatgacgacaagaaccggaaagttatgagaagcttacatcgcggcgatgaagtcgagaatctttgcaatgtttcccggattgttgggttagaagcctttgaagggctactaattcaaggcaaagaccatatatacatccttgacaatttcttccagagagtcgatggcgaaatagtcaacgtttcgcaagctcccagtgacgagcgtgacccttacgtccgcatgattgccggcagagaagccagtgagcgtaaaccccaggaatacgaaactagaagctggaaatggacggacctcgttagtatatccaagagacgattcctgtttcgggatgttgcgcttgagatcttttttaccgatggaagcagctatctgttgacgctcatttcatccaaagctcgagatattttgtgcagccagcttgctgcgaaggctccgcaagttacaggaaacgttggacactcgcggccggaggatatatggcggtttgagactctcagaagttctgaagacgcgccacaatctcttggctcaaagtttgccagcgtcttcgggcactcgccggtttatccagcaactcgtaaatgggtaaagggggagatctccaacttccattaccttatgttgatcaacacactcgccggtcggacatttaacga

SEQ ID NO: 21965 - DNA, 850 bp, Emericella nidulans
accagctccgaattccactgcccacgaccagatgaacaactttgtgcttgaacagaccattactgcgccttttcagaactccccgctcacggcttactttcgacggtgctcgtggtctccagatgggttgcacattgctgccgcgaatgcggtcaatggaccggtgagctctgtggctatcatcaatcgtggaggctgggatggagacatcaatcttatcggtcacgaagcgcctgtcgaagtttgtgccttttctccccgattgtactctccgcagccgataaaaaaaaatcaacaggatagtcatgaccatgtggcacaggcccctgtgacagtaattgcttgcgctggaggcgacaaatcactcagtgtttggattacgagtaatccacgaccgattgtggtggcacaggaattggcggcgaaatctatctcagacttggcatggagtccggatggcagctgcctgtatgcaactgcgctggatggcactattcttgcggtccggttcgaggatggagacttaggctatgctatggagttggaggaaaatgagaagtcactcaccaaatttggtacgaaccgaaagggtgcaggtatcgctgagactacagacggcctgcttcttgaagagaagagcaaggctggcgagcttaaaggggtcgaaggacgtatgggtgctctgatgggcgacggtcatgctacaggtgatgccgtggccaatggaaaaccgacacctttgccatcaacatctaatggcgtcaccccagctgctccgtctccatcgactgatgctcagaaatcacagccgaacgcagctgcagcgccatcagcatcggagactgagaag

SEQ ID NO: 21966 - DNA, 850 bp, Emericella nidulans
caccgacttacatctggtctaaaattatactggtcgtcctttctgtacgtggaactcgtcgtcagctctctgcaagggactaatcatattttgactatcagtctctttacttagggttcagtttcaatgtcaacaattcgatacaagggcttcagaatcaactatgggccatctttatgttgctcattttgttcatcaacattactgagcaaataatgcccatgatacaaaccccaacgagcgctatacgaggcgcgtgagcggccttcgattatttatcgatggacaagtaagactttgcccgtcacttgaggctttctgcatattttaacttacctcttgaagcatacctactctccaatatcctcattgagctcgtctggcagactctcatggcagtcttactgtacttctgctggtattaccctgtgggcttcgtccagaacaccacctccgatgaccaagctatccgtggtttcgccgtatttctattcctatgggtttatctactatttaccagcacgatggcgcacttcgccatcttctggataaaccttccggaaaccgctggcgtgcttaccagtcttttatggatgctgtgcatcttgttttgcgggcgagtaaaaactcaacatgctgatttcatcgtatgctaaccagaaaacagagtgggagtatccatggccgatctacccaaattttggaccttcatgtatcgtgtgtcccccgcaacatatctggttgggggcataaatgccacccccagcgcaactgggacgaatacgtcccgatcgtgagatcctccaagggctccaacggaaacctacctggaagggggtcccatccggat

SEQ ID NO: 21967 - DNA, 491 bp, Emericella nidulans; identical to SEQ ID NO: 7423

SEQ ID NO: 21968 - DNA, 850 bp, Emericella nidulans
cggcgttacccagctattgcatctcttcctcgttcaggaaacgcgcgcaactatcctccttgaccgcgaggccaaacgccgtcgcaagtccggggaagaccccaacgtctacggccccaatgagctgaagtccccaagactagacttcaaagagtttcttgctgtctggcgccgaccctttgaaatgttcctccgcgaaccgatcgtgctctgcctttctttgctttctggtttctctgacgcgctaatcttcacctccatcgagtcgttcgctcttgtcttcaagcagtgggggtttgaccctctgaggatcggactctgctttgcaacgattatcataggataccttgtggcctacgcgatcttcatcccggacatctggcgtcagcgcaagatccgcaaggagcacggtaatgccgcccgcctaccagagcgtcgccttctactccttctcttcatcgctccgctagaagccatcggattgtttggattcgcgtggaccaccatggggccagagtataatcactggattgcccctctaatcttcatgttcctgatcgcaatcgccaactatggcatttatatggcgaccatcgactacatggttgccgcctatggcccgtactccgcctccgcgactggaggcaacggtttcgctcgtgatttcctcgccggcttatctgccatgtacgcaacgcccatgtacgagaacatcggtggccgattgcacttgcagtgggcgagtacgatcctcgctatcttggctatccttgtcactatccctatctacgtcttttactggaaaggaccgcagattcgggagaatagcaagtttgctcagacgctggcg

SEQ ID NO: 21969 - DNA, 500 bp, Emericella nidulans
caatgtgtagtattaagaggactactgcgcgccaggcatggaagtagctgtgcctagctccccactagacagaacaccgagacaaacatcgcccacctctgcacctttcgtccagacgctattccttcctgttcccagaagtgacgatttagcaactgatcttattaccacacgcagaatgacaacctacacaacgaaccacgcgccctctgtcctacaaacccacagctggcgcacagcccagaactccgccccgcacctcctgccgcacctccagccgggcctgaagatcctcgatatcggctgcggcccgggctccataaccgtcgacctcgcgcgcctcgtcgggcctactggccacgttaccgggatcgagtacgtttccgacccgctggactcccgcggcggcgctcgcggcctcgagcgggataaccaacgtcacattccaggtcggcgatattcacgcgctgcagttcgatggcgatacctatgaagtcgtg

SEQ ID NO: 21970 - DNA, 850 bp, Emericella nidulans
tggggatttaagatttgcgctctcgcaggatcttgtcaatgctctatacaacacgaagggcataacgcggttctattcgcatcaagcggaggcaataaatcatctccacgacgggaaaaatgtcattgtctcaacatcgaccagctccggaaagtcgctgatttaccaggttccaatgctgcacgaactcgagcaggactcggacagcaggggcatgtacatatttcctacgaaggcccttgcgcaggaccagaaacgcagtatgcaggagctgctgcagtatctgaacagtttacagggaacgatggtggaaacattcgatgcgacacgcccatggcgaatcgtaatcttattcgtgatgaagcgcgcatcatcttcacgaacccggatatgctgcacattacaatccttccgcaggagagctcgtggcggactttcctccagaatctcaaatttgtggtcgtcgacgaacttcacgtctacaacggactattcggatctcatgttgcgctcatcatgcgtcgcctgcgcgggatatgtgctgctgtcggaaaccggcatgtccgatttatatcctgctcagcaacggttgctaacccagaagaacatatgcgggcaatcttcggcgtcgacgatgtgcaactgattgattttgacggttctccctgcggccggaaggagtttctttgctggaacacgccgttcaaagaccctggtgatcccacatctgcacgtggcgatagcgttgccgaagccgcacggctcttctgtcaacttattaaccgtggcgcgcgagtgattgccttctgccgtatccgccagctaggcgaagtttcccataaggcggtcc

SEQ ID NO: 21971 - DNA, 431 bp, Emericella nidulans
cgcgctgttttttggcttcgcatgagcggataaaggtcgctgttgcgcgacattatgagcgaaaggggtttactcagtctggtgaacttacgcagggcctgattttgagtgggtccgcgggtgtatcaaagcttattgctgtgctgattgcttaccctcatgaggtacgtacttattcttaccgaccctattatccaacttaaatgggtattcactatttgcacttacaggtccttcgaactcgcctccgacaagccccgatggccgacggccgacagaaatacacgggcgtgctgcagagcctccgattaatggtcaaggtggaagggtttgtcgctctgtacggtggtctgaccgcgcatatgatccggacggttccctcggctgcgatcacgctgggaacgtatgagctggtgctcaagctactgagc

SEQ ID NO: 21972 - DNA, 850 bp, Emericella nidulans
ctcacacgctcagcatatggaatgggcgtctctcctcggctggctgggttagcctcacactaagacccctggcacttctcaactccccacccctcctctggtccgccacggtgtatgccctctcactgggctggctcgccgtgctcgccgagaccatagcgcatctgtttcagtcagtaggcggatacgggtttacgccgattcaggctggtttgctgtatctcagtcctctaataggaacgatcttgggcagcgttattggcgggaaagtatctgatatcgttgctaaagtcaaggcataccgcgataacggcgtgtacgagcctgagtcccggctcctgatgatgatcccagcaatactcgtgtcaacgttgggactcgccggttacggctggagcattcagcttcgcactcactggttcatcccaacactctgttttggggcgatctactttggctgtatactggggagtacgattgcggtgacgtactgtctagactgccataaagcggatgcgatcggaacacaggtggtcctaagtttgatgaagagtaagtcttccttgccaggatatattaccctatacgggactgactggtatagacacccacgggcttgcgttctctttgttcgttgtagattgggtcaaggcttgcggaccgcgcaataccttcttgatcatcgctgggattcattccgccttcctatctgcgacgatttttatgtatattcatgggaaacagtttcgtataaggatgggcaagcgaagttcatagcttgctatttgtttgcttatatgaggacataaatgacttctcagcgctcacattaatttacattggttcacat

SEQ ID NO: 21973 - DNA, 322 bp, Emericella nidulans
gatcccgctaagggatcatgctgattccaacattgttatcatgatggctggaaacaaatcagacctgaatcacttgagatctgttgctgatgaagatggtcgctctctcgccgagaaggaaggtttgtcgtttctcgagacatctgctttagaagcgactaacatcgagaaagcgtttcagaccattttgtctgagatttatcatatcataagcaagaaagctttagcggcacaagaagctgcaggtaatcttccgggccaaggaacagcgatcaatagatcagattcatctgcaactaacagatcaggatgctgttctacc

SEQ ID NO: 21974 - DNA, 850 bp, Emericella nidulans
gagcgcgcacaatatgcgttataccttcaggaaaggctcaaggattacgccactgacgagaccggcctgcaacctggctctcaggtctgggtttgggaaggctcgaacgctgcaaaacttgaggcttcgcttgacgagtctgggagcttcgataagcttgttagtggaaagccgcccaggccgggccagcggattgtctatgttgatggagggtttgaccttttctcttccggccatattgaatttcttcgccaagttctagcaattgaggaatctgatggcagacaacgcggctggtatgaccaagaacagagagagcaaagggtaaagacccacggagaagattttggcaccagcttacgtggtggctggcgttcatgacgacgatgtaataaaccattggaaaggtttaattatcctatcatgaacatatttgagaggggcctatgcgttcttcaatgtcaagtaagcatccatcctttccattacgggttggtctgacaatttctagtacgtacacgccgtaatcttctctgctccattttcaccaagtcagccatatttagagacaatgcctttgggcgttcccgacgtcgtctaccacggtccgactacctttatcccactcacctatgatccatatgctgctcccaaacgaatgggtatatttcgcgaaacgaccgatcacgcttttcaacatgtgaacgctggcgaaatagttgaacggatccttaagagcagagaggcttacgaagcgagacagcgcgccaagttgcagaaggcagtgatcgaggatcaagccaagtcaagagaagcggcatgacccaatagtatgagtcattcttcctgc

SEQ ID NO: 21975 - DNA, 710 bp, Emericella nidulans
tatctggaagcctactcacagtccgcacagatttatcagatccgatccgcaacctactaaacaccttgcccatgccgccagcttgtcgatactgctatcacccggattgttcatcatcgatcatattcattttcaatacaatggcttcctgtacggcattctggtactgtctatcgtctgggctcggaagcagtcgaaattgctgtatagcggaatcgccttcgccgttctactctgcctaaagcacatctatctctaccttgcccctgcatactttatctacctgctgcgagcatactgcctggacccgaaatctgtttttcggcctcgatttggaaatgctttcaagctaggcctcagtataattacggtgttcgggcttgcgttcggaccatttgtttactggggccaactgctccagctgaaagatcggctgttcccattctccagaggcttatgccatgcttactgggccccaaatgtctgggctatgtattcattcacggaccgcatcctgattccatgtgcgtatgaacctagggtttctcttcctgcaccacgctgacgttcgtagttgcaccgaaacttggactgccggtcaaccaagatgctctaacaagcgtcactcgcggcctcgtcggtgacacttctttcgcgattttgccagagatttcaaaagagtacacatttgttctgacgctcctatcttt

SEQ ID NO: 21976 - DNA, 526 bp, Emericella nidulans
gggaagagaatgctgagctgcggcggctgatgccatttgctatcgttggctcggatgactttgtggaaatcgacggccgcaaggtgcgggccagacagtacctttggggtgttgttgaggtagagaacccccggcactcagacttcttggcgatccggagtgcccttctccacagccatctggcggatctgaaggagatcactcatgatttcctatatgagaactaccgtaccgagaagcttagcaagagcgttgacggcgctgccacgtacgtatatgcacttcttcactttctgatcctgcaattctaatgaacctcagcactggaaccgattcatcgatcaaccccgaagacctggctactcaatccgtccgcctgaaggaagaacagctccgtcgcgaagaagagaagcttcgggagattgagctcaaggtgcagcgtgagattgctgagaagcgccaggagttgttggctcgtgagagtcaactgagggagattgaggcccgcatggcccgcgaagcaagc

SEQ ID NO: 21977 - DNA, 850 bp, Emericella nidulans
gagaataccgttgccgacgcgcaggaagtactcaagaaccagtggaccaaagagtctcgctccatctcgggttcccatcactccctgagtatgacccactgctacacccagatctcgtgcctgctgatgcagtggttgttgtcggcttcgctgagctgggcccatggggaagcgcgcggattcggtgggaaatggagtcgcgcgggtgtctttctcctgcaggatacgtggagacggcatggctaatgaatctcatacggcatgttgacaacgtcaattacgtcggatgggtggatggggaagatgggaagcccgttgcagatgctgatattccaaaacgatacggcgagcggatcctatcgaatgcaggcatacgttcactgccatctgacaatcgagaggttttccaggagatcgtgcttgaacaagacttgccgtcatttgagactacacgggaaaatgccgaagctctgcagcaacggcacggcgatatggtgcaagtcagcacactcaaaaacggcttgtgtctagttcagctacagcacggcgcaacaatccgcgttcccaaatccatcatgtctcctccaggtgttgccggccaactgccgacaggctggtcgccagaacggtacgggattccagcggaaatcgtgcagcaagttgaccccgttgcccttgtgctgctctgctgtgtagcggaggctttctacagtgccggcatttccgatccaatggagatatttgagcacattcatctatcggaactgggcaactttgtaggctcctcaatgggtggggtggtgaacacccgagcgctatatcacgacgtctgccttgataaggatgtgca

SEQ ID NO: 21978 - DNA, 553 bp, Emericella nidulans
gctccagtggtgagtcttcgccagtgaatactggccgcttctgccctttttgagaggaagcgtccatattcgatcgacggacgcttcgcagcctcctgcaatcaacccgacttatttcatgttcgagcaagacgccactgctcaggctgatatggttcagtttatctgcaaggctttcggtaccgtaccgctaagcaatattgtagggaatgaggtttccccagagttgggtgtcctacccacaaatttgtcaatcgccacttggaacaactgcggtttggcgaactgtaagttgctctcgttcagaaacggcatatagctaacccggctgtagaccgacctaattatcacccagtcggtactgccagcttgcttccttggggaaatgggggaagttgtcagtcctgagcttaaagtgtatgggaccaggaatgtccgtgtgattgatgcatcatttctggcgttccagctctgtggtcatttacaaaggacactggatgctgtccgctgaaaggcttcagatataataaagcgaggcaccatggctaaaatt

SEQ ID NO: 21979 - DNA, 850 bp, Emericella nidulans
agctcgaaccaggcaacacacaagcccagagcggtctggatgccgtgaagcgagccatcaacgccgaggcccaggctgacggtgtcaccggtgatcccatgggcggtctcagcaacatcttcaacgatcctcaactgttccagaaactcgccagcaaccccaagacctccgccctccttgccgacggcgacttcatgaacaagctcaagaaactccagcagaacccgaacagcattggtgaggagatcaaggacccgcgtttcttgcaggttatgagcgtgctgcttggcattgacatgaactttggcgctcctccccagggcggtccctccggcgccgctgcggaagccgaagaagacgtaccgatgcctgacgcccgcccgtcccctccgaagaaggagcccgaacctgagcccgagcctgaggatgaggagactatcgccaagaagaaggcacaggaggccggtgatgctgagaagaagattggtaacgacttctacaagaagaagcagtttgacgaggccattgagcactacaccaaggcatgggagctgaacaaggacgtcacatacttgaacaacattggtgcggccaagttcgaaaagggcgacctccagggtgccattgagacatgcaagaacgctattgaggaaggacgtgaacaccgcgcggactttaagctcattgccaaggctttcacacgtatcggtactgcctatgagaagctaggagacctcgacaaggccattgagaactacaacaagtcgctcaccgaacaccgaacccctgatgcccttactaagaaacgaaacgccgagaaggcccgcgacaaggccaagaaggaggccta

SEQ ID NO: 21980 - DNA, 776 bp, Emericella nidulans
aaaaaagaaattatcttcttaccttaatctcacgacgatctgtgaagcgtccaggcctacggtatcttcgtcgtggagtggatgacgacgggaataccgccaacacggtagaaacggagcaaattctctcagtaccggattgggacccttcccataatgtttactcgtaccttcagctacggggttccattccgctatacttctcgcagtctccatactccttcaaaccggtccctgtactccatcattcgccagaaacaaataaattggcgttcgaacggcacttccgtactataagccgacgttacgggaggatacaagctgtttctctggttgataagcgcgtcccggaactgaagcttggggagcaatacgagaagtatgctcagggatttaatcagtctggcggtattgacggcgtcccacttgggtttgaatggttcgattttcataatgaatgccgagggatgaaatttgagaatgtgagccggctcgtcgacaaacttgcagataccttggaagaattcaaaagcattgtagtgaacaatggcaccataatccaagatcagacgggaattgtccgtaccaactgcatggactgccttgaccgcacaggtgtcgcacagtgcgccttcgggcaatgggctctggagcgcgcattgaaacaggaaggtatcgatattgacttgggaggggactctctacaaggtggtttaacatattgtgggcagcaatggtgatccattccaagcagtattctcaacagcagctttgaa

SEQ ID NO: 21981 - DNA, 546 bp, Emericella nidulans
ttaatccggagagagccgttgagttttccggaggcggattctcggatcagatttgcgcgcccatcatatcaggattccagtgttcttggttttttgaagacacttggtggcaagtgggatggattatacaatccccagggaagaggaatccccgacgtcgccgcgcaggccaacaactatattatcatcgaccatggcaaaacatatcacattggaggcaccaggtacgtagctttgatctgatcagatctctgtactaactgatagaccagcgcctctgcgcctgtctttgcagctattgtatcacggttgaacgcggccagattagaggacggcaagcccagattgggttttctcaacccgtggctttattctttgaatcaaaccggatttaccgatatcgtggatggcagatctgtaggttgtctgggggccccaggggtcgaaaacctttatgctagctggaacgcaacgcctggctgggatcccgtcacgggcctaggcactccgttctataatacgctggtgaaagtggcaagagagttg

SEQ ID NO: 21982 - DNA, 850 bp, Emericella nidulans
ctcaaggacgtcaacctcgacatcaagcctcgtgagaagattggcgtggttgggcgtacgggtgctggaaagagttcactgactctggcgcttttccgcataatcgaacctaccaacggtggaatcagtatcgacaatctggacatttcgacaatagggctccgtgatctacgcgggcggcttgccatcatcccccaggacccagccatgttcgaaggcacggtgcgggacaacctggaccctcgccatgtacatgacgataccgaactgtggagcgttcttggtacgtgggcctgcacatgacggtgaatcagtggtttaatggtattgactgtatgcagagcacgcccgactgaaggagcatgtatctcaaatgcagggtcaactggacgcgcacattcaagaaggaggtatgtacagcacatgcagctagtatatccctagcatcgcgcttaattaaccaccaacaggatccaacttgagccaaggccagcgccaactaatctcccttgcccgagctctcttaacgcctagcaacatcctcgttctagacgaagcaacggtgagtggcattgctcaccggtttttgggctctggagaaaactaacaacactaggccgccgtcgacgtcgaaacggatgccctgcttcaacgcaccctgcgtagtagcatcttccaagaccgcacgattatcacgatcgcgcaccgtatcaacacaattattgactcggaccgcatcgtcgtcctggacaagggccgcgttgcggagttcgattccccggcggcactgatcaagcagcgcgggaaattctacgaccttgtcaaggaggctgggctgcttgacagtgac

SEQ ID NO: 21983 - DNA, 850 bp, Emericella nidulans
gagggggtctcatgacgatggctacaatcataaactccgacatgatcccctttcatcgccgcggtatgtaccaagccgcgcagaacgtcctgcacgggttcgggtctatctgcggggcgtcgctcggcgggtctattgcaaatacgatcggttggcggtggtgctttcttttacaggtgcccgtgtccgtttttgcgcttgcgatcggacggatcgttatccctatgccgcagaaacctcctacgggcgttggctggagtgtttggaagcaagttgaccttacgggtgcgctcctcctcattctcggtctgtccgtgcagctggtcggcttgagtctgggtggcaatgagctcccttggagtaacggatgggttgtttctagtctgctcggcagcctggtcctgttgggcgggttcatagtcgtcgaggcaaagacaagtgctatccctgtcatcccgctgcggatgttgaaaggtctcttgccggtttccacgcaaatcgccaatgtttgcgttgggatggcagcttacgctgtaagtctctcttgcctccctatctcttcgctcagcccctccctgcaagtatcaagacgcaactattgacgtcagcagttcctcttcaacctccctctcttcttccaaatcgtgctgctagacagcgcatccaaagcgggtgcccgtcttgtgattccgtccctcgcgacgcccgtcggcggactcctgtctggaatcgtcatgtcccactacggcaaactgagctacctaatgcgtgcaggtgctatgctcatgtttctggggaactgcttgtaatgatattggactttgaagactcggcatggaagtactttgtt

SEQ ID NO: 21984 - DNA, 500 bp, Emericella nidulans
ttttcatttgcgccggaatccaaaagctttataacctgcaaaccaggtccaatttcaccgttagcttggacgccagccctcaaatatctgtggcaagaaacagaggtttccagtgttcccatcttcctcgaagcggtctaagcatagtaagcccgtcctattcgcctttgcgaataagagtctgacactcaacgcagtggcaatgtcgggcttagtctaggatccgccggcgattctacgtccttgcccgcacaattcctgacattcagcagactcgtggtctgtgcgttgatgattcgaggacgccatcgaggaatgcctagtcagctggtccgtgcagtgctccttccaagcgatagcctggtggagcatggctctgtagcaatgtacagtacaaagggtctttggttggagcgccggtcgttgaaagttcgccggtaccataccccatgagaccgccaatagttctatctttagccggtcttgcgaccggtgaatcg

SEQ ID NO: 21985 - DNA, 850 bp, Emericella nidulans
ctcgtcttcgcggttaccgatggatcgcatgcaccggatggttggaggaccccgtacgttctcgtgacgtttctcctcggaatagcgctacttgccgcagcattttacatcgagggctgggttgcgtccgagccgctgctcccttttgatgtcttcaaggtcaagtcgatgagcccgctcttcgttgcgctgtcattctcgtacggtgtattcgggatctacctgttctacgccagtttctagtaagtcaatcctgatcgctccgcgatggcagctaatagggccagcatccaagacatccttggccataactctttgatttccgccgcctggttcgcccccatggccgccgggggcgtaatcctcgccacggttggcggtttcaccctgcaccatctgcccggaaaacttcttctcctgatctccggcgccggctacctcgtttcaatgctgctgtttgccatcattccagacaatcccaactactgggcatacgtgttcccggccatggtggccgcaacagttggcgtggatatcgggtacagtgtctcgaacatcttcattacaaccaacttgcctcaaaaccggcagggcgtagcgggcgccataatcaacacgatcgtattcgccgggatcagcttcttcctcggcttggcggatctggtcgtcgcggagacgaaggatttaggagctgctgggagctacaaagctgcgttttggtttggagtcgcttgctcgggcgttgcgattttgctgctggtgttcattcgcgtcggaaaggcgcagagtgacctaactgttgaggagaggatccagctggccgcgtcgttggctgtgggggatgttacgc

SEQ ID NO: 21986 - DNA, 505 bp, Emericella nidulans
tcaaggtggcggaggtacaaggaacatgccgagtcaggacaaacggtccaacaatcagatacatcttccagtctgtccatcacggctgtcgatatcgccgattggtcaactgtcgtgaagcgcctatcctcaactatcttatcaactacagtcataggctcaaaatctcatcctgcgcctctcctcccaatttcaactccctcaggagatcgaattcaccctagccatttcaccgtcgacttcaagcgcttcgatgttctgactctctcggacccagacctcgcttccctattccaatcccaacggacaaacatagtcacacttatgttcacactaaacgagctcttctcaacctccatgtcgaaagctacatcttttcttctccggacaacggacctcctagaacggggcacaatcctcctagtcgttgacagcccggggagctattcgacgctcaaactgaacaagagcacgggcgagcagcaggagagacagctttagagta

SEQ ID NO: 21987 - DNA, 850 bp, Emericella nidulans
caaggggcctgagaacgataaggctttggacaaacggtacttcgttcgcgctgtcgtccgtcccggccgactccgtgacgatatccccactgcggagtaccttacctcggaagctgaccgtttgatgaacgacattcttgatgcccttgaggtcattggcaacaacaactccgatctcaaccacatcttcatcaacttctcccccgtcttcaacttacagcccaaagatgtggaagaggcattagcaggcttcttggatcgcttcggccttcgcctttggcgccttcgtgtcactggtgccgagatccgcattctatgcaccgatcccgccactggcatgccataccctctgcgtgtgatcattagcaacactgttggctatatcatccaggttgagctttacattgagaaaaagtccgagaagggcgagtggcttcttcacagcattggtggcactaacaagcttggatccaaccacttgcgtccggtttccaccccttaccctaccaaggagtggctgcagcctaagcgctacaaggctcacgtcatgggtactcaatatgtgtacgacttccctgagctcttccgtgaagctttccagaactcgtggaccaaggccatagaaaagagcccgagcttgatcgagcgtcgtcctcctcttggcgagtgcatggaatacagcgaagctgtcttagacgatactgacaacctggttgagatttctcgcgggccttgcacccacaccccacggaatgtttggatggataggtaccgctcgcccccccagtatcccgagggcagacgcctcatcattgttgcgatggacattcccttccaaacggttcgttcg

SEQ ID NO: 21988 - DNA, 850 bp, Emericella nidulans
tcgggcaccgcacaccagtgactgtacttgcagtgtcccggtcctttagcaccctgttgtctgcgtcgatcgacggtcagcttatgctctgggatttaaaccgtcagtgctttttgcgggagcttccattgaaagggcctgttgatgtatgctctagtccccaattcttatcattcaacccaactaatgcgagctcagtgtgcccaaatcaataatgtgactggagaaatcgctgtttgtcgagggaaccgcatcacgctatactcgctgaatggagccgtattgcttgaacaggtagtctgcgagtcatccgatgatacgacgttggcctgtgttttctacgaaggagtcggcgacgaatggcaagagcgcgagctggtctttaccggccataaaaggggtgttgtcaatgtaagtaacgactcccagggcccaggcgcggacctaacacgttgtaggtctggagcaagatcatcagaaatggtcgctttgagctggagttgatccgccagctccatcacattgataacaaccgcgacaacggtgcaaatatagccgccggaattagttgtatccaggcgtttccccaagttgtctatactggcgatgaagcgggaagagtggtaagtggcggcctggtatccgacgttggattttgtttcgcaatgctgattgatacttcatagtatgagtggagctgtgtccaacgccgatgacctctaaaatttcctcgtctggtggctatctctcatgctcaaagtccagggattataaattctttgtttatccgcggagtatctgcttcctgttttcatgtttctcgacactgatgccgttgctttttccattg

SEQ ID NO: 21989 - DNA, 850 bp, Emericella nidulans
caagcgtgagaaaggtaggtagtgctacgcagacatcactacccacttgctccgacatatgctgattcggtaaaatccttacaggcctacgaaggaactcgtaccgagatggttgaggcgtcgaggaaccacaagaagatagcgtcaaatatccgggaattagtcgtttcgccgttcaagcgctggtgcgatcaacatgaggcacggattgagaactctcatgatgacctccaggctcggatcaaggagcataccaagcaggtagacctggtgaagaagctgcggagccagtacttcaacaaatgccgtgtacttgaggatctggaggaagagaacaagctcgcatttcaggcgccggaaactagccctaaaatcaagccgacacccaaaataatcctacccgacaaagagcctgtggaggatgagccggtggaactcggcgaccgggtgtatactccagatgatctgaagaagcttctcgtgcacatgctagagactatccctcagggtgagattaaagtgcctattattggcacttaccaaaatacgtcgactggtgcggatatcgtggaatatacccaaaagtacttgaacgcgactagcatcagctacgccgagagaatcgggcaggatctcgtcgacaatggcttcctccggttagtgggaaatatgggcagcacatttgccaatagctctaagttgcgttaccagtggcgttccaagtgtttccagatctctggcataccggagaagacgacagctttgatgcgtgtgacctctgtcgcgaccagcgaggatggtattgattcgcctatttcctctgtctctgagatgctggctggctggaatc

SEQ ID NO: 21990 - DNA, 654 bp, Emericella nidulans
cggtggtctctatcagttgtgtctccggctcggtgatctctacgagagtctcggcgcggcagggtgggccaatcaggctcctcacgatacaccgcgcggagtacagtcatcttcaaccgccccgatactttcgcctggggcgtctgcaagggctgtcaattcctttcccgcctgtcctcgttcatccctggcgcctcaaactggcctaccttcgaacgcaacgcctccgagcagtacgaaggccgcgttgctatggtccgcatctccgatcccgacccgtccaacccttctgtcttcctccacggcatgcacggctcttccttccccattgccgttgcacacggcgaaggtcgcgcctccttcacggcctcctctacagacccagcttccttcgtcgctcagggcctggcgccggtgcagtgggtcgacaacgctacactcaagcccaccatgaagtacccttttaaccccaacggtagtcccgagggtattgctggtattcgcaacgcaaatggtcgtgtcatggccatcatgccacatcctgaaaggaccgttatgaacggtattgcgagctggttgccggccaaggcagaggagtggggtgatattgggccatggggacggatattcttcagcgcgagacggtgggttggt

SEQ ID NO: 21991 - DNA, 850 bp, Emericella nidulans
ccctacagtacatggccgcgcaacgcgaacaccctctgatctctacgatctttcttcgaacgttaatggaccgacgatatttctatggaattcgggtggcggcggctcgtgctttagtgaaacatgccaaagaagaaatcaactggctagggctatttcatctcgagaaagcttttcaagagctattctgcctgccgggatctcctatgactcggtcaaataacttctcagatagggccgcgtatgtccttcagctagtcattcccgaggcaatttccaaagtgcgcgacgtcagtggtaagactcccatgagggtgaagcggtttctttatgacaagctgaagttcaacgacaactccaataatgaggtaagcaagtctaccttgtatgtttttatgcatatactcacactgatgaagtactcggacaacttaaacgtggccacattgatgaagtccatatgtcacgccatgcttgaaagagttgagtcccgtactgatgacctgaacaattttgatatggacgccgttctagaagctctagccgaagaacagctggagaaggacgctattgcggaaatcgaccgatataggagaatggacgagtggtcaagctctttccagagcctctactcccgcgcggctctatattgccgaatgcagctgatgcaagctaaaatagctgaagtcgacgttatgcaatttctaccctacacgcgggtaggcacttatgacctccttcgcctggacgctttagaatgcccccgcccagctggacatcttcaaaagccccgaaagaaaacggtggttcattttcaccatgtcaaatgacccgtccagatgggtccgtc

SEQ ID NO: 21992 - DNA, 850 bp, Emericella nidulans
acgtggagaccatggctttggatggggagaccaatcttaaaaccaagcagccgtgccactctgtggcaaaggtatgcggaacggtgggaggtatttgcagcagttcaatacactttgctgtagaagatcctaaccttgatctctacaaattcgatggaaacgtgacggtagctgctggagagaagacgccgctgacaaacaatgaaattctctaccgcggtagtatccttcgcaacactgaacgggcagtgggcatggtcatttacacgggcgaggaatgcaagatccgcatgaatgcaaacaaaaaccctcgcatcaagatgccctctctccaaggcaaggttaaccgagtcgtcatgctcattgtgcttttggtggtaatgctggctggtgcctgtaccattgcctacaagtactggtcacatgacgtggaaagccatgcctggtacctcgaggacgccaacgtgagctatgggcctgttttcacctcttttctcatcatgttcaatacgatgattccgatttcgctctatgtgagtatggaaattgtcaaggtggctcaaatgctcatgctcaacgccgatatcgacatgtatgatcccgagtctgacacaccgcttgaagcccggacttcgacgatcaatgaggaacttggccaagtcagctatatcttttcagacaaactgggaacattgacaaacaatagcatgcgtttccgtaagatgagcgtcgctgggaccgcatggtttcatgactttgatctgcttggcgagactaaatcaaaaaggtgaacgggaaaagctgatccataagaaacgaagtgtgaaagtgcacttagactgtaacccgg

SEQ ID NO: 21993 - DNA, 611 bp, Emericella nidulans
tccctcccacgatagttcccaacccaccgacaaaatatggcgtcgttctctttcctgccttcgagatgcttgacgtcttcggcccccttgaagtactctcctgggctgcacggctgcacgaaaagctggatctctacctgctgcgcgagacactggaccccgtcaccacacagccgcagagcgctgcaatgaacacatttaattcgtcgttctttccgaccgttaacccaacacatacgttcgatgataaccctgagctggatgtgctcatcgtgcccggtgggctggggacgcgcaaccctaacatggaccggaccctgcagttcatcagctccacttatccaagagtgcagtatctgatcaccgtctgcacagggtcagcgctggtcgcccagacggggatcctagacgggcgccgcgcaacgacgaacaaagcatcctgggactctgtcatcgttaatgggccgaatactacctgggtcccggaggctagatgggtagttgacggcaatatctggacttcttccggcatctcggcggggatcgatgcgacattggcgtttgtggccgagttatatggaaaagagaacgcaacggtaatcagtgagtat

SEQ ID NO: 21994 - DNA, 327 bp, Emericella nidulans; identical to SEQ ID NO: 8311

SEQ ID NO: 21995 - DNA, 850 bp, Emericella nidulans
gagtatactcttgctaacaccctaccagtttctttggctgagtcacttctgaatgtcagtttctcgtaccaactgcactagcaggcatatctgttgagtcctcatctgatttccttcaggcaaatccaaaactagctactacgaaagatgatgatgaccgtcttccaattcactgggcggtggcctacaaccaccttcccatggtcgagctcctcgtttcaacaaaggacttcgatccggatgtcgaggtacgtactcgttggaacgtatcttttgcattgtaagaccttaccagactaattggaaggccaggacggatcatgctggactcctctaatgatcgccgctagtcttagaaatgccgaaggtgaccccatcatcgagctactcctgcgcaaaggagcggatgtcaatgccaagagcatcactgggcaggtaagtccctgaagatacatagtcattcttttttgaggcatcaaattgatcaatccagaatgcactggactttgcaacatctaaagcaaacatcaccacagtccggaccttactggaaaacaaatgcagtgcccgagtcaaggacaaaaggggccagttagcgcttcatcgtgcggctgcgataggctctacgccaatcatccagctactgctgaaagaaggtcgaagcccggttaatgctactgataatgatggccttacggcattgcaccatgctatttcagaaggtcatggtgatgcggcgcttacgttgttgaaagctggtgctgaggcggataagaaggatgcgagtgggacgttagcgattgatatggcgccggataagaaggtagataagcagccagcatcattggaa

SEQ ID NO: 21996 - DNA, 545 bp, Emericella nidulans
caaaaggccctgagccctcgagactttgctgacaccattacattttacaattttctgtgtacaactactctgacgggatatggggtttgaagctatcattctgacgcaactttgtagcttctgtaattggccaccggatcaagtgccccaacaaccactatctgtttggtgagctgatgaaggaatacaataagaatcacttacccatggccaagcttctggattacgccattggtgaatgcactgtcaccacatacacacaacgacaatgccgattcttaaccgtccaccgctgtatccctgtttgttggaataatctcatgcgcaagtgctgtgctatctactgcgaggaatccgatgactacatgaagatgggtgtcctcaacggtcttttcgttctaggccgtagcatcggtctgattgcccactaccttgatcagaagagactgcgcactggtctttaccgccacccttgggatgacatcacgtacctgctccccgccctgcaaaagggtggctcggagggtcgtgttgaggtcaacgta

SEQ ID NO: 21997 - DNA, 428 bp, Emericella nidulans
aaggtgcgtggatatctggcttctacatcgatttcatatgctgacgcggttggtttagattgtatgcgaagtgtatcccgacgttcacggactgcacgattgcggaattagaaaagctgggtgacaagtaccgtctggcgttgagggttgcaaaggatccgcgctgggagcgggtcaagtgctcgcacaagggcacctatgccgatgactgtctcgttgatagggtgagttcgcccgtctctgaactctttgggtccgcgatccgctaacgcatgacaggtaacgaaacaccgcatctacctcgtcgcaacaaacgataaagatctttgtcgccgactccgcaagattcccggtgtgccaatcatgaaagttgcccgaggaaagttcacaattgagaagctgccggacgctttggattagcggcatcg

SEQ ID NO: 21998 - DNA, 850 bp, Emericella nidulans
gccgaaaaagcagcggaagaggctcggaagaagaaagagcaggagcgcgcacgggaacgggagctcgaggaaatcagacgcagagaacgctcagacaggggctggggagggaggagaggcggtttcagaggccgggactttgacagacctcgctcacctccgagacgacgcagccgggatcgttattgggaccgccttcaaggcgggagttcgattcgtacgttccctctggttctcgcaggggccgtcggccttctaggtcacccagtcgctcacgttcacgttcacgttcacggtcgcgatctgtgtcatcatctcgttcgccgccacccaggcgtcgcaatgaccgcaacagacgacgtcgatcagttagcgattccatctctccagaccgagagcgccggaggcagaggagacgtagtcctgattacggtgatcgagcaagatccatatcccgcagtgattcatcgcgctcacgtactcccagaagagaccgaagacggagatctgtttcttccagcccatcccgctcacccgcccccagagaccgacacagacggagggactcatctgtctcgagatcacggtcccgatcgcagagccgtgacaggaagcacggtcggcgcagatcgtcgccttattcaagagatgacaggagagaatcaacggctaatgttgcaaagggccacagaacctgtgatgatcgccgtttgagccgcagcagagatcgcggcggggaccgtaggcgccggtactcgacgagccgcagtcgtagtcgcagcaggagccatagaggccgttcttctagcaagagtcgtgactctcgtagtcgcagccgcagccgcagccg

SEQ ID NO: 21999 - DNA, 850 bp, Emericella nidulans
atgtgtgctgggcaacaagactccggcgcagatgacggtgctcaatgagtgcccgcttgatcctggtggttatttcatcgtcaatggaacggagaaggtgattctcgttcaggaacagttgagcaagaacagaatcatcgtcgagacggatccgaaaaaggagatagttcaggcatcggtcacaaggtaagagtccgaggcttcagtggggtttggcatcttactaagaatgcttgtagttcatccaatgagcgcaagtctaagagttatattattttaaagaaggacaggttatacgtcaaacacaacgtgctcagcgaagatattcccatcgttatccttctcaaagccatgggcatccataccgacaaggaaatgatgctcctggttgctggcgtcgacaaggtctaccaggaggacttcgctattaactttgagaaagctatcaaggttggcgtatttacgcagcagcaagcacttgattggattggttctcggatcaagatcaatcgaaagcagatgtcttaccgccggacacacgttcagaggccgtcgaggctattgcgtccgtcatcatttcccacattgaagtcaaagacatgaacttccggcctaaggccatttacgttgctaacatggcccgccgtgtgctcatggcgaagaatgacgcggcgctggtcgacgaccgtgattaccttgggaataagagactagagttggccggacagctattagccttgctctttgaagatctcttcaagaagttctgctttgatattaaaatgaacattgataaggtcctaaacaagcgcaatcgagttaggcgtcaatgccggctgagagccagcgc

SEQ ID NO: 22000 - DNA, 850 bp, Emericella nidulans
ttccgctacgtgcaacgccgccaggcacaatactttcggctggggtaaatttgcctatatccttaggtcgactggtgtatgctgattcttcataagtgtgttcaagttcgtgctctcccgaacagaattccgtcgccaactgaaggtaatggatgacttcataaaaccctacattgaccgtgtcctcgccatgtcgcccgccgaactagaccaaaaactctccaaaagcgacaccttcctccacgcattggctcgcttcactcgtgaccgccgcactcttcgcgaccaactcgttgccatcctccttgccggccgcgacacaacagctgccactctatcattctgtctctttgaattagcccgcaacccagaggtcaccgccaaactccgcgaagagatcgcatcgcgcctgggcctcggcgctccgcccaaaagccctcttacacggacctcaaggaaatgaaatacctcaatgccgtcctcaatgaatcaatgcgcctttaccccgtcgtcccattcaacgtccgcttctccgtaaaggacacaaccctcccgcgcggcggcggacccgacggcctcgcccccgtcgccgtcagagccggcacccgcgtcgtctattccacaatgattatgcagcgcagcccagaaaactacgatcccccatctgcaccgaactacttcgatcccgcgcaatggaacccggagcgctggctctcgggatggcaaccgaaaccatggcagtttattccgttcaatgggggcccgcgaatctgcattggtcagcaatttgcgatgattgagatggggtacacagttgttagaatcttgcaggcgtttgagcgcattcagg

SEQ ID NO: 22001 - DNA, 850 bp, Emericella nidulans
ggaggtacgtatactggccccggtcccgtatccttcatcactttcctccgcatcctgggttcggtgacggctaatatgggcattgttcgttagcgaactccacgtcttccgcggccaccaaccctccggcacggatttcatcatgggccacgagttcaccggcgagatcgcctcggtcggctcgtccgtctcgaaattcaagcccggcgacaaggttgtctcccccttcactgtctcctgcggagactgcttctactgctcccacaacacttcctctcggtgcgccaagtgccagctctacgggtcggtggtcctcgacggcgcgcaggcggactacgtccgtgtcccgctggccgacagcacgctcgtctccgcgccggagaagatcgacgagaagaagctggttatgatggcggatatcttgccaacgggattcttcgcggctaagaatgcattcagcgggcttgataagagcattatcaaggaaagcacagttattctcttcggttgtggaccggtcgggatctttgcgctgatcagcgcgctcgagtacaagcccaagcaccttattgcaatcgactctgttccctcgcgactggagctggcaaagagcctcggtgccgagccgtggaactttgccaccgactctgagggcctcaagaaccgggtcaaggaactcacggacggccgaggcgcagacgttgcgattgaagtcgtcggccacagtgatgcgctgagaatggcgtttgacatgatccgcccttggggcaagatctccagcgttggcgtgcacaacggggagatcccttggacgggtaacgaggcgtatggcaagaataaacaacacaag

SEQ ID NO: 22002 - DNA, 850 bp, Emericella nidulans
  unsure (1)..(850): unsure at all n locations
cttcgaggagagcgtcaagtcgctccttgccctcacagaaaggtacgtgcctcggattttcatttcttaagttaaacctaactcccgtctagatcagacgcagataatcagcttcggaccgctggctatgaagtcctcaactctttcgttaccaatgctgccaacgacagccttcccactgttgctcacctatccgacgtcgtcctccagcgtctggagcgtactattcctatgcagcaacaggtcgtcagcgtcgaggaccgcatcatgctcgaggaaatgcagaccggaatcacaagcgttgtcctggtaagtacacggaagtttccttcactaattgtttactgacttgactaggctattgttcaacgcctcgaggctgaaatcaagccgcaggccgaccgtattatgcaaatcctgctccaagtcctttctactgttcctccgaagtccagcgtgcctgacgttgtgttcgccactgttggtgccattgctaatgccttggaggaggagtttgttaagtacatggagtcttttagcccgttcctcaacggtgcccttggcaaccaggaagagcccggcctttgcgccatggccatcgggctggtcagtgatatctctcgtgcgttgaatgagaaggttttgccttactgcgacactttcatgaaccacctgatgaacaacttgagcgtaagaaacctttcttatattcaatgtacgaatcctaacatgatttccagagcgccaccaaccagctcaagccagccattctngaaacttttggggacattgaacaagcaattggagagcactttgataagtacttgaccgttgtcggtcagagtttgtc

SEQ ID NO: 22003 - DNA, 507 bp, Emericella nidulans
tctgccaaagaactcactttcaaggaggttgccgagcacaacaccaagaaggacctgtacatggtcattcacgacaaggtctacgactgcagttctttcgtcgatgagcacccgtacgtctcacgtatcttccagctttttgatgttcaccgcattggacatgccatggactgatttggtataattatagtggtggtgaggaagtcctcctcgacgtgggtggtcaggacgccacagaggcctttgaggatgttgggcacagcgacgaggctcgcgagatcctgcagggtctccttgttggtgacctgaagcgtctggtgcgttccccctgtcatgtcgcttggaaacgatcttttaacaatatttgtctattagcccggcgaccccactcctaaagttcacggttcatcctccagcgagtcttcctcctctagctccagtaccggcttcggcttcggtctctacgcgatccttctgatcggtggcgctgctgcctacgctgcctac

SEQ ID NO: 22004 - DNA, 311 bp, Emericella nidulans
gcgcctttgggtacagcccaaactggatgaccaactttgtcgtcgtggaatatactcccatcgtttttcagaatatcggctggagattttggatcgtctggacaatctttaatgccggcttcctgccggtcatttactttttatacccggaaaccgcaaaccgcacgctggaagacctggattcttattatcgtactaacccatccctggttgttacaggggaccctgatgcgacttgcgtcaagcggccgctcaaatatatccagcatgaggatgaggagctgcagaagaatgcaaaggggatatcaatg

SEQ ID NO: 22005 - DNA, 558 bp, Emericella nidulans
tcactctcctttgggcgaacccctgctgaatagcggctcaagcttcacgaagtttgcaaacataatcagtccaccgattggggtccgcaagagtaaatggaacctcggggccctggtccgcaagctgaacctgagctcgctcgtccaccacagctctcccagcctaaccgcaaggctgctgggccgagttaaagaaaacttggaagtcttcatcgcacccagggcttcattcgccgtaaacagcctgccgtcactcgcgaaatgttccagactccgtcatctagacctctcgctcgtggccacacctattcccttccaggatctcagaagaagtctaagcaacctcgtcaatttgcaaacccttcgccttccccagtcaacttccatcacaggcacagaatcgttcggaataccttggccccagaatcttcgccgtgtccagttcagcggccacttttccgctgaaccaatgcgatcgttccactggccgacatctctcacaagcctcactctgaagaactgctccgacctctctctcacaaatattagcagccttat

SEQ ID NO: 22006 - DNA, 428 bp, Emericella nidulans
gatggttcttttaagttagaagtactcttagtggtaaatatcctaaattcgaatgtaagttggaaatatctcaaagacaaacagatcataaaggttttagtaatcaggagtttttaaataaaattgctgatttctttcacactgaagttaaagaaacaagattaaatagatctactccagagtatagagttagaactactaatttacaaggtaataatcaagcaaagagttattttattaaatatccattgtttggaactaagtatttagattctatagattgaatgaaagttgtagatttatttaataatggtgaacataaaactgaattaggtaaagaaaaaattttaaatataaaatctaatatgaatgataaaagaactgtttttacttgagatcatttacaaaatttttacaaattgaaaata

SEQ ID NO: 22007 - DNA, 352 bp, Emericella nidulans
atcggccctcaagcaatacttccgcaaactacccatgcctctcatcacgtacgacgtttacgaaaaaattatcgaaacaggggagatcacttcgcactctggtcgtgtcgaagcgttgcaaaagagcctcggagagttaccgcgtgttcatcaggatgtgcttgagttcctcgtgtttcacttgaagcgtgtcgtggaacgggagaaagaaaatctgatgacaagccaaaacattgccgttgtctttgcgccgacaatcatgcggccacagagtctcgcacgagagatgacggatgttcaaaagaagaatgaggtggtcaagttcctggtggataattgccaggaagttttc

SEQ ID NO: 22008 - DNA, 850 bp, Emericella nidulans
ggcgaaggggggagtatatactccttattctggacggccatggaagccacttgaccccggcctttgacactacatgcaaggataataacattatccccgtctgcatgcctcctcattcatctcacctcctgcaacccctggatgtgggctgttttggccccttgaagagggcatacagatccctgattgagcagaaggcacgcctaggatacaaccatgttgacaagcttgattttttgaaggcttattcagaagcctataagaaagtctttacaatagagaacattcaaagcggattcagggcaactgggttacatcctttctcacctgctgcagtactggataagctgcagttaagaccattgactcctacaccccccccccaagcagaggtactgcttcaatcccctcctctcaactctgtacgcctcatacagtccgtcaggtgtatcgaaaagcttcatcagtcaaaaagcttctaaaagagggctctaggagtccttcaagcccctcaaaacaggcgctggatgaatttgtaaagggctgtgaggtggctatttacaatgctgggttgctggcacaggaaaacaaggatctccgtttatttgtggcagataacatggcaaaaaagagtcgttctaggcgtctaatgactcctacagatggactctcatttaaagaagccagggaccttatttcgttgagaaataatgaattacaagctggtggggggggttcaagctccagtacccttccaacttcggagagacttaggcgcgcccccccaaggtgtacaaattgcggagtacaaggccataaaagaacaagctgtaaggttccgaatcatcct

SEQ ID NO: 22009 - DNA, 846 bp, Emericella nidulans
tcagccaggatgtcccgcctcgccggtcattccgctccatcatctgggacacagacacgcactttaagacccccaaagagcggcaccttctcctaaaactggatattgcaatgctcagcattggatgcctgggcttcttcatgaaatacctcgaccatggaaacctctcgaacgcgtacgtctcaggcatgcaagaagccctctccatgttcggcaacgaatatacctatgcacaaacaatgtacacaatcgcatttgctataatgcagatcccaagtacactgatcatccagcgtgtgcggcggagtatctggctcgcggccatggaaatctgctggggcgcgttcacgtttgcgcaggccggtctgaagtcggtatctgagctttatgcgttccgattcctggttggtccttcgaaagttcgtttttttcctcattgctttacttattggggagttggtatacaaagactgagcttgcaaaacgcgttgcgctgtttcatctgacggcgccctgggggcggcttttggcgggtatctacaggccgccgtctacgagaatctggatgcagtcatgggattgaagggtggatatggctttatattgtttgtggttgcatgactgttccggttggaatagcaacgttgttcattcttcctgacacgccgtataacacccgagtttgtttttgaacgaaaaggagagggatcttgctaaggagagggtaacgagagcgggaaaggcgccgccggtgagggttacgttaggcacaatcaagaggattctcggaagttggaagtggtatgcgtttgtgcttggatatgtggtcagtactcattcctattg

SEQ ID NO: 22010 - DNA, 850 bp, Emericella nidulans
tttacagatggagaaccagattgttgtgaacgactaccgccagatggacaagattctgaaggaagagcgccaatatttgctcaacatggtcaagaagatccaaaagacgaagtgcaacgtccttctaatccagaagtccattctgcgtgatgctgtcacgatctttatctacacttactttcccgattaagattctccgcctcaagacattgacgtgaccagtcgagttcctgtgcagagtttggctgcatgcccgtcgccaacgtcgattcgttcacggaggacaagcttgggaccgccgatctcgtagaggaagtccaatcgtctggcgctcgctacgtcaagattaccggcatcaaggctcccgccaccacggccaaccagactgtctccatcgttgcccgcggtgccaacaacctcatccttgacgaggccgaacgctcgcttcacgacgctctttgcgtcatccgctgcttggtgaagaagcgtgcccttatcgccggtggcggtgcccccgaatcgaagtcgctaacacccttgcaaagcgcgcccgggaactgactggcacagagtccatctgctggaggcatttgccgaagccatggaagtcatccccaccactctcgctgagaatgccggtctcaactccattaaggttgtcacagacctacgacaccgccacgcccaaggccagcagaacgctggagtcagcatccgtagcggtggtgtaaaagacgatatcactgaggagaacattctgcagcctttgctggtgagcaccagtgccatcgaactggctgcggagacggttaagatgattatgagaattgatgacatcgccctttcaagg

SEQ ID NO: 22011 - DNA, 706 bp, Emericella nidulans
aattaaccccttactaaagtggatctcattaggtgtgaagacgaactgaccctctttgcgccgctcggatgcgggtttcagacggggatgggagcgatcgagaatgtggcaaagcccgacgagaacagcgtgcttgtcgttctgggactgggaagtgtaggccttgcgtcgatcatggtactgttcttcccctccctctttttagaaacatgggactggtggaagtgatgctaataagtcggacagacggcattgatccgtccgcacagtgccatcgtcggcgtcgacaggctccctggccgtctggaactcgccaaagagctcggcgctacacacacaatcgatacttcgccgcctggattcaacctgcaaaagacactccttgagatgtttcctagtggagtacaccatatcgtcgacacaacgggggctcctgtgctcatcgaggatgggctgcgatctctcaggcagcgcgggaagattgttctgattggcgtgccgccgatgcagtacgagctggggattggggtggttcagcatatcaatgtatgtttgccctacctccgagaaatgcggactgggaatccctgtggatatcacggtgatatgctgacggcagcagaccggcagggctattgttgggtgtattgagggtgtctgtgttcctggcgaggtgagcccacgacggctgcacaggccctgtcaa

SEQ ID NO: 22012 - DNA, 489 bp, Emericella nidulans
aacaactatgctaacactatcaataaaggcaggggagcattgctcttatccgttgttggcggcaagttgtccgagggtatcaacttctcagacaaattagggagaggtgtcttaatcgtcggtctcccgtttcccaatatacgtagcccggtttggcaagccaaaatcaaatacattgagcaaaaggcttaccgaaacgtcggatctggctccgaagaaagtcggcgattgtctgccaaagccgccgggagagatttttacgagaatgcttgtatgcgggctgtgaaccaatgtattgggcgagctattaggcaccgcaacgactatgcggccatcgtccttattgacaagcgatatgggaaaactagcatcgaagccaagctgcccggatggatcaaacaaagcctagtgaaagactccgctcttttgccagcagcgacaacgttagatgggcttgcgtgtttcttccgcagcaaaaaccactgcggg

SEQ ID NO: 22013 - DNA, 850 bp, Emericella nidulans
gcttctgctcatcgcccggcctgaagcaaagaaacttagcttggcctttgtttgcttgatgatatcttcggcaataacaatgtctcttcccttttctattggcaaaattatcgacgcgtctacgaagacatccgaagatggtcagtttttgttcggactcagccctaccatgttctacggtgctttggccagcattctcgcgtttggtgccgctgcaaactacggtcgtatcataattctacgaatagtgggagaacgtattgtcgccaggacccgctccaagctttttcgccagactttcgtacaggatgccgagttctttgacgcgaatcgcgttggtgatttgatctctcggcttagctctgacaccataattgttggaaagagtataactcagaacctctcagatggactgcgggccggcgttagtggcgctgtgggctttggtatgatggcttatgttagtctcaagctatctagtatcctggcattgctgcttcctccaatcggcctgggagcgatcttttatggaagggcaatcaggaatctcagtcgcaagatccagaggaacctagggaccctgaccaagattgcggaagagcggttgggaaatgtaaaaaccagtcaatcatttgccggcgaaatcctcgaggtcaaccgatacaatacccaagtgcggaaaatctttgaactcggaaagaaggaatcgctgataagtgcaacattcttcagctctgtaagtccactgctatcaaatctgcatacttcgcgcaaataaaaaaaaaaaaaaggctgacagtttcttagaccggacttatgggaaacttgacaattctggcactgctgtatg

SEQ ID NO: 22014 - DNA, 850 bp, Emericella nidulans
  unsure (1)..(850): unsure at all n locations
agcctgcgtatgcatggcggacaaagacttnctatggcaataagcctttaactgcaaccaagaccatggaatccgaagagtcttccttgatgcgctggaaccatttattgttgaagggacagtggtagctttaccaccggatgccgtcaaagccctgataaaccacttcgtcgtcacccataccgctagtcaactggaagagatactctgtttgcttgacactagcacgatggatattgaccaagtcacaacattgtgcaagcaacacaacctctatgatgcatttatatacgtttggaaccgatgtttgggggattacgtagggcccttggaagagctgatcaaattgatcccttttcaacagtccatagccaatggggattccgtctacgagcccaaggattttacgaacgcgatgaaaatcttcccatatctctctttcattctcacgtcacgctcatatccgacagggagcgatatggatgacaccgaagcgtcacgagcaaaggcagccttgtacgactatttgttctctgggactcgtggatccatctctcctctggaagttctgctgaagtttgacacgtctagcttcatgagcatgctaaacgaagcgttcgaagatagctttctcaatgagcaagatccggacgaggttcctcagcaacggctgtctttcaaccgacagtatttgattagcatcttgctccaaaccatgacatcaggctctttccctgcgtccgattctatatatctggatatgttcatcgctcgcaatctacctaaatacccgcaatacatcctcctttccgggagcactctccatcaagtcctcgaacgagttgtgccc

SEQ ID NO: 22015 - DNA, 850 bp, Emericella nidulans
gaccggcgagacaatacaacatcaaagcgaacctcccgttgacgacttggagaatttaagtttaaatggcgacagtgcgacgaatggagataccaaggacttggggagcacacctaatggcactgcgggagagtcaacgacaccaaattctgcttcagcatcagcatcaatttcatcagggtcatcgtcgccgagcgcaacgagcacaaccactcgtaccaaaaagcccaaccgacaaaaagcgcgcttggccagacgcgccgcagaacaaactgcggccgcagccgcagcctcagaggaagcctctcagctaacgaaccatcgcgggaccgaacaagaggcgatggacgcggccttcaagaaactcaacgtgaaagaaatcgaaataaacccagatggccactgcctcttttccgcagtcgcaactcaactagacgaactgggcctaggactgcgccctgatccctcacgcattgtcataggacccacaactcagacgcggatcgatacagtcgcaagtcccaaacacgacgggtatagggccgtgcgcgcggtgacggcggattttattgctgaacacaaagatgaattcgaaccgttcatggaggagcccctggagtcttacacgcggaagattaagctcacagcggaatggggcgggcagttggagctgcaagctattgcgcgggcttatggggtggatatcaatgtcgtgcagggcgatgggaggattgagaaaattgaggctggggatgttgaagaggaggagcgggcgaaacgggttatctggttggcttattataggcatacgtatggacttggggagcattataatgctttgacggcgaag

SEQ ID NO: 22016 - DNA, 850 bp, Emericella nidulans
aaatgcaaaacccaaggagaatatcgctcccgatgtcgcggaacaagaaaacaaggaagagaagtcttcaggctcggataacaacaatcagccagagacaaagcgattgcgattagaagaagagccggaacccgttgtcgcagacttgttcgaaactgcgcaagagcgcgagattgcaggatctgcagggcttcaagctgagaaagaagcaggcccagtggtcttgtcccaccaggtccggcatcaagtcgccattccgccgaagtatccttacgttccaatctctcaacacaaacctccggagaaccccgcgagagtatggccgtttacgctcgatccattccagcaggttgctgtctcgtcgattcagagaggagaaagtgtgctggtatcggctcataccagtgcgggaaagacggtggtcgcggaatatgctattgctcagagtttgaagaacaatcagagggtcatctatacaagtcctatcaaagccctgagtaatcagaaataccgggagtttgcagcggaatttggcgacgttggtctaatgacgggtgatgtgacaatcaaccctactgctacttgcttggttatgacgaccgagattctgcggtctatgttgtatcgcggctccgagatcatgcgcgaagtcgcctgggttgtcttcgacgagattcattacatgcgagatgctagtaagtgtgtcaaaaggtcgcaagagtacagtcactaaatacgggacatagcgcgaggtgttgtttgggaagagaccattattcaactatccagataaggttcgatacgtatttctgtccgcaacaattgccaaggcgatgcagttcaccgaatg

SEQ ID NO: 22017 - DNA, 705 bp, Emericella nidulans
gttaagcctgagatgagagcgggtgcagatcaaaacccgctgaaacgggacaagagcgaggacgtaagcgatagcgatgagagcgaaaaagtacagcccagcaacaagaggcggcgaaaatcatcgggcaaaactccggccaaaccgcaaattgattcttctcctgaaagcacgaaaggccgaaaatcccaagtcaaagagcctacaccagaaattgtggtaaaagcatctggagaggaaacaccagaggatcctgacgtttcagaagcggaagaagaaggactatctgctagcgaagatgaaacggataagaaacctgaattgaagaaaaaggagattgaaaaagttcaagcaactataaagggtagcgggaacgatccgtatcctgactggcagcctggggagcctgttccatacgctgctctatgcactacattctctctcatcgaaatgacaacgaagcgacttcagatccttgctcactgctcccttttcctccgacaagtccttcgtcttactcctcaggattttcttcctacggtacaattaatgatcaataagcttgccgctgactacgctggcatcgagctgggcattggtgaatccttgatcatgaaggcaattggcgaaagtactggccgtagcttggctgctgatcaaagcagaccagcatgaaatcggagatctgggcctggttgcggcaaa

SEQ ID NO: 22018 - DNA, 850 bp, Emericella nidulans
tttatttatggtgcccttattctcttcagtgatcggtatcaaagtgaccgagtcgtcccagttgaacggcacatactggcgccagaatctggagtcaccagtccgcttcctgacagctgttcaggccgtactcgactcagaggaggaaaaaagccgtaccttcttggagattggaccacactcagctctgtctgggcccctccgacagattctgtcagagcacccgcgcgggaaagtgtgctcttatgtggcatcgcttgtacgaggagaggatccaagaacttcagtcctctacactgccgggaacctctacaactccggcgttgctgtgaatcttcgtgctataaactgcgagggaaacatgcttgtcgacctaccaccttacccctggcaacatgatacgagatactgggaccagacgccagcggtggaggcctggagactacgcaagcacccccatcatgagctgctgggctcacgggtgttgggctcaacagacatagagccgtcctggcgaaataacctctcactggatgatgctccctggctatatggacaccggattatgggcaagactctgtttccaggcgccggatatattgccatggccggagaggctattcagcagctggtatctaggccaaatgtgagttaccagatcagccacctcgtgctaaaacacgctctttttctggacagcaacgagtgtgtagagctcatcaccaacctacgaccagtccggatctcggacatccaggactcagaatggcatgagttctctattactgccgtgcaagctggggaggcgacacgactctgcttgggtcaagtcagagtagccccgccgtca

SEQ ID NO: 22019 - DNA, 850 bp, Emericella nidulans
accagggctgaatacatcatacttgcttcccacacagataaagatggggcttggaaggctagggttagtgtcgacggtacaacatttgccgatctgaagtttccgcccaatgtcgtgccagctcaaaatctatacacccttgttgacgcctctgagcacgccatcttcctgtatgtcggagggagtaataataccggctcattgataaaaagtaacagcaacggcacaacatatgtccttagtttggatgccgtgaaccaaaacgactggggatatgttgatttcgagagaatgcaggctttggagggtgtcataattgcgaatattgtcagcaatgttgacgagctttccgacggagcacccaagaggctgaggacaatgatcactcacaatgatggtggtgagtggacattattagcaccgccaaccaaggacgccaatggcaagaagttcccctgttctgttgttgaggggaaaggcactgaagattgtgcgcttcaccttcacggatacaccgagcgcgcagatccgcgagatacattttcctccggttccgcgattggcttgatgatgggcttgggcaacgtgggggatcggctaaccagcaaagatgaagcagacaccttcctgaccatggacggtgggatcacctggaagtccgtcaagaaaggtagatatatgtgggaatatggcgactcagggtccgtaattgtgatcgtatctgaacagaagtcaacaaaagtcctgcattacagcaccgacgagggcgccacctggcaggactattatttttcggatgaggaaattgaggttattgatatctccactgtaccctcagatacctcaaaga

SEQ ID NO: 22020 - DNA, 679 bp, Emericella nidulans
cagtatcatatctcacattgttttaacttcgctgaccgccgacgctcgcaggatgctgaaattgaccgcattcgaaaagcatttgttctggatgcgtaaggcctcccattggcttatctagcataccaggaaactaatggcatacgacaccagctacgccgtcctcgatctacaacccggagtaacagaaaaggatattaaactccaataccgaaagaaatcactactcatccacccggataagacgaaaaaccccggcgccccagatgccttcgatcgcctaaagaaagcgcaatcggcgctcatggacgagaaacaacgcaactacctagacgaatgcatcgcggatgcgcggcgactccttattcgcgagcacaaatatacactggactcaccggaattaaagacagaagaattcaagaaggagtggcggcaaaagactgttcaggtgttgctggaggaggaagcgcggagacgaagacaggccaaggcgaagctacaagaagagggacgagagaggcgaaaggaagagcaggaaattgaggagcgaaaacggaaacgggaacagcagcaggcctgggaggatactcgcgaacagcgtattgggagctggcgcgattggcagaaggggcaaaagaaagatggtgagaagaagaagaaaaagatgaaggtattaggg

SEQ ID NO: 22021 - DNA, 572 bp, Emericella nidulans
tgtttgtggcataccagattccgcacaaatggacttacacaggattgcaaggcgccgtcgtcctggcaaatgacttggtcgggcgcacctattggttgaagttggtggatgtatcggtaagtgataaatgatggtttcgaggatcacattttgacgtctcgtgtctcttttttagcctgctggaaggggtgtcatttgggaccaggagatatacgagaacttccagtacaatcaagaccggacgttcttccacactttcgagcttgacgattgccccgcgggtctatccttcgcggatgagaaagaggcgaagacgttcattaagaaaatgtcggagcgggagaagaatgcaagcaaagagacccgccagaccccttttgcatcgacacgaggacaaggtcctacacccgtagcgaacggaaaatcccacggcgtaggtcgttcgatattcggcagcctgctgggacggtcgagtgcgccaacacacataacgcccgcggagctcccccctgcgcctactattcaagtcgctccaccaccccctgcgcccgcagctacccctccacgcaaag

SEQ ID NO: 22022 - DNA, 850 bp, Emericella nidulans
gacaccgcaagggcaacgaggaggatcttttcgaagcacttcgatgtctcggccagggtttgcatacccttgaggatttcgcagcgcacacaaactactgtgagcttgccctccgggagatgggcttccacaatgtgttcccgcacaccggcacccagacccagatgaatatccgcggccatcatgtctatccgttggtcacgggaactttcggcatggttgacttctttcattcggtccttggagaggcgtcggatcattttactcagtcggagattaatgagatggatattgcgcttggagatgcacaatcgagctcgtccgccaattctttgaactcccttacagggcttttagggaaggttccgggatgtggtgatctggtcgctgaggcagaggcactcaaacgccgttcagaagcccagcagtcttcaaacagccgcagtggcgctgaccttggctacgcggctggccagttcactcgctcgttcaacgatgactcggagcaaagccgtggcgtgcacgagcagagcagggcagatgcaccgtcaggagctaacaagcccaccggcttacctggaatgccagattttaacccagcggaaaccattgcgaaaatctaccctatcctcgaattccgtgacaaggtcgtccgaaaggtctcgtcaatcatagagaagattcccgggttggaggccctcgtcgagaaaatcaccgaaacgttgacagtcttcattatgtctttgcttgctcctttcatccgcacatattactacccctgcctccaagtccctacaaaccggaacaaaggcgtgattgaatcttcgggaaagcatcagtttgaaccctg

SEQ ID NO: 22023 - DNA, 522 bp, Emericella nidulans
gaaccgacttgatcatactgacattcggcacgcaggacggacgagagctagtttcgaaactatacattgactttcccctcaaccgcctcttctaccggcagatggaggacttcttagagcgacttacgtccaagttagacataagccagggcgtgatcaagatcctcgaaatgggtgcagggaccggaggaacgactaaatggcttgttcctttgctggcgaagctcaacataccggttgagtacaccttcaccgatattgccccgtctttcgttgctgcggcgcgcaagaaattctccaagcaatacccgttcatgaagttcagaactcacgatatcgaaaaggcccctgcagatgatcttatcgggagccaggaacgtattattggcagaaacgcagttcatgctacgcatagccttagtgaattcggaaagaacattcgcaagggcctgcgggctgccggcgttctgctgatgcttgagatgacagggacactccactgggtcgacatttttttcgggc

SEQ ID NO: 22024 - DNA, 850 bp, Emericella nidulans
cctcaaaacagatgtgattaagagccgcaatcgagtcaaaactgcaggccagggaccaaagcgcaaagtgagtcctcaagctgaggttttctcaggccttctgcaccttatcatgcggatagtggtcgctaatgctcaagtgtgtgcaatagtccggtagcgcagtcgacggaaatgggctttcctcttcgagatcggaagctggcacccctcctctgggggtttcgcagggatatcgtcgcgcgtcgcgtaagatgtcacccggacattcagaccgatccaattccccagtgcctccgaccgatgctcacggactttccggcttgcaccaggcggtcgcgcagtcttattacaatttcaacattgcgccccagcttttgttcgacagtgtaacggccggagaccacacgagtcaacttccttccgtccagcttcgtatgccttaccctacgagcccgaccgcgccggtagaccgccatcatgagcctccggagacatacgaggacctcctggcggcacaacacgttcttgaagactcgcgtctgtgagttagacctcatcaatgggctctttaggggtcgcgtcgcggaacttgagcaaagcgacgcaaccgcgcgacggggcgagatgattcttctcgactgagatgtgcgtctgcaggcgttccctcgatgacgctcagcgaagggaagaggagctcaagcggcgtatagccgagctggagcgccagcttgccgaacggactaatggtgcgaatacgttgcaggaaaaccctcttgagccgctagccaagagaatgaaaactttccgacgtgggtggaacatgaatgggaactcaccggggcaaatc

SEQ ID NO: 22025 - DNA, 850 bp, Emericella nidulans
gtctcgcttccgccctcagccactgtcgcgccggttcaatgattcagtttcactgatttcctccacaatgtccacggggccgcccgtttggccggctcaggacgaacaagagtcacaaccccctgctgaaacccagacccgtgcccgacggtcgcgtagaaagaaggacgacgccgttgagaccgatcggaaggaacctacaaagtcggcgagatccagggataaggataaagacaaagagaaggacagggacaagggaaaggaccaagacaaggagaaagagacgaagcggcccagtcgccgcccgcgagacaagtcttcgtctacctccaacaaccctacttccacccagtcgaatccccgcaaaaagcccaagttagagggtacgccgccgaagcaaagccctgacgcggcccctgccgtttctgcagcagtctcgacagcttcagactcggccccagttcttgcgcacacgaccactgtttcggttcctactccgcggcctagtcccccaagtgcacctgcatcgcttccggcgaatcactctgagcttccacctcaaccgcagatgacccaatctcgtcatctcgatctgacctctcagttgattcacccttctcaatccgctactctccaagcttcggctcctacaacgtcgccgccatacccgatgatggtatctgcgccgccttcccgtccccaatctcagccattgggaccaccccctcagcgaagagcggtcaaaattacgatcctataaggtctgcatttggcacgagctcgtcgcctgccgcaccgcctccagctcctgcgtctacttctttcagtcctccggcccgtccaatttcgc

SEQ ID NO: 22026 - DNA, 654 bp, Emericella nidulans
ggacttgatagctgataatcttcttcagccattctttggctcccttggctgcacttcagccattgttttcacttgctttggagctgcttatggaaccgctaaagcgggtgtcggtgtctgctccatgggtgtcctccgccccgacctgattgttaaaagtacgttagaacccggcgttccagcgaagcataacgctgaatgagcttattagacatcgttcctgtcgtcatggctggtattatcggtatctacgggctggtcgtgtccgtccttatcgcaaacaacctcggccagaaggttcccctctacacagcgcttgtccagctgggagctggtcttgcggtcggtcttgctggtttggctgctgggtgtgtatacatgctaccagattcgcattcatgaagctaaccctccgaattaagtttcgccattggtattgtcggagacgccggtgtccgcggaacggctcaacagccaagactctacgtcggaatgattcttattctcattttcgctgaagttctgggtgagtaacagacctgggtagtgtctcataatgaatcatattaatcttggttctcttctgttgcaggtctttacggtctcatcgttgcccttctcatgaactcccgtgccaccctcgaggccagctgc

SEQ ID NO: 22027 - DNA, 594 bp, Emericella nidulans
catcattgccactggtacactcttgtgagtaggtgctgttgtaacgaaaaacatccaactgatccgccaggttcggctatgactcggcttttgtgggaactaccattgcccgccaaagcttcgttgatgccttcaacatcgtcgagtcggaggcggcggatatttcaagcaatatcacgtcaacctttcaggccggcgcatttttcggcgccatcttctgcttcttgcctgagtgaagccgttagagacggtctcactggctaaccggaccaagtgaccgacaaaattgggcgtaaatgggcccttcaggcaaacacactgctgtttcttattggcgcgattgtgatgacggctgcaacacatcacctttcctatatatgtaagtcatatccccgtagtagtcaaggttgttaactagagcagatgctggacgagctctcaccggcatcgcatgcggcgctatcaccgcgaccgtccccagctatattgccgagctgtcaatcgtgtcgatccggggcttcctcaccgggttcttcgaagtcgcataccagattggtagcttggttggattctggatccctttagggttaattg

SEQ ID NO: 22028 - DNA, 500 bp, Emericella nidulans
acttccggaaccaagaccctgacagtccccatcaccttgaccaacactgtcacgatcaccacgacctactgtgaggacgagaccaggccacctgtccacccgactgcgcccaccactgggaagcctgctccccctgtcactggcaacccaggtccgactggcaccccagccccaactggaaagcctgttcccactggcaagcccactcctatacccactggcaaacctcgtcctgttccaacaggccccgtgaacaacggcaccgcgccgcccaaccctccgttccagaacagcacttcgccgcctcttattccgactacgagacccgttcccgtgcctcctggctcctccccagctccggtccctgttcctgttccggttcccagccctggtcaacccgaacagcctggtacccctgccgcccccggagggtccgccactcccagcattcctggccagccaggtaccccatgcagcccctggaggatcaggacaccccg

SEQ ID NO: 22029 - DNA, 850 bp, Emericella nidulans
ttctcctccggttacgctatgccctcagtctacagcggcaacgcgaccctcactcagatctcgtcgaccgtcactgccgacaagttcgaggtcctcttccgttgcgaagagtgtctccgctgggaccacgagggcgtctccggtagcgccacgacaagtgctgggcagctgatcctcgcctgggcgcaggccgaggagtctcccacgaacgcggactgcccggatgacctgagtctggtccagcacgaggcgcaggggatctgggtaggaaagctgagcggcgacgctgcaacctccaactacgagacatcgggtgcgctcgcgaccaacgtcgtcgacgggacttgcggtactgatggtggcggcggtggtgataatgggaacgggacgaccccaggcgtgcctgtccctacaaacgtcacgtacgactacatcatcgtgggctctggtcctgctggaatggtccttgccgaccgactcagcgaagcgggtgcaaagaccctgcttatcgaaaagggcccaccctctatcggactctggaacggcaccatgaagccagactggcttaacggcactgatctgacccgtttcgacgtgcccggtctgtgcaacgagatctggaagaacagcgatggcattgcctgccccgataatgaccagatggccggatgcctcgttggcggcggcacggcagttaactcaggtctctggtggaagccttacagcaaggactttgacgaatcgttcccggagacttggaagtacgacgacgtcagagatgctgtgacgagggtcttcacgcgtatcccaggcaccacgaccccatctaccgacaacagactctacctcg

SEQ ID NO: 22030 - DNA, 850 bp, Emericella nidulans
gaactgacgtatatggctttctacggtcgctacatcatgttaatgatgggtatcttctcgatgtacactggtctcatttacaatgatatcttctccaagtccttcaccgtcttctcgagttcctggaaatggcctgacaatattgaacaaggccagtctgttgaagcgtcactcaagggcagctaccggttccccttcggtctagactggaactggcacgaggccgagaacagtctgctgttcaccaacagtttgaagatgaaaatgagtatcatccttggttgggcgcatatgacctatgctcttatcctgcaatacgtcaatgctcgccatttcaagtccaaagtcgacatcatcggcaacttcatccccggcatcatcttcttccaatccatctttggttaccttgttcttactatcatttacaaatggtccgttgattggccggctagaaaccagtcaccccctggtctcctcaacatgctcatctttatgtttctgtcccctggaaacgtcgaagaggagctctatcctggccaaggcggtgtccagctttgcctattgctccttgccgtcgcacaagtccccattatgctattcttcaagcccttctaccttcgccgcgagcacaatcgtgcccgcgccctcggctaccgtggcctcggcgaacaatcccgcgtcagcgccctggatgaagacggcgacctcgacggcccccgtcaaagcacggcaagtgacggcgaaggcgttgccatgattgcccaggacctcgaagaagagcacgaggagttcgacttctccgaaattatgattcaccaggtcatccacacgatcgagttcttgcctcact

SEQ ID NO: 22031 - DNA, 850 bp, Emericella nidulans
ctcagtctcatctggagccaattcttgtcgatgaggccaaaaagctcggcgcacagttccgcttctacaccgagtttgtgagcgtcacccaggacgagtctggcgtgtccaccattctgcgagatcgagagtcagaaaagacttacatggtgcgctcgaactatctacttggctgtgacggagcgcgcagtgctgttgtgagcgcgctgggaatcccaattacagggagacaaatcaacacggcgttcaacgtgcatattcaagccgacctcaccaaatacatcgctcatcgtccgggaagtctcaattggatcttgaatccagaggctccagactggtccgctgtcggaaattttcgaatggtgcgtccctggcacgaatgggttgtctcgatgcacccggcctcgaagaatggcaagcgatttaccccaaccgaggcagatatcatcaaacgtctgcaccagatgatcggcgacacatcaatacctatcaaggtactctcgacatttgaatggactatcaacgaccaggtcgccgattattggcagcgggatcggatcctatgcattggagacgccgttcatcggcaccctcccatcaatggtttgggtagcaacacatgcctgtccgatgcattcaacattgcgtggaagctagcttatgtcattaaaggcattgcgaagcctgctctcctggagactctcagcgtcgaaaggaagcctgttggtgatggcattgttcgccgcgccaacaccggcatggaagcacatcggaacctgtggtctatcattgggttgactccagaggaccggcaaaatgccttgtcattgctttcagaagatagtcctgc

SEQ ID NO: 22032 - DNA, 505 bp, Emericella nidulans
cattaaagccttcagtgccatgtgcaatgtctctccgttatgggtgacgtatctgatgcagcgaaacatgggtgctgctatcgacctggttcagtttgtgcatctcatctgggtgtggtttgccaaaaccttcctcgccccgacaccccggcagacgattgagtggacagcaccgccggcattcgattacgccagttactacaactatttcctctactactcgactatcgccatctgcttcgcaactctacagcccattgtgctgccggtcaatgctctgtactttggtctggatgcaatgatgaaaaagtacatgctgatgtatatttttgtgaccaaaaacgaatctggtggccagttttggcgtgtgctcttcaaccgagtggtgttcgcagctatttagtccaatgtgatcattggccttgtagcaaaggcaagaaaaacctggaacatggtgtattgtgtcgagccgctcccattcctcatgcgtcttccaagagtattg

SEQ ID NO: 22033 - DNA, 850 bp, Emericella nidulans
tctgcaatctcgagagtgatgatcctcgattcctgatcgatatctcatacgccaggcggctccaacagaataatgttgttttatggtggtcctcaaccgcgaaaccagaccacgcaggatacgagaaggatgacattactggtccattggagagggttggcatgccatgtgtcaatgttccaggctcttatactactgtctgtgttgagctagaggtccgcaacctcgccattaacaccattctcacttcctccatcatcaatgaagcggaaggagccgactcgcttctagccccgtctgatccgtccgccgaaagtagcgggtctggagttctttactctgagaaggcgtttgcatcagccggtgcggttgtgctacgcgagatggtgaagcactggtggtcagaagcgtgtcaaggaaataacatggccgatatcatggtgcaacacctgatccgatgggtagagagcccagcgtcgtgcctttacgaccgctcgttgcaccaatacgtgcggatgctgtcgagaaagtcttttcagcagcttatggctgaattcaggcgcgtcggttcaaatgtcgtcttcgccagtccgacccgtctcttgctccagacttccaagacagaggtaggcaacgcctatgcatacagccaatacgtgctgaagtcaattcgcgccaatccgtcattccactttatcgatcttgatatcaaggaatactgggactacctggtctggtacgacgagtacaactacggcggcaagggctgtcaggaagtcgcagagacggaagaacagccactggaaaccgtcatgcactggcagcttagccgctttctcggggttctctc

SEQ ID NO: 22034 - DNA, 850 bp, Emericella nidulans
agcagactcatcctcattatcggtcatgtatacatctccggctcgaatactgccttgtctctatgtttattggacggccactccttctgaaccgggctgcttctcgctcgtcgcccgcttcaccagaaacacaaaacagtgacacccgcgcagtggccactagtgtcattaacaaccatacaaagcaccgtcagcagctagttgattcctgcatccaagctgctaaggaagccctgaggctgtgcagtatcctgcaaaataatgggcctggcctcgctcgcgcttcgtatgctgagtacagttcctgccgggcatctttattggcactcattgcccgctcaattcaaggccaatcgagccagtttcagggtgaactgcaccagggcctggagatgatccgcgagatggctgctgctggggactcggcgagatcggaagtggcactcctggagtcgcttgagcgcgcgttgacacgtctgcattgcgcgaatgaggcagatggaaccgggcatggagatacgccaagaaacaaatctggtgccgactatgagggtttcaaacagtgggaaaccatgtggaagtctactggcagcacaaacccagagaaaatgcacagccaatggacccccggcttgacattatttgcgagccaaaatcacttggatgagcacataccccagtcgctcgaaaccggagtctcctcttcaatgaagcataccgaggatatgcccaacctacactccccgtgctcctttgacgcactgccctttgacaacggcagcctgcccattcaacctgagcttcgattcttgcaggagtttctcgcaatgcccggatacaggtttgacac

SEQ ID NO: 22035 - DNA, 850 bp, Emericella nidulans
cacgcatcgaagaacgtcgatgacggactgaacatgtttgatggcagagaccatttatatttccattccgggtcaaaaggtcagcacgagctatgggacagccgactgtttaactacggaaaccatgaagttctgcggttcctccttagcaatcttcgcttttggatggaggaatacggctttgacggttttcgatttgatggtgtcaccagcatgttatatacccatcacggtattgggacgtgagtcacgataatctcgatattttttacaagtgctcaccagtgtcagtggcttttcaggcggataccacgaatacttcggtccagcagttgacgacgatggcgttatgtacctagccctagcaaacgaaatgctgcaccggctttacccagattgcataaccgtggcagaggatgtttcgggaatgccagcgttatgcctaccacacggccttggtggagtcggattcgactatcgtctcgcgatggccattccagatatgtatatcaagcttctaaaagagaagtcagacaacgattgggacattggcaatctcgccttcacgttgacaaaccgacgccatggcgagaagaccattgcatacgcagaaagccacgaccaagcgtaagtcctcccgtcttctgtaacagacccaaatcctaacataacccagtctcgtcggcgacaaatctttcatgatgtggctctgcgattaagaaatgtacacacacattgtcgtcctgacagaatttacccccgttattgaacgccggatggcacttcaccaaatggtccgggtttggacacaccccccttgtggccaatgcttccctaatttccaagggac

SEQ ID NO: 22036 - DNA, 420 bp, Emericella nidulans
ttctcatcaatctcagcggcgatactgctactatacctattgtgaggctatgtccttgcctaggtaactacgcggttctgttcgtctcggccgtgcatggactgacaagcgaggaagaatgttccgcacgttttggctgagctctcggcattctatacacacgagcagctgcctagaatgccgccatcagaagaattgagagacgagtctagagcatcacaggggcactcggacgctggtgacgcagacgccgatgcagagaatgagttcgttagcaagcgcagggtgcagctagcgagcgcgttagaacatgtgatcttcaccgcgttgagggcgcgattggttgctacgacacagttattgaggggtgctgtgaaggtagcggacctgaagggattgtatcgggtgtttgaacgatgc

SEQ ID NO: 22037 - DNA, 683 bp, Emericella nidulans
aaaatgactaccgatgattttgagcctctgctctgcttaggcaagggatcctttgggaccgttttgctggtgcgccatgctctcacaggaaagctttacgcgcagaaacagttcaagaaagcctcgattacggttcacaagaaactcgtggaacaaacgaagaccgagcgcgcgattctggaaagcgtgaatcgacaccccttcgttgtaaagctcttctacgccttccaggaccacgaaagactttaccttgtcctcgagtacgcccaaggaggagaactcttcacccacctcgcgatggaacgcatgtttgacgaagacgctgcggccttctacatggccgagatggtcctcgcgttggagcacctacatcagaacgtcggcgtgatctaccgcgatcttaagccagaaaactgcctccttgaccgcgaggggcacctccttctgactgacttcggcctcagcaaaatcgccgtgggcgacgacgaccgctgcaactcttccctcggcacaatcgaatacatggcccccgaagtcattcaaggcaaaccctatggcaaagcatgcgactggtggtccctcggcgctctgggatacgaccttctcaccggctcgccaccctttaaggcaaataaccacgcgaagctgcaagagaagattctcaaacagaaactcgtcctacc

SEQ ID NO: 22038 - DNA, 850 bp, Emericella nidulans
ctgatggtggtctcgtgagccatgaccggttcagtgggctaaggggcatcctcagtggaccagcaggtgagactcgtcaaattcatctgggctgttcagtgctaactgcccgtaggaggagtcgttggctttgctcggacctcgtacgatgccagctctggcactccggttgtgggctttgatatgggtggcacttccactgacgtctcacggtacgggggcacattcgagcatgtctttgagagcaacactgccggaatcacgattcagagtcctcagctcgatatcaacaccgtcgcagccggcggcggttcgatcctattttggcggagcggcctctttgtcgtcggtcctgaaagcgcctcgtcgcatcctggccctgcatgttatcgcaagggtggccctctaacggtgactgatgcaaacctcttcctaggccggctgatcccagacttgttcccaaagattttcggcgagacagaggatcagccgctcgatgtggacattgtgaagaagaagttcgtcgctttgacagcggagatcaacagagataccggcaaagctctgactccagaagaggtggcctgcggtttcttgaatgttgccaatgaggccatgtgtcggccaatccgggcgttgacggagggcaaaggatatgatatcggtacgtattaacctaggaatcactcataaatacaaaccctctctctaacattcacagcgagccatagtttggcggtcttgggaggtgcaggagggcagcatgcctgtgacattgcccgaacactgaagatttcgaccattgtaatacacagattctctagcattttttcggcttacgggaagacgc

SEQ ID NO: 22039 - DNA, 850 bp, Emericella nidulans
accttgggaattactggacatgtgcgatctgttaacggaatccaatgggaaccttctggtggttatcttctatcaacaagtgctgatcaaacaacccgccttcatgcacagtggcttcgggaagggcaaaagtcgtggcacgaattctcgcgaccgcagattcatggttacgatttgaactgcgttgacactcttggcccggaccgcttcgtatcaggtgctgaagagaagctgttacgggtgttcaaagaacctaaaccaattgcccaactgctgaagaacctttccggactcgcacagaatacagagggagagcttcctgacacagctcagattccagttttggggttgtccaatcaagctgtgggtgaagaagcccctgtggaaacagatacggcagaggccgagagtatcggacaagcgcaggcatatcaatcaatactatcaaattcgactcagcctcctctcgaggaccaactggctcgatataccctgtggcctgaacacgaaaaactttacggccatgggtacgaaatatccgccgtggccgtaagtcacgaccgcacactcatcgccactgcatgcaaggccagctcgatagatcatgcagtggtgcgtttgtacgacacatccgattggcacgagattcgaccatcacttgcagctcatactttgaccattaccagtctctccttttcagctgatgacaaatatctgctcagtgttggacgggatcggcagtgggcggtttatcgtcggagtgaaacagactcatcaagcttcacactcattacgtccaaccccaagggccactcgcgcatgattctcgatgccgactgggcccctgtct

SEQ ID NO: 22040 - DNA, 691 bp, Emericella nidulans
atgcctacagcaaaagcaattgtcgcccgcgagccccggttcacagcgctgaactgggcgctcgaggatgtctgcgtctctaatgagcccggcgacgacgaggtccttgtcgagatggtcgcttctggcgtctgccataccgatatcgtactctctgcggtgccgtcagggcagctaggaattgggtatccaaaagtgataggccacgagggtatgtctaccgtactttactggaccccgtagggccactgaactatgctgatactcagcggattgaattttgaaggatctggatacgcgcgcagaatcggtaagaacgtcacaactgtccaggaaggagacccggtgttgctttcattctattcctgcgggagctgtgggcagtgccaggagaggcacccagcatactgcgactcgttcgcggtagaaaattacgtcgggcgcagggggcatgtcacgacagccaattctgccaatggtaaaggggacaatggggagcaggtccactcgcgcttctttgcacagtctagtttcgcgcggtacagcatcgttgatgaatcgtgtatcgtgaacgcgtaggatctccttcggagtgaacacgagctgaccctctcgaaaagctgggatgcgggttccagacggggatggcagcgatccaccagtgggcacagccaaccaccccctgctgcct

SEQ ID NO: 22041 - DNA, 850 bp, Emericella nidulans
gctctcgttgcggcagcggcgccgcgtgccctggcttcgccagggcccagtctcaacgagcgccagtccgatgatgaaccattttctccgccatactacccagccccgaacggcggctgggtgtcgacctgggcggaggcatacgagaaagcgcacagtatcgtgagcaacctgaccctggccgagaaggtgaacctcaccaccggcactgggatattcatgggcccctgcgcgggccagaccggcagcgtcccgcgactcggcatcccgaatttatgtcttcacgactctccgttgggcgtgcgcaataccgaccacaacactgctttccctccaggaatcacggtcggtgctacgtttgacaagagcctcatgtacgagcgtggtgttggacttggagagcaagcacgtggaaaaggcgtcaatgtgctacttggcccttctgtcgggccgttagggcgcaagccccggggtggccgcaactgggaaggattcgggtttgatccggttttgcaaggcattggaggcgctgagacgattaagggaatgcaaagtacgggcctcattgcttgcatcaagcatttcgtagggaatgagcaggagatgcatcgaatgagtagtgtcgtcacacaaggctactcgtccaacatcgatgacagaacgcttcacgagctctacatttggccgttcgctgagggtgttcgggccgaagtcgggtcagtgatgattgcttacaatgatgtgagtggaacggtttctggcatccatcgtatgctgattatctaggtaaacaaatcatcctgcagccaaaacagcaagctcattaatggcgtactcaaagacgagctgg

SEQ ID NO: 22042 - DNA, 500 bp, Emericella nidulans
tacgagtcacatgtcgtgtcgatatgacgaccaacctctaaggcttggcgtcttcagctcctgtaagagagagtgtaatcggtgtccagacatatggggctatacattcccagcatgagagtatcgggactagtcacggaagtgcgccgcactatgcacactagatctaatagtgtgcggtcaataggttcgcgtggggccaatgttggcttctcgatcagagaagcgtccttggtgcacagaataggttgctcacgatcaagggtcgggctgaacttcctgacatagttcaggtatcagtgtccttggcatatggttgggtcaggtgcacagtatgtcacagtagtaggcagacccagcggcacagtacagggataggcgatatagtacaagcacgatgtcacatgcggacccgtgggtgataactccagcaacattgaccttggatccggtcgcatctcccaccagttgagaccagagggtccaaccgcaccagatct

SEQ ID NO: 22043 - DNA, 659 bp, Emericella nidulans
attttgtcggcgaggtattcctaaagtgcaacgccaaagaagtcgtagagcgatgcggcaagctggtacaagacattattcggcagagttctgggtcagataagatcccagagatatctgtgcaggggcatttggacgccacttttccgtacatgctcagtcacctggagtatatcattggcgaactcctgcgtaattcgatccaggctgtgagcgagagatatcaaggtctcaaccaaacaccaccccccatcgaggtgctgatttgtgaagcacctcaacatgtgattatgcgcgtttcggaccaagggggaggcataccccgagagattctgccatacttgtggtcttttacgaagggtccccacagcaaagtacgactggaaaatttaggacaggtcccggcaatggcagctacactacaggagctctcagtgtctagcgacataaaacatgcagacaaagagacatttcgagagagctctctagacacgctgacttcgcggcctccagatcttaggctggggatagggctgccaatgagcagagtctatgcagagtactgggcaggtagtctggagctgcacagcttagagggatacggcgtggacgcgttccttcagatatcgaagctcggcaacaagaacgagcaagtgacg

SEQ ID NO: 22044 - DNA, 500 bp, Emericella nidulans
  unsure (1)..(500): unsure at all n locations
ttcttctttcatattgatagaaataccaaagaatctttctgatgcaaaaggggtgaaagtacccgtatgctaataagatccactcatatttctttacaaccgactattcttaccttacttcttattcatttagtcatgatgatattaggcgacttttttctcttaccactggcagcctctaatgaatatatcgctaaaggagaatggtggcgtgtcataacttctcttctcgtacacgtagacttacaacattttctttctaatagtatttttttgtttgctcttggttcttctatcgaaaagcaactcggacacttttctttttttattctattttttctctctggaatttctggaaatatttcttcttatattattatgccgcttgaatatattcacgcaggtgcatcaggtggtattttcggactattaggtgcacagttatttttattgtacaataaaaaccgctcttatctgaattagtcgacaagcttntcgag

SEQ ID NO: 22045 - DNA, 500 bp, Emericella nidulans
cttgcaagctaacgctggttgccggtataatagagaaacaggtcaccacggtttcgccgttggatccgggggaatcagatgttggaaaactagaactccctgagaattttggcgaggtcgtgaaaggaatttaccgttgcgcgtttccccagccctggaaccttccggcgctcaaaactctagggctgcgaaccataatgtaagagcttgtccacgtattgtgggactatggcttacatatggtttatagtaccctcgttgatgagccctacacacagagccacgagaagttccttgaagaaactgggatcacccatcatcgtattccattcatcgcgaataaggaccctgctatcaaaacgccagagcgtgtggtgaacaccattctgagattgatgctcaataagtccaaccaccctatcctcaaacactgcaataaaggaaaagtaagtgcaatgttccggcctctacggagccacttctcactaaatggtaaacag

SEQ ID NO: 22046 - DNA, 339 bp, Emericella nidulans; identical to SEQ ID NO: 9352
  unsure (1)..(339): unsure at all n locations

SEQ ID NO: 22047 - DNA, 354 bp, Emericella nidulans
cgtccctatcctgctgctctcttccttgctcgtcgaggactggtcctctgagaacctgcagcggaactttcctgccgagtcgcgacaaagcttagtgatcggaatcttctattctggcgtggccgccatattcatctcgtactgcaccgcctggtgtgtacgagcgacctcgtctaccacctacgccatggtgggcgccctaaacaagcttcctcttgcggtcgccggcattgtcttcttcgcggcccccgtcactttcgggagtgtatctgccatcgtgcttgggttcatcagcggccttgtctacacgtgggcgaaaagcaccggtgcgtgagggcccaacccgtcacgagc

SEQ ID NO: 22048 - DNA, 411 bp, Emericella nidulans
ttgatggctgggctcttttcggaccaggtattgtgtcttcggagttgattcgtgatcccaatgccctgaggatttccacgaagttaaatggccgcgaggttcagtcttcgtcgaccaaggatatgatttttgatgtcgcgcagacagtatcgttcctatctcgaggcactaccttgctgccgggtgatctcatcttcactggaacgtaagtccgtatcctatgaacagcagaggccaaatactcacgaatgcatagcccccagggagtcggtatgggcaggaagcccgcgctctggttgaagcacaacgaccaggtcgaagtctcccttgaaggggtaggctcctgcttgaatagagtggttttcgacaaaccatctgtcaagctgtgaagcgggaagcctttgatcggca

SEQ ID NO: 22049 - DNA, 850 bp, Emericella nidulans
ttgtgtttttggccggctacacagtggccagtagctttggtctaccagatacagggtacattgcaatggaggatcagtgcaagagaatccaagaagtggtgcgcctggtcaaagttcctgtcatggcagacggggataccggttacggaggtcccatgaatgtcaaaagaacagttgagtcattcgcagctgcaggcgctgctggtattatgattgaggaccagacctggcccaagcgttagtgccgtttccagactatgttgaaaagcttcgctaacgcaaatgcaggatgcggacatacaaagggcaagtccgtcgttacccgtggtgaagcctacgcccgtatccaggcagctgtcgacgcccgcaacgaggggcaggacatcttcattcttgcccggaccgatgccctgatacacggctgggacgaagccctaacccgtgccaaggagtttaagcgcatcggtgtcgacgcggtctttgtcgaggccctgccggatagggagtcaatgcggcggtgtgtccaggatgttggcattcctacttttgccaatatcattgaaggtggtaagacagaaaatatctcggccaagaatctcgccgagcttggtttctgcgctgtagcatatccttggacgctggtcgccgctaggcttaagagtatccgcgagacgctggacgccctgaagaagagtatgactgaaggggcaccgccaatgattttgagctatgcagaggtctgtgagggggttggcttcaacaagtactgggtatgtaccgtcttcttgtcctcagacctttagttaaccttgtgtaggaacgtgagacccggtacgagtacaatcaggat

SEQ ID NO: 22050 - DNA, 423 bp, Emericella nidulans
ttcgcggtacgcataatacgactcactatagggatctactccgtcttgtaagtgcccctcacttttgaatgggcttcagcttggaactcgagtaactggtatccagttggtcttttggtctcaacggtatcccctggattgtctccgccgaaatcttccccggcgcgctgcgaaatctcacggggacatgggctgcgctggtgcaatggtatgcaattcccttcacctagtatccatatctaaatcagcaggttgatccaattcgttatcaccaaagctctcccgtacatcttcaatagccttgggtacgggacgtggttcttcttcgcctcctggatgctgctcgctatcatttggtcattcttttttctcccggaaaccaaggggaagactctcgatgaaatgcatacgatcttgtacgtt

SEQ ID NO: 22051 - DNA, 850 bp, Emericella nidulans
attacatccctacacaatggcagacctatcttttaaccgtatttatcttgatagtccacactggtattagcagcatgccaacaaaatgggtagcggttttcaactcttggggttcgactttcaatatgctcgcactggtggctgtcattatcgccattcctgccgggaccactaactctcccaagttcacaccatctagggaggtttgggggaacattacgaacatgaccgactatcctgacggagtagccgtgctcatgacattcgttgctgttatttggaccatgtctggctatgactcgcccttccatctcagtgaagagtgttccaacgcaaatatcgcctccccacgggccattgttatcacctcgggcgttggcggtctcatgggatggttcttgcagctcgtcgtcgcctacaccgtggtagacattgacgcagtattgaactcggatctaggacagccctgggcgtcgtacctcttccaggtgatgtcccgtaagggtgcgcttgccatcctcgcactcaccatcgtctgtggtttctcgatgggccaaggatgtatggtggcggcatctcgagtcacttatgcttacgctcgcgacgactgctttcccttttcgaagcactggaagcgcatcaacaacaccacccaaaccccggtaaatgctgtcatactgaacaccgtccttggaattctgatgtgtctcctcttatttgccggcgacgtcgccatcggtgctttgttctccattggagctattgcgcaattcgtcgccttcataatccctattgcaatccgcgtcttctttgtccgtgaccggtttcgcaaaggaccatggcatctggg

SEQ ID NO: 22052 - DNA, 850 bp, Emericella nidulans
tgacctctcctcccccgacccgaatgacaacaccaacgagcctttccttgacttccttgaggccgtcctcaagctcgatcagaaagacctgccccaggtcatctcgacctcctacggcgaggacgagcagacaatccctgagccgtacgcccgctccgtctgcaacctgtacgctcagctcggttcccgcggcgtgtctgtgctcttctcctcgggtgactctggcgtcggcgccgcctgccagaccaacgatggcaaaaacacgacgcacttcccgccgcagttcccggcctcttgcccctgggtgaccgccgtcggcggcacgaacggcacagcgcccgaatccggtgtatacttctccagcggcgggttctccgactactgggcgcgcccggcgtaccagaacgccgcggttgagtcatacctgcgcaaactcggtagcacacaggcgcagtacttcaaccgcagcggacgcgccttcccggacgtcgcagcgcaggcgcagaacttcgctgtcgtcgacaagggccgtgtcggtctcttcgacggaacgagctgcagttcgcctgtatttgcgggcatcgtggcgttgctcaacgacgtgcgtctgaaggcaggcctgcccgtgctgggattcctcaacccttggctctaccaggatggcctgaacgggctcaacgatatcgtggatggagggagcaccggctgcgacgggaacaaccggtttaacggatcgccaaatgggagccccgtaatcccgtatgcgggttggaacgcgacggaggggtgggatcctgtgacggggctgggaacgccggatttcgcgaagctgaaagcgctcgtgcttgat

SEQ ID NO: 22053 - DNA, 850 bp, Emericella nidulans
caccgcaattaagagatcctcgattccacgagatgagatcttcctcaccacaaaactctgatgcaactccttccacccagacgacgttgattctgcactatatgaaactctgagagacctgcaaaccgagtaggttgatctatatctgcttcaccacccatgcacgtttgcgcgtgggaaagaccgctttcccaagggtgaagatggactcatgcgtatgggagagacgacctacgtcgatacatggaaagcactgcaggagatcatgaagaggaccaggaaggccagggcaatcggagtctcaaacttcagtagggatgagactaagaatcttatcaatgctgaaatggtgagcttcttcttggtcccactcagccaggcatacgatggaggttagggctaatgtcgttcgatgggcgcagaccccagcagtccatcagatggaactccacccgttcctctctcaaaaattcttcgcagtctggcacaaaagtcttgaaatccacgcgcagcagttcagtcctataggtaatatgaactcgttctaccgcgatgtctactggagcaacaggcgcgccaacctcggccgcctcctcgacgagcccgtcctctccgaaataggcgcaatgtattccaagaaccctgcacacgtggtattagcctggagcgtgaatcatgggcgctctgtgatcccgaagagtacgattccttggcagatcaggcagaatgttgagagtgattttgtgcttgaggaggatatggagaggattgatgagctgaatgcggatttgaggttcaatacgccgcaagaaacttaccgctggctgctatatgaaggactggattgagt

SEQ ID NO: 22054 - DNA, 500 bp, Emericella nidulans
actgtgccagacccagggccacaagtatccaccatcagctccgatattcacgcagtcttttctcgagattcaacagtggtagtcctaaactggtcgacaccgttaaaatgagcacccctgacatcaccctatacaccgataacactcctaatgggcacaagatccccattattctcgaggagctcggtctcccctacaagctcgagcaggtctccatccagaccggcgagcagaagaaagagtgcgctgctcattctaattctaatctcatcagctacagaggctaattccacagatggttcctcaagattaacccgaacgggcagatacccgctctgactgacggcaagcagcgtgtcttcgatagcggcgccatcctgctatacctggccgataaatatgacgcagagggcaaggtcagctataagcctggaacgcctgagtattatgagcagctgagctggatcttttggcaaattggcggccttggaccgaggggt

SEQ ID NO: 22055 - DNA, 850 bp, Emericella nidulans
cacattttcctcttctagcttttggcgtgggcaattggtgactttgactacgtcgaggcattgaccgaacgtaaataccagggaaagagtattcctgttcgtgtctatacgacgaagggacttaaagaacaagcccgctttgctcttgaatgtgcacatcggaccgtcgactacttctcggagattttcgagatcgaatatcctctgcctaaggcagatcttctagcggtacatgaatttgtaagttgtctctcgacactgccggaccttcataatgacctttcgtgaaaaatataggcaatgggagctatggaaaactggggtcttgtgacgtatcgcacgactgccgttctgttcgacgaaggcaaatcagatactcgttataagaatcgaattgcttatgttgtcgctcatggtgagtcaagcattaccttaagccgctctccaccctagctaactaggctattatagaacttgcacaccagtggtttggcaatctcgtaacaatggattggtgggatgagctctggctcaatgagggctttgctacatgggtcggatggcttgctgtcgatcacttctatccaggtaaggaatccatggccccctctagcgatcacagctgaaagtatctaataccatggtagaatggaatatctggtcgcagttcgtggtatgtacttctagtggtgattcaatgttgaaagtaaaaataatgacagctgacggctgcacaggctgaaggtgtccagcaagcatttcaactcgattcgttgcgtgcatctcacccgatccaagtacccgtcaaaaacgctctagaggtcgaccagatctttgaccacatcagcta

SEQ ID NO: 22056 - DNA, 576 bp, Emericella nidulans
tttcctgccattcttacattggaagctcacatctcacagtctgcacgtatcatttatgacgataacaaaggtgctattgccgctgcagaggctaagagtgagtcacgcagcagatattcactaagaccatgaccattcaggtgtggaaaccggagtatgagcgccccggtagacacttcgtatacacgacaagatatgcatacttcttcgtcactctacttgatcagcttgatgacagagctaatctcgagcaattgctacgtcgtgttcgaaaaaagcaaggcgatttcatcaatcatactaagttatgggaggatatgtgtctaacctacgcccgcgtcatacgtagagcagctgggattagtgagggccatgaagaaagtgtcttcaaaccgatagggtgggaggagttctcctccaacaccgcccgtctagaagagcttcctcacgttgcgcctgaaagtccgtcacttctcgagctcctccgggacgcgattgaactcaagaaactaaacaacaatcttatgaaagtcgcgttacttgaagatcttattgcggacgtctactcccgcatct

SEQ ID NO: 22057 - DNA, 718 bp, Emericella nidulans
  unsure (1)..(718): unsure at all n locations
ggaaagggtgaagttcggatcagagtcgcatatgttggattaaatttcaaggcaagtcctcagacatccatggcgatgctaatgggctgacacaaatcaaggacattatcaccgccctaggactaattgcgtctcctgaccagctagggctggagggcagcggggtggtcgagagtgttggcactggtgttaccaatgtcagcaagggagatagggtcatcttcttgggcccagggtgttttgcaacccacgttactgtgccagctgcaaaagctataccactcccaggcaattggtcgctggaggagggggcaacgtcgccgattgtctctttgacggcggctcagtgtctcttacgactaggaaatctacgacgagggcaggtaggttgatatgctatggccgatgtatagagttctgacacgctggttcagtctgtattgatccacgctgcggccggaggcgttggaattgcggctattaggatctgcaaaggtgtgggagcgaaggtagagattttttctgaagcgtcgtcaattcacactgacagacaatagatctacacaacggttggcaacgacgagaaagcacagtatttggtcgacacattcggtatcccacgtgcgcacatctttcattcccgcaatgcatcattctatgatgacctcatgcgtgaaaccggtcgccngggggcgnatatcgttctcagctctctcag

SEQ ID NO: 22058 - DNA, 500 bp, Emericella nidulans
ttgaaagcaacccattttctatcactatgaagagatcgtaaagatccagtccaccctcaaagagtctatcaccggcttcggctgcttcggcgcactcttgcagattgcgcacccggcgtcgcccgcggtctcaacaaccacagcgaattcgccacgcgccaacctgaccgcgccgagaaaatagtcatctacgtgtacatgatggtatacggaggtgaggaagagaaatcgctcatcagagagtgggtgaacacgatgtattctcgcgtcaaaggcggggaaggcgacaccaagtaccacgcgcaaaacccggacctccagctttgggttgcggctaccttgtatgtgaggtggctccaggcttatgagatggcctttggtcagctacagggcgagaaggcggagagtataccatgaatttgcggtttttggaacattgctgcaggttccgcagagcaagtggccgagggatccctttagtagggttattgcggcccgat

SEQ ID NO: 22059 - DNA, 473 bp, Emericella nidulans
gcatcatgtcccgtctcggcgcgaacgacaacattttcgcagcccagtccacattctttgttgaactatcggagaccaagaagattctatcagaagcgacaccccgctctctcgtcattctcgacgaattgggccgtggaactagctcttatgatggagtccgtgtcgcccaagccgtccttcatcacgtcgccacgcacatcggcgcattagggttcttcgcaacccactatcattcgctggctgctgaatttgagaaccatcctgaaataaagccgaagcgaatgaaaattcacgttgacgagaacgagcgtcgagtcacgttcttgtacaagcttgaagatggcgttgctgaggggagtttcggcatgcactgtgcggcaatgtgcggaatcccaaataaggtgattgagcgcgctgaggtcgcagctaagcaatgggaacacaccagccggctaacggaaagccttgag

SEQ ID NO: 22060 - DNA, 834 bp, Emericella nidulans
gacaacaatgatgatgaaggggaagtggtgaagattgcactccatccattcgataacgaggcgatctgggaggggaacagtacgcttgttgatgagttggtcgagcaggttccccttgttgcaggggatgctgttgagggagatgggtatggggatatggcccttccagttgatgcaatcgtgtgtagtgtcggaggaggtgggctattgaatggactcgtcatgggacttgagcggcggcggagacagctggcaaaatcttcatcaagaaagacggcgcaagcaagaccgacgcatctgattgccgttgaaacgcgtggaacggactctcttgctgcggcagtagcgaaaggttccctggtgagtctgccgaagatcacgtcgcaggcgacatcgctcggtgcgatccgggtttcggaaaggacgctccagtatgcgctacatccgccgcagggtgtcaaagtgcatagtacggtgctgtctgatgcagacgcggcaagaggcgtgctgcgtcttgtggacgaggagcggatgctggtggagttggcttgtggagtgtgtgttgaggcggcagttggcgatgcttgtcgggctgagaagacgaagaagaggaagagggggttggatgaagggtatggagatgaccgggtgtcggcgggtgagagtgagggagatttgtcagatggaggggtggctgaggatcccttgcggtcgcggttgaaggagctggtgccggacttgaaaccggagagccgagtagtgatagtggtttgtggagggagtaatgtcactattgatgcggcggtggaatggaggacgatgctgaacgaagga

SEQ ID NO: 22061 - DNA, 840 bp, Emericella nidulans
atgcataatatgtgcaatgcgtgcatggaatatgtcgctaacctggtcacagctactcagggcaacgttaaggaggcaactgggattcttcagcgcgagtactacaaacaccccgaggcgctcgtccttctcattcaggttgcgactggccatgatgacgcgcagttgaggcaactcgctgccgtggaggctcgctccttggttggcaagcactgggctaaggttcaagctggccaaaagcctgctctccgcgaacaactccttcgctctggtgtcagcgaggccaacgaccttgtccgccactccgtcgctcgtgttatctcagctgtcgccaaagtcgatttggaggatggcgagtgggctgacctgcccaacttcttgatgcgcgcggccgacggtggaaacaaggatgagcgtgctgtctcgctctatatcctgttcactattcttgagaccctcggagagggcttcgaggagaagttccaggatctattcactctgttcggcaagactatccgtgacccagagagtgccgatgtccgcatcaacacactccttgccctgagcaaattggccatgtacctcgactccgctgagaacatgggacccgtcaaggcattccaggaccttgttccttccatggtcgctgttcttaaggacgccatcgaccaaggcgaggatgaccgcatcatgcaggcctttgaggtcttccagaccctgcttggtttcgaccctgctctcctcacagttcacctgaaggatctcgttctcttcatgaacgagattgccgccaacaccgagattgatgaggacaccgtactcaggctatcagtttcctga

SEQ ID NO: 22062 - DNA, 566 bp, Emericella nidulans
gatatcaacatgatcctgcagccaatatcaagcctcctaatgcctttagtgattctgattggggtgggccttatttaaaagcacgggggggtgttagcagatatgttttcaaacttgccggaggaccaattgcttggcaatcaaagcgccaaacctgcgtagcaaccagctccaatgaagctgaatatattgctgcatctgaagcctcgcgcgaagcctattagatatactctcctcaaacttcaaaggacagacaataagttcatcaaaatccagagactcgcgaaattatgaaggatctttaattatttgatgaccagcatgcacctggtatcctattatatatagacaacaaaggagctattgatcttacaatgtccaacatacaaaccaaaagatcaaagcatattgacatccgctaccattacacccgtgatatggtcgaccaaggcatcatccatatcaagcagatccctactgccgaaatggttgcagatggctgtacgaagcctctgggatctgaagctcactcccatttcattcgtttattaggtctccacaacgat

SEQ ID NO: 22063 - DNA, 850 bp, Emericella nidulans
ttcatccgtctcggcttcgtttgccctgaagctcaaactacgcctgactttttgaccttcatgtcgagcccagtcgagcgcgtcatccggcctggattcgagaacttagtgcccaggacagccgatgactttgcgcagaggtggaaagagagtcctgaacgccaggcacttctacgtgacattgaccggtataacaccgagcacccctttaacgccacagaccttgatctcttttcgtcttcgcgggatgcagagaagtccaagaaccagcgaccgaaatctccatataccttgtcatactggggccagattcgaatctgcttgtggagggatttccaacggctgaaaaacgaccccagtgtgacactggccatgctgattctaaacttcttcgaggccttgatcatttccagtgtgttttacaatcttcctggaaatacctcctccttcttctcccgtggcgcattgctgttcatgatggtcctcttgagtgccttttccagcgttctcgaaatcatcacgttgtacgagaaacgaacaattgtcgagaaacacagcagatacgccctttaccaccctagcgctgaggctatttcttcgatgattatggatatgccatacaagattgtcaactccctgctcaacagccttgtcctgtacttcatgggaaacctccgacgtgaagcgggagcgttctttttcctctacctgatctccttcgccatgatgatgggcatgtctatgttcttccgttttttcgcctctctgacgaaatcgattgaacaagccctcgccccctcttcaatcatcttgcttgctctggttctatacacaggctttgcatcccggt

SEQ ID NO: 22064 - DNA, 850 bp, Emericella nidulans
aattgattcgattcttgatcttcaagcctgatagtaaccgtttgtgcaagttcctggagctctctgcgctaggcgtccgccttgcagctgagggcagctatcacggcaaagaagggtacttgatgattcaatcttcaaaaggacttgactttcgaagagcctttaaccccgggatgatgaaacgacgacattcgcccaaatggttccttgtcagacacagctatgttgtctgcgtcgactcacccgaagagatgaatatttacgatgtgttcttggttgatccattcttcaaacttcaaactcaaaaggtcagcttgcggcatcagaaagcgaaggaactcgcgaagtctgctacagaatcagcgcggcatccacagcaccatacgctaagacttgagaattctgagcggaaacttaggctgctggctagaaatgagcgtcagcttcaccaatttgaagattctattcgatttatggttagcaataccccgtggtcaaaaccaaaccgtttcgatagcttcgctccagtccgccagcactgtttcgctcagtggttagtggatggacgtgatcatatgtgggtcgtatccagagcgataaaccaggccaaggatgtgatatatatacatgactggtggctgagccctgagttgtatatgcggcgaccagcggcgatcagccagaaatggcgacttgatcgtcttcttcagcgcaaggcccgtgagggtgtgaaggttttagtcatcatgtaccgcaacatcaactcagccattccaatagactcggaatataacaagttctctctacttgacttgcacccaaacatattcgttccccgatgttcccatca

SEQ ID NO: 22065 - DNA, 850 bp, Emericella nidulans
ctaacatagacagccgaggaaatcaaagacgcttctcggacgctccccaaggctatgatgtctgcggttggagtcaacgcggtcttagggttcatcatgatcatcactctttgcttcactcttggagatgtcgacaacatcctcgaaagcccgaccgggttcccgtttattcaaatcttctacaacacaacgcagagctatgccgccacaaacaccatgacggccatcttggtgatcaccttgacggcaagtaccatcaccgaggttgccacggcctcgcgccagctgtggtcttttgcgcgtgacagagggcttccattctcggatttcttcgcctacgtatgtttgaccccccactctatttcttagcatgcagtacatatctgacacgcgacaggtaacacctggctggaacatcccactgaactctgtcctcgtctccctaatcgtcacaattctcctctcgctgatcaatatcggctcaaccgtcgccctagcagcgatcgtctcgctcacgatcacctcgctaatgtccgcctacatcctgtctatcggctgcatcctgctcaaacggttccggaacgagcctctccctcaccgccgctggtccctgggccgcttcggcatggctatcaatatcgcagcaatggcatttcttttgccggtgtttgtgtttgcattcttcccacttatggcggaggtggacaagcagacgatgaactggagcgttgttatgtatatagggttaattacgctggcatcagtttattatataatacggggacggaatcactttgttgcgcccgttgcgctggtgaggaagctgcgctaggcttctgaaaagagtatt

SEQ ID NO: 22066 - DNA, 653 bp, Emericella nidulans
gaaacaccaaacctctttcgcccgctcacaatccgctcggtaacgctcaagaaccgcgttatcgtcgcgccaatgtgcatgtactctgcagagtccgacccatcctcaccctcagtcggcgccctgacggacttccacatggcacatctgggccactttgcactgaagggggcagggctggtcttcactgaagcgctcgctgtccagccgaatggacgcatctcgccgaacgatgcgggaatctggcaagaaggtactgagtcagagcaattcaaaggtctgaagcgcgttgcggatttcgtacactcccagggcgcaaagtttggtgtgcagctggcgcactccgggcggaagggaagcacggttgcgccgccgctggctgcgtcaagaggggtgagggctcttaaggctgatgagggggtgtttgggtggccaaaggatgttgttggcccgagtggcggggaggagaacaagtgggagcctgggaatatatcatactgggctcctcgggaactgaccgtggcagagatccaggagatcgtcaaggcgtttgcgaaaagtgcagagattgccgttaaggcgggtgtggacgtgatagaaaaccacgctgcgcatggctatttggtgaatgagttcttagccgcgtgcgcatc

SEQ ID NO: 22067 - DNA, 850 bp, Emericella nidulans
caaaacaccaagaaaattgtcgccctccataagaaggcactggcaaatccaaagactaagccaagcgatctgggacgattgaacacagtcgttgtcaacgaccgcgatcagcgcatcaaaatgcaccaggcaattcgtcgcatcttcaattcgcagattgaatcttcaacagacagtgaaggaatgatggttatctcagtcgctgccaaccgcaacaagaagaatccacagggaggtggaggcgggcgtgagaggccgcgcgtgaattgggacgaactgggcggacagtatctgcactttactatttacaaggagaacaaggacaccatggaggtcatctcgttcatcgcccgccaactgaagatgaatccgaagagcttccagttcgcggggaccaaagatcgccgcggagtaaccgtgcagagggcatgcgcttatcgcttgcaagccgatcgcctcgcgaagctcaatcgaacgctccgcaatgccgtcgttggcgacttcgaataccaacctcacggcctcgagctcggcgacctctatgggaacgagttcgtcgtgactctccgcgagtgcgaggttcctggcatcaacatccaagaccccgcatcagccgtagccaagacaaaggagctcgtcaacacttcactcaagaacctctaccaaagaggttacttcaactactacggcctacaacgtttcggctctttcgcaacccgcactgacacagtgggcgtgaagatactgcaggacgacttcaagggcgcctgcgacgctatcctcgactacagcccacacatcctcgccgcggcacaagcagaattaggccagggcgaagcgaagggccaca

SEQ ID NO: 22068 - DNA, 685 bp, Emericella nidulans
tgtatgtttcctcttagggtgctatccttgcgttaatagcaacaaggtttaggaatctcgcttttagggctgatgctacgtggatatccaggtcgcgggctcacagggcacgcgtgcatcgctatagccgaaaaggctccagaggcaccgtttctcgtgcaggatttagccggggtcgttgaccaaggtcgagcgtctcttcctgagtctctgagctctcgaatcaccttcaaagagcacgacttcttcacgtcgcagccggaggaagcggatatttacctgcttcgatttatcctgcacgaccatcccgactctactgccatagatatcgtcaagaatcttataccggccatgcgacagggcgcgcggcttatcatcaatgacggtgtttatccggaggttaatacgttgccaaagggggaggagaggattgcgcggtaggtgatcgctgatgaacggagcttttaaatctttgtagggctggttcaatgctgacattgtcttgtactgtataggataatggacctcgagatgttgaccaccttcaacgcaagggaacgaccgctagcagactgggtcaagctctgtgcagacgccgacagtcggctgaagctgcggtcggtttcgaaaccggagggcagtgtcatgtccatcctcgagtttgtcttcgatgagccggaatcga

SEQ ID NO: 22069 - DNA, 850 bp, Emericella nidulans
gttcgccgtcaaagaagggtacagcgtgcgcggtctctcacgacgtgaagaaggcgatgcgctgttcgagtcgctgggctcgactcccgtccgcggtgacctcaagaatgcagaccttctcacagaagagagcagaaacgccgacatcgtcctgcaccttgcgttcgatcacgattttaccaagccgtaccaggagctagttaacactgacattgccgctgtgaccgcccatgccaaaggccttgaaggatccggcaagcctcttgtcgtttcgaacgggacaaccaacgtcgcgcccgatcccaatggaggcgagaccgacgaggatgccccgttagcagaccaccttcttaccaaccgtgacggcgccgaaaggcatgcgctttcgtttgtagacaagagcgtgcgcgttgtctccatacggctcccgcagtacgtctacggtcctggtagtacaaccggcttcgccgcgcaattgatcaagctagcgatcagatccggcgaatccgtgtacattggcgatggcgagtactgcttctcggatacatacgtcgatgacgctgccaaactgtaccttcttgccgccaagcacgcaaagcccggagacgtcttcaatggtactgggcacacaaccacgacatacagggccatggcgactgcgatcagcgagctcgtaggagtacccgctcgctctattactcctgatgaggcagtcgctcgctggggcccgttccttgctggattcattagcatcagaaaccgtgcgtcgaaccgaagggctgttgagcagcttggttggaaacctgttggaccggggctgctatgggaggttcgcaacgggagctatgta

SEQ ID NO: 22070 - DNA, 822 bp, Emericella nidulans; identical to SEQ ID NO: 12134
  unsure (1)..(822): unsure at all n locations

SEQ ID NO: 22071 - DNA, 503 bp, Emericella nidulans
gtaaaatcaaaggggccaggcgcgttattggtcggcctgaaactcaggatcagtgagactttctagtcaaggagtgtgtgttttatgtggctaaccaactataagtcccctaactggcgcaagcaattgaaaacggccaaccccgggactatatcaatgtctattttgacaatgtcgacggcgaaatcctcgatgcttgtctggccggggttgctcccttctcgcgctttgttatgtgtggtgctatcagtcagtacaatacctcgaagccaaaggggccagctagctatatgaatgtgattgtgagtatcccttctgatgtatgctgcttgatactgatcatctttcagtcgcaacgtgtcactatgaaaggctttatagttttcgatttcgccgaaaagtatgcagccgctcgcgaggaactgtcgtcctggctagcccagggcaagcttgctcgcaaggatcacatcctcactggtggactggaatcggctcccaaagcg

SEQ ID NO: 22072 - DNA, 500 bp, Emericella nidulans
cctagtcaatgactggcgtgaacttgctagactacgcgtcatcctcggccttttcgaagcaggtctcttccctgccgctgtattcttgattagctcctggtatatacgccatgagacagggaagcgaatcggcctgttttacctgctaggaagcgcgattagttcgtttggaggaattcttgcttacggagtacgtttcccttcttcctaaatagaggctatctggagtctatgctaataaaagcagctgcagcaaatgcacggactccagggccacgcaggctggcgctggatctttatcatcgagggcgttctcaccgtcgcgatagggttagccgggttcgtgcttattgtcgacttccctgaagacgcgcgccgtacgcgctggttctgacggacagggagattgatatcatgattgccgagttgagaaagaccgtggcgacgcacatgaacgcccgtttgtttgaaggagtttctgaagtacggacttcatggca

SEQ ID NO: 22073 - DNA, 615 bp, Emericella nidulans
cctgctgaaaatggagtggagggcaaggcaactgagactacgactgagttaaccaaggacaaggatgttgagcttgcgaaaaaggttgtgaaggaggaagcacaaaaaaagcgaaaagtgagccattcgcctagcgacgaggaggagagcgagagtgaagacgaggagaagaaggaagaggacgagaaggataatgtaaaagaggattctggaaaggcgaacgtaccagatcttccctctgttgatgcggttagcctaccgcagcccgatgggggccccaagaagttcacagagttgggtctttcggagaagacgcttcaaggtattaaggagatgggatttgagacaatgacggaaatccaacaacggacaatccctccgctcctcgcgggccgtgatgttcttggtgctgcgaagacaggatctggaaagacattggcattcttgattcccgccattgagatgctcagtgcgctgcggtttaagcctaggaacggtatgttgggttcttttctctctgctaatgctcttgattgtcctaacgaacatgctgaaataggaaccggtgttattgtggtctcccaacgcgcgactggctctgcagattttcggcgt

SEQ ID NO: 22074 - DNA, 506 bp, Emericella nidulans
ctggacttcactaagaaccggacattcaagttgatcaatgaaaataaaatcaaccccacaacgaaaacgccggttggattcaaactccttcccgcatacagccaaatgctcctcgcccacccagattcctaccactccaagcgttctgagttcggcgctcatgccgtttgggtgacccgatacgacgatgaagagatgttccccgcaggccagtatacaatgcagtcaagtggcggcgagggtatcaactcggccatcacaaggcgccgcaacgatcctggaagcaaaacctctgtccgcaacgaggatattgtcctctggcacacctttggatcgacccataatccgcgaatagaagattggccggttatgccaatggacaggatggttgtcgggttgaagccggtcaacttcttcagtgggaatcctggcctggatgtccctgtttcgacacaggagaggaatcggagtgtgttggtagaaggggacacagtggtgtcaacttc

SEQ ID NO: 22075 - DNA, 850 bp, Emericella nidulans
caacaatacaaacacctgctcttcttccaccgctacctcctcccttttctcggcacctatccaccaacctggttcagcattgtcagccgacaggggctcgcaattgaatatagccttaatttccaggcgtcaggcaatcccgttattcggagtgcatttgaaccgttgagttacgcgtccgggaaggatgctgcggatcccttgaacaagcgacctacagaggacttgcttgcagggttggtggagcaagggttggagggattcgatatgacactcttcgatcatgttcgggatacaatcttcatttcggacgaggagacggctgcccttgaaaacccagatgcctatgggatcaagacgcatactgctctaggattcgatatgaagggggacaacacggtggtcaagtgctatatgcatccgcggtggaagagtcttgcaacgggggttccggttgccaagctgatacgagattcgcttgagcggatcaaggaccagttcgattgtgaacaggcgctcgaactggttgatgagtatatggaggatagtggatcgtgggatttaaggacgttcattgcgtgggactgtgtgcctttggcccagacgcgactcaaaatttacggcatcatcaacgaggtctcgctgggcaaagttgaggaactgtggacgatgggtggccggctcaacgacgagacgactctcgagggactctcgctccttcggcgcctttgcacctactggaggtcaataaggatgaccggctgttttcgaagggggacgaggagaaactcgagtatggcccaacagtcgacggcttcctgccactattctggaactatgagatctgggc

SEQ ID NO: 22076 - DNA, 787 bp, Emericella nidulans; identical to SEQ ID NO: 13158

SEQ ID NO: 22077 - DNA, 500 bp, Emericella nidulans
ttctacttttgcgcccattgtcaaaatgctcgtatgtttatacttaaagattctgtggtccttggagccaaatgctgactttaattgaacatttcagcgtcgtcaagctcgtgaacgtcgagattatctttaccggagagctttgcaactccgcgatgcttccattgccgaaaaaagagcgcagctgaaggagtcgctagcaaccggaaagcaactcgatccatctatcgcgaatgatcgaaaacttcgagaggatttcaagtttgacgaatcactgccgacagcagacaagaaggataaagacgcagatcttctcgacttggacgacgaatatgctctcacctccggtatcatcgatcctcggccgatcgttacgacttcccggtctccttcggtgcgtctaggaacatttgccaaagagatccgtctgctcctacctacttccattcgtttgaatcgtggcaacctagttctccctgatctcgtggcgagcgcaaact

SEQ ID NO: 22078 - DNA, 850 bp, Emericella nidulans
aattggtttcgtggagcaagtttgtgcaaggtgaagcaacagttgacgctgctccccgaacacccaatcccagctttgccacggctgttctaaaacaagctatcaagcggacggacctcgactggccggagaagatcatgcaggtctacgtcgcgcactgcgaagactacgaggactcggaggaactgcagctcgcaattctggagactcgcaaggcaatgcgagctatcaacgcccgtcgtcagcgggaagcccaggaggctgccgctcaacaggcagcggcggcagcgaccgaaacccaggaggcttctcagtcggaaaagaggaaacgagaagatgaatcgacggcaaacggcctcccaactaagagggcgcgagcagacagagcgtcagttgaagcggagccagttgcgcttcgccgtgatcgtgaaaattctacggttgtggtcaagaacctgcctcaaggcaccactgagcacaaagtccgacaattcttccgtgatgtatgtttttcgtccttttgctaaatgcattagctaatttcatatagtgcggtgctattaatggtgtcaagatgatgcctggtgaagacggaaaatcggaagtggctatgatcgagttcaatactcgagacgatgcagccgctgcacagactcgtgaccagaagactttcgatggcaacactatccaagttcacttcggttccgagacgaccttgtttgtgaccaactttccccctacagccgatgaaaactacattcgagatctgttcagcaaagtatgtctccagccccttgctcatatcactcccaatctaacgtttatagtatggcgaaataatagacatccg

SEQ ID NO: 22079 - DNA, 850 bp, Emericella nidulans
gaggcctgcggaaaggccgttgttgatcggctcggtaggtcgagctgctcgctgcgttccaatccctttattctcgtgtagagcctgctaataccgagccaggtcaaaagcaacatcggccactctgagcctggcgctggcatctctggcttgttgaagacaattcttgcattggagaaaagtgtcattcccggaaaccctacttttgagacaccgaaccccgagagtatgtcaagtcctccaaccaatgcaggacatggattaacaccacgcagttgactttgacggcctgaagacgcgcgcttttcaacatgccactccgtggcccagcatgcctttcaagagggcgagcgtgaactccttcggatacggcggctctaacgcccatgtaatcttggacgaggcaaagactggcgtatctgcatcagaaatgtgcttcaagtcgtcctatttacctgaagaccatgatccattcgaagaatgcgaggaaaatgagaaatgctttccccaactgctagttttttcagccaatgacgagaaatcgctccaggagtatattcgcgctctgagagcccacctaatcaacccccgcgtgcggatctcattgcaggacctggcgtatacgctatcggagcggcggtctcggcatttcaatcgtgcatttcttatcacacagaccagtctcaatctcgatctccatggtttggtctttgggaaactgcggtcgagctccccacgagtaggttttatcttcacgggcaagggtctcagtggcctcaaatgggaaggtctcttttggatatgtttccttcaggaagggggcagttcgcttggttagacagggcacttg

SEQ ID NO: 22080 - DNA, 537 bp, Emericella nidulans
gcgtgcccttacgaacagcatttcaagagttaatgtggctggtaccacctccctcctgccacatattctcagaaacaatccgcaagctcacttcttatgatgggcttcccatcccgtaccatcgagtcttttccttctctctgcgcatgtcattctaatcccacgccgggggggtatttatgctcgcggtgcaacagcaaagtctgcggccttcctgctgagtgtccatcctgcggtcttactttgattttatcaacccaccttgctcggtcttatcatcatttattccctctaatgaattgggttgaagtttcttgggaacgtgcgcaccgcagcacgacatgtttcgcatgcggtattgcctttcctacaatccccccgaaagagcaatggcaggccactcagaacctcgccaagggaatgagtgtaagcagtcgttacgaatgcacagtgtgcgaaaatcatttttgtattgattgtgatctctttgctcatgaggtggtacataaccgccctggttgtcagagcagggttgtc

SEQ ID NO: 22081 - DNA, 850 bp, Emericella nidulans
cgttttatttttagggataccacgttcagataacagctcgctcagaagccgacttgacagtggaaggtattattcaaaaagttggcgatgcatcaggtgcgaaatatacacaaggactcgaaaaaccgaacgcgtctgtcccaaaaccaccagtatccagcaagccggtctttactcctctccgaactggaggtatcaatgtgaacgcagccgccgccgctccactgccactaagagcgaagaaaaacgacgacgacggatggggccccgatgctcctcccgttactcgaaccaatctagagaaagtcgagccggcttataaaccgacccgggtcaacatacaggaactcaaatctgagaagcagaacgagccaaccgtgaatcccagtctcacaacaggccaccaacccgatggtgtcatcaagggcggatatcagcctatcggtaaagtggatattgctgctatcagaaggcaggcgcgcgaggctggcaacctaacggatgaccgaccagagcccgtcaaaggcgcataccaaccagtcggcaaggtcgatattgctgcgattcgtgcaagggctcaaaaacctgatgagactgacacaagttcgaagggaagttccgcccgacccgatgggtcttctggcccgtctacagacctggattccactgaatcaagccgcctgacatccctgcgtaagcctaaggtcaccaataagttcgctagtagcacatcgtttgccggcgcaaagccgccccttcccgccgtcaatgcgttgagtgccacgcctgtgcctcctatagggagagctagtggagcaaatgccgaccaaggatgtgagacacctgcgcg

SEQ ID NO: 22082 - DNA, 850 bp, Emericella nidulans
atgcagccccgggctgtccagggtatgctggatttcgacttcatctgcaagcgttccactccttccgttgccggtatcatctacacattcggcggtcaattcgtcagcaagatgtaggttgcatatacaaggatcgatgctggttcatacagctgacaatatgtccgtaggtactggggtaccagtgaaaccctcctccctgtttaccaggacaccgcaaaggccatggccaagcaccccgacgttgacaccgttgtcaacttcgcctcttcccgttccgtctacagctctactatggagctgatgcagtaccctcagatcaaatgcattgccatcattgcagagggtgttccagaaagggtatgtgagctgtgtgctgcacaattgaagagacctcggcgctaacatgaaaacagcgagctcgtgaaatccttgtcaccgctaaggagaagggcatcaccatcattggacctgctacagtcggtggtatcaagcctggcgctttcaaaattggtaacactggtggtatgatggacaacattgtcgcttccaagctctaccgcaagggatccgttggttatgtgtccaagtctggtggaatgtccaacgaattgaacaacatcatctcccaaactactgacggtgtttacgagggtgttgctattggaggtgaccgttaccccggtactactttcatcgaccacctccttcgttaccaagccgagcctgagtgcaagatccttgttctgctcggtgaggttggtggtgttgagaaataccgtgtcattgaggctgtcaagaacggtgtgatcaccaaacccatcgtcgcctgggccatcggtacttgcgc

SEQ ID NO: 22083 - DNA, 465 bp, Emericella nidulans
actcaccgacgaccctcttcaagcccaagtccatatgcaaacgctctttgagatccgcgccgaaaccctctggactacctcgattccatgaaaccgcacttcacccgcgtcattggattccgacccaccggttggacttaccggccacctgccggccggactctcgaaaacccgcccgtgtcaacagtactctactcatcacattggaagacacccttctccgtgcgagacctaactccacagcgcgggagcacgcgcgagagtgcgtgtttcggcgtaccctatagcgagcacagctcgtttcgagagttgactatgttttgctgtgccgttcgcattgggcggatcatacccacagttaatgtgggtagtcaaaagagcagggagcgtatgaaggcttggtttgagaagtgggaggctgagaagaggaagagtgggctatataaagtggagggagatgattgg

SEQ ID NO: 22084 - DNA, 613 bp, Emericella nidulans
aagcttgtcgacgaattcagataagcagctaatttttttacagaagcaatcgaagaaaatccgagagatgcgcttgggtacattaattttgcaaatttattagacgtattaggtgatagcgagcgagcgattttattttataaacgtgcactagagttagatgataaatctgcagcagcctattatggtttaggaaatgtatattatggccaagagcaatttactgaagcgaaagctgtatttgaacaagcaatgcaagctggattacaatcagctgatgtaacatttatgttaggtatcacacatgtacagcttggaaatgatcggcttgcactaccattcttacaaagagcaacagaattagatgaaaacgatgtagaagctgtattccagtgcggactttgctttgcgcgattagaacacgttcaagaggcgaaaccttattttgaaaaggtattagaaatggatgaggagcatgcagatgcgttttacaatttaagtgttggtacgtttttgaggaaaatatgagaaggttttcctttatttagaaagcaactgaaattagtcagatcactttttaggggtaatggcgttcgttattagagcagaggtg

SEQ ID NO: 22085 - DNA, 651 bp, Emericella nidulans
ccatgaaaaaataggctgacccatgtgttgaaccgctcccaagaatttagggccggccatgtacctcattgaaagcatgatagtttaccacacaatgttgaataaggggctcattcgacaccaccatttcctcccgaactaaatccgcctcaagatacgacaaggtgtaaccgcgatccccgtgatagccatattgactgcgcctttcttcctagcctaggtgcgtggttggtcaaagctgtacaactttgcgagcgaggctccatttcctgcgtacacgtggctgcagtatccgctctttgtctgcttcacggactttggaatctattggattcaccgctggcttcatgttccgatggtataccgctggcttcacaaaccacatcacaaatggatcgtgccgtcgccattcgccagctatgcattccatccagtggacggctggtcgcagagtctgccgtatcacatcttcccgattttgtttccgctgcagaaaagtgcctatctaggactttttgttttcgtgaccttatggacagtgttgattcgtaagtcgagcgtttaccgggggcagtccctgggaaagtaatgtttctaataccaaacaaatgacgccaagtatctcactaattctgtggttgtaacggggag

SEQ ID NO: 22086 - DNA, 500 bp, Emericella nidulans
gggagcaagcttatgaacataaagttaggcataatttttaaattggaccaacagatcccttaggttataggcagtgcttttagaaaaccatgcaattagcttgaaattattcatcatcgctatttaacttcggagaaggcttggcaatagtggtcaaaaacattccatataaattgacaagtcaaatggttgcaagtttacaaagaaagcttgatgtatgtatagaagaagccgcgccatttggacgctgtattatgccaggtggtagcgagtcggcggctattattcatattgctcgtactgttgtaaggagagcagatcgctctatagtatcagtgccaaaagaagtgaaaataaatgaagttgtcttaaagtatgtaaatagattatatgattatttgtttgcgatagctcgagtaataaatgcccgattacaagtgaaagatgtggagtataaccgtagtgcattagtttttcgtgataagaaagagaagtaagtg

SEQ ID NO: 22087 - DNA, 850 bp, Emericella nidulans
ggatatctccggcaagaagtgaaaagcaacaacgcggcatatctcattttcacttctggctcaacaggaaaaccaaaggtaaggcgcaaaaaccccgaaatatgtgttttcgcgtctgactctttctagggcacgctgctggagcacagggctttcgtctcctgcgttttcgcctacggtgcgccaatggggttgaatgctgatactcggaaactccaatttgcagcccatacatttgatgccagtctgtgtgagtctttagcaccgctgatacacggaggttgcgtatgcgtaccgagcgaagaggagcgtttgaacgacatagtccaggcaatcaacaggatgaatgtcaactttatctgtttgacgccatcctttgcccgattcgtcaatccgtcgagtattccccaggtgaatactgctctcttggtcggagaagcaatgtctcgaacagacttagaagcatggtcgcatatcaagcttctgaatggatatggtcccaccgaggccgcggtttgtgctgcaatcaatagcaccatggacattaactccgattgtcgtgatattgggttagccacggggacgcatttctgggttgtgaaaccgaacaatcacgaccagcttgtccctgttgggtgcccaggagagcttctgcttgagggtcctacccttgctcggtgctacataaacaatccggagaagacagatgaagttttcatatataatcctacctgggcacggcacgatccaaagcgcggtgatcgcaggttctacaagactggagacttggtaaggtacaactcagatcttggttcgctcactttcttaggaagaaaagactcccagatca

SEQ ID NO: 22088 - DNA, 732 bp, Emericella nidulans
atgacgtccacgatcgcagcgaaaagcaaacccctaccggccggcatatactgccccgtcctgtcactttataagcctaccgtacgccaggagatcgactacgatgcctcatacaagtattttgtctacctaatccgcgggggtgtagacggtctggtgatggctggaacgacagccgaagcagttctgctgccagcaagtgaaaggcaagagctggtccgcgttgcgcgccgcgctgcgagtgatctgaggctccccagttcccgattgtggctgggatcagcggcagtctacaaacgaatctattcgtctggcagaggaggcgcacgaagcaggggcggattttggcctcttgctgcccccgtcctactgggtcaaagccgtgactaaggaggtgattgtcgatttctatcgcgacgtcgccgacaatagtccaatcccgatcgtgatctatagcgtatgctttaagcttctgtacctgctatacgatgctaatatagttgtatgatagttccctgccatgtgtaacggggtcgacctgaattcgaacattatgtcggaactggcgcagcatcccaacatcgtcggcacgaagctcacatgcggaaatgcaggcaaagtcacccgattggcgcacgaatacgaccatgagcagttcgcggtatacgcaggctcctcggaaaagcagaagccatgtctcattggaggcggcacaggctgcgtgaccggggt

SEQ ID NO: 22089 - DNA, 850 bp, Emericella nidulans
cggaactcgttcagtcgctctccctttggccgctggaaacacaacgatcctcaaaggctccgagttgtctccgaaatgtttctggttgatcggggatgttctccgggaagctggacttcccgcaggctgcttgaacgtgatctatcacaagacctcagatgcgcccgcggtcaccaatgcgcttattgcccacccagacgtgcgcaagattagcttcacgggtagcactcttgttggttcgatcattgcctccaccgctggaaagtatatcaagccggttctgcttgagctgggtggtaaagcctccgcgattgttctagatgatgccgacctggagaaggctgcgatgggctgtacactgggggcttttctgaacgtaagtaactcgttcaatggacatagttcgcggaagcccggtgaatgctaacaccaaccattagtctggccaaatctgcatgtcgacggagcgcatagtagtccaacgccctgtcgcggagaaattccagaagttactcgttgaaacatccgagaagattttcggcaagaacgcgcctgcacctgtccttgtggcgaccgctgcggtcaagaaaaaccaaggtctggtagctgatgcgatcgataagggtgcctctgtcgtttttggcgaccctaaagaaagcgagccatgcgcaaacgctctgcgccccgttatcgttggaggcgtcaccaaggagatggacctctatgccacagagtctttcggaccgacagtgtccctgatcgttgtcgacagtgaggaggaagccattaaggtggccaacgacacagaatatggcctcacacggcagggtttacgagcaatctgttaggg

SEQ ID NO: 22090 - DNA, 699 bp, Emericella nidulans; identical to SEQ ID NO: 6408

SEQ ID NO: 22091 - DNA, 850 bp, Emericella nidulans
ggctgcggccgagtctatcgtgctcttgaagaacgaggataacatcctacctttcaacaaggagaagtccatcgccgtgatcggaccaaacgccaagatcgccgcttactgtggaggtggctctgcatccttggatgcgtactacacaatcacacccttcgaaggcgtatcagcacagagcaagggtgaggttcacttcgcccaaggttcatactcatacaaggaccttccgttgatcggccacctcctgaagaccgacgacggcaaaacgggcttcaagttccgcgtttacgacgagcccgcatccagtagcaaccgcgaactcctccacgagctacaccttgtctcatcccagggcttcctcatggactatcgccaccctaagatcaagtcttacctttactaggtgaacatggagggctatttcactcccgaagagtccggtgtctacgacttcggcgttgttgtcgtcggaacggggaaactcctcgtggatgatgaagtcgtcgttgataacaccaagaaccagcgtctcggctctgccttctttggaaacggcaccgttgaagaaaagggctccaaggaactcatggctggccagaaatacaaaattaccttccagttcgggacagcacccacctcggacatcgacacccgcggggtggtcatcttcgggcctgcaggcttccgcttcggcgctgcccggcgccagacgcaggaagagctcatttccaaagctgtcgaagtcgcctcaaaagcagaccaggttgtcgtcttcgatggtctaacaagcgaatgggaaacagaagggtacgatcgtccggacatggatcttcaaccaggttcaggc

SEQ ID NO: 22092 - DNA, 474 bp, Emericella nidulans
  unsure (1)..(474): unsure at all n locations
gcgtgggaacgacgatggcgaggtctggattttgtcggtgaaggagtggacatcatcatcgacggtaatgaggcaaagaagcgcaagaaggagaaggggtgggaacttgatctgcgcaaagnccgctacgctactgctctcgaccaggtccttggctcggccgacaggatcgcgcagcttacccttttctcagagctgcggcaccgctctgcgcttcgtgcggccctgcggggtcgtgatgaggtcacgcttcagcccgtgctgcagtgggtgtacaagaacatcacggagccgagactggttggactgagtgtggaggtagcaatgaatgtgttggatatctactctgcgaacctggggcagtcggaacagatcgacaaaatggtagagcggctgcattggcgggtgagggatgaagtggactttgcgcatcaggcgttcgagacgaaggggatgttggatatgctgcgtgct

SEQ ID NO: 22093 - DNA, 850 bp, Emericella nidulans
cgcgggaaagtcctccctaacactcgcactgttccgcttcctcgaagcccgacgcggccggattatgatggacggcctggatatcggacatgtcaagctgtccgagctgagaagtcggctggcaatcattccacaggatcctgtcctcttctcggggactataaggtcgaatcttgatccgttcggggaacatagtgacttggaactattcaatgcgctggaacgggtacatctgctgcggtttgaggatacgtcgacgcttgcctccagctctgcttcggcgtcttgttcgggatcagaggcctatcctccgtcagatggtagtcggagtccaactacgacagctggtacaagcccaactgaccccatgagcgcgagcataactctcactgcttcctcaacctctacttcaaaagccaaagaaaccggctttttcgcatccctctcctctccagtaaccacgaatggcggcaatctatctcacggtcagcggcagctcctgtgtttagcccgcgccattctaacccgtcccaagatcatggttctggatgaagcgacttccgcggtggacatggagacagacgcattgattcagcaatccatccgcaccgaatttggaaggtccgactcgagtttactggttattgcacatagactgagcacgattgcggactttgacaagatcctggtcctggatgccggaagggttgttgagtcgggggctccgagagagcttctaaagactgaaggtggtatgtttagggccctggttgaaagaagtggggagagagaagttgttgagaagattattctgggtacgtccagagaagaatgatctttagagttgaaa

SEQ ID NO: 22094 - DNA, 661 bp, Emericella nidulans
  unsure (1)..(661): unsure at all n locations
gcacaaccgaccctgtatgcgggtattggagattggagcagggaccggtgggataactgctacgatcttgccagcgatgcatactcctcacggagaacgactctatcacagctatacatatactgatatctcatctggattcttcgagcgcgcccaagagcgcttccgtgcatacaaaggtgtcgactaccgggtactggacatctcagtcgacatagctgcgcaggggttcgatgcgccttatgatttgattatcgcgtctaatgtgcttcacgccactccaaaccttcagcaaacacttgctaatgtgaaagccttgctaaaacccggcgggaaactcttcctacaggaacttgcacccaccaccaaatgggtaaactatatcatgggcacgctccctggctggtggctcagcaatgatgaccgtccatgggaaccatacgtgtcgccgaaacgatgggatgcagagcttcgcgctgccgggctgtctggggccgataccgttgttcatgatggccatatgaatgctcatattgtttcatccttgccagaacttcggagtgagagggaccgacaagttactgtcctttgtaaacctggttctgagcacttgtactctgtcatcgnctacctncatactcgggatttcgaactgatacct

SEQ ID NO: 22095 - DNA, 767 bp, Emericella nidulans
cgatgcttgtcttcccgttaccgcgcttcaattatttgaccttggtggggtcagattcgtcctcctgggccaggggacatttgcgcgcctggtcgaggagagcagcgggagggtgctcgcctatttacgagtattcaagataaaccacgttcacggctatactgttcttcaaaaagacggtcggtcaacaggccatgttcagcttgtggcatggggaggtcagtcgttgagactcgttgagttgagctactcaatcagctcatgcggagagcctgtcgtgtccttggtagcagcaagcgctgagtatctggctccggattgggttctagctggatgcccgagcacggatggcagtgcagcgtatctggtgacagcacacaatgctgtgcttggcatgtctgtggtagaggaggcaaacagaagagccattcacctgcgacaattagtagccggagtcaaatccatcctatattcagctcagattgtcccggtatctcctacgaacctcttggtggcagctggcacagtgttcggtgagataatagtctggtcatgctttgtctgcggcggtaatggctccactgccaatgcagtcagttccatacatcacttttttaccggacacgaagggtccatctttgatgttgagatatctccgaagattgccaacctccgtggtgatctttctggaaggctattggctagttgtagcgatgatcgaaccgttcgaatttgggatatttcacactgtgagatcgcctctcccg

SEQ ID NO: 22096 - DNA, 541 bp, Emericella nidulans
gcctcgctcagctggctttatcacgctcgtcagagaccgagaccctggacgtgtataccccgacccgaacgacggccgagtgcgaattgactatgacgtttccggatttgaccgtaatcacatggttgaggggttagtcgctaccgccaagatttcttatatttcaggagccagagagattcacacatcataccgggacatgccgccattcattcgaccagccgaagacaagggtggctctcccctgggaatcaacgatccagtgttccaggcgtggattgaggaacttcgtcgcaaggcaccgaagacgtcggaccgggtcatgtgggcaagcgcgcaccagatgggaagttgccggatgggtacatcaccacgtcacagcgttgtcgatccagatggtcaggtttggggcaccaagggcctatatgtgattgatgcatcgatcttccccagcgccagcggtgtcaatcccatgattaccaacatggccattgcggaccacctgagtcgaaagatcgccaagtcgatggagtttcaaagc

SEQ ID NO: 22097 - DNA, 605 bp, Emericella nidulans; identical to SEQ ID NO: 6658
  unsure (1)..(605): unsure at all n locations

SEQ ID NO: 22098 - DNA, 616 bp, Emericella nidulans; identical to SEQ ID NO: 6473

SEQ ID NO: 22099 - DNA, 850 bp, Emericella nidulans
acccctggtggtcctgtgtccaaggagacgcagaagttcctgtccatggtctttgctcctatgattagcggctatggtctgactgagacttcggccatgggcgccttgaatgaccctggagcgtggaacccgaatgctcttggtgaaatccccgcctgcattgaagtcaaactggttgacttcgcggatgccgggtacttcacaaagaacaatcctcctcagggagagatctggatccggggaggcagtgtgtcaacacactatttcaagaatgaggaggagaccaaggcagcatatgccgagggaggatggttcatgaccggtgatatcggtgaatttgacaagaatggccacctcaaaatcatcgaccgcaagaaaaaccttgtgaaaacgcaaaatggcgagtacattgctctcgagaagctcgagtccgtctaccgatcttctcctatcgttggcaacatctgcgtctacgcagccgaagaccaggacaagcctattgccatcattgttccagtggaaattgctttgaagaagattgcgagcgagaacggtattgagggtgactctgtagaaaccctcgtgcacaacgagaagctcaagtctattgtcctcaagcagctccagactgccggtcgtgctagcggcctcaagggcattgagattatcaacggtgttgtcctttctgatgaggagtggactcctcagaacgtacgtcttttcttctctcgctttgtttcaggacgtaactaacatccaacagggcttcatgaccgccgctcaaaagctccaacgcaagaagattatcaacaggtaccacaaggacattgaccgtgcttatggaaagaaa

SEQ ID NO: 22100 - DNA, 839 bp, Emericella nidulans
catgttttatcaacacggtatgttatcttgtccgggcatctggctttctatcagtctcatttactaatttttgcagaacccgaacttggaagatgacgaggaagaccggacaaatacctggcgaccgatccgctaccgtctacctcctcgcagcatcatgccatatgcctgggacttcccggcgacaaagaacaagtctctcgtgttggcttgcaagggcaaagaacggcggattaggctgaccgagattggaaacttgatacctatgcgtattcctcccagtcagcctggagaagcgcagaagatcatcgacatcaatattgttgctgatggtccgacgcagactctggttttatcgaacttcaaagcatcaaagagtatatatcggcagcaaagatcacaaacctcgcaaacgagcatcaatactggcttcgaagtcaaggaatttgactctgatgtcaatttcaaagctcagcttcaccttggtggtatcggtatctccttaatcaaccagaaaatgaaggagttactttacatgacgttccgtgatatcgaggtcaagttcaaggaatcgaaggcttaccagactctgaacaccaccatcaaatggattcagatcgacaaccaactttacggcggaattttccctatgctgctgtatcccagtgtcgtccccaaaactggtaaggaaatggaagcccatgcgatctggcatactatgaggacactcgggaaggatgactcctatggtgcgctgtacataaagtatgctactctgctgatctagcagatgacgctggaacctgacgaggacgggatctgtgctatgctagattaaa

SEQ ID NO: 22101 - DNA, 850 bp, Emericella nidulans
agccggtctctatgaatcgctgacatattccgtctcagggctttcgctcaaagaattcgaatgaaggtatactggattccgaatttgctgccttcgaatcaaacagtcctgtgggagcgcctctacccaaccttcaacacgaaggtcacttcgtggctccggccccccacatgcctatgccccatgccgcggaggcgccgaactgggcagccgatttccaaaaccttcatatctcggggccgtcgcgagccattaattaccaaccagggccatcagcagctccgatgtcgaatgcgtcacagcaaggttggcacggtgaattcttaaggcaaccaacaacaacagcacaggcctgcattacaggagaatcaggcactcggtcaaaggtttcaacaatcatttaccccgaactacaccatgaataactcaatggctgtttatgcacctggaccagaaacagtgcatgtctcgaggaccgaagaatttgatgaatctgcctttgacgctgcgtttgaacaggccaaggcggacatggcatctcagttcgaggagtcactcgttgagacaaacgttactgaatcgaacgccaataatgaagatcagaaagaagaggcccctgctcaacaaattggccatgaaacgataagaattgggtcggacaccatctcacaagttgacaaggacgatcctcaagcggcggcgaacgatgcagacgaacttgctcgcaccgcgggccatttgttgaacagcgtcagccatgagacgaatcaaaagttccgagaaagcaatttcctggcattaatgcggcgcattcgagaccatgaggtccaactcgagggtgatgaatttc

SEQ ID NO: 22102 - DNA, 850 bp, Emericella nidulans
atgttcggttttgagtcatgggttggtggtcgctactcagtctggagtgcgattggtctgtccgttgccctctacattggctacgacaacttccaccagttccttgccggtgcacacgccatggacaagcacttccgcgagactcctctggagcagaacatccccgttctcgggcggtcttttgagcgtctggtacagtgacttcttcggtgctcaaacccatctcgttgctcctttcgaccaatacctgcaccgcttccccgcctacctccagcaactttccatggagagcaacggaaaggccatcacccgtaccggcgaatatgtcaaatacactaccggccctgtcttgttcggcgagcccgctaccaacgcccagcacagcttcttccagctgctccaccagggcaccaagctcatccccgccgacttcatcatggccgctgagtcgcacaaccctgttgagggtggaaagcaccagcgcatgctggcctcgaacttcctcgcccagtctgaggcactgatggtcggaaagacccctgagcaggtcaaggccgagggtgctgctgacaacctggtgcctcacaagaccttccttggtaaccgcccgacgacctccattctggcccagaagattacacccgccgccctgggcgctctcatcacttactatgagcacctgaccttcacagaaggagctatctggaacataaactccttcgaccagtggggtgtcgagctcggcaaggtcctcgcgaagaagattcagaaggaactggaaaccgagggcgagggcagtggtcacgactcctccaccagtggtctactcctcgccttcaagaagaaggcg

SEQ ID NO: 22103 - DNA, 850 bp, Emericella nidulans
aaagatgcaagttgaccggtttaccctcgtgaggcacgtactgacagttggcagaacttcacatcagcgcctccccctcgacgaacctaccaagatcccgcacacccagagctaacggagatcatgctggaagacgagtccggacgactgcgacttacaggaagtaagcttcagtcagttcaactagcgacaggggtaattatcgcggtgcttgggacagaaaacgcaaatggagattttgaagcgatcgatatcaaggttcctgatctcgctcggcaaccacggcggtgggaaagagatgaagcgaaggcacccaaagaagcgaagaagggaaaaattgcaatggtcagcggccttggaataacggggacctcaagtgacaccctcgcccttgagctcctgacagactatcttctaggctacacgggatcatctaagggcgaagagggttctccgccagatgctagtaggattacgaggttgatcatcgccgggaactcactcggcgcgagcaccatcgaggcagcaccggcaacggatggagtaccggcgaaaaagattgcgcaccagaagaagtacggatatgacgcttcagcgtataacgcatcacctattacacaactggattccttcttggcagagctcctgcctagcataccgattacacttatgccaggcgagacgacccagcgaatttcgcctgccccaacagccaatccaccgggcgatgtttctcggtcaagggcatactgttccgcaccgcaatcggagaagacaaagtagagccgggctggttcgacagcgtgacgaatccttgggagggagacgtagagggatggcgattttgggg

SEQ ID NO: 22104 - DNA, 594 bp, Emericella nidulans
ttggtgcgaaaagctgtcgcgattgtggtagccctccagctgctcagaggcgtcaaccgctacctctcgcaacaggcgcagaacaactgggtccgcgcgcgcccgtggaattcgtcgcgagaactggtcctactcaccggaggaagcagcggtattggaaagcagattttgcttgatctgtcaaagttgaatgtgaggactataattgtcgatgtgaaggagcccgatttcagattacgtgagtcgacgaaacctatgtctttgaaattggaatattttttttggctaatcacctgcgacacagctccaaatgtattctattatcaagtggatatcacctctactgctgccttgaaagagacagcaacgcagatccggagagatcatggccatccaaccgtgctaatcaacaacgccggggtaggattgtcagggaccattctcgaagaaccggaggagcacatccgtctgactctcgaggtaaacacgctggcgcacttctggacagtgaaagagtttttacacagcatgatccagaacgatcacgggcacattgtgactatcgccagcatggcaagtttcgtggctctgggg

SEQ ID NO: 22105 - DNA, 850 bp, Emericella nidulans
cgtgccaagggctacgtgtcacacggtgccgtgtatgcagggcattcgctcggagaatttggagccttgtccgccttgtctcggtccgttcctacgggggcgttggtcgagctggcattctaccggggctcggtcatgcaggcttccgtggcgagcgacaacgacggagggacaacatacggaatggttgcgatgaacccgaagagggttgggacatgtaggtttcaggctccctttggtcgtgatgcgagagctaagattgtaagtctttacccaaactacgctggatcgcctagttagccagatcgcggcccaaagccaagaactactcgagatcgtaaatttcaatatcgagggggagcagtacgtctgctccggaactgtaagtcgcctaacctgtacgagactcttctaacaattaaaggccgcgaacttgtacgttcttggaagattgatcgaccaattagcggaggcacctggccaagcttgtctggctgaagaacagaacgaactacagcctatcatcgactcgcttctcaccaaagcaaaagcgcttccacgtccaatccaacttcagcgcggaaaggcgacagtcccactagaaggaattgacgtaccattccactcaagccttctgcggaacaccgttgatcggtttaggcagtgtctcttgcgtccggggttcttggtggacaatattgacgtggagcagctagtgggcaagtacatcccaaacgtgatggcgaggcctttttcattagagagggagtatattcaggaggcgtatgagttgacgggaagtccgattctgaagaagatgctagctgaggcgtgagctttgcaaacaatt

SEQ ID NO: 22106 - DNA, 631 bp, Emericella nidulans
atggcggttacatccttcccggccgattctcttgcttcaatggaatcggtgaagcagacggtgcgctcgacgtcaacatgctcagctgccaccgtgttgtcactccaaacactcttccgaagtgcaggggagatggaaacaacgttgaggaggaccgcacgaggcacgaaagccacggctacgaatgcgacggcgtcatcgcgggcgaagactacgcggacgaaatcgacaagcacgagcaccacaagaacgaaaacgccagcccaggatgttagcacctttacaagtacgagtgcgagccttgcggacacacggctttcaaatcaagaaaaattagttcttgctacagaagtgttcaattccacgctgaagacgctttcagatgccgtgaagacggttatgtccatctcgaaagaaaagaaggatgcgagccccacgaaacgcggcactaccacgaaaggtcgggtgaaaacgagccaacccgacttaacggataatgagaacggtgtgtcggcggtagcagagtgtgcacggttatccctctcatgtctcaagatgttgagaacggatgctattgtgaccgaagatgccaaattgcatcttggcaggcgcttgttgttgagccagtgct

SEQ ID NO: 22107 - DNA, 850 bp, Emericella nidulans
tgtgagtctacagacgctgaaggcgatcttcagcacaggctctcctctggcgccatccacgtttgagtatgtctactcgtcaatccatccggatatcatgttgggttcaatcactggtggtaccgatattctttccctgttttgctccggctgtccgatcctccctgtgtataagggcgaaatccagtgccgaagcttagcaatggcggtctctgtgtatgattacgctggtaacgacatcagctcgtctggcgagccgggagacctggtctgtacccggccattcccagcgcagccagttatgttctggccacctggacccattggagttgagaaataccgcaaaagttattttgacgtctttggtccttcaatctggcaccatggagactttgtacgcttaaaccccgaaactggcggagttgtcatgctaggacgaagcgacggtgtgctgaaaccagccggcgtacgattcggcagcgctgagatctataacatcctgttgaaacactttgcggatgagatcgaggattctctttgtgttggacgtagaagggaagggatcgatactgatgagacggtagttctgtttgtgaagctggcatccccgagcgactcgttgcccccggatcttgcatcgcgcatccaggctacaatccgcagagaactcagtcctcgccatgttccaggaatcgtggacgtttgtcctgagattccggtgacgtcaaatggcaagaaagtcgagaacgccgtcaagcagattctctgtgggcttaatatcaaaatcggcgccagcgttgcgaatgcctcgtgccttgattggtatcgcacatgggctgctcaacaccca

SEQ ID NO: 22108 - DNA, 850 bp, Emericella nidulans
ttgcggggtgactcgacacttcgcggccacttccccgatgagctagaggcggcagaggagataattggagcggttgatagctggatcctggcgcctttctttcgtcagggagggcgtttcactattgacgatactcactatgtcttggaccctgttggaaatctagtaccggctgcgcagacaccgcttgctaaggacgctacttttggagacgcgaactcgaacctcaggaactacgtcgtggagaagtcggagggctcgattacggcgaacagagtgcaatatatctccttggaggatattcgcactggcgggcctcgagctgtggcggagaagctcatcgcttctcaaaaggggagtatcatcatcgtcaatgctgtggtcgatacggatatggaaatcttcgtgcttggtttgttagatggtacgtctaatttcttccttcatgatcaagcaagctgacttcactagcaaaatcgaagggaaaagcatacatctaccgaacaggtgctgcctttgtatcgacgagactgggaattacgcacattcctccattgacacccagatctctcggtctcagcacccacacctgtcaatcaggtggtttgattctcgcaggctcctatgtgtccaagtctaccgagcaactgcagtatctgattgacggacgagggtcagatctgcaggtgattaccctcagggttgaagatcttctgaaaagcgcccaggatgcggagcagatagctctggacgcaaaggacaaggccggaaatttcattctcgcagggcaggatgacctagtcatgacaagccgcaaccacataactagagttgccggggtatctacttt

SEQ ID NO: 22109 - DNA, 684 bp, Emericella nidulans
ggtcctcttgactgactcgacttgatggatagtaaactaatgattgtaaatgcagggttcgcagctggtcctctcctcttcggccctttgtcggaactatacggacgcaaacggccgctaatagccggatacgccgtctttgtggtcttccagataccggtaggagtcgcccgcaacatcgagacgctcattctctgccggttcatcggcggtgtggccgcatctgggcccttgtctattgcaggagggtattttgccgacttttttgatcccgttcagcgagggctggccctggccatcttcagcgggacgaccctagtgggaccgatcgtagggccgatcctgggaggcttcatcacgcagaggtgagaaggggggaggacacactctgctagtctgatgacgcgagctaatgaaatgccctagttacctcgaatggcgctggacggcctggatcaccatgattatggctgccgctgctggcctcatcggtcttttcgtcctgccagagacctacgccccggtcctgctccagcgcaaagctgccagactgcgcctcgagacgaagaactgggctctgcacgccaagttgtatgccatttgtgctcctctcccctctcccctcttctaatcgatgcacagagacgagtcccctatcaccatcggctccgttatcacccggta

SEQ ID NO: 22110 - DNA, 850 bp, Emericella nidulans
gacacagcagagcccgccaaagccgtacagagccaggcagggccaggccgccaaagcccggaagcgtacgccagccagggtcagagcccaacatcccagaggccgtacagcccggacagagccagccaaagcccatcagatcccagcagagcccccaaagcgtgtaagtattcgcgagccagagccagagccgcccaatgtgtcggcagcccaggcccaagccaggcgaggcccagccagagtccggtagggcccgtgcgagcaagccaggccagccaatcctgtcagtgccagagcaagcccaagccggagcccagcgagcccgccaaagccatacgcgccatggagccagacaagcccggagggtcaggccaagtggagatcgagagccttagatgtagaggtagcctagacccggtcagcgccaattaggcgtacaggcacaacagagggccagcgcccaatgacagcccagatatcagcagccaggtcgggaatgccatggtcagggttcagattgttgcagttattgccagaggagccaatacagggccaatctgggtcagccagagcccgtgtagattcaagcagttatccagtatttggcaagtagttgatattaggggattatagatattataaccagagccagattgagcctataccagccagagccagacccagatcaggaccagagccagagagttgcagttcaagcaagcaactgtatcaggcccaaagcagtattatggttggccaggcacgcgtgggagccagtaaatcatggttagggttaatattatacagtcatagccagacaggcagatatagtaccagatatgcaccaaag

SEQ ID NO: 22111 - DNA, 850 bp, Emericella nidulans
ttccggaaagagagcagctaagtatgatcatcgctgagttcactgcgcgacttgaacgtgccttagaggtatgtgaattcagtttgcaattgagtacgaacattgagctgataactactagctcacaagtagagctttgccccgcctcgatgaggatgatcgcctctcccccattctgaaccacctatctaagaacttcggaagtgcggagtccgtgtacacagaaggcgaaggcttcgtggatggcgctccaattaccgccgccagcattgatcctctttcacaacatttcccgctctgtatgcgtagcctccacatgtccctgcgcaagaacaaccatctgaaacattttggtcggctccagtacactctgtttctcaagggaattggtctatcccttgaagagtgtattctgttttggcgccaatcgttcaagggcttcaccgatgaggagttcaactcccgttacaagtacaacgttcgccacgcctatggtgatgtcggtggagatatcaaccgaaggggtcgcggctacccaccatattcatgtcaaaaaattcttagcgatacaaaccctggagcaggacagacgcatggttgtccgtatcgccacttttccgttgataacctaatcggacttctccaatctaccggcgtgaacgacaaggacttgttgcgcggagtacgcgaagatgtcgagaagactcgttatcacattgcctgcaaccgagtattcgaatatacacacaaagccgaaatcaagagagccaaggaagacggctcagcgggtgaaatcgaacttgataccattgttcaccctaacacttacttcaagcgcagttatctcctg

SEQ ID NO: 22112 - DNA, 850 bp, Emericella nidulans
tgacagtcgatttccccctaaccgccacgaatcttacgacaaacagcacattcgccgctgaatcgtgggccttgtatcgcacccataagacaggcccttacgccgacgcaactggcgacttccttgccttctttccaactgtaaacttcacctctcaagctgatgtcctccagggcattgctgctgatcagaacccgcaagcctacctggacaaagacactccgccctcaattgtggacggctacaccgtccagcataaactcctcacaagcggactcgccgctacggatgaagcgcagctcgtaatcatctgggcggacggcacgtttgtctcggcctccagcatcccttttcacggggcagcgtgcgtctagcgtcatccgaccctttcgcgcaacctctcgcggaccctgcgtatctgcgtaatcctgtcgacgtgcggatcctaatcgaggcgatcaagtacgcgcgctcgttaaccacaaccctttctctggcggcatttaaccccgtcgagctcgtgcccggtggcagcatcacctcggatgaagatctggaagcttatgtccgcggcgcagtagactcgctcttccatccatcaggaacttgtgccgtgggtaaatttgaacttggtggcgttgttgatgtggacttcaaggtacatggagtgaaaggtctaagagttgtggatgccagtgtgttaccaatgttgccggcgacgcatattcagagctcagtctatgcggttgctgagaaggtgagttcgcttttgtttctcgaatcttatccgtagaaacagctagtgtgcttattactgattctacatcgtttggacaggccgcgaaggcga

SEQ ID NO: 22113 - DNA, 850 bp, Emericella nidulans
tttacacggggtattgctgtgttcaggcaacatatggggattcttttttctgacctagtacagaattgtatcctacaccgcgacatgaaaggctagtccgcctgtatattgaaggacgttcttggctgacccagcgcagctgccaatctacttataagcaaccaaggtattctgcagattgccgacttcggactggcacgtcctttcgatgaagcgccccctcagccaggcaaaggggcgggcgaggccaaaagagactataccacattagtcgtgactcgatggtatcgtcctccagaactgcttcttcagcttcgacgttatacttctgcgatagatatgtggggtgttgggtaaatcgcactccaatcctatttgtcctctttctaacacttacagttgcgttttcggtgaaatgttcaaaggaaagccgattcttgctggtaacagtgaccttaatcaggcacaacttatattcagccttgtgggtacgcctacggaagagaatatgccaggatggagctctcttccaggttgcgaaggcgtcaagcatttcggcaacagaccagggaatctcgcagaagtattcaaagagtaagccacctccgatcagctgtctccataggattcgtaattaaatctctgacatattatagtcaaggtcctatggccatatctttgcttacagagctcttgaagctagactggcgaaaaagagtgaatgcgattgatgcgctgaaacatccttatttctcgacaccgccactcccagcacgtccaggcgaccttccgagttttgaggactctcatgaacttgatagacgaagattccgtggacagcgggctgcta

SEQ ID NO: 22114 - DNA, 850 bp, Emericella nidulans
tcgtagtagggacaacctgccgccgtcaaggtgtttctggtgccccagtttggagcgccggtctcgcaaaagacgtttttcaagggtgataaggttcaattgaagtggaacgcgtcaggcactagcttgattgttctcgctcagactgaagttgataagactggcaagagttactatggagagaccactctctatctcttgagctctagcggccagtttgattctcgggttcatctgggtatgtcctcacaatcagcttcttacacagcgatctaacgctccatcagacagagaaggcccgattcacgacgtcagctggtctcctacttctaaggaattcggtgtcgtgtacggcactattccggccaagacgaccattttcaatgttcgcggtgttcccaaacacagcttccccctgacaccccgaaacaccattttgttctcgccccatggtcgttttgttctcgtcgctggctttgggaacttagctggtcaaatggacatttacgacatggagaaaaactacaacaagatcactactgtggaggcagctaactcgagtgtatgcgcatggtcgcctgacggccagactattctgactgcgaccaccagccctcgtctgcgcgttgacaacggcatccgtctctggcacgtcagcggagctctgttgtataacgaggacattaatgagctctacgacgttttctggcgcccgcagtcgacgattcagcacccgctgggcgatccgttcaacccattgcctgctccgcacgcctccgcgatagttacctcagcacaagaaaggctccagtcaagcccgccggtgcataccgaccccctggggcgcgtg

SEQ ID NO: 22115 - DNA, 791 bp, Emericella nidulans; identical to SEQ ID NO: 8426
  unsure (1)..(791): unsure at all n locations

SEQ ID NO: 22116 - DNA, 850 bp, Emericella nidulans
tgcgcctgtagggagagtgctatcgtcgcaaacaatcggagtcgagttctcatctagaattgtgaagctgggcaccgggccccgacggacaagaattaaattgcaactatgggatacggcagggacggagaggtttcgatcggtgtcgaggtcgtactatcgcggagctgcaggtgctattctcatttatgatgttgcatcatacgcatcgttcaactcccttccgacctttatgatggatgcgcgggcccttacatctccctaccttactgtcattctcgcggggaacaaaacagacctcacgcaagacgactaccatgaggatggcatgcgccgccccatcaccccctccagcacttcaagcccgcaatcttcactcccgtatgactccacggctggctcgtttcgttcgagcaattttggtactgcaaccagaatgacggccacgtatgcctcgcatggtcgcgaagtcagtatggaagaagcttcgcaatgggctgccaggtctaatatacccgccgttgtcgaggtctcagctctcacgggggacggtgtggaagagctcttccagcgattagcgcgcatcatcctcaccaagattgaactcggtgaaatcgatcccgatgacccacaaagcggtattcagtacggggacggcagtccctatggtcacggcacgagcgatgcttcaagcatcaaaagccaaatgactatcgaagacaatgccgtacagcttcatagaaggaatacaagacgacgaggcggcagtaactggagggcaagcatgaacgagtgggaagatgttttccgtgtgagcggatcacataacaggaaaagttcaggctgttgc

SEQ ID NO: 22117 - DNA, 850 bp, Emericella nidulans
ctgtctgggcttcattcttcttgtagtcgtcaacgtgcttgcctcatgcatactagccttggcggtaggatggaggcttgctctcgttgctatctttggatgtcttccaccgttatttcttgccggctatgttcgggtcaggctggagatcacctgccaggaacggacgacaaggctctacttagaaagtgcccggtttgctacggaggcgatcagtgccattcgcactgtagccagtctcacgctggaggaaaaggtcattcagatgtatgatgaacggttgtcgcacacctcgcctaagttcatccgaatcacccttgtttcggccattttattggggttatgcgaaagtctttatcttgccacactaggcctaatcttctggtacggggtcaagcttctatcacaaggggaatacaacgtcgaaacgttcttcatggtgtttgttgccgtgatcttcggtggtcaggcagctggattcctgctcggctatacagtgagtaagtatacgtttgtatatgcttgtgtacctcttctctcctccctttctaatagggactatctagataccgcaaaggcacacacagctgcaaacaacattatacatatccttggctcccggccgtcaataaacgcctccaccggaaagcaagagacagtccaattagactcggacactgccatcgagttcaaggacgtgcacttcagctatccagccaggcccacggtccccgtgttgcagggactatcctttaaggtgaaaaagggcgaacacattggccttgtcggtgcttctgggtgcggtaagaccacggtgatatcgctactggagagattctacgaggctggc

SEQ ID NO: 22118 - DNA, 850 bp, Emericella nidulans
ggcttccagagcgaggaaggcataggtcgtcttcgaagagtcttgactgcctacagttggacgaacgctgagattggctactgtcaagcaatgaacattgttgtcgcagcattattgatgtaagatgccgcatcccttgtcagaccgaagtctaaccagactagatacatgtcagaagcccaagccttctttctactctctgttctgtgcgaccgtttagtgccgggatattactcgaccaccatgtatggcacattgcttgaccagaaggtgtttgagtcgcttgttgagaagactatgccgattctttgggaccatctgaacaaatctgatgtccagctgtctgtggtctctcttccctggttcctttctttgtatatcaactccatgcccctggtgtttgcctttagagtcctcgatgttttcttcttggaaggaccgaaagtgctcttccaggtcggattagcaattctccgcatcaacggggaggaacttcttgacgttcaggatgacgggtcttttatttcagtcttaaaatcctacttttcacgccttgacgagtcggctcatccacggtccgagaatccaaagctcagagctatcacgcggttccaggagttgatggtggtcgctttcaaagagttctctcaaatcactcatcagaccatcaccgaacagcgtgagaagcacaaagatgcagttttagagaatatcgaaagctttgctaagcgcacatcgatacgaaatctcggccctgaaagcaagaaatccagttcagacgatttaggagcaatctatgtcagcatattcggaagttatctatgactaccagcaaaggcaaaaggtatcg

SEQ ID NO: 22119 - DNA, 850 bp, Emericella nidulans
ggagctggacactgcattattgaaattcagccatgaactacaaaagcgcggtctgccaactgactttaagactgtcgacgatctgacgctcgttatgaacgaagtgaagaaccatgttatagaagacctatgcctctgggagttttacgttctcgacgttaagagcaatgctcggagggttatagacgagtggaaagtatccacaaacagcgatatagaacgtgggcgctgggcgcagctcgatctaggagcctacaaagcgtggtcattggaagatcaggcaagcctcattcgccagaaaggagtcccgactgcgggccaaatcctcggaagatacagtcgagaaattgatactcaactcggggtggccattgctactgcactgtttggaaactttgacgccacgtcgtcggacttgactgcggttgagaataccctgcgcaagctgctcgacgtagtcaatgtgccgttttacaaggagtacaactcagatgtcaccgaaatcatgagtcagcttttcaatcgtatcaagtacctgaggattgatgaccatggaccgaagctcggtcctgtgaccgaccaaaatccgctcatagagtcgtacttcaccagactgcctctgaacgaaatcactaagaaacacagccccaaagcattagccctcgccaacaatggctggatatggaacgcggatgctatgcgcgataacgctgggcccaattctagggcatacctacggcgagaagtgattgtctggggagactgtgtcaaattgcggtatggagatggccctgaagacaaccctttcttatgggacttcatggccaggtacactcgcttaatggccaag

SEQ ID NO: 22120 - DNA, 568 bp, Emericella nidulans
gcaggtcgactctagaggatccccctactctgccatcagatgtaaacaccaacatgcttccgactctgaagagaattatacagaacaaaattcctgttaggatcttcaggtaatagttctattaaaaatctcctactgcttttatttcttactgcacctgtatttgtacctaacacttagcttgtcgacaattgcagtggagatcaagattctgtagttccatttctgggaacacgaactatcgtaggagaactcgccaacgatctcaatttcaagacgacagttccatatggagtgtggttccacaaaagacaggtagttagcttacaccattaaacaagcagcaagttctcaaacagattgtgaacttagttatggatgtatgggattttgactaggttggaggctgggcatcgagtatggaaacctactaacttttgcaacagtgagaggagcggctcatgcggtggcgtacacgcagccctcacgagctctgcatctattcagcacctttcttcgtgggcagagattgccaacaagacagatattgctatgcatgactgaaaga

SEQ ID NO: 22121 - DNA, 465 bp, Emericella nidulans
  unsure (1)..(465): unsure at all n locations
caagctcgacatcgtcgtgcgaactcaggaatcgcgtcatctgtctcagctgagnagtatactgtccagcaatggcgccagataatggacgtcaaacctcgacggcgcgttctggacgcctcaggcagcggcgaatatctttcaagaacnaagggtccggaaagggcagtattgtgtttacagcgagtgtgagcgcaagtctggtgaatgtgccgcagaaccaggctgctgtatgggccctccttattcccttcgtatgccctaagtttgtttcggagagggacggctaacagaggtcctacacgtgcagtataacgcttccaaagccgccgtggtccaactggcaaaatgcctttctgtcgagtgggtcgattattgccgagtcaactgtatatcgccaggtttcatcgccacagagatactcgaccaccatccgaaggagtggagggagaagtggtacgatat

SEQ ID NO: 22122 - DNA, 734 bp, Emericella nidulans
tggagaaagtctattcaagcagcagcatatatcccgtaccgatttgtccagtctcagatggcagccttgacttacaagccatcgtacgtctcaaagctcgtgcagctgctaaagggagagcagtccgagttggatcacgaagacgaacaggcaatcatttggtcagcagccagtctatacggtgctgcggcggataccacagttattactcttactacgttcaccctagccatgatcctgtttcccgatgtgcagcgcaaggctcaggaagagatcgaccgtgtagtcggaaaccgcctgccaggctttaaagaccgcgaaaagctgccatatatcaacgcgttagtcctagaggcgctgagatggtggccaattgcacccatgggcttccctcacacagctctgagggttttgaatacaacggcctttatatccccagggcgcatacctcctccggcagttgggtggttcctacatgaccatcagtgtatgacaacccggaaatattcgacccagaccgtttccttgagccacgaaacgaacccactcctatgactgaggcctttggttatggtcgaagaatctgccctggccggttcttcgcggactcaagcctcttcttgaatattgcgcaatcattggcagtctttaacttcaagaaggcagtgagcagtgacggcaaagagattgagatcgacgttaagccaaagccaggcctcctcacgtatccgact

SEQ ID NO: 22123 - DNA, 500 bp, Emericella nidulans
ggcctgatcagctccacgtccgcacgcagtaaccaggaattcttcgcctccgactttctggtcttatttatccatcgtcctctcttctgttatcaacgaagtacctttccttcctcctgttctcacattccctttttcggtctccctcaatatgacgaataacaagttaacgggcgctgatgtcgccaagcacaactccaaggactcttgctgggtcattgtacacggaaaagcctatgacgtgaccgagtttttgccaggtatgttctaccaattccatcgagtgcatcagcgatatactgacaattgacgattaagaacaccctggtggccagaagatcattctcaagtacgccggcaaagatgcgaccgaagaattcgaccccatccaccccccagataccctcgacaagtacctcgactcctcaaaacacctgggcgaagtcgatatggcgaccgttgagcaggaggagaaggcgctatctccccatgatgatgct

SEQ ID NO: 22124 - DNA, 500 bp, Emericella nidulans
gggggaagccaggcgtgtgtctcaaaatgaccgctgttcctttgttcacgaggctattatattttcttgaccatttggactgctggcttaccttatccgtggcacaacgggtggaaagtgccgtactcaacgggtaacgtctcgctcgacgcctctacttaatgccaacatagatgctgctttatctggtgcataatctgccaaagatactacagtgcgttcatgtaccacagtcgatctctgtgatggtgaacaacgatctccagcagctgccataagacatgtcatacgtgccgatgccattgacgtcacagatgacatcggcagcctagattgactgtccgaacttatgcctattgtcattactcagcatatcatcctgtctgcggacgaagcaatgatactaacaactgcgatgcccgggaggcctgcttcgctgcattcgtagatccatcgaagtcatgcgcaactattgtcagtgcgctggacaggtgcctgat

SEQ ID NO: 22125 - DNA, 828 bp, Emericella nidulans
acgaatatgaatggagacggcgtcgcgaaacgcaagcgcaactccatctccgcggcggcggagcggccggtgaagcacctgaagcccgaaaactctacactcacccccggcgacaccaccccagccaatgggaccgtttacgatgtcgaggacaatgaagagctagggccgttgatggcgattgggccgacgcaggcggattcaccagaatggcaggctacgattgaagaggtagtgaagagtgtcgtctcaattcatttctgtcagacttgttcgtttgacacagagctgtcaatgagtagtcaggccaccgggtttgtcgtcgatgcggagcgcggttatattcttacaaaccgacacgtcgtctgtccgggtccgttttggggatatgtcatctttgataaccatgaggaagtaagtcttctgctagtgaccttggattcaaattacaacctaaactaataaatcagtgtgatgtctatcccgtgtatcgagaccccgttcacgattttgggttcctcaagttcgaccctaaagctatccgtcacatgaaactcagagaactgaagctgcagccggatggagcccgtgtgggatcggagattcgagttgtgggtaacgatgctggagagaaactgagtattctctctggtgttatcagccgactcgatcgcaacgcgcccgaatacggcgatggctacagggacttcaacaccaattacattcaggctgccgatgcagccagcggcggtagcttccgcaggccgggagtaaacattgatggaaatgcgatcgccctgaaagctgggggcttgcaaccgccttttc

SEQ ID NO: 22126 - DNA, 422 bp, Emericella nidulans
tccaaaagtcagcccgcaggaactcggctcagcagggcactactatggcgcctacctcgagccgggcccaaagcaatacgacatccgagtctcccccagcaatgccgggtagctccggccgaggctctggagtcgttcctattgcggctgccccgcctaaatctagctcagcggcgactacgtctccgggcacaaacaacggttgtggtgcggtacaggtggctcctaaacgtcagcgtaggctggaaaaggcctctgatgttgatatggcggaaagcccgtccagtacctcgtccggtggacgatccaaggttgttccattggcgccggctatgcctccagcggccgtcaacccagccaaccacagtatcgctgctggtcagggcgcaagccaggaatgggagtggttgacgatgagtttg

SEQ ID NO: 22127 - DNA, 850 bp, Emericella nidulans
aaagatttcgccagtttcagactgggcgtctatgctggaagcacctcttccatccacatcgatcgacgccttcagccaggaggaagttgcggcgggctacagtctgctagaatacatccgggtccagttgcagggtcttaatctaaagctgcaaccccctcgccgccgacatctaaacgaatctatgagcattgaccgtaacagcttgagagggcttgaaatactagagtcagcgcgcgacagcttcaaaggcagcctactacatgcagtgcgtcggacctccaccaaaagcggagcgcgactactgcgagatcgactaacatctccgtcaacttcattacctgtgatcaacgaacgtctcgatctggtttctgtttttattgaggatagtgagatacgaaatgatctagtacagctgttgaaacgcagttacgatgcccaacgtttggttcagaaatttactcttgggaagggagatgcagatgatttgatctgcctttcaaagtctatagaagcctcaaagaatgtcaagcggctattatcggccgcgagtaacgcaagctcagagtattctcggaaatcacttcagaaaatggttgatcaactctatctagatgggccaacgctattggctgacaagatcctgtccgcaattgacgaagaagggctattgcagaagcagcgtatcgaggaagacactgcagctgaagccgctattctagcccagaggttaccctcaatgaaggcccaccggctgttcttgccagtttgccaaagaaagtccgggaaaagaccactgagcgcacagcaaccgccgaatcctcccctgtcgagacgtggattatgcgac

SEQ ID NO: 22128 - DNA, 850 bp, Emericella nidulans
agccttcaaccactcccaaagcaatgatgccgaatccgaatacgatcgtcttcgcgacctcgcaagacaagaagcctcgaagcgcaactcctgtttccagcgcgtacgtccaccacaaacccaccaacttaccttaaacaccaacaaccacaaacctcttcaaaatgctaaatagtgatgctaccagtcccaagaagcatacgcgtccggcgacggcgcagcagccaaagaactcagcgagcagggcaaagcgcacggccgcaagatggagggagtataaccgacaagcgtcagagtttatttttcgcgagaacaacgcgccggggcgcgttgatgcggatacaatcgatcttacggacaatttgttgaagaagcagaagatatccttgagagaggattaagtccgcgagaagtcaagggcagactcatctgcatgtgtatgtcttagcctactctactgggcagatggatttcatgggtggctttttgaatggtaggctgactggcagggacttctaggattgttggcaagggaaaccattccgcgaaccatgttcagaagatcaagccgcgcgtggagaaggtctgtcgcgagctgggcctgcaatatgcgacggaggagaatgaaggcagaatctatgtcaatcttactggcggcgcggcggatagtcttccttccaaaccgtcgcatggacatggacatcaacaacagcactaccaacaaccgcatcaacaccagcaacagcagcagggtaaccaggatgagattgagcaagtcgtcaatgcgatactgccgcgggtgctgcgcaagctggagaaggcttgctgtgttgttatgtaggcgtttatc

SEQ ID NO: 22129 - DNA, 694 bp, Emericella nidulans
gtctttggtccattgatcctcagggggtgggtttcgacaatacaagaccacgctgctgaatatgccattcggcgcgtttcaatggatattcatcctgctggccagctatctcgcacagaaagcgcggctaaaaagcgttgttcttgcgctgtttatgctccccgttgtcgcaggacttggagttctttacgccgtgccacgcgatgactcggcacagggagccctcatggcagggtactacctgcttgccttcctcttcggcgggaacccgatcatcattgcgtgggttgtggaaaacaccgccggtatgaccaagcaaagtatagtcacgagtctataccaggctgcctcggctggtggaaacatcgtgggtccgctgctcttcaacgacaaggactcgccagagtatctcccgggcctgcaggcctgtttaggtatcttttcggccttggttgctgtcgtaggaatgcagtggctgctgctgttctggatgaataaaggccaggaacggcggcgtctggcaaatgggaagcccgcaaaaatggtggaccgctcgatgcatgggaactttcaccaggcggattcggatgagagcgcggtgggtgcgggtgaggatggtcaggaccagcagactgggaataatgcgttcttggatttgacagaccgggagaacgatgagtttgtgtatatttac

SEQ ID NO: 22130 - DNA, 740 bp, Emericella nidulans
gctcaggacaagatggaaccctcgtacaagcggtatggagagctctatcgacgcacaaataccgatgaaatatcgtcattgacggtaattgcaggtcccccgtaccagtggtctcaacgcgccgatcatggagctcacaggtgaggctgaatgcgatctacctggaataactatgctaatacaagacttcaggtcattctggtgaggttttcgccgtacgatttgacccaacggctcagcacatcgcatccggttccatggatcgatctatatgtaagtcaagactaggacatgaactcgaataatgactaacttgcatttacaaagtactctggaacacctatgggcaatgcgaaaattacggcattctatctggtcacaaaggcgctattcttgacctgcaatggtcacgagactccaaaaccatattctccgcatcggctgacatgactcttgcaagctgggatatagagtctggccagaggatccggcgctacattggtcatgaagaggtcataaacagtgtcgaaattagcaaaagaggccaagaaatgctggtcagcgctagtgacgatggtacgatggggatatgggaccctcgacagaaagaggcaatcgattacctggaaacggagcttcctattaccgcggtggcacaatctgaagctcgaaatgaggtattcagtggaggcattaaaaacgcaattcacgtatgggacattcgaaagaaggctatagct

SEQ ID NO: 22131 - DNA, 850 bp, Emericella nidulans
gcatcctcaagatgaaccgagaaaagttgatccgcaagaactctccgacgagaaggtgatcgagaactacaaggcctcctgcgacggtggtatcctgaaagtcatgagcaagatgggtatctctactctagcatcttacaagggtgctcagatttttgaggctcttggtattgatgacagtgtcattgaccgctgtttcactggcactgcaagccgtatccgcggtatgaattttgagctgatcgcgcaggatgcgttcgccatccacgagcgtggttacccatctcgtgccatcgtcgatatccctggtcttaatgagtcgggtgagtaccactggcgtgacggtggtgaagatcatatcaacgatcccgtcagcattgccaatatccaggatgctgtgcgcacgaagaacgacaagtcctacgaggcatacgctaaggctgcccacgagcagattaaaaactgcactctgcgtggtatgcttgagttcgactttgaccagcggacgcccattcctatcgaccaggttgaaccatggacagagattgttcgccgattcgtgactggtgccatgtcgtacggatctatttcgatggaatctcactctaccctggctgttgccatgaaccgtctaggtggaaagtctaacactggtgaaggtggtgaggacccagagcgcagcaagcgcatggcgaacggagataccatgcgctctgccatcaagcagattgcttctggccgcttcggtgtcacatcccactacctcgcagacgccgacgcactgcagatcaaaatggcccaaggtgctaagcctggagagggtggtgaacttcctgggcacaaggtcgtt

SEQ ID NO: 22132 - DNA, 850 bp, Emericella nidulans
atcaggatactgttgtgcaacaacttcatcgtgttctgcgaccattccttcttcgccgcgtgaagagtgatgtcgaaaagagtttacttccgaagaaggaagttaatctatacgtccccatgtccagcatgcaagtaaaatggtatcaaaaaattcttgagaaagatattgatgccgttaatggagccggcggtaagaaagagtccaaaactcgcttactgaatatcgtcatgcaactgcgcaaatgctgcaaccatccctacctcttcgaaggggcagaagagggtcctccttacactaacgacgtacatatcatcaacaattctggtaaaatggtgattctcgacaaacttcttgctcgcatgcaggcgcaggggagcagagttctcattttctctcagatgagtcgtgttctggacattttggaggactactgcgcgctccgaaagtaccaatactgtcgaattgatggcactacagctcatgaggatcgaattgccgccatcgatgaatataataaaccagattcggataagtttattttcctcctaaccacaagagcgggagggttgggtatcaacttgacgactgcggatatcgttgtgctgtatgacagcgactggaatccgcaggccgatttgcaggcaatggatcgtgctcaccgcattggtcaaacgaaacaggtcgttgtataccggtttatcaccgaatcagccatagaagagagagttctggaacgtgctgcgcagaaattgcgattggatcagcttgttattcaacaaggtcgggctcagcaacaggccaagaataccgcttccaaagatgagttgctcggtatgacccgaggagc

SEQ ID NO: 22133 - DNA, 850 bp, Emericella nidulans
atgcggacctccagcaatctagacgaccgaaccctacatgagctctacctctggccctggatagacggtgttgcgaatggactgggttccgttatgtgtgtcatgaaccgcgtcaatggaatcattggctgtgaaaatgatcacattatgaacggcattttgaagaatgagaccggttttagaggtattaccccattgtgatagtcttcttatttcttcactctggacactgctgaaatcacaggtttcatcgtccctgatgtcactgcgcctgtggacaaggctgccggcctgcttggaggggcttggctggaactcagggtactccgtctcggagatcatggctgctgtcaagaacggaagtatcccagaaagcgtcatgactgaacatgcgttgagaatcgtggccacgcagttgaacctccttcagccacctgaggagtacgcatttcctgttgagacggccgacctcaacgtccgagaccccagcagcaaagacttcatccgcagagccgggtccgagtcaatcgtcctgctcaagaacaaaaacaacaccctccccctccgcagcccgatgtcgctggggatctttggcaaagacgcggccaatctcgccacgggaccgacgccgcagtcggacttttctaacttcgcaggcgatacctatgatggacacctcatcactggaggtggcagctactcaccagctccgtatgtcgtgtctccgttagacgccctcacggcgagacgcgagatggccagggctttggttacaaatacattctctcagacaactggaccgtcacgccttccgagtctactggggaagggttcttccagactctggggt

SEQ ID NO: 22134 - DNA, 850 bp, Emericella nidulans
ctaagttccattaatgagcgtcggctaatgatgaagattgatctccgcctgttgccgatgctctgtgtgatgtacatgattacttttctggataggtgcgcttgcgtctggtcttagatttacgtcaggtcctttattaaatgctatccatgagacagggtcaacatcggcaatgccgccgttttaggaatgcgggatgatctggacatggtagagggaacaaaatacaacgctgcgctgatgatattcttcattccatatatcctattcgagattccatccaacattctcctccacaaactgaagccgcatgtctggcgtgcgtatctcgcaaatccgggagaccgtgagcgctgatctgacagctggtagtctccttttgcgtgttcagctttggcctcatctgtgtcctgcaaggcttggtacagagttgggccacgctcatggtaacgcgctggttcctggggatgtttgaaacggcgatggcgccaggatgtacctactcctctgcctatccattaccttactctatctaatcaatgggaacaggcgtatacctgctcggcatgtggtacaagcggtcagaagcgcaaaaacgatacagtatcttctcctgctcgaccatattagccggtgcatttggcggtcttctgcatccgccattggaaagatggatggggtaagagggtacggcgggtggcggtgggtgtttatcctcgagggcctggccaccatcgtgatggcggttatggtctactttgctctgccagactttccggaagactgtaagtggttgagtgagagcgagtacgaccatatcagggacaagatggggggcgagacaggacgc

SEQ ID NO: 22135 - DNA, 850 bp, Emericella nidulans
cactctcgctccctggcacaccgatccggccagatggccgctcaccaacgcaattccgccctctcacagcagaaacagatatcctgcccggcacgaatggcagcgcacgggtcgggttcgcagatggcacacaggctattgtgggcgttaaggctgaggttgagaagactattctcggtgttcaagcgcaacagctggaggatgcggaggggtttggcgaggccggctcagacggcgagggtggcgccggccggggttcctcgtctggccatggatcgtgggtacagatggccattgagattcctggctttcgagatgatgatgccttacctgttttcttgtctgaaatgatgagggagccactggtagaatctgtctcgggcggggagaagggtggtgctgaggagatggttggcgggttgaagggacggcttgtgataaatcggaggtggcattggaggctgtatattgatgtgggtttcctatacaccggttcttcgtactttggtatgtgctaatatgcgatgtctaggtcctgctcctttcacaaccattgtcctaccccctcccccttctatctcttacaacctacctcgccctcctcgcaacaaagctgccaaagctaaaatcaaaaggcgaagaagacccttttttcgacgatgactggaacgctgccgaatacttatacccccgtgtcaaacccgcaagaaccaccattccgagctcaatatccgtgcataaagtccgacctcccgttacgctgctcgtcatttccgtggcagagaacataattttcgacccaagccgtgaagagattgctgtggcggatgcagtgctcgcaatttcagta

SEQ ID NO: 22136 - DNA, 850 bp, Emericella nidulans
aatctcctagccaagtcgcatctggacccggaggtatacggagaggacgcactggagttcaagccggagcgaatgtcagacgagttgttcaacgcgcgcctgaaacaattcccaagtgcgtggaagccatttggcaacgggatgcgggcttgcattggacgaccttttgcctggcaggaagctctcttggtcatggccatgcttctccaaaactttgacttctcactagctgatcctaattatgacctcaagttcaaacagacattgaccattaaaccaaaagacatgtttatgaaagcacgcttgcgtcacggcctgaccccaacgacgctcgagcgtcgactggcggggctggctgttgagtccgcaacacaggacaagattgtcaccaaccctgcggataattcagtcaccggtacccggttgacgatcctctatggctcaaatagcggaacatgcgaaacgctagcgcggcgtattgcagccgatgccccgtctaagggcttccatgtcatgcggtttgacggtcttgacagtggtcgttccgcgctccctacggaccaccctgtcgtgatcgtaacctcctcatacgaaggacagcctcctgagaacgcgaaacaattcgtttcttggctggaagaacttgagcagcagaatgaatcattacagctcaaaggagtcgactttgctgtattcggctgcggcaacaaggaatgggcccagacgtttcaccgcatccctaagttggtcgacagcctgctggagaagctgggaggcagtcgcctcactgatttggggctggcggatgtatccactgatgagctattctcgacatttgaaacatgggccg

SEQ ID NO: 22137 - DNA, 467 bp, Emericella nidulans
gccgcggcgcccgccgtggattcgcagacctgtgctctcaagaccagtacattgggccgcaaaggcaccatgatcgccggcaccctgatcaccggtgtccttcttttctgcttcaccgcgtctacagatccggacatccagctcgtctgctcttctctcgaggccttcttccagaacatcatgtacggcgtcttgtacgcctacacgcccgaggtcttcccggcccccaaccgaggtactggcagcggaatctcgagctgcctgaaccgaatcgccggactgtgtgctcccatcgtggccatctacggcgcgagcgcgaacccggatgctccgatctatgcatctggcgcgctgatccttgccgccttcgtggctatgattttcctccccattgaaaccagggggagacagacgctgtaaacctatagcggccgtcttctgtctcgaggtttcaaaatttgaatttt

SEQ ID NO: 22138 - DNA, 453 bp, Emericella nidulans; identical to SEQ ID NO: 9140

SEQ ID NO: 22139 - DNA, 850 bp, Emericella nidulans
actcagcgttccccgccggtgttaacgtcgcagcaacatgggatcgacaattggcttacatccgtggtcatgcaatgggtcaggaattcagcgacaagggcattgacgtacaactaggcccggccgcaggtcctctcggcagattccccgacggtggccgaaactgggaaggttctcacccgatcctgttctgtccggtgttctcttcgccgagactatcaagggcattcaggatgccggtgtgatcgcaaccgcgaagcactatcttctcaacgaacaagagcatttccgacaggtacctgaggcgaatggttacggctacaacatcacggagaccctgagtgagaacgttgacgacaagaccttgcacgaattgtacctgtggcccttcgcagatgccgtgcgtgctggcgtgggcgccattatgtgctcataccaacatctgaacaacacgcaagcctgccagaacagccaccttctgaacaagctcctgaaggctgaattaggctttcaggggtttgtcatgagcgactggtctgcgacgcacagcggtgtcggctctgctctggctggtatggacatgacaatgcctggcgacatcgccttcaacgatgggctctcttactatggccccaacctgacgatcagtgttctcaacggaaccgttccccaatggcgtgtcgatgacatggccgtccgagtcatggccgctttttacaaggttggccgtgaccgtttggccaccccgcccaacttcagctcctggacgagggcagaaaaggggtacgaacacgcttcgattgatggaggcgtacggcacagtcaatgagtttgttgatgtccagcaaga

SEQ ID NO: 22140 - DNA, 850 bp, Emericella nidulans
  unsure (1)..(850): unsure at all n locations
aaaagccaacaacgggcgaattgaaggggagaaccgggcaaaaaccaanaaaaggaaagaaaagacaacaccaggaacggaaccaaaagaaaccggaaactgaaaacccaaacaaaccacagggggacaaagagaaccccaagcactagcggagcgaagaacagggcaagctgacacagaaaagcgaagacgacagcaagggcgaagggcaccaatagcagagcaaaaacggcaaacaagaggaacatgccgagcaacagacaagcgcaagaagacggagagaagaaagcgccagagaacgagggaaaagaacaggcgagggaacgcacggagaagcaaggaagaagagagggcgtatagcaaggagaggaagagggggaacgaagaagacggaccaacaagggatgataagaaccccaaccacagaaaaacaaaagcgggagacatcaagacaaaaaagaagggaagaaagccaagaacgaggaagaagaggaaaaaaccaaagccacaacaaagaaggaagaggagccagaacaggacaaaacaccaaaaggggggaacggcaaaaggagacaacgaaagaaaaaaaggaaacaagacaagggccaaaaaaacgggggaaaaagaaaaagaaaaacaagggaaaaaccacacaaaaaaaccaaagaaaaccccggcccaaaaacgggaaaccccaagaacaaacaaaaaaaaggaggagaacacaaaaacacacgcgagggacaaaaaagaaaaaacccacgaagcaaaggaccacaaaacaaaaccgaggaagaacaaaaacgaaaaacaacaccgcaaacaaacaagggaaaaaaaaaacaaaaaa

SEQ ID NO: 22141 - DNA, 850 bp, Emericella nidulans
aatggcgatacgctttttcctaggagtggccgaagcaagcactttcagtggcactcattttatactcgggtcatggtataccgagcgtgaactaggcaaaaggagcgggatctttactgcaagcgggctcgcgggccaaatgttcggtggtttcatccaaactgggatccattcgtcgttagatggtgctgcagggctgtccggctggagatggcttttcatagtgagtatattccactcttatccagggcgatttctgcctcatcccagctaaccattccagattgatggcctgataacccttcctgttgcattgtacggagctttcttgtttcctgatactccagccacaacccaagctccataccttacatcctcagagcgagctttggccgtgtcccgattgccggtagcgaagcatgccccgatatttaaccgaacattcctgaaaaacctattcaagacctggtattggtgggcgtttgtcattctttgggtgattgcaggcgagacggagtcattctcgtccaattctttgttggcactttacatgaagtcgcaccccacaaaccattactccattgcccagcttaacaactaccctactggcgtgcccgctgttggaattgtctctacactgttctgggcgacgcttactgatttttgggggggtaagcggtatattgtgggttattttatcggcattactggcatcatcacgccgatacttattctgactcggtttgactcaaccgctacagtctttggtgcatactattgggccggagccgtttatgcttgccaagcaacctttttcgcatggtgtaatgatgcgatgaggatgcaggag

SEQ ID NO: 22142 - DNA, 365 bp, Emericella nidulans
cagccatatcgacgttggccattgcgcgaatcacggcactcagacgcgatcgagatctacacccgcgaaaacatgccagaacggtatcacttcaagaacaacgatcgcatcgcccctctatgggtaacctgcgagttcgacgctcaggcagcactccagaacggtcagttttaccatccgaaaggaattcacgggtacgaccatgaacatccgttgatgcgggcaatttttatcgcccgtggccctggttcccgcatccacccaacagtcgggttgatgcttttcgtaagtggccccaatccgactaaatttcccttgctgacatgacagaaaacatcaatgtttataatatcctgtgcgactct

SEQ ID NO: 22143 - DNA, 838 bp, Emericella nidulans
atcgtctccctgtcttcactctcttcactcctcactgtctcacaaaatgggcgaccgactccaaccagtcgaccagcatggtcgtgaccgaaaagaaccctaacaataatgaccaagagcctacaccaaagacgtcgacggatcagctccccaagggcccgatcggtcccagtcctcctcccaatggcggactcgtggcctggctgcacgtggtcgctggtttcatgctgttcttcaatacctgggggttgctcaacactttcggcgtcttccagacatactacgaatccgggactctcttccgtcggagctcctcagatatctcgtggatcggatcagtccaggctttcatgctgctgctcgtcggcttcatcacagggcccatctatgaccgggggtaccttcgcacgctgctgaccgtgggcagcttcggcatcgtcttcggcaccatgatgctcagtctctgcaaggagtactggcaggtcctgctggcgcagggcttctgcgtcggaatcggtgctggatgcctatttgtcccgtgcgtctcgatcctgccaacatacttctcttccaaactaggcgccgcgctcggtctcgccgttgcgggatcctctctcggcgggatcatctatccaatcgtcctgaatcgcctcctcagtcccctcggctttggatggcccgtccgagtgattggtttcattgccctcggcaccctcctcctcccgatcgtcatcatgaagcagcgcgtcaaaccacccaaggccaaaaccctgatagactggaccgcgttccacaacatcccatgcatcacgctagggattgtccgactaaccttgca

SEQ ID NO: 22144 - DNA, 552 bp, Emericella nidulans; identical to SEQ ID NO: 7226

SEQ ID NO: 22145 - DNA, 850 bp, Emericella nidulans
attccaagtgcctttagcgtctgcttctatgcctactttgcagcgatcttcatctacatttgcaagatcccagtgctacaagcttacgcctgttgcgaacctacttggaagaagtggtacatctcatttgttactcggtctactttctatatcccctacgggcgagctatctcttaccgatttgacgggaagtattgtcttagacctgagtcacgctcgtctcatccctaagggtggcgcctggcttacgccgggcatgtttgtactcgtcgatggcatttacgaggaggaggagaatgtcaggggctccacgctaggcggcaacagcgggattggaggtgcgataggaggtaagttcgttggagtgacaatttgtggtcctccttgtgaacgccgagaaacttcgcttggaatgagtatccacggtaaaaacgaggatatcagctctagtggcggctttggctgggtggacttcactggagtagggagtgagcgtgctcaaggttctcgaatgagacgaattcagacaaggtgtctgcacgaggctcacgatggtaatcagttgaatcgccgtttcaagattgtcatcatgggtgaagttaatcttgacaatatgaagacgatggacgctctgaggaaagtctttagtctatacaacgattcggctgtgcaggagcgtcctttgttgttcgtcttggttgggaattttgttcagaaagcaataattaatggcggtggtcagggcgggagcatcgagtacaaggaatgtttcgacatgcttgcattggtgttgtccgatttcccttcgttgctacagcggtatacgttcatctttgtcactggagacaat

SEQ ID NO: 22146 - DNA, 849 bp, Emericella nidulans
cgtcccaaaaccccaaccggcacagttctggtaacaggcgcatcaagcgggatcggcgcagagctgagttatatcttcgcggaaaagggccacgatttgattctggttgcgcgaaacgaagaccagctcaacgtcgtgaagaacaatatacagcagaagtacggcgtccgcgccgatgtcgtcagcatcgatctgtctgttccgggatccgcgcaaagagtgtatgatatcgtgacaaaggagaagcagctgactgtgaacgtgctggttaatggggcagcactgggcgcagcgggcgatcccttcgagcaaccggttgagctcgttgagcgcatgacgacgctgaattgtatctcgctagtgcagctgtcgcacttgttataagaacgatatgatcaagagaggcatcgggtggatgatgcatatttcgagcgttggctgtatgtttccttccggccactatatcgctccgttgaccctgcacaagtctgaagtagactaactagttgtatagcgtatatctccagcccgggccaaaacatcaaccactcaaccaagtactttgtccgcgccttctctgaagctctttctgtggaacttcgtgcctaccctggaatcgtaaacacactactccttcccggccctgcggaaacgcaattcatcacgcgatcgcacgcccaggaaacggtcatgatggctgcgtcgggggcggttgaggatcccaagtccgtcgcgcaagtcgggtataaggcgttgtgcaagggcaagcgagaggcgttcagtagttggaacgccatgttcacgagtccagtcttcaacgtcgtacggagtcgagcgcgccattttttt

SEQ ID NO: 22147 - DNA, 850 bp, Emericella nidulans
tcccaactccaagcaaatacgccgaagctgttgatttctggtccttggagctcaagccgtacgccgccctcgacgtccccgtctggcccgatctcacaggtaaacgggtctcaccaggcgcggcgccagaatacaaactgatatccgaggcgatgtcaataacctcgtccttcccagttttagagaaagtcgcagcagatctagggctgaaatctgttgcgtcgatcattagggcggcatgggcgttcgtcagcctgtcttatctgggcctgtcggggacggtgtttgcggagacgttatcagaccgcgtctttgatccgtccttggaaagcgcagtcggtccttttatatctgttgttccggttccgttccgagtagaaggggatacgacagtgaggaagatcctggcagaacagcaccggctctccttgcaatcgtggaagcatcgacatgttcatgcgagagatattcggaaggcccttaagcggcagagaggagagccgttgtaccctgcagtattcaatttccacgcgcttgacgaatcaaaggacagaaaaattgcgagcctgcctggtctctggcatgagcttgaagaccagattggcctgcatgttgagcatcccatggccatgaatgttttccagtcgccaagcggaaacatgaccctggaggcatcaagcgatagtcggatcttcagccgtgaacatttacgcctttttgttcgccagatcgatgctctcatctcggaaatgctcttatcgcctgatgaatctctcagcgggctcgtgaatcggcttccgtctgacctacgatccctatccacaggattgtgagccatgaagtcgcgaat

SEQ ID NO: 22148 - DNA, 850 bp, Emericella nidulans
gctgcgagctctcgtcgctgacctgggtgccaagattgttttgacctctagtgcctgtttggacaaggcctctaacctgggggcgcagccatttgtggtaagccaggcaagtgttgaacaattgcctcttggtgggcatgatacaagcctccacgaagccaggccttccaacgcggcgtacgccattttcacatcaggcacgacgggtatgccaaaagcgacggttatacagcacacggcacttagcacaacctctctccagctcgccaagtatcttggacttgactctagcacgcgaacgctgcagttctccagctatactttcgacgtcagtgtcgctcgatattcacggaacgctgatcaatggtggctgtgtgtgtgttcccagcgacagtgagcgggtaaatgacatatctggtgctatccgccggatgggcgtcacgcactggaacagtacaccaggaatagcgaatactatcaatcccaagaccgtcccgtccctggccacacttgttacaggaggcgagaaaatgtccccgggccacattgagcgctggagcgaccgagctgtgatcaacgcgtacgggccctcggaagcaacaatcatcgcaaccgtcagcatcaaggtcgataggcagggtaacctctctaaggagagccgcagttctattggaaagccggtctgtggccgagcctgggttgttgatccgtacaatcctcagcgtctcctgccattgggggcggtaggggaacttgtccttgaaggctgcaacgttgcgaggggctacttgaacaacgaggaaaagacggccaaggcctttatcgagcatttagggttcctgacaatgaa

SEQ ID NO: 22149 - DNA, 850 bp, Emericella nidulans
attcaacacatatggccgagtcttcttcttctcatggtttggcttcatgcttgcattcctctcatggtatgccttcccgcctctggtgagtctcttcttccgacaaccggactgaaggaatcctaacagtgaagccagttgactgtcactatccgcgatgatctcgacatgtcccaaacacaaattgcaaactcaaacatcattgctttactagctacgtaagttccctgcatgcaaggacaagacgcagagccagccctaaccctatatcagactactagttcgacttatctgcggccccctatgcgatcgtttcggacctcgactagtctttatcggcctactgctggtgggctccattcctaccgcgatggccggcctcgttacctcaccccaaggactgattgccctgcgcttcttcatcggcatcctcggcggcacattcgttccctgccaagtctggtgcacagggttttttgacaagagtatagttgggacagccaactccctagctgccggtctaggtaacgctggtggcggtatcacatacttcgtcatgccggccatcttcgactccctcatccgtgaccaaggcctccccgcacacaaggcctggcgcgtcgcctacatcgtcccctttatcttaatcgttgccgccgccctaggcatgctcttcacttgcgatgacaccccgactggaaaatggtccgagcggcacatctggatgaaggaggatacccagacagcatctaaaggcaacattgtcgaccttagctctggtgcacagtcctcccgtcccaccggacccccttccattattgcgtacgccattcccgacgtcgaaaagaaa

SEQ ID NO: 22150 - DNA, 777 bp, Emericella nidulans
ccgaaccatgactggcgaatcaccctgaaggataaggttattgtcatcaccggcgcaaacaggggcatcggtctggccatcgccgaggtctgtctggccaacgaagccgcagctgtttacagcctagaccttttcgagcctggcgaggaattcaccgctgtgcaaaaaaagtcagcgaatccgagtcgcctccaatacatccactgcgacgtcacatccgaggaaagcatcagctcggcaatcgacgctgtggtgtccgccagtggcgccgtccacggcttcgttgccaatgctggaatgaccaagcaccaaccagccctggacttcacccgggccgaaatcgacaagttgttcaacctgaacgtgtttggcgcgtacttctgtgcaacggcagttgcgcgcaaattcattgagctcgggatcaagggctctattgtatttactgcttccatgacgagttatagacccaaccgcgcgccgagcgcaccctatggcgctacgaagggtgctgtgcggaatatgacacatacgctggccatggagtgggcgcaccatggtattcgcgtgaactcaatatcacccggttttatcaagacccagatgacttattttgtcgaccaggcgccggactggaatctcaagatgcaatattacggtggtatgccaagattagccgatccgaaggagctaggaggggcttatgtgtatctgctgtcggacggagcgtcgtacacaacagggattgacattccaattgctggtattgtcggagcgtgg

SEQ ID NO: 22151 - DNA, 511 bp, Emericella nidulans; identical to SEQ ID NO: 6428

SEQ ID NO: 22152 - DNA, 608 bp, Emericella nidulans
acccaaaagcaatggtccgtcaagggcaaggaaaaccgcttcgacgagctcaagttcgaggaaggcgaaatccccgctgttggagataatgacgtcctcgtcaagctgcacggcgcctcgctcaattaccgtgatctagttatcccccaagggtatgtttctttttccttaaaatatatcaaggagcaaggctaaaggagctgttcacaacagaaagtatccctttgccctcaatttccccgttattcccggttccgatggtgccggcgaagtcatcgaggtcggatccaaggtcacccagttcaagaaaggcgataaagtggtcacactcttcaatcagcagcaccagtacggccccatcgatcccgcgggagctgcctccggtctcggcggtgccgttgacggcaccctgcgccagtacggtgtcttcaacgagaacggcgtcgtccgcgccccgcgaaacctgaactaccttgaagcggcaaccttgtcttgtgcggctcttacaagctggaatgctctgtacgggctgaagccgctgctgcccggtcaggctgataatggcagggcacagaacggtgttagtgtttttgcgctgcaggtttggc

SEQ ID NO: 22153 - DNA, 850 bp, Emericella nidulans
ggaacggatggcacatatgacgggttggagcgagttacaatggtgcgttcaacaaatcccatatattcctctctatggtctgaaattttgacttcttctgacttctgtccagtgctggttctacttacgccttctcgacaatccggatgcgaactactatgcctatcccctggatttgtgcgcagaggtgtctgagcagctaaaggtcatcaaaatctactatctaccatcagcccaaaatgaccgaataactgaccaagcgcgaccgtttgatatcaagaaaatccactctacagcagaaagcgagtaccatccaagcttgcgtccccctccccggaacacgacaaagccctaccaggtggtccagccggaacgccgtcctttaccatcaagggtaaccacatctcgtgggagaagtggacaatgcgcgtaggatttaactaccgggagggtctgacgctccacgacatccgctatgatggacgcagcttattctaccgtctctctctgtccgagatgtttgtaccctacggagacccgcgctcgccttatcctcgcaaggctgcatttgacctaggaagtgacggggctggcatcaatgccaacaaccttcgcctaggatgtgactgcctaggcctgattaaatactttgatggttggcacaacacttcttctggggagccactgaagctccctaatgtcgtctgctgccacgagcaggacgacggcattctttggaaacacaccaacttccgcacacagaacgccgtcgtgacgcgtgcacgcgatcctggtgttgcagacaatcatcaccgtcagcaactatgaatatatctttggcttccagttt

SEQ ID NO: 22154 - DNA, 789 bp, Emericella nidulans
atgcattcgttcaagcgctcactcctccttctcggagccctccttcctgccgtctttggagctcccgtcgagcctcgccgagcagctgaaaaggttcccggaaagtacattgtcacattcaagtccggtctcaacgttgaccagatcgatgctcacacctcttgggcctcgaacgtccacaagcgcaacctcgagcgtcgcggcctagctgaacgggaccagtactctggcattgagaagaattacaagatcaacaagttcgcggcttactccggctctttcgacgatgccactattgaggagatccggaatagcgcagatgtgagtaccttgcagtctttggccattagcatggtatacagacgctgacggttatgcaggttgcccacgtcgaagaggaccaaatctggtacattgacgccctgacctcccagagcggcgctccctggggtcttggagccatctcacacaagggcgaagcgagcaccacctacgtctatgacaccagtgcgggagagggcacttacgcctatgtcgtggacaccggcatcaatgccgaccacgaggaatttggcggccgcgccagccttgcctacaacgctgttggtggccagcatgttgacagcgtcggccacggcacccatgttgctggcactatcggcggtgaaacctacggtgtttccaagaaggcgaaccttctgtccgtcaaggttttccagggcgaatctagcagcacttctattattctcgacggtttcaactgggcgctttccccaaaggggtctaaat

SEQ ID NO: 22155 - DNA, 527 bp, Emericella nidulans
tttgcccggtgggggagaggttctgtcccgggtgtggggtatacaacaagcgcattgcgccgcatgtcagggtcattggtgtgaagacccaggacgccaacgcaagggcccagtctcttgatgaaggctctcgtgtgttgctgaacaaggtcggcctctttgcagatggcgctgcggtcaagagtgtggggtcgaaatgttggcgcgtggccccgaaggtagtagatgagattatcttggtttcaaccgatgagacttgcgctgcgatcaaggatgcatttgaggatacacgctcgatcatcgaacccgctggtgcgctggccattgcaggattaaagaaatatgtcgccaagcgccccagccccaacaccagccgtgaactggttgcaatcacctcgggagcaaatatggattttgaccggatgcggtctgttgcggaacgcgctgccttgggggaaagaaaggaagctcttctgagagtaaaaatccctgaacacccgggcgggtctcccagcaaagaggtccga

SEQ ID NO: 22156 - DNA, 702 bp, Emericella nidulans
gctcctagcagcaccgccttcaaggttcgtcgatgcagaggggaatttactgtgggccaaatctgatatcgtgcaggacaaggagaagcccatggccgtgcgggcgtccaacattctcgctgccagaggtgcgttacactgtaacactaattcaagggtggtgctaatgaggtgcagctgtcgccgacgcgatcagaacggtatgcgtgcagacgaactgtaaggatgaggggctaattcgctatacagtcactgggacccaggggaatggacaagatggtaggttttatgtttgctatgaatgagcaggcgctaaagcattttcagatccaaactcccaaaggaaacaccattatcgtacgaatgcctcctccatctccccccgaagtgcgacactaaccgcccccgcagactaacgacggaaacacaatgctgagagatatgagcgttatgcaccccgctgctcgcatgcttgtcgacctcagtgcggctcaggatgttgaagctggagatggaacgacgtcagtggtcgtgattgcgggaagcttgctgggtgctgccgagcgcctacttggaaagggtattcacccaaccgtgatctccgagtcgttccagagagccgctgctgctgccgtaaagatccagcacaacatgtcccggccgatcaacctgatggatcgctcggccttggctcataccgca

SEQ ID NO: 22157 - DNA, 484 bp, Emericella nidulans
tctcctcgctgtaacacctcagagagaaccgcagttccgaaccgttcattgagagggttcgaagttattgaagaagctaaggctcggcttgagaaggcttgtcctcgtaccgtttcttgtgctgatattctcacccttgcagcccgagacgccgtcgttttggtaatatactgaaattattacatgcattacatatttcattcgatttcttactttcttatttatgtgtgtatttcacatgagggagatatataacatatatatatggtcgtgtttagcggtaatttaatattggtttatgcagaccggtggacaacgctgggaagtgcccttgggacgtctcgacggccgaatctcgcaagcctcagacgtgaacttgcccggaccaagcgactccgttgctaagcagaagcaagacttcgctgctaaaactctcaacacattagacctcgtgactcttgttggtacgttgtcattgcatatg

SEQ ID NO: 22158 - DNA, 560 bp, Emericella nidulans; identical to SEQ ID NO: 10535

SEQ ID NO: 22159 - DNA, 745 bp, Emericella nidulans; identical to SEQ ID NO: 6823

SEQ ID NO: 22160 - DNA, 393 bp, Emericella nidulans
  unsure (1)..(393): unsure at all n locations
acgaaagaaagttgtcagtcttcgtcatgtctggcnggacgggcacacgctgtcttcaagtcttagggctgtatgcagatgacaagatgaacgaaatgtgtcatgcttgatggaaaccggctagaggaagacattntgctgaagaacgagctagacgaattcgaggctttggccgggaagaaagagaagtgcaaaattgtgcatacactgacgaaggggagtgaaagttggactgggcggaggggacgtattgatgaagaattgattaggcagcatgccgggacaccggatagagagaccatggttttggtttgcgggcctgaggcgatggagaaggcttcaaagaagatcctnctgtcgttgggatggaaagaggagaaccttcattacttc

SEQ ID NO: 22161 - DNA, 449 bp, Emericella nidulans
aatagtaagaaagagaagagagatcaagaaaagaaagtaaagataaagaaaaaagtaaggagaataaaataagtaacaataagaaaaagatgaatgagagaaagatacataagagaaaaaagaaacaaacacaatgaagaaagaaagaaaaaaaaaagaagaaattaaaataaggtcagaagagagaaaacaaaataaaagaaaacaaacaggggagaaacagtagataaaaacaaaaagcaaagaaggcacacaaaaatgaaaaagaagaaatgatcagaggacaacaaaggaaataaaaagaagcagataaaaaaacctaacccaagatacatagggaaagaggacaaaaaaagcatgaatccaacaagaataataccaaagccgatcaagtataaactagaaaacaagagagcaaaagaacaaaggcaaaaaagggagccaaaaac

SEQ ID NO: 22162 - DNA, 850 bp, Emericella nidulans
acatggcattgagtcaagagaccagagctaaccatcgcagtggcacaacttcatcggcaacagctccgaccttctcatctctgacatggatatcttctcgcgctcatcgtcggaggcctgggcatcgaacttggacgcttgggacacgtttcgctcagacaacgtggttattcagaactctgtcatcaatcacgatgacgactgcgtctcgttcaaaccaaacagcgccaatattatcgtccagggcttgcactgtaacggctcccacgggatctcggttggctcgcttggaaactacccgtatcagtacgatatcgtctcagacctgtacatctacaacaacactatggccaacaccaccacggcagcacgactcaaggtctggccaggcgctgaggccgtcaagaaaggcaatccgccctgggtcggtgggggaggcaagggatacgtgcgcaacgttacctatgacctgatgatcaatgataacaacgacctcgccattcaaattgaccagtgctacggggccatcaatgcgagcgagtgcttggatcacccgtccggcgtcattctgaccaacgtactcttcaagaatatgtggggtacctcaaatggtgcgaatgatcccgttgctggccagcttatctgtggttcagcggatgtaagttttattttcaattcctttttttatcctttcccttcttttggttactgtagttaacgccggtagtcctgcgacaatattcgagcggagaatgtcaccctgacgaactccagtgggcagccgtcggagtggcagtgtagatacatggatgaagagcttctggatcttggtggcgtcggttgcatccct

SEQ ID NO: 22163 - DNA, 850 bp, Emericella nidulans
tttacgtctctagcgtacaagaggtttcgaaagtcatgcgacgtggcggaaatgcgagagcggttgctgcaaccaacatgaaccaggaatcatccagatggcattccatatttgtcatcacggtgactcaaaagaacctggaaactggctctgcaaagagtggtcagctgtttttggttgatttggcaggtagtgataaggtcggcaaaactggtgctagcggtcagactctcgaggaagcgaagaagatcaacaagagtctgagcgctctcggaatggttattaacgcacttaccgacggaaagtcaacccatataccttaccgtgactcaaaactcacacggattctgcaagaaagtttgggaggtaactcgaggaccaccctgattatcaactgttctcccagcagctacaatgacgccgaaactgtctcaaccctgcggtttggtgtacgagctaaggccattaagaacaaggcgaaggtcaatgctgaattgagtcctgctgagctcaaacagttacttcgccgagcgcagagccaagtgacaagttttgaaaactacatttccgcactggaatccgaagtctctagttggcgcagtggtgaaaccgtgcccagggaaaaatggactccagccagaaacgctgaagccgtaggcgccgcaaaggctgaagcgcgcggccctcggcccagtactccatctcgtctccatgatgtatcccggtccgaaactccacgaccagattcacgcatcggcgatcgctctagcacacccagcatcgttcttgagaaagatgagagggaggagtttctccgacgcgagaacgaacttcaagaccagatagcaga

SEQ ID NO: 22164 - DNA, 500 bp, Emericella nidulans
gtcggattcagcggatctatgcaatggctggaagacaggctgaggcgcatgatgaggtgaaactggatgattccgagcaggactcactttttgctggggccggtacccgatcgtcgtccaagcaatcccgcggcgttgagaatgcggaagggcagggactgagtgaggttggagagagtatacctgctggtgcgggcggaccgggacggtatttccgaccaggctctgggctattcacagatcgaatgagggcgctcgtacagcggcaggggttccgacttgtgctggggagtgtgtatccgcacgacccgcaaatcagtgtaccgtgggtgaacgctgcgcatgtcttgagtatggtcagaccggggagtattatcattgtgcacgatcggaggccctggacggcgccgatgctggctactgttctacctgaactgaagaggaggggttatagggttgggactgtatcggacttgctgaaggagggggcttccatgact

SEQ ID NO: 22165 - DNA, 850 bp, Emericella nidulans
aatgctctccgtcgccaacatcgccggcgtgcagatctccaacgtcggtagcccagacgtcacctccaccatcctgctagagatggcgcaccgtctcaacaaagttgtctgcgaggacccatccatggctggcgcagtcgtcacccacggcactgacacccttgaggaaacggccttcttcctcgacgcaacagtcaactgcgggaagcctattgtcatcgtgggcgccatgcggcccgcaacattcatctctgccgatgggccctataatctcctgcaggccgttactgtggcgagcacgaaagaggcaaggaacaggggcgcgatggtcgtcatgaacgaccgcatcgcctccgcttactacgtgtccaagacaaacgccaatacgatggatacattcaaggctgtggaaatggggtacctgggtgccattatctcgaacactccgttcttctattacccggccgtgcagccaagtgggaagacgactgtcgatgtgtccaacgtcacctccatcccgcgcgtcgacatcctctactccttccaggacatgacaaacgacacgctctactcaagcattgagaacggcgcgaagggcgttgttatcgcaggatctggtgctgggagtgtcgataccgccttctcgacggctattgatgatattatcagcaaccagggagttccgatcgtgcagagtactaggacaggaaacggagaggtgccgtattcggctgaggggggtatttcgagcgggttcctgaacccagctaagtcgaggattttgttgggattgctgttggcccagggagggaagggcactgaagaaattagggcggtgtttgggaaggtt

SEQ ID NO: 22166 - DNA, 610 bp, Emericella nidulans
ctgttggtgaaataaagttacattttacgtctggattggcagggtgaccctgatcgcagcacaggtttcgagaacgagcgggaaaagactaccatcgagaaaatttgcgttaagagcgcgaaagaaagaagcgccgaaaggaaaagatcaagggtacaaaggcgatgttcccgctgatgatgacaacaaagggcgctgctggtaaagagaaacagcaagaaaacgaggacctgggctttcacggatccatttttccttgatcacttctgataaggcgacttcttgctgctcgtcggaaggaagaaaaacgcaggaagcggtcgaagcgcgctgcagaggagactgccgccgcagccaaacggcccgaactagaattgttgatgatggatgacgtcgatgccaagtctggaatgcggcactttgatatgaacgagattgtcaaggctgagaagcaggctcgcaagaagaagggcaagggcaagcaaaagggagaggcagctccagttcccgacaacttcgaaatggacgtcggtgatccacgattctcgcgtcttttccaaaaccacgaatttgcaatcgatcctaccaacccacggttcaagccgcgtca

SEQ ID NO: 22167 - DNA, 477 bp, Emericella nidulans; identical to SEQ ID NO: 6161

SEQ ID NO: 22168 - DNA, 850 bp, Emericella nidulans
acccattcttgcggaattctaccggcgcatgaaccccgaagagctagcatggttgatcaggatcattctccggcaaatgaagcttggggcgacggagcggacctttttcgatgtctggcatccagatgcggaaaatctatacagcatctcgagtagtcttcgtcgtgtctgttgggagctacatgatcccaatatccgactcgacgcggaggatcgaggcgtgtcgctgatgcaatgcttccaaccgcaacttgctcagttccagatgcagtcactagatcgtatgatagctcgcatgaggccaactgaggacgatcctgttttctggattgaagaaaagctcgatggagagcgtatgcagttgcatatggtgtcggatgcttctgcgccagggggtagaaggtttcgattttggtcgaggaaggccaaagactatacatatctgtacggaaacggtatatacgacgaggctggatctttgacccgtcaccttaaagatgcgtttgcagacggagtagataacctcatattggatggagagatgattacgtggaataccgaacaagatgcacctgagccctttggtacacttaagacggctgctttatccgaacagagaaacccttttcgacaaggtattcatccactattcagagtctttgacattctttatctcaacggccgagacctgacacggtacacactccgagatcgtcgaaatgccctgcagaaagtcataaagcccgtacatcgccgcttcgaagtgcactcctatgaagaggcaacaaccaaagctgaggttgaagcttctctcagaaaggcagttgcagaagcttctagggctggtcct

SEQ ID NO: 22169 - DNA, 850 bp, Emericella nidulans
ctgcacagcgcgcaatcctccgttacgagtctccaacgtccctacagcggtcgacgacgcaaccgcagacgtaaacatgttcttgatcatcggcgcactccggaatttcaacgcaggcatgcacgccctccgccagggtcactggcgtggccttacaccgccgcgccttggccacgaccctgagaataaagtcctcggcatcctaggcatgggtggaataggacgcaacctgaagcgcaaggcagagtcgttcggcatgaaagtaatctatcataaccgccgcgaactgagtgctgaactcgcagggggcgcgaaatacgtttcgtttgaggagctcttgaaacaatccgacgtgattagtttgaatttgccgttgaatgtgcgtcccttattccttccctctcgtcatgttgactctggactggtaaactgatgggtgtgcgtagaaaaatacccgccacatcatcagcaccgagcaattcaaccagatgaaggacggtgtcgtgatcgttaacacggctcgtggtgccgttatggacgaagacgcccttgtcaaggccctcgacaatgggaaggtctactcggccggcttggatgtcttcgaggacgaacctaaaattcaccctggtcttgtggagaatccgaatgttttgcttgtgccgcacatgggtacttggactgttgaggtatgttcctctcattcctgccaatatgcatatgcattggtcagaagttaactcgaatgcagacgcaaactgcgatggaggaatgggctattgagaatgtgcgaatggccttggagacgggcaagttgaagacccctgtccccgagcaggctgatttgtagttg

SEQ ID NO: 22170 - DNA, 850 bp, Emericella nidulans
cctcaccgctcgatgagcagatcgagcgcgctaccgcgtcttctcttgaagatatcgctctgaatctcgaaatatctgatcttattcgatcaaagggtgtacagccgaaagatgctatgcgatctttgaagcgacgattagagaacaagaaccctaacattcagatagcgactttgaaggtttgtttccttggtctgtcctttactcgactgttctgacaaaattaatctcttagctaacggatacctgtgtcaaaaatggcggaacccatttcctggccgagattttatcaaaagagttcatggacaaccttgtctcgctcctgaaagcggaaggtgtcccgctgaactcgagtgtgagggacttgatgttagcgctgatacaggactgggctatggctgcgcaaggacgcatggacttgagctatcttggggagacataccggaagctgcaaatggaaggcttccagttcccgcccaagagtgcgattagtgggagtatgctggaaagcagtgcggtaggccggaacagtaccgttccatctcaagctagtctaacgtgatttttatagcctccggaatggatcgactccgacgtttgtatgcgctgccggacgcccttcagttttatgaatcgcaaacaccactgcaggaactgcggaaacgtctttgatgcgcaatgttccagcaagaccctgccattaccccatcttggaatcctacagcccgttcgcgtcgatgacgggtgctacgcgaagctaacttcaaagccgtttaatcaaggctctttggcggatcgatcgactttcaagaacaactcgatcacaaaatccaatgtgttggaaccccgt

SEQ ID NO: 22171 - DNA, 512 bp, Emericella nidulans
atcatggtcggtttcgatatgcacgggttgacgcctgccccagtcacgccgttcactcctaccggtgagatcgactacgacgctatccaacggctgggaagctggctcagtagtatgaacggcgtcaaagggctcgttgtactaggccacgcaggggagggcacctttctgactgccgaggagcaagtcgcggtgatcaaggcatttgtcaagtcagttgacgacaaaatccccatcatcgctggcatcaccggcgaaggaactgaggtggcggcactagaggcgcacgcgtgaaagctgctggggcgaaacgggccttctgtatccatctcacggctggctgcggtttggataccaggacggagcaccccaggatcgctaccgccgtgtctacgaggtcagcaatctcccattgattctcttccagtatccagacaacaccaaggccacatatagcttgcagacgatgctcgatatcgctgcgcaaccgggtgtctttgcaatgaaaaacg

SEQ ID NO: 22172 - DNA, 850 bp, Emericella nidulans
tgcgccctgggccatatgtcaacgccgaagccagcgctggagggttcccactctggcttacgacaggcgcatatggctcgacgagaaatgacgaccccagatatacagcggcctgggaaccgtattttgcggaagtgtccgaaatcaccagcaagtatcaggttaccgatggtcattatacactttgctaccagatcgagaacgaatacggacagcaatggattggggatccgcgtgacaggaaccctaatcagacagctattgcttacatggaattgctacaagcctcggctcgtgagaatggtatcactgttccattgaccgggaacgaccctaatatgaacacaaaatcctggggcagtgactggtcagatgctggaggcaatcttgatacggtgggcttggattcgtacccttctgtaagtggcttatatctatattgctaaacatttctgacggatcagtgctggagctgcgatgtcagtgtatgcactggaacaaacggtgaatatgtgccatataaggtgctagactactatgactattttcaggaagtccaaccgactatgccgttcttcatgcccgagtttcaaggcggatcttataacccgtgggacggacctgaaggagggtgcactgaggatactggggccgattttgcgaatctgttctacagatggaacatcggccaacgggtatctgcgatgagtctatacatgatgttcggaggaacaaactggggcggtatcgcggcacctgtcactgcgagcagctatgactattctgcgccaatttcagaagatcgctcgataggatccaagtactatgagccaagctgctagctctgttt

SEQ ID NO: 22173 - DNA, 746 bp, Emericella nidulans
gcgctctcggcaggaaagtgggcacgccatcgtcgatgtcctcttcggcgacgtcaatccttcagccaaactcgtctacacaatcgcaaagagcaaagatgactataacgggcaaatatgcgagtgctgtgaatgcgactatacggagggactctacatcgactaccggcatttcgaccaggcagggatcgagccgcggtttgagttcgggttcggattgtgtacgtccccttttcacctaatcttttgttccctttatatccctttctttcagttgcggtatacatatgttcaaaggtttcaagtctgacgggagagcgaatattgcagcttacacgactttcacccactccgacttgacaatcaaccccagcacagatataacaacactccaaccctatgctacaggccccattacagaaggcggtccctccgatctcttcgagcagatcctcaccatcagcgcctcaattagcaataccggaggagttgctggagcagaagtagcacagctgtacctttccttcccagatgccgctaaggcaccggttcgacaattgcgcgggttcgagaaagtctaccttgagcccggcgagacgaagtttgtcagctttcccattcaaagaagggatctaagtatctgggatgagcagacatcgaagtggaaaatcgtcggtggaaagtacggtgtggtgctggggaggagtagccgggatttcacggtcgaggaaacgctggaacttttg

SEQ ID NO: 22174 - DNA, 724 bp, Emericella nidulans
tctgtgtcccatgaacaccggtcccatgaatatccgcgacgctcctattactattggcgacgatgtagcatctcagattccaggtacgtgtcttggattgcagactaacaaggaaaggcattgactctcttaggaatcgcgtatactgttccagatcttgatgcatctgtccgtgtgtatattaattccacaaccactcacgaaagtattgcttgtctcgaggctagtctttcgaacggtaaaaccgtttaccaaaagggcgttggattggctacggccatcattgccggcttgggcttgacagcctctgccattacctccggacttgggcattcaaacaccgccgcgcacgtcgcagctaatgctctttctctcttctccttctatcaatcgcaagcgatgattggaatgacttctattcacctgccgccaattgtcgcgtcctggacccagaattttcaatggagtatgggcattatccgtgtcggcttccttcaggacatttgtacgtggtaccagcgctctacaggaggcactgctgcgacactcctttcggaactctcgaccatctccgttcaacccctgaagaaacgtgcttttgatgctgcatcagggttagttccgaggactgtcggggcattgatcaaacgatctggtgcggaaagcgagaaagccacttctgaaactgtggaagtgcgcggaatcgatcgtgttggattcattg

SEQ ID NO: 22175 - DNA, 850 bp, Emericella nidulans
aaacgagctgactccaagtctcaaaacgacgcgttgatgcaagaaatcggcctcctgatgagcgttagccatccaaatttgctctgcctcaaggacacatttgatgaaagtgatggggtatatctcgtgctagaacttgctccggaaggggagcttttcaatatgatcatacgcaaacagaagtttacggaaaaagagactcgccacatcttccgtcaactcttcgaaggcctgaaatatctggtatgccccgtcccttacatgggttgttcatactatgattctaacgtagacagcatgaccgtggaattgtccaccgagatatcaaaccggagaacatattagttgccgacaacaaattgaccgtaaaattgggagatttcgggctggccaagataattggtgaggactcattcacgactacgctgtatgttctcccgaaagtataattgaagtacaaataactgaccaaatactacgtccagatgtggcacaccaagttgtaagtacttacgagttcattgtgaatgatgctcattctccagatgttgctcccgagatactccaagaatctcgccgtcgaaaatacaccaaagctgtcgatatctggtcacttggtgtcgtcctctacatatgcctctgtggctttccccctttctctgatgaactctatacgccagagaatccttacacactggcccaacaaatcaagctagggcgctttgactacccatcaccgtactgggattctgtgggagatcccgccttggatcttatagacaggatgcttacagtcgacgtcgataaaagaatcactgtcgatgaatgtcttcaacatccatggctcaca

SEQ ID NO: 22176 - DNA, 500 bp, Emericella nidulans
caagcataacccgtaaaaagcataggacgtagggggaggtaaggatattctctcagttgctctaaacagcgggaattttacagatatcgagctcatcgaccaaatgatgacgttccttgctgccgggcacgaaactacctcgtcggcactgcaatggtcggtctacgctctctgcaaacaccctgatatccagacccgactccggcaggaaatccgctccaatctaccctctgtctcttccaatgatccaaagcccataaccgcagaagctgtagactccctcccatacctccatgctttctgcaacgaagtcctccgcttccatccctccgtccccatcacgtttcgcacaacgacccgcgacactacacttgctggtaccctgcttcccaagggcacacaactgaccatctctcccgaggtcatcaaccaagacccaaatctatggggaccagacgcacacatattcaacccagaccgatggctgcgccctaacagag

SEQ ID NO: 22177 - DNA, 850 bp, Emericella nidulans
ccgtatgggaccggatctcgaaatgggtgtctgagaacaaggcgctcgtctatactgttgccggcgtcgcggtcgtggtaaccagcgccggtgtcgtctactacctctccgactccagccggtctggtaaaccctctcccactactcctgcgcctacagagaagaaaaagaagaagagcgggagccagcgacgaaaggagaagaaggctgaggaggaaagaaagagcaaagctgcctctgtccaagacggtgtgtgcatcttggatttatcgcgtacattcgctgactttttttctcagagaaaacagaaaagaaagccgaagagcctttagaagaaatccctgaagtagacgaggcgaccgttggacaattggatgaggaagtgcgtttcgtttcatgtcattgcccggccccgcttgttaatgaaaatttagacccggaaagcatacgcagcgaaattaaaagccgccggaaacaaggcctatggcgccaaagattatcctagagccattgaactatacggaaaagctatcctctgcaagcccgacccggtgttctactcgaaccgtgccgcctgctacaacgttcagtcggaatgggaaaaggtcgtcgaagacaccagtgcggcccttgcaatggatagcgagtacgtcaaggctttaaacaggcgcgccatcgcgtatgagcatcttgagaagtatagcgaagcccttcttgatttcactgcaagctgcattatcgatggcttctcaaacgaagtcagtcgtgttgctctcgagcggctcttgaaaaaggtcgcggagaggaagggcaaggagatccttgaggccaagggcaagaagctgcccag

SEQ ID NO: 22178 - DNA, 593 bp, Emericella nidulans
tcttgactatctagtcgcccacaggaacaacagtctatacaacacccttagcatctttgagtgagtcttgcatctgcgcttgctacttaattagctaatctcccccagtgtatacgttgcgggccaagtcctcaagaagcttctcaatgatttcccggacaaggtcgacggacagcaggttgttgcggaacggaaagcccgcaaggtttacgaagcccttgaggcgtaccccgaggtctaccggatcgttccggacaaggccgtgcgctcgcggatgaatatctgcttccgagttgtcaaggtaggcgcattcgctccaacttgcatgcggttcatcactaactcttggcttagaacggcaacatcgacgaatctgaaaagaccttcctcaagggaggcaccgagcgtggcattacaggaatgaagggtcacaggagcgttggaggtgagttctctaagcgttttctaggacggttttgcagtctagctaacacgcaccccaaggcatccgcgtctcaaactacaatgccatccctgagtctgggattgacaagcttgttgtttacttaaaagaatttgctacattataggta

SEQ ID NO: 22179 - DNA, 850 bp, Emericella nidulans
gcgctatacgagtcttgtcaggggatttgccgggagtgttcttctgctatcgttggtggttgtaatctgaccctgtcgccgcatatgacggttgctatggcggagcagggcgtgatagcacccacaggatactgccgttcctttgacgcgaatgcagatggatacaccagtggagaggctgtcaacgcaatctacatcaaacgcctatctgcgcccattcgagattgagacaatatccgcgccgtgatccggtctgcatgcatcaattcagacggcaaaacagccgggctgtcattccccagtcccaaaagccacgaggatctcattcggcgcagccacgagctggccggtattgaatatctatcgaagccagccataattgaatgccacggtactggcacagcagtgggtgatccccttgaggcttgtgccgccgcgcaggtatttggggaatggggtatacttattggatctgtggaccacgctacgctacttgctcagcagtcaatttcgcaaactcatcacttcccttaggtcaaaacagatctagggcatagtgaaggtgcctcgggattaagcagtgttttgaagatggtgctcgtcctggaacaccagaccattccactgaacctcaacttcacaacccccaatccgaaaagtatgtgtttacctcgatctgtaaggcaggcaagtcatatatgagctgaggcagctaactgcaatggctagtaccttttgactctgcgcgtcgaaggggttcctgtggaatgccagtcatggcccagcaacaagcatgaactagtcggcgtgaattcctttggtattggtgggttatgttatgttatgttat

SEQ ID NO: 22180 - DNA, 850 bp, Emericella nidulans
ttccaatccgtactgacgtggttctcaactaattcatagtctacactcaaacgttcggcgctgcggatcactcgggaggttgagctgctgggtggtgaattctcctcgacacattcccgtgaaaacgttgttctcaagaccaaattcctcgcgaacgaccttccctactttgttgagctattggcggaagttgcttcccagaccaagtatcctagtaagtatttgctgagaagggcgcagtaaaaacctcgatatatggacctaaccttcgactaggctacgagctcaatgaaattatcgccaagcttctgaagctcagacaggtcgccattgccaatgaccctgaggctgttgctgtcgatgccgttcacggtgtcgccttccatcagggtctcggtgagactattactccctccgctcatgccccatacgagaagaacctctcagctgaggctatcgccgagttcgcaaagaacgcctatgcgaagtccaacatcgctctcgtcggtagcggtgttagctctgcagagctttcgaagtgggttggtgatttcttcaagggtcttccgaatgccggcaccaccggccgataccaggtcaagtccgactctgcttcgaagtactacggtggtgagcagcgtatctctaccaaggccggcaactccgtcgtgatcgctttccctggcaccagcgccttcggaacttcttcctacaagcccgctgcttccgttctcgctgctcttctcggtggtgagtcgtccatcaagtggtctcctggtttctcgctcctcggccaagccacccagggcttcagccagcttcgcgtctcgaccaagaaccatgcctactc

SEQ ID NO: 22181 - DNA, 750 bp, Emericella nidulans; identical to SEQ ID NO: 13139

SEQ ID NO: 22182 - DNA, 770 bp, Emericella nidulans
gcgatgaccccttcaacgaagccgaaaaccttccatgttgccatcgttggcggtggaattgccggtctgagcttggctatcgcccttcatcatcgcgacgtctcagtcaagatctacgagcaagcccatgcctttgccgaagtcggcgctggcgtctccttcgggccgaatgcagtcgaggccatgaaactctgccacagtgggatatatgaggcattcaagaaagtgtgcacacggaatctgtggccggagaaggagaaagtgtggttcgactacctggacggatacacacacaatgaagaggagtacaatgccgcttcgagtgggaaggagagcaagaggcagaaaatcgcattcacgatcacaaatagtctcgggcagacgggggtccatcgcgcacattttctggacgagctggtcaagttggtcccccaggaaattgcgcagttcaataagcggctccagaacataacagagcggggagacgggaagctagtgctcaagtttgcggatggggtggaggacgaggcagatgtggtcattggttgcgatgggatcaagtccagggtaaggcaaattctcgtcggggaggaccatccctcagcgcacccatcatttacacacaagtatgcctaccgcgggctggtgcccatggacaaggcgatcgaggcaattggagaggaacttgcctccaataaatgcatgcatgtatgtctcttgaatatctttccctggtttcctgcatagaatcctgcaaatacataccagat

SEQ ID NO: 22183 - DNA, 500 bp, Emericella nidulans
tatgaggccgcgcggatcataaaactcatgaggctgtatcgcacactagatatggcccttgtggctagcgattacatgggctgattacataggcagttacacccggggtgatcctagccgtattgaacgggtaacgtgttgcttgacgccatgattatattggagcatgaacgctgatgaatatggatataaatggtctatatatcatgtatgtcatttatgggccacattatatataaagattgccaagccaccggcgccagaatagccatgaagcaagagtatcgtgtcgtggggcgtgaggctacagatgatacggcgccactaaattggcaagaccgagtccatgaaattgtctgaccattatcatagatatacggcatcgatgatgaagcctgttttctacattctgaagaaactcgtgaatacagcatctcatgaaggacaataatattctgggttacggtgcaaatattgtgtgatgcgatggcagatgtatc

SEQ ID NO: 22184 - DNA, 715 bp, Emericella nidulans
gcggaagaaacctggcaagccgctgtagctgagcgccgcagaatactggatcttctgattcccacagactggaaactgagcggggagttcagagcttcgcttccggcagacggccgtctcctgcaggcagatcctgtgcgaaagagtgggattctctcagaggatgagctggacatcacggagaactattcagcgggccagcttcttcagcgactggcacggggtgacgttagctctttggctgttacgacagcgttttgcaaaagggcggcaattgcgcagcaactggtaggatgatgtgccttgcgtacactgtgctgtttctgactcgtacagacgtcatgtttgacggagcatttcttcgcccaagccattgagcgagcacggtaccttgatgagtatctcaagcgcgaaggcaaggttgtaggcccgctacatggcttgccgatcagcataaaggatagcttccaggtcaaaggcctgcatacaacggtgggatatgtctcgtttctgaagcacggaccggcaacagagaactcggctcatggttgatctgttgcttgaccttggagcggcgctctatgtgcaaacgaatattccacagactctgatggttagtatttgtactgggggttcgtgagaagtgctaatgaaagaagactgacgattcagagaacaacatctacggccgcaccttgaacccccacaacactaa

SEQ ID NO: 22185 - DNA, 591 bp, Emericella nidulans
caccatatcggcgagactctggatccggtggccctcaccggtggggttactctcgtcccgacaactacaatcaacgatgcccccgagctcgacattctcttaattggaggagatagtcccattcgctccaatatcccagagagctacaaggagttcattcgacgccatgtcgccggcggaaagctcttattcacaaactgcacaggtgcggctgtcgttgcacagactggggtgcttgacgggaaggctgcgacggtgaataagattgagtttaattggataaaacagaggtatccggctgtcaagtggaccaaagccaagaactggatagtagatggaaatatctggacgggaagcggtgcggtagcgggcatggacatggttgcgcattggatcaaggagaattacggtttggatgttttgacggaggctgcaagaggtttggatttcgagcctagggacgtcaacgggttatttactgtgttgccaccacgattcgatgctgatggaaagaggattgcctcgcatgttttcccttgagcgaaagaaatctctctagcatcgtcagggagttgcgtagattttggcgag

SEQ ID NO: 22186 - DNA, 593 bp, Emericella nidulans
tcgtgaatggccacaatctagctggcaacgaatggctcatccagcgtgttgtaaatgaaggccaccatctagcatcgcacacgggcgtgaaacaccccagggaacagcctggtctcttcgctccaggagtttatttcaaaactaacctgacgtcgtcttactttccagatggggccataccgatcttactgttctcagctatgatcaaatcgtcgaccaaatgacccgactcgagtctgcctttgtagcatccgtcggggtagtccctacctacatgaggccaccgtacctcgccgccaatgactatgttctgggcgtcatggctgaactcggctaccatgtcattggtgctagtgtcgataccaaggactatgagaacgatcatcctgatctgattggacgtagtgtggccaagtttaaccaggagctagatcagggaggaacgatcgtcttgtcgcatgacattcacgaacagactgtgcgaactctgacacacatcatgctggaggaagtgtacgaacgagggttgcagcgtaagcaccattttgccctttctttgtccctatgttgggctccaagagacgttacactga

SEQ ID NO: 22187 - DNA, 850 bp, Emericella nidulans
ctcgacttcccggacaacaagttctccctctactttctcgcctacaacgggccccagtccctccagggcgaccgtcactggacagaccgcaacgccgttctcgaactcacccacaactacggcaccgagaacgaccccaactacagcatcaccaacggaaacaccgagccgcaccggggctacggccacatcgccatctccgttgacaacatcgaggcagcctgccagcggctcgaggatgccgggtacgcgtttcagaagaagcttaccgagggtcgcatgaggcacattgcttttgttaaagatcccgatggctactgggttgagatcatcaagcgcagagacgaggctatgagtacgtctacggatccggcgacctacaggctgaaccataccatgctccgcgtaaaggacgccgaggccagtctcaagtattaccaggaagtcttgggtatgacgcttgtaaggacgatcgagaataaggaggctgcgttcaacctctacttcttgggatacccggcgtcgaacccgcaggcgactgagggcgccaataatccggttgccgagtgggaggggctgcttgagttgacgtggaactatggcactgagaagcaggagggcaaggtctaccacaacgggaacgacgagccgcagggattcggccatatatgtatgttgactactcatcttgcactcaatatcggctctaacatatataggtgtctccgtggacaatttgaacgcggcctgcgagcggttccagtctttgaaagtgaacttgaagaagccgttgacggatggcccatgaagaacgtcgggttctttttagaccagacggatactggatcga

SEQ ID NO: 22188 - DNA, 500 bp, Emericella nidulans
ataagcagaaccatgaaagtgttcagagccgcaacgttcatcactgtgttcctcgccgctacagatggagtaaacgccatcaccgataccaggactagcccgctgagaaaggaggcagcaggaaaaggcattctcattgggtctggggctattagtccgacctatctcaatgatcctcagtttgcgactgtccttgctgagcagttcgagagcctctctcccgagaatgagatgaagtggtcattcatcaacccgaccaaagggcactacaactgggagacaatcgaccgtctggttgagttcgccgaagcacacgatatggtagttaaaggccatgggctcatctcgagctgctgcaaccccgactacttagtcaatatcaccaaccctacggcattccgtgctgcaatggcggcgcacttcaaagcagttatgcggcggtatcacggcaaggtagatcggtgggatgtgtgtgacggaagccataagaccagcgtact

SEQ ID NO: 22189 - DNA, 850 bp, Emericella nidulans
caggatctacctactaacaagatcgacgtagttgccaataatttctggggaaaggatgatgccggcgttgcgcccatgctagagcgcatgcaagcagctaagctctcttgcgatgaattgaagacttggtacaatagttcgtcacccatgcctaggtctgactcgcgaacccgtcgttctgacagctgctagtccgcgccgcgatcgaagatgagtatgcacggaagctccttacactctgccgcaagcctctcggagcacacgagacgggatctcttcgggagtcttttgatactgtgcgagcagagacagaggccattgcgaaagcgcatgccgccatcgcagggcaaatgaagagagagctagaagagccgctgatcgcatttgccggtggtaacaaagaacgaagaaagatcatccaaaatggcattgagcgcatacataagactaagatgcaacagacacacaccgtgaataaggtgagcttgtggatatctcagcgcggaaccggtgggctaaacagacagactcgggatcgatacgagcaggactgcctaagaataaaaggttatttggcgcaaggtcacatggtgatgggccaagaggagcgaaagaacaaggcgaagctcgagaagacccagattcagctagcgtctagcagcagtgagtatgatgccgcagttaaagtgcttgctgataccaccgaacgctggaacaaggaatggaaagctgcctgtgatgtaagccctgcgcagaaactccttgattggtttgtcactaatagcgatttagaaatttcaagaccttgaggaagagcgcatcgatttcagcgagagcagccatggacata

SEQ ID NO: 22190 - DNA, 385 bp, Emericella nidulans
gaggaagatggagcggttctgcgaggtcttcgatgagcttaacattcctgtacgtccccattcctatccttttggggcgtgtttaattgctgacttctattagtattctgaccctgaaggtggctacttcgtgctggctaacatggcctccgtcaaactcccagagggctaccctttccctcctcacgttgctagccggccgcgtgactttaagctctgctggttccttatccacgaagtcggtgtggctgccattcctccgacggaattttataccgatgccaacgcacatatcgctgaggactacctccgctttgcagtttgcaaggaggatgacgtcctcgagacggcgaaggaaagacttcgtgggctgaagaagtatatc

SEQ ID NO: 22191 - DNA, 703 bp, Emericella nidulans
gagcttggtgctttcgccaagcttgagcccgagttcactgctcgtggcgtcaagcatgatcggtctcgtgcgtggacaccgttgtgcccctcatactaggtcccttactaactcctcatagagcgccaacggactgaatcccacaaggcctggatcaaggacattgacgaggtcaccggctcaaagctgaccttccccatcatctccgatcccgagcgcaagatcgcccaccagtacgacatggttgactaccaggacaccaccaacgttgactccaagggtatgtgggatctaggaatatgctgaacttgagcttctctctaaccactttcccgcaggtatggctcttaccatccgttccgtcttcatcatcgaccctgccaagaagatccgcctcatcatgacctaccccgcctccaccggccgcaacacggctgaggtcctccgtgtcgttgatgccctccagaccaccgagaagcacggtgttaccacccccatcaactggcttcctggtgacgacgttgtcatccctcctcccgtctccaccgaggatgctcagaagaagttcggcgacgtccgtgttgtcaagccgtaagttcacccgagcctggagcattcatcagttgtttggagcagttgagcagttgctaaccatctctcgtgcagttacctgcgtttcaccaacctcaagaaggaataaatt

SEQ ID NO: 22192 - DNA, 850 bp, Emericella nidulans
gtggcaaaggggggagtatatactccttattctagacagccatggaagccacttgaccccggcctttgacactatatataaggataataatattatccctgtctgcatgcctccttattcatcttacttcctgcaacccctggatgtgggctgttttagccccttgaagagggtgtacggatccctgattaagcagaaggcacgcctaggatacaaccatgttgacaagcttaatttcttaaaggcttattcagaagcctataagaaagtctttataatagagaacattcaaagcagattcagggcaactaggttatatcctttcttacctgctgcagtactggataagctgtagttaagactattaactcctacacccccccccaagcagaggtactgctttaatcccctcctctcaactctgtatgccttatacagtctgtcaggtatattaaaaagctttatcagtcaaaaagcttctaaaagagggctctaggagtccttcaagcccctcaaaataggcgctggatgaatttgtaaagggctgtgaggtggctatttacaatgctaggttgctggcacaggaaaacaaggatctctgcttatttgtagcagataacaggcaaaaaagagttgttctaggtgtctaataactcctacagatggactcttatttaaagaagccagggaccttatttcatcgaggaataataaattacaagctggtggggggggttcaagctccagtacccttccaacttcggagagacttaggcgcgcccccccaaggtgtacaaattgcggagtacaaggccataaaagaacaagctgtcaggttcccaatcatcct

SEQ ID NO: 22193 - DNA, 850 bp, Emericella nidulans
agcgtctgtgtatcgtcggtgtcggtatgtgccttactcatcactaagactcctttgctcttttaattactccgttttacgacctgaactttttctgagactgtatttgcttctagactccggcgctcagcccctcgttaacgacgatgaatccctcgccttggccgtcaacggtgaaatttacaaccaccgcatcgtgaggaagaccttggacgtggaatacaactataagacacactcggactgcgaagtcatcatccctctggtatgtgcgattagagcagcgcggaagaggtttgtggtaaaggatactgactcgtgtagtacatgaaatatggtctcgatgctcccaaacatcttgatggcatgttcgcctgggttctttatgacaagaaggaggatagggttattgcggcacgtgaccctattggtatctgcagtttctacatcggctggtcctctcagactcctggagccgtatactttgcctccgagttgaagagtttgcaccccgtctgcgacaaggtcgaggcttttcctcctggccatgttttcgactccaagagcggtgaattttcccgctacttccaaccctcatggtgggacccgaccaacgttcccagtacgcccgttgattacaaggcgattcgtgagtctctcccgaggtctgtgcgcaagcgcctaatggcagaagttccgtatggtgttctgttgtctggtggtcttgattctagcttggttgcttcgattgcccagcggccaactctgcgcatgcagaaggctagatccggtgtcaagagcgaggccaacggtgaactggtcggtatcgacggcgagatcgggcttatcg

SEQ ID NO: 22194 - DNA, 839 bp, Emericella nidulans
ccctaactgtctgtacagccctctctgcaaagaagtgaacgatgctctctccaaatacgatgaaatcatggatattggcgctatcatcatcacagggggggagatggcttttgccggggtgttcttgtctactccatgtcaaggctctttctcttcaagtcgcaattctaacagatatttttggtgtataaagccggcgcggacatcaaagaaatggcccctctaaccttcgcttccgcgtatagcaacaacttcatagccccttggtcgcatctcgcgaattctattcgcaagcctgtaattgccgccgtttctggcttcgcccttggcggtgggcgtgaacttgctctaatgtgtgacatcatctactgcaccgcgtccgccacgttcggacagcctgagatcaagctgggcgttatccccggcgccggcgggtcgcaacgtctccgggctgcggtgggcaagagtaaagcgatggaactcatcttaacgggcaagaacttcagcggcaaagaggcgggtgagtggggagttgcggcgaaggttgtcgatggtgggaaggaggaactcttgaggaggcagtgaagactgccgagacaattgccggatatagccgggttgcgactgttgcggcgaaggaagtagtgaataagagtcaggatttgggagtgagggagggcgttgagtacgagcggaggctgttccatgggttgttcgggagtcaggatcagaagatcggtaggtttttgtccctttaccattactccaagaatggcactgacggagagaaaggaatgactgcgtttgcggaaaagaagaagcctcagtggtcgcacgag

SEQ ID NO: 22195 - DNA, 619 bp, Emericella nidulans; identical to SEQ ID NO: 9859

SEQ ID NO: 22196 - DNA, 487 bp, Emericella nidulans
cgatggtctacaggtacctcgtcgaagatcgccggtagggaaggttgccacctgcgtgtccgtgttcaccccttccacgtcatccgtatcaacaagatgttgtcgtgcgctggtgccgatcgtctccagaccggtatgcgtggtgctttcggaaagccccagggtaaggtcgcccgtgtcaacatcggccagatcatcctgtccgtccgcacccgtgactcccaccgtgccaccgtcatcgaggctctccggcgctccatgtacaagttccctggtcgccaaaagatcatcgtctccaagaactggtgggtttaccccctgttcgtcgtgaggaactacttttcattttcttcaggagggctaggttaagtcagttctggctcatttccttctatttcattctttgttctctgttaaattttgtctatataattttacccttttctgtttgtcttatttattaaattttaatatttttctctttctc

SEQ ID NO: 22197 - DNA, 493 bp, Emericella nidulans
ttccggacaaccactggcggacaggggtctttgaaaaacaaggcgtctctctatccggcttgttgaatgtcatcgacggtgtcgcagcatgcgaaggccgcatacttgttatgacaaccaaccaccctgagaagctcgaccctgcgctcgtccgcccaggccggatagacttgtctattgcatttgggcactccacaacctctgacattaaggagctcttctcagctatatactctacattggagggcgacctgcgggtttcgcctgctgagcggttgagccctaaactgcgtgcgaggatggcgaagcgaagctcaacctcacattccacaaacagcaccaatgctaacgtcgttatccacaaggaaactagaaagttctctgaagagcaaatccggctatgggcggcggaatttgcagaaagggttcctgcaggcgagttcacccgtgcggagatccaggggtatctgttgaaacataagactgatccgga

SEQ ID NO: 22198 - DNA, 850 bp, Emericella nidulans
aggtccatgtggtccttgcagtgaaatccactatgatcgcattggcgggcgcaatgctgcttctcttgtgaatcaggatgatccaaatgttctagagatctggaacaacgttttcatccaatataatcgcgagaacgatggatcgctgcgttctttgccaaacaagcacgtggacactggaatgggttttgagcgtcttgtatctgtgctgcaggacaaatcctcaaactatgacactgacgttttcggtcccatcttccagaccattcaagttattactggagcacgggaatatcagggccgatttggaactgacgattcggatggaattgacaccgcctatcgtgtggtcgccgaccatgtccgaaccctgatgtttgcgatctctgatggcgttgtgccaaacaatgagggccgcggctatgttattcgacgtgtattgcgcaggggtgcacgttacgcacgaaaatacttcaatgtcgaaattgggagcttcttttccaaaatcgttcccactgttgtggagcagctcggcgacatgtttcctgagttgaaacaaaagcaacaggatgtcatagagatattgaacgaggaagaaatatctttcgcgaaaacgttggatcgcggggaacgccagttcgaacagtatgctcagcaggccaagactgcgggtgaccacaaattacatggagcagatgtttggaggctctatgatactttcggttttccggtcgatttaacgcgcatcatggctgaagagcgtggtctcgagaaaaaagatcgtcagttcgaagaagcacgccacaaagctaaagaagccagcaaaggccataacataaaaacgactgaa

SEQ ID NO: 22199 - DNA, 850 bp, Emericella nidulans
ggcgacgagctcttcaagcgcgcaggtgtctggttcgtctcgagcaatctcggctccttcgcaggcgggtatctacaagccgcagcgcacgagacgctagacggtgtccatgggatggccgggtggcggtggctattcattatcgatgggtgcatcagcttgccaattgccctgggaagtttcttcttcttacctggtctgccgcacggggagaaagtgtggtggttgacggacgctgatcataggcctctgtgttcagaggatgcggaacgagggtgtgagggaaagccggaaaattgggaaacgcatgctcaggagagtgtttacccattggcacttctatatcgcagtctttacgtacatcttgttagtgggccgtctccctacctagcatgtgcacaggtaggtaaaaactgtttgttgcagtgactaacgattcaaccagcttccaatgcacctcctacgttgccggccagatgatcctctggttaaaagaccaggcagatcgatatggtacctggacagtgtctcagatcaatatgattccgacgggcgtacaggctgtttctgtgtttgccggtgtactggcgacatctctggtcatggtatatccgccctgggctgtcatgggcgttgttgcctccgtcctgctcttctcgaatgtctgccttttggtctgggatattccgctgggactgaaatgtgagctcatcccttccttcctatatacccctttgttgggcgcagcgtgttgatgatactagttactgcatactaccttctcggcttcacctcgtgtgtcacgccaatcctcttcccgtgggtgaacatggtcatgcgcgatgactcc

SEQ ID NO: 22200 - DNA, 319 bp, Emericella nidulans
tgacgtcggcgggcattcgaccgtatcccaatcattgaaagctgtgaaggcagatggccttgttgccctggctggattacttggtgcatctgagaatgctcaggtaccatcaatcatggacggtctgacatatctctgtgcgacgaggggattcctgctgggtacgcgggagcaatttcgggaattgaatgcccttattgacgagaagctcatcaagcccgtggtcgatgaccgggtttttgggtttgcggagataagggaggcctatgagtatctggagcagcagcggcatttctcaaaggttgttattgatattgat

SEQ ID NO: 22201 - DNA, 604 bp, Emericella nidulans
aaagctaatgcttctcagctgcgaaacacatactgcgggatctgcggcacgacctccatgagtatacctccggacccgtcttaataccgaagggagcacatagcatcaccaaagctaccgcgccggttgtcatgggtcacgagtttggtggagtcgtcgaggaagtgggagaaggcatcacacacctcaagccgggacagaaggcggttgtgcgcccgaccatattcgacaggaagtgccccccatgcaaaattggctacgagtattgctgcgagaatattggcttcatcggactatctggtatgctctttttcagaatcaagcaagctgtacgatctggacaagctaacgtcccaatgcgaacaggttacggcggtggttttgccgagaaaatagtcgcgcctgcagaacacttctaccccattcctgataatgttacgccggaatccatggccatgatcgaaccactggcggtcgcatggcacgccgtcgacttgtcgccattcaaggagggtcacaatgtcttggtcgtcgggggcggtcatcatggtctatgcttcccgccagtaatggagatgcgaggcgcccacttcccggtgccctt

SEQ ID NO: 22202 - DNA, 850 bp, Emericella nidulans
acatcatactttgctcgactaccatctcagacagaaacaccgaagtgggtgatccaggcttccgttatagagggaatcctcttcagctgcaggttgaagacgttggacatcttttcgactggaaaagccctcggcgacagatatattaaatatgccgccatcttttggacactggccaacaacgcacgtcctgagtatcttctcagtacgtcggtgatctatagcatggtggaactttctgttgggatatttcaggaagacgaagaaatggagaagtccttggtcaacctaccggatgctgctaccgacgccgtagctgactatatcgataaatcgtgccacgagacagctttttgcaacaatgtcgcttcccacgcgacaccgcatggatcggatatctctggatatgatgtagaaactcgaactcaactcatgaccatccagcacaacataaggctttggctgcgttttgctttggtagacaacctcccggcgaatgccaattcccatgacatatacgatctcaagcaagaagtcaagatggcaatgattgctgctctacaacaagctaaagcacacaaattcctcaacagcagccaaacattctacgcttggctccacacatgtgccgtccacgacgccaaaagcgctgtcgtctccaagtccctgatttgcaagatcgggcacgggtcaaatgtcttccgcacagccaaggaaaaatatctcgccgaaaggttatggcggcaggtttccatagagggcagactttggaacgatcttgggagcattgagcgagacagactcacagcaaacctcaattcggccgactttctcgagtccgggccagctg

SEQ ID NO: 22203 - DNA, 850 bp, Emericella nidulans
ccgcaggacattgctaacaagggcgtcttaaccagtgtgaattcatgactttcaacttcgcaatgcaggctatcgatcaaatatcaactctgcagccaagacgcactacatgtccggcggcattcagccttgcaacatcaccttccgtggtcccaacggttttgctgctggtgttgctgcacagcactctcaggattactccgcttggtacggcagtattcctggtttgaaggtcgtggctccctggagcgctgaggacgctaagggtctcatgaaggcagctattcgtgacccaaaccccgtcgctgtccttgagaacgagtatgtgaatcacctcaaaatcactccatcgaagcgtatcacaactaatcgtgtccagacttctatacggccaggccttccccatgtctgaggctgcacagaaggacgattcgtcctccctattggcaaggccaagatcgagcgtcccggcaaggacctgacaatcgtctctctctctcgctgcgttggacagtccctcaacgctgctgctgaactgaaacagaaatatggtgtcgaagctgaggttattaacctccgttccgtcaagcctcttgacgttgagacgatcattcagtctctgaagaagaccggccgcctgatgtgcgtcgagtctggtttccctatgttcggtgtttcctccgaaattctcgctctgtccatggaatacgggttcgactacctgacagctcctgccgttcgtgttactggtgctgaggtacccactccttacgctgtgggattggagactatgagctttccccaagaggacaccattgttggccaggctgccaagcttctccgattgtaa

SEQ ID NO: 22204 - DNA, 503 bp, Emericella nidulans
gaaatgcaagccgccaatcgcattcagaaagccctcaaagcaggcacacccgcttcggtgcctggcagatgctccccggcacaaacctgacttgcaccatttgccggtccgcaccgaacatcgactggctgctcgtcgacctggagtacggcaacatctccgacgatggcataacacgagatcgttgctgcagcggcggcttgcagtacctcgccgattgttcgcgttgcagagggtcagctttggattatcaaacgtgccctggacgccggcccgcacgggatcatggtaccgatgatcaaaaccgtcgatgatgcgaggacggtcgtggagtatagcgtgtttcctccgcgagggaagaggggtttgaggcgctgcttgcggcggatatattcgtttccaccgccacccacgggcagattagacagctgaccggcctagagaatctgcagctggctgatgaaggcttggtgattgccattcagattgaggcgaaaagcgcc

SEQ ID NO: 22205 - DNA, 354 bp, Emericella nidulans; identical to SEQ ID NO: 14493

SEQ ID NO: 22206 - DNA, 582 bp, Emericella nidulans
gctaatagaaggccgtcagcctccaaaaccaccttccacttcggagccggcctcctctccggtctcacatcctccatcctcctccaacccgccgatctcctcaaaacccgtgtccagcaatccgcccatccctcctccgtcttctcaaccgtaaaggcaatcctgtcttcacctaaccccgtccggaatctctggcgcggaactctcccttccgcgctccggacgggcttcggctccgcgttatactttacgtcgctcaacgcgttacgaacgagtctcgcttcaacatcgctcaccaattatgatgcagatgtaaagaaaataggaaacgggtcttcagcgctccccaaactctcccacagcgcaaacctcgccaccggagccgcggcgcgggtcgccgcgggcttcgtcatgatgcctgttaccgtcctcaaagtccggtacgagtcggactactacgcgtaccgcagcctatactccgcgggccgggatattgtgcgtacggagggagtgaggggtctcttctccggatttggcgcaacggctgcccgggatgcgccatacacgagttatatgtcctcc

SEQ ID NO: 22207 - DNA, 500 bp, Emericella nidulans
cactaagatcgtccatgaataggaacatgagtcggcctttctatataatatgtgttactacttgagctaagcctgcactttagtgagaacgtacgcacctaatcacgcaagtcaattttgctccagcactgattaatatatgtataggttatcatggcctgcgtgaagaagggactttcgcgccaggacgcccatgaggaaattcgtacgctcctcacataccgtacctttcacatattctggcatgaaaactaggtgtcctctcacaccaagcctccgacaacgttaagaagcacggcaagaataacgacctcctcgaccgcatccgccgcaccgagttcttcgcgcctatcctcggcgagctcgacgctctcctcgaccccagcacctttgtcggccgtgcccctcaacaggtcgagaaattcacctcgaccgaggtcaagaaggccctgcagccctacgagacttatctcgctactgccgagacctctgcgcttcac

SEQ ID NO: 22208 - DNA, 850 bp, Emericella nidulans
gtctgatatccccatttccggcaaggcgctggatgggaatgtgtatgccgatgcgccaccgcgtcctatgaccgttgacgagatcaaagaggtcgtcttggagtatgcggcggcgagtaagagggcgattgaggctggctttgacggagtggagattcatggtactgtaaccacccttctcgcctgctattgtcatagcatgccctagcagatgctgactgtaacaggtggaaatggctaccttctcgaccagtttctacacgacaatgtaaataaccggaccgacgcctacggaggctcaattgaaaaccggtcccggatcgtccttgaaatcatctcggccgtcacggaagccatcggcgcagagcgcgtcgggatccgtctttccccatacaactacttccaggatacacgggactcaaacccacagaagcactgggggtatctgtgcactcagatcgcttcacttcccgagtccagcaggccagcctacgtgcacatgattgagccgcgcttcgacgagatcctcgacgagtctgaaaagatcagtgcccttgagacaatgcaagaagtcgtcaagccatctcttgacgggctcagatcttctctgaagaaggggggtgtcagcttcattgcggcaggaaatttcaagccagagaacgccggtgagaaacttataacagacagcgcggatgctatcgcttttggccggcttttcatctcgaatcccgatctgccacgacgattgaaggagggtatcgagttgaccaagtatgaccggagtacgttctatggcgcaacgcccccagagaagggctatacggactaccctttcgctcaatagagcatg

SEQ ID NO: 22209 - DNA, 837 bp, Emericella nidulans; identical to SEQ ID NO: 9609

SEQ ID NO: 22210 - DNA, 850 bp, Emericella nidulans
aggtcaaggccaacttcatcaagcacgcccgcaaggatgaggccactggtgagctgtacatgactgaagcagacttcgtcgacgcgatcgctcccaaacatgaagattacgtgagtttccacccctatgtgtcatgctttgaccgaacggccaattgacatggacctcagcataaaatcaagcgtgaacactacggaatcctcttcagagtcgcagacagtcgccggaccggccgaatcaacattcacgaatgggctaccttcgagaacctgcttgcgaaacctgacgccgaatacgagatcgccttccgacttttcgatactgacggaacggggacggtcaagtgggagaccttccagaagctatacaatgagaacaagacgaaagacagcataccctttgattggaactccgagtgggcggcgttgtatacagggaagaagaagacccggcatgatatgacatacccccagttcgcgcagatgcttcgaggcctgcaaggcgagcgcatccgacaagccttccatgtgtttgacaaggacggcgacgggtacatcgagccggaggaattccagcgtatcatccttgagacgtcgagacacaagctgtcggactatgtgctggagcatcttccgagcctgtgcaacatctccgcgggaacgaagatttcgtatgccaccgtgcgtgccttccagaatgttatgcgggagatggacatgattgatttaattattcgcgaggcgacggataagagtgaggatggtaagaacacgcgctaggatatcctgaacgccgcggcgcgtctgacgcggtattcgcagttcacgccgatggaggcggatgtaagagc

SEQ ID NO: 22211 - DNA, 850 bp, Emericella nidulans
ggcccaagaccaggcttaaaaggatcctccagctcctccttagccccctgccagagcgcaccataatagggctgcctctccctcccctacgcatgcttccaacagacaacaaagactatagccccgccccattacagatatcagtatactcagacggctcgcgaactggccaaggggcaggatatggctatgcaatctactttggccctatcctggtgaccaagggacatggccccgcgggccccaggacagaggtctatgatgcagaaatcatgggcgctgtagaaggcctacgcgcagccctgggacaaccatgtgtgggttactctacccagctagttatcctcctagacaacctagcagcagcctccctgctagcaagctataggccaactccgcataggcatggactgtcagagtccttcggccagcttgctacccagtggttggaagctccctcaatcctaaccaggccacggaagccccttcaagtccgctggatcccaggccattctgggattgctgggaacgagctggcagacaagcttgcaaagcttgggtcctctatatacagccctaacatccccccatcccctgcatacctacgacgggaggcaaaacagtggcttcgtacagaggcatatacagcatatgctagtaaggcaccccaagcctacaagaccctggatatcagaccccatacaaaggaaagccgcacccgcgagcacaagcttccccgttgggtacttggccgactcgtcgccgcccgtacaggccacggagactttacggcataccaccagcgcttcaaccactcagactacctggagagctgctcttgtggcaagac

SEQ ID NO: 22212 - DNA, 850 bp, Emericella nidulans
cgatgaggagcgactggaggtgtccctgaaacgtgaggtcgaaatcctcaagtctttgaatcatccatcccttgtacaactcaaggcttttggcagcgacgaaaaacgcgctctcctggttcttgactactgcccaggcggcgacttgttcgaagtcgtctcgaacaataccagacccctgactccggggctcatccgacgaatttttgccgagctggtggctgctgtacgctatttgcacgagcattatgtagtgcatcgtgatctcaaactcgagagtaagctccccgcgccttcctgctagaacaaagctgactgatggctaccagacgttctcgtcaatcttcccaaagaagctctgcaaaagattaccgattggcgtacttatgaccgtgcagttgtgaccttgagcgacctgggcctctcacgacgtatacctgaacctcctgagagccctcttctccaaacccgctgcggaagcgaggactacgcagcaccagagattctgatgggccagcagtacgatggccgctccaccgacggctgggcgcttggagttttgctgtatgcgatgatggagagcagacttcctttcgacgccctccctggaacccgaggcgatcctgcgaaactccgagcccgaactcctcaccgtatagcacggtgcgaatggtcctggtaccggtacgcagacagcgacggtgagtgggatcccgagaagggccgtggtcttgaaggcgcgcgggagtgtgttgagtcgctcctgaaacgaaacacaaaacgcaagagccttgaagagatcgcggccatggagtgggtgaaggacgccattgacgtgcctggcgggttg

SEQ ID NO: 22213 - DNA, 850 bp, Emericella nidulans
cccccccccaacagcccccccatggggcgcttggtcaccggattcacaccgcgccgcacacccctacccgccaaacctagtccacctaaaccaccgactataccccccacctgcccccccaccaaaacccccaccgcagtacggaacgcgccacccccaactacaaccagccccaaaaccacaaacacacaccccccccttcacacgacatccccaacccccaaccacccgccagccccccccaaggcccccccgaccccggcccggcccacctgaaccacatgcccccaacacccaacagcacgcccgctcccaccggccccaaaacccccggaccggcccgcctccccccggaaacccaccccaccccccaccccgcaccggagcccccccgaacccccccccccatcggcccaccctcccctccacacccgcgaccccccccccccggaaccccccggccccccacccagcaaacccgacccccccaaccaccaacccccccgacatccgacccccgaaataacccccccaccaccccccccaatttccaacccaccggaccgcaatcacccaaacacccgaccatccccctgcccaccgcccttaacccaccacccgcctatacccacccccaaccaccccaacaccccctcggccactcaaccccccccatccccccaaaaccccctcccccccaccaccatacccaaaccccccccccacaaaacccctacaccccaaaccaaccccccccccgccaccaccccgccaccaccagacccctcttcaaaaaaaacagcaccctcacccaccaaaaaagcccccccatcccaacaccccccccccc

SEQ ID NO: 22214 - DNA, 850 bp, Emericella nidulans
tcgccaacgccatcaactccgcctcacctaatcgcgctattgccgtcgttggcgacatccttaacgacaagtacatcacgactcttgttgaaaaggccgccgaattcgggaacggcaagatccacattatcgtcaataatgcgggttttacgtgggatggagttattcacaaggtaagcacacctctcgtactcgtagcatgcttcacaaagcgtcggactgttgctgatgcgtgtttaaatggaatggtgtagatcacagataaacaatgggacaccatgattgcggtgcacaacacagcgccgttcaaactcattcgcgcggcagcaaagtacttccgcgtcaaggacggggagccacgtgtgattatcaacatctcgagtacgagcgggattcacgggaatgcgtaagtgccacctccaccaccaccaagccgtcctcttaagttagtgtgattgacactaattatgcgcagcgggcaagcaaactacgcccttgccaaagcgggcgttgtgggcctgacacgtacaatcgcaaaggaatggggtccgcaattcggcgtccgctcgaataccattgcgttcgggttcgtgcagacacgtctgaccgctgcgaaggagaagggggcgttcattaccacgcccgacggaacgaaggttgcccttggtatacccgggcagcagcttggggcgaaggagggcgcgaaggatgggaagccggcgtatccggatattccgttaggcaggccggcgagtcctgaggaggcggcgaggagtgagcttgctgtggccagtccgttgtttagttatgttaacggagagacaattcgggtactggaggccggagcgta

SEQ ID NO: 22215 - DNA, 850 bp, Emericella nidulans
agaccgtgaccgtggcggtcgtcaggcatacaaccgcaactacagaggtatggaaatgaccaaccacccatcgcttacaggacaaatctaacgaatatcgtcatccagatcaacaagtatatgcagctggctcttctagcctcttcgccgttcaagttgccgaagacgaatctactttctccgtggttgacaacactcgcacttccgctaagcgcacctttggccggggcggtggcaccgtcttccgtgaccgtgcccagcgcggcggcgcgggccagagaggcggccgtgctggcttccagcgtgttggtgctggtcgtggccaaggtggtgaccgctactacgacaaccgtggcgcccgcggcaaccggggtcgtcgcttcggatggaaagactacgataagccgcagaggactcgcgagccttcagtcaacattcgccctgattggtctatgctcgaggaggttgacttcaaccgcttgtccaagttgaacctacaggcacccgagggcgaggatgtcgacacgtacggattcctctactactacgaccgttcctacgacaaggcccctgtcaagaacgccgagcgccgactgcaggctctcgaccgcgctgcgtacaacgtcaccacgtcgcaggatcccgttatccaggaattggccgagaagaaccaagccaccatcttcgctacctccgatatcctctccatgctcatgtgtgctcctcgcagcgtgtactcttgggatatcgtcatcgttcaccagggcaacaagatctacttcgacaagcgtgagggcgcttcgttggatttggtgactgtcaacgagaatgccgcgatgcgcccttgagg

SEQ ID NO: 22216 - DNA, 850 bp, Emericella nidulans
attgaacaccctgtacgcggggatgatacacgcgcctggggccctccttatgcaccatacattgacggccgagaagggcctggcgagagtgcttactacctttccgtatggctccctactttatctctaccgaccctagcaagcagattctaacagtcaaatgtaggtaaaccgcaacaaacgctccttagccctctccttcgctcatccccaaggccaaaatatcctgcacagactagtgagagaagcagacatcctcgtcgaaaactacattcccaacagcctcgcaaaatacaagctcgactacccgaccctgtcgaccataaacccttctttgatctacacctccatcacagggtatggtcagacagggccctacagcaacaggcctggtttcgacgtaatggttgaagcggagtttgggctggcacatctgacagggagtaaaaatggcccgccggtgaaggttggtgttgcggttaccgatctcacgacgggtctttatgcggtgcagagtatccttgcagcactctggcagagggcgcagagtaaagagaacggagaggctggaaaaggagaaggacagcacttggatgtttgtctcagtgattgccaggttgcgacgctggcgaatatggggcaggggcctcttatctcaggacagaaggatagtggaagatggggaaccgcgcatcgtatggatacaactcacctacctcctctcatctctcttccactaactgacatgtcagcatccgtcgttccctaccaatccttcgccacagcggacggggacatcttcgttggcggggcgaacgacaagctctttggaatcctttgcgcgcggctc

SEQ ID NO: 22217 - DNA, 850 bp, Emericella nidulans
ctcttacatcctgcacatcaagttcttctccaacgcgcacaaaaccagcgcccccaagccgagcaagtggcttcgctcctccctgatgtggaaactgcatgcatcgtacttccccataagactctaccgaagtgcctccctttccccgcgtcgcaaatacgtgatcggcgcgcacccgcacgggatcgcctgccacgggatcgcaggcgcattcacggcggatgcaacaaggttcgagacactttttcctggaatcgtcaaccggttcctggtgaaggatgggatgttcaccgcgcctcttctgcgggagtacctctttgcgcgggggcagagcggtgtctcgaaggattcctgcatccagcatctcacgcgcggaggttatgatcttcgggggatgggcaaggcaatcactatcagcgtgggcgggagtcgcgagtacaatatcgcacgcccggggacgatgggcattgtggtcaagctgaggaagggattcatccgccttgctgtcgagacgggggcggatctcgtcccggtgcttgtgttcggggagaacgacctctttgcgcccattcagttctctcggtattcgatcaagggcctcatcgcttgggcgtgggagaaagctgctggtcacaaggttgccttctcgctgggacggttctgcatgttcatccctttccgacggccgctgcatgtagtcgtcggcagacccatcagtgtcaagcagcagcggtttgatgtcagcgagaagtatgtcgaggagttgcagggccagtatattgatgagctgaatcggatctgggcggactggaggaatgtgtttgaggaggatgcgagcgtgaagttcgag

SEQ ID NO: 22218 - DNA, 672 bp, Emericella nidulans
atgggtgtcctcgagaagctgtcccgcaagaccggtgtcatcgtcggtgatgacgttctccgtctcttcgagtacgctcaggagcacaacttcgctatccccgccattgtacgtgttcttgatcgcccaattgcttagatatcttgattctgaccacagtacagaacgtcacctcctcttccaccgtcgttgcctgtctcgaggctgctcgcgaccagaactgccccgttatcctccaggtttcccagggtggtgctgctttcttcgccggcaaggtatgttttaaaaacttctgggaaccgagtccgatctaactcgcgtagggcgttagcaacgatggccaggccgcttccattgccggtggtatcgccgctgctcactacatccgcagcattgcccccagctacggcatccccgtcgttctccacaccgaccactgcgccaagaagctcctcccctggctcgatggtctcctcgacgccgacgaggcttacttcaagcagcacggcgagcccctcttctcttcccacatgattgatctgtctgaggagcctgtcgactacaacatcgacaccaccgctaagtacctcaagcgtgctgctcccatgaagcagtggctcgagatggtaagactgcttcgatcatgacccaaactgaatcctccgctaactg

SEQ ID NO: 22219 - DNA, 850 bp, Emericella nidulans
  unsure (1)..(850): unsure at all n locations
accatcgggtctatcgcggcgaaaatcntaaatcaaacgaactactcgcggctagcgacccgtccccgcgacgcaattggggccaggccctgcccttccccttctacagcatcattggctctctaatagggattttggtgactgctgcgacgcagaaccgcctaggcggcgaggcaatctggaatccgccgaccctgttcgcctctatattgcagaaagatccctctccggggacgcgggcggctgtcttcttcgcgggtctggccctatctgtttcgcaactgggcacgaatctgcccggaaatgcgctcccaggcggcctggaccttgcctctgtatttccaggttacatcaatatccgtcggggcgcctatatctttgcgctcctcagccccgtggttaatccctggcgtctcgtcaacacggcaacgaccttcctgactgttctttcggggtatggcgtcttcttggctcctatgacgggtctcatggcggcgcattatctagtagtctgtcgccaaaaggttaacattgatgatctatttccgtggtgataaagctagtatctactggtatacagctggggttaactggcgccctccagttgctgtaagcctccatccgtctaaacgcttgatcctcacttgaacactgactggtttggtatacagtggattattggcgtagttcccaccatgccaggcttcgtagcgccgttaacacgtccatcaccgtttctgatgccgcgaccgagctgtactacatcaactatctgtacggattcttggtcagtgccgcggttcatgcattccttcactggcttatccccgatcggaagctccatgccttt

SEQ ID NO: 22220 - DNA, 850 bp, Emericella nidulans
taggtcaaagccgagtatgaagccgccgataacctgagcggctatgtgatctcctcctccaacaagtcccttatcacctcgattctctctgcgggtaccttcttcggtgccatcattgccggtgacctggccgattggttcggccgtcgaacaacgatcatcagcggatgtggaatcttcatggttggtgtcgccctgcagactgcctccaccactgttgccttgctggttgtcggccgtttgattgctggattcggtgtcgggtttgtctctgccatcctgattctgtacatgtcggaaatcgcgccccgcaaggtccgtggtgccattgtttccggctaccagttctgcgtcaccgttggtctgatgctggcttcctgcgtggactacggtaccgagaaccgcaccgattccggctcgtaccgtattccaattggtctccagctgctctgggctatcatccttgctgttggtctcttcctccttcccgagtcgcctcgttactatgtgcgcaagggcgatgtgtctagcgccgccaaagtgcttgctcgcgtccgtgaccaggacgttgagtcggactatgtcaaggaggagcttgctgagatcgtcgccaacaacgagtacgaaatgagccttatccctcagggtggttactttgccacttggttcaactgcttacgcggaagtatttggtccccgaacagcaacctgcgccgtaccatcctgggcacctcgcttcagatgatgcaacagtacgtgcttctctcgttcttggttaccctaaactgacatttcacaggtggactgtgtaacttcgctttacttggactacttttcaccactatgtttc

SEQ ID NO: 22221 - DNA, 714 bp, Emericella nidulans
cggtcttcaatgctgacatcccaagccccacgcagactcctcttacttcggatctggctctaaagccgagatttatgcgcaggtcattcagcaagccaagggccttgtgacaggacagcgcaactgggtcaggtacgtggactgtagttaaaacacccttcccttggactatctatatggtcaagtcaggatattgattagcattgtcagcaacttctccaatgtcgcctccctcctctggcacgcctacgccgcgcttccggccccctcctcctccgtgaattgggctggtttctacatccgccaagatcaattcccttccaaagagacagctgaatcgacagaagccgctcgtgtgaaagaaacgctctggctcggtcccttccagggccgtccagcttgccaggagatccggtttggtcgcggcgtgtgcggggcggcggcggcgaagcgcgagacggtcgttgttcccgatgtgctggagttccccgggcacattgcttgtgatgcgagtagtcgaagtgaaattgtggtgccgattctggcgggcggcgaggtaagttggttattccataccgttgggaagggcactgaccattgcagacggtcgcgattattgatatagactgcgccgagccgtcgggtttcgatgatgaggataaggagtatcttgaggaattggcagcgctactttctgagagctgcgactggtca

SEQ ID NO: 22222 - DNA, 792 bp, Emericella nidulans
gcagtatgccagaccactcgctctacgggccctggcccgccgtgcccatgtggcgcccaagtttaccgtggagaactacgtccgccagctcggcctgccgtccactttcgtttatgcgggcatctacaataacaactttacaagcttgccatacccgctcttccagatggagctcatgccagacggcactttcgagtggcatgcaccctttgacccggacatcccgctgccttggctagatgcagagcatgacgtcggcccggcgctgctgcagattttcaaagacgggcctcagaagtggaacggtcatcggtaggttgccgattgaatgggggatgggtgaaagaaaacgaagattgagaacttgctgactggtgtaggattgcgctcacattcgagacgctatctcccgtacaagtatgcgcggccttttcgcgcgctctcaaccgccgggtaacgtacgtccaggtccccaaggtcgagatcaaagtcaacattccagtcgggtaccgggaacagcttgaggccatcgaggtggtcttcggtgagcacaaggctccttatttccctctaccggaattctcccgtcctgcagccggatctcccaagggattgggtccagccaacggcaagggcgccggggcgggaatgatgcagggtcccggaggggtaatctcacagcgtgtcacagacgaggcccggaagctgtggtcgggctggcgagacatggaggaatacgcgcgcgaggtctttcctattgaggaagaagccaacgggctggactggatgctg

SEQ ID NO: 22223 - DNA, 850 bp, Emericella nidulans
ttgacgtcccatggtgtcattgagaatcccgacgatcctgttcaggtcgccagatttttgaggggaaccacacgactgtcaaagaaagttcttggagaattcatatcgaaacgatccaacgagggccttctcaatgcatttgtcgatctgcttgatttctccggcaagtcggtagttgatgggcttcgagatttacttggtgcgttccgacttcccggcgagtcagctttaattgagcggattgttactacattcagtgaaaagtatatcgagaaggcccagccttctgaggttgctgacaaggactcgctgtttgtcctgacttatgctattattatgctgaacaccactctttacaatcctaacatgaaagctcagagtcgaatgtcttgtgccgacttctcgaaaaacctaaggggtttgaatgcaggccaggactttgcccccgagttcttagagaagatttatgattctattaaacaaaacgaaatcatactaccagacgaacatgataataagcacgcattcgattatgcgtggagggagttgctgtcaaagtcagcttccgccggagagttagtcgttggtcaaaccaacgtcttcgacgcagacatgttcgcggctacctggaaacctgtagtcgccacattatcttacgtcttcatgtctgcctcagatgatgcggcgtattctcgcgtggtcatgggatttgaccaatgtgctcaaatagttgcccgctatgggttgacagaggcgttcgaccgcatcattttttccttgcctcctcagcactcttgctaccgatagcccccctagcacgctcttaatccgaagtacaggctgggaagaa

SEQ ID NO: 22224 - DNA, 850 bp, Emericella nidulans
gagggaaacaagtagctgcccggcccgtcacgaaaggaaaacttcttcgtcctggcggtccaggcggtggcccgtccaaactggcttccagacctgtaccagagcgtcggcctataccacagcccacgcctcaaacagccgcggcgcaaccgacaccagcgtccagacccgttcctcaaccagtggcagccgttgcagcatcccattcacgtacttcatctactgcctccgcaagggcaccacccccgcctcctcccgcaccacctgcagctgcaggaccgaagaaagcaaaggccctgtacgacttcagcagcgacaacaatggcatgatatcgattagcgcaggacaaattgtggaaatcgtttccaaagaaggaaacggtcagtatatcttttcccaaattattgaacatcttcctaacacttcccaggctggtggctgtgcatgaacctcgaaacctcagcgcaaggctggacacccgaagcatatctcgaggagcaagttgcacccacgcctaaacccgcacctccacctccacctccagttgctccccgagcaagcccagcaccagtgaatggatccgccgcagttgctgcagcgaaagccaaagcggcgcctccgccccccgctaaaaggcccaacatggcaggccgtaaaacagcacctgcgcctccacctgcaccccgcgatagtgctgtcagcatgaattcgcaaggagattcttctggtgcaagtggtcgcggcaccccaagcagcgtttccaatgctagtcttgctggtggtcttgccgaagccctgagggcacggcagagcgcgatgcaggggaagcaggatgacgacgacgactgg

SEQ ID NO: 22225 - DNA, 850 bp, Emericella nidulans
caaccatccgcgatgcagcaacctcccgatctcccaccacatacccgcgcctcttctgcagcgggtggatgcactccatgacggacggacaagctctagccagcgacctcgacgatctcgacccccacggccggccgatattcatcgacgccaaagacctgcattcagcgtggtgcaacactgcagccctaacggacctaggaattgacaaatccacacctacacctgctggcggagacatcgcacgcgataatgacggtaaccccaccgggctactcagtgagtctgccgctgtaacgatcgtctggccgcacgttgcgcgggtcgcgacgacgaacgagaaaaaggaatacgtgaaggatgcgattcgcgcgtataatgcagcagggtacacgggaatggtggaaatggcaacagatgagaatatcttcgagaccgcgcggcagttgcgagaacaggagccggagtcattttcaattaggctggctatgcattggcttattacgcccgctgctagcgaggaagaagtgctagcgcaggtcgatcgagcaattgaattgcatgagaagtacaacaaagagacgagctcagatttccggattgcagggatcaaagtcatctgtgatggtgttgttgatgcctgtaccgcggcgctgttagagccatatacggctggtttatcaaacactgcctcgacagcttcaccggcacccctctgggaagaaggtatcctccgcaaagtcgtccagcgcgccgacggcgcccgtctccaagttgccttgcacgcgattggagacgctgcagttgcactcgccatcaacacgcttggaaccgtagagccacgaccagg

SEQ ID NO: 22226 - DNA, 850 bp, Emericella nidulans
gaagacaaccaacagccgccggtgctctgacacgccacggatattgggagtcttcactggacaaggtgcccagtggacacagatgggatgggagctagtcggggcttctccagtcgcccgcgcctggcttgaagaaatgcaaaactctctgaatgacctcccgaccaagtatcggccatccttttccttgactggtgaattgtccaactcggtgtccaagatgaaaagtgccaccctatcccagccactttgtactgcgctccagatcatcattgtcaactttctgagggcgataggggtctctttcacctcagtaatcggtcactcctcgggcgagattgctgctgcctatgcagcaggatacctcactgccacagacgcaatccgtattgcgtacttgcgaggatttatggcgtcaagggcgggtgggagaaacagtcaaccaggtgcaatgctcgctgctggtgtatctgcgcaagaagctgcagacatctgcgccaagtctaaaggtacaatcacagttgctgcggagaatgcgccttttagcgtgactttctctggtgacgccaatgctatacagtcactggagaaaaagttaaaagatgaaaataaattctgccgtatcctgcaagttgacacagcctaccattctcaccacatggagccctgctgcaggccttacctggacgcgttagaggaatgtaatatcagtgtaaaggatgccatcagtggcataacatggtattcgtccgtacacccgggtgattatatagattcgcgttcgctgcgtggtgcctattggatcgagaatatggccatgcccgtactattttcacaagccgtggcacac

SEQ ID NO: 22227 - DNA, 697 bp, Emericella nidulans
ttcctgctcctgatcctttcgcccactatgcctggcaaggctgcgctaccatcccatgtcatcaaattcaccaactgtcgtatcgtgaaaggaaacgagcttgttaaccaggatgtctggatcgagtcgacgtccggtaagatcctccgggcccaggaagcattctatgggctgcacctgtccccagatgaggtcatcgatctaggcggacgtatcctcgctccaggactcatcgactgtcagttgaacggtgctcagggtttcgacttttcgatcccgcaggcttccaaagaggaatacgatgaaggattgcgggtagtaaacaagggcctcgccaggaccggggtgacttcgtatctccctacgttggtcagctcaactgcagaagtataccacaaagtccttccgtcactcggcccggcaggatgcaagcatcgcccagaggatggcgccgagtcgcttggcgcgcacgtcgaaggcccgttcctgagtcccggccgcaatggaatccataaaacggatgtccttcggtcagcaactacggtggaggacctggatgattgttatggtcgcgagaacctctacggcccgaacaagactattagactgataacggctgcgccgaagtcggcaagatgatgtccaatatcccgcacatcgtctccaacgacatcatatactcaatcggccattcgga

SEQ ID NO: 22228 - DNA, 360 bp, Emericella nidulans
cttgtcgacgaattcagataaatgattgcagttcttttaaccgatgcggatggtacattatatagccatgcattattcaatccaaaaatcattagccattctgttgaacgtacatatttacagggtggtgaaggctgtctgtctgtagaccgcgaagtacctggttatgttcctcgttatacaagaattacagtaaaagcaacttctatttacggagaagaagtaaaattacgtttaaaaggtttaccagcattcgtattccaacacgagattgatcatttaaaaggcgttatgttctatgaccatatcaataaagaaaattcttttgccgctcctgatgattccaaacctttagagcga

SEQ ID NO: 22229 - DNA, 399 bp, Emericella nidulans
  unsure (1)..(399): unsure at all n locations
tccgtgctcctgcggctctcttccggccctgcgttcttggtctggccgcggtggtctccncgtcccccctttcgnctctctcgtgcgtgtcgctgtcgccgtccgtccggtctcgtccggcnccctcgttctggtctgtgtcnctcttcgcctcgctctcctgccctgggcggcnctnccgcntcgctcgtctggtggtcccgccctgtcccctggtctctccgcccgtctgccgccgggggtcgccgcccttgcgccctcgtccctggcggtccggctccttgctcctcctgcgcgccgctcctccgaatgaatcggtggttccgtcttggcttctctgtcccccttccggcggctgtggctctcctggccggcgtccgctgcgcgcggtccttcgct

SEQ ID NO: 22230 - DNA, 516 bp, Emericella nidulans
atgacttccattcggcggatgtccccaacggacctcttctccctcaacctcaccaacctcgacccactgaccgagaactacgatctgggcttctacctgaactatctcatgcgatggccgtcgctctttagcagcgtgaaggaccgcagggaaggaattgccggatacagtatgctttcattttgccctttttcctgttctcccattctttaatgatacccctgtttcattatcccctaccgaatcgagccccgctaatccccgcaatccagtaatgggcaaactcgaagagcaacacccctccctcaaagcctcagagcattacactccctggcatggacacatcactgtcctaactgttgcgccggcatggcggagacttgggcacgcgcgtcgactcaccgagcgtctggagcggggttccgatatcaacaatgcctggtttgtggatttgtatgtgcgggcagggaacaaggtcgctgtggatatgtataagggcatggggtgcgtcgagtt

SEQ ID NO: 22231 - DNA, 500 bp, Emericella nidulans
gaaacacaggaaccgggggatgaacgagacagacaggagcgaagagaccgagaagcacacggcaaaggggacaaaagagaccaacgagagagccaaggccagcggcaaggaggaaggccaagcgaggagacccggggcgaagcagacagggaatggacggaaaaggcaggacggcggacagaaagaccaagggaaaagacgggaggaaccccaagggaaaggcaaacgcccaaagaaggttggagaacgccgcccgcaaaggaaggaaaaagccaccggcgcgggaaaaaagggcaaacaacacggcaacaagcgccggacaaaaaggagcccgccgaaagccagaagggaagccagagaacaaccaggcaggagaaaagcaggcgggaaggggggacccacccaaaagaacggagcacaggccgggcaaacaagggaaacccccaaacaacaacgcaaaacggggagaaacaaccagggaggaaaaaaaccaaaagaag

SEQ ID NO: 22232 - DNA, 464 bp, Emericella nidulans
gtcttcatgatgcatcaagagtcaaacagcgttgttgtcgttgccgatattaagacacttatcgattatgtctccgttggtccccgattcagcaacagcgtcctacagacattgaaggtcttgttcaaaaaacgccccccaaagaaccgaagacttcttatcttggctaccacaagtgagcgagcactcatgaaagagctgaacatttataactcgttcaactccgatatcgatattccaaatgtcaccagccatgaagaactgagacatgtcatggaaaaatctgaggtgtttgcgagcgagcaggtagcggaggctttggaacgcatcgatcctctcaagggagagacaccatacagcatgacttttggtgttgggatcaagaaggtcttcgatgggatcgagcttgcgaagaagacgccggaccagctggtgaatcagttcgtgcgcttcatcaacagtgc

SEQ ID NO: 22233 - DNA, 634 bp, Emericella nidulans
aacaagaatcggggcccgttgggtattcttgttgctgcgggcgctgatttgcgtcacgtagtgcactacagcaagttattgaggccaaggtatgttcccacggactcaaataaggcgtggttgcaaccacgctgccatcgtgggactaaactggcgcagtcaggtatcctttttgagatcgggccatgggtgcaacgtcgactggaccgatcacatggactcgactccgttgctgctagcagccgaacggggccatcttgatattgtatctttcttgctggaaaagggcgctcagactaaccatacggacttagagggcaggacggcccttttctgggcctcgaaaggcggccatatgggtatcgtccgtgttctggtcgcacagggcgccgatttgaacagggctgacgagtacggacggactcctatgttggctgcagttcagcacgggcgcaccgaggtggtccagtttcttctggatgctggtgccgacaagaaaaagccctatatacaccgaaatgttttctacagactattccgaactaactccccacagggaggagttagccagcatcttcggctctctctttcttttatggctaatcactcaacgatgtctttccttccttccttt

SEQ ID NO: 22234 - DNA, 496 bp, Emericella nidulans; identical to SEQ ID NO: 8670

SEQ ID NO: 22235 - DNA, 500 bp, Emericella nidulans
tccctccattggataattatcggtgatagtcatcgcttcgttgtagctagagaaccccgacgttagatcacgtcttacacatgtatacaggtccttgagggccattgaggcccgtctgcgccgtggccttctcacctgacgggcagacagtggcgtccgcctccgaggacgagaccatccggctctgggacgcggcctccggtgctgagaagcataaacatcatcttgatgtagtagtaactactttgtcattctcagataacagctgcctcaatactgaccgcggttcactttctttgaaccaccaagcttgcaacttctccactgaacagccaaagaatgaaatattcatacatgagaaatgggtgactcgcagcgggcagcgcttgatctggcttccaccagactttcaggcgacatgtgcggttaccagtggcaataaagtgattcttggccatagatcaggcggcttgacatttttgtggttaaattaacaaatc

SEQ ID NO: 22236 - DNA, 850 bp, Emericella nidulans
tactccgatggagcaaggagcgccttttacctgaccagggttactgttcctaccgagcgacgggttaaacccgacatggagagtcgctatcctcgaaacgccgaagaacttcgctcgtattatgaagcaacgcaactgaagcgtaaaatggcattggaatacaactatccaatctcagcagaggctgccgaggcgacgaaaaactttcaagaagccgttcactccgaaaaaagccctgccctttccaggagatcgccgctcactgtcagcttctctacgcaagtcaaatcggcagtgatcagacagtatcagctgctgtggggtgataaagtcacatttctcatccctcagggtttgaacttcgtccaagctctcattaccggttctttattctacaatgctcccaaaaactcttcggggctgcccttcaaaagcgggtctctcttcttcgccatattgttgaattcgctgctctccatgagcgaggtgaccaactcctttgcagcacgtcccgttttagcaaagcaccgtggcttcgctctcaaccatcctgccgccttttgcttcgctcagatcgctgccgatgtaccacttatcctcacgcaggtcacgctgttcgctctgccagtctactggatgactggtctcaaggctacaggtgaagctttcatgatttattggatcaccacaatctccgtgacaatgtgtatgacggccctgtttcgcgccataggcgccgccttctcgagctttgatgccgcctccaaagtatccggtatacataatgtcggcactcatcatgtatacaggcttcttgcttccgaagcgcagcactgcatcagtgttttcc

SEQ ID NO: 22237 - DNA, 544 bp, Emericella nidulans
acgcggctggctcggtatgacctggctctaccctgcagagatcgtgcctctgaagatccgtgctccggctaacgctttgtctacctcctcaaactggatcttcaacttcatggtcgtcatgattacccctgtcgcgtttgacaacatcggctaccagacctacatcatctttgctgtcatgtaagtttctgattccctcctcttagagcctcgatactaatgcgatgcagcaacgccttcatcttccccgtaacatacttcttctacccagaaaccgcctaccgttcgctcgaagagatggaccgcatcttccgcaagacaaagagcattttctcccttgtccgaactgccaaggaagagccgcacatgtatggcaagcatggtgagctcatgcgccagctttctgatgtcgaagacgaggcggtgcgccgcgccagctacctcgagcaccacgccggcaagaaagaacatgagtctagcgacgaaacgagtaccgagaaggtggataacgtggagcatgtgaaataagttaaagtttgactct

SEQ ID NO: 22238 - DNA, 507 bp, Emericella nidulans
aagtctgagcagaaacatctcgataaatggaccaacgaagaatggcaaacgaaagagggctctggcacagcgaagcaggatgacgggacgcggaagaggtatttgccgaagaaggcgtgggaagagctagatgaaagggagaaaaaggcgacggaacagaaaaagctggaagggtcaaaggcaggaaagcagtttgtagcgaatactggagaggcgaagaggaagaggggagaggtaagcagggaaggagagaagaaagggagcaggaacgggggtaaggataagaaagggggtcaggtagataggaagaaagagaaagaagggaagatgaagcaggagccggaggagaatggggagaatggggagaatgaggaagaagaggttgagaattcgaaaacaccccgaagattaaaaaagccctccggaagtcttagatggcgagaatgaagaaaaaggagacaacagcggtagtgaagacgaggacgaggaacaccaccggcgggctta

SEQ ID NO: 22239 - DNA, 850 bp, Emericella nidulans
ccagtatggccttgacgatggcgacgttgccccgatgtgtgcctctcacagcagcgagcatgtacatgtcgcgcgggcgacagacatgctgcgcaaaatcgatgcccgcgagcaagacctgcaatgcgggggccacgcatctctctcggaaacggtcaatgcgggctggatcaaagccagcctggtaccctccgctatacacagcaactgctctggcaagcacgccggaatgatcggtggcgctaaggccctgaccacgcggagcgacgggtaccatctccccggacatccgatgcaggtcagggttcagcaggtcttctccgagctctcaggcctagacgcgcaagatatcgaatggggcattgacgggtgcaatttgcctgctccggcgctcccgctaatgaatcttgcgcgcgtctactgcggtctcgcagcgtccgctgagaaggccgccgtgtccagcgcggctccagcaccaaggagccaacacttgtcccgcatcttcggcgcaatggctcagaacccgcggctggttgccggtcaaggccggttctgcacagttcttatggaggcatacaagggcgttctcgtcggtaagctcggagcagatgggtgctacggcgtttctgtgcgggtgtcagaccaaacaattgcgcttggagcggagggcgcgattggcatcgcagtgaaggtggaggacggtaatattgggatactatattcggcggtggtggagatattgcagcagcttggtattgggacgacggcaacctgggaggttctggaagggtttcatcgcccaaggctcatcaacacagccggtatggtgaccgggtcgcttcatttttca

SEQ ID NO: 22240 - DNA, 500 bp, Emericella nidulans
tctctcaagcaaccaaagctttatacgaaagagaacttgccaagggagtcagcgagaacgaggagattttcaccggtgaagagtcggtcagcacgggtgcacaaccccaatgggcaagcaagtaccggccgtgcaaaccccgatactttaaccgcgtccagatgggatatgaatggaacaagtataatcaaacccattacgaccacgataatcctccgccgaaggttgttcagggatacaaatttaacatcttctattccgacctcattgataaaacgaaagctcccacttattggatagaacgagagcatgtaatgaaacggtgtcagctatttgtctggtgcatagaggaagatacctgtcttattacgtaaatgctgtcccgtcttttaagactttcttttcccattgcttttttattgtatttcctattaacttttgttttttttaatctcatttaatgtttattttttccctttttcattcatttattctcatct

SEQ ID NO: 22241 - DNA, 850 bp, Emericella nidulans
tcctccccgatacgaaggaggtaggtgctcgtcgacctggtaatcagaacgggatactgatcgtaaaagggatttattctcggtcgcgagacgcctgcagatgcgccggaggctggcacattccacactggacctaaccagtggcccaagaccctgccggacgaagagttccgagttcccataatgagataccatgcaaagatgatcgaaatggtcaaagtgattctcaaaatactggccctcgggcttccggcagaatggaattgtccatcggatgtgtttgatgagctgaccattaatccatcggcgccactgcgtctgctgtactatgctccccagcctgtcaaacatgagaaccaatttggcggtatggcttcaattaatttctttacacccgctgtatgctgtgaaaactgatcagagatccagtgggtgcccatactgactttggcaatgtctcggtgcttctccaggaagaagactcagaggggctggaagtcttctatccgccaactcaaacctgggttcccgtcccagccaaaccacattcctatgtgatcaacatgggggatatgatgcagaaatggaccgcaggatactacagaagcgcgctccacagggtcgtcaatagcaatacaaaacctcggtacagcgcgccgttcttcatgaatgggaatctggatgtcaagtgctatgccctggacggatctggagaagtaactaccattggagaacatattcgcaagcggctgatggagactatcggcggcgaagaggggaagaaactgggtctctgaagggaatggaataggtccttaagactacgagttgggatctaacctaggataag

SEQ ID NO: 22242 - DNA, 850 bp, Emericella nidulans
tctggcgggagaactgctgaagaaggctgaggaattgctgcgcttgggtctgaagacgagcgatatagttcagggatacgagaaggcacaaaactttgcgcttaattttgttagaaggtgggttcttgatctttcaataaaatgtccctgaatgtccccgtcttagaggccatatctaactgaaggatgcaatagatcttgaagtcgatcgtttgcaggatttacgctcccagactgaactcactaaggccctacgcacggtggtcgccagtaagcagtccggtaccgagcagctcctcgcttctcttgtcgccgaggctgtcctgtccgtgctgcccaaaaatcccgtcaacttcaacgtcgataatgtccgcgtggtgaagatcatgggaggaagcttggaacagtctcgtgtgattaagggtatggtgtttggccgcgagcccgaaggttcaatcaaaaaagcccacaaggccaaggttggagtcttcagctgccccatcgatatctcccagaccgaaaccaagggtacggtcctgctcaagaacgcgcaggatatgcttgacttcactaagggtgaggaggagcgccttgaagccgctattaaagagctctacgactccggtttgcgtgtcgtcgttgcaggcgctcaagtcggcgacctggccctccactacctcaaccgcttcaacatcctcgtgatcaagattctctccaagttcgagctccgccgcctgtgccgcgttgttggcgccactcccctcgcccgcctcggtgccccaatgcctgacgaaatgggctccgttgacgttgtcgaaactaccgagattggaggcgaccgcgtcactgt

SEQ ID NO: 22243 - DNA, 588 bp, Emericella nidulans; identical to SEQ ID NO: 6528
  unsure (1)..(588): unsure at all n locations

SEQ ID NO: 22244 - DNA, 850 bp, Emericella nidulans
ccttcgcccatgccttcggttatagccctcacgagataatcggcatcgtcgttgaccgaccacttctagcccctaatgtagcgcccgcgaacgaagcgcccaaggaggtgcgcatctataaccacaacgaatcgccgcaggtcccgcacgcaccagagtatgtcttcttctacgcgaatcgagcgcccaagaagggaggggagacgccgatctcatcgagtctagagctgttccatcgagcgcgcgctgagatacccgagtttattgacctgctcgtggagaagggggtcaagagttcggttacgtacacggttgagaggcagtacgtgggcgggtcgacgctgagacaggcgttcgggaaggagttcgtcgatgaagacgacgaacaggcaaaaagaaggaaggtcgaggcgcagattgctcggtatggacgcgggaagtatacgacgtttgaatggagcgacggtgcagacggccaaaggcaagtgctaaccctaactcaccacctccctgtgatccgcacacagcctggcaccaacctccccacgctcttcactgggctagcagcgtactacaagaatagccttgaggcgaaaaagggaagcggcgctggtcggaagaacgtcgccgttcagacattcggcgacgggactccgatcccggaggagtacctggcgacgttggcgcggatcacggatgagatccgcgtcctgcatcggtggcaggacggggacgtgctggtctttgataatgtcattgcgcagcatggcagagagccttgggagggcgagcagggggaccgcgtggtgctggcgagtctgtttgacggggagactgtgccggggcctta

SEQ ID NO: 22245 - DNA, 850 bp, Emericella nidulans
ctcggttgattgtactcttcccccgtcctaattctcgtctccctgccatttgggattcagggaatcatatacaggtgctgacgaatgtctgatgaatagacacgctctcgctgctcattctcgcctgcatctcgattgcgcgcgacggcaactggtctgccagcaacgggataatctacggcctctacgccggcctgatcctcgtccactccgtcgccacgatcgtcacgagcaacatcatgccgcgcatccagaccgcctgcatcttcatcaacgttggcctcataatcgcgaccgtggtcgcattgcccgtcggcaaggtcactcgcggcgggaccctgaattccggctcttttgtcttcggacacatcgacaatctctccaactggccgacgggctggaacttcgtcctggcgttcatgtcgcccatctgggcgattggcttcttcgattcctgcgtgcatatgagcgaggaggcgagggatgcgcccaaagccgtgccccgcggcatcctcttcagcgcagggagtgcgtgcttgttaggctttctggtactgagtgtcctggccgcggtcatggatccggatgtcgccaaaacggcggggactgtctatgggcagccgatggcacaggtacacttccttttcagtagtggttgggagatgacaagtgtgctgatgatgggcagatctactatgattctctcggcaaacgtggcgcgctaggcttcatggccgtgctgatccttatccagttcttgatcgggctgagcttggtacgtcgtgcgctgctgcttttccaagccccatatgcccccatgtcgtgcctaacaagtcgaatacagatcgtg

SEQ ID NO: 22246 - DNA, 850 bp, Emericella nidulans
ggaatagtggtttcatcggtttcccgtccgtcggaaagagtacattgatgagcaggttaacgggccaacattccgaaggtatgcttaacgaagacaggagccgtgtgacggacactgacgcatttttgcaacagcggcggcgtacgagtttacgacgttgaccaccgttccgggacaagtactatacaacggcgcgaagattcaaattcttgatcttcccggtatcattcaaggtgccaaagatggtaaaggtcgtgggcggcaggttattcgtgtcgccaagacatgccatctcattttcattgttctcgacgttaataagcctctggtcgacaagaaggtgattgaaaatgaattggagggattcggaatcagaatcaacaagcagccccccaacattatgttcaagaagaaggacaagggtggtatatcgattacgagcactgtgcctctcactcatattgataacgatgtaagtcgttaagagaccggtttcaattgttgtgacggttattaacacttccgttttcgaacttaacaggaaatcaaagccgtcatgagcgaatacaagatttcctctgcggatatctcgattcggtgcgacgcgacaattgatgacctcatcgacgtgctggaggccaaaagtcgcgcatatattcccgttgtctacgctcttaacaaaatcgatgccgtcactatcgaggaactcgacctgctgtacagtattcccaacgccgtccctatcagttcagagcacggctggaatatcgacgagctattggacatgatgtgggagaagctcaacctccgacgaatctacacgaaaccgaagggcaaggcccctaactat

SEQ ID NO: 22247 - DNA, 612 bp, Emericella nidulans
atgggttggttttgggcagattcgcagccgcaacttccggcgcgcaatcacccagcatcctctgatgcatctcctccggcaagtaaaacgaacagcagagagattttcaagtgctgactgttgatgatcatagccagcatgtcccatgcatgcatctcctcccaaatccgagacttcaagcgcttgtcccgtgcgatcgtcggattcgcccttcttcgtacctccgaaatcttctgctcaaccacctactgcgcctgatacaaaacagtcgaccctgtccaagcttaacccgttgaactacatgtttgcgtctctctcgcaagagcgcgctccaaatcaaaccgtggacctaggtgtggaacggaaagtctcgtctatgcccagaggtgattcagaagggaactgggagtatccctccccacagcagatgtataataatatgctgcgaaaagggtatcagacaccccacaggatgcagtagcggccatggttgcagcccataactttttaaaagaccccccttggagtgagtgtgtcgattggaggaggatcttttcgaaaggttgagggaatgcatatgaaaagtgcccctggggtagcagaaaaacccta

SEQ ID NO: 22248 - DNA, 500 bp, Emericella nidulans
aaagcggcccgaagagactgcaaaagaaattccaagatgcagttgagaaagttgctcgtgaccttcactcgctctataaagaaaagcatgagacgaaggttgcgcctctcaagaaaagctacgaagcacgctgggagaaacgattgcgagaagccgagaagaagctcaaagctgcaaatgacgaatgcgagcaactcaaagctgagcgagatgcggcgctgcaggagtccgcacgccctgatgctagcatgatatctcgtgagaacgaacaacatgaagcagcgaagcacgtcttcgaggcgcaaatcgcgggtcttcagcaagagataaccattctcaagagcaacagcgaacagctgcgtgccgagctcaaggcagaacgagcggagaagggcgatcttgttgctcttgtggaggagtggttgtcaatgcagaatcaacagcccgccccatctccacaagccaaaagtcatgaggtgacgccggagcctgttcccaac

SEQ ID NO: 22249 - DNA, 614 bp, Emericella nidulans; identical to SEQ ID NO: 6828
  unsure (1)..(614): unsure at all n locations

SEQ ID NO: 22250 - DNA, 500 bp, Emericella nidulans
tcgcgcccacgcatctccgtgcccaaaaactacaacagcttcgctaaacgcgccttttcatcatcccctaccgtcttctttcacccctcagccgcaaaaatgggtgcctctgaacacgtcccccccattacctcgtaggtctctcattgaaaaaaccccatttgccacatcaaatcaacgataactaacgtcattgtgactcacagtaaggccgaattccaggagaaggtcctgaacgccaagggcttcgtcgtcgtcgactgcttcgcgacatggtgcggtccctgcaaggccattgcgcccaccgttgagaaattcgcccagacctacaccgacgcttcattctaccagattgatgttgacgagctctccgaggttgccgctgagctcggtattcgcgccatgcctactttccttctgttaaggatggccagaaggttagcgatgtggttggtgccaaccccggtgcgctcgaggccggtatcaaggctctgcttgct

SEQ ID NO: 22251 - DNA, 708 bp, Emericella nidulans
ccgttgcgcagacagtcaaaactatctccaacccagctcgaagagctccaaaaggcgacgcatttcgataagaaagaactgcaacaatggtataaaggtacttttggctctggagcgtggaaatattgctcgaaatcaattttatgtgctcgttgagagactgctgctgacatacgtcatatcaggatttctgaaggactgcccgtccgggcaattgacaaaggaggagttccaggatatctaccgaaaattctttccgtttggtgatccctcgtcatttgcgaattatgtcttccgggttttcgattcagataatagcggcatgatcgatttcaaagagttcatatgcgccctgtcggtcacctcacgtgggagaatggaggacaaattggactgggctttccagctctacgacattgatggcgatggaaagattacgtacgatgagatgctggccattgtcgaggcgatttacaagatggtgcgttcacccctgaatcccgcagggcgtttgctgacgtgtgattctaggtcggctcaatggtgaagctcccggaggacgaggacacaccggagaaacgagtgcgcaagatctttcgcatgatggacaaggatgagaacggcagcctcgatatggaagagttcaaagaagggagcaagcgtgacgaaacaatcgtcagcgcattatcgctatacgccggcctggta

SEQ ID NO: 22252 - DNA, 850 bp, Emericella nidulans
caaggaggacctcctcctcatgaagaggcacaacatcaattcggtccggtgctgccactacccatccaccccacagctcttctccatgtgtgacgagctggggctgtgggtcatggacgaagcagaccttgagtgccatgggttctacgatgccgtggcccggccgctcgatataccggaaagcatggactacgaggaacggaagaaactcacattcgcgcaagcggccgagttcacgtccaataaccccgaatggaaagcagcgtatctggaccgtgcggagcagatggtagcaagggacaggaactatgcctccgttgtcatttggagtctggggaacgaggccttttacggggccaaccacgcggccatgtaccgcttcataaaggaagaagacccgacccgtcctgtgcattacgagggggatatggaggccaagacggcggatatgtactcgttcatgtatccttctgttgatcggatcactaggctcgcgacggaagaaggggatgcattcaccaagccgatcgttctctgcgagtacggacacgcgatggggaacgcacccggcggcctggccgagtacatgaatgcgttcaggacctatcgccggctgcagggaggctggatctgggagtgggcaaacacgggctctggctggaggagaaggggttctacgcgtacgggggtgacttcggcgaccagcggaacgacgggagttttgtgctggatggcttgctttacagcaaccatacccctacgccggggctagtcgagctgagaaaggcgtacgagccgatccatgcgtggtatgaagatggtagaacaggctgcagaaccggtttgattt

SEQ ID NO: 22253 - DNA, 850 bp, Emericella nidulans
aaagatgctttactactcctactagatataaaaggggtatttaatactgtaatatactaacagctcctttcttacttatacctgcaagaatagtataaaggcttactctagctacttaaggactggcttactagctgctctgtatctgttcatattaaagaaggcactgctatagtactaattaaaggcagactcctctagagatcttctctatccctaatactcttcctactatatatagcaagaataatctctatcttagagggctccttctgctatgcagataatataggtatattattaactaggaataccctagaagagagcttacaataactagtagaggcctataagtaaattactactctagggacagagacaggcctccctttcttaataaagaaaatagagatataatacttctctagaaagctgtagcagtatctccctatagttaccctacctagtataagggagattataccatccctatatatattttggttaggagttcttctagatacaaagcttacttttaaagcctatattaatttagtctttagctataggaaataacttgcctagtacctaaagagacttagtaatacctagcatggctgcccagtggcctctatataggcagtagttatatagtatattcttttaacagctctgtacagggcagaagtcttctatacaggcaaataataaaaagaggtagttaacttcctactttctctcttctgcatagcagccctggctattatcccagcctacaagactaccctctactatagtactcctctacaaagcagaccctactagatctagaagctctacttaacaagaa

SEQ ID NO: 22254 - DNA, 574 bp, Emericella nidulans
  unsure (1)..(574): unsure at all n locations
cggggatctctctgtggatggagaggcagcatataagcttacncctngtgtggagctctttgctgcggccaaggctattttggttgatgctgatgtacatgtcgagggtggcccgttagtggctcggactacacggatgcgcgtcaatttcctccaccagaaaatgctatcagaaatcaccagcacgctgcaggatgttatctataaggatctggatgtgatcagtgagacactgcttaatcatatgacctctggcgcggaaaagggcaaattcctgctggaacgtgctaccgttcatgtccaccacggcttcgacgctaaggctagagcggaccttgaacgggctgctgcggagcggaagttcgagtttgctttgactggtagattgggaaagcgaaccaagtttcaacaaagagacatcagtcagcttgtcatcttagcgaagagtgctgaagatccaagcaataccgatggggttgaaacctcggaaaggaccaaagacaatgcagctgcaccgacaaatctggatctcaacgatgatacccttctggaggcaatttccttcactaaacca

SEQ ID NO: 22255 - DNA, 850 bp, Emericella nidulans
atcagtcaccagttactacgatctaaacgattctcccaggacgagatcgccgtgatagacccgtcagcctggcaccactatcaacccggttggacattagtcgggggaggtctcaaagcaaaagacagactgcggcgtccactgcaggatctgatcagcccgcgcttgaagttttatcgccatacagtaaacacgttttgccctgacagcaacatgatcatgcttgacgatggctgtcggatcgcatacgaacatcttgtggttgttccgggcatcgagatcgattatggaagcatcagaggccttccccaggctctggaaaacccctctgcacccgtctcatctatttatgggtatgagttctgcgacaaggcattcaagacgatcgagaacctcaaaaaaggcacggccattttcacccaacccacaggcatcgtcaaatgcgccggcgctcctcaaaagatcatgtggctggcactagaccactggcaaaaaacaggccggtatacctacagaccaggcaccggcgccgcaacagcggcagtagaagaggattcgccaatcaagatcaaattcgcaactggtctggcaagtctattcggcgtgcccaagtacagtgctgtgctggagcagctgcgctgccagagaggcgtcgagggctccttccagcacgacctcgttgctattgagggtaaccaagccgtcttcaatgttgcccttccacatccagagggagatgcaggtaggaacggaaacgggagtgggagcgggacagttgcggcctcgacgacgcggaaggtacagattgacctgctgcatgtcgtgcccaagatggggccgtacgccttta

SEQ ID NO: 22256 - DNA, 850 bp, Emericella nidulans
cttgagcttctggatcctgagcagaactcgtcgtttctggatcactacatggatgtacctgtcgacctttcgaaagttctgtttgtttgcactgccaatgtcactgacacgatacctcggccgttactagaccgcatggagcttattgagctatctggctatgttgcggacgagaaaatggccatcgctcaaaagtatcttgcgcccgctgccagagaactaactggcctcaaaaatgtggacgttactcttaccgaggaagccattgaagagcttatcaagtcgtactgtcgggaaagcggtgtgcgaaacttgaagaagcagattgaaaaagtgtaccggaaggcggccttcaagatcgtttcggatcttggggaagacgtattagcggaggacaaggctctcacagccgaggggaaggctgcgcaagaggagtcggagaaggagacaggccccattgaatcaacgagcgaacaggagaaagccacaactgaacacccacgggtgtgactgaatgtacccgatagtgtacacctcagtattgctaaggacagcttgactgattacgttggcccgactatcttcaccaccgaccgcctgtatgacacctttccgacaggtgtcaccatgggtctggcttggaccagcatgggaggtgcggctctctacgcagagtccatcttgaaaaatgcatcgacacacaagtcacaacctggtcttgacatcaccggcaatctgcagaacgtgatgaaggagtgaactcaaattgcctactcgtttgtgaagtcggcgatggcgaagcagttcccggagaatagattctctgaaaaggcaaagctgcacatgcact

SEQ ID NO: 22257 - DNA, 850 bp, Emericella nidulans
cttccatgcagggacaccacccgcagtctttcgtgccgctgcccgctcgcagatttccaattacagcacagcctccttcatcgacaacgaaatcacctcaatcgtccctgtaaacaacacgaacctgacgactttcttccgcgcaacggacagcacaggcgccgagtacacggctcgcaaagtcgtgctcgctacgggcgtcgtcgatatcctgccctcgactcccggtctgatcgagggtttcggaaagggcatcttctggtgtccctggtgtgacggatacgagcaccgcgaccagccttttgggatcctcggaactctcccgcatatcgtgtccagcgtacttgagatctcgacactgaatagcgatattattgcgtttgtgaatggctcgtacacggatgagtatgtctcggctctggaggaagactaccccgactggcaggcacagatggccgcgtacaatgtctcgatcgataacagaacaatcacctccttcgagcgcatgcaagacggtggtgagaaccggaatgacgttggccagcaattcgatatcttccgtgtgcatttcacagagggcgagcccgttgtgcggaacgcattcctgacgaactttgagacggcgcagcggtcgagtcttccctatgatcttgggctggtgatgaaggatggaaaaatcgatacgagtatcaaccccggcatgaggactagtcgtgcgggtgtttttgctgtcggcgatgcgaattccgatgggagcacgaatgtgccgcatgctatgtttagtgggaagcgtgcagctgtctttggacatggtatttattttcccctatctgtgtttactgaagatgga

SEQ ID NO: 22258 - DNA, 850 bp, Emericella nidulans
gatgtgtacgagtcggcgccgctagccgcgacctttctccccaaagcttctatatccgagcctggtgcctcgacatctgctgcgtccgccgcatctgtgaccgaggccgatgggagtgcggacgcaaccagcgctgggcggatattgcttcaacctccaacgacagaggagattgccagatactttgccctgattcagccactgaaatactctcagccgcatcaaccgattccgtcaccgttttctcctccgctcaacggtcttacacttactgcctataatgccggtcacaccgtgggtggaacaatatggcatatccagcatggcatggaatctattgtttacgctgtcgattggaaccaagctcgagaaagcgtcgttgcaggtgctgcctggttcggaggatctggtgcgagtgggacggaagtcattgagcaactgcgaagcctacagcattgatctgtagtactcgcggaggtgacaaattcgctcttcctggcggacggaagaagcgcgatgagatactattagatatgattcggagcactttggtcaaaggtggcaccgtgctgattccaacggacacaagtgcgcgggtgcttgagctggcatatgcgttagagcatgcctggcgcgacgctgctagggacacccaagatgatgttctgaaacggggtggactatacttagctggtagaaaggtcaacacaactatgaggcttgcgagaagtatgttggaatggatggatgagagtattgtgcgcgaatttgaggcagctgaagctgcagatactgctggccagaacaatgacggccagcgttccgaccaacgccagggcaagacagataa

SEQ ID NO: 22259 - DNA, 850 bp, Emericella nidulans
gcttactgtcggtagctgttcgcttatcgcgtttttcctggttgaatggaaagtggctgcccttccaatgcttccaggtaagggctcttcccgtccgccgtaggctgagctgacggctgcagtggttcttttcagaaataaggtcatctgcgccttgttcctccagaccttccttctgggagctgtccaccaagcgtacctctattacctgcctctgtattatcaaaacgctcgcgagtggagtccgattgtctctgcggctctgacatgccccttgatggtgtgccattcgctcacctccatcaccaccggtcagtacatttcgcgtcgcaagcgatacggcgagctgatttggcttgggttcgggctatggacactgtaagtctgatccgtcacccataccttctgcccctgctaagcctgctaacggtggtggcctcatgattaggttcgacagatcaaccagcccggctgtcattgccgtaactgttggcattgctggaatcgggattggaagcacattccagcctactatgatagcatgccaggcgcactgtacaaaatcacagcgtgcggtagtcatatctgaccgaaacttcttccgctgtcttggcggggcctgcggactcgctgtctctgctgctgtcctccaagctgtgcttcgatcgcaccttccggaggcatacaaaagccttgcgcattcaacatactcacttccatccagagagactatctccgacgcagaatggagtaccattatcgatgcctacgcggccgcgtcccgggcggtattcatactgcaagttccattaataggtgcctgttttctgttgtgcgttttcgttcgtga

SEQ ID NO: 22260 - DNA, 579 bp, Emericella nidulans
accctcgcccttgtcgcaaaaagtctaagcatgctttaagcttgagacctctgtgtccttggttttggcagtgagtaccacttccgtgtcgcccacgattttggcaagcccttttcatctgaggcaggtgtccaggtctttcagaatttcagctaccagcaaactggcaccaacgtgcgcaagcttatcgccgactcgatcgctctctttcgggaagcgcgtttcaagcaatctcctgctggcggcagtgccgacctttggcaattggagctgattatctcggacggcatctgtgaggaccatgaaacaatcagacgccttgtccgccaggcccaggaagaacggatcatgatcgtgtttatcattgtggacgctctgaaggggaactctatcctagacctcacgcaggcgagctttgagccggataacgagagcggtactggtgagatgaaattgaaaatgaagcgatatctggaaggattccccttcccctattaccttgttgtgcgggatgcgagagaactccctgctgttttggctacggcattgaagcaatggtttgcggaagttggtgatgtt

SEQ ID NO: 22261 - DNA, 458 bp, Emericella nidulans
acacctcttcaggaagcccgtggtcagatttccggcattgccgccaaagatgccaagaagtaccaggaggtgcttatagcattgattttggagggtgcttatgctctgaacgagccgaccgtggatgtccgtgcgagaaagaaggacaaggatgctgtaaagaaggctattggggaggcggagaaagatttcaaggttgcggttggcaaagaagtcaagatcaacctggacgaggaggagccactgcccgatgacaagtacgtctcgccccacaacagatagctatacgtactaatcttacttttcccagtgctggcggtattgtcatcaccggtggaggtggcaagattgaaatcaacaacacctttgaggaacgactgcggcttctcgagatcgatgctctccctgttgtgagggagacactttttggaaagaacgccaaccggcgtttccacgac

SEQ ID NO: 22262 - DNA, 720 bp, Emericella nidulans; identical to SEQ ID NO: 2557

SEQ ID NO: 22263 - DNA, 850 bp, Emericella nidulans
acactaacactccgcaggaaattttcaacaaccgcaggaaatcacggaatctttggctagtgccaatagacgtgttgaatggcgcaggacgctattttgcaatctacttatccaacagatattcttggcttctagccgcacagactgggatttcgctaatagaaccctgaaggagctccggctagaggtccaatcattcggcgacaatcttcctcatacaatgcaatgcctgatgcagtacgcagcaggtaccattgcacaggcgacgggcgatttagagacagccttggccgtttttcaatccccgctattcttattatccggtttcaacaaaaccgctcgcaatgaccctcaccgcgacctcgccatcctggcaaccatcaacatcgtcctcatcctcagcaacccagcccacccatctcattctcacctgccaaacctcctcgccacacttgagtctttctgtcgcgcaacgcctaataagtacatccaagccgcatatttcttgctctgcgcgaccacaaacaccgaatcgaccatccagactaaacaaaacctccagcaagccctccaggctgccaccgcaatcagtaacagccaaatcatatgcatgaccttaaccttcatgagctggaaatattttcgtggagtcgtgggcgagcaagccgaaaaaagcgctcgcgcgggccgcgcaatggcgggaaaggccagcgaccgtctttgggttagtgttacggacgatatgcttgcagagactttagaaaggcaggggaaaggcgaagaggcgaagagtgtccgagaggagggttacagggtcatgacgaacctgccaccggcattgagacggcct

SEQ ID NO: 22264 - DNA, 850 bp, Emericella nidulans
gacgatgatgaggaagatgacgaagttagcgatgaagaagatgaagacgaagatgaggaagaagaagaagaggaggaagaggaagaaaaagaggacgagagaaatgcctcaaccatatttatccgcaacctaccattcacatgcgatgatgagtctctctacgaccacttcacccaattcggaccgctccgctacgcccgcatcgtcgttgatccagaaaccgaacgtccccgcggtaccggcttcgtctgcttctggaagcccgagcatgcgcaggcctgtgtcagggcgcccctaaacagcaagaccctctcgccgcagaaaaggaaaaggcaaaaagggcacgatcatcaagcaatccgtcctgcagaatgagaatgccgatccaacgggccgatacactctcgacggccgtgttctccagatcagccgggccgtgagcaagtcccgtgccacacagctccgcgaagaaggtgtctcgaagcgactcgtccgcgacaccgacaagcgccgactctaccttctcaatgaaggaacgatctcacctaactctactctctacaagagcctttcgccttcggaaatcaagatgcgcgaagacagtttcaagcagcgacagaactttatccgcaagaacccctcccttcacttcagtctcacccgtctatccatccgtaacataccccgccacgtcacatcaaaagacctcaagcagttagctagggaagcaatcgtcggctttgccaaggacgtcaaggaaggtatacgccaaccactctcgagagaagaaatggaccgcgcgtccgaagagatgagagaggcagagaagctgcggaagaagaaaggtgtc

SEQ ID NO: 22265 - DNA, 472 bp, Emericella nidulans; identical to SEQ ID NO: 252

SEQ ID NO: 22266 - DNA, 714 bp, Emericella nidulans
cagtctgagtgacgtgaaatggactctttctagttcggccctcaatagcacagtgcggctttctctgccttcccaagcgcatctggacttgctcaatgcaggcgtaattggtaagcttgttcgtcttgtcaatttttctgtctcactgaccaaaaagacgatccgtaggttttaacgttactgaataattagttgctgaaattgcccagctattatggtttgaatgagatcgatctccaatggattgcccaggcgaactggacatatacaagtgatcctattcctgatctgtaaggaaccgtctcgttaccgatcggccaatctaacatttatcaggcttgaagaatatgagtctacttggctggtgttcgaaggcttggacacattcgctactgtcaccttctgcggccacaatatcgcctctaccaacaaccagttccgacagtatgcctttgacgtttcctcagccctgaaggagtgtacaggaggccccgtggtccggatcgattttgcaagcgcccctaacactgtagacgcaattgcggcagacccgaagacacccgtatggcctgtccaactgactgctcagctgcccaaccgctggcttatgcgcaagcaacagtccgattttggctggaattggggccctgcgtttgctccttgtggaccatggaaaccggcatatgtcgtccagcatgagaaaacacgtagacc

SEQ ID NO: 22267 - DNA, 590 bp, Emericella nidulans
ggtacaaacaataaagaccaccctctaccaattgatgtactgcccgggggccgcgacgtgcagaccccctatggatcgatccgtgtgtacgaatggggcccagagcacgggcccaaggtattgcttgtgcacggcattaccactccctgcatctcacttggcgggctagctcacggcttggtagaccgaggttgccgggttatgctgtttgatctgtgagtgccatggttcttgactggctcgagcttcctactaacttctgccattaggtttgggagaggctactcggactgccccgctgatcttccccaagacgaacggcttttcgcatctcagatcttcttggctttgagttcctcgccaatctcgtggacgggggccggttcaggcaaattctgtctagtcggttactcccttggcggcggtatagctacatctttcgcgtcattcttccctcaactcttgtcggctctcgtgcttcttgctcctgcagggttgattcgcgataagcatatcagcttccgtacccggttcctgtattctggaggcctgccggatcggctcctcaaatacctctccggtatccgatt

SEQ ID NO: 22268 - DNA, 850 bp, Emericella nidulans
cccttttgaacatggcccccgcccagatacgcgacctcgactacgctgagcgacatggatacactccggtgttgttaaagaaattaattcacgacgctggtcgtggtgctcctctcgctaaggtccagttccgccacccttacaagttcaagcacatcaccgagaccttgatcgccaacgagggcatgtacaccggccaattcatctacgctggaaagaacgccgctctgaccatcggaaacatccttcccctcgcctccgtccccgaaggtaccgtcatctccaacgtcgaggagaaggctggtgaccgtggggctcttggtcgtacctctggaaactatgttaccgtcatcggccacaaccccgatgagggcaagactcgtgtcaagctcccctccggcgctaagaaggtcatcaagaacactgctcgtggcatgatcggtatcgttgctggtggtggtcgtaccgacaagcctctcctgagtatgttattcggatttgtgcccattagctgacgcaggctggggcaattgttggagaacaaccgctaatgatctgtgaacagaggcttctcgtgccaagcacaagtttgctgtcaagcgcaacagctggcccaagactcgtggtgttgccatgaaccccgttgatcacgtaaggctctttttcccagtcttaagctggaatctggattatatctgacatgaattctttacagcctcacggtggtggtaaccaccagcacatcggtaaggcctcgaccatctcccgctacgccgcccacggtcaaaaagcgggtctcattgccgcccggagaactggtctgctccgtggtacccagaagaccaaggat

SEQ ID NO: 22269 - DNA, 748 bp, Emericella nidulans
gtacaaaaattccgccccgtagtagtgtcgggtccctctggaactggcaaatcaaccctactcaagaggcttttcgccgagtatcccgacaccttcggattctctgtttctcgtctgtaaaccccgctttcgcccaataactggagttctcatgaaggcagcgtttctgacatactgtcagacacgactagagcccctcggcctggcgagcaacatggccgtgagtactatttcacgacaaaggaggacttcctcgacctagtgagcaaaaatggctttatcgagcatgcccagtttggcggcaactattacgggacaagtgtgcaggccgtgaaggatatcgcggcaaaagaaaggatctgtatcctagacatcgaaatggaggttggttactgaaaatcatcctgcgaaagcgaagttgtggagtctctcagttggtagactaacgcctgtacttgattccaaatagggggtgaagcaagtgaagaaaaccgatttaaacgcgagattcttatttcttgcgccgccatctgtcgacgagctagagaggagattgcgtagccgcggcaccgagacagaagagagcttgcaaaaacggttgacgcaggcgaagaacgagcttgagtatgcaaagcaacctggcgcgcacgataagataatcgtcaacgatgacttggagtccgcgtacacggaattgaaggactatattgttgatggtgggaattttggatccgaggcatagacggcg

SEQ ID NO: 22270 - DNA, 850 bp, Emericella nidulans
aatccagaaggcttacaacgcctatgccggtattatgaagcgggaggcagaccacacgctcgacacggtagacaagcttcgcgcgggcccaatctcaatgccgcatgatcatgaatggaacgcatttgtcgcaaatacggacgaaatggtggacccgcgtatccgaatccgtgacgttgaaagcattacgtatcccggcaaggatcatccggctgctgcagaagtcaggtcagggatgctggaacgcaagagcaagtatctgaagagctatgctcctggatggttcgtctgcttacccgttggactgctcgatgtgctaatcctgctgcaggtatgttttgtcaccgactcacctccatgagtttaagtcggcggatagggttgcatggcagacaccagtaatgtcattataccttccagaacagaaacttggatcgcattcgcaaccggactcgacatcgcacaagttcatgctgaaaggacggcaaacgggaacgatgcacgagggtcactcctgggtatttagagcggagtcccacaaaagaatgataacctggtacgaggatattgatggaatgatcatatgacaggagaggcacgatatgcgtacgtcaggcgacatgtacgtaccgtcagtggtgccagtttccgaagcagcagtgacggagtattgaatgaagacgaagccgatcggaccccatactctgctggatcagttgtgatgcaacaggaacgtcctacatctcagcgccaaccaggtggcatgttacaccagccctgtacaaatcgatcgtcaccaacacgatccactgtctccatcaagcggagagagctcggagagagagatctg

SEQ ID NO: 22271 - DNA, 850 bp, Emericella nidulans
cactgtggcacgatagcgacgacgagcgcattaccatttctttggctgggaacaacagactgaggaaactgcgtgtcactgagtcggaagatattattagtgggaaggagtacatcaggcgacttcgccggcaatatctgcagctacatccgacgcctgattgggcgaaacctaattcgaacaagcaagcggacgagaacgaagatgattccaactatgaggatgagatggatacagatgaagagggggagatatccgcgcacgcgttggcgaacgttttgcagggtattgatttcacgaagattgagactgagagcgcaacgggcggtcgtccgaagctgcgaaaggaagtcattagtatcaacgattaaaggatattgggaaggaccaccggtgagtacttcagagaagacttcttctacctcatgcataactaatgtgcgcccgcaatccatagtctgctgtcaccctcactcaccttccaccctcattatccattgatcctctcctcaggcccagcatcaacactctcatccaccatgtctcccccgacgccccaagccctcacccactcctacatctctcacattcgccaaacgcccatcagcacctcggccttctccccggacggacatcagatctacgcgtccggtcgccgtcgctattaccacatctggaacctcaattccggcaaagttgacaaggttaacggctctgccgaccgccgcgaggaacagaaatctatggaacgcttcaagctctccccctgcggccgcttcatcggtcttgtcggctcaacccgtaaaggcggcggtgtcattaacatccacaataccgtcacagcgcaatg

SEQ ID NO: 22272 - DNA, 443 bp, Emericella nidulans
  unsure (1)..(443): unsure at all n locations
aaaaagtctgcgagnatgcgctctccctgaagaaagggagcggaccttacgtcgtcactgaagnaggcgcgcaggggcccgaggacaaggtcatccaggtaggcagcattcctcccacttcgaatcctcccaaagttagtgctcgctggttgactgatgagaatgcagcacaactctgaaggcgaggtcatcgttgacggattcacggtatacgactttggcaaactataccgatcgtgcggcacatgcggcgatatccagcgctcagcgacgattaccaacgtcgttgccgtatcagggagcactattgccggggcgaatgggaactttggcgatgtggtgaccattgacagctccaactgcgcgacggatgtcagtgccatctgcaccacgtacgaagccgatgccgacggcggcgagcccgaggaggtctcgaccgatgt

SEQ ID NO: 22273 - DNA, 850 bp, Emericella nidulans
acagcgactagtctctgactccgccaaagtgaaactttggattcggatcgtgcggctataccttgaggaagacgacacaactagtgccgaggcattcctcaacagaataaaaaacctgccgagcaagatcgaagaccacgagctgaaactgcacttccggctttcccaagctcggattcaagatgcccgcagacgttttctggacgccagtcaggaatacttcgctgttagcctcgccgctggcgtagatgagagtgacagactccaagcccttgcggccgctatccgctgcgctgtcctcgcaccggccggtccacaacgctcccgcactctagcaacactgtacaaagatgaccgcgcgacctccgttgaagaattcggcatcctggagaaaatgttcctcgaccgcttctcactcagaagaggtatctgcgttcgcgcagcgcctagccccgcaccagctcgcacaaaccgcagacggaacaacagtacttgataaagctgttgttgagcacaatctcgtggccgcgagcaagctctacgagaacataaagaccgaccgcgctaggcgctattctgggtctgcaagctagtggggatctgacggctggtgagaaggccgaagcgtatgcagccagaatggtagaacaagggcggctgagcgggagtattgaccagattgatggtataatctacttcgagtcaaatacgactgctacggggagacatattcggcagtgggatgctggtgtacaaggtctttcggagggggtagagcgagtcgcgactaacattgccgagggccatctggtacgttgacctcctgacgtgctgcagcctcaatgcagaa

SEQ ID NO: 22274 - DNA, 544 bp, Emericella nidulans
cagtaaactgatctgatcccagcaatctccacctcaaaggtcctcctagtgccatactcgaaatggcatgtgccgcggtaccacgaatggatgaaggacgaggtacgccggccacatatagccaatcccctcatatacgccccaggaattctaatgagcaagtaggagatccaacaagcaacagcctcagagcccctctccctctcagaagagtacgccatgcagcagtcttggcggaacgacgctgataaactaacctttatcatctgtcttccggtggcacctgagacggataatgggaatctaagtctcactgacgaggacgatgctcccacccgcatgattggggatatcaatctgtttctccgagtggaggaagatgaagaagatggagacgaggaaaggaattctagcaaccctcagatcatcggcgaaatcgagcttatgattgccgaaaaaaaggatcaagggaagggctttgggaaggctgcgctcctggcattcctgacgtatgttattgagagggagagagaggttctgggag

SEQ ID NO: 22275 - DNA, 850 bp, Emericella nidulans
tggtcgcgacgcggagcggctctagcaggccacccgctcatcgacaaaattgcgtttacggggtcgaccgtaacagcacgcgagatcatgaagctcgatggggagactgtgtagaacataaccatagatactggcggaaaatcaccccttagggagttacctggcgctgacctggagcatgctgttaagtggtcgcactttggtatcatgtccaaccagggacagatgtgcaccgccacttcccgaatctacgtccatcaagatatattccagctgttcctgtccaaattcaaggccgcggttgagacgacttccaaaatcggcgaccaatgggacgaatctacctttcaggggccgcagattacacgcgcccagtacgaccggatcctttcctatatcgagaccgcgaagaaaggcggtatggccgtagtcaccggcggctcagcacatgcgccttcgagcgagaagaacaaggacggctatttcatccaaccgactgtgttcaccggcaccgatgactcgcatgctatcgtccgtgaagaggtctttggcccggttgtggtgatcctacccttcgcgtccgaagaggaagccatcaggcgtgcaaatgacacaacatacggacttggggcggcagttttcacgtgcgatctggaacgtgcgcatcgtgttgctgctgagatagaagctggcatggtctgggtcaacagcagtcaggactgtgatccccgggtgccttttgggggcgtcaagcagagcggtattgggcgtgaactgggcgaggcgggcctggaggcttatacacaggttaaggcctgtgcatgtgaacatgggcaacaagctttagaac

SEQ ID NO: 22276 - DNA, 850 bp, Emericella nidulans
ctggatgctcgacaactccattgcgtccatgcaaaaccgcatgttctctctcttcctgatcatcctcctcccacccatcttcctcaactccaccctccccaagttttatatgaaccgcgccctctgggaagcccgtgaatacccctctcgaatctatgggtgggtcgccttctgcaccgccaacgtggtcgctgagatacccgcagccatcatctccgccacggtctacttccttttgtggtacttcgctgtggggttccctgtcaccgcatccgcctcgggctatgtcttcctcatgaccatgctcttcttcctcttcatggcatcctggggtcaatggatttgcgccttcgccccctccttcacggttatctccaatgtgctgccgttcttcttcgttatgaccggtctcttcaacggtgtcgtccgcccctacgatgactaccccgtcttctggaaatactggatgtattatgtcaacccggtaacctggtggattcgcggcgctatctccgctatcttccccagcgtcgagatcacctgcgccgccactgaagcgacccacttcaacccgccccctggctcgacttgctctgactacgcctccaacttcgtgaacaacattgccggcgctggatacctggctaacccggatgcgacaagtgactgtcagtactgcccgtacgagaatggaacgcagtacatgagcactctgaatgtgcggcccgacgacaagtggcattcttttgggatcttcctagcctttgtcatcatcaactgggtgcttgtttacttcttcatctacaccgttcgggtgaagaagtggtcattcggagtgggtctctgtttg

SEQ ID NO: 22277 - DNA, 850 bp, Emericella nidulans
atcttccgagtccgagtccgactcgagcgacagcgatgaggagatgaaggatgcctccagcagcgagagtgatagcgagagcgagagtgaggaggagaagaaacccgctaaatcggccaaggctgaacccaaggtggttaaaaaggccgagtctagcgagtcagagtcttctgactcctccgattctgattccgacgatgaatcgtctgaggaagaggaggttcccaaggccaaggctaaggctgctgagtccagcgacagcgaggactctgactctgaaagcgaagaggaagccccggccaaggctaagggcgacgccaagacctccaaggaagagtctgattctgactctgacagctcggagagttcttccgattctgatgaggagtctggtagctccgggtccgagtctgaggacagcgacaagccagcggattctaagaagcgcaaggctgaggaagagcccgctgctgcttccaagaaatccaagactgaggagggtgcctccgctaacctctttgtcggcaacctttcctggaacgtcaccgaggagtggcttcaccaagagttcgagcagttcggtgagctgtccgcgcgtattatgaccgaacgcgacactggccgctcccgtggattcggttatgttgaattcaccaacgctgccgatgctgccaaggcttacgaggccatgaaggaacacgagattgacggccgcaagatcaacctcgactacgccaccggacgccccgccaacaaggaccagggcggcttcaaggaacgcgctcaaaaccgtgcccgctcttttggcgaccagaccagcccggagagcgacaccctctttgttggcaac

SEQ ID NO: 22278 - DNA, 850 bp, Emericella nidulans
gagcttgtggatcttaacgtctttgtacagtgtcagcggatcgccgagagtctccgcaatggtgaaactaaggatgctctacagtggtgtaacgagaataaagctgccttaaagaagagtcaagtaagtaagagccaagctctgctctaattcaaccatgacctaatatggtgtatgcagtacaatttggagttcgagttacgactgcaacagtacattgagatgatcagaacgagggacagggcgaaattcgtggatgcaatggtgcatgcaagaaggtacctggcaccgtatgacgaaactcaatcagcggagattcgtcgagctgccggccttcttgcctttcccccgaacacaagagccgaaccctacaaggtattttagcccggtccccaagaaaacctaatctaatgtgcaatagtcaatgtatgcctccgaacggtgggtgtacctctctgaactatttattcgcacgcatcatgagctcctctcattgccttctcggccattgatgcatattgcgttatcagccggcctatctgccctaaagacccctgcgtgtcattcagctaacacctcttcgagctcaaactctcattcgaccgccacatctgtatgtcctatatgctcaacggagttgaatgagcttgctcgaaatctgccgtacgccaatcatacgaagagttccgtggaaaacgacccagtagtcttgcctaatggcagggtatacggtttacatcgtttgttagacatgagcaagaagctcagctccctcgaggcaggcaaagtcagagatcccacaaccggtgagatcttcaatgagagcgaattgaagaaggtgtacataatg

SEQ ID NO: 22279 - DNA, 537 bp, Emericella nidulans
aacgttagcgcatggaacaggatcgacaaagataatgctgtaagatcaccaccagtccatttagacggcccatgagacatgagtgaaagaaattacaagtgcgaaggcccttttggtcattgacgaccaagtcggccttgccaccgtcgttcgcgcctacagcaccaacgacttccgtaacaacatggtcgcccacgctgctatcggcaaggcgtttgacatccccgtgctgacgacctcctcggacgaaggccccaacgggcagatgcttaaggagattctcgatatgtacccgaacaccacggctgtccgccgccagggcgaggtcaatgcatgggataacgaggagttccgcaacgcctcaaggcgacggggaaaaaagcagttgattgtaggtgggattgtgacagaagtttgtaagtctctatagttatttccgcgcttaactcgatcttacactgactggattttgcaggcactgcgttcctcaccctctccattgtcgatgaagggtacgaggtatatgccaacgccgac

SEQ ID NO: 22280 - DNA, 850 bp, Emericella nidulans
ttttcctcgtggtgaacgcggtcggtttgttcgtcggtattgtctacaacagccaaaccccagatctctatgagaataatgcccaccacaagatcggctgggtcgcgacctgggtgatctctgctcaggtcgtgatggctctgatcttcgcctacgccggtagaggagagaaggtagagaatgcctacgagcgtgcgcaattcttgcccgtgtcgaccgacgacatggccgagactcctacgactctccccgctggcattcgccatgaataccgctggtcgagggacagcggtcagggcactgagcggaacacggcgtcccttcatagccgcgctagctcgtcttgcccgtcgccttcggatgaatacgatggctttgagaagcccgacgaggatatccccgaacagtctttggaatcccgaggtttcatgcacaccggcgtcctcgaccgattccttgcccaccgcgttccgagcttggtttccgtccgtgctcttcgaatcctcaatttcgtgtacaatgtcattgacagattgattctgccgcttggttctattgcgcttgttagcggcggcgtgacttacggtggtatcatggtaaggatagcaacttctgtgtaatgggccttactaacaacgcacagcgagacagagaagtcttcaacggcctcgcgcacttcatcaaaggcggtatctttttctggtacggtctcatcaccttgggccgcatgatgggctgctgggcggacttgggctgggcttggaatgttaagccaccgcgcgagattgttggctggaaaccaagatttgcagcggcgagttcaccgaatccgcggccatcttctcctgtt

SEQ ID NO: 22281 - DNA, 850 bp, Emericella nidulans
caagcaagtcggatatcaaccagattacacacagctcctccaacacatcgttcgtgtgaatccggaaaagggtgctgagtttgcgactcagcttgccaacgaagagtctggcgcactcatcgaccttgaccgcgttgtggatgttttcctttcccagaacatggttcagcaggccacttctttcctcttggatgctcttaaggataacaaacctgaacatggccaccttcagacacgcctcctcgagatgaatcttgtcaacgctccgcaggtcgctgacgccatcctcgggaatgagatttttacacattacgaccgtccccgtgtttcccaactctgcgagaatgctggtcttatccaaagagccttggaaaatactgacgaccctgccgtcatcaagcgcaacattgttcgcacggatcaactcagcaccgagtggctgatgaacttcattggccgtctttctgttgagcagaccctcgactgcatggacacaatgttggaagtcaacatccgcaataacctgcaagctgtcgttcagatctgcacaaagttctccgaccttcttggacctagtcgtttaatcagtcttctagagaaatatcgcaccgtcgaaggtctgtactattaccttggaagtattgtgaatctttctgaggatcccggggtacattttagggtcattgaagctgccactgcgatgaaccagatctcttaggttgaaagaatttgccgtgaaagccacttctacaccctgaaaaggttagaaattcctcagggaaactgtttgaccgaacattgccgttatacttttttgaccattaactttggcccaactggcttggacctt

SEQ ID NO: 22282 - DNA, 732 bp, Emericella nidulans
cgcgggatgtccaatcccacaagaaaatgctgtgggatcgattgcgataatgaagctgggaccttacaatgcccaacatgtctgaagctggatatcaaaggcagttacttctgctcccaagactgcttcaagaagaattgggtaggtcgcatccgcgccgattctgatcgctgagcaccgaagtttgattgtgtccagaccacgcacaaggctacgatgcacaaaccacgaaatggtaactacctctttcggctggaaggtagcggcgacttagccagttgtttactgatcacgatacagatcgaggactgttcaacccttttccgacttaccaatttactggctctgttagaccagtctacccactctcgccgcgacggcctgtccccaaaataatcacccatcccgattgggcggagactggcatcccaaggcgggaaatgcgcttaagcaggtcaaaatgggacctcttggatgctaagggccagcaggctatgcgcaaggtgtgccggctggcgagagaagtcctcgacataacggctgcagcagtgaagcccggcgttactacagactacttggacgagatctgccacaacgcttgcattgagcgaggggtgagtcaaggccactctaggcgaactttgtaaggaggtgtactgaaacagccagcagtcatatccttctccgctcaactacaaccactttccccagtgaatttcccacaatcatagg

SEQ ID NO: 22283 - DNA, 850 bp, Emericella nidulans
tgccatgtcgttgcttcccgacgtcttatctaggatttcccactccagtccttcaattcgaaagaaggcagtagtatgcttgtaccgcctggccttggtttatcccgaggctttaaggctagcatggcctaggctgaaggaccgtttgatggatgaaacggaagacagcagtgtcactacagctgtactcaatgtcgtatgcgagcttggatggcggaggcctcatgatttcctcccacttgagccaaggttctttgagcttttggtggaagggggtaacaattgaatgtcaatcataatcataaaacttgtgagtttgttttatggacacttggcatttggtaatgctaacttccctagtttgcaacattgactcctctggagcctcggcttgtgcggaaactcatccggccgcttatcaatatagtccagacgaccaccgccatgtcattgctctacgaatgcattaatggaatcattcaaggtggcattttagagggagaaggggcgcttgaagactcgcatgagattgcagatctttgcgtgtcaaagctccgaggcatggttgttacagatttcgatcccaaccgtgagtgttccctattattatccctatgctgtgctaacggataccagtcaagtacgtagcactgctcgcatttagcaggattgtagtatcccaccctcatctgatttcgatgcatcaggacgtcataatgaattgtctagaggatgcggaaatctcgatccggttgcaggctttagagctggcggctcgatggttacaggagacaatcacgtgcacgctatgtagtgagaactacaactttcaaggatccaatccaatacg

SEQ ID NO: 22284 - DNA, 671 bp, Emericella nidulans
aagctctttgaggctggtatcgagaagaggtttaaggatgggggtgttacaattgcgagtatcgtcaatgtcatgaatacgccttcccccgaggacgaggcggccggtatcgatgaagatgggctcttcaaccaggccagccagttcgtcgggtctgtcttcagccgtaagttgcggcatgccgtgaactcctggctccctgcgcgtgaaaccgtgcaagccgcctacaccgaccggaagaacgtgcacgccagcgggaagatcatggttctgcctcaaggcggcgtgccctggaaggagcacctgtacaactttgagaaggaggcaaaggcggctaatattaacggcaatgcggaggacgccgaggttgtgtatgtgctgtacccagagagcgcggccgaagggtccaagtggcgtgtgcaggctgtttccgtgaatgaggggagcttcgtctcgcgcaagcctttgcccgagaagtggcggggtgtcagggatgcagatctcgatggagttcttgctggtgaaggggcgggtatccagagggggcggtgtttgtgcatgcgagtggattcatcggcggccataagaccagggagggggcatttgctatggctgctaagggctctggaataggcgttcataaaaggtctagtggagtgttacgggtttat

SEQ ID NO: 22285 - DNA, 850 bp, Emericella nidulans
ctgccagcatcggtccaggcctccctcagaaatccattccgcttatggttcaaagcgtacgggatgtcagggtcgaattagctgcaaaagacatggatcgactgcgatcacggattcagcggacccgaagcaatcacagagatctgagttcagctccggtcgttcccagctctgatgctatgagtgagacgggtaggatgccacaggctgaaattccagacttggtggcagaggccgagaccaagccatataaagttcttccgttcggccttgatgccacagtcaatatgagagaccttgacccggctggtaagattaagtttttatttcccggaaacccaaatcgctgacggctactagatatggacaagttggtgagcattaagggtctagtgatccgagctacgcccatcattcccgatatgaaagaaggttagtgcatttctccaaactcagagagggccatgctaacccttcatcaagcgtttttccgctgtcaagcttgcaaccattcagtccaagtggatatcgaccgcggcaagattgccgaacccaccatttgtccgcgtcaggcatgccaggagagaaactcgatggaaatcgtgcacaaccgctgtgtctttgccgataagcaggttatcaagttgcaggagactcctgatagcatccctgacggccagacacctcactcagtttccctgtgtgtttacgacgagttagtagatgtgtgcaaagcaggtgaccgcgttgaggtaaccggaatcttccgatcgaaccctgtgcgagtcaaccctcgccagcgaacccagaagacactcttcaagacatatattgatgttctgcacgttca

SEQ ID NO: 22286 - DNA, 659 bp, Emericella nidulans
caactattttcaaaaccctgaatatttcatgttctacacccttttcaacacttccctcgccgaagaccgcgcatacggcgtgcactccggtacaaatgcaaactttgcctgcgacacccgtaacgcaacaatggacctgcaggctgactaaagcgggaaagggttcggcgaaccgcagaaccctcatgcgctgggacaagcgtcataagaagtatgttagtcgccaaaacgacgaggacggatccaagggcaccaaactcgtccgtggtgagagcggcgccaagatcgcggctactttacgcagcggccggtttgatgcgtggaagaaggggaagagagtgggcaggttaccgagagtcggcgaggcggaaacgcctggtctggctgcggaccttggtggctctggtggttcttttggtgggaagagattcaggcacaagagcgagaaggcgcccaaggctgcagacccgttgagaggggattatgaaaagatgaagaagaaggctgaggctgcgagggagagggccgctagcaaggttgggggcgtgacgagtggaggaaagagcgagattaggaatacggacgatatccgcaaggcgaggaaattgaagcagaagaggagagagaagaatgctcggccgtcgaggaagaagtagacg

SEQ ID NO: 22287 - DNA, 520 bp, Emericella nidulans
tcgtcgtcccatatgcagtctcgtctccacatatgtccgcgactcacgctgcattgtgctgctatcgtctccctcatcccttcgcagactcctagacatccgctttacagatctctctcaccgctggaccctcgtcggctgcacttggctgcaatacatcattggtgcccccgttattatctcctggaatctcctctccactaacatagccggacacacgaagcgctctattgccaacggcctctggttcacgctatacgcgagcgggaacgttgcggggtcgaacattttctttgcaaacgaagctccccgatatttctccgctttgaccgggttgctgatctgttacgcgggtatgattttgctcgctggtgttgcgtacgccgttatgaagatcgagaatgtaaggcgggaccggaagatgactgctgaggagagcatcatgaggcaggatagggccgttttggatgggttcaaggatatgacggatatggaatcaaaggattttcgttatgcgctt

SEQ ID NO: 22288 - DNA, 838 bp, Emericella nidulans
gtgagattgacatataagaggagtatttgagtatcaaaggtgattggaaaggataattgagagaaatggatgttactagttatgtaatgaggcagaaagtattgattggagagagaaacggagggataagcatgtaaatgggagaatagattagatgtgcaatgccataggaaagaagaggttctccataaagatttcaaaacacctacaatcaagccctttctccatgtctctcacagcatcgaagcttgttgtgggcatggcctcgcgagccctacacatttacgatctaaaatcactttcgctcttaacgggacagtcggaagaaggtgtggcgccggccaaggttgaagttgagccatggcagcgacgggaaagcagcctgaagtttatgacgcgctgcgttgcttgcatgcccgatgacgccggatacgcttcatctagcatcgaagggcgggtggctgttgagtggtttgatccctcagccgagtcgcaagcgcggaagtacgccttcaaatgccatcgacagacgtcggatgatgtcgatgtggtgtatcccgtcaactcgctggctttccatccaattcatggaacattcgcatctggaggcggtgatggtgtggtggccctttgggatggcatcgcaaagaggaggatcagacagtaccagaaatatccttccagtgtagcggctgtggcatttagctctaatgggaaatacctcgcaattgccatcagcccaggatacgaggatggaaaggatgatcttactgacgggacggtcaggaactatgtacgcgaactcggggtgacgctagctatgggaagaggtgcgaga

SEQ ID NO: 22289 - DNA, 788 bp, Emericella nidulans; identical to SEQ ID NO: 346

SEQ ID NO: 22290 - DNA, 850 bp, Emericella nidulans
agaagttcgattacatcgtttatcctagccgcagtatccagaccgacggtatcaaagctttctctgttacttcgtttggtttcggtcagaagggtgctcaggtcattggtattcatccgaaatacctgtatgccactctagatcgcgcacaattcgaagcatacagagccaaggtcgagactagacagaagaaggcataccgctacttccacaacggcctggtcaacaatagcatcttcgttgccaaaagcatagctcctatgaagcgaaacttcaaagcaaggtcttcatgaatcccgattaccgtgtggccgcagacaggaagctttcagagttagactatccacctaagccccctgttgctactgacgcaggatctgaaagtaccaaggctgtgattgagtccctggcgaaggctcacgccaccgagaactcgaaaatcggcgtcgatgttgagtctatcgatagcatcaatatctcaaatgagactttcattgagaggaattttacggccagcgaacaacaatactgccagaatgccccgtcgccgcagtcatcgtttgcgggaagatggagcgcaaaagaggctgtcttcaagtccttgggtgtctgcagtaaaggtgctggggctcccttgaaagacatcgaaatcgagaatgactctaacggggcgcctactgttaaggtaagatcactcaacatgtttcatgttcagttttacatttgagctaacgatttctagctccatggtgttgcggccgaagctgctaaagaagctggtgtgaagcatatcagtgtcagcatcagccacagtgacatgcaggctgtcgcagtggcaatctcacagttc

SEQ ID NO: 22291 - DNA, 850 bp, Emericella nidulans
ggtgccagacgattccgatcgcggtcatccccgactttctaatggccactctcatccttcgatggttagaacgaagtcctcagatgatagcccgacatcgccaggggccaccgatactgccaccacttcctttcccctcaacgacattgattatgaatctgacccggcagcggtggcgcaagaactgaataacctggctgcattcggcggatgtcaatggatgttactgcgaccggcgatcccgatcttccaagtttcaatttccccgttccctcgatagccccctcaccctctgccgatgaaaacgatacctcgcgactattttgggttcctgcccgcctgcatccggagctggctccgaaagagtttaagtcgtttctcgagagtaaatcggaacatatcaagcgcagatcaggcgaattttccacattgagccctgaacgccaaaattcaaatagttccctcactcgaaagcggtctatgttatccaagcaaattgacaatggccaaggctacacggatggtgcagagcggttagagcgcaaacggtctcagaatagagatcaccaaggtccaaatctgcaagaaatagaaagtctagtgggcgaaacctcgcaaaagaccccgattgccgccactcttttggaaactgttcaggcccttcacatctgccccgaggatgatcggccaatccttgctgcagcgccgccgggtcacagtctcaggcgttctacgagaacccagtatcggaaggcttggagccttgagaagggtgaacgaccttcctatgcgagaagaactggtcggattgctgattcgagggatatgcctgctcgctcactgccccttc

SEQ ID NO: 22292 - DNA, 691 bp, Emericella nidulans
gactttcttactttcgctagaattgctattgtcagtactgacaaagtgagtctcgtgtgccccgctaactatgcatgaacgtcatatacttatatcacgcgtccaatagtgcaagccgaaggtgagcggatacaagccccaatcagtcttgcggcctagtcactgactcttcttctccatctagaaatgtcgtcaagaatgtaaaaagtcctgccccgttgtccgtaccggaaagctttgcattgaggttactcccgaatccaagatcgctttcatctctgagcgcctctgtattggttgcggtatctgcccgaagaaatgcccattcggcgctattcatatcatcaacctgccgaccaacctggagagtcaggtcacccaccgctactccgccaacagcttcaagcttcaccgtcttcctatgccccgtcctggtcaggttcttggtcttgttggaacaaacggtattggaaagagtacagctttaaaaattctttctggaaaattgaagcccaaccttggccgttatgataacccgccggactgggaggagatcctgagatatttccgaggttccgaattgcagagtaaggtttaccccttcaaatcggcttgtatccgctctgaccgcaatagactactttacgaaggtgctggaagatgacctcaaggccgtcgtcaagcctcagta

SEQ ID NO: 22293 - DNA, 850 bp, Emericella nidulans
tccgagtactccctcactcagcatctggcaaacaacctcatcgatctctatatcaacttgccgtctagcaaccggttccgacgacccgccaactacatgagcaagggttaccgcacccgtcgtatggctgtagactaccagacgccgttggtgaccaatgtcaagaacgcgaagattttgatcgaggctattgctcgccactacgcactcaatgtgcagactatcgactatcagaccagccaccggtcgattatcctccctggtctaattaacgttggcgctttcgtccctggccttggaagtgcagactccaaggattttgaggctgtgaccaaggcttctatcgcagctggtttcagcatgatccgggtgatgccagttggcgtcgactcctccatcacggatgctcgcaccctgaaacttgtccagcagaacgccggcaaggcctctttctgcgattacaacttctcggttgtcgcaacttcctccaactctgctgaagttggacagttgactggcgaggttggctctttgttcatcccattcaaccatctttctggaaacatcagcaaggttgccgctgttaccagccactttggcgcatggccttcgagcaagcctatcattacagatgctaagtcgacggatctcgcgtcggtcttgcttctggcaagcctccacagccgcaacatccacgttatgagcgtcacgtctaaggaggatattgggcctgatcgcccttagcaaggagaagggtctcaaggtcacttgtgatgtttccatctactgccttttcctgtctcgggatgattaccctgaggctgcattcttgccgacggcagaagatcag

SEQ ID NO: 22294 - DNA, 848 bp, Emericella nidulans
gtaacagccctgtccgccggtacgccgacatcaccacagacggctgggactaccagcgccacggcattgtcgcaaccctctccctcgccgaccatatccctcctccgttccccatcggcacgcggacagcataccagcgcttcctgcctgccctcggtggcccaatcgcccttctcccgctcccaaacaacaacgctacccttgtctggtccacgacggtcgaaaacgcagcttacctcaagtccctatcgccgggagccttcattgccatggtcaacgccgccttccgcctgggcatgccagatttacagtacatgatgcgcatggagcgcccctcgtcctcgtcggtcacgaacctcgacgaagacctgcacgagagcgaactcacttggcgcctacagcacactccatccccctctcatctccctccaatggtcacaggcgtgcaagaaggcagcgtcgcctcattcccgctacgtttccgccatgcgtcaacgtacatctcaccgcgcgtagccctagtcggcgacgctgcgcacgtcatccaccctcttgccggccagggcctaaacctcggcctgggcgatgtggcctccctctccagaacaatcgagtacgctgtgacgcatgggatggacataggcgatatcctcacgctcgagagatatacggctgagcggtacgccacgaacgcaaagatcggtggcacctgcgatgtcctgcacaagctttataacgtgcccggccaggggcctgttgcgtgggggcggagtctgggatttgagatcattgaccgagtaccctttctgaaggggtttctgatgaggaacgcggattaaagagggtgt

SEQ ID NO: 22295 - DNA, 850 bp, Emericella nidulans
gggctaagctcacaatatctttgtagatcaagatgctgccaaatgcacattatatggacaaccaagccgagatccaatggtccatgcggtctgttctcatggactggcttgtgcaggtccaccatcggttctcactgctccctgaaactctttttctttgcgtcaactatatcgaccgtttcctctcatgcaagattgtttcgcttggcaagctgcagcttgttggtgcgactgctatttttatcgccgcgaaatatgaagagatcaactgtccgtctgtccaggagattgtttacatggttgacggcggttacactgtcgatgaaattctgaaagcagagcggttcatgctaagcatgctccagttcgagcttgggttttcaggacctatgagcttccttcgcataatcagcaaagctgaccattactacctcgaaacctggcccccttgcgaaatatttcctggaggttactatcatggatgagcgattcgttggtagtcctgctagtttccttgctgccggcgctcattgcttggcgaggttaatgctcaagaaaggcacctgggtatgttttctttgatctgtttatgtatacgtgactgacgattcattagtctcctgctcatgtgcattacgccggttatacttactctcagctatacccgctcgtctctctcattgttgagtgctgtgagatgccccgcaagcatcattcagctatttacgataagtacaacgatagacgattcaagcttgcttctgcttacgtggaagccgaaatgaggaagaacttccgtcttccagagccggctatcgaccgcaaaacaacacatggtcaaggacgggtt

SEQ ID NO: 22296 - DNA, 850 bp, Emericella nidulans
gagagagcacggaacaagcttcttcttgagttcatcaccattcagcgaggtgttacagataaggaagcctccgagattcagaacaagatggctcgaggaggcatcacgctcggcgagcctaactctaccgatgacatctctcgaatcctcaagcgccgcggccagagaatgttcgagcagaccggcaaccaggcgaagttggaacagcttgatattgattcagtgctcgctaatgctgaattgcatcaaactgaacaggctgagggcattcaagcagacggtggcgaagagttcctcaaagcatttgattacgtcgacatcaaggttgacgatctcacatgggacgacatcatacccaaggaacagcttgaggagattaaggcagaagagaagaagaaagccgacgagaaatacctagcagacgtcattgaacagaatcgaccgcgcaagcgcattgttgcaggtgatgagcgagatacccgtgccgaaagaaaagctaagcgacaagcacgggtccaggtcagtatgaacgatgatgatggagatgactcggaaccaaatgcgaaagcggatccgaagcgcccgctagtggagaaggaatatcgtcacctccttcgagcctttctacgttatggtgatattgaggaccgagaagaggaagttattcgagaagcgcgtctaacagaacgcgatagggacactgttaaaagtgcactgcgtgagattaccgataaggctgcggagttggttagagaggatgttgcacgactggaggctctcgaaaatgccggcaaggttctcaccaaaaaggagagaaaagccgtgctgtttgaccttcacggtgtaaagc

SEQ ID NO: 22297 - DNA, 525 bp, Emericella nidulans
agacaagaagaacagaaagagtcgacaacagtctccctctgctgagaaagctggggaagagacggctcctgctgttcctgccgatcctcctgtctctgatccagccgtcgcggccgtgaaccaacaccagctgaggatgacaagcctgccacagaaccgattgaggaggctaaggacctggagcctcctcaacctgtagaaccggcctctacagcagagccagccaatgaggaaaaactggcggagcccaccggggaaccttctgtagcaaaaccagctgaagaagcgccagttttagtggcggctgaggagccacccgctgcagagtctggtgaagctgaggtttcagcccaagaacctgttgacgagcaagtgcctccctcaactacgactgaagaggaagcacccgccacaaatgctcaggagcccgagcccgcctcggcaccggccgaaggaacacctgttgcggaaactcctgctgttgaagtcgaagccgaacctgtaactggagaatctacgccggag

SEQ ID NO: 22298 - DNA, 850 bp, Emericella nidulans
gtggaacagcggccaacctgatctctatcgcgagctgcctgcgcccgtacgaggcggttctggccgtgcaaacgggccatatcatcgacaaggaggctggagccattgagacaacgggacataagatcatcatggtgcctggggtacgggggaagatgacgccagagaacttagagactgtactcgcaaggaacacgttctttccgcatatggccaaaccgagattggtgtatatttccaacgcaacggaactggggaccatctactcacaagaagagctgaaaagactggcggatacctgtcgacggcgagatctactgcttctcgtagatggagcacggctaggagtagccttgacggcgggcggcaacaatgtcaccctccgggatctggtcgattacacggatatcttctggattggagggaccaagatgggagccttgctgggagatgccattgtggtacggcgagggctggcagagggctttgaggttcacatgaagcagcgcggggccttactttccaaatcacgagtcatgggaagcccagttcagcgagctgttccgtgacggattgttcttcgagctggctcagcatgcgaatgcaatggtcaggaagatagctgaccagtttctccagaggggctgggagctggccgccgagacggagactaaccaggtgtttgtggtagtagatgatgacaaactggcacaattgcaggaacgcatccggttctatgcgtgggaacggcggcctggtgcgacagtagttcgcatagtgacatcgtggccacggccgagaatgaagtggaccgactgtgcgagtggatcgcctgtaattagaatcaatc

SEQ ID NO: 22299 - DNA, 594 bp, Emericella nidulans
gccctcctgctcaccataatattctctgcctatgcctatggtgcaaatgtgaaaacaacagggcaaatggtttctttccaagtcaatctaacttggagcgattatcagcctgctgggattccccgaaagatgatcctggctaacggccagttcccagcgccggcgttgagattgaagcagggagacgatgtcgaattcttggtcaacaatgagatgcctttctccactactgttcactttcatggtaacctcctccttgcacaatccatttgaaagaattgctagggaactgacgcagtgtgccaggcattgagcagcagggtaccccctggtccgacggtgttcccggtctttcgcaacggcccattcctcccggtgaatcgttcctttataaatggcgagcaacgaactatggaagctacttttaccacgctcacagccggggtcagcaggaagatggtctttacggagcgattcatattctggctgatgattcgattgaaagaccatttgctttgatatcagaggatgaacaggagattcagtctatgagaagggctgagagcgaatctatccctatcatgctgtcggatg

SEQ ID NO: 22300 - DNA, 850 bp, Emericella nidulans
gactccaagtcggaggaggattgggcttatgtcggcgaatggtccgttgaggaacccaccgtctacaagggtattgacggagacaagggtctggttgttaagaatgtcgcggcccaccacgccatctctgccaagttcccgaagaagatcgataacaagggcaagactcttgttgtccagtatgaggtcaagccgcaaagtgagtaattctccttgttggaactgacgcatggtgttgataacctctttcagactcccttgtttgtggtggtgcctacatgaagctgctccaggataacaagaaggctcttgcggacgatttctccaacaccaccccctacgtgatcatgtttggtcccgacaagtgcggtgccactaacaaggtatgaccagccgctaaagttttatccatggcatccacttactttctgcaggttcacttcatcttccgccacaagaaccccaagactggtgaatatgaggagaagcacctgaaggctcctcctgctgctcgcaccagcaagctgagctccctttacaccctcatcgtccgccctgaccagtccttccaaattctcattgacggcgccgctgtcaagaacggcactctcctcgaggacttcaaccctcccgtcaaccccgagaaggagatcgacgaccccaaggacaagaaacccgacgactgggtcgatgaggccaagatccctgaccccgacgctaccaagcctgatgactgggatgaagacgccccctacgagattgttgatgagtctgccgagaagcctgacgattggctagaggatgagccgaacagcattcctgaccctgaggccgagaagcctgaagactg

SEQ ID NO: 22301 - DNA, 850 bp, Emericella nidulans
tctcaggggcttgcgatgacgttctcccacagccacagaatgaacaggaacgaactgaaacactgatggattaacaggccacgccgattcacaccgcgaaagccctctacgattatacacgtcagacagatgaggaggtatctttctcggaggatgcgaacttggtggtgtacgacacttcggatccggactggaccttggttggagtcaatggggattttggattcgctccgtcaaattacatcgatatccttgacgactctgtagctcatgcagctcccgcccagacctctgcatcgccggaacctccttcggcggctgcagcgtccccagcgtccccagctcccgcaccggcacctcctagcctcccgcagcgtccagagccggctcccgcggaggagcctagctcgcccgtctcgagctctcccagtgatgccgtgcagaatcccgctgcagccgccatcgccagtatacttcacaagcagcacgcctcgtcggaatcacccagagatgttccccctcccccacagccgcagccgccctcagagccgcaataccgtgagccgtcacctcccccacctcaattgccgcgacggcccccttcggagcagttgacatctcccgtccatctcgagtcaccaacattcgcgccctcaccggtttctcatcctcggcatgcttcgatacgggagaacgatggtggtccacgagaatcacctccttataatcgggttggacggacagcgccgcgctccccatctggatatcacatttacaatattaacgagatggttgaggtcatgggtaaaagaaagaagatgcccacgaccctagggatcaacatcgccac

SEQ ID NO: 22302 - DNA, 850 bp, Emericella nidulans
tccaaaactatctaggtccgctcattgcgaagaggagaacgccaaagatccaaagacagtatgcggatatcggaggaggttcgcctatcagaaaatggtcagagtaccaatgcgcagagatgtgtaaattgctggaccagctcagccccgagtctgccccgcacaagccgtacgtcgcattccgttacgctgcgcctttgacggaggaaatgtacgcgcagctgctagcagacggcttcggcaatgggaaaggtggccgtgctgttgcattcacgcaatatccgcagtactcgtgttctacaacgggtagttcattgaatgagctgtggaagtggaggacccgactggaaggaaagcgcgcaaattgcgacgtggatgcgacaggaactatccagtggagtgtcattgaccgctggcctacacacccgggtcttatcgaagcgttcgcaagaaatattgaagaccaactgaagacgtaccccgaggaaaagaggaacagtgtggtgttattgttctcggctcacagtttgcctatgagtgtggtcaacagaggtgagacgatgactttctactctgtacggccatatatctaacagattatcattaggtgatccgtatccagcagaggttgccgcaaccgttcacgcagtaatgcaaagactgaacttcagcaacccgtatcgattatgctgggcagtctcaggtttggaccgtctggcttggctcggcgcctcagaccagcgatacagtccaggaatatgttaagaggggacaaactgatcttgtccttgttccaaatgcattcactagcgaccacattgagaccctgtacgagctggatctggaagtg

SEQ ID NO: 22303 - DNA, 850 bp, Emericella nidulans
atcccctggttcatattgtttcttctgacgctcgcgacggcgttgaagcagtatgaacagctggggtttgtctctggcgaagtctgtttcttgctgatggctcacttcctttacaccaatgcttgtgcgaagggagaggacctaataattccgagctggtatgtcaagattatgtcttttagccccgagaatcaagaaagctgatacttgggtctctagggatatgtactacgagaaatggggtttcatgctcatcttctggaatctcgccggcgttcccatgagctattgccactgcaccctatacctagcctaccacgatccctcaacctaccggtggaacccggtaactctgatcatctgggcgggactgtacctctttttctactggatctgggacacctgcaacagccagaagaatgtcttccgcgctgaagagcgcggcgcaagtgttgaccgcaagtccttcccgcagctcccttggcgcagtgtcaaaaacccgaagaccatcaagacggctgatggggggttgatcctttgcgatgggtggtgtacgtccaataatcattctaagtccctgttattctccggatacgtatactgatggcttgttcaactgacagatggtatcgcccgcaaaatgcactatacctgcgactggttcttcgcgatatcgtggggcctgattacaggcttcgactcgccgtttccgtggttctactctatcttctttacgatcatgatcatccaccgcgcgaggagggatatccggcgctgtcgcgagagatatggcgaggcttggaaggagtatgagaagcaggttccgtggctgtttattccggttagtctc

SEQ ID NO: 22304 - DNA, 850 bp, Emericella nidulans
caaaatattcggaatccaatcctggattatatatggttgttactttccccttcatttttgctgtcatgtttggtgactttggccacggtgcattaataactatggttgctactgttttgatctattgggagacgaagctgggaagcacaaagcttgaagagatgattgagatggctttcttgggtcgctacatcatgctgatgatgggtttattctccatgtacactggtctaatctactgtgatattttctctaggtcgttcaccatctttcagagccagtggaagtggcctgacaacattcggcaaggccagacagtcaaggcctcactaagggacggctatcgtttcccgtttggagtggactggaactggcatgatgccgagaataccctccttttcactaacagtttgaaaatgaagatgagtattctcataggttgggcacatgtgcgtgcgatatttctttaagagatagattaataacacgtcccagatgacatatgccctctgcttgcaatatgccaacgcccggcatttccagtgcaaggccgacattttaggtaattttatcccgcaaatgattttctttcagtcaatttttggctaccttgcctttgcgattatctataagtggtctattgattgggagtgtcgtggccagtccccaccaagtcttctgaatatgttgatctcttattttttgtcccctggcgaggttcaagaacaactctatcccggtcaggcagtcgtacaggttatcctattgttgcttgctgttactcaaatacctatcatgcttttgttcaagccattttacctccgctgggaatacaaccgtgccacaacga

SEQ ID NO: 22305 - DNA, 850 bp, Emericella nidulans
cagggacagaaaagccgatcacctacaacgataaagctgcgctgcgcgaagctttcgagaaggccggctccaacctcgccgccttcctcgtcgagcctatccaaggcgaggcgggtatcatcgtccccgatgacgattatctgcagctggccagatcgctgtgtgaccagcataatgtgctgctgatttgcgatgaaatccagaccggtattgcgcggacaggaaagctgctctgccacgagtggagcggaatcaaaccagatatggttttgctgggcaaagcgatctctggtggcatgtaccccgtgtcctgcgtgctaggacggaaggatgttatgctcacggttgagcccggaacccacggctcaacctacggaggcaaccctcttgcctgcgctgttgccatccgcgctcttgaggttgttcaggaggagaacatggtggaacgcgctgagaagcttggccaggccttccgcagcggcttggaagccatccagaacccgatcattcagacggttcgtggaaagggcctgctcaatgcgattgtcatcgacgagttcaagaccaacggacacactgcatgggatctctgcatgctgatgaaggaaaagggtcttctggtaggtatcaaccctccgttcattcgaccaacgctaactcggccaaggccaaacccacccatcagaacatcatccgtctagcaccgcctctcgtcattaccgaggaagaaatcgcaaaggcgctggaaatcatcaaggccgccgtggctgagctgccgaatctcaagggtgctgcggaagataaggtcgtccctccgccagagaagaaggtgaagattactctcgagaac

SEQ ID NO: 22306 - DNA, 850 bp, Emericella nidulans
ttaccaaacagcctgtaacgggctggatatcaaggatcctgatatacgtggtatactccggtacgcaggcgctgaaatctccgaccctacaagctcgcagtggtcgtccatccgcaattcctgcggcgatgagccctatgataagctcgttccgtatgtgaaacggacagtgggaaaggctgccggccaggagaaccttaacgtgggttggtactatgacctgccagagctgtactttcactggacgctcaatacaaaagccctgacgatcgactggggaactccgacgaataaactcatctataataaaaaatctgtctttccagcggaatacaatatctacgaggtgccaaataggggtcgagtatgttccctatctgcatctccagcgcgtggtgctgaactagctagtggacgtactgggtcattcaaaatgttggactcgtcaacgcctatcaccctttccatctacatggtcatgactttttcatccttgagcaggggcgggggctttatacacctctcgtcaagctgaaccgtgataacccgccccgaagggatacggccacgatggcagggaacgggtttcttgtcattgcattcgaaagcgataacccggggtaggttctcatccacttcaaagaacaccgaagactaatgtcacagatcctggttgatgcactgccatattgcctggcacgcaagccaaagcctcgccctccagtttgtcgagcgtgagtcggagattgggcccttgattgagccggttattggcgagattgagagtgactgtaaaaaatgggagaagtaccatgcggaatccgtctaccatcaggatgattctggtatc

SEQ ID NO: 22307 - DNA, 395 bp, Emericella nidulans
ttaccgagtctattgacagcgtctacaacgcatttggaactgttggtgattatgctcgatctgatgttcgcggctacttggaggatctagcttacgtgctcgactcgggtattaaggtcgccctcgtttacggcgaccgcgactatgcctgcccgtggaacggcggtgagcaagtaagtctgcaggttgactacagccatgccgacaagttccgcgctgccggatacgcaccgctgcataccaactcctcatatgtcggcggctctgtacgccagtatgggaacttctccttcacgcgggtataccaagccggacatgaagtgccggcatatcagccggagacggcgtatgagatcttccaccgtgcaatgttcaatcgggacatcgcaacagga

SEQ ID NO: 22308 - DNA, 850 bp, Emericella nidulans
accgagctgaacccgtggtcatggaacaattacgtcaacatgctctacatcgaccaaccgaaccaggtcgggttcagttatgatgttcctactaatggaacgtacaatcaattgacaggtgtgcgtgacgtttctgaatggtcgacggtcccggagcagaacaatacgttctacgtgggcacgttccccagtctcaacgcctctgctactgcaaataccactgagaacgcagcccgcgcgctctggtcgtttgcgcaaacctggttcacggagttccccgcctacaagccccgtgatgaccgggtcagtatttggaccgagtcctatggaggccgctatggtccgtctttctctgcgttcttccaagagcaaaacgagaagatcgccaatggctcgcttaccacgcctggtgaatcacactacattcatctggacactctcgggatcataaacgactgtatcgacctgcttgtgcaggctccgtcgtaccctgagattgcgtacaacaacacctacggaatcgaggcaattaacgaaaccatctatgagtttgcgatgaatgcatggagcaaacccggtggctgcaaggaccaaatagtccgatgccgccagcttgcggccgaaggggaccctcgcatgtatggcaacaacaagaccgtgaatgcagcctggcaggcagcggacaggtactgcagcaacaacgtggaaggcccttacccactgttctctggacgaggctattatcacatcgcgcacttcgacccggacccttttcaacaaccatactacctgggttatctgagccagcactgggttcaggatgccggtggggttcatataaaatttccga

SEQ ID NO: 22309 - DNA, 850 bp, Emericella nidulans
aggcagcagaggagaatatcatcgtcaatgatctcaatgccgcattcgatgtccttcgacaagccaaggaagaaaagaagggcgagcgccgcgtcgacattgttcttgacaacgccggcttcgagctcttcgtcgaccttatcctcgccggatatctcctttcggctgatatcgccacaagcgtagtccttcggcccaaactgataccctggttcgtgtcggacgttattccacgcgacttcgcagaccttattcaggccatcgctgacccccagagcttctatactgcccccgacgaggctggaaatcagcaaagcccgctctcggacaaggaggtcgaggaggtgaagttcctcttcgaccagtggagccatttccatgcggagggcaagctgatcattcgccctcaccccttctggactgcaggcggctcctactggcgcatgccgcacgtcgcacctgacctcttcgaagacttgaaagaggccgaactggttctgttcaagggtgaccttaactaccgaaagcttattaacgatgtgcgttcacaatactattaactcctaccacaccctgaatttttcatatttctatttctattccgagacactaacaatccctccaggctgcctgggacccgacaaccccgttcgcaaccgccattggcccgctaggcccgcactctggcatccgtgtcatgtcattccgcacctgcaaggccgattgtgttgtcggtcttccagccggcaaagacgaggaactgcgcaacgcttacgagggctcgagatccggaggtcgcgagtgggcgtggagtgggaagtgggccgttatctctttctgtgatggtaag

SEQ ID NO: 22310 - DNA, 850 bp, Emericella nidulans
cgcgaaaaggcaaccagcaacatctgtacggctcaggccctccttgccaacatgagtgccatgtacgctgtttaccacggcccttctgggctgaagaccatcgcccagcgcatcatgtcgatgactgccgctttgcgggagagacttgcggctttgggctacaacgtccctgccaagtccaacgtctctgacggtgctgcggttttcgatactatcacgatcgaattctcgaacagtgaagaggccgatgctattattgctgctgcccgtcagaactcgatcttcctccggcgcgtctctgctaccaaggtcggaatcactctcgatgagactgctggccgcgaagagctcaaggccattctgcaggtcttttccgctcacgccaaagccgaggctgctcttgaccaggaactcggccttgcttctatcccagcgagcctggagcgtacttccgcctacctcacccaccccgtcttcaacacccatcactcggaaacggagatgctgcggtacatccgccacctggagtccaaggacttgtctctcgcccactctatgatccctcttggctcctgcactatgaagcttaacgctacgaccgagatgattcctgtctcatggcccgagttctcgcagatgcacccgttccttcctgcagatgtcgccaaaggatacacccagatgattgatgacttggagcagcagttggccgacatcactggaatggccgaggttacggtccagccgaactctggcgcccagggcgaattcgcaggtctgcgtgttatcaagaagtaccaggaagcgaccggcagttctaagcgcaatatctgtctgatcccggtttctg

SEQ ID NO: 22311 - DNA, 545 bp, Emericella nidulans
tgccaaaaccactcagcagcaccgtccgatcgcgcatgacggactgaaatcccacccctttcatggtagacacaaattctaattctgacttcccgatgggcgttgttcaaagacgtgaacaataactttgagatccagttcacgctcgatgaagtacctgacacagacacgattacgatgcgcatcgcgacgacgctcgcctttgccagtggaagaccgcagcttacgctgaacgacgatgaatgcggcgcgcctgaggcaccgactaagattgattcgaggggtgtcacgcggggcgcgtatagagggtatggcgaggtgtacacctgcgagttcgatgtgggcagtctggttgccggtcacaactcggtgtatattagcgttgtctctgggagcagtggggacgaatatttgagtccaaattttgtgagttttgagcctctccccgtctcttggttgtttgttggtttggccactgggataaggataagctaacgttgcttttctcgtacgtgcagattgtggatgcgatcgaggcttattat

SEQ ID NO: 22312 - DNA, 759 bp, Emericella nidulans
aactcactcagggcaagaatgtagccgacgccgcgaagcgagcgggtgtgcagcacctgattttctcgtcgttactcaacgtctccggatcaacaagcggacggctcaagaacgtgccccatttcgaccacaaggcccaggttgagcagtatattcgcgaccttgggatcccagccacctttgtgctcccagggtattttatgtcgaattatgttttcttgggaatgttgaggaagggcgaggacggcgtttatacccttgcttaccctgtgaatgaggggtcgcagttcccgcttgttgatattgaggcagatcttggtgagttgtttccctatcagttcacttgtaatgaagctataaagattaatgtggttgatcaggtaaatacgtggctactgccctcaagagcccatccaaaacacagggctcccgaatcctcgcagcaacagactactatacgcctacccgcatcctcaaagaattcgaggaagtgacaggccacaagactaggttcattcagatcgaccacgagacctacaagtctttcatgccgggttacgtcggtctggagatgctggagaaccacctgttcatcgaagagccggggtactaccttgggcagagcttaaaggatagcttggatctcttgactgatgctggcttcaagctgacaacttggaaggagtttgttgagagctataaaggtgcctttgcgtgaaacttgaactttcggagagtggttatgggtccggctttgat

SEQ ID NO: 22313 - DNA, 850 bp, Emericella nidulans
aaaaccatcaataacggaatatgaagtgggaatccggtgctttggtccctcgaaggccgctgcacgcatggagggttccaaagccttctcgaaggacttcatgaaacgccataacatccctaccgccgcctacgagaatttcacagaatacgaaaaggctcgcaaatatctcgatagtgtgtcgcataacgttgtcatcaaagccgatggattggctggtggcaagggggtcatcatcccaacatcaaaggaagaggctcaccaggcccttcgcgaaatgatgctcgaccgccaatttggtgatgcaggaaatgaggtcgtcattgaagaataccttgagggtgacgaacttagtgtcttgactttcagcgatggttacagcatcaagtccctccccgctgctcaggatcacaagcgtatctttgacggagatcagggcccgaatacgggagggatggggtgctacgctcctactcctatctcttcgaagcaggtcctcgaagagattgatcgcacaattgtgcaaccctctattgacggcatgagaagagaaggtacgtgctcaaaggtcagactttcttgtcactggtaatgctaatggttataataggattcccgttcgttggtattcttttcaccggtctcatgatgaccaagaacggccctaaggttctcgaatacaacgttcgcggcggagacccagaaacccagactctccttcctctgctgagtgatgacaccgacttggctgagataatggtggcctgcacagaacattggctcgacggcgtttcgatcaaaatcaagcccaacttctcgaccaccgtcatcgctgtcgctggaggatcca

SEQ ID NO: 22314 - DNA, 557 bp, Emericella nidulans
aattacagactctggagggccattccggctctgttaactctgtggccttcttgccggacggccggctgctggcatccggctccaatgacctgacagtgcggctctgggacacggcgacgggcggcctgcagaagactctggagagccattcccgctgggttaattgtgtggccttctcgccggacggcagactgctggcgtccggctccgatgacgagacagtgcggctctgggacacggcgacgggcagcctgcagcagaccttgcctatcaaggggacagtcactaaactccaattttctcaagatggttcatatatcagcactaacctggggtcactcaacattcaatcctattgtggcaataatctatctaattcaccaaaaactcattctgatatacttattaaggtccgggattggataacgttaaaggccacacaagtattatggcttcctcctgaggccagaccttcatgttcagcaatcagattgaatacccttgccttgggacacgcgtcaggtcgaatttcatttataggattccgggtataatgg

SEQ ID NO: 22315 - DNA, 850 bp, Emericella nidulans
cgttccaaacacttgggtccgcggagacatggtgaggcatcttcataatggcattgtggatagtggctgactgactgtgctaatagtatgcggcgggaagcccaaacatgcagcgagtcaacgggcagacggtgactacacaacgatcatcggcacttctaaacggaacaaagtactttactaagtcccccccgacatttcaggaattctccaaggaccaggtcctgaatatcaagtctgttccgggtaggcaggtctatggagatggagcaaccgatgacacccagaatatcaatgagatcctggctgaaaatgccgactgcggcgtaatctactttcccgctgggacttacatggtgactgataccatctttgtcccgaccggaagacgcatcgttggtgatccttacgcttcagtcattagcggtgttggtgcaaaattccaggatccgatgtcggttcgtcctatggtcagattcggataccctggggatgttggcgtcgctcaggtcagcgatatgttgttcacggtcggagacatccttcccggatgtaaaattgtcagtcctccagactcaataggttccatcgctaaccatacccaggtcgaagtaaacattgctggctcgaaacccggcgatgtcggtttctggaatagccatattcgaatcggcggcgccgtgggaagcaaagtcgaaagccaatgtgcgggtagtccagacaaatgcaaagcagcttgggctgcccttcatctcacaagcacgtcctctgcttacattgagaatatgtggggatggacggcagatcctagtattctatagtgtcacctaaatcgtatgtgttgatcata

SEQ ID NO: 22316 - DNA, 667 bp, Emericella nidulans
gaaataaaagctaacactctttcgcgcaaactaggaagaaatcgaggccatgaaacgacgggtcgctgagatggaatctgaagcggcaaagttacgggaaatgcaagctaccctcgaccagcaatccgagagcctgaaagaagacaaggaagacatcgacgcccggagtatttttgtcggtaatgtggattatggagcctcgccagaggaaattcaagcgcacttccagagctgcggttccataaatcgcgttaccattcttctagacaaattcacaggccaacccaaagggtacgtggtagcctcaaagtcataggcggttgccagacgagtctcttgccatctagagatctagccctactgacttggtgatatagctatgcctacgtagaattcgccgagcccagtctggtggcgcaggcccttgttctgaacgagagcgtcttccgcggtcgaaacttgaaagtgagaagacattaagatatagaacctctgattcagttcgctgacaagtttggcgcaggtcgttcccaaacgcaccaacctccctggtatgagcagtcgaggacgcggtcgtggtcgcggccgcggatacggccgtggagggttccctcgtggtggatatcgaggcggttatcgcggccgtggacgaggctatgcgccctac

SEQ ID NO: 22317 - DNA, 850 bp, Emericella nidulans
ctgggaatttagtggctcttatgggctgcagcggtgcgggaaaaacaacgtgtgtatagagaatacatcattatttgctaggatactgaccatttaccaggctcttggatgttcttgcccagcgtaaagatattggtgaggttcgtggttctatcctcatcgacggacggccccaaggtatcagctttcaaagattaactgggtattgcgagcaaatggatgttcatgaggggacttcgactgtccgcgaagctctgattttttctgcattccttcgacagccatcaagtgtcccagaagaggagaagttggcttacgttgaccacattattgatcttcttgagctatatgatatccgcgatgctcttattggaagtaagcttttcatggattgaaaagctggaaaaacgttaacttgtacagctcctggcgctgggctcagcattgagcagcggaaacgggttacattgggtgtggagttggttgcgaaaccaacgctgctcttcttggatgaacccacctctggtctggacggacagtcagcatataatagttagtacgcttgataccacagtctcgtacgtgtgctaaccacggaagtcatccgcttcctgagaaaactagtagacggaggccaggctgtgctctgcactattcatcagccgtcagctgtgctctttgacgcatttgactcacttctcttgttggctaaagggggaagattggcatactttggcgagagtaggatcccttcccctacttatcgacccaaggctctaactagactagctggtaaggactccgagaaggtactagagtactttgctgggatttgaccaccatgtccgcc

SEQ ID NO: 22318 - DNA, 500 bp, Emericella nidulans
tgaagacgagctcactaacaccgcggtaactgattggttatactataggaatcgaacactctcgggcagaagaaggagctctgtcaacactggccgtcatcggttcagtattggcaccttccgaggcctccaacatcctcagctaagcaagaagatgaatcgggtgatcaaaagcgagaattcagcgatcgccgctcacgagtccgctgcgaggcagcgcatgtcgattgcggcgcagatatccgaatggggagagaccaccgaggacgaagccatttcggatatctcagataagctgggcgtgctgatggcagaaatgggcgaacaggaggatgtttatgcgcagcatctagaggattatcgttccgtccttaagcatattcgcgatacagagagctctgttcagccgacccgggatcagcgagccaagatcgcggatgatatacaacgtctcaagctaaaggagcccaatagccataagattgagaccatggagcagg

SEQ ID NO: 22319 - DNA, 506 bp, Emericella nidulans
atcttgatccaggatgaaatatacggagaagaactggtccaggagccagtgctcgtagaacttattcagagcccggaggtgcagcgactgcaaggcatctgccagcatggagttactggattcttgggcctgacaccgcgagtcactcggcttgaacattcagtcggtgcatttatactcgtgcgaagagttggtgccacaattgaagaacaagtcgctgctcttctccatgacatctctcataccaccctcagtcatgtcattgatcacgccctctccaagcccggggaaggaagctatcacgaggtacacaagacacggtatcttgagacgacgcggctgccggacatcctcgccagacatgggatcaaccagaaggtttttgaggaagaacttttccctttagtggagatgccatcgcctcaactctgtgctgatcgactggactatgctttacgcgacgccgtcagcttcggcaagcttgccatggaagatgctagaaaggt

SEQ ID NO: 22320 - DNA, 850 bp, Emericella nidulans
gatgtctacaagctttcatcgttggtcagtgagcatgatgctaagaaggctggtgcagagattgttaagcagagtgccaatgcgcctctaagtgggctgctttattcgattctgcaggtgcttgatgaggagcatctaaaggttgatgctcagttgggaggtatggatcagagaaagctctttgcggccgctgttgagtggctgccgaaaatcggataccgaaaggtgagatgtccattacttcgtccataacggctactgaacattacagcgtgcgcatttggttacaccaatggtggctggtctcagcggcggtaaaatgagctccagtgttcaaggtccgttctcacatcttatcaactctttacgatgtgactgattccacccagacagcaaaatcgacctcctcgacggacccgacgtcatccaaaagaagattcgaaaagctgaagcagcccccaaagtagtcgaagacaacggcgtcattgcaatggtagaatacgtccttctccccgccgtcggcctcaagggcaagaaggaattcgtcgtggagcgccgcgacgccgaacccctggtctacacagacatcgccaagctaaaggaagactatgcaaacgacatcctgaccccgcaagccctgaagcccgctgtgacggcggcgctgacgagcctaatggcgcctatccaggcggcgtaccaggcttcccctgagtggcaggagatcacggcacaggcttacccgccgcctgttgtggagaagaagcagaagaaggttaagagtaagggaactcgttatcctggtgcccaagctcaggcccaggcccaagctgaggcgcaggcagaggtcgag

SEQ ID NO: 22321 - DNA, 824 bp, Emericella nidulans
caagatgcctaccgagttcatcagcctcacctttcctaccccgtctacggagatcgacccgatccccaatgccgccattgacccggcattcctggagcgctatgctcgcaatctagatgattactcttacaactatacccttgtcccttatgattcctcttatttcgatccttggactgtcggcgcgaccatcgcctcacacacgaaaaacctcaaaatcatcatcgcggtgcggcccaacaccctttatccgactgtggccgccaaagccctagcgactctggatcagcttagctccggccgtgccgttgtccattttatcgccggtggcagtgatgccgaacaggccagggagggcgacttcctcaccaaagaccagcgctatggccgactggaggattatatcaaaatcctacgccgggcctgggagtctgccgacccattcgactgggagagcccctactacacatttaaggatttcagcaaccgggttcgtccggtgaacggcaccattcctgtctcagtcggtggatcatctgacgaagcctatcgcattggtggctcactcgcggacatcttcggtctttggggagagcccctgaaggagactaaggagcaaatcgaccgcatctatgctgaagcggagaaagcagaccgtactgacctgccgcgcatgtgggtgaccttccctcctatagtggccgagacggacgagctggcctgtgccaagcacaccgcacccttgatgccctacagaaaaaccctgcccctggtcttggtaggcgcctgctatgcacctctcttagacgtcggctccaacgttg

SEQ ID NO: 22322 - DNA, 791 bp, Emericella nidulans
gggggctaccctccccaggaagggtacggacagcagcccgtggcctatggagcccctgttcagcagcccggggaagctcctgctccacaagtccacaccggagggagaaagaagagagcatatgctggagaggccttcgagatcggttctggtgctaatgctgctctcggcgggcagccaccagccggcggtgcctatggcgcatacccccctcaacagcctgcctacggagccgatccgtcgcagatggcccaaggatatgctccgccagttgctccgggagtcgcacagatgacccagcagtttggtgctatgggtgtaacggatcctcatcttatgccgccccagcaagcgccccaggctccccaggctccccaggctccgcgggcagtccctctcaaccagctctacccaaccgacttgctcacccagccattcaatgttgctgagctcgattacccgcctcctcccatcgttttggcccctggggtatgtgcttgataaggaagccttatgttgcattatgatgactgacatgtagcttagacgagcgtttacccctctccttatgcgaactgccctcccaaatacgtgcgctccacactaaatgccgtcccgacaacacactcgctgctgaagaagtcaaagcttccgtttgctctcgtgattcaaccttatgctgcccttcatgacgcggaagaccaggttcctgtcaaaccaaaccgagtcatctctcgttgccgacgaagcagatcctatatcaacccattagtgacgttccttgaccatgg

SEQ ID NO: 22323 - DNA, 674 bp, Emericella nidulans
aaagtgtcggggccaaaacagtttttgtttgttggcggaacgcacctgggtggtggaacattctggggcatcatgtcattattgactggcgcccgaacttttgacgacatgctagcaatggcggaccgaggggataacagcggcgtggacatgttagttggcgacatctacgggatggactacggaatgataggtctcaagagcacggtcatcgccagcacatttgggaaggtcttccggctacagaaccgcgagcgggtggcgagcgatggggaggcaccgcaggacgggtctcgccaaaaggccgacgagccgatatttaagcacgaagatatgagcagaagcctactatacgccataaggtaagagcgtccatccttacagtatgatcgcccactaaccgtctcagtaataatattggacaaatcgcatacttgcagtccgaaaagcaccaggtcaagcacatctacttcggtggctcgttcattcgaggacaccgacaaactatgaacacattatcctacgctatccgtttctggtccaaaggcgaaaagcaggcatactttctccgccatgagggctacatcggcgcagtcggcgcgtttctacgaagaaagccagttaactggggccgccggaacagtattgatgagcacgtgcctgctcaagggctc

SEQ ID NO: 22324 - DNA, 741 bp, Emericella nidulans; identical to SEQ ID NO: 15799
  unsure (1)..(741): unsure at all n locations

SEQ ID NO: 22325 - DNA, 602 bp, Emericella nidulans; identical to SEQ ID NO: 1253

SEQ ID NO: 22326 - DNA, 439 bp, Emericella nidulans
tatccaagaccccggaatcagtttggtaagcaccggcgtgcgtgcggtggatcactgcgtcgagacgttctgcgcggtcaagggaacgtcagaggaatcggactcactggcgttgaaagcgctcgcgaacttagtgccagggcttgtgaggtgtcgtcatgatccgaagggagaagatcttgatgctcggttgacatgtcagctcgggtccgtggatgccatggcagcttgtacgagcggaaaggttcaactgggtgctagccacggaattggccaccagctcggtcctctcggcgtcggccatggcgagactagctgcatcctcctcccagccgtatgcaagtacaacgcaaaatacaacgccaacaacgaccgccaatcccggctgcgcgagttcctcctggagcagtcgatagtcgcggatgtaataaagtcgcgc

SEQ ID NO: 22327 - DNA, 850 bp, Emericella nidulans
cccaaagcccacaattgtacaagcagatgtgtatcgctggtgacatgcagagtgttttcgagattgctcctgtgttccgcgccgaggagagcaacacgcaccgacacttgaccgaggtacgtccatactaaaagttttattgacacagagaagctgactacgattcgttgtttagttcaccggtctcgattttgagaagactttcagctctcactatcacgaggttctcgaatttgccgagcagctcctcgtattcatcctttctcagctcaaggagcgatatgcggaccaaattgccattatccagaagtcctaccccaaggcaggcgatttcaagctccccaaggacggcaaggccctgcgactgaactatatggacggtgtggcgctcctcaaggaggcaggcgttgatgtgtcagaacaggagcgcttcgagaacgacttcaccactgctatggagaaacagctgggacagatcatccgcgaaaagtatgacaccgatttctatgtgctggacaagttccctatggctgtccgccccttttacaccaaggcctgcccccaagatccccgcttctctaactcctatgacttcttcatgcgtggcgaggaaatcatgtctggagcccagcgtattcacgatgtgaaggagttggaggcctctatgattgccaagggcgtcaaccccaaccaggagggctttgaagactaccttgctgctttccgccagggctgccctccccacgccggcggtggattgggtttgaaccgtattgttatgttctttcttggattgccaaatatccggttggcgactctgttccctcgtgacccccagcgtctgcgtcct

SEQ ID NO: 22328 - DNA, 850 bp, Emericella nidulans
taagaagctcatatataagccctgggatatgagtcgggcagccaaaagccgggatcaagatgttatcgaaaccttggaagatatcgcgggcgagatcattccaaaaaccggcttctttcaaaatggacaaagtccggagactgggttaaaagtgcaaaatgggatcgcgagaacgaattgcattgactgtcttgaccgtacaaatgctgcacagtttgtgattggaaaaagagcactggggtaccagcttcatgctctgggtattattgaaggaacgactgttgagtacgatacggatgttgtcaacctttttaccgatatgtggcatgatcatggcgacaacatcgccatccagtacggtgggtcgcatcttgtcaacaccatggctacgtaccgcaagatcaaccagtggagtagccattctcgcgacatggtggagagtttcaaaaggtactacaataactctttcctcgatgcccagcgtcaggaagcgtacaacctgtttttaggaaactatatcttctcacagggacagcccatgctctgggatctttccaccgattactacctgcatcacgcagaccccaggtactgggcgaacaaaaagaagcccaactatatcaaatggtatacagaagagaacttgaagaaacgcgaagtgcccgttcccccggttccgccaaaagaaccattatcccgctacgacgactactggtttgagtactaccgcccactagcagtctcctccttttccaaaattttttcgtacaagatgaactcgacactccgctacctgcccttccgcccaacatccacagacgattataacctcagtccttttgtcccgcgc

SEQ ID NO: 22329 - DNA, 511 bp, Emericella nidulans
gcagtaactcagatgattatccttggaaggaagcaggcactaacttattttggcaaagagccagatattattgttcagccttacagcataggtcaagacacttggctgaaacagcacagtacagattggttgcttgctcaaatagggtttaaaggaactatagacagccactaccttcaagatagattgataaaagttttgaatgtacatgaggtgatatttcctaatatgacctctttagaacccttacacaatgctgttctggtgtttactgatggctcctctaaagagcgagctggatttcttataatcaacaggtaatcataaagactcctggcctatcagctcaattagcagaattaacagcagtactgaatgtctttcagtctgtgagtgaggcttttaatatttttactgatagtttgtatgttgcaccatctggtacccttattggagacctgtggtacgtttaactttaatacaccagcaggatccctgttttcacaattgc

SEQ ID NO: 22330 - DNA, 817 bp, Emericella nidulans
cgatttccgcgaagccacccgactccgagagaaatacgcagaccagatcaaaatcctgattggctttgaatgcgactggattttgccagagtcgcggactttggttgagacatcaatgcgtgctttcccgttcgagttcttcatgggctcgatccaccacaccaagaccatacccatcgactacgaccgggagatgtacgagaaagctcgggatctagcaggcgggtcggacgagaagctcttcgaagccttctttgacgaacagctggacatgctgaagcagttgaagcctgtcgtggtcggccacttcgatctcatccggctgaagagcgacgatcccgagcgcagcttcaagcagtggccgggtgtttgggagcgaattctgcggaatctggactacgtggctgggtacgggggcattctggagctgaactctgcagcgctgcgaaaggggatgagcgagccttatcctaaagctgagatttgccaggtcagtttatctgctctttatgactgtctggatagtggtcatgtcagctggaataccgcagcggatatatgcgagataatgttctaattgagtggacaggagtttttggcgcgtggtggtcggttctgtttctcggatgatagccacgggctagatcagattggattgaattacgccaggatgctggagttcatcgagacgaatacggacatcaaaacattgtattatctcgatctcggaaacgaacccgaaactcaaaccccggtggatagccggtttccccggacggtggtcaaatccatctctatggaagaggtgaagaagatg

SEQ ID NO: 22331 - DNA, 310 bp, Emericella nidulans
taccgaatacctgcaacgactacagaaactctttcatagagttgtctacccctaccaccttcgtctcttcaacacgactgatgatgctgaggatcccgatcgtctttacgagttatatgcggtggtcgtacacatcggcggtggtccttaccatggacactacgtttcgatcatcaagacccaggatagaggttggctgcttttcgatgatgaaatggtagagccggtggataagaactatgtacgcaacttctttggtgacaaaccagggctagcctgtgcgtatgtgcttttctaccaggagacaacc

SEQ ID NO: 22332 - DNA, 743 bp, Emericella nidulans
tcatctacctggatgcggaaaagattcgacgagcccattgcaatgctaaccaggttcagggatcaattacgccaaaatcttctcgtcaaacattattactgcgacatcgatattgcccacctgatttcctacaacgaagagttggcccacaagctcaccaccgaacctgcagatattatccctctggtaagtagccctcccttggctgagtggcgaagacttactgacatatgataacttagtttgaggcagctctgcagcaatgtactcagcgaattgtctatccctcgcaacgagatatcgtgcttccaacccaccaacttctgctccactcttcagccactcacatctccattcgcgacctgaatgcaacgaatatctcccaccttgtccgtatcccaggtatcgtaatcggtgcctcaacaatatcctccaaagcaacgaccgtccacattcgctgcaaatcttgcgatcacgctgagaatatccgggtcgagggtggtttctccggcctaacacttccaagccggtgcggtcgtgagcgccaacccggtgaagagcccgacacccagtgcccccttgacccatacgttgttgcccacgaaaagtcccagtttgtggatcagcaagtgctcaagctccaagaagccccggatcaagttccagtaggtgatctaccacgtcatgtgcttatatccgccgatcgatatcttgccaacagggttgtcccggcaacgatgccg

SEQ ID NO: 22333 - DNA, 850 bp, Emericella nidulans
gaaaccacaccaatcccgctcgcgccgcagaaccagcttctctcccgtgcccttgcagaggaaatccgtcttctcgtcccgccgcgcctccaattggtcaattcctggcgtttagcatatagtctggatcgcgacggcgcgtcgctatcaacgctctacgagaattgccgctcggtgtcagcgcgcagtccaagggctggctatgtcctcgttgttcgtgacgcttcaccgtccgcatcgacaatattcggtgcttacatgacggaccccccacatccagactcccattacttcggcacaggggagtgcttcctgtggcgggcgagcgttctccgcccgcctcctgcctcgctcagtatggccgacggcgatggaggcgtatactccgaggaagctttggaacgggcaggactcccaccgccaccgagcgcggatacaacgaacgttggtaggtccacaacactgcggggtgagaaggcacagccgaaatcgcttgcaccgcatacacatgggcttgctcaaggaggggctactaatagcggaactacaacccccgaccgaatccgcttcaaagcatttccttatagtggggtgaatgattacatgatgttttgcgagacggggtttctcagcttaggtggagggtgagtttgaatccttcttttacaatctccaggaatggcaggaggagctaataaattgatctgtcagagacggccactacggtctatggctcgattcaatcctcgaaaagggtgttagcgcatcgtgtcaaacattcgggaacgaaccgctctccgatgagggagttaaattcgatgttcttggcgtcgaagtctggtatgttggg

SEQ ID NO: 22334 - DNA, 500 bp, Emericella nidulans
tgtatatctcattacaataatcatcagcctttacgaactgccctttttttccctggtaagttggactccatgcttcgcgaagacatgaattgcagctcacctagggttaggccatggggtgcagagggtaggaatgacccgtccttggattgataggttccccagtgtcgcggggaattttttggaagagatggattcaatattaggtttccggctatctcatgtaatcgcagacgggccaaactcagaactcaacaagacagaaaattcacagccggctataatggcaacgtcagtgctaatactccggatacttgaaacggagttcggcttcgatacgaaaagtcgggtggatgtgaccctcggacatagcttatgcgagttttccgcactggtggccggtggctatatccatttcagcgatgccttgagattagttcgacgacgggctgagattatgtcgcagtgtacgccacatgccggttgcagatcccgtggac

SEQ ID NO: 22335 - DNA, 850 bp, Emericella nidulans
agttttggttcagatgctcaagaaaatgggggccattatcctggccaaaacgaacctaccgcaaagcatcatggtatgtctcttcagttggcgatatactgtctcacaaatctgacggcaaccagtgggcggaaacagagaatccactatggggtttgacaatcaatcctcgtgaccctgcgctcacacctggcggctctactggcggcgaggctgcgctgcttgcattgcatggttctatcttggggtttggtacagacatcggcggtagtattcgaatcccgcaaagcattctgggattgtatggattcaaacctagcgtacgtctaccgtttcgcgtaagcacgccaattacaactgcagctaacaatggagtagagtggcaggctgccctatcgcggcgtccccgtctccacggagggccaagagcacgttccctcatccgttgggccaatggcccgcgatatcaactcaatatactatataactcggcttctaaccagttctcgcccctgggatctagatccaagatgcgcaaacctgccgtggaatgaaagcgtcttccggggcatacagtcccggccactggtaataggtttgattctggacgatggggtggtaaagatacatcctcccatcgaacgtgcgatgcgagaacttgcagccaagctcgaagcaaacggccatgaacttgtcacctggaatacatcggaccacctcaaatgcataagtctgatggatcgatactataccgtttattgaaagagagaatatttttccaaattaccctgtttccagagagccctttattccccccttgtaaccattgttaaaactctaaaagcccaac

SEQ ID NO: 22336 - DNA, 738 bp, Emericella nidulans
cttccgaaacgcaagcaaccggcaacacaagcaagaaccaaagttctacgggaagccgaaaggccgtccgagcctcagttgggccataccgtgtcagtgtccgccggaaatgggcctgcaaaggtcctcagtagccccaagcacaagcactcgtccagcaagtcgctgaagaaggaaaagaaggaaaagaagctttacagccggtcgttcaactttgagaaagagaagccggaaatgcttcaaacactagcttcttcttcggtcgccagcacaaatcttcttaatgctcttaagcgtgtcaaccgagagacgcagcgtgtgagtgaagatgcagaggtcctcaacaggtttgagacgtgtaaacaactgcgccgtcagatactccggtacatccaacacgtggagagtgaggaatatcttggaagtcttatccatgctaatgaggagttggtgtccgcactcatggcatttgaggtgttggacaaaagtgtggactacgatagtgatagtgatcaggacgttcttgaaagcggctggacacccgaccgcgaagtcagcgaatcctttactgggctatccattaaccctccaaaaccgccccgtcctactcgaccattgagcatttctgtaccttcatcttctacacacagaccggaatatgataccgagagtgagtcggaatttgagcctgatgatgatgacgagaacaacccttttggggaccgaaatgctattata

SEQ ID NO: 22337 - DNA, 596 bp, Emericella nidulans
tgtctggaccgattcgcgcgaacgctcctatctctaatgacccggctccggggtacaatattgagcaactcgccaaaaagggcaagcaactggtcgatttgccatacacagtaaaaggcatggactgctctatgtcaggcattcttgcagccattgatgctctcgccgcaacgtacggactaaacggagaacaaccggatgaggaggaagacgtaacagatgttacgcccgtttcagacggggctttagaaagccggaaaccaacccgggcagatctgtgcttttcgctgcaggagacggtattctcgatgttggtggaaattacagagcgcgccatggcacatgttgggtcgaaggaagttttgattgttggcggagtcggatgtaatgagaggctgcaggagatgatggggatcatggcgcgggatcgcggaggcagtgtgcatgccacggatgagaggttttgtattgacaacgggattatgattgcccaggctggtatgctcgcatataagacaggcttccggacgccgctcaaggaatctacgtgcacgcagcgcttccggacggatgatgtatttgtgcaatggagagat

SEQ ID NO: 22338 - DNA, 850 bp, Emericella nidulans
ttccccgaaaagggaagatgatttactaacaaagatagaatgctctaagtattcactatacgaagaatgatgacattttcaagtaagagtaatgagcgtcattgttagggtgcctgctaactcatcgaagggacggagatatggtccttgttgacggaggcggtgtatgtctccttgggttcaaaaacttggattttgctaattgctgcaggaattgggcacttatatttcagacattacccggacttggccagtaaacggcaagttctcggatccgcagcgcgacctctataatgcggtgttgaacgtgcatcgcagctgcgtctccctttgcagggagagcgctggcctctcgcttgaccgcttacatggtatcgctgaaaatggattgaaagatcaattgacacagctgggctttgatctctcgggagatgtatgtcaaccgtacgtaatgtggcttgaccgtcggcgctgaccgcaaccaggcattgaggactctttttccacaccacttgggccactacatcggattagatgtccacgactgtgccgggtattctaggggctatgaccttaaggccggtcaatgtatcacgattgagccgtgagtatccatactgtacctttgatatccatacttaccaataccaggggcatctatgttccggacgatgaccgatggccggccaaattccgaggcgtcggaattcgaattgaggatagcgtttgtgtcggcgacgacaatcctattgtattgactacggaagcagtgaaagaggtaagttctctgatgacaaccgtgtacttaaatcgctctgaaggtgctaacatggtgcaactcccaggtgga

SEQ ID NO: 22339 - DNA, 776 bp, Emericella nidulans
cgtcttctcgccgaatcgcacagcctaaaggccgaagcaaacaacctttacttcggcgccttctactcccaagccatatccacctacgaccgggccctggcctcctgccccagctacttagactacgagatcgctgttgtacgaagtaatatgtccgcttgctacttgaagttaggagattggaaggctgctgtcgacagcgcaaatgcttgtattgagggcctggatcgggttgtcccgccttcgcagcccgaggatggtaaggaaggtgcggcgaaggaggcggattccgtggtggaaatccccgttgatgacgaggtcaacgagcaagcggcactacagaggatcaaggaaaacgacgagcggaaacgggatgtcgcgcgcattcgggcgaaggctctgatgcggcgggcgagggccaagagtgagttgggtgggtgggcgaatttgcagggtgcggaggaggattacaagcttcttgctgggatggagaatcttccaccaagtgataggaaggtcgtccaaaaggcgttgcgggagcttccggcaaggataagtaaagcgaaggaggttgagatgggggagatgatgggaaagttaaaagaagtaagtgactgtcctattactgtctggatattttgacttgctaaccaccgtagctgggaaatggtattcttaagccgtttgggctgtcgacagacaacttcaaattcgttcaggacccgaagacgggaggatatagcgtcaatttttcttcatagtggcggatttgagaa

SEQ ID NO: 22340 - DNA, 455 bp, Emericella nidulans
caacggaagtagaccggtacaaccccgccgtgcgttcgtcagtcggtagcggttcgatccagcataattgtggcaatagcgacagctacaacagccggccttacaaccgtaccggtaacggcgctgacttcagtgaccagtccggcgggtatggcagacggtccaaccctgataccagcaaccgcggctaccctctcgtcaccgaggatggcgaggagatccagacgcagaacatcagtattcccgctgacatggttggatgtatcatcggcagaggtggaaccaagatcacggagatccgccggagctccggggcccgtatttctattgccaaggctcctcacgatgaaaccggagaacgcatgttcaccatcatgggaagcgcccaggcaaacgaaaaggccctgtatcttctgtacgagaaccttgaggccgagaaaactcgccgcagtcag

SEQ ID NO: 22341 - DNA, 850 bp, Emericella nidulans
cggcccattgtgtctcatggaaggaccatgaccactagtgtcttgtttgccgattgtatcaccgttatcaaccgctacgccttcttttctagcgagtttccactcgtcatatcccttgaagtgcactgcaaccctgaacagcaaattgctatggtgaaaatcatgaaggagaccttcggagaaaagctgatcttagagccgctttctaactcattcgttctcccctcgccagaagagctcaagcgtcgtattctcatcaaggtcaagacgtgtgatgagacggaaaatatacgacaagacccaataacttcatttcatggtcggaagccgaagctcaagttctcctttcattcgcccttcgatgtccgatggacctacattacctaaccttccgtcgctttcaagtccacccacaataggtgcagattgcccgggtccattcttggtacccgagaggaggtcattgactaccaccagcatcagcagcgccactgaggacagtgacggtggtcttgtctccgtcaggaaagagagaagaaggcggcaaaagagcaaaatcactaagccattgtccgacttgggagtgtacacacgcggctacaaatggcatagctttgcctctgcggagagccaagcattcaaccacgtttactcctttgccgagcggtcttttgaaagtatttgtcgggagcccagcaacaaggcccttttcgagaagcataattcaaaatatctgacgcgggtatatccctccggttttcggctacgatcgtctaacttcgacccccttaaattctggcgacgtggtgtccagatgcgtgcgctcaactggcagacttatgacattggt

SEQ ID NO: 22342 - DNA, 574 bp, Emericella nidulans; identical to SEQ ID NO: 14386

SEQ ID NO: 22343 - DNA, 850 bp, Emericella nidulans
gaacatccgagttattcgagatcgacccaacaggaagctttggtatgccaggatgcttatatggatcagatggctgcaaagtttcacttaaatgacatgacgagatggccagaaacacccttacagccaaatatgaagctgctgcataacgaagagcaagctacaccaggccagatccatgaataccagcagaaaaccggctcagctctatttccaacaatcattaccaggcctgatgcagccctagccgtcaacgagcttgcaagattctctaggaacccatcgccaagtcatatggaagcgattaatcaagtcattgcctacctatatcatacacgatatctagcgcttgaattcagcgcaagtgagtatgctgatgagatcttcatatgcacgagtgatgcctcatttgccaataatgaagacagaaaaagcaccggaggttacctatgcaagctctttggggctccaattgaatggaaatccggcaagcaacgagctgtcacgaccctctacaacagaagcggaatatgtcgctctagcagaagctgctaaggcaacatattggtggcgtcgagttttcaaatcattggaatttgaccctggtcatacatttgctgtatattgtgataacaagcaaactattgacctgcttgtaaaggatacagcgcaacgaagcaagctacgccatgttgatatcaacagatcatggctccggcaggaggtccaggaagggagacttcatatcaaatggatccctaccaatcagatgacagcggacggctttaccaagcctctccctgttcaaaaacaccaaaaattcatcaagatgctcaatctggtcgatatc

SEQ ID NO: 22344 - DNA, 850 bp, Emericella nidulans
cgcggcctcactccaaaaccccgaggcattctggtctcaccatgcccagcagctccattggcacaagaaaccttcacgtgcaatcggtcggtcgactaagactcttgctagtggtgccagccatgagtcctggtcttggtttcctgacggtgagatctcgacaacgtacaactgtgttgaccgtcacgtgctcaatgggaatggggacaacgtcgctattatctgggactcggcggtgacggggaagaaggagaaatatacatatcgacaattgctggatgaggttgaggttctggctggagttctgagggaggagggtgtaaagaaaggggatgtcgtcatcatctatagtatgtctcccattgcaggcctctctgtcggttcggaggagctggtagctaatgcagacagtgcctatgataccggcggcgctgatcggtgcgctggctgtcgctcggctgggtgcaatccacgcggctgtcttcggtggattcgcggccaaatcgctggcgcagcgcattgaggcggcacggccgcgggcaattctgacagcctcgtgcgggatcgaaggggcgaagggccccattgcgtatcgaccgttggtggagggagccatcgaagccagcagcttcaaaccggagaaggtacttatctggcaacgagaccagctgcgatggaataatccggataaactgggcgggcagcgaaactggaacaggctcgtaaagagcgcgcggatgcggggtattcgtgctgagccagtaccagtcagaagcactgacggtttgtatatcatctataccagtggtatgtcaccgtccaacgtgcgttccataaacgttcactgacg

SEQ ID NO: 22345 - DNA, 727 bp, Emericella nidulans
tacaagatcattgacaacatgccaaggaagacaaagagaaggccgacagagctgagaagaggtccataatgctccaggaagaaattgagactctgcgtgtggagactcagcagcttacccaagaaatgcgtcgagtcgctgaacttgcggacaaagcatggagggagtccgaaagctactctcaaatccttggtgcactggaaggtaaacggattgaagcgaagagtatccaagccacgatcgacaatcttaaacgacacctagtagaactcgacgagccggatgaatggctcgaatcgaatttggagcagttcgaggcgaggcaacttcagtaccaacagcaagaggagactgaaaaggagaagtacatggagatcaaggaacgaatcgaagaggcacggcacaagctcggcctcaagcaagccgagtatggaaaacatgagaatgacaaggccaactttgagcgccaggtcgaaaggcgtcagcgcatgtccaaaggtcttgcacgaagctacaacatcagcgggtttgatacaattgtggaccagtcagatgtggaggaattcatggcaagaatacggaagattctaaaagatcagacccaggtcttggaccgagctaaaagagaggcacagggtgaattacgtgaagcgcagacatccctgaaccagatcagtgagcgcaagtccgtgttcaagaaagcaaaaacgccgcgcagtgacagata

SEQ ID NO: 22346 - DNA, 615 bp, Emericella nidulans
gttatgcgaaagccagcgctggtccaaaacgaggcgaggcagatggccaaacttgacagtgttttgcgcgaatctctaaggaccaacacccttgtgagccaaaccatgccgcgaaaggtcatggtggatagcctacagacgccggatggaatcacgcttcctcggggcgcaacagtggcactgctcgcacgagccgcccagactgacccagatatctatcccaacccgaacaaattcatccctttccgccatgccgttccaggcgggaaacaattcgccgccacgggagagaatttcctggctttcgggcacgcgaagcacgcgtgccctggacggtttctcgtgtctgttgagttgaaaatgttggttgcacatatactgagacactatcacatcgagctgccggctgagtacggtggtaaacggccaaaggcagtttggtttactgacttgaatttaccgccgcagcatggagtaatcagggtgaagagatgtgtataatgggctttgtactagtactcacttagtgcaaaatgtagacggcgtttattcacgggaaatacaaggcagacgggcgtcctagcagtacttctctcgctactattgctcagttcc

SEQ ID NO: 22347 - DNA, 591 bp, Emericella nidulans; identical to SEQ ID NO: 15270
  unsure (1)..(591): unsure at all n locations

SEQ ID NO: 22348 - DNA, 850 bp, Emericella nidulans
gcggaaaccaccgtgactgtatcggccggatcatcgaccacgaaaaacatctccggctcggtcaaaacaggcacgacgatcttcaaaattggagaatgggatggccagtgagcactaattatccttcattaccagtaaaggacagccgactgacccaagctttgtcattttccagaccaactggcttccgcaacgcagataaacaactccgcatgcacccctccgactcccggatggactcctggtcttccacctacacagttggctcttcttcgctctctgacttccccatggctgtcttcaagagcgtcaataaccccgtgacgatcaagttcaccgctacttctgcacagacaggtgctgcaactctccgcataggcacaaccctctccttcgctggtggtcggccgcaggcaacggtaagcgactcagccgcctctggtcaataaagcaaaacagcaatgcagtgtaactgacaatcatgaaatccagatcaacagctataccggcccggctccttaagcgccaactaatctcaactcccgaggtgtcacgcaaggtgcttaccgtgggcttgggaaggtgtatgatgttagcgtgcccgctggaacaattgttacgggcgagaatacggttcgtcccattgctaatacattctggcgcccgcgcccggctgactgaccgtgtatatagatcactataagcgttatttccggaagctcaggtgacgccttcttgagccctaacgtggtacgtatcattcatgtccttctacattacgcagactttgttggttggtcgactgactggtccactgatataggtttttgattgcattgaacttttccag

SEQ ID NO: 22349 - DNA, 850 bp, Emericella nidulans
ggtatgtacttctctacgactcgcacaacggtcatgctgacccgactagcaacaactgtccatctggggtgagaactgtgacgaagacgtgtctgatatcacggataaactgggtgtcttgctctatgaagtgggagagctggaggacatgtacgtcgaccgctatgaccagtaccgtgtcaccatcaagagtatccgcaatattgaggcgtccgtccagccaagccgtgaccgtatgtagctaccgcctcgtatcgtggcttacgctgacatgtcctaggccagcagaagatcaccgatgagattgccaagttgcagtacaaggaccccaactccccacgcattgtcgttctcgagcaagaactcgtccgcgccgaggccgagtctctggtcgctgaagcccaactttcgaacattacccgtgagaagctcaaggctgcattccagtaccaattcgatgctcttcgagaacattgcgagaaggtcgccatcatcgccgggtatgggaaacaccttctcgacctcatcgatgacactccggtcactcctggtgagactcgccaggcgtatgacggatacgacgctagcaaggccatcattcaggactgcgaagacgccttggcaaactgggtctcgtccaaggctgccgtcaaatccagcttgtcccagcgttcacgtactctctctcagcgccgacaggataacatcaataagggccgtgaaaatggggtggacctgtcgtcccaggaccagcccttgaggggtgaccgggattcatgggttgccgcagagcagcaccctagctaccaccatgacgatgatgaagaggctgccagtgatggagacatcc

SEQ ID NO: 22350 - DNA, 431 bp, Emericella nidulans; identical to SEQ ID NO: 11026

SEQ ID NO: 22351 - DNA, 513 bp, Emericella nidulans
acatctccagcctacatctccaaaacagccttcaaagccagtggaacattctcaggaggaggaggagaagaagaagaagaagaagacagctgttatcaatgaagacgcggagcacgtccaaaatcacgccgtcaaccaactggctttctcacgtctgtcatccacgcctttttctaccatccttgacaaccttccctcttccatctggaaggcagacaaccactcgcgccacgggccttcaagagaagagattcgggtaatcttggattccacaaagtgtatcggcaaagttgcgcgtgaaggcaaggatgctgccggaaagccacttgaagccgaatactattacattcctgacttcgatgacgatgttatgcgtcgtgaagccgtcgtcacagacctgcgaaaacccggccttagaaactgtcgaaagcaacataaggtttgtctctcattcagacttggccatgactgtactaacctgagcagcaatatttttggcggaaaccgaaatga

SEQ ID NO: 22352 - DNA, 500 bp, Emericella nidulans
acgtgagacatcccttgaacagatgccgtctctgcacttccgccgccgcatggcgtaacttgacaaaaaaatccaaagcctcaacggccgccgcttccaccacgacgaccactcagccccaatctcagagtaatagcaccggcgccagcaccgaatgcccacctgacgtcgaagccctcggccgctcaacctggaccctccttcacagtctcacagcgacataccccgaaaaggcctcaccaagcgaacagaccgagatgaagtcgttcctcacattgttgtcaaagttatatccatgctgggtctgcgcagacgatttccggaactggatggcggagccaagtggtaagaaccagccgcgactcggcgggagaagtgagtttgggaattggatgtgcgaggcgcataatgaagtgaatcgaaagctggggaagaaggaattcgattgtcgtttttgggaagaaaggtggaaggatgggtggaaggatgggaggtgtgat

SEQ ID NO: 22353 - DNA, 783 bp, Emericella nidulans; identical to SEQ ID NO: 14035

SEQ ID NO: 22354 - DNA, 850 bp, Emericella nidulans
agaaatggttgagaacatgaaggttgtcgccgcctctgacgtagagctcactgtggaagagcggaatctgctttctgttgcctacaagaacgtcatcggcgcccgccgtgcgtcctggagaattgttacctccatcgaacaaaaagaggagtccaagggcaacgagtcccaagttgctctcattaaggagtaccgccagaagattgagggcgagctcgccaaaatctgccaggacatcctggacgttctcgaccagcacctgatcaagtccgctcagagcggcgagtccaaggtcttctaccacaagatgtatgtttctgtagttgttcatctatgccacccatcttaacatatctctacgccaacaggaagggtgactaccaccgttaccttgccgagttcgctgttggcgacaaccgcaaggctgcggccgacgcctccctggaggcctacaagtctgccaccgaagtcgctcagaccgaccttgcccctactcaccccatccgtctcggcttggcccttaacttctctgtcttctactacgagattctcaactctcccgaccaggcttgccacctcgccaagcttgctttcgacgatgctattgccggtatgtagcgcattaatgtcagatctaggcgctcgactaactttcgttgcagagcttgacaccctgagcgaagagagctacaaggactccactcttattatgcagcttctcagggataacctggttagttaaattcacgcgatgctcggaacagttcttctgacatgatttagactctctggacctcctctgaggccgaacccgctgcagagaatgcccccgccgaaaagaaggaggaag

SEQ ID NO: 22355 - DNA, 639 bp, Emericella nidulans
atggaagctccccgctcacatccggctcctgagccgaagataaagcctaccacagtggatggaggcttgacggatcaggttaagaccaagagtggtgggatcacattcgcacaccaagactctctgccgaagttacctatcccggatcttgagagcacatgcaagaaatatctcgacgctctgtcgccgctgcagactcctaaagagcaagaagagaccaaggctgctgtacgggagttcctcaaaggcgagggtcccggccttcaagagcggctgcagaaatatgccacatcgcaaacgagttatattgaacaattctgtacgtgagcatagttgacttccttccagcttctacgaagtctaagctaacagttattctagggtacgactcctatctgaattacgacagtcctgtcgttctcaacctcaaccccttcttcttgctggaggacgatccaacacctgcgagaaacaaccagctgactagagcggcatcgctggttgtttcggccttatcatttgtgcgcgctgtcagacgggaggagttgcctccgataccgttcgaggtacgccattgtgcatgtatcaatattcccggctatttggtactgcacgtgttcctactgagaatggctgcgt

SEQ ID NO: 22356 - DNA, 850 bp, Emericella nidulans
caccatctcagatcttattcagatttccccagaggatttttcaaaatatagttccgttgccatcgaggacaacattaatgaaaagtacgccaacaaagtaagcccatctcgatgtccctcaggttcacaaccctagtctcttaaaacaattttgctgactttactggtaggtcattcagaagattgggctctgtattggtttctatgatctcttagagtcatcagatggtctgatcggccatggcactgggctcgtcaatgtgaacggtgagctagcccagtctccatcccgatctttcatgatgttctagccgactgacatatactacagtgaagttccggcttattgtgtttcgcccatttaggggggagattgtgctgggcaagatctcaagcgctactgaaaatggcataaaaagtaacgatgggtcattccgtgatgacgctgtatgctaattcactggcaccagtcggcgtagaatttttcaacgacattttggtacctccagaactcctttggatggcgctagattgtgagtctcacacagtctttgcttggccgtggctgacgtgaagcagtgattaccaggaccaggtttggatctgggaaaacgaagaagggacgttctacttcgatgtaggagaagttgtccgcttccgcgttgaaatggaagaatggcatgaccagattcccaatgctcctgatcttggagatggcgctccaattgaccgcaagcctccgtattctattattgtatgtacagatcactggaattctggaatatgcccttctaatggaatacagggatctatgcagatggctggtctggggccaatatcatggtggtag

SEQ ID NO: 22357 - DNA, 485 bp, Emericella nidulans
agctatgtctgccgttcagcaacccttcttctatccttccctctcagcaccttctccagtcgtctcagcagaatggcgttcgcgcagaaagcacgcctgctggagatccacccgcaatcctgaccctgattccgctcaatggcactttcgaaaagaaacagatcacactgccgtactttcctgaaaccctgcgaatcggccggcaaacgaatgcaaaaaccgtacctacgtcgaaaaacggcttcttcgattccaaggtgctatctcgccagcatgctgaaatttgggctgacagagcgacggggaaggtcctgattcgtgatgtcaagtcgtctaacggtaccttcctcaatggccaacggttgtctccagaaaaccgtgagtctgaagctcatgaaattcgggaaaatgatacgcttgagctggggatcgacattgtcagtgaagaccagaagaccatcgtacaccataaagtctcggccaaa

SEQ ID NO: 22358 - DNA, 455 bp, Emericella nidulans
agctcttcatccgagaccggttgtcagaaccgcagccgcagacggacctctcgtggtccggtctcccggtcatctttgacgaggttttcacgggcctctaccgtcttggccgtaaatcctctgcgtcatttataggtgtcaacccagacatcgctgtcaacgcaaagctccttaccggaggcctggtgccgctgctgcactaccctagccagcagcgaaatcttcaacgcgtttacaagcccggagaagcgagatgcgctcttgcatggacacagctacactgcgcatgcggtcgggtgccaagtagcccttgatctccttcggacaatgaacaatatggacgaggacggatcctggaacgacttcaagaacgactggaaacaaccccatgccggcgacaccgcccgggtctggagcgtctggtcccacaagctgctccacaacctttcccacgc

SEQ ID NO: 22359 - DNA, 690 bp, Emericella nidulans
gaacaagttgagaccttggaggcccagtttcaggcgcaccccaagcccagcagcaacgtcaagcgtcaattggctcaacaaacgcaccttagtctccctcgagttgcagtatgtgatattcaagctggttgaaggctagtttactgactcttgcagaactggttccagaaccgacgggccaaggcgaagcaacagaaacgacaggaggaatatgagcgcatgcaaaaggcaaaagcggaggcagaggaggctgctaagagaaagtctgagtcttcagtgcctgagtcttcagattctcaacgttcagcggaggccaaagacgagaagaagcaagatgacagcaaagcccctacccctaaaccgtcaaagccagcatctgacgaccaaaaacaatccgaagctcctgctgagtcgaatcaccagcagacccgcagtgaatctaatcgcgtagctagccttgcgtctctgcagagggccatggacgccgccgctcagtaccaaggtggtcagggcacgacaagcatgggcgggtccggatcagtgtccccaaccacatcgctgccgaatgacgcagactcggccgtttggagttcagtaaactcaacaaacggagagctctctgttcccggtttagagaactcgcagtctttctctgattaccgttcaactagcgacgcgggtgctttgttc

SEQ ID NO: 22360 - DNA, 850 bp, Emericella nidulans
tacccaccggcatttattgaagatggcgcgagacgagcctgattctggtgtctgtgtcgttgacggccgtgaatacgtcgagcaacctcctcccgagaactcttccgcttggggaaaaacagtacttaataaggtatgaagaccctggcggatatagttgtccttgtctaaaaaacggcgcagttccgtgatctcaatccgggtgaatatcctccaaatttcaattgcgggtgggcttacgaaactgtcgttactgatccctcacgacacctgccctggctccggggaaagattatatccctcgggggccagttcgttcgcaaacgagttgagtctttggaggaattatacgccatgtttcccgaatcgaggatcttcattaatgcgagcggtattggaagcaagtatcttacggacgtgcgtgatgacagatgctttcctgaacggggccagaatgtgttcttccgtacaagcaactgccgaactctctactttcgaaatggcaaggagtacacatatattattcctcgaccattatcccaaggcgtgatcctgggaggggtcaagcaaagagacactctgtaagctaggaaacctgctttgtggctcttttactaacgacagcaggtcaccagaagtagacatggagattgcaaaggacgaaattgcccgggcgcatcgccttgccccggagatcgtacccgcagatccgacggaagaagtcctcagttatatcattggaattcgtccttcgcgagaaggaagctttcgactggactctgagaaaatcggggaccgcacccgttatgtcagcatatgggtttggggggtgaggatacgccttttcata

SEQ ID NO: 22361 - DNA, 850 bp, Emericella nidulans
catggtcgtcagttcctttgccatcggtgttcttgggaaatctgtttacagcctcggttttgtcgacgctattctgacagttttgttcttcaaccttcttggcatcatgaccgtctgcttcttctcctgttttggcccatttggcctgcgtcagatggtgttttcaaggctatggttcggctggtatgtcaccaaaggatgtgagtatcttcaatccaccatggtttataatatggtttataattgcggcgagggctcatatatcatatctcctgcagttgctgttctcaatattcttgcatgcttgggttggtctgctgccaacgccatcgtaggcgctcaaatgctccacgcagtgaactccgatgtacctggcttcgccgcgatcttgatcatttccatttgcacgcttttggtcacatttgcgggatataaagtggtccatttgtatgaatactggagttggattcccactttcatcgtcttcatgatcatcctgggcacctttgcacattcgggggatttccaaaacatccctatgggagtgggaacatccgagatgggcagcgtcctctccttcggctcagctgtctacggcttcgctacgggctggactagttacgcagccgattacactgtgtaccagcctgccaatcgcagcaagcgcaagatcttcctttcgacctggctaggacttatcgttcctcttcttttcgttgaaatgctcggtgttgccgtgatgactgcaacggatattaaaggcagcaagtatgatgtgggctatgccacgtccggaaatggcggcctcattgccgcatccttcaccactgggggctttggcgattttgcc

SEQ ID NO: 22362 - DNA, 850 bp, Emericella nidulans
aacttatcctgcctgagtaggtaattccggaggtctatcagattatgttactgttccagccaagcatgcgattctgttgcctgagagcgtccccctggatcttggtggtgagtccgccaagtgcacttttcactgacctagctaaagcagagcccagcgctcgtcgagcctctaacagtagcctggcatgccgtagcccgcagcccccacgaaactgcgcgtactgcgctcgtcgtcggcggcggccccataggcctcgcagtcgtgcaggtcctcaaagcccggggcgtgcaaaccgtcgtcgtcgccgaggtctccacccagcgacgcgaatatgcgctcaccctcggcgccacacacgttttcaaccctctcacggacgatgtcgttgcgcgtgtccgcagcttaacggataatgcaggcgcagacatcagctttgaatgctcaggagtacaggcagggttcgatacagccatgaatggaatccgggtccgggggacgacgacgattgtgtcgctctgggagaaaaagcccatgatcgatgcgtttgatgtggtttcttatgagaagcatgttattggggcggcaatttgcgacgacggggactttgaggctgtgatcggggccatcaaagacggtgtgttactcatcctttctcgtcttgcttattactcagttccgttgagaaggcaacatgctgactggtctcctacacgctctaggcaaactcaatccccgtcccatgatcactagcaagatccggatggaggacgtcgaagaaaagggcttcaaggcgcttgtcgacgagaaagataagcatgtaaagatcctgattgacattgccgcatga

SEQ ID NO: 22363 - DNA, 572 bp, Emericella nidulans
gtgagttcacttcagtagatgtttcagaatgctttgaagctgacggattcacaggtggccatttatgctgcgctggacatggactgcgcaggtcttcttcacactgcacaccctgactattctcatgaagatccactcttacgccttctacaacggtcatctgagcgcaacagagcgtcgactctcagaattggataagcctggttcgcaaccaacaggtgaggctgttcggtatcctgaggtgcccacttccaagcagccactgcgacgacctagtatccataagcggtcaaactcagttgcgcaactgcgcgacgacctagctactgagttaacttcgccaatgggcaatgttacgtatccccagaaccttacgctctacaactacgtcgacttcatcttctgccccactctctgctacgagctcgagtatccccgcagcaaagaaaggtcgtggatggaagtcggatacaagacccttgcagtatttgggtgcatcttcctcttgacgcttgtgagcgaagagttcatcctgcctgtcctcgcggaggccggcgttcgcttacatgccg

SEQ ID NO: 22364 - DNA, 850 bp, Emericella nidulans
gatcttctcgatagacgagcacccgatgtatatctacgcaattgacggacgctacattgaaccggtccttgttgaagccgcccggatagtgccgggttctcggtattcagtccttattgagctcaaacagaataggacagctaaagactacacgatccgcgttgcccagaacggactcaatcagatcatcaatggctcggcaacaatgttgtatacctcgcaccggcctcagcagaacgcttcaataccatatattacggaaactggcgacgcaaccacaccgcaaacagtatatttgaatgaatctctcattgtcccatttcctgtccaactccccgcgccaaccgtggaccagacaatcatcctaaatattaatcactatcacgccgcttaccgctggcaattaggaaacgggagctttcctatggaattagaagaggtccgtcctgccctgttcaacgcaagcgcaatcccatacccatacagcgtgtctaccctaaacgacacctgggttgacattgttttcaacgtatccggggcgaaccaaccccctcatccaatgcacaagcactcgaacaagtattttgtgatcggggagggtagcacgccgttcatatggtcgtccgtggcagaagcaatggaggagatgccggaaaacttcaacttggtaaatcctgaactgcgcgatacgtaccctacaccgtttgttcctgaagcaactggagtctggctggctatacgatacaaggttgttaacccaggcccgttcctgcttcactgtcacctgcagatgcatcagagcggtggcatgacattggctattttggatgggattggagattggccgctt

SEQ ID NO: 22365 - DNA, 850 bp, Emericella nidulans
ctaatcggacagactgtcgacacaaactctgccttcttcgccagatactgcttctcgctcggaatccagctcaagcgcattgaagtcatcgctgacgaagaagaagagatcatcgaggccgttcgccgcatgagcaaaaactacgactttgtcgtgacaagcggcggcattgtgaccaacgtttgtacccttagcccctctacacccatgtatctaacgaaatggacgaacagtcacgacgacataacctactcctccatcgctagagccttcaacctcccgctaaagctgcatgaagccgccttcgagcgcatgaagaaactcaccaagccccatgccctcacccccgacttcagctgggacacgccctcccccgcgctcactgcacgcctccgcatggtcgagctccccttcgatgcctccctccccgccgagtcccaggccatcttcgtctcagatgacatgtggggttcccatcgccattgtcaacggcaatgttcatatcctccccggcgttccacggctcttcgagcgtctcctcgaacacctccggccatcgctgcttcctcgtcttgttaaccccgagggtaaggggatttaccgatatttgtttagcacaccgctgccagagagtgcagttgcgccgtacttgacggatctggcgacaaggacggcagccaggggcgtcaaggttgggagttacccgcggtggcagaagaagaggaacacggtcacgctggtggggacggataaggagtttttggactcactagttgccgaggtcgaggagaatgtgcaggggaagaaggtgtcggcggaggatgagttggattcggacactgaggagaag

SEQ ID NO: 22366 - DNA, 527 bp, Emericella nidulans
ccacattccatccaccaaataactactaaactatttagacaattgtcagccagtctagccacttcgtgcatacaaaccccgacatcttcgaggatcctcactccttcattccggagcgctggctcggcgagaaaggaaagtcactcgataagtggctcctagcattttcgcggggcccgagaagttgtcttgggcagcagtgcgtatactctttccattaggtcatctattcaatgccgcttgcgtactaatgtttgttgatgggccgttaggctagcctgggcagagctatatctgacctacgcccatgtatttcggaaattcgatctgcagattgatccgtcaaggtttgtttgcatttttggtcttttcatcgttttctcccttttttcctcttattttctgcttttttctttggtgatgtgtgctgatcataccgtagtcccaacgagctaaaatggaaagataccttcttagctcattatttaggcccacatctcaaggctaaattgacgcctgtcataagc

SEQ ID NO: 22367 - DNA, 818 bp, Emericella nidulans
tctgggactgacccccgggataatccctatctggctcatatgtacgctgatacgtcctctaacggcaactcaagctcacaggctgataacaagaattcagcctttgcgaagttgcagcgacataaaacaactgctcgcaggcgcaaaaggttgaagacaacgagttcaatccgttcacaaatcggccatactcgagcaagtacttctcgatcttgaaaactcgccgtgatctccccgttcatgctcaaaggtaggttgccttcccttcaatgatttcgcaaatcgctaacgtgtgattgtttctcagagatgagttcctgcagctctaccagcagtctcagatcctggtcttcgtcggtgagactggttccggaaagaccactcagattccccaattcgtcctgcttgacgatctgcctcagacccaacgcaagatgatcgcctgtacccaacctcgccgtgtggctgcgatgtccgtcgcccagcgtgtagctgcagagttggatgtcactcttggggaggaggtcggttacagtatccgttttgaggatatgactagtcccaagacacttttgaagtacatgacggacggtatgctcttgcgggaggccatgaacgaccatgaactcagccgctacagcactattattctcgatgaggcccacgaaagaacaatgtcaaccgatgttctcatggggcttctcaaggaagtcgtgcagcgccgacctgatctgaagatcatcatcatgtccgccactctggatgcacagaaattccaacgatacgtcaatgacgcacgtttgcttgctgtccccggt

SEQ ID NO: 22368 - DNA, 550 bp, Emericella nidulans
atggtccgctcattggcaagttgagacgcgggcaagagctgaagatgacttgtatcgcgaagaaggggattgcgaaggagcattcaaagtgggcgcctacgctgctattgggtttgagtatgatccgcacaataacctcagacatgtggattattggtacgaggaggatcccgtcaaggaatggtacgttgaaataatgggctactttcgggctttcagatctagcccttgactttatgcgagaattgcctactaaccccctggaaggcccgtctcccacaacgccgcctgggaacctgcagcacccgcagaccaaccgttcgactatgacgcccaacccaacaacttctacattgacgttgaaagtatcggaaatcttgaaccagacatgattattcagcagggtatcactgttctccagcgtaaactcgccgccgctatcaaatccctttccggtgaagatggcacgaatggtgttgtggacgaagatatgatgggagttcagagcccagacccctatgagcctcgtgacgacggcggctacacagcc

SEQ ID NO: 22369 - DNA, 850 bp, Emericella nidulans
aaatgcatttacacttagccgtttgtcctaagcgtgaacaaagccaagatgtcctgcatcgagctcgggaaatgggtatgaagatctgggccgtagagaagctgcagcgcatgattgccacgatcaacgacatagatcttactaatgggagtggccattctacacggaataatgccgccgggtctcagacgaagtccagaggaaaagatgatctctcacaagttctccagaacgaactgaacggcccctctgaccgaagtcatctatctgtgctcaaagacttggtaccattcaagggcccttttatatacgtacatgacatggatgaaaagacacgacccgtcatggttcgagaatatcctaaagttgcaagacgacaagacggcgtgtggccgcagttcaggagtgctccgctcggcaagtgcccgtttatcgaggatgtgccctctaaacgagagattgaaagacaacgagctcgtcaggagaaagagaagaaagaatttatcaaacctgcagtgcctcaatctaaacacaccgcggtggaacctcgaaacgaggaaaacttgccgctcaaaaaagaaacgagtcctgccgagggagatgagctcgccccgcattgcaccaggcaagagactccggatgctcctcaagggcttcccttgtctcctaaaaagagctcagagagctttattccaccacagcttaaccgcaaaggcccgttctatcatggccgggaaccagccgcctcaggcgtacaaccttcaaacatcacctctgccattcgttctcaaatggtctcctcgacggctgctcgcctggcgcaaaggccggtctcagcaaagaagtccat

SEQ ID NO: 22370 - DNA, 668 bp, Emericella nidulans
gatgtcagatccaatgtacgccaggtcaaagttcctgtcaaaagggcccctggtacggtttattgagcacgacatttgacaaatattccgttgacagagacccgttctaggacccgaacgaagcaaagtggacgagactagttaagaccacttattgcgaccccaatggcgtcgagagaacttgggagtcggcggaaagacaggtaagattggatgaaacggttattcccgtccgtcgtctgacgtctatgcaagcggtctattccggattgctattgctgatactaagagccaaggctttgctagacaatcaaacatgatgtctcaaatgttcgctccgaatgtctactgatctttatttcgatgaaacagactcgacctgcaaactgtgaggtagatggtgtcggaattgtaaccattttggacaaatccagcggcccggagctcctccttcagaagcaatacaggccgccaatcgataaagtcgtcattgaagtgccggctggcctcatcgatcccaatgaaactgtcgaggagtgcgctgtgcgtgagctcaaggaggagacagggtatgtaggcgtagcgacgcgacaagtacggtcatgtacaacggtaagtaatatatcttcgccacattcgccgacggtcgccgtgctgatgctggcctg

SEQ ID NO: 22371 - DNA, 850 bp, Emericella nidulans
tcgggcatcctcgcctccgcctcagtaacgacattgctatccgacctcgacttgcagggccagcgctactctgtttcaattttcatcttcaccgtcgccagcatcgtctttcagctcccctgcactgttgccgtgcgctatgtcggcccgcggctctggttcgcgactatcacgttctgcttcggtctcatcaccctatgcacagcattcgtgcaaacctggcgccagatgatcgccgtccgcattctgctcggaatcttcatgtctggcatataccctggtttgacatacctcgttagcacttggtacacgaggcaagagcagcagttgcgttttgcattcctgcagtcgggtgaagttgcagccctggcgacaggttacatcgtcaattacggcttgaatcagctgcacggtaaagctgggctcgaaggctggcgttggatgtacctcgttcagggacttatcacctgcgttattgggattgcgacatactggtggatggttgatttccccgaaaatgcgcgaaagagcttccactttcttacagagacggaggcgaaggttgcagtgcagcgcatccaggctgaccgcggggatgtcgttctcgaccccttcgaatggcgaaaggtccttgtcaacttcacggacccaaaactatacggctttgcgtgcatgtacttttgtctgaatatcgtctccacgtcactcaattatttcctcccccaaatcatcgagtcgggattaggtttctcgagcaatgagtccatcctcctttccactccggtacctaccctgacttcctaattttaaggaagggcacagcactaaccaaaaccagccctactactgg

SEQ ID NO: 22372 - DNA, 850 bp, Emericella nidulans
atgccacacaataaccgctttcagcgatgacggcgactgtctacttgtcgggggccggacgtcccccgcttccgcgctccaggatacctgggtccgcaagaacaatgtgtggcaagcaggttccagcctcccccttgctcggttccgacactgtgcgacgagagtcacacttggttctgatcgtagcagcggcagcgtgcttatctacggcggaaagaccagcgatggtacaacgcttgatacctggttgctgtggaatgataatggagagggatggagctcagttacggttcggactatgaacgacgcacccgcaccaaaggcccggtttggggcatgcttggctagtatagatagcacgaacggtttgctatttggtggtattgggcccgatggcacaattctagaagatttctggacttggaaattatacgaggaagctgatgggtctttgtgtatggagctgaccgaccaaactgggagcctcaggaatatagcgctgggttttgacattctcccacgctttggggctacggtaagttccacggcgcaagggttggttgtatctggtggtatcatcccccggcgggttgttcccttcgacggcgagattctcctcctcgactcggcgacactgctcgattgcatcaagaatggcttaccattgaccactcccattctatctacaattggtcttgacgctggttttaccggaccacggccattactggtcggacacgtctctcacgcgattagcactgatcaagtcctccttctaggcggcggcgctgtctgcttttccttcgggacattttggacgcgagggacctggatgttatgtccagtaggc

SEQ ID NO: 22373 - DNA, 642 bp, Emericella nidulans; identical to SEQ ID NO: 8655

SEQ ID NO: 22374 - DNA, 617 bp, Emericella nidulans
ctggtgcatgagcacatgcggcagctttggctttgtttgcctacgcaggcatcacagacctcgttgacggttatattgcacggcgatataacctccagaccgttgttggcacgattattgacccgatggcggataagctgctgatgacgattggcgtcgcttgtcttgccgttaacgggtcgatacctggtgagtctgtccgcccctcaatagtccaaagttaacaggcgtagtatggctcgccgtgatcattctcggtcgggacgttggtctcgcgatttccgcattctactaccgttggatttcgcttccgccgccaaagaccatggcccggtactgggacttttcgctcccgtctgcggaggtgaagccaactgggatctcgaaagtcaacacagcgttgcagctgctgcttgtgggaagcgcgatagctcttcccgttgtcccggaagcgtttattgacgcttggcagctgaaggaaacaatgaccgcatttcagtaagtctaccatttcccgccgtgtttttatgtttgggcgcacagggaagctctggcggtacaagtagtatgttcgaggtactacaagtacatacgaccacagggtgtggagaacaggg

SEQ ID NO: 22375 - DNA, 850 bp, Emericella nidulans
gcttctcgcacctattctgcgcgcgcccgccacggcttacagctacaacccaaaggaggacaccggctcggttgaagacgtctttgcgactggctcgcagctggccctagtgtcagccatgcaggccagaaattctgcccgctttactgtgcttggttccgtggagactctgcaggacaaatggttctctgctaccgttaaagcacccggtggtgaagaggtccaaactgtcaaccgggaattcgccaagcaattgaccgcgtggacatttaaggagaccggtgttctcaaggtcggaaagattgagcatcacctggcgaaggatgacctcacagccgaagatctgaatcctagcatctaccgaatcaagaacgagaccgtatgtgcttctcttcactatcctgctcgcactaaccttgctcaggtcttctccatcgaaatttccgaatataactacgatggctatgtacccttcgaggttcccgtcaacgacaacatccagctcgaattcaccatgctatccccattccaccgtcttaacctacaacagtctgcaacaacaccaaatagcaccatcttcagcacccggttcactgttcctgaccagcatggcatcttctccttccgcgtcaactataaacggcccttccttaccaacatcgaggagaagcacgaggtcacggtccgccactttgcgcacaacgagtatccgcgcagctggaagatcaccggcggctgggtctggatcgctggcctttggtctgttatcgtgggattcctggcctttgtagttgtttggctttattcggagcccgcgacggcggagaaggcaaagactaagaaaacgcag

SEQ ID NO: 22376 - DNA, 850 bp, Emericella nidulans
tctccatctgatggagatggtcatcaacgcccatatattacaacccagatctcagtctccaagtcctagaggccaaggggtggaccaacaagttcttcagcgcctggttctctagcattgacagcttcagacgtgttcacgacaagacactgtccattgtcgccatcacctcgctgctcactttgaaccctgccgacgtgccaactagcgttcaacaaggttggccaaggttgcttcagggagttaccagactgttccacacattgcccgccgctattcagagtatgtattttcatccagcccaagcgacttagactaacgttacacagatcgacaagaggcgacaaaggagtcggacttccaatacgaagaggaagacgaggatgatgaaggtaacgactgggagggcgaagtggaatggactgagggtgatgatgaggctggtcccgagggcgatattcccgacgagagtgctgcttacctggacttcctgaacaaagaggtgagtgatggcagcatgtgcttttcagcttgtggctaaatcatcaccaggcggcaaaattcggctctttcgctggggacgacgatgacgacgagcttgatgaggagagtttacttgagactcctctcgacaaggttgaaccatatgggctgttcaagcaggtgttcatgagtacgtgttactttattcctctaataggatttagctaacttgcaaccagacctccaacaacaacaacctcagctctacgaaaatctgacgaatattctaaacgacgaagagaagaagatcatcgagtctgtgttccatgaagccgacgcaaaggctctggccgcggccaatgaagaa

SEQ ID NO: 22377 - DNA, 848 bp, Emericella nidulans
cggcagtccccagctacaatgagggatatgcagcgcctcgatcagtaccatacagtcaaggttcttggcgagggctcgtttggaaaggtcaagctggcgatccatcagcccagtggccgtcaggtagccatgaagattatctctcgccgcaagctgctatcccgggacatgatcggtcgagtcgagcgggagatccaataccttcagctgctacggcaccctcatattataaaactgtatgtcgatgttcaattgggtctgggccgtgctaacgtcttaggtacactgtcatttcaaccaaaacggatattgtcatggtgctagaatatgctgaacgagagctgttcgattacctagggaagcgaggccgctgcaacgacgcggaagcccgcaagttcttccagcagatcatctgcgctgttgagtattgtcaccgccataagatcgttcaccgcgatttgaagccggaaaatctcctcattgacagggataaaaatgtgaagattgcagattttgggttaagtaatatcatgacggacggcaactttctcaaaaccagctgcggcagccccaactatgcagcgcccgaggtcatctctggcaagttgtatgccggcccggaggtcgacgtctggagctgcggagtcattttgtacgtgctgctggtaggacggctcccattcgacgacgattacatcccggcgcttttcaagaaaatcgccgcgggcaacttccacatgcccacctacatttcctccggggctgcccggctcattcggtaaatgaagcaggtgcacccagtgcaccggatcaccacttgaagacaagcgcggtcatccaggtacgca

SEQ ID NO: 22378 - DNA, 679 bp, Emericella nidulans
gatccccaaaccacctccaccacaagaaccaccacaggcccattttgccccaatcactcccatttcttatttcccgtctttatattccttcagtgaccgcgagctagaggagtcctcgaaagccaagccctacggagggattctctccgaggcagatgctgacacctccaagacgctaccttcacaacttgaccgtgaacgcttcgaagccgcacggcagaaagctgaagacgcttggcaaaaacgtctagcagagtcccagaatggtggcgaaactgtgcagcatgcttctcagaaggtctttgggcctccatctaggatcaagtatatcaactttggcggattcgagattgagacttggtacgcagcgccgtatcctgaggagtatagtcgaaaccgagtactctacatatgcgaattttgcttgaagtatatgaattcggactatgtcgcgtggcgccataaactcaaatgccccgcaaaacatcctcccggcgatgagatctaccgtgaaggctccatctcaatcttcgaggttgatgggcggaaaaatccagtctattgtcagaatttgtgcttgcttgcgaaactgttcctggggtctaaaacgctttactatgacgtcgaacccttccaggagagtcatgaccgagtaaacgattagggtgctcttcgtcgg

SEQ ID NO: 22379 - DNA, 396 bp, Emericella nidulans
gtcccggggcgttctataccggcccgaaagtcagcagcattattgccggcatcgcggtggcatggctgggctttggcttgttgttaagcatgtttccaacggtcaagaatcctggacgtaagtgccgttcatttcatttctcctttttcggtggctgggctgcgggcgatgatgctaatggatcttgggctggatacagccgcagaaatgaattacaccgtcgtgattaatgggttcgtctggattgctagcatgttgtattatgcggtttacgcccgcaaggtttttactgggccaagggtaacccttgccgagggagagggtgtctcttcgtcatttattggcacacaggcggaggcagcaagggaggtgaacaacgagaaagaggtcggtaca

SEQ ID NO: 22380 - DNA, 361 bp, Emericella nidulans
taagttctccgctcgttgcccaacactcccttatcgtaaaggaaagtaaagctgatatacgtgtaggatgcctctctatcacttcgtcacagcggacttgccctccaacacgaaagctcccgagctagacgacgtccacgccgctgcttcccttcgcgccgacgcttcctggtcaggcgtcgacgtgtcagccggcgccggtgtaaccgaggaactggttggtttgtacacctcgtaccttgtctccgttggatttttgccgccaccgacagagtctggtgcacgaccactgccggctgtatcgatcacggatgatcagcgtgaggcgatggcgggtgttggtggacgtggtggaactgct

SEQ ID NO: 22381 - DNA, 586 bp, Emericella nidulans
aggtacatttccgacgcttccgggctcggtcaagcagttcatggatgatcaccctgagcacatcgtcgaagggaactcgttgcgtttcctgagcgatgacaatggcaaaacctacaacaaatgccacttcgtatgctccctttgccttgtgacttgtttcatagctgatatgcaaagtggtcgaattttgagatcggcagcctggattggttgagatccaaggagtacctggactactttgactttctcgaccgggcaggcggcttctactatgaaagatggggtgacgcgcctatccattcgattgccgctggcttgctcctcaagaaagaacaactgcacttctgggacgagatttcctactaccacataccctttacccattgtcctcgtgatgaacaactcaggatggacctccgatgtagctgcgacccatcaggaaactttgactggaggggtttctcatgtgagtctcctggcctggctaatgcagcgtcttcattaacatattgccatatcaggcctttcccggtattacaagaccaacaatatcccattgcccccaggtgttgacgagtacagctgg

SEQ ID NO: 22382 - DNA, 850 bp, Emericella nidulans
atctaaggttgagctgctgcactactgtcactcgcattccatcccggtgatatcctctatgggtgctggatgtaaatcagatcccacgcgcgtcatgatcacggatatgtcagtcagctcagacgaccgactttcacgcagcaccaggaggaggcttaaactgctgggagtaactactggtatcccagtggtgttttccacggaaaagcccggccccggcaaggcgacactattcgcgctggcagaagaggagttcgccaagggctaggtaggcgacgtatcagaactgtcggatttccgttctcgaatcctccccgtacttggaaccatgcctgccgtctttggatacactcttgcaaatcacgtcatttgcgagatctctgaatacccaacagactatagcatgggtggtaagggcaaagacaagctctacgacaccgtccacgcacagctactggtgacccttgaacgactcgctcgagcggaaagtgaatcaggcacccagcctattggactgcgtctcccgatgagcagagacgatgtcatctatctcgttgacgagatttggcggggcaagagtgtcgttactggacttcctagtcggctagcacttaccctatggaaccgaccatccaatgggtttaagccggatccccaatgggagaaagaagggcaaatcttgattccattcaagcctgaggatttagtgcttatgaccaaggaggaagccacccgccatgagaaggaagttcttatgggtggaaagaaggtcgaagacctgtacagcgaggagattatccagaaggtgaatcagcgccagaaggagatggcatactatgagcaatttcga

SEQ ID NO: 22383 - DNA, 500 bp, Emericella nidulans
tccctcgaccgcgaccaggcagcggtgccagtctgctcagtccacccccctcgacggcatcaaccctgcgagtcccaccaggcatgcgtccgggcactacaaactccaattccaactctctctccccgaactctgtgaccctcaaacccgtcaaaaaggcgtctcaacgcgctgttctcgaacccggattctccccactcgactgggcagccctaacctcaaacccaaaccacaaactacgcggcgcgaatctcccgggaactctaataaaggtcacaccgtcgatgctgaaagcgcagaatggccggaaagggacagatgcgtggacatcatatcagggaaaagtctataatatctcaccgtatttgccgtttcatcctggcggaaagggggagctgttaagaggagccgggaaggattcaggaaagctgtttctggagattcatccgtgggtcaattgggatgcgattctgggggagtgtttggttggtattttggtt

SEQ ID NO: 22384 - DNA, 670 bp, Emericella nidulans
caaacgaggtctattggcccctctaactcggtgccagataaactgtacctcgcctcctacgaccacactcccgacgccaaaactcctttcccatacccggccgagcaaccgaaatcccccagcaagcgccgagcgcaagcctctccgagcaagaagcgcagtcccgtttatttcacggtcgatgatacccttctgtataactcgtttcatgcggattttgggcccctccacatcggtcatctgtaccgctttgccgtccacttccatgacctccttgccgcgaacaatgaccgcgccattgttttctactcacggactgacgctcgcagccgtgctaatgcggcttgtcttgtcgcttgttacatggtcctgatccaatcgtggccgccgcatcttgcgctcgctccgattgcgcaggcggaccctccgtacatgcctttccgagatgccggatacagtcaagcagactttattctcaacatccaggatgttgtatatggtgtttggaaggccaaggagcagggagtgtgcggcttgagagatttcagtcttgaagagtatgttggcattgatcacaccaaattgtttgaatgctcatgattgcctaggtacgagaagtttgaacgagtcgacatgggagacttcaactggatcagccctcatttcctcg

SEQ ID NO: 22385 - DNA, 546 bp, Emericella nidulans
acaaaaccccttatagagcagcttgagaagatggagtcgaattatgagaatgcaaagagtgcttcagagcagtatcagactcaactgactcaagctcgcgaagaggttgaacaagaacagtcgaaggtaaaagctattgaatctgagctgaacgatgaacgagctagtttactagagctggagtctaaactcgctgcaggcgagacaggcgcaggcgccctacgagaacatgttgcagaggaagaacagaagctaaataacatgtcccagcaactcgccgaaaccgaggctcgggctcgacgatcagaagaagaagccttgcagtggagaaagcgggctgaggctttgtctgagtctgataaacaggttgcagccaggattgatattcgcacggcaagacttgaggaactctcgagacagctgtttggacaagtggaaaagctggagcgcatgttggagcagctaggctttactgtcattcgccaagatggagagatagtagttcaacgatcctccaaagtcaatgccctctctgctactgcagac

SEQ ID NO: 22386 - DNA, 638 bp, Emericella nidulans
tcgagaagctgatctccgacggagcgagtctcgactgcacggacagcagtaggcgcacacccttgcaccgtgcgtgcgccagcggcacgagggacatgatcgcgctgcttctccgccatggcccagaactgaaaggcgcgcgcgatcgacgtgggaacacgccgctgcatgtcgtctgctccgagagaagagggtcggcatttgaccttcggactgcggtgagtttcttcattgatgcaggggttgatgtgaattgcgtgaatgaggagggcgtgacggccctgcatctcatcgccgagcgaggagaggaagaatggattagcacggtggagctactgctgcagaatggggcgcagattggcttgggcgatgggatgggaaagacggcgctgcacaaggctaccgtcgccgggtgcgcagagctggtagaggcattgttgcagaatggagcggcagttgacgcggtggatgatctgggccactcggcgctgcatatgtgcgtggtcagtgagagtctcgaggcgatggaggtgctgctgaggtacggggcggatgtgaatttgaggaatgtacggggccatgcagtgctgcatctggtctcccgtctcggatcggcccggctgtgggcatgctcatga

SEQ ID NO: 22387 - DNA, 850 bp, Emericella nidulans
aagtctcttccttcgtcttatccggctaggcgtcccagctatcacgctcgaccagcaaggacgtgctagaccaagtattgcagagcttttccggtggcgctatcagaaccttggaaacctgcctattgtcgaacaagcgccagaattcaagcaggccaatgctggtttccagtttgagtaccaattcatcaacgtgccagactaccagggcacaggggaacgtgagccaactcctcatttcgtccagaatcttggtgaagcagagtatgctgttgccatattccagtatatgcgacttttcggtaccctgcatagaagatatagatcctcgccacatacgcaggtcaaacggcactaatcaaggatgtcttaaaccaccggtgctccaagaacaccctcttcggcatgcctaagatcgtcacgacagtagacagatatcaaggcgagcaaaacgactgtaagctcttgcttcaaccactcagttccaggcaactaataaggtttctcagacattatcctctcccttacacgcactcgcacagttggatacctccgtgacgtacgccgtcttaccgtagcgctttcccgtgcccgtcttggtctatatattctcggccgccgcgaggttttcgagtcctgttacgaactaaagcccgcattcgatttgctattacaacgtccagacaaactcatgctcgctcctggggagatgtacccagctaccaggacgttagacgacgaggtcaagggcacccctatggaaggcgtagagcatctcggccagtatgttttcgagatgacccaagccaagatcaaggctcttgggggggaaggtgccattgttgatgag

SEQ ID NO: 22388 - DNA, 745 bp, Emericella nidulans
tcagcgggacgttatttccaagtactgctttgggaggcttttggttcatcgcacaggaagaatgggagccaaactatagaaatgcgctgaaagccactctggctccggtccatgtatttcggacgtttcccttcctcaaacggctaacagacatcgcgccactgtgtgcaagatgggccagtcctggtatcagggagatgctaatcgagtcaaacgagaagatgcctgcccgaatacgaaaggctaggcaagactccaagagaggcatcaccgagacccaacccagtctgtttgctgcgcttctcgacgcaccattgccagaagcagagaaaacagaccagcgattgggaggggaaggttttcttatgatcgccgctggcaccgagacaacggccgtatgtttatataccctgcgctagaccgtttatcagtgactgagcattcgcagtggacgctgaccgtcatcaccttccacctgctaaaccaaccggacacactgaaccgtctcaggtgtgagctgcaggatgccgacgctcttaatctccaatggtttgccctggagaggctgccgtacttgactgctgtcattcacgaaggtctacgcctgtcatacggggtatcgcagcgtatttcccggattgctcccacagagacgttggtctatcaaggcgagcacaatggccgtagaatcgagtactctataccgtctggcaccacgatgggcatgtcccccgcacctcaaccc

SEQ ID NO: 22389 - DNA, 553 bp, Emericella nidulans
tagagacggcgataatacgactactatgggatccatgaggctatactgcctggcgggggctttgggggttaacaaggggttaaggactgacgcttacgacaatgacaaccccgagcaccgtaagatccgtctgggtatcgagcagggtgacggtatctccaacatggtcaaggtgtccgaaggtctggctgccatcaaggaggccggtcttgagctttgtgcaccacgaggatctggctgaccgaccagatgagattccgtggtactaccctcttgcaggttccttcaagcatatgacttcgccatgggatttcttcactattgctcggatgacatggtggggacgtggcttggtccaccgctttgtcggcgccatggagaccatcaagctcattccccagggaacacataaaaccggcgatagcctggcgttggccgcggactgccttgtcgccggtggtgagaagaagctcttcactccgatgtacctgatggttgcacgcaagcctgagtaaggcactaatgtacaatgaccagcatttctttcgtgcag

SEQ ID NO: 22390 - DNA, 582 bp, Emericella nidulans
caggttgcccccaagggcattgataacgctcggtatgtgtacaagtatgcctatggtctatgtaaggccccaaaggtccagctcgtgtgcaaaagggttctgaactttatgtacgtaccgggacatttgtctcacatgctttttaagacattgaagaactcccctgcgcgccgtggtcgaaagacacggcgcagataagaagctttccccgtcaccaaggtcatcatcgccgaaggcaaagaggatattactatcaaggtgtccgatgaaggtggtggcattccgcggtctgcgatccctcttgtctggacctatatgtataccacagtggagcaaacacccaacctcgacccggactttgacaagagcgacttcaaagcgcctatggcaggatttggatatggtttgcccattagtcgcctgtatgcgcgatactttggcggtgacttgaagttaatcagtatggaagggtatgtgcttctcaatgattgttatatggcattgcaacttacatgatccaggtacgggacggacgtctaccttcaccttaaccgcctatcatcgagttcggaacccctccaa

SEQ ID NO: 22391 - DNA, 441 bp, Emericella nidulans
tatttcgggcagaaggacgttcagcagactgtcgtcattaagcgcatggtcaaggacttccacattgataccgaggtccggataggtcccacaatgcgcgaagatgatgggctagctatgagctcgcggaatgtatacctgggcattaggcgacggaaggttggactagttctctacaacgcattgagagcggcagaaagtgcatatcagtctggcaagctcagccgggccgacatcttggatactgcaaacagtataacccaacagttgttaacggagcagcaatctctgtccgagaccgagcgcgcgctgttcaaagttgactacgtctcacttgctgactcggatacgctcgacgagcttgaggtcgttgatccttcaaaaggagcgatcctcagcggagccatcaagatggcgccacttgagaagacgaacgtagga

SEQ ID NO: 22392 - DNA, 784 bp, Emericella nidulans; identical to SEQ ID NO: 12555
  unsure (1)..(784): unsure at all n locations

SEQ ID NO: 22393 - DNA, 544 bp, Emericella nidulans
ccagctcagacaacaaaaaacagtgtggtgatcaaggtcgggatggtcggagatgcacagattgggaaaacgagtttgatggtcaaatatgttgaggggagctgggacgaggattatattcagactctgggtgagttttgcggcctcttcgttgccggtggttgctgattgctccaggcgtgaattttatggaaaaaacaatttcgatccggaatacggagatcactttctccatctgggatttgggaggccagcgagagttcgtcaacatgctcccgctcgtgtgtaacgatgcggtcgctatacttttcatgttcgacctcacccgcaagagcactctaaattccatcaaggaatggtaccgacaaggccgtggctttaacaaaactgccatccccttcctcgtaggtaccaagtacgaccacttcgtcaactttcctcgggaagatcaggaggagatttcgattcaggtatgtgcagccgccgccgctggctcttctcggctctgactctttaggccaatacgttcgcaaaggcgatgaaa

SEQ ID NO: 22394 - DNA, 850 bp, Emericella nidulans
aagagggatatcaacttgctctccacggcgcgtggcgtcaggataagcagtgggtagcggatcagctctttgccatgtttacccaggatcccacctccaccgcagcaatttatgaacacgcaattgagtataactggttggagtaccttcttggatatacaaatggtcttgccatggaccttgcctgttacgctcataggaaaggtccgtttgaactggagcagtgggttcgcaatgccgcatccaaaggtcttatggacatgggtacacttctatccaaatacctccgtatcaaggccgatgatgagcttcgtgtccagaggagggaacagcttgcgccccagatggtcagcttgtcggtcaaaacagtctttacactgctgtcggttctagaagaatacgtcggagatccccagaacctcacccctgtgcaacgaatttgcatccaaacttatccccgactaatcaactacggcgaaggttttgatgatatcatcgatgcgaatggcgaatctgggaatgcattgcccgaacctgtggacaagaaaatgcaagagctgttcggcaaaatgtaccatgaggagctatctctgagagaaattcttgaactcatgaggcaatacaaatcctctcgcgaccccgcggagcaggatctgttcgcctgcatggtccatggcctcattgatgaataccattgttaccacgaatatccgttggaggcgctcacgaaaactgctgttatgtttggtggtatcatcaacttccgtcttgtaaaaagcatcactctgaaagtaggcctgggcatgatactggaagctgttgagaacatacaccatgatcgagcgtacat

SEQ ID NO: 22395 - DNA, 783 bp, Emericella nidulans
cagatgacaactttcgacttgaacgacgtcgcgacggctctccgcacagcccgtgctgaagtgaggcctatcgacgcacctacgaagacctggcctagtcttaacgcggacatggcattcaaagttcagcaaatcaactccgggcaggccatacagaacggtgaccgactcgtgggatacaagcttggcaacatcgcaaaggtcatgcaggcggcgtttggcctagaccaccccgactatggctttttgcacgcaagcaccttcatgtacgagggcacgacgatctccctaaacagattcatcaaaccgtttgtcgaactcgagcccgcatttgtgctgcggagttctctgaagggccctaacgtcacagttgcggacgttattagtgccattgactatgccattcctgcaattgagatcatcgactcgcgcgtcaaaggttgggagattgatcttccggatacattagccgataatgggtcaacgggtgcggtcatcataggcggaacgcctcgaaagctcacggatctcacactcagcaatacacggggtttcttgaagttcaacggcgaggaggtgatgtcaggaaacacgaagaatatcctgggcaatcccctgtcggctgtcgcgtggttggtaaacaaactggcggagtatgatatcgagttcaaggccgggcaactcatcatgccggggagctgcttggaggccgttcagatggacaagcctggaaaatggacatgcacctatgaaaactggggtacgattgagtttgatgtatta

SEQ ID NO: 22396 - DNA, 850 bp, Emericella nidulans
gatctcatcatcaacgaaattttggtgatgaaggacagcaagcacaaaaacatcgtcaacttcttggacagttatctccatgggctagacttgtgggtggttatggaatacatggagggaggtagtcttacagatgttgttaccttcaatatcatgagcgaaccccaaattgctgctgtttgtcgagaggtacgtttctttgagcgatatttgagttctagtactgatttcgtctcttagacgcttaacggcttgcagcaccttcactcgaaaggtgtgatccatcgagacatcaagtcagacaatattcttctttccttggatggcaacatcaagctcagtaagtgggacattgcaacattacgctcagactgaattttaatgattcgcagccgatttcggtttctgtgcccaaattaatgactctcagaacaagcgaaacaccatggtcggcacaccgtattggatggcccctgaggttgttacgagaaaggagtacggacgtaaagttgacatttggagcctcggaattatggccatcgagatgattgagggagaacctccttacctcaccgaatcgcctctcagggctctatacttgattgccacaaatggcacacctaagatcaaggacgagcacaacctgtcgcctgtcttcaaagatttcctccattttgcgctcagggtggaccctgagaaacgagcatcagctcatgacctattgaaggtatgattatgcatctcaacacagcagactggctctaatcctttacagcatccctttatgaacctttgcgcgcctctcaatcacctttcgcctctagttaaggctgcacggattagcagggcg

SEQ ID NO: 22397 - DNA, 850 bp, Emericella nidulans
gggcgacgcagtgcatcggcatccgccgttgaacggccttggatccaacacttgtatccaagatgccttcaatctcgcctggaaggttgcatacgtccaccgcggcattgcaggagcccaattgctgtcgacatactccgccgagcggcagcccgtcggccacgggatcgtgacgcgcgccaaccaggcgttcagggaccatcagcagatctgggcggcgctcggaatgctcggcgcatcgctcgaggagcgacagcgtgcgcttcaagagctggccgagcccacgatcgctgggcgcgagcggcgtcaaaccctccagaaggctgttgcgcatactgcacacgagtttcacggcttaggcgtcgagatgaaccagcgatacgagggtccaggaatctacgacgcagacgaggccgatccctttgcactccctggccgggcggccgaggatcccgtcttgtactatgagccgaatacctatcccggctgccggctgccgcatgtgtggctgaaccgggccatcccagggcagccagtgtccacaatcgacctcgcagggcacggcgctttcacactattcaccggtattggaggtgagccgtggaaacaggcggcggagagcttaggtggcaagcttggagtcaccgtgcatgcgcattcaatagggttccggcaagactgggaggacgtgtactttgaatgggagcgccttcgcggggtggaagaaagcggtgcggtactggtccgtccggatcgatatgtggcctggagggcagacagtgtgttgaaggatgttgctgcctgcgaggagaagttgtcagtggtgctgaaagcgatcctgtgtgttgat

SEQ ID NO: 22398 - DNA, 677 bp, Emericella nidulans; identical to SEQ ID NO: 6543
  unsure (1)..(677): unsure at all n locations

SEQ ID NO: 22399 - DNA, 622 bp, Emericella nidulans; identical to SEQ ID NO: 9998

SEQ ID NO: 22400 - DNA, 850 bp, Emericella nidulans
tatacaggcgaagcatgttcgcccaaaaagtccatatgtcatatcgatacctatgcaggtcaagctttgcactattcgagcatatcagaggtatttctcgttcatcggttaatatacatgtcctaacaatctcaggatatggaacgataaaccgtctacgctgacaactgttattgggcgaatcgtcatgtctctcattattggctctatatactatgggtaatatctgtcgctacatgggcaacacactctgactctattaggacccctgacgcttcagccgggtttcaaagcaaaggggcctctctctttttcgcttgtctgtacgtgctcacccttaggaaaggagactatgtctaactttgcctagcatgaatgcactgatcagtatcacggagatcaattcactatacgatcagcggccaatcatcgagaagcaagcctcgtatgcatttgttcatcctttcgccgaggcgttcggtggaatcgtgtcggatattcctgtcaaattcgtggctgctgttgtcttcaacgttatttattactttctggctggattggtaggttcctgcaaaattctaataagagcaaagctaatgagcacagcgctatgaaccttcacagttcttcatcttcttcctctttacatttctaagcacactcgctatgtcagccattttccgcacgttggcagcatcgacaaagactttgtctcaagcaatgtccatggccggagtaatggtattggctattgtgatctacactggcttcgtgattcccacgccccagatgtctgatatcccgtggtttagctggatcagatggattaatccggtttattacacattcg

SEQ ID NO: 22401 - DNA, 850 bp, Emericella nidulans
cttcgtgaacgacactctcgatggccccgttctccgcaccttacacgaaggcggcacacgcgcaatcctcctccgctgtgcgggctttaataacgtcgacctcgtggtagccgaagaactcggcctgttcgtcgcgaacgtaccctcttatagccctgaagcagtcgccgaattcacgatcacgctgctacaaacacttaacaggaacatccataaggcatataaccgggtgcgcgaggggaatttcaatctcgagggtttccttgggatgacactccacgggaagacagtagggattgtgggcgtggggagaattggattggcgcttgcgcggattgtaaggggtttcgggtgtaggttgctagcggcggatccgaagccggcggttccggcggaagagtttaagaatgagtatgggggtgaaattgtggagttgaggactttgctggcggaaagcgatgttgttagtttgcattgtccgcttacggcagggacgcggcatatcattgatgctgagaatttgggttatatgaagcggggcgctttgttggtgaatacctcacgcggtccgctggtcaataccaaggctgcgatagaggcattgaagagtggacagttgggtgggcttgcgctggacgtatatgaagaggagggggcgtatttctataacgaccattcggcggagatcatccatgatgatacgttgatgcggttgatgacgtttccgaatgtgcttgtttgcggacatcaggctttcttcacgagggaggcgctgacggagattgcggggacagtgttgagtaacatggaggattggattgagggcaggcattgtggcaattcgctagtt

SEQ ID NO: 22402 - DNA, 834 bp, Emericella nidulans
gtccccacccacgaagaccatgtcgatgtcctcatcgttggcgcaggccctgcgggccttatgctgtcgacgtggctaagccgctgcggtatcaagacacgcattgttgacaagcgtgggacaaaggtgaggctgatctggaacataacatgaccctactgtaatcacctgagagcgggacgacgactgactgctacgctgtaggtcttcaacgggcaagcagacggcttgcagtgtcgcactctcgagattttcgactcttttggctttgcacaccgcgcctggcgagagtcgaatcatatgattgagatatgcctctggaatccggacgagaacggtcgtattcgacgatccgaccggattcctgataccattcctcaaatcagtcgcttccaacaggtggtcctgcaccagggccgtatcgagcgattttttcttgattcaatgaaggagcacagtaatctgacggtagagcgcggcgtcctgcctgtctcctttgaaattgacgaggccaaagcagcggacttcgatgactatcccattagtgtgacgctgcgcaccttgtctgacaaggaagccacgccacagcagcggcagcagcaccaaaagtctgccgatggacagcgcgctgttgttgatgatggactcttccgaagcaacctggtggccgacgacacagacgatctcatcagggcagcaacagccgacagtagtcgcgacggtcaagtggagttggtcaaggccaagttcctcgtcggttgcgatggggctcattcctgggtgcgacgtcaagcctgcttcaaactggagggtgactcaaccgactatatctgg

SEQ ID NO: 22403 - DNA, 557 bp, Emericella nidulans
ctcttcccagttgcgcggagaaccactaccctcttaaggcatggattgactgatcgcatgatctgattagatacgaacgacatcatcgtcctctacccgcagacggccgtcgataaatcgtcgcacaccatctggggcggcgatttggaagcgaataccctttcctgctgggactggatcgggatgtatggagacgatgccgatcagaagggtggtatgttgaattcttccgcgttccgtatgccgtcgtgctgactggggcgaccaggggtgcagatggaggccattgtgaaccaggtcaagcgtattgtcagtgggtttgcagatgaccgcgctgatgccggcgcagaagccgagacaatatccgcaccgagttctggttatcctgatcgggagctgtaggagggagtggctgctcgcgacaatagaaccacacatatccaacatttgactcaaatctgaagaaattaagatacagcacaaggacttttattttattttcattttatttttataccttattttacttattttgaatgtactgctgaccccgtccg

SEQ ID NO: 22404 - DNA, 850 bp, Emericella nidulans
ctgttcccggtgacaaggcccttgtgaaggtcgtgcggcacgtcaatgccctatcctacagcgtgacggactttatcaaggtcattgagcccggtccgcaacggcgagacgacgcaattggatgcaaatactttggcaaatgctcgggttgtcagctgcagatgctgtcttatgcggaccagctggcgcataagaagcgcatcgtggagaaggcgtacgccaacttctccggccttattccggaactgattcctgccattggggatactttcccatctcccctgcaatacgggtacagaactaagctcacaccgcactttccacctccaaaacgcaatgacgccggagagccccaagtaccgcctattggcttcacatacaagaaccagcgccgacacctagatatcgaagactgtccccttggcacagacatcattcgagcagggctcaaaagcgagaggaagaaggtagcggaaaatttgcagcagtacaagaagggcgctacgatcttactgcgcgaaacaacttcccgcacacccaagagctcgacagacaccgaccctacctccgccacaaaacccaccgtaatcacctacgaaaacaagaacatgccacaccaagaatcaggcgacgtcatcactctggatcggccgaactatagcgaagagaaacggtgcgtgacagatcaaaacgcacctcgttgagtacatgacgatacctttcaccattaagccgtgccttcttcagacacaactgatctttccgattacaggacatcgcgacatgcctactcaactcgcaaattgaccccataatactctgagctactcgtcggcttacatacgtttcg

SEQ ID NO: 22405 - DNA, 766 bp, Emericella nidulans; identical to SEQ ID NO: 13225

SEQ ID NO: 22406 - DNA, 466 bp, Emericella nidulans
aagaaaaagttcgaaaaggataacgaaaaacttttggcagaaggtgataaagagatgaaggcgagtgatgctcgtaacccggttggaggctgtcaaggaattagagaaaaaattcaacaaggagaacaagactggcaaatgagaagctgagggccgaagcccaaccgtagagaaactggaggcatccattactaaacttcagcagcggatcgagaacatgtagctccaggcccaagacaaggaagataatatggaagtggctcttggcaccttaaagattgcgagtgaaccgatacatacgctttcgatttaatcagcagctaatcctcagcagaattatatcgatcctagactcacggtcgtcttcagcaagaagttcaaagtcccaatagaaaagttcttctcaaagtctctgcgggagaagtttgagtgggccattaagtccgtcgatgagaactgggagttt

SEQ ID NO: 22407 - DNA, 850 bp, Emericella nidulans
agactagcttatgatcgagaactctcaatctcggggcagagcattaagcctggcgacattataaataatgcgtcactcattctcggaaagcaaataatcaacatccttccggaagggtaaggttacccaccatatgcttccaactttattctctttacaaaactgaggcgtatgtaggtctgccgtcttgaacccagagctggcaccactttgcctggacgctcagaaaacagctgttgaattgccaatccgagtgaatcaaaccgatcctatactgatagagctgctacgccttgacttcaacaatggcgacagtgagattgtgacgattcaaagtaaacaactgaaacaattgaaacggcagtcagacaagaggcgctcccaattgtcttctgagttacaccgtgatctcctcctaccaattcggaaaaccggaatatatcgtttacagcgtgtcgttgatgagtccaagcttgaggtccgggtgcgagcttcggattctatagtcactgcctgccctcgcgctctaatcaaaaactcacacacgcataagtgccgtggtgagctctcgaacctagtgctagccgttgagggtactccgcccttgaaaataaagtattccaggcaggtgaacgaccatgaccgaggtttctcatttcaaaacatccaaccagaccatttacggactccacttctcggtcataggtcgcttggtcggttgttcgatggacgggagccagatatcacctgggctaaaagtcagatcattgaaatacctctaaacgagtctctgaacattggcggtgattggctctacatgatcgaggaggttcatgatggctcgggcaac

SEQ ID NO: 22408 - DNA, 352 bp, Emericella nidulans
cttccagattctggcaggctatacccggcgaaatttgagtcagtatttttttccaaacttggcgataatttttttttatctaaccaatctcttctcgcacaggaccaagcctccatttgaccgacatgactggtacgtgatgcgcgaaacgccgtcaggccccaaggagatccgctatgtgattgactactactctgggcccccagagccgaccggagagcctgttttctaccttgacattcggcctgctttggattcgcccaccgccgctgccgaacgactgctgagatggggatctgacgtctggtatcgcgcaagcggaggcgctgtccgtgacaatgacaaaaaataa

SEQ ID NO: 22409 - DNA, 500 bp, Emericella nidulans
aagccctcaccttttcttaacaccgccggtcttcacagatcccggtcccccttttagtgcgcccagtggtgggggtctcccattcagtgcgttaccgattaccaagttacccgaatatacttcttacaccgtcactcctaccggggggtcgcggttttgcaagaaatgccaatgtccgaagccggaccgggcgcatcactgctccacgtgcaacgagtgtgtgctgaagatggaccatcattgtccgtggctggcgacttgcgttgggctacgcaactacaaagcgtttctgcttttcctcatttacacgtcgctgttttgctgggttgattttggtgtctcagcaatctggatctggacggaggtttttaatgacacacggtatacccacggtatactaccggtgcccgtcgtgttgttgtcgattctcggaggaaacattgggctagttctgaccggattcacggcttggcatatcgccgtgccacccggaccgtggt

SEQ ID NO: 22410 - DNA, 850 bp, Emericella nidulans
ttcggaagctgtacacggatgagattcttaagaaaacaggagtcaagctggggttcatgagtgccttctctcgtgcttgagttctggctatgaaggatgttcccgccgttaacgcttccattgaaggccccaatggtggtgataccattgtttaccgcgattatgtggacatcagcgtcgctgttgccacggagaaaggcctagtgacacccgtggtccgcaacgctgagactatggatctcgttggtattgagaagtctattgcagatcttggcaagaaggttggcctagatgagcctcatttaggagatcataactgacgccattaggcacgtgacaacaaactgactattgaagatatggctggaggcacctttaccatcagcaatgtgagactcttatatttccttatcgagcaagccatgtactaatcggcatttagggtggcgtttttggatctctcatgggcacgcctattatcaaccttccacaaactggtaagttatgtgtccacgactactagtacaatcatcaaactaacccgctccagctgttctcggtctgcatgccattaaggacaaacccgtggccatcggcggcaaggttgagattcgtccggtatgtaaaatcctgctaaagcgcgcttggttcttgttgttaacctacctatcagatgatgtatcttgccctcacttatgaccatcgacttctggatggcagggaggccgtcactttcctagttaaggtatcttttacctcaccttttcgtgttctttctgtggaacaatttgactgacgatatcgacaggtaaaggagtatattgaagaccctcgccgcatgcttttgggt

SEQ ID NO: 22411 - DNA, 850 bp, Emericella nidulans
  unsure (1)..(850): unsure at all n locations
gtactgccaaatctcaactgctgaagttcacggaaaaagtttcaccaatcgccatctacacctccggtaagggttcgtccgctgctggtcttacggcatccgtgcaacgggacccggccacacgtgaattctatctggagggaggtgccatggttcttgcagacggtggtgttgtctgcatcgatgagttcgacaagatgcgagatgaagaccgagtagccattcacgaagccatggaacagcagacgatctccatcgccaaagccggtatcaccaccatcctcaactctaggacatctgtcttagctgcagccaaccccatcttcggccgatacgacgacctcaagactcccggtgaaaatatcgacttccaaaccaccattctctcccgtttcgatatgattttcgtcgtccgcgacgatcatgaacgcagccgggatgagaacatcgcccgtcacgtcatgggagtgcacatgggtggccgaggcatggaggagcaggtcgaggcagagattcccctagagaaaatgaaacgatacattagctactgtcgcagccgctgcgcacccncgtctttcacccgaagcggcagaaaaactctcgtctcatttcgtttcgatccgaaagcaggtccaccgcgccgagctcgacgccaacgcccgctcctctatccccataactgttcgtcaactggaagccattgtccgtatcaccgagtcgctggccaagctaagtctgcagcctatagcaactgaagcccacgttgatgaagctattcgcctcttcctcgcatcaacaatggacgccatacacagggtgagggccagggcacagagagatgatggaggag

SEQ ID NO: 22412 - DNA, 480 bp, Emericella nidulans
cccggctttatggtcggagccaaggccgagcacgccggcatcatcaagatgggcgctcagctcgtctcggctgtgagctgctctactgtgcctcacatctccatcatggtaggcgcgtcctacggagccggtaattatgccatgtgcggaagagcctataagcctcgcttcatctttacctggcccacgggccggtgcagcgtcatgggcccagatcagctatccggggtaatggagtctgtgcagcttcagagcgccaagtctaaaggtaaggtcctggagccgaccttgctgaagaaacaggtagagagtttccgccagagtgcggcgcgggatagtgagtgctacgcgaccagttccatgctcattgatgatggcatcattgacccgagggacacgagggacgttctagggatgtgcctcgaggtcgtcaatttgaatggggtcaagggaacggagacacatcatcttttagctaga

SEQ ID NO: 22413 - DNA, 850 bp, Emericella nidulans
tcgcgatgattgtgacgggcttcgtggtcatggtcctcttcgtgctgtatcaagcatactgggcgccgcagcccttcctcaaatacgagttcctgaccaaccgcactgtcctgggcgcttgtctcattgatgcaacctaccaaatgtcctactactgctggaactcctacttcaactccttcctgcaggtcgtctgtaatctccccgttgcagaggcaggttacgtaggcagcactttccaggtcgtctcaggcgtcctcttgttcatggttggcttcgccatccgcaagaccggctacttccgctggctactcttcatcggtgtcccgctgtatatcttcgcgcagggacttatgatccatttccgccagccgaatcagtatatcggttacattgtcatgtgtgagatcttcatttccattggcgggagtatcttcgtgctgcttcaacaacttgctgtccaagtaaccgttgatcatcagtacgttgcggccgcgttggccgtcctgttcgtctccggcagtaatgaggtgctgtcgggaatgcgatctctggcgccatctggacgaacactttccttcccgcgctgatgaggaatttgcccgagagtgcgaaggcgaatgcggtggccatatatggcgatctgagagttcagctttcgtaccctgtgaactcgccagagcggatcgccatccaggagagttacgggtatgcgcaagccaggatgttggctgccggcacgggcctgatggcgctgatgtttatctggatgttcatggtcaagaattataatgtcaagaacatgagccagacgaagggaatggtgttctagacaccgcactcgggtgtt

SEQ ID NO: 22414 - DNA, 500 bp, Emericella nidulans
tctcctcactccctacccccccccctattttttccccccacacccaccctaccctaatctctcctcccaaacactaccccccccttccccaacatcacacctaccctacttctctccccatccccccttccttcaatccccctaccctcatccactactcctactcctccatcccttctcacctcactacccctctctccccccactctttaacccccaccccctatcaccctcctccactattccccaccttctcctccttccctcatccccctccaccctcaccttcttccccacccacactctcaccctctcctatcccacccccccctgttctccttctctacatcttctcctcttctcccattaccaccactcacacctcctattacaccccccctcccccactcctccactcccccactacctcactccatctcttctacataccttcccctcgtatgtctttccccgcatcccatcctcttcccctctcaccc

SEQ ID NO: 22415 - DNA, 585 bp, Emericella nidulans
cttctgacgatgctaaggctaaaaagtcgcgatgggaccaaacacctgctcctggtggtggcgaagcccccaagcgccgttcacgatgggatcaagcaccagcgattgcggcggcaacacctgttggtaaccaaggacttgcaacacctatgcatccttcccaagtaggtgcgcctatgattccaaccagttttggaactgatatctctggccgcaatgcccctctctccgacgaggagcttgacatgatgctcccgtcggaaggctacaagatcctcgagcctcctcctggatatgctccaatccggacgcctgcaaggaagcttatggcgacaccggcaccgattgccagctccactggcgtaggtggctttatgatgcaggaaccggagagtgcccgttccctcggcaagcagcttcctaccgagattcctggggttggcgatctccaatttttcaagccagaggatatggcatacttcggaaagttgatggatactggagatgaatcaacgatgtcagtggaggaactcaaagaacgaaagatcatgaggctgttgctcaaggtcaaaaacggcacgccac

SEQ ID NO: 22416 - DNA, 850 bp, Emericella nidulans
tgacgtttgtctacatttaatggataacctttcatccttaatatggcgtctgctctgcctcgcagtgacggctatgtgctttactttcaagttggtttttgcggcatctgaatcgccagaacttctcaatgagactactatccaaactgttgcaacatttatggatggtatcacacttgtcctatatgcgcgggttgccatgggcggaattgctgtgctctttatgttgatatttatgagaaacggcaaactgcctataaaacaaggtaagcaagcaaaactggcgatgaatcgcatatctgatggaactgtaggattatttcatgaagctctaacgctcttccttctaacccagtcgagagtaacaaatgtgcctatttttctcttcttcagactgcagctcaaagctttgacatggatgaacttgaattctgctgaggttactctcacatctttgctgatgcaatacatagctttttttgcatttggtggatcgaacgctatatcttccatcgatctatctaacgcgtataacggcgtcagcgtttataacgtcattttagttggcatcctgacatatgtgggcaattgggccggcccgatttggtggatatctgccactaagcttttgagaagaggggaatctcatgacgaaagccggactcacactgcacttttaactttccatgcggcctctatcttgacctctgttatggccgcatgtacggcattgaggactcatcttttcatttggactgtattttcgcccaaatacttgtacacaatgtcttgggttattatccatcactgggtgaacctgctgctcccaacggtaggtaggcagtgatgc

SEQ ID NO: 22417 - DNA, 340 bp, Emericella nidulans; identical to SEQ ID NO: 12628
  unsure (1)..(340): unsure at all n locations

SEQ ID NO: 22418 - DNA, 455 bp, Emericella nidulans
cagaagaaggtcttgagttcgcatttctataaaagtgtgcaagcgttggctatcacgctctcgtcgttttcagcaactcctgtagtaggcttggctggctcacggacgatgtcctccgatgctgcatcgcagtatccagcatgcatggagcgaagccgcttcagttacagccatgcctcatgcagggcatctgtcgtggatactgtgtagatcttatcgccccggacgattgagcgagtggcatagatgttcagcaagtttcgttcgtcatcttttcgaatctcctcacccgccgggacaactacatccctcgcatcggtataagcgctatactcggtcccaatggtgttgctatcaggtttgtagctagtgataacgtgcgtctccagctcgcggttgcgttacaagtctctacgcatgttgcaatgatgcctattaatgggtagtcccgccct

SEQ ID NO: 22419 - DNA, 409 bp, Emericella nidulans
ctgatactctaacgcccacacgtctgcctgcctgtccatcgccctcgccccaacaggtcgctacctttctttcggcggtagcgacgccctgatctctctttgggacacaacggagtggatctgccggcgcacagtttcgagtaataacggcggtgccgtgcgtggggtgagcttttcctttgacgggaggttcatctgcggcgcgtgcgatgagaaggagtgtggtggaaacgggattgagatttttcacgcggaaaccggagagagtgtgcatactgttaatactggaggtagttcgaacacgggtgtttcggcggttgcgtggcatccatcaaggtactggttggcttatgcggttacggcggattatgggacgcccggggggttgaggatcgtaggggccgccgga

SEQ ID NO: 22420 - DNA, 850 bp, Emericella nidulans
accttccccttcaacttcaagaacgtcgagaagcagtacgaatcatacaatggcataaatgtgaagctacgatactttgtccgggtaacggtatccaggcgcatggcggacgtgatacgcgaaaaggacttgtgggtttactcttatcgcatgccactggagaccaacagcccgatcaagatggatgtcggtatcgaggattgtctgcacattgagtttgagtactcaaaatccaagtaccacctcaaggatgtgattgtgggacgtatctatttcctacttgtgcgcctgaaaatcaagcatatggagttgtcgattattcgacgagaaacgactgggacgcggccgaatgaatataacgagagtgagacgctggtgaggttcgaggttagtggtcaggatactgattcgttgaattattgctgatcgaacccgaacacagattatggatggttcaccttcaagaggtaagctcatcgcatcgcttaagcgctcattacccggaacctcgtttctcgaccttcctcaaatagaagctagtcctgtgacggaatatggagatgacccttgcttaccgtcgacaggcgaaaccatccctatccgtttgttccttggtggatttgacctgactccaaccttccgagatgtcaacatgaagttttcaacccggtattatttgagtttagtgctcatcgatgaaggtacgattgttaactgattacacgcactcaagatgtgtttcctctttaaacccttgccctcgtgcttgaagctttactccagctatatgcattggcgcctggtctattgcccatcacaccgccaatcttcaatttccaggccttcaata

SEQ ID NO: 22421 - DNA, 644 bp, Emericella nidulans
agttcgttgctaacacacatcgcaatctttagtgttcgctcgttcgacaacacccgcagcgaaacgatccagttccacacgccgcttactttgattgtcgggtacaatggttctgggaagacggtcgttacaccatatatacattcaaaaaggggcatgctaaccctgaatctagaccattatcgaatgtctcaaatatgccacgaccggggaccttccgcccaacagtaagggtggtgcattcatccacgacccgaaggtatgtggtgaaaatatacacaacggacacgggctaagggatgtaacagctgtgtggggaaaaagaggtcttggctcaagtgaagctatccttcaagggcacatctggtgcgaagatggtggcgactaggagtctccagctcacggtgaagaagacgacgcgacaacaaaagactctggagggccaacttttaatgatcaaagagggagagcggacggcgatttcgtcccgggttgcagagctggatcaaattatgcctcaatatctgggtgtgtccaaagctattctcgactctgttattttttgtcatccagacgagagcttatggcctatgagcgagacttctgttctgaaaaagaagttcgatgaaatatttgaagcactc

SEQ ID NO: 22422 - DNA, 850 bp, Emericella nidulans
gatatccccaaagctcaacacggagacgagcccgacgatgtcctcttcaattccctattcggagtgcgactggtggagctcaacaggccaaagaagcttaactcgttgaacggctcgatggtcaggaagattcttccacgcctcaaggttagacacggaactacaacatctggtagaagcgtcgttgctaagctcgttaggaatgggaaaaatctcaacttgccaacatcatcatggtcgctggggccggcacgaaggctctctgtgccggcggtgacgtggctgctcttgcactacagaacgaaaagggccccgagggacaacaggcatcgacagacttcttcggtctcgaatacaagctcgaccatgtcatcgcaacctactcgaaacccttcatctccgtcatggacggcattaccatgggcggaggcgttggactaagtgttcacgcgccattccgcatcgcgaccgaacgcactgtcttcgccatgcccgaaacgaccatcggcttcttccccgacgtcggcggctcttttttcctcccccgtctcgacggcgagattggcacctatctggccctaacatcggcacgcctgaccggtgttcaggcgctgtatgctggcattgctacacactactttgactctagcgttttgggcaatctgacacagcgtctgtcggaattggtcttccgcgacagtgctactctccaggagcggctagacctgatcaaccgcacaatggccgagttcgcgacaggtcttcctgaggaaccccaactggctggccagctgcgtagcgcaattgaccgatcttccgccacgatacggtggagcagattatgaaggcc

SEQ ID NO: 22423 - DNA, 850 bp, Emericella nidulans
aactcgccgcctgcacatccctctggctcgcctaccacacttacattggtgacgaatgtagcaccctcttcgcgttacatcagagatatggacccgtgctgcgtatcgctccaaacgacgttgatattgcctctggtgacgcgatagaacccatctacctagcgcgcggcgggttccccaagaccccagtgtattctaagttcgacattgacggacacagcacgatcttctcgacattgaccttaccagagcgagcgagtcgagccaaggccgtagcgccacttttctcgacggcgtcgatccgtaactcgcaagagaggttgctggaagttgtagatgatttcgtggacaggttgcgacagggggcccagtctggccggccggtcaatgtgctgggcctggctagggctatggcgattgatgctgtgagcgcgtacctcttccaagagcggtatggggcgcttgacgagaacgcggaggttatgtctgcctcactgtttgtggatgcgtatgtgggtgttggcgcgttcttcaactttgtctgtggccgcgttggcgagtttctagtcggtcttgttgaatacctgactcagctatctgggacagccaagtcctttacggcgatcgatgactacaccagccggttggtgagacaggcggtccccaaaagcggcacgtaccaaattcgtctcctggaacgggtctcactgcgccagacgcagattgagatcaaagatgtctgttttgcggggacggactcgacgggcatggatgttgcaacaattatctggtacttggcgaaatatcctgaaaagttagtttccctccgatatacttgccagggtagggc

SEQ ID NO: 22424 - DNA, 705 bp, Emericella nidulans
cctacacagaacaatgctcaaccaaaccgtccttcttccttggtccatgcagaacagactcgcagcccgatatctccttctcgtgagcagggccaacgcctggagcatatagccacacaaggcactcctgcacggggagtggacgccccactcaaggagaatttgtttagccaggaatctcaaggacgagacagccaatatctgcttcggctgatgcaacaagtgagagtcagtcccggtgctggccccaatcaaggccctcaaaatcagccacagagtactggaccaccccctgggctaatgaatatgcctgatggcatgcctcatccccatggagtagagccttctatgaaaggtcccagctttttgaatgaccccgcaatcgccacgatgcagagatcggatgttgatcagctgcgacgacggcctactaatgggccgccaatgggctactttgacgacgttcccttggcgcagggtcccattacacctggtggcagccgtgttcctcagggccatgcgccacccatgggcatccagcgccctcctggttttgagcacatgccacctcccggttgggctggtcaccatatgcccccgcaacaaactgcccctccagctcctttggcccctccccccgggtattccaaccccgaacaggggcgtcaacccaattatatctccaacgtgatgccaatgcctgga

SEQ ID NO: 22425 - DNA, 850 bp, Emericella nidulans
tccacgcctgtgtttacttcatccagcccaccggtcactctctaaagccgcttgatatcgaggttatgcgcaggttacacaccaaggtcaaccttatccctgtgatcgctaaggctgatactctgacggatgatgaaatctccatgtttaagaagcgggtatgaatatgcaaagtccaatattttgagaacttcagttctaacaagattatccctagattctcgccgatatccagcaccactcgattcaaatcttcgaagggcctcgctacgaacttgacgacgaagagactatcgcagaaaaccaagaaatcatgtcgaaggttccttttgccgttgtcggtgccaactcagaggttgctacatccgatggccgcaaggtccgtggccgtagctacccctggggtatcattgaggtcgacaacgaggagcactgcgacttcgtcaagctgcgccagatgcttattcgcacccacatggaagagctcaaggagcacactaacaaccatctgtacgagaactaccgctccgacaagcttactcagatgggtgtcgcccaagacccaagcgtgttcaaggaagtcaaccctgctgtgaagcaagaagaggagcgtgctctgcacgaacagaagcttgccaagatggaggcagaaatgaagatggtcttccaacagaaggtagcagagaaggaaagcaaactgaaacagagcgaagacgaattatacgctcgacatcgtgagatgaaagaacaactggatcgccaacgcgcagagttagaagagaagaaagcccgcctcgagagtggacggccactcgaagaaaagggaaagaggaagggattctctcttcgt

SEQ ID NO: 22426 - DNA, 503 bp, Emericella nidulans
cactatcgaaggtacgcattactcatctccaggtcgtccgccgatcctaatcatgctcgacaagaggtcggagacgccgcgctacaatctcagcagcgtcagaaatattctttgtggacggcaccgctctcgagggagctacagaatacgattcagaaccgcttcaagaccaacgtggtacaaggctggggcatgaccgagagtcacctgcggcgcgatccatgtccccgggggactctacgacgagtctggcagcgtcggcatgctcgaccctaattgcgagtgtaagctcttagatgaagaggggagaccggtgcgaccgggagagccgggggagctgcatgttcgaggtcccaatgtgtgtctcggatactggaggaacgacaaagcgaccaaggaaagccttgacagcgatgggtggctgaaaacaggtgatatcatggtcgccaaggatgattgtttctgggttgtcgacggaaagaaggaactgatcaaggtcaacg

SEQ ID NO: 22427 - DNA, 544 bp, Emericella nidulans
ctctgagaatgtgattggagtcgttcatgatcatttcataacgtttcatctagacatggatattgatggaccgatgaataattctttggttaaggttcatctagagaagcagagagttccaacaggaaaatcgccaaggaagagttacttgaaggtcaagaaatatatagccaagactgagaaagatgctcagatcaagttgagcctctatgacccatatgaattccacattgtgaacccgaaccgaaaatctcgggtaggaaacccggctggttacaggatcgtaccgggtggtaatgcagcgagtttgcttgatcacgatgatcctcctcaaattcgaggtgcattcactaataatcaggtatttaattttaggctatggtgttatatataagattctgattagctataatctcggtttaggacttaatgtgtccaaatgttcatttaactgatgcaattggttttatcggtttagatatgggtgactccatataaccggtcagaacaatatgccggggggatcctctagagtcgacctgca

SEQ ID NO: 22428 - DNA, 850 bp, Emericella nidulans
tggggtatggtgatcctacgcagcacccgcagcctggggccggatctatgccgtcgggtgctcctttcaaggatccccgacctttcgcgcctgtgcccaaggcccgtccgaattatactaaactcggtatgttcattgcattggacacctgggcactttcggtgcactatttcaaatgtattcttatactgatacgtatcttctctagacctgattaaatatgataccccataccttggaccaaaaatccagcttatgttatcccagcttgagttcaagctgagtgtcgagaaacaatacaaagcaggcattgagaagatggtccgattgtaccaggacgaaggcgatagaaagagtcgcacagatgccgagggccgacgaattgagagtaaccagaagattcagcttctaaagcaggctctcaagcgatacgaagatctccatgttgatattgagtcgacggatactcctgatggtgcggacccattgctctctgtgtgacttattctccccctagctgacgttgatttcagatgaaagtttaagcgccccgaatctgcgcaagccgctaaccggtcttctgacaatgcgaattcaagccgttcaggacgttgatcatgcgactagctcaagattttccaggggtcccgagacgtttgttatcgtgaaagtcgaggatactataaaggccagaacaaaggcaaccaggtccgacaggtggcaggatgagacattcaatctcgacatagacaaggcaaacgaggtcgagcttaccgtatacgacaaagctggtgacaggcccactcctattgcgtatgctgtggttacgaaaatcaaacatcggctttgt

SEQ ID NO: 22429 - DNA, 306 bp, Emericella nidulans
cttctgtggatgtttgtcgataagcagactatactgatagggcatagtcttcataatgacctggcagtgctgggaatggtgcatcagcggatcgtggattcggcgatcttgacaagggatgcggttgctggtgcgaaggaggactgcgccagggtcaggaagcttgctaaaacgttctttgaattggacatacagacaggaaagggacatgattgtctggaggatacatttgccgcgagggaggtcgtgctttggtgcctgggtaatccagagaagctgcgggagtgggcagcgggtgagagggag

SEQ ID NO: 22430 - DNA, 526 bp, Emericella nidulans
tccttttgagtcatggctgaggaagatcttgttcgccttgatatcaatggcatttttgccgtcatcacgttgaacaaccctagaaagttcaatgccttgacacagagtctatactatcgtcttgcaagcttgcttcgagctgccgaggagaatccagacgtctatgttactgtgctaatcggcgagggcccctttttctccgcgtaagtcctcttcgctttggcgcgaacaacgcagagtttgcaagagatgctgacgcaggcttcagaggggctgacctcaaagggaagccaccatctatggaggagatgttgtctcgcccttactggcttccgaaattggtgaataacaacgtcgacgtggcgagagcgttctacagccattcgaagattctggttacggcgctgaacggacctgtcatcgggctttctgcggccttgatatctcactcagactttatctacgcggtatccaacgcctatttgatgactcctttcacctctcttggtcttgaactctaagcgaa

SEQ ID NO: 22431 - DNA, 850 bp, Emericella nidulans
gtgcgcagggcttgtccctctcagttgcggatatcttcaattaccccaagcttgatgacatggcaagaattgtggttgcagcttacggtgcgtctgccgtggcgcacaagtacgatgcacctttcagcctggtaggtggcgaggaaagtgcacgctcgattgtccaaaagcatattccacatgtgcagattgatctagttgaggatgtctacccttccacctccctgcaggaagggctccttgcgttgactagcagtcattccagtgcgtatgtcctccaagcacctttcttgctaccgcccaatattgacctggaccgtttccgcgacgcctgggcaaaggttgttgaggcaaatgccattctccgtaccgtgattatctccactgagacccagggtacctgccaggttaccttgagacagtccattgagtggtcacaagcgtcgacacttgaagaatacctggcgcaggatagagaaaggcctatgggctacggaacagcgctaagccggtatggcctgacattagacggatactttgtctggacagctcaccactccatctatgatggttggagtttcgcactgatgctggacgaggtcgagaagagatacaaggatgagtcggtagtttctcgtcctctttttgctgaatatattcgattcctgcagcggcaacagggcaagaccgatgcaactgcattttggaaagtcgcagctacaagatgctttctcgtcaagtgtattcccacagctttcaagctctctctacgaggtggacgtagaccgcaccttcaagtacagcttccctttcagacccagtccaatgtgacggcattcacccttcttta

SEQ ID NO: 22432 - DNA, 648 bp, Emericella nidulans
ctaataccgcaacagtgtgtcgtgacgggcgacggtgctgtcggcaaggtgaacatctgccgctcctccctccccgaaatcaacatccatttcgctaatcaggcgttcagacatgtcttctcatttcttatacgaccaatgccttccccggcgaatatattcccaccgtgtccgtcaccgcgctcctcctttccctctagcgcaatgaacctttgttgaccggttaccacagattcgacaattatactgctagtgtcatggtcgatggtagaccgattagcttaggactttgggatactgctggacaggaagattacgaccgacttcgcccattgtcctaccctcaaaccgatgtatttctcatttgcttctccatcgtcagccctccgtctttcgacaacgtcaagtctaaggtatatccccaccctttgcgaaatgctttgtagtatataatacttcagacgatatgttgctgacttcgatgtagtggttcccggaaatcgaacaccacgcgcccaacgttccaatcatcctagttggcaccaagctcgatttgcgagacgaccccgaacagctcgaaagcctccgcatgaggaagcaggagcccgttacttatgagcaggctctggcaaagagtggccccggttc

SEQ ID NO: 22433 - DNA, 361 bp, Emericella nidulans
tactaacgaattggcataccagaaccaaatgcttgtttcaatgatgcttttcgagtcattggtgaacggcgaatggttcaaacgaaagcccattatcttatttctcaacaagattgacctcttcaaagacaagctcgcgatatctcccatctcaaagcactttcccgactacagcgactcgaacaccgactttgatgcggcagcaaaatacttcgccgatcgcttccgaggtatcaaccggattccggagcgagaaatctatattcactacaccaacgccacggatacaactttgttgaaggctaccatggactctgtacaggatatgattatccagaagaatctccacacgctcatactc

SEQ ID NO: 22434 - DNA, 504 bp, Emericella nidulans
tactcgcatgtggactatgaagatcatatcagtaagggcaaggtcgacagcgtcatggtcgatcgaggtgcgctgatcaagccatggctctttgagagattcaagcaggccagtacctcgacaaatcagcttctgagcggctagcgtacgtcgaaaactttgctaggtacggcatggagacttggggatcagacgaatatggtattggcattacccggcgtttcctgcttgaatggctgagctttgcgtgccgctacgtgcccatcggactgcttgagtatcttccccccaagataaacgaccgacctccgtactggcgaggtaggaatgatatggagaccttgatgggcagccatgactatagggattggattaagatcaggttagtcatctcgttaacttactgactttacggatgctgatcattttacgtacagtgagatgttccttggcccagctcacaaggacttcaagttcgagcccaagcacaagtccaattcctac

SEQ ID NO: 22435 - DNA, 570 bp, Emericella nidulans; identical to SEQ ID NO: 14388

SEQ ID NO: 22436 - DNA, 850 bp, Emericella nidulans
gcaagcccattcacaagctcgatatccccgcctttgactggccccaggctcccttcccctccttgaagtatcctctcgaggagcacgctaaggagaacgctgaggaggagcagcgctgcctgcaggaagccgagcgcctgatcaaggaatggcacaaccccgtcgctgctatcattgtcgagcccattcagtctgagggtggtgataaccatgcctcccccgccttcttccgcggtctccgtgaaatcactaagcgcaacaacgtcctcttcatcgtcgacgaggtccagactggtgttggtgccaccggtaaattctgggcccacgaccactggaaccttgagactcctcccgatatggtcaccttctccaagaaggctcagactgccggttactactttggcaaccctgccctgcgtcccaacaagccctaccgccagttcaacacctggatgggtgacccctctcgcgctctcatcttccgtggtatcattgaggaaattgagcgcttgtttctggttgagaacactgccgcgactggtgattacctctactctggccttgagcgcctcgcgaagcagtaccccgagcacctgcagaacctgcgtggtaagggccagggtacgtttattgcttgggatactcccaagcgtgacgagttccttgtcaagggcaagggcgttggtatcaacatcggtggtagcggacagaacgcagtccgcctgcggcctatgctgatcttccagaagcaccatggtaagttccctgttatcgctactaatgtgaacatggctaacttctcacagctgatatcctccttgagagcattgagaagattatcaagcaactg

SEQ ID NO: 22437 - DNA, 500 bp, Emericella nidulans
cgtataatacgatattggagatcacttcttcctatatgaggtagcgagtgtgaaatgaagataattgatagaaactttggaggggtaaaaatgaaaggagtgatagcatctgatcacggcggcatgaatatccgtaaagaacttgtaagtttattagaagagttaaatattgaatatgttgatttaggttgcgaatgtgaagctggatctgttgattaccctgactttgggtttcccagcagctgaaatggcctcagaatggtgaagaagatcggggattttaagtttgagggacaagcatttgtatgtcaatcgcacaaaacaaagtaattgttttccttgggcgttggttcaaggtactttaactccaaaggaaaggagaccttaatgccctaacagcttacatggggaaccgtgaattgggaggtctacccggataaccgaaatttggtaaaactgttaaaagggaattagaaacccttttataattaacttccatc

SEQ ID NO: 22438 - DNA, 850 bp, Emericella nidulans
  unsure (1)..(850): unsure at all n locations
ccccccgncccctttttcccttaacaaacaccccccccccccggccaccgggaaaccccaaaaacggttagccccaaacacccaccagcccgttttgcccccccccagcgacccaccccggtttttaaccgccccccacccctaacccacaccaacccccacccccccgcccccccctgacacacccccccccccccttcaccccccccccaaccaccccccccccaaaccaaactccccccaaaaagccacccccaagccccaaagaccccccacctaacccccccccccaaatagggnnngnccccccccccccctggaacctncnccccatccagccaaaaacccccggnccggctacncccccccgaccccccgcccccgcaacccccccccccccccccaaccaaccccccgccccgnnntcccccccccccccctaccccaaacccccccgcccccaccacccccccccccccccccacccccccacaccccccccgcctctcccacccaccccccccccccccccatcaaccacccccctcccccaccccccaaccgacccgcccccccccccccccccacaaccacgatccccccccccccaacacantccaaccccccccccccccacacaacaaccgaccccccccccttcccccaaacccccccccccccaaccagcgaacccccccaccnccnccacccccccaaccctccccccctctccccccccacaaccccttcacccccccccccccccccatacaccncccccacccacccccccccccacccacccccccccccacccccaccctccccacgaccccaccccccccccccc

SEQ ID NO: 22439 - DNA, 682 bp, Emericella nidulans
gggcctgagctccccatgctttccctggcggctggtctcaacggtctggccggtcctctccatggattgtaagcctcatacttcccgataaaagcctggtattgccatgtttcaatgtgtctaatgtgtttcttttcaatagggccaaccaggaagtccttaactggctcaccgaaatgaagaaggtcgtcggcaacgacctcagcgaccagtccatcaaggactatctctggtctaccctcaacgctggtcgcgttgttcctggatacggtcacgccgttcttcgcaagaccgaccctcgctacacgtcccagcgcgagtttgctctccgcaagttgcctgatgaccccatgttcaagttggtcagccaggtttacaagatcgctcctggcgtcctgaccgagcacggcaagaccaagaacccttaccccaatgttgatgctgtaagttccccgccctgtttgctcagtctctccgtgcactgacacaatcctagcactctggtgtcctcctgcagtactacggcctcactgaggctaactactacaccgtcttgttcggtgtctcgcgtgctcttggtgtccttcctcagctcatcattgaccgtgcttttggtgctcctatcgagcgtcccaagagtttcagcactgaggcttacgccaagcttgttggcgctaagcta

SEQ ID NO: 22440 - DNA, 850 bp, Emericella nidulans
cgtgggtcaaaacagcatttcgcatcctagtctcccaccacgtccggcatcgccacgaccgaggaaagcccttcatgctgaagaaaatggaaacggcgcaaacgccgaactggcaataacgatcgactacaccgagccgtctgatgtccttgatacagctctctacgaagacgatcaaccaccaggattcctcccgcacttgcgcaacaagaatattaacttctctaaatccgagaatgaggatctcccagcccgcattactagggtgtggtatattaacccttacggccaagaaatcaggccgcgcgccaacccgcgtgtcctggaatccctgcgcgatgcacaggcaataatttacagcatcggatcgctatatacgtcgctcatccctagtataatcctgcagggcgtcgggcaagccattgtctcgtctccagcacgccacaagattcttatcttgaacggttccctagatcgagagaccggtccctcttcagatccattcacggctgcggactttgtcgaggcgattacccgcgcgggagaggaaagtcgcggccgagtgacgcttgaacctccacaatctccaccgtctacttcaagtttgggatctacaactggtcccggagcattcccctctttattcccaaatggacatggatccagcaagtccgccctgccctacacctcatacattacacatgtccttcacctcgaaggacccgggacaccacatgtggacaaagaccgcctcgccgagatggggattgagacgcttcgtctttacggacggaagattgtagcgtcgactgatggcgcggaggctgaagttcctattgggatgaggtat

SEQ ID NO: 22441 - DNA, 850 bp, Emericella nidulans
acaggcagcagttatatagtgtgttctcccaacagctctgtatgggtcagaagtcttctatacaggcaaaagacaaaaaggggtagttaactccctgctttctctcttccgcacagcagccctggctattatcccagcctacaagaccacccctactgcagcacttctgcgcgaagcagacctaccagacccagaagctctactcaacagcatcctccggagggcagcagtgagatacatgagcctcgacactaaacacccaattgcccaaatagccgcagagactaccgcgggcaggcccaaaaccaggcttaaaaggatcctacagctcctcctcagccccctgccagagcacgctataatagagctgcctctccctccattatgcatgctcccaacagacaacaaagactatagccctgcccctttacagatttcagtatactcagatggctcacggaccagccagggggcagggtatggctatgcagtctactttggccctatcctagtatccacgggacatggccccgcgggccctaggacggaagtctatgatgcagaaatcatgggtgctgtggaaggcctacgcgcagccctgggacaaccatgtgttggctactccacccagctagttatcctcctagataacctagctgcagcctccctgctagcaagctataggccaacccctcacagacatggtctgtcagagacctttagccaactagccgcccagtggatggaaagcccttcaatcctaaccatgcaacggaagccccttcaggaccgctggatcccaggtcactctggcattgctgggaatgagctggcagacgagctcgctaag

SEQ ID NO: 22442 - DNA, 850 bp, Emericella nidulans
ggaactacgccaggatagtcttaaccgagtggtgatgaggagactcgagcatatctacttcaagccttcccaggttattacaattctggaagagggcaccgataaggcccttccctccgagctggagacctctatcacaactcgcggcaacagtgatgcccagaccctcgtgcagacgctttgcaactacctgttcaggaacagcgacggtatccttcgagcgcgtgctatgctcgcccagatctacttccttgctctccacgaccagtactaccgtgctcgcgacctgatgctcatgtcccacttgtccgagaacattgccaatttcgacgtgagctctcagatcctcttcaacaggacgttggttcagattggtttgtgtgctttccgcgctggtctcatttacgaggctcagaacaccctctcggaaatttgcggcacggtcgccaaaaggagcttctcgcccagggtatcatcctgcagcgttactccaccgtctcccctgaacaggagcgtctcgagcgccaacgccaactccccttccacatgcacatcaacctcgagctgctcgagtgcatctacctcacttctagtatgttcctcgaggttcctctgatggcccaaacctcatcgtctcccgaaatgaaacgtcgcgtcatttccaagaccttccgccgcatgctcgactacaatgagcgccaggtcttcactggccctgcagagaacacccgtgatggcgtcattatgagtgctaagttccttgctgccggtgactggaagaaggccgccgagatgcttaactccatcaagatttgggatctcatgcctcaaccagagaaaatcaaggaga

SEQ ID NO: 22443 - DNA, 635 bp, Emericella nidulans
  unsure (1)..(635): unsure at all n locations
gcgctcgattcgccggatccagtcattacctctaatagcgcttcgtccgggtcatcggggtcaaagtcgaaaaggggtgcaacgattcgattcttccctcatcaagacccgagtcaaagctcgcgcccgtccttaccctttatccctatctcgcgaactcttccatccgatacctgcaacattcgcgtcggtcgatattctgagcgagatggtctcccacagcccaatcccagcgagccatcggatgcgcctgttggattcaagtcaaaagtcgtgagccggaaacattgtgaattcatataccaaaatggccagtggcatatcaaggatgtcggaagttcatccgggacctttttaaaccatatgaggctaagccagcccggcatgccgtctcggttgtacaccatcaaggatggggacattgtgcagctcggaatcgacttccgcggaggagaagaaatgatatttcgctgtgttcgcatcagggttgagtgcaaccggtcctggcagcagcagccgaacgaattcaagtatgtccgcgtcttaagctcttgtgagctataactaactattgatgtagcaaaaacacggaaagtcttattagaaaccctgggaagggtccncaactaattatt

SEQ ID NO: 22444 - DNA, 671 bp, Emericella nidulans
agattgattcgccaggcgggcgtctcagtggaaccgaattcctacaaggcggatggccctctatcgaacaaaggtcgagattacgccaagaagatgactgaaactttgctgaaggacagggagtccgagaagcaggcgatgatcgaccgaggagagactgattacgagctcaagcctttgacggtatggacatcaacgagacgtcgtacagtcgagactgcaaagtatttgcatgaaaaggggtacaaagtccggcagagatcacaactgagccagctaaaccctggtgtctgcgaactgaagtcagagagaagaattagagaagagtatccagatgaagtggctaaacatgaacttgacccttatcatcacagatacccccgggccgaagtgggtcgatccccctcttcccttcggactgaaactaactgctgtagtcataccacgatcttgcagtgcgactcgagcctataattttggagctggaacgggagcaaaatgatctgctaataattgcccatgaaagcgtgcttagggttttgtatggctatctcatggcgtgcaatgctgcagatatcccgttcctggaattcccacgtgatgaaataatagaggtaaatcttcttagttcgacatgttgagctaaatcggttgactgctgtttagataat

SEQ ID NO: 22445 - DNA, 850 bp, Emericella nidulans
cgtgcgagcaacgccgctacagaacaagaacaggcgaagctcaagattgcgcacttggaaaagaggatcaaggaggaagaaccgcgagccaagaaggctaaggagcagaattcagggcttctaaaagaactcgaaggcctcaagtctcaggccaagaaattggaatatgagctctcgaagttaggttttgagcctgggcgcgaggagcagctatatcaagaacagagcgggctccagaaagaaatccgtgaattgcgccagagagctgacggtcttcagagaaaggttgccaatatcgaattcaactactctgatccctacccgaactttgaccgatccaaggtcaagggtcttgtagcccagcttttcactgtggacaaagagaagctccaggctgctacagctctggaaatctgcgctggcggtcgcctgtataatgtcgttgttgactcttccgatactggtacgcagcttcttcaaaagggaaagctccgcaagcgtgtgaccattattcctctgaacaaaatttctgccttccgagcgtctgtagagaagattggggctgcgcaaaacctcgctccaggaaaagtcgacttggctttgtcgctcattgaatatgatgaagaaattactgcagccatgaattacgttttcggcaacactttaattgccaacgatgctgagacagcgaagcgggtgacctttgatccttctgttcgtatcaagagcgttactcttgacggtgatgtctatgacccgtctggtacactctccggtggtagcgcgcccaactccagcggcgtgcttgtgaccctgcaaaagctcaatgagatcacaagagagattcgaa

SEQ ID NO: 22446 - DNA, 850 bp, Emericella nidulans
ccgttcagatcatggtcctatcgtggtgcggaaggagtaccaggatgagatgcgcgacgtgcttcgaaagtacagatacgcgaaacagaacaatcttcttctgctgcttccattcacaacggtctccgagtaccttttcgaactgcgcatgctcgccaagtgcatgaacccgctcggtcctaatgcgctgttctacctcgccgcagcggttagtgactttttcatcccgcgcgaccgaatggcagagcataagatccaatcctccgaaataccaaaggagttccaaggtaacgatgaagctgtgggtgccgatgacctttacacgggcgggttcgaacagaagcaggagtcgagcaaaaagttggtcattaacctagacccggttcccaaattcctccatcaactcgtagatggctggtcaccggagggtagcatgatcgtgtcgttgaagctcgaaaccgatcccaatctcctcgtctataaggctcagacggcgctccagcggtacgcccaccacctagttattggaaatttgctttctaccagaaaatgggaggttgtcttcgtcacaccgaacccaccttatgagcgctggattcgagttcccaagtcgcgccggagtaagagcatctccggcgtcgaagaccaggtgggcaaggctgaggcagcgaatcggtcatcaggagaccagaccttggcggccccagtgggtgaagagccgtctaaggaagaaaaggacggagaaggcacgtcccgtgagggcacggagattgaaagcttgatcataccagagctagtcaaactgcattcggagatgatcgagaagttcaagcgatagtgaacattactc

SEQ ID NO: 22447 - DNA, 534 bp, Emericella nidulans
tactctccaggtccgtacatccgttctcggcgtccggttatccaagtcacgttttgttgttgcgctactcaatagcattcatacgtttgtcttctcttctccgccgaagaagctagcggttttcgagaccacggataatcctttggggctggcatgtctgggacagaaggtattggcatttcctggtcggtctccagggcaagttcaacttgttgaactggaaacggggaatgttagcatcatacctgctcacagtacaccactacgtgccatggctttgagtcccgatggagaggtgcttgcgacagccagcgaagcggtaatccctccttgaatccggccagcactcaattccgctaactactggtcgcagggcactttggtgcgaatatttgctacgagcaactgtgcaaaaatggccgaactttggcgcggagtggatcatgctattatattctcacttgccatctggccatcaaacaacctatttagccgtgacatctgacaaggctaccctccatgtgggtaacctcc

SEQ ID NO: 22448 - DNA, 722 bp, Emericella nidulans
  unsure (1)..(722): unsure at all n locations
ttttgcacggtgggtctttacgaagatgtcctggggagacgcaattctttggaaaatttttgccggtcttactcaataggacttccaatcaagacgaacttgtcaatcatgatttgaatgtgcccctcccaaaggaatttggtcaagctgccagtttcaggtggcaaccattgatgtcaacactcactcatcacgcaaacggatgtggttattcctaccgtgacacttgtaaggcataaagatgttctctactcgtggcttgcagaacataagccactgttcctctgtggtcctcccggttctggtaaaaccatgacactgtttgccgcgcttcgtaaattacccaatatggaggttgtcggtctcaacttctccagtgccacaacccctgacctcctcatcaagaccttcgaacagtactgcgagtacaagaagacactaagcggcgtggttatgtctcctaatcagattggtcgttggctggttatcttctgcgatgaaatcaacctgccggctcctgacaaatatggaacgcagcgagcgatttcctttttgcgccagcttgttgaacaaaatggtttctggaggacatcagataagacatgggtctcattggaccgtattcagttcgtcggtgcttgaaacccaaccaccgatgcaggtcgtacgcctcgngatnacgattccgaagacacacccctttggtcatggtcgaccacggg

SEQ ID NO: 22449 - DNA, 775 bp, Emericella nidulans
actaatattctaagaatggcctctgtcacatccttggacaaggacctgcgcaacctgcgcctgtcccgctataccccgcaagcggcggccgaagttcgctcatggatcgaagaagtgttgcgcgagaagctagcacccggtgatcttctcgaggcactcaaagatggtgtcgcgctttgcaagtaagcgaagagaacttctttcggacactgactactgcgaggcttggttgctgacaattgcccgattcagactcctcaatcttgccgtctcccccggtgtaaaatataaacaatcttcgatgccgttcgtccagatggaaaacatatcacattttcttcgcgcttgtcaactgccccctcttagccttccgccccacgatgttttcctcaccgtcgatctctatgaggctaaggatcccgcgcaagtccttcaatgtatatcagcctttagccgcagggcaaattcgatccagcccggtaaatttccgcgcgcaattggagtacaaagcaaggccggcactctgagcccgtccttaaccggttccagtcagggccctcatacgcctacaaagaaccgaggatttagtgatgccaactctagcgcctctggccgctccagtcccgcacggtccccccaacctgtcagcagttggagcaagaaatcggaccagtttgtcacacagccagcttggaatatccaccagtatggatacatgggaggtgcaagtcaagccaatcaaggtgtcgcatttggtgcccgtcgacagattact

SEQ ID NO: 22450 - DNA, 850 bp, Emericella nidulans
tcggggctctgatgtaggcgcagaagcacagggaattgaccatgcggaactactggagaggttgaggtctggtatagacaatgaagatggaaaccagttcatcctgcgacccgtcagtggacgtgctggcttagagatggataaaaccggaaatcatgaacaaccagctgtcaatgcgcgacttttgtttgacgagatcggttttgttttagacgacgagcaataccgagatgcattgatgcttgtcgacctcttccactgttttatccgccaccaggagtataggaaacttcaaccaaagtcgcgaccgaaagaggaccccagggcctggtttaggtatgcaggagaagccgtactgagtaagattcatgataggaacaggcggtggacatgggattacatcaaagaacgaagggacgatcggatcgcgtacattgatctcttcaagaagaaaaaaagggaggagatgttatcagcagaggaaacggaagagttcaaccggttggaaagaaagctgagctatgaggatatccgattctggcgctcgcttgcgagaaatcaattgcggaaggagaacgtaggcgtgaagaagcccccgcgacagcagacatggtccgagtggatatggggttctaagaaagaggactccgaagaaactgccatgactgaggaacagcggcaggaactctacaatgccatcgattgggacgagaagaaaactatcacggaaagcgtcgatgttccgagagaatgggtcaagctccaagtaaacgctggcctgaaagccggaagtctgactttggtacgcggtcctcatggagacgcaaacgaagtcatgaagttcgtgttt

SEQ ID NO: 22451 - DNA, 503 bp, Emericella nidulans
actcacaagaataggactcatccgcgacaactccattcacgtcggaattcgcggccccgtcatccgtcctaaaggcgacatcagaaacgatatccgctgcggcttctcgattatcaaagcccgggatctagatcgtctcggtgtagccggtgtagtggaggagatcaagacccgcgttggtaacagcaaggtctacatctcggtggacattgatgttttggatcctgcttttgcaccaggtacctatttcaccccttggtggagaaccattgtccgctgattctagcggtagcgaccggaaccgcagagcccggcggattcacgacccgcgagctcctctctatcctcgacgctctgcgcggctgccggtcgttggcggagacgtggtcgaggtagcgccaatctatgacaccatggcggaaacgaccacgctagctgcggcggaggtcgcgcattctctgcttgggctgatgattgacactccagttgttgattagaccatt

SEQ ID NO: 22452 - DNA, 500 bp, Emericella nidulans
ccaacccgcgcaaattcttttaaacgtttatgaaaacaaacggcaagtcccgtcgcccactctacgtccgcttcatccacatgctgcttgccgcccaaggcgtcacagcctcccaagagcgtgtgcagctgcagctccttgactttgcataccgctacacatccggcgtgttacaagatgcggtgcatcttacaacagaaggatacgcggggacgggagcggatactactacaagcagtgggaataagggtccacctgaagtgaactctgtgacattgccagcattacgactaagcatcgcgtcgcgattacactatcagttccagacgggtctaccaaaggagtttctcatggatgttgcagcagagaggaatcgagttgcgctgccgggtgcgacgagggggtttgacgcgggtgctggtaaacctgcggcaagtaacagtgtgcttatggcgggaatgaggctgccgccggagcggatttgcctcacggcatctgat

SEQ ID NO: 22453 - DNA, 299 bp, Emericella nidulans
tcggcgtggcccaagcagtaatcttgaccctacgaggaagaatccgtcgctatttgaaccggtgcatgtcagtgcatttgatatcacgggcaagggagttgcgaacccagtggctacgttctggtcctccgctgagatgctctcttggctgggagagaaagatgcagcagataagctgatgggctgtgttgagcgagtctgtgaggctggcatccttacagcggatttgggaggaaacgcgaagacacaggatgtagtggacgccgtatgtgcagagattgaccggctctgaatttaaa

SEQ ID NO: 22454 - DNA, 468 bp, Emericella nidulans; identical to SEQ ID NO: 13489

SEQ ID NO: 22455 - DNA, 682 bp, Emericella nidulans; identical to SEQ ID NO: 10570

SEQ ID NO: 22456 - DNA, 850 bp, Emericella nidulans
gtgcatgtcgacggcacagagcgcatcgcggaggcagtggctaagtacgacgttgaccgcttcatccacgtttcctcctacaatgccaacaaaaactctccctccgaatttttctccaccaaggtatgtttgtgttggacatacctcgaaccgaaactgattgttccagggatggggtgaggaagtcgcgcgctcgatcttcccagagaccaccattgtccgaccagctccgttgttcggattcgaggatcgtcttctccacaagctcgcgagcgcgaccaacctgttcacagccaaccacctccagcaacgctcctggcctgtacacgtgagttgaactgttgcagtctacacaagcaggggctgattcttgcaggccattgatgtcggtaccgctcttgagcgcatgcttcacgacgacaccaccgctggccagaccttcgagctgtacggcccgaccaactactcgcttgccgaaattgctcctcttgttgaccgcgaaatcgtcaagcgccgccgccacatcaacgtccccaagcgtatcctgaagcctgcggcctatctcctcaacaagtacctgtggtggcccaccatcagtgccgatgaggttgagcgggaatttattgatcaagagatcgacccgacagcgaagacgttcaaggatctcggaatcgagcctgctgaactgtctgaactcaccttccactacttggtaagtcttatatctttgttgttcaaataaattgtgctaactttggtttagaaaggctaccgaagctcctcgtactacgacctgcctccggctacagagcgggagcgggcagaggagaagaagtacgtgcacgttctc

SEQ ID NO: 22457 - DNA, 801 bp, Emericella nidulans
gcaaacgtcgctttgattggatgtacaggtatggtggtatgtccttagtccagtaccggcagtgcgcaaaaagccttagtgcaacgcgcatcacaaagctacacgtcagaagatggaacttatacatatctagggggctcatatactcactagccttatcgcaaaccctgctgttacgcggattgatacgatctctcgccgtactcctcaagccgcgtcttccgcgccacaagcaaaactcaccaccatcgtatcaaccgatacttccaagtgggctagcgagctctcttccctaaccccaatcccgtctatttttatttcggctcttggaaccactagggctgccgctggaagctttgagaaccagtataagctcgaccatgacctgaatttggagatggccaaagcggcccgtgatgcggggaccaaagtatacgttttgatttcgtctagcggcgcggacgtcaagtccaattttgcatatacgaggatgaagggagagattgaagaaggagtgaaagctttaggattcgagagaacggtgattttgcggccgggattgatcgctggtcagagagaggaaagtcggccggccgaggctgtcgctcgattctttgcaggggctcttggtaaagtgcactctagcttgaaggatggatgggctcaggaatccgacgttatcggcaaggctgcggtcaatgctgggctaaaggcactaaatggcgaagttccagcgggcagtgaaaaggtctggtatttgtatggcagtgatattattcaacatgggaaagaataattcgg

SEQ ID NO: 22458 - DNA, 658 bp, Emericella nidulans
gccgtctaacccgcgcccgcataatataagaagcgcgttgtctccagaagttagtgaaagagggtgtatcggtccccgcattattgggtgtggattgggagccgagtgctggagatgggagctcttggcttgttatggaatggattgagggtgagcctgtcagggttattctggaggaatgggaggcatatttgaaaggcattgagagggaaaagaggctgggcttgggagagggtgtgcaagggagcgaggaggagaaggttcgcgggcttatgcggaggattgggagggctgttggggggttgcatagagcgggtgttatacatggggacttgacaacgagcaatcttatgctgcgccctttgggctctgcagatacgactgaaaccatagaggagagggatcagtcaccctctatggcaggtgaagttgtcatgattgacttcggactcgcgatgcagagctcccaggatgaggaccgcgcggtggatctctatgtcctagaacgggcttttgggagctcgcatccacgaacggaaaggtttttcgaggaagttcttgttgggtatagagaaagttataagggtgcggtctcggctctgaagagactggaagatgtgaggatgagaggaaggaagaggagcatgattgggtagtt

SEQ ID NO: 22459 - DNA, 705 bp, Emericella nidulans
gccaacatgaaggaagctattgtccccaaaggactgtcagtccagattgtcgactcgcccatcccaaccccgcgccctgatgaggtgctgattaaggtcgtcgtgagtgggacgaatcccaaagattggtaggcttatcaccatctggcctgacccagttgattatgaatacaatcataacaattctgacgagaaggtctcggataggaaactcccagaatggctggaccaggccggtaatcagggcgatgacattgccggcattgtcgaggctgtcggtgacaatgtgaccgagttcaagcccggagaccgtgtcatggccttccacgagatgaccaagccaggcggcagttatgccgagtatgctctcgcctggcagcatactaccgcgcaccttccgaagcatatctcattcgagggtgagcccgtaatccccctgatagtttgtcgaaacttgctgatcaatccggtgacattcagaggcggccaccatcccgctggcggctttgacctccgtatctgctctgtaccaccacctccagctccccaccccttggagtccggccgcatcatctatcccgctggtaatctacggtggcgcgtcagcaattggcgcctttgccatccagcttgcccgcaagagtaatatccacccgatcatcgccattgccggccgcagcgcgccattcgttgagggcctgattg

SEQ ID NO: 22460 - DNA, 850 bp, Emericella nidulans
gaaacgagcgcagtatctacccagactcaggattcgagtacccagcctttcgtcagcggcgggactccaacctcgaaggagacgccatcgacccaggcacaagcccacataggcagccctcccgccagtaacgctgctaccacgccagttgacgaaactgcatctaaagggggaattagtgcttcgacgagtgatcgtacaacaaccactcagacaactccggtcatggtcatagtaacgcagggcgcagatccggagcatcccacaagccaaacaatcttctggcctggccgaggatctagctcgagcgctgtgacctgggaatcttcatcacctttaaaccctactacttctacatccgcacacgcgcctacacccacgccggtctggacctgggcttggacccctacctctgcaagtacagttacggcaatttccacaagtttagaaacatccacattaccaggcaatcaagaagaggaatcaacaaccactctcatgctctcgcccacatctacaactctgactcccaactcaatctctgaggaacccacttccacaacaacagttacggaaatctcaaccattgtgcaaacatccacattgccagctgtttcagcgtcagagccggcgccagcaacggcacctacattttccagctccaatctcggcgaagaaccaacgtcaaccaccacagtcacagtaatatccacgatcgtgcaaacgtccacactaccccttgactcggaaccctcgccgacaagtacggtctcagccacagtcactcctatgagcccattcagctcatccagccttggcctagaggaagaaccaacttcgacaacaactg

SEQ ID NO: 22461 - DNA, 850 bp, Emericella nidulans
tccggcaacggtgcctcccagccagcagaaggtgaacagcccaccaagaaaagaaaactggattcacccaaatatcagctcctgcgacaaagatgggaaagatttgcagcacagctcaacgactttgaagcgcaagtagctcagggcgatgccaagttcgcatttgctttcgtacagggaaagattgttcgtgctctgcgcaatggcgagtgggtgcttcttgacgaggttaatctcgcgtcacccgatacactcgaaaacatcgcaagcctcttgcatcatggcagtgagggttcaccctccgttctgctttccgaggctggtgatgtagaacgggtatttggacatccagatttccgaatattcggtgccatgaacccagcaacagatgcaggcaaaaaggacctcccaccgggtcttcgatccagattcaccgaactatatgtgcaatctcccgataatgagctggatgaccttttgtcattaatcaagaagtaccttggggacttaagtctgagcgattccagagcagcaccggatcttgcccagctttacatggaagctaagaagctcagtaatgaaaacaagctaacggacggtgcgggccagcgaccacactttagcattcgaacgctcgttcgtgcgcttatttacgctgcggaccatgatcaaatctacggactacgacgagcaatcttcgaagggttcaccatgagcttcggaaccgttataagccgtgaatctgaggcgctgttgatgccgctgcttgaaaagcatattttcggtaatatgaagaccctcagggcattgcttgggcatgcacgcataccttccagtgatgggcacgaac

SEQ ID NO: 22462 - DNA, 850 bp, Emericella nidulans
aaccgcaggcatgggaacagcgctcgcgttgggcaaggcaactggaccggtttttatgagcaacatgctgacgttcggtctggctggacttgttggctaccgtgctgtctggggtcgcgtcccgctcttcactctcccttgatgagcgtgactaacgcaatatctggtatggtcggtgttggtggtttcttcatcatgggtggtggctatcttcctacgacgattccagaacttttggggtcaatctcagttctcctagcattcatgaatgtatccggcggcttcgttatcacgaagcgcatgctagacatgttcaaacggccaaccgacccgccagagtatccctggctgtatgcaattccggccgttgtatttggtggcggattcgtagcagccgccagcaccggtatggccgggctcgtgcaggccggatacctggtcagcagcatcctgtgtatcagttccatttcaggccttgcttcccagcagaccgcccgccgagggaacatctttggcatacttggtgtcgcggccggtattttggcgtctttggcagctgtcgggttctccaccgaagtattgacccaatttgctggcgttgcaagcgtgggtgccatcgttggtaggtcagctccactaccgtatcatcatatcactgacggcagcaggggcattgattgggcgccgtatcacaccaactggacttccgcaaaccgtagctgctttgcactcggttgttggtcttgcggcggtgcttacgagtgccgggagtgtaatggcagacatagatcacatttcgactctccatctagtgacggcttatcttggggttctaatcggtacttcccac

SEQ ID NO: 22463 - DNA, 850 bp, Emericella nidulans
ggagacggaacgaccaccgttatcattctcggtaattcattgtgactttcttgacttcacatacaaaggattctgactctttagctggtgaaatgcttgcccaggcgctccctcagctcgaacgcaacatccaccccgtcgtcattatctcggccttcaaacgtgccctcgctgatgcacttgcaatcattgaggaagtttcgctccctgtagacattgatgacgacaaggcgatgtacactcttattaagtcatctatcggcacaaagttcgtttccaggtggtcggatctcatgtgcgatttggcactaaaggcggtccgcactgtgtcttttgatgccggcggtggaaagagggaggtcgacattaagcgatacgcgcgtattgagaagattcccggtggtcagattgaggacagtgaggttattgatggtgtgatggttaacaaggatattacccaccccaagatgcggagaagaattgaaaaccccagggtcatcctgctggactgcccattggagtacaagaagggtgaatcacagaccaatattgagattacgaaggaagatgactggaaccgtatcctacagattgaagaggagcaagtcaaacacatgtgtgacgctattctggctctgaagcccgatgttgtcattaccgagaaaggcgtctctggtattttctcccattcctaggtttagattgcttctctaacctcttcagatctcgcacaacacttcttgatgaaggcgaacgtcacagcaattcgccgagttaggaaaacggacaacaaccgtattgccagagcgacgggtgcaacgatcgtcaacagtgtggatgagctttacgc

SEQ ID NO: 22464 - DNA, 850 bp, Emericella nidulans
agaaaaagatctacgatgacctttttagagcctgggatggtcttcacaaggggttcattggtggtgataccgccattgaaatcatgggccagagcgggttggctaggaatgatttagaagcaatttggacattagctgaccctcataatcgtggacggctcaatatggacgagtttgccgtggccatgcatttaatttacagaaaactcaatgggtatcctgttcccaaccgtctcccccctgaactcatccctccatccacaaggaatctgaatgattcaatcggcactatcaagtctatgctttctcaagatgcagagcatcgaaaggctacaggtgcatttttgcagccccagaagacaggtgtcagttatctgaaagaacattctttccggggcggagcagtatcccctggtgctggccgtaaggatgctacactgttcaaaaacaatgacgaggcagctgctggttatcgctcaagtgcgcgtcggcgcgtcggaaacagcggccgtacaccctcacctgcggcttcgcaagcttctgaggaggaattgtctgtcgaacaactgaagaagaaaattcgtgaaacgcagatcatgttggatgcggttgattttgaggatgagaaccgtgcggaggaagaggacgcgcttgacaggcgggaccgtcgtgaggccgagagtctaatggataggattcgacgtgtgcaggacgatatcgatactcatcctcatgcggctcttcgcagccttgatactggcgctgagcgaaggactgcgccgtcaactgcaggcttatgaagaccaggtgccacaaattgcttccgaagttagacgtgtcgagcgtgaaa

SEQ ID NO: 22465 - DNA, 850 bp, Emericella nidulans
ctggttacagttccttcgcatctgaagcgggacccattgctgcaaggaaaagatatcagtgctgtcatctggactacgaccccatggacacttccggctaatgctgctattgctatacaccctttgttccaatacacaattgtcgaatcggcagctcatggttatctactcgtcgcacaatctcggttagagtatcttgaatttgttctgaaagaagacctctccgtgattgtgccatcgattctcggctcagagctcgtggacaacactacgtatcagcccctgtttaaagcggcgaattcggaaccgcagccgctcattgctgcggacttcgtgaccgctgactcaggcacagggctagtccattgtgcccctgggcatggtatggaggactacgaagcctgtcttagccgcggaatcctagcatttgccccggttgatgaccatggaaagttcaccgatctcgcaatgcctgatgacccgaaacgattgagtggcaaaagcgtgctggccgatgggaatgttgctgtactcgagtacattgagtcacaagggcaactcctttttcagcaccgctacggacaccggtacccgtatgattggagatcaaagcaaccgatcatcattagggctactgaacaatggttcgccgatgtggccgatatccaaagcagtgcactaaaggctctcgatgatgtccaattcgtaccggcggcgggccggcaacggctggagaactttgtgaagaacagaagtgaatggtgtatctcccgtcaacgcaaataaggtgtccccatccccgctctttatcatcaaggtacgggagaggcggtacttaccaaaacagcgt

SEQ ID NO: 22466 - DNA, 850 bp, Emericella nidulans
tattattcccttggcggctatgctgagttttgcaacggaagagattgccctaaggacaggcgagacgattggaggtctcctcaatgccagttttggaaacgctgtcgagttaatcgttgccatcattgccttggtccacaacgaggtgctcattgtgcagacatccctcatcggtagcatgttgtccaacctccttttagttctggggatgtgctttctcttcggtggcatcaaccgcttggagcagcacttcaatcctgtcgtcgcgcagacagcagccagtcttctttctctatcggtcggggctttgatcatccctacagctttcaacgcctggtccgacggtacgtcaaatttctattaccgcattgaagaatactaacaatcgtagcggacaaatccaagactgccccgctatccagaggtaaggattgttcctcattaccaagaactactctcaccagtattaggaactagcgtgatccttttggtcgtttacggttgctacctctacttccagctcagtacacacgttgagatgtacaacgcgcccagccagaaatccgaaaagatacgccagaaggtgtccgaaggcgacgccagtcgcggcattgctcagatcggccatatgtcggctgcactggcaggagcgaacaatgagcctgtacaggaccctgacgacgagccggaagagccgcagcttcacatctatgttgcgattgcgacgctgtgcatctccactgcactcgtcggcgtgtgtgcggaattcatggtacgtctatttcgttaagattgccaagaataaggcgctaacccgagcaggttgactctattgacgcgctgacagacc

SEQ ID NO: 22467 - DNA, 306 bp, Emericella nidulans
catcacgagatttcgattccccccccgccttctataaaggttgggcttggaatcgttttccgggacgccggctggatgatcctccagcgcggggttctcatgttggagtttttcgcccaccccgggctcgatcccctcgcgagttggttcaactgctgcatgaggttgaacgacctcgcggagttcttccggcagtgcaaatccgtcggcatccaggaaaccagcagcggctatccgcgcatccatgcccccgaactgcaggagtgggaaggcacaatggccgctttggtcccggatcaattcgca

SEQ ID NO: 22468 - DNA, 850 bp, Emericella nidulans
tggcaatttcgagaagcacttccttataaaatcacctacaggagattctcttggcgcctaccttgagcaggaaacaggccgatatcatgttagaccagtttcggatggccagaaggatcatgaccatgctttaccaacggctaccatgtcagaatggcaccaacgcctatctcatgtccattttcgagctatactaaagttcgaacaacagaagattttgaagatcaaaggacgaaagactctagcattctgtgacatctgcagacaagcaaaacagaggagacagatctccaaggaacctgcttcgcgcgctacaaagatcttagcgcgaatccatattgttattgcaggaggtggagcaacattgaattgcaaggatgagcaagctccgcccggcatcgagaatactcgatatttcttgttaatcacggacgatgcaacacgatatcgatggttcttcactcttcggaccacagatgaagctatccctaccttccaatggtggattaagcatatcaagaaccaagggatttagcccaccagctttcgtctaaagcgatcgcgaattcttgaccgacatggtgaagaaactctgccaaatctgtggtttggtcttggagcccaccacagcagattctccatggcaagatggcgttagtgaacgcggaatccaaccacttctgcagtctacaagaccgatgatttccgattcaggattcccacgttggctatggccacaagccctggacacagctgtctatcatctgaaccgattaccgacacaagtccctcttgtacaatgaccgaaggtaatatggcgccaactatcgatagtcggtatagtagtcgt

SEQ ID NO: 22469 - DNA, 850 bp, Emericella nidulans
aagaagaattaattttatagtagattctttctagagattaatatagagcagcccctaggctattatatatttaataaatagctaatcttcttctagcagagtatggtttaaccctagtatagactataggtaagaaataggtctataactttatccagcactatccagagatcaaaatagcttagtcctaataatataattataaatatactaactttaaggatctagtagctgcaaaggcatagtttaatcagctatagattattataatatagtatagtattatacctaaaaatatctacaactttaataagactagatatataataggccttactactactataaaagtagtaataagagcagaatttatagtaaatatcaagtaatctagcctagaaattataaataagtaactttaattaagtatattaactttacaagataagtactactattatatattattttcaaaggcaggatctatatagagggctggtattaagatcctaatcttctaagcaactagaggattaaagttaataagaatagatagataatagacaagattagactttgctagctttaaaatctttttattcctataataaatagttatacagctagaagatattacctgcttattttagatagctataaaagctatttaatatctaagtttaattaaatatatagtaaaaataatattatttctatctgcatgcctccttattttttaaattatctttaacctcttgatattagttacttttaacgattaacaaaggcatagagatacttggtcaagacaaagatataaaatagctttaactatattaataagcttaac

SEQ ID NO: 22470 - DNA, 850 bp, Emericella nidulans
atgggacggcgagagtgatcctgagctgccggtcaattggcaaccctccaaaaaatggcagaatgttgtcatggtctcggccttgactttcgtgacgtgaggcgatcctctcccaaatgctatcgataagttgcgactaaccctggccacgcgctgcccagtccgtttgcgtcgtctatgtttgccccggcgatcaaccaagtcatggccgagatgggcacctcgaaccgcgacatcggctcgtttgccgtatcgatctatctgcttggttacgcatttggacctctcgtgctgggaccctgcagtgaactatacgggcgtctgattgtctatcatactggtgccctgctatttattctctgcaatgtcgcttgcgcgctgtccgttagcatgccaatgctcatcatcttccgtttcttaaccggtcttataggcgctgctccgttgacaataggtcctggtaccgttgcagattgcttccgccaagaggagcgcgggcgtgccatggcagtctggacaatgcctgtgctgctggggccttgcctgggaccagcggttggagcctacgtgtcccgttcgctgggttggcggtggaacttctggcttttgatcatcgtggtaggcttctacccaactcatcaccggctacaagggaattgggcatacgctaataaggcagtttcaagtccggtgcagtttcgctcttctgcctcgtcttccagcgggagacccatcctccgacgctcctgaagcgcaaagccgctcggctgagaaaatcgaaaggcaaccccaacatacgccctgtcaaccataccacggtatcccggagccatctgatcgagacgagcat

SEQ ID NO: 22471 - DNA, 850 bp, Emericella nidulans
  unsure (1)..(850): unsure at all n locations
cctcaagaagaagataattgtcttcttctctagctgcaattgcgtgaaataccacgctgaactcctcaactacattgaccttccagtgctggacctacacggaaagcagaagcagcagaagcgaaccaacactttctttgagttctgtaacgccaagcaaggagtcttgatctgcacagatgttgccgcaagaggtctagatgtatgtcttcctttcctctgaagtagctatagcccactgccacctttagatccctgccgtcgactggatcatccagttcgatccnacagacgacacccgagactacatccaccgagtcggacgtaccgcccgtggagccaatggcaggggccgcagtttgatgttcctgcagccgtctgaagttgggttcctcaagtacctcaaagaagcccgagtaccagtcgtggagttcgacttcccagccaagaagattgtgaacgtccaatctcaacttgagaagctgatcagccaaaattactatctcaacaaggtaagcttttagcccagaactcgttttgagatgtggacgatgtgtatgtactaactcattcccccagtccgccaaagacggctaccgctcctacctccaggcgtacgcctctcactccctgcgctccgttttcgacgtgcacaagctcgatctcgtgaaagtggcgaagagcttcggcttctcgacgccaccgcgtattgacatccagcttgggtccagtctcagcagagataagaagcaacagcagcagggaagacgcagttacggtagtcaaccgaagggcctgaagttcaagaggaagcatgaggatgattgatcttggtttgccttggtatgct

SEQ ID NO: 22472 - DNA, 850 bp, Emericella nidulans
cggtatttcaacaccaccaagacctctgcgattatcggggcgatcaatagcacattctctggaggcggtacggtgacaaaatctctccaattttgaatctcggtctaataaccgcagctgctatcggtgccctccaaggagggttgacgatggatcggtttggccgcaagttcacgatccagatgggcgcttcgatctgtctcgttggggcgatccttcaggctgccgcgacaaacctggctatgatcctcgtcgggcgtattctcgcgggttgggctgtcggtctcatgtccatgtctgtccctgtctatcaatcggaatgcgcgcatcctcgaaaccgcggtatgattatcggtctcgcccagcagatgattggagtcggtttcattgtcagcacgtaagccgctcgttccttaaaatcttcgcgactctgaccgtagtagatggattggctttggctcgttgcacgcacccgagagcagtgaattccaatggcgattcccattggcgttccaggtcgttcctgcagtgatcctgctcattggactgttcttcctacccgagtctccgcgtcacctgatcggaaaggagaaatacgaggaggcaatgaaggttttgcgaaaacttcattatgacggcacgaacgaggactggattcaacgagagtatggcgagatcaagtccaccattgacgcagaaagggccgtgaccgagcctggttggctagtgatgttcaaggttcctcagtataggactcggttattgtacgctcaccaccctaaagattattgaccacggctgaccggtacaggcacggtgttctcgtccaggtatcacgcagatgacaggt

SEQ ID NO: 22473 - DNA, 850 bp, Emericella nidulans
actcccttgtctagaggcatgtattccgcagaccagttcatgaaccctgggcccgcccctcgcccaccgaccgatcgcccgaaacttaacctctccgcaagcagcggtgtaacgacgtctcttaatcagatgagcctagattctccaagcaccccgagcgctaacctgtcattgttcccgaataccagcagcccttctctcgtgcgcacaaggacagatcaatcaggttctgccgtggtcaaggaaggatatgtacgttgcaaagaggataagttcctggctacgtggaaccagcgtttcctaattcttcgcgaatctcgcttggatttcttgaagaatgaggcaggaaaggtggttctctccatacctctttcggcagtcacaggtgtttctcgctctgaagatacacgaatggccttcgaaatcgtccgtctagccaatccgaaagatgcgacctccaaggccgccctgatcactcgggatgttcccacgaaaagtctgacttgtgaggtcagaactgatgaagagatatatgactggattgataagatatacgaacgttgccccggaatgggtggtgtaagcaatccgacaaacttcagccaccgcgttcatgtcggtttcgacccgcggacaggagccttcgttggtctacctccagagtgggagaaacttcttactgcatccgcaatcaccaaggaagactacaagaagaacccgcaagcagtcatcgaggttttggagttctactccgacattaagatgcgtgaacaaaacccgcagtattacgcaggtttgggctctccagctggtcaggcaaagccgtatggtagcagcactgtggcggtcc

SEQ ID NO: 22474 - DNA, 549 bp, Emericella nidulans
  unsure (1)..(549): unsure at all n locations
tctcgntcttaggacgaaggctcttgtcgtgaaacacgtcacaaaccagactcgtttcggtaaagtgattttacatatatcctaactgtcgccggtaatggaaacggtctccttggtattggcgaaggaaagtcacaggaagccacggatgcgagagtccaatcgctataccgtgctattagaaacatgaaacctgtcccccggtacgagaaccgcacgatctttggcgatgtgaagggcaaagtgggcgccgttgagctgaaactgatgacccgtcctcccggtaattttttcaatactacatttccgctcagcgaagctaacaaggccaatctaggtttcggactccgctgccagagcttgatttacgagatgtgccgagcagccggtatcagcgacattgcggctcgtgtcgagcgagccagaaacccgatgaacacggtgaaagccgcatacgaagccttgatgagccagcgcgacccggaggagattgcccgtgcccgaggcaagaagctggttgatgtgcgcaaggtctactactcgggaaga

SEQ ID NO: 22475 - DNA, 350 bp, Emericella nidulans
acccaccagcctccgccgtcggcagttaatacgcacacttctactgtgatcttcactccgctggctgcgtataagctgcatggtgcttagcgcagccgcatacaactataacgcatcatcttgaccttgcggatgataaggggctggttcttatgcatggccaggtgatgcctgactcgggagtctcgactgccgaggctacgtggttagttagctgcgtgcagcggttctacgacttcggcggccaggcgagtggacgaaagggggaacttctccgcatgtttacccagggcgatgttcagaactttaggattgaagagttgatggctgaagcggagaaattgtagatt

SEQ ID NO: 22476 - DNA, 580 bp, Emericella nidulans
cttatcgatcaaacgtatcccgaaattctacgctcaaacttgtcatccaccgtgcttgagcttaagaagttgggaatcgatgacttggtgcatttcgacttgatgatcctccagcgccagagacacttatgagggctctcgaggaactgaactaccttgcgtgccttgatgatgacggtaacctcaccccgctgggccgccttgcctcagagttcccgctagaccctgcacttgcggtcatgcttatcagctcaccggagttctattgctcaaatgagatcttgtccatcacagcattgctctcagtgccccaaattttcgtcagaccggcatcccagcggaagcgcgctgatgaaatgaagaatctgtttgcccatcccgatggcgatcatctgacattgcttaacgcctatcacgcgttcaagagccctgaggcgcaggagaaccccaagcagtggtgccacgaccatttcctttccttgcgatctctgcagtccgccgacaatgtacgtatgcaactcctcagaatcatggaacgtgaggaactggagatgatctcgacgtctttcgaagataagaa

SEQ ID NO: 22477 - DNA, 807 bp, Emericella nidulans
cgagtaacatcttccttgtaacaaacatgctcgacagcataagttttccgcagccaattgaaacggtcctcactgaaagcgcccagaaatgcaggctccttctcgacacagttggcggtattgaccgcaagcatctgaggggcctcattgaccgcaaacactctgagacgttggcgctgtatcagggtcagtcccggttcatgctggaggatctaggcgcgtatctctctgagcgcaatatcggctccaaggccaggaagaggatcgcgtctaaggttgcggaggagatgattgcggtacgtacagacaaccccctgaacaaaccgtctcacaagccttgctaataatgataatagcgaaaccatgcatactcaaaccttgtcgagcttctcttccctcatcatgtccgtcttagtattcatgcgtatgcctcaccagtccaaccccatccattacactagagcgaaactaacctggattttttccagacacacaaatgccggacccaaatttggcatccgcctcttcccccgcggggctgtgcgtgcggcaccaaccgcacaggctattctctctatttctcagtccaagtccgagtccgagtctggggcgatcaccaaccccctctacgagttccagatccctacgccctggcataactgtcttgttcgtgtagaggggttagagggcatgcttcttacaagatcaggaattattcgcgatgcgattagcaaaggcttgttcgagggcggctggtgtcagcgcgagggaggtccgggcggatactttgttattcgcaaggttaag

SEQ ID NO: 22478 - DNA, 850 bp, Emericella nidulans
cgtgcagatcatctataacgccgggctcttgcccatcttctggctaatcctgcgcgagacccgaccagatgtaatcctcaagcgtcgtgctgctaaaatccgcaaagaaaccggccgtcccgtctacgcccaagccgatatcaacgccccgtctaccctccgcctcctccaaatctccttcaagagaccgacgaaaatgctgctcactgaacccgtcgtcactttcttcactctttggattagtttcgcctggggtattctgtacctcttctttagcagcgttgtgcaaacgttcggcgagaactacggctgggatactttggcaacgggtctcgtgcaactcgccatctctgtcggtgccgtgattggtactgtgttcaacccgtttcaggactggctctatcttcgctcgtcgagtaggaataaggaaaaacctagcaagcctatccccgaagcgcgcctgtatacgtccataccgggctcgctcctttttgccgcaggcctcttctggtacggctgggcttcacaaccagacgtgcactggatcgtgcctacgatgggaattacagcagcaggtgtcgggatttacagtatttacatggctgttgtgaattatcttactgatgcgtacgagcgatacgcggcctccgcgctgtctgctgcgagtttaggacggaattcctttggtgcatttctgccgctggctagtccacaactgtttagcaaccttggttttggatgggcaggcactcttctcggattcataggggttgcattgagtgttgtccctgtggtactggtgctcaaaggccctgctattcgacgcagtagtccgttcatgagggagagt

SEQ ID NO: 22479 - DNA, 850 bp, Emericella nidulans
ttcttttcgggtctccttccttacgaattcatcttccacgccatgtccggtcgtgaaggtttggtcgatactgcggtcaaaactgctgaaaccggatacatgtcgcgtcgtctgatgaaatctttagaagatctttctactggttatgatgacactgttcgaaattcttctcagggcatcgtccaattccagtacggtgacgataaattagaccccgtcgatatggagggcatagccaagccggtccacttcgatcgaactttcatccacgctgaaacgacgacgtataagaacgaggaacgaagcttgtcccctgccgagatcatggaagtatgtgaggagatgctctcaaaagaacgcgccaagtagcgcgatatgatctaatgggtgctgaactcgactatatggatcgaagcgaccatggagttgaccagttcgagagcgctcgggatttccttgattcaattcaacaatacgtccaaaccaaggcggacaaactgatctctcgaggtggtgacagcgacccatctgacgagaggaccatcaagggtctaaaccatactggaaagctgacggagaggacgcttcggacgttcattgctgagtgtttgatgaagtataagaaagctcaagttgagccaggacacgctgtgggtgccgttggtgcgcagtccattggagagccgggtacgcaaatgacactgaagactttccactttgctggtgtcgccggtatgagtatcacacagggtgttccccgtatcaaggaaatcatcaacgcctccaaggagatcagtactcctgttatttcctgcgagcttgtcgagaagcgcaacatcgtcgcggctcg

SEQ ID NO: 22480 - DNA, 850 bp, Emericella nidulans
cttactaacacaacagcgaatagatggtggccctctccatggcggatggctatgcacggttaacgggaaagccgcaatgcgtcatcgtgcatgtcgacgttggtactcagggcctcggtgctgcaatccacaatgcctcgtgcgggcgcgcacccgttctgatcttcgctggcctctccccgttcacgattgaaggcgagatgcggggctcccgaacagaatacatccactggatccaggatgtgcctgaccaaaaacagatcgtatcgcagtattgccgctacagcgcggatatccgctctggaaaaaatatcaagcagatggtgcatcgtgctttaaagttcgcgacaagtgacccacagggtccggtgtatcttgttggtgcacgagaggtcatggaggaggaaatcgagccatatgctgttagtccgtacgggtggagaggtgttgcgccgccggcgctccctgctgagggggtggagcttattgcgcaggaacttgcatctgcgaaggagccgttggtcattgttggatactcggggcgtactgcgcggggagtggagcagcttgtcaagcttgcagacacatacaaaggcattcgggtgctagatacgggtggtagtgatatgtgttttcctgctgaccatccagcatccctggggatgcggttcgggatccacgaagccatcaagacagcggactttatcctcgtcgcagactgtgacgtcccctggatcccgactcagtgcagtccctcagactcggcaaagatcatccacgtcgacgtcgacccgctcaagcagcagatgcccgtcttctatatcccggccatggcagtcttccgcgcctt

SEQ ID NO: 22481 - DNA, 850 bp, Emericella nidulans
ccacagcttccaccccggatacctcacagctgagcgtctggccaaggctaataacctcaagcttgctgtcactgccggtattggctccgaccatgtcgacttggacgctgccaacaagacaaacggtggtattactgttgctgaggtcactggttccaacgttgtctccgtcgctgagcacgttgtcatgaccattctcctcctcgtacgcaatttcgttcccgcccacgaccagatccgtaacggtgactggaatgtcgccgcttgtgctaataacgagttctaccttgagaacaaggttgtcggaaccgctggtgttggccgtatcggtgagcgtgtgctccgccgtctcaagccctgggactgcaaggagctcctctattatgactatcagcccctgcgccctgaggttgaaaaggagattggcgctcgccgcgtggactctctcgaggagatggtctctcagtgtgatgttgttaccattaattgccctttgcacgagaagacccgtggtctcttcaacaaggagctcatttctaagatgaagcctggtaaatctgctcttttatatttgattattccgatgctaatgtatcacaaaggttcatggctcgtcaacactgctcgtggcgctattgttgttaaggaggatgttgctgaggctctcaagtccggccacctccgcggctacggcggtgatgtctggttcccccagcccgctcccaaggagcacccactccgatacgccgagcacccttggggcggtggtaacgctactgttccccacatgtatggtacatccattgacgcccaaatccgttacgccaacggcaccgaggccggtcttaca

SEQ ID NO: 22482 - DNA, 586 bp, Emericella nidulans; identical to SEQ ID NO: 6784

SEQ ID NO: 22483 - DNA, 610 bp, Emericella nidulans
ctgactggaggttatgactagaataaaaggcgcaagaacagttccgataagacgaagcagcagaaagaccccatggaaggtctgagggatgccaagactctttatgttggtaatctgtacgtttcccggacacgttacgccctcttcgtgtggtttttccaattgctgaccattacagctcattttacactacagaggaacagatccacgagctcttctccaagttcggtttcccagccgcacaacccggatcttttgctaacccgatttagatgcggagagataaagcgccttgtaatgggcctcgaccgatacaacaaaactccttgcggattctgcttcgttgaatactatacgcatcaagacgctcttgattgcttaaaatacattggtggtacaaagttagatgagagaatcatcaggacggaccttgatccgggattcgaggaaggccgacaatacgggtacgcacgcaactcaactttcttgttccgggcaaggtactgactcgcagcgcagacgaggtaaatccggtggccaggtccgtgacgaataccgagaagagtacgatcctggtcgtggcggttacgggcgagcatacgcggatgat

SEQ ID NO: 22484 - DNA, 850 bp, Emericella nidulans
gacgaatgcccatgttatcctggaatcggcaccatcattcgagttgcagacccagcctactaacggattccacacagactcggactgcatctgcgtagatactgactcggacagtgcggcaaacggtgtggtgacgccgtcaagtgattacgagcatggtcccccagagccaaatgaagacggccggcctcagcttttcatcgtctccgccaaatcaagggtgtcattagaggcagcaatctacaatgtaagggactgggtctcgaggcacggagcaacgtatataaaaaggcaagagctagtcaaaacactctgccaccgacggtcgattttcaattggcgtgctagcattgttgcgtcttcgcagccgggcatcctgtcggcgctggagaagcctcacaccactaagtcctggacgaaggtccaggttgtcttcctcttcaccggccagggtgctcagtacgcgaggatgggaaaggaacttgtaggattagatagcgtcttttcccactcgcttgatcagtctcaaacaatcctcaccgagcttggagcttcctggcgccttttggaggaacttcttcgcgaagagtccgcgtccagcatcaactcgagcgagctctcacagccagcaacgacagcgatccaaatagcccttgtcgacatgctggccgagatgaatgtccgcccgagtgccgtgctcgggcattccagcggcgaggttgccgcagcttatgcagctggcatcctagggcgaagggaggcattgacaattgcctatcataaaggctttgtggcgggctggtgcaggaacgccatctcatctcaaggagcgatgttggcggttgggctg

SEQ ID NO: 22485 - DNA, 850 bp, Emericella nidulans
aaagcatacaccatggcgtcatgatggtcggcaagtcgggttcaggcaaatcgtcggcgtggaagattctgcttcaagccctccagcggatcgaaggagtggaaggagtctctcatatcattgactctaaggtcatgtcaaaggaggccctctacggtagcctcgatagcaccacgcgggagtggacagacggtctgtttaccggtattttaagaaagatcgtggacaacctccgcggtgaagacacaaaacgccactggatcgtttttgacggcgacgtcgaccctgaatgggttgagaacttgaacagtgtgctcgacgacaacaaactactgacacttccgaacggagaacgtctgaacttgcctccaaatgtccgcatcatgttcgaagtcgaaagtctcaaatatgccaccttggctactgttagtcgttgcggtatggtctggttcaacgaagataccgtgacgccttcgatgatcattacgaactatgtcgagtcacttaagactaagactttcgaagacttggatgacgacagtgtgccttctggtcagagtgctgtcaagacccaggactgccaagatatgctgtcaactattctctctcaactcttgcagacagatgagcttgttcacaaatcgcttggggaagccaagaagtacaatcatatcatggagtttactgaaatccgtgcccttaacactttgttcagtcttctgaacaaagcttgtcggaatattcttgaatacaatatccagcatgttgacttcccgcttgagtatgagcagatcgagtcgtacatctcgaagaagcttcttctcgcacttgtctggtcctttaccggaga

SEQ ID NO: 22486 - DNA, 705 bp, Emericella nidulans; identical to SEQ ID NO: 6266

SEQ ID NO: 22487 - DNA, 392 bp, Emericella nidulans
agtggcttgaagatttacgccaaatcgctgaagaaggcattgttgtcatcctggtagggaacaagagtgatcttgcgggagacgatgcggattccaaccagagacgggtcactaggcaagaggcagaggaatggtgccgcatgaacaatgttgtgcgttaccttgagacgagcgccaagtcaggcgaaggagtagaacgtgcgttcctcgaagttgccgagcgcatataccggaacatcgaaatgggcaaatacgaccttaatgatcgccgcagtggagtaaagagctttggtgctactggcggtgcgaacaacagaatgcccaagaccgtgacgttagggatgaatgatgcgatgcgcaaaggtggtaatggtttaggcggaggttgttgc

SEQ ID NO: 22488 - DNA, 675 bp, Emericella nidulans
ttcacccggccaaccgtccttctcctaattgacaatcagaaagctttcgactgtgatccgaacactccatgtcactggggcactcaacgctcaaacccgctactcgaacaaaacctatcccgtctaataactgccttccgtgccgccaaatccagatcagagacgaaactcgaaatagtccacgtcttccactcttccacatctctcacctcccctctccatccatccgcgtccaacgggaccggaattcagcccttggcttgtgtccagccggcacaagatggttcagagcccgtgatgtggaagcacgtcaattccgcctttatcgggactgggctagaatcctaccttaaagagcacggaatcaggcagctagttgtggcaggcattactacagatcactgcgtatcgacatctgtacggatggcggcaaacctaggcgtggcggatcggtatcctgagggcaagcccgttctgaatggagatgggagtcaggagaaagcagtgccggttgttgaaggccggattgtgcttgtgggcgatgcgacggcgacatgggccaaggggggattcgacgctgagactgtgcatgctgttaccctggccagtctggacggcgagtttgcagatgttatggcaacggagcaggtcattgcgtccttggaagcgttgaat

SEQ ID NO: 22489 - DNA, 850 bp, Emericella nidulans
cgtgtgatggcaagtcgcaattgttacgggggctggatcaggcttcggctacggctccgcaaagaagttcgccgaggagggagcagaggttattgccgccgacatttcagaaaaaaatggccaggcagttgcagcagagctgggtagcaagttcatctacacagatgtgactcggcgagatgattggcaagcgcttctccaagctacgctggacgaatataagacactcgatattgtggtcaacaatgcgggcgcaacatactctaacaaacctactctcgaagttacggatgctgatttcgacctctgcgtgaatgtcaatgctaagggtcgatatacctgtccaccagtggtatcgtgccatactttgtagaacacaatcggccaggatgctttatccaggtctcatcaactgctggcctacgcccacgcccggtttgacgtggtacaatgcatccacagctgctggtagcaatgctaccaaggctttgggctgctgagtctgggccccagagataaggttcctctgtgtgtgcccggttgttgggagcagtggcatgtaagtgacctcattcccgcagttcttaaggtcatttttgtatcaagtataacatccttcctaggacacatctcttcctagggaagccggacaccgaggaaaatagggctgcgtttgtgtcgactataccactaggccgtccttcgacgccagcagacgttgcgaatacttgtagtttcctcgcaagtgatgaagcggggtttatcacaggagtcgagctggaggtatgcattatctaacttgccaagtttccgcgctaatattctgcagattgatggtggccgctgcgtg

SEQ ID NO: 22490 - DNA, 415 bp, Emericella nidulans
tcgactaccctgccgatgctgctgtatgtctaaccccccttccaagtttagcgtaccgaactgacggattcagggaaatgccgcacttggaggctccggcgggcctaagatggccagcctcgtcgaaacagccctcaagcagtgccctgacactaagattgtcctaggcggatactctcaaggtgctatggtcgttcacaacgccgcctccaagctctcttccggccaggtcgttggcgctgtgaccttcggcgaccccttcaagagccagaagcccgacaacatcgaccagttcaagactttctgcgcaagcggcgaccctgtttgcctgaacggcgctaatgtcatggctcacctttcttacggcaatgacgcccagactgcggcccagttccttgttagcgctgctggactg

SEQ ID NO: 22491 - DNA, 422 bp, Emericella nidulans
gagatttatgcgaatgcactacgcgctgaacacagcaaacactctgaccgaacgagacgcttagatcggagttccgctcggctgcagaagagccagcgaattgctatgaagacgagctggcatagcacccaatgttttggctgatttgcatgagcagagagagactattacgcatactcatgggatgttgggacagagcgaatgtaatgtggacaagagcatcaaaactctgaagggaatggctcgtaggtactgtcacccctatgctgacctttaatgggacagacttcaagagcgacgtctgtggaatgcaagctaaaaggttcttttcgtgcaggatgggtacgaattactctagacccgttgccataattaccaccctgatagctgtgttccttagggtcccaccctcctcaaatcgg

SEQ ID NO: 22492 - DNA, 509 bp, Emericella nidulans
gttaacatggtgctgtctgagtgggagtttgcccttgcgaaacgagatgtcacggtaaagcagagtttacatggacggcaagcgtacaatgcgatggtgcagtcgcgggagaatatgacgcctctcatccgaaaatttgagaagggtgatatcgacgataacgtgctacagcatatagtggagataataagcaaagcccagcagcgaagatatgttgatgctaacgatgcttacctgcggctgagtattggaaaagcgtacgtcctgctcgttcctcttttattcccatattatgtctaacagtccacagagcatggcctattggagttaccatggttggtattcacgaacgttcagcgcgagagaaactacatcagggggacaagcaagcgcatatcttaagtgacgagagtactcgtaaatatctacagagtatcaaacgttgtcttagctttgctcagactcgctggcccccagacgatcagctgcaaattatgggctgagcgcga

SEQ ID NO: 22493 - DNA, 850 bp, Emericella nidulans
gtatcggaggactgggagttattccttgctgcccatgcccgaaccccttcaggcccgtccaacaaggtgaagtcggcttggtgacgcgattcggccggttcgtgcactccagtgacctgcgaaaataacaaaaacaacgaaaaacgcgcagctaacataacatagattcgagcgcgcagtagaccctggtctcgtcaaggtcaacccgctgagtgagcgtcttatcacaatcgacgtaaagatccagatcgtcgaggttcctcgccagatttgcatgaccaaggataacgtgaccctgaacttgacttccgtcatctactaccaagtcgtctcgcctcacaaggcggcgtttggtatttccaacatcaagcaagcactcgtagagcgtacccagaccacattgcgtcatgtcattggtgcgcgtgttctccaagacgtgatcgaacgacgtgaggagattgctcagtcaacgtcggagatcattgaggaagtggcttcaggatggggtgtcaacgtcgagtctatgctcatcaaagacattatcttcagtgatgacctccaggactcgctgtccatggcagcgcagtctaaacgtatcggagagagcaaggtcattgccgctcgtgctgaagtcgagtctgccaaacttatgcgtcaggtatgtgctaagccattgtcccgcgatctaagctaatcaagtcaggccgccgatatcctttcttctgctcctgctatgcagattcgatatctcgaggcgatgcaagctatggctaagacggccaacagcaaggtcatcttccttccggcgccaaaccaaaccgtacagcagcaactagcggcggcggagaat

SEQ ID NO: 22494 - DNA, 850 bp, Emericella nidulans
ggttgcggcggcttgaagagttcttagagaaagcgacacttcatgatgatgaaaggaactttttatcgggcgagacaacgtcgaaactaagtccgtactttgcaagcgggtcattgagcgcgcggacggccgttgcgaaggcacgcgaagcaaatgccggtaaaatatctcgcggcgaggccgggtatatatcttggatcagcgaagtcgcttggagagacttttacaagcacgttctggttcactggccgttcatttggtaaggcccacctccaccatttagcacagaaagctgatgctgtcagcatgaacaaatgcttcaagtttgaattcacgaacatcgactggtcatataacaacacccacttcgaagcttgggcggccggcaagacagggtaccctctggtagacgccgcaatgcgccaactacacgcaaccgcctggatgcacaaccgctgccgcatggttgtttcttccttcctctgcaaggatctgttgatcgacctggcgccgcggcgagcgctacttcatggagcacctcatcgacggcgacttcgcgtccaaccacggtgggtgggggtttggctcaagcacgggtgtagacccgcagccctatttcagaattttcaaccccatccgccaaagcgagcgattcgaccctgacggcgagtttatcagacgttgggtgcccgagctacgcggcgtggaggggaacgctatacatgcgccgtatgagaggggcgcgggagacatcgcgagggcgaatgggtatccagagccgatccctgatcatgcgaggcagcgcggtgttgaaataaggaagtataaggatgctgcgcggggagcataa

SEQ ID NO: 22495 - DNA, 850 bp, Emericella nidulans
ggtgcaacagacgatggcgtcgttgatgcaaacgtcacgctgtccacgctggcggaactcatctccgccgccggcggcccagactacgacttcaccgagatcgctcctatcgacggcgaagacggcggcgaaccgggtgggaatatccgtgtcgcatacctgtacgatccaacgatcgtgcagctgcacaacccaaacccaggcacatccaccgatgcaaacgaggtccagtcgggcccggagctgaaatacaaccccggtctcattgacccgaccaatgaagcgtgggaggcatcccgcaagcccctcgtcgcagcgtgggagacagttgacggcaagaatacgttctacaccatcaacgtccatttcacgagcaagggtggcggctcatacctgcaaggcgatgagcgtccgcccgtaaacggtggcgttgagcaacgcaccgcgcaggccgaagttgtcgctgtaagccctcccccgtccaaaaagatgaccctagccaaaccaactaatatcataaataaaacagtccttcatcacctccatccttgaagaagacgcctcggccaaaatcctcacaaccggtgacttcaacgagttcaccttcgcggcgccgctcaagacattcgtctcggcttctggactccaagacctcgacgaggtggtcggggtagacccactagaacgctacacgtatatctatgacagtaaccacgagcagctggaccatatgtttgtttctgaggcgttggcggaaggggcgcgcatggaacatgtccatgttaatacgtgggtcaattatgatgacgcgccgtcggatcatgatccgtctgtggctgtcctgaatgtt

SEQ ID NO: 22496 - DNA, 850 bp, Emericella nidulans
ttttagactctccaccaggtgccggcgacacaatcgggtgggcggagtcaatgctgtggtgttcgcgaacagtgtccttggtgcacgcacgcaaaagtaccctgacctgattgacgtctgtatcgcacttaccggtagggcgccgctggctggagtccagattacagaggaacgcgctccgagactctgcatcgatgtgactgtgcaaaagcacgaggcactggaggatgtattttacccgctgcttgggtacgcggtaggaacagtggtcgcgggaaatatccccctaatcactggactggagtcgacgaatccgactaggtctgacctgaaagctttcagtgcagcctttgcgaccacggcttctgcgcccatgttccacatctctggcatcacacctgaagcaaagcagttcgatctagctgggcttaagcgtattccactcgccgacgataacctgctctccgctctcaacggccttatcactgccgcagacgactccgtcggccttgtctcactcggaaacccgcacttttctcttgaagagtttgctcgtttcagtgaactgtgtactggccgccgtaaggcggattcagtccaggtgatcatcaccaccaaccgacagatttacgctcaggcgtgcgctgcgggacatgttggtgcaatcgagactttcggggcccaaatactcacagatacctgctggtgcatgatgtcagagtcagtgatggactcttctgtggtgaacctcatgaccaattcggccaagtacgcgcattatgcgccgggaatagtccgccggggggttcattttgggacattaaaagactgcatcgccgcggcggagaca

SEQ ID NO: 22497 - DNA, 729 bp, Emericella nidulans
cccagtaatcactgttcaccgtcaatcaccatctccatcatggctgaacggattttaatgaacgagttcaaggctctctctcaagagccgtgggtcaacgttgagcttcaaaacgacgacatcttcagatggacgatcgggcttatcgtgctgaatccagattcgttattttacggaggttacttcaaggcatccatgaagtttccaacgaactacccgtattcgccaccgggtacgcttttttgcccttgagtgctcagacctgccatttactaacaatgctcgtagagttccgctttcaccgacccctctatcacccgaacatctacaccgacggcaagctctgcatctccatcctccactcgcccggcgaagatgaaatgtccggtgaactcgcgtctgaacgctggtcgcccgcccaacgcgttgagtccgtactgatttctatactttcccttctcgacgacgcggaagtctcctcgccggccaacgtagacgcttcggttctcctccgcaaggattttgaagcctacaaagaacgtgtacgaaagtgcgtggaggattcgaaggctgacattcccgagggattcgaaatgccgacacacgagagcacgatcaggagtgccccgaagcaggtgaaggacgatgactcggacttttgggccgagagtgacgtggacgatgatatgtttggagggagtggaagtgaccaggaggaggttgactcgg

SEQ ID NO: 22498 - DNA, 334 bp, Emericella nidulans
cctttctgatctcgccgctgcccttgcgggttctattggcatcgcacccacgtcgaacctcgacccaacccgtcagaacccttccatgttcgagcccatccacggatccgccttcgacatcacgggcaagggcattgctaaccccgtcgctacattctggactgcagccgagatgctggagtggctcggcgagaaagacgccgccgacaagctgatgcagtgtgttgaaagtgtctgcgaatctggtatcctgaccgcggatctaggcggcacggccaccacgaaagaagtgacctccgctgttgtcgaggagatcaaccgtctgaattaggtt

SEQ ID NO: 22499 - DNA, 796 bp, Emericella nidulans
cagaggccgtcgccgccgaggagccagctaaggaagcagtgactgaggagcccaaggcagaagaaaccgcggcaccaaccgactccactgaggcccagaaagaagccgcagaggagccagttaaggaagcagtgactgaggagcccaaggctgaagaaaccgctgcacccactgagcccattgaggctcagaaagaagctgcggaggagccggttacggaagcatctactgaggagcccaaggcagaagaagccgcagaggagccagttaaggaagcagtgactgaggagcccaaggctgaagaaaccgctgcacccactgagccgattgaggctcagaaagaagctgcggaggagccggttacggaagcatctactgaggagcccaaggcagaagaagccgcagaggagccagttaaggaagcagtggctgaggatcccgaggctgaagaaaccgctgcacccgctgagcccattgaggctcagaaagaggctgcagaggagagcaaggtggaagagcctgctgtcgcccctgaggctgatgagcccgtaagagaagctgcaggggatctcaaaggtgaagaggtggcaaccgctactgacgctgttaaatctgtggagaccacaaccgtcgagcctgctgtcgaagcggaagccgcaacggagaaggccaaggtagaggaatcgaccactgtcgacgaagttgctgaaaccgaagtcgctgaaacagcaaaggaagtcgcttccgaagagcccaagactgaggaacctgtcgccgttgctgaacgtgtcgcttt

SEQ ID NO: 22500 - DNA, 850 bp, Emericella nidulans
gtcactggagatataaatatctcaagaggcgagatagatgcagcgcacgcggcggaaaacataaagaaaggggtaactacggaggatgacttcgtctctgctcctgctcgccgcctgttcaaccagttattaattgacggtaaagtcgtgggtgaccgagatgaaggaagagaacaacctgtcctttttgatatatgcaggtcatttcatccgaaacgtaaagggatgtatacttgctgggagcaaagaataaatgctcgtcccggtaactacggttcgaggatagactacgtcctttgcagcctggacatgaaggattggtttttcgactctaacatccaggaagggctcatggtatgtcctaggaaaacctgaagactgactccgctaattggcttattcaggggtcagaccactgcccagtatacgccgtctttaaggacctcataccactgaatgacggccaatcccacatactcgatatcatgaatcctccaggggtgttcaagaatggcgagcgtcaacagaattacacggcaaagttcctactaccgctatcagggcgattgataccggaattcgacaggcggagaagcattaaagatatgtttatgcgcaaaccgagccaaccatcgccgaaaacgtcttctccgcagaatttaacagcatgtctttctaacgaagaaagcagcatgactgcgaggacagcgacaaatacaccaaaaccttcagatgctgatgcgcccgcctctgtatccaatgatactctacagaaggggaccgtccgaaaacgacccgtcgggactgaagttcctccggttaaacgatcgaagtcagcgagtacccaaac

SEQ ID NO: 22501 - DNA, 520 bp, Emericella nidulans; identical to SEQ ID NO: 7033

SEQ ID NO: 22502 - DNA, 850 bp, Emericella nidulans
gctggcggcaacgaggccgacacagacgccgacgcagagatggaggcatactggacagccatctcagcctggcacacccaactcctggtccacgacaagacaccgaaattgaccactctattcagcttcacaaacacctctttcagcctagttgccgctacgctcctggatagtcctgcatctgctctctctgcagtattagcacccttcgtccagaccctggatgatttagggctgaactacacctacgaaacaaacacccagtcatcgttctacgaccactttgcactctacacgcccgccttaccctatggcatcacggtcacaaactcgaccgtcggtggccgactgataccccgtcagacggtcgctgagaagctccccgaattagtctccgcactgcgcaatataacttctcacccgaatatccgtatcaacgggattgcggccaatatcacgcatacccgggtccggaatatacgtgcctcaaatgccgtgcttcctgcctggcgagatgcgctctacactctgaatatggatgcttattttgagccgggggcgtcgacagacatcattctgcgtcgtcaggcgctgacgaacgcaaatcaggatcttctcaaacaagttacaagggacgcaggaggtggcgcatatacgaatgaggcaaccttcgataacccagattggaaaacggactattttggaactaactacgacacgcttttgcaggtcaaggagaagtatgacccgggtcacgcgctctatggagctgcgacggtgggcagtgactattggagcatgcaaggggatgggagactttgtgttgctgctggtgtctttggtactcctt

SEQ ID NO: 22503 - DNA, 523 bp, Emericella nidulans; identical to SEQ ID NO: 7852

SEQ ID NO: 22504 - DNA, 850 bp, Emericella nidulans
aacccatggctacgacctctcaccatttggccttactgaggacttaccagagcaatctgccgatcagagccccatccagatcggggaaaatattgctcgtacgatcaaagaagccatggactgggccaaagcatctctagcttactcacaacaagaagccgaacgccaggcaaacaagaagcgagccccagcacctacctataaaccaggtgacaaagtatggctgaaccttcggaatattcgtacggaaagacccagcaagaaactagactggaagaatgcaaaatatacagtcacaaagttgataggcacacatgccctacagttgaatactccaccaggaatacacccagtatttcatgttgacctcgtacgactggcagataatgacaagctcccctcgcaagtccaggatgactcccaacccccacctatcttggtaaataacgaagaagaatattatgttgactccgtactagataaacggtggaagaagataggaagaggaggccgttgggaatatctggttaaatggactggatgggctaaacctacatgggaaccagcccacgaacttgaagaaacagaggctgcacaagcctatgaattacaacaggaacaacagaaagaagaccatcccaacccagaacccacagaacaagaaaagagaacaggctcgcgcagaaccagatcgtacgacaagattaatcctccagttcctcaattggagcacggggaagctctgcaacagtaagaggcacatacttaggctcgcgatcagcataaaagtcgcaacgagctccgccatctttccacttgcagccagcacaagcaccattccaatagccag

SEQ ID NO: 22505 - DNA, 850 bp, Emericella nidulans
aaaaccaatcaccctcaactatccaccactgaataggactaacgcggttccataggtctggagaaacgtgcgcgactacggagcaaagggtgacggagtcacagacgacactgaggccatcaaccgagccatctctgatggaggacggtgtggcgtagattgcggctcgagtacgagatatcctgccgtcgtctggtttcccggcggcaaatacctcgtcagctcaccgattatccagtactataatacgcagtttatcggagacgtaagacacaacctaagcaattgcgaagaacattgactgacacctgcagccattgaatgttcccactatcctagcagcctcaagctttgttggactgggtgttattacctctgacccctacgtgagcgacaacggacaatggtatttgaaccagaacaacttcctgcgcagcatcaagaacttcaagattgatattcggcctacggatccatctgcctatgtgtgcgcaatccactggcaagtagcgcagggaacgtccttggagaacattgagttctacatgttgtataactcggatgttcctggcaacacccagcaaggtatctatatggagaacggatctggaggctttctggcggatctgacttttgttggcgggaacttcgggtgagaccttctttgctctacctctattacttactttacttactaacattgcccctaattgtctttggccttgcagtgcctactttggtaaccagcaatttaccacaagccagcttgttttcgtcaactgcaatactaaaaaacaggttcattgggattgggcatggacaatgcaagactatgtcatgagattatcac

SEQ ID NO: 22506 - DNA, 850 bp, Emericella nidulans
ctataaagtcggtaaacctgggaaagctcaacagaaagctcaaagacaacctagcgatggagattgatatcctcaaataccttctccacccgcacatcgtcgcactgctcgactgtcttgagacaaattcacacattcatttgataatggaatactgtgctttaggcgatttgtcacagttcatcaaacgaagggacagtctcaaagaccatagctatacccggcatatgatatcaaagtatccgaacgtctctggtggagccttaaacgaggtgatcgtccgtcatttcctgaagcagctggcaagcgccctaaggttccttcgtgataagaaccttattcaccgcgatatcaagcctcaaaatcttttgctctgcccggcgccaaaacccgcgccaacgcagtcagaagccgagccacagatagtcccgctcaaaggcagtgaaacgtcgtttacgccggcggtgggcttagaaacgctgccattgctcaagttagctgatttcggtttcgcacgatccctccctgccacgtctctcgcagagacattatgtggttctcctttatatatggcccctgagattctacggtacgagaagtatgatgccaaggcggacttatggtccgttggcactgtgctatacgaaatggtcgtgggaaaaccgccatttagggcaacaaatcatgttgaattgcttcgaaagatcgagactgcaagagaccgaatcaagtttccagaagagaatcctgcctcagatgatattaaggcactagtccgtggccttctaaaattcaatccggtggtgcgaatgacatttgcagatttctttgagaatgacattattacggg

SEQ ID NO: 22507 - DNA, 677 bp, Emericella nidulans
atcctgtgccttctggctggacaggttcagagactatgtacctgttgagatctgtccactacccaagctcgacagcactccaaatatgctaacctcgaaaaagcgcaatcccctagccctccactcaatcacagaatcctgcaagaccatgtccgtcacaatccaaactgtctccctgctttcctacgcaaaggcctacgcgcaccttctcggaacccgtgacgtcgtgttcggtcaagtcttagccggccgaacactgcctcaccctgaggcagaccgtacattaggaccattattcaacactgtcgcgcaacgaataacgcttgatcccacatttatgagtaactgcgctcttgcgcaacggctccaaagggatggcgtcgaagcacaaagacatcagcatgcaccgctgagaattattcagaatacgctgcgtcaagagggaaatcttgactcgaagcagttgtttgatgcactctttgtgttccagaagagtgccgcgctctctcagggtatcctgaacgagcaggagatttggacatcatatgaagatgaggatttcgtcgttgacgcggaatataaactcaatgtcgaggttgaccattctcacgacgaggacgatgttagggcaacggcaaatggtgccaaccataaccagaaaatgcgtgagagtttcc

SEQ ID NO: 22508 - DNA, 605 bp, Emericella nidulans
cactcactatagggagacccaggcttaggatccacttgctactggcgaggacttgggcgtttctttcgcagagtcgaaccctcggaagctcatcaaacgctccaaaaagcccttgggacacctacccctggagattctgaaccacctttcggcctatatcgactcagtcatccgaaacgaaacactcaacatcagtctccaccagtcccaggctagtacgtactacgtatctctaatgattttcaacattgctaacttctgaagttgcctgcctcgcccaactaaacgaagtcgtcaccggcactgaacgcgtcctcgacaccccgctcccagtcgcctacagcatcgcaattgcgcaaatcgcttggatttacgttcttgtcctccccttccagctctacgactctcttggctgggtcacgatccctggctccattgtcgctgcgtacattattcttggcctagcaaccattggcagcgaaatcgagaaccccttcggccacgacgtaaatgatctgcctctcgacacatattgcagacagatcgcgcttgaactggatattgtcaccgctgtaccgccgccaagtgttgacgaattcacctcc

SEQ ID NO: 22509 - DNA, 850 bp, Emericella nidulans
tagagttcgctgtcgcgctattaggttgttttatcgccggagttgttgctgtgcctataaacagcctaaatgattatcagagtctaaaccttgtccttacatcgactcaagcacatcttgcattgacaacagaaaacaacctcaaaagcttccagagggacatcactacacaaaagctcaactggcccagaggcgttgaatggtggaaaacgaacgaattcggcagttggcatccaaagaagaaagacgacacgccaccgcttattgtcccagacctggcctatattgagttctcgcgcgccccaacaggagacctgcgcggtgtagtcatgagccaccgaacaatcatgcatcagatggcttgtctgagcgcgatattcgcaactgtaccgtcgtcttccaaacaaccatcgcgcggagaaaccattattagctatctagaccctagacagggaattggtatgattttgggtgtgctccttacagcatacggtggccatacaactgtttggctggaagatcgagcggttgaaacgccaggtctttacgcccaccttgtcaccaaatacagagccacaatcatggctgcagattaccctgggttgaagattaccgcctacaactatcagcaagatcccatggctacacggcacttcaagaagaattcggaacccaactttgctagcgtcaaactctgtctgattgatacactcaccgtggacgccgaatttcatgaggtacttgcagacaggtggcttcgacctatgagaaatccaagggcccgtgagattgtcgcgccaatgctatgcttgccagaacatggtgggatggtgatcagcgtaagggattg

SEQ ID NO: 22510 - DNA, 763 bp, Emericella nidulans
acgtccaacgggcgacttgcgcttgagcaatggctcattgtcaggtgcaaagcgtatctctagtatcgccgggattctcggtatcatcaagttgaagcttggtaagtcaaacttccggactcattactcccagttgtcgtctatactcatatttgtcatttattctagacaagtacatcattgtcatcaccaaggcccaacccatgggccggctgcgcggccaaatgatatacaaggttgccggtactgagtttcttccactccgcgagcgcccgctgcacgatcatgacgaagatgcctacttgactatgttgaaggaactgctacgaacagggcctatgtatttctcctacaccttggacatcacgaacagcttccagcgccagtcacaaagcgatatgagcctgccaatgtggaaacgagccgacgatcgcttcttctggaaccggttcattcagtcagatctgattgacttcagtttgggtgaacataatacgacgtccgttcgttatggtccgcaacccggcgttgatccttatatcctaccagtcatatttgggatgctgcgtatcacaccggctaaggttaaatctaccacttttacgtttgctctcattactcggaggtcgaggcatagggctggcacaagatatttctcccgcggaattgacgagcagggaaatgtctcgaattataacgaaacagaacaaatcgttatcctcccagcagccaccggcggtctttctgggtttgctggaggccc

SEQ ID NO: 22511 - DNA, 600 bp, Emericella nidulans
ccagatccaatcgcctaggtaattatgcccgaatcatcgtctgccaacgactgggaaaaccccagagtttttcagcgcaatcgcctcaaggcccgcgcgtactggatcccagagacctcgctgctgctgaacggggattgggacttcaactatgtctcttcgccgcttttggctccttcgcctacaccgtcacgcttgagcggtgacggcggcgaggagaaagacgcagaacaggaccaggtcgaatggaagcccatccccgtccctggtcactggcagctgcacgggtacggccggccaaactatacgaacgtcatcttcccgttccccgtggacccgccgcgggtgcccagtgagaatcccacggggacgtacaagcgcagcttccgtgtcccgtcgacgtgggatagagatgcacagctgagactgcgattcgacggagtggacagcgcgtaccatgtctgggtgaacggggtgcaggtcgggtatgcgcaggggagtcgtaaccctgcggagtttgatatctctgatcaggttgaccgcgagaaagagaacgaggtatttgtcagggtataccagcggtgcgatgggagctatatc

SEQ ID NO: 22512 - DNA, 850 bp, Emericella nidulans
cgccgcatactgacagcctgtcttcagagcgccaatgaaagggcaattaccaaacactacaagcgtctctcacttctctaccaccccgacaagatccgtcccgacccagcgaagaatgaaaccatcgaactgctcaatgaacgctttgtggaactcaccaaggcatacaaagccctgactgatgaagaagttcgcaacaactacctccagtatggtcatcccgatggcaaacagagcttcagcatcggtatcgctcttccgcagtttattgtcaccgaagggaatggtaaatatgttcttctcgtctatggtggcttgctcggtgtactgcttccgtacattgtcggaaaatggtggtatggttcccaacgatacactaaggaaagagtctacgtcgctagcgcgggtaacatcttccgagaatacaaagatgacatcacggatggtggaatcgtcaacgccctttcctctggcgatgaattcaaggaagccatcccagctcaaaaagcagagacgggtctggcaaagcttgaacaaaaggtactagctgacgataacaaattcttgactgaccaggaacgggaagccattaaaggcatggacgacttgagcagaagaaaggctttggccttgttgtgggcttatttgggccgtgttgagttggacgaccccatcctaaatggaggtaggtcgctcttcctctcattgataagacattcactaagttcagtccagaaaagtacgaagtcgcgccaatcgctctgtctttaaatgaagccttcactgccgtttctcttgcctttggaaatcttcgtcctcttctcggttccttccgcacgtctcagaatct

SEQ ID NO: 22513 - DNA, 554 bp, Emericella nidulans
gctccgttaaaaaggagtttgcgtccggtgctcgtcctgccggtcgtatttccaatgttctacatgaatcgctccccaagggctctgaagtcgagatcagcatgccctttggtgattttgtgctcgataccaatgccaccactccagttgttctgatgagtggtggtgtcggcttaacaccgatgatgtccatgctaaagaccgttaccaacaattccaaatcgcgaccggccgtattcgtgcacgcggtgcgcaacggacgcgtccacgcgatgaaggagacgctagccaatatcatgactgacaatccacaggtgaagagggccatcttctatgagcaggtggaggaaggcgacaagcaaggtgtggactatgactatgttggacgtgtcgatgtatctaagatcaaagacctggtgttcttgccggacgcagactactacatctgcggcccatcgccgttcatgaaggcgcagagtgaggcgctggagacattgggagttcgccctgatcgcatccatatggaagtctttgggtcgccgactccataacca

SEQ ID NO: 22514 - DNA, 744 bp, Emericella nidulans
gccgaaaagatgcgttgctttatacatacctgaaccctgatgggattatggggtatcccgggactgtgaaactgagggtttattacgtcggtagtgaagaggtggaaggtgggctgccgcggtcgattcttaacatcgagtacaaggctaagttggtgggtgatgaggttgagaagacggtcatcaacatcacgaaccacaggtatgtatccctcgttctgtacctgcagacaatcgctgacggtacgcagctacttcaacctcagcggcgccgcctccgccgcagaaggcgttaccgcaaaactgacgactcgcgactacctcccccttgagaacggcattccattagggcagatctctcctcactcgatagacacaacgcagcctttcgagttcggtcctgacaaagccaccttcgacgactgtttcgtcgtcgaccgcgatctgagcggggtgtccctcgacacccgcaaccgaccacttaaactcctcgccgagttccggcacgccgatactcgcatgaacctgcaggtgcacagcactgatccagccttccagttctacacgggcgccgggattgacgtgcaaaaggccgatgaggaaaatccggctcgaggaccctgggccggcttctgcattgagcccagtcggtacgtgaatgcaattaacgaggagaagtggcggcataccgtcgtcttgaagaagggagagaagtatggaagtcggatcatgtacaaggcttgg

SEQ ID NO: 22515 - DNA, 850 bp, Emericella nidulans
cggaacggatcaggctcggtagggaaggaaatcgatccgtttatcatctcaggaagcaaagtactagaggggttagggacgtatctcgttacgagcgtcggaccgcactcgacgtatggacgcatcatggtcagtctctcaactgaaaccgaccctaccccattgcaggtgaagcttgcgcgcctagcaggctggatcggatggtttggactggggtatgctgccatctacctattctggggggtcattgcgctgatggtgttaatatagttcggccttgctcctattcttcgtcctcttcttccgtttcatcgcgcagttgtccgggatctatgagaatgatacaccagcgatcaaaggccagcacttcatggatattctgatcgttgctgtgactgtcattgtagtcgcaatcccaggtacggtcccgttcttttttccgcgaatattgatactgagtatgtagagggtctcccgctcgccgtgacccttgcactagcattcgcaacggcacgcatgctgaaagaaaataacctcgtccgactcctccgcgcctgtgagacaatgggtaacgcgacagtaatctgctccgacaagacagggaccctaacgcagaacaagatgtctgtcgtggccgggttctgcagcgcgggcgaatcattcggcaagctcccttctgatcctgctgaagcaccggccatgaccatgcccggtatgctggagcggtttccagctgcgttgaaggagttactcgtgcatagtctggctttgaatacaacagctttcgaagagaaagatacgaatgggagggagtttgtaggtaataagaccgagattgcgcctttacact

SEQ ID NO: 22516 - DNA, 850 bp, Emericella nidulans
ggtctgctgttcgtggctgcaagtatataccagatgactcgcggagccttggttctatttgtcggtcttttcagcgtcctgttccttcaccgtaaactatacttgtaccaatggctagcactttgcgtggtggttcttggtgttgcgttggtcggtcttgcgggtgcgctgtttggcgacaaccagggtcatgatattactcaagaaactgtagcagcagctgttcgatccgcaacaaccgaagtcggagcaaccgcacagaccccggaagctgtgagagctgttgtgggtgtactccttatcgccgcagctcagatattcactgcttctcaattcgtcctcgaggaatggatactagagaactatgccatggagccgctccaagtcgttggctgggaaggtatcttcggattttctgtgactgtcatcgggtccattatcctgtacctaggcgtgggacgtacggaagcaggacggtacggatattttgacgcgagggagggttggcaccaggtgttcacccacaaggctgtagccatctcgagcgtcctgatcatgatcagcattgggtatgactatttcctttttccatattcctccactatcaccccattcattgttaatctcttctcaaaatagtggctttaacttcttcggcctctcggtcaccagaaccgtatccgctacatcccgcagcacgatcgatacctgccgtaccctcttcatctggctggtatcgctaggtctagggtgggaaacctttaaatggctgcaggtagctgggttcgctctgcttgtttatggaacattcttgttcaacgatatcgtccgcccaccgctgaaggcttgc

SEQ ID NO: 22517 - DNA, 850 bp, Emericella nidulans
cggaaattcaggctaacgtgggggctatagaagctcatacttccaggagtcggccacttcggccattgcctttctcagctttcaagcggtggctatttgcagccgataagagagcatattgcttccgggaaaccgttatgggaatatgtgttggtttccaatcccttttcgagagttccgaggaggatccccaacattcctggtttgggtacaatcccagcgcggttgcgcaaatttgacgcaaaaacgaagagcgtacctcatatcggttggaactcggcaacagatacccgcattgactcgactggaggccagaccttctatggattgagcccaagcagcaagtactactacgtacactcatacgccgcgccatatgagccgggaattcttgagaaagatggttggttggtcgccacggcgagttatggggaggagaaattcatcggcgcgatagcacgagataacatctttgcgacacaattccatcccgagaagagcggccaagcaggcctacgcacccttcgcgctttcttggacggagctcagctccattctgtcacattagaagactcgattttgacaggagagaaaaacggtcttacccgtaggatcatcgcctgtcttgatgttcgtacgaatgatgtcggcgatctcgttgtgactaagggcgatcaatatgatgttcgcgagaaggatggtgcggatgctggagggcaagtgaggaacctgggaaagccggttgatatggctaagaaatattacgaacagggggcagatgaggtgacgtttttaaacatcacctctttcagaaactgtccgttagccgacctccctatgctcgagattc

SEQ ID NO: 22518 - DNA, 623 bp, Emericella nidulans
  unsure (1)..(623): unsure at all n locations
atttaacgggcctggttttgtaccaatgactgcaaagcaattgtcgatcgcaagctctaaatctgggtttgtttgcagggccgcaaacatcccgtagaaaagttgcgtcgtaaacagatcatcgacttttggaactagaaaaaatcaaagaccccatcatcggctcactcaatgtcgagcaaaagaagcgcgtcaccattggtgtcgaattggcggcgaagcctagccttttgctcttccgtgacgaaccctaccagtggtctggacagccaggctgcgttctcgattgttcgctttttgaagaaactgtctcaagctgggcaggccattgtctgcaccatccaccagccctcctccatgctgattcagcaatttgacatgattctcgccctcaatcccggtggcaacactttctacttcggcccggtaggaaaagatggcaaggatgtgatcaagtacttcgctgaccgcggcgctgtttgtccaccggcaaagaacgtggccgagttcatcctggagaccgccgcgaagcccatcaagcgcgacggtaagacagtcgactggaacgaagaatggaaaacctctgagcaaagccgccaggtcaaggaggaaattgancggat

SEQ ID NO: 22519 - DNA, 789 bp, Emericella nidulans
cgataatacgactactatagggatcctccgcaaattgcccacggccacaactgcaaccgctactacccaagtagcaggacgaggacgaggatccaacgtctgggtctccccagccgggtctctcatgttctcaactgtagtacgccacccaatggagaaaatgcagtctgctccggtcgtcctcatccagtacctcgccgcgttggcagtagttcagggcgtacgtagttacgatgagggctatgacgccgtgccagtcaagctgaaatggcccaatgatatctacgcgttggaccccggcgaacctgaacacaagaaacaatacaccaagatctgcggcatccttgtcaactcccaatactcttctaatgaatatacctctgtcgtcggcatcggcgttaacgccaccaacgccttcccaacaacgtccctgacagccctggctgctcgctttgtaggccacaaggcggctcctattacccttgagaaacttctcgcgcgtattctgactgtctttgaagacctttatactcggtttcttcgcacaggcttcgacagaagtttcgaggagatgtattacgaggcctggctgcataccaaccagatcgttacgcttaggctgagggaggtaccagggcgagaatcaagggagttacacgtgattatgggttgctccttgctgaagaacttagttgggatgaccggcctacgggaagagtgtggcagctgcagagtgatagtaatagcttcgattttatgaagggtttgttgaagaggaaagttaattga

SEQ ID NO: 22520 - DNA, 850 bp, Emericella nidulans
gtcgacagatgaccacgactggcacgacattttcatgatttcgtacttggttgcgactttgccgtggacaattggttgcttggcgttgagcccgaacaaccgtcgcgctgtcaagtaccggaagatccttgccagtctgtttttcggcacgcttgttcccttgatttattacttcatccagcataaagtgcacaaagtccctggaggtgaggagcccttgtggatcttgcgcaacatacgctaatactgttacctactagcttacacgagatacgctttttttgagtggtctctcattttgtttgatgtcggatttgacgccgttaccgcgctcgacttcgaggcgttcgaattgtcgtgaaggatgttaaggaatcagccaaggtatgtaccatggcttccgaagtaatgcacagccagagaatgtacagttccaaatttggtcgttggtacttgagagacatgatctaagatgaatttatctcaggcagttgaaaaacactgcagactccgttctcgaaaaagagtgtgtacaactccaccctaggcaatgtctttcatgagattaactcgtagacaggaagggaaagcctgtcggaaatacttttggtcagggtttcttctggagtgaagtcttcgatgctgctgcagatgtgtacaacggggtatatactagtcttcctacctgttcaatcgccatttactgacagcccgcagtttgtctactggactaactggactggtcttcccgtacttgtctggtacttcccgctctagcacatgggtatttccggatatgaagttgttatccttagttccgctgcgcctgtcatactcaccatctgagagc

SEQ ID NO: 22521 - DNA, 323 bp, Emericella nidulans
agatcagttcaaggcgcgtcttcccagtttcgatagccaaaatggctgctatccaagagggtgctgagaagaccggcaaggtcgtgcaatacgttggtagcgttgatgttgctatgaagcaggtccgtgttggactgcatcagtttgacaaggacagcgccattgccggactcaagggcagcgacaacattatctccttctacactcgtaggtacggcagcaacccactcattgtgcagggtgctggtgccggaggtgatgttacagctatgggcgttacggctgatctgctgaaggttattgagcgtctgtaaaccttacta

SEQ ID NO: 22522 - DNA, 850 bp, Emericella nidulans
ttcggcagctcaggtggacgaaatttggtacagaggggcagaagacaccccgatccacgcgtgggtggtgaagccgtccaactttagaccaggttccaagtaccctctggcatttctggttcatggcggcccgcaaggcgcatggaatgatcaatggagtacgaggtggaaccctgcggtttttgctgagcaaggatatgttgtcataacgccgaacccgcgaggcagcaccggttatgggcaggaattcactgatgcaattcgcgggtcctggggcgggttaccctatattgatctcgagaagggcttcgactatatcgagaaaaacctgaagtacgtcgacacgaaccgcgctgtggctctgggcgcatcctacggtggctacatgatgaactggattcaaggccaaccgctcggacgacgattcagagctcttgtgacgcacgatggcgttttcagcacgacctccctgcttgccaccgaagagctgtattttcctttgcacgatcttaagggcgtgcagtggatagttcctgagaactgggcacaatgggatccttctcgtcacctggataagtggcagacgccacacctcatcatccacaatgagaaggattatcggctgacgatagccgaaggcctctcggcgtttaacgtgctgcagatgaagggtattgacagcgctttcttgacattcccagacgagaatcactgggtccttaacccggaaaatgcactgatgtggcattatactattttcaactggatcaacaagcatgtcggtctccctgccgcctccgagcgcttcgagcagttttcaggtaatgaaaaggtggcgctccagaaccgt

SEQ ID NO: 22523 - DNA, 850 bp, Emericella nidulans
gctcacgtggctgtggatgtctttcctatcggtatcgatgctgaagcaatacagaagattgcgtttgaaaacgcagacacggagaaggctgtagaagggttgcgacagttatacgctgggaagaaaatcattgttggccgtgatcgcctagacagtgcccgcggggtcgcccagaagctccaagctttcgagacgttcctcgaacgattccctgaatggcgtgacaaggtcgtacttatccaggtcaccagtccgacaagcgtcgaagaggagaaagaagaacaaaagattgccagccgcatctccaacttagtcagtacaatcaacggccgtttcgggtcgctgagtttttctcctgttaaatattatcctcaatatctctcgccgcacgaatacttcgcgttgttgcgggtggccgatgtcggccttattacaacagtccgcgacggtatgaacacgacgagtttggagtacatactttgccagcaggaaaaccatagtccgctcattctttccgaattctccggaacggctggcgcattatcgagcgcgatccacattaacccatgggacactatcggcgtctcagaagcaatcaacaaagccctaacagaatctgtcgctgacaaaaaggagcagcatttgaaactctacaagcatgtcacgaccaatacggtttcagcatggtctaaccagttcatctcgcgcctgctcgcaaacctctcctctttcgatcagtctatggcgacccggccctagacagaacaaaactcttgaagcagtatcgcaaatccgaaagaggccttcatgtttgactcgacggcaccttacccgatcgtgaaggacccca

SEQ ID NO: 22524 - DNA, 850 bp, Emericella nidulans
aataatgcttacaattggataggagcaatgctatgataacctacgtgtctctcggaatgcctgggataccaaccttgttaaggttcgtgactgccgccgctcgtccgttcgccactttcaagccgcctaacaaatccaggcaaatcccaaatatctgtctgtgaactgggaagctggtggtggaggtgctttcgccgttattcccttagaagaacgaggcaaattgcccgagcggatacccctgtttcgtggtcacaccgcggtcgttttggatacggactggtaagcagtgaccatactactcttgtcgcaagtttcagaataagccaacgtatttaggaaccctttcaacgatgatttgatcgcatccggttccgatgatggcagggtatggttgtatagtgaactaattagttacgcgccggccgaactaaatgttctgtaggtcttcctctggcgggtccataaggggttcacgctatcccctgatgtagacgccgatgatatccaagatgttgcgccagttggaaagctcagtggccacccgaagtaagtgtcgatacataagcctgtttgcgatcaacagtctcacatctgtcacaggaaggtcgggcacgtgctcttcaaccccgcggctgaaaacatccttgcgacggcatccggagactatacagtgaagatttgggatattgaggctggtgcatccaagttgacattgaacgttggcgacattgtgcagtagcaatcctggagcgcaaatggctcccttcttgttacaacatctcgcgacaagaagctgagagtctgggacgtgcgtcaagaacgacgtgcgctcgcagggcacggaccg

SEQ ID NO: 22525 - DNA, 670 bp, Emericella nidulans
cagggttaatgtgcagtgcactctcccggttctatgttccgcggtccctgtgggaccagggagttcctaagaaagccctgcttcgcgaggccgggaagatgacccacggcgacgacgtcaaggacctccatcaccccttggggcccttggtgtcacaagaggcttttcaacggttccagcagtttgtcgacagggcacagagtgatggacacgagctagtctacggtggtaaaacggatggcagccgtggcttcttcgttcagcctgccattttcatggccagcgacggcgacagcgacagcgagctgatgacaacggagctatttgggcctctatttgccgtgcagacctatgatgatagctcacctactggcttcgagagggtctgtgagctgattgacaagacattcgagtacgggctagcgggcttttgtcttttcccgggatcgggatggccatcccggcttgctgaccagaagctgcgagacttgggcggcattgttttggataaagaaaaagtcgggggcaattattggggccatccgttgggggggcgcggccttgtgttaccaatgacaaggcaccttggttatgcccgttccattttagcattgctgtgtaggcacctccaaactgtagtctacctgggcagtatttcccaataaaattt

SEQ ID NO: 22526 - DNA, 850 bp, Emericella nidulans
catcctcctctcccgagtccactccctcacgctgcgtggtggcggcagactcactagagctcggcgcgtgtcgcccatcccccaactgaaatgcgtcggtccgtccaagcgcatatgcaatatgtacgagatagattcaatgagatgcatcaacgacggctacggttacgacgaggaggacgtccagtggacctgcacggcatcactccccggtgagttcaagcttggttctacagacgtcgtgtgcgaaggttaccgaaacgccgatgatccctatgtcctgaagggaagttgtggcgtagaataccggctgctcctgaccgagctgggcgagcagaaatttggacaaggatcgtttgatgaggataactggtggcgaagcctgaagcatgggtgggaaaacaaggattcagagtcgaccctgacgctgtttggcaaccttgtcttctggggtattttcctcgtcgtctttctgtacattgtagttgggctggtaaggcagtgtcttgggtggcggcgaggccagccgcaacctggtcgtcgttggggttggggtggtgacggcggcgatgatggagggccgtatcctggtggacctccccccccttacagcagcaacccgttctacagttttggtacgtctggatcaggctggaggccagggttctggacgggggctatggccggtactggacttgggtatgagctgggaaggagaagtacgagcaatcgatacagctcgccgtatccgcggggccgcagatatggttccagcgaagggagctcgtcatcgtcccctgcccgtttctcaacgccgtccacaagcacaggattcggttcgacaaggcgc

SEQ ID NO: 22527 - DNA, 850 bp, Emericella nidulans
agtatttggtcgcatattcccagcccagaagccgatgctcccctatagcatgtttaaaaaaatcgatactctctggcttacggtcctacagtttgcagctggggccgccatgtacagcgtgttttattatgttgggatttactttacagtcgtcgaggcgtactccgctagtaaggctggtgtacagttgctctactatattcctggcttaggaggtacgttcaatttgtccaagccgccactgacaccaatcagcctcgccctaacaagaagctatccagccggtgtctacctagcaatcctgctttgcaatacctatcccgcgcaaacattcccaccactgctcctcggcacatttgcggagaccatcggtctgggggtattgatttacgccatccgcaccgaacgatccaatatcctaaacgggatgatggttctcgcaggcgcaggaacaggcatacggctcatgcctgcatccctccatgcttccggcgtctggcccgaccgtattgcctcagcgctgtcgttgctgcgctttgcattaccatttggcggtacactcggaatcacgatcatggggtccgttttcaataataaacttgcggagggcgttgcttccatccaggggtacggttcttcgaacgtctccgcacaggacctcgcccatggagggacaagcagcctgtctttcattaactctcttccagctgatgcacaggcgaaggtgagaacctcgggtcgggacgccatcatgtgggcctatattgctatcctgcctataatcgggattagcatattaactacaatgtttatgggaaatgtctggattgggaagaggaagaatagaacg

SEQ ID NO: 22528 - DNA, 756 bp, Emericella nidulans
tctaaagtacttcctgtgctagctctcagccatgctgtcgcggcggctcctcagttgtctgcgcgggctactgccagcttaaatacctggttatctaccgaggctagctttgctctggatggcattctcaccaatattggcgcaaatggcgcttatgcaaagaccgccaaggctggtgtggtcatcgccagccctagcactgaaagcccagactgtgagctcagcggctatctagtttttggtctcctgtggaataaacattaacaggagcagactactatacctggacacgagatgccgctctgaccgtgaaagtccttgtcgacctgtttcacaacggcgatctgagcctacagactattcttgaagaatataccaactctcaggcatatttgcagaccgtctcaaacccatctggtggtctggcgagtggagggcttgcagagcccaagttctatgttgatatgaccgcctttaccggctcctggggtcgtcctcagcgagatggcccggccctgcgcgctactacccttataggtttcggcaactggttgattgtatgattcgatcttgttggcatgaaagttgctggctgacatcaataggataacggctactccagctatgctagtaacaatatctggcctattgtgcgcaacgacttgacctacgttgctcagtattggagcaagagcggctatggtatgttgagcactccattggcatttttccatctcttaattgtctaacattgct

SEQ ID NO: 22529 - DNA, 513 bp, Emericella nidulans
aagatcgttacaaaagcacgaccgccgctgggacgccgacttcgtcaccctctccaagctcgtttaatccggccagctcggccgcgtcgtcgaatttgaaacccacttcgaccgccaccgccctgaagaacccgctcctaccgtttcgaaatggaagaacaaggttgtacccggtggcagcgcgatccacgatcttggctctcacctgctcgatcaggcgctgtatctgctcggcaagccggagcgggtgacggggttcgtgggctcgcagcgcgaggtcaatacctccggctttcaggactcgttcacagttctgctgcactataagagcgggtcgctggtgacggcgaaggcgggcgttgtgagtccggaggaagagcagttgaggttctgggttaggggagatcagggcagtttcaagaaggttagtcacttttccgcgctgtgtgcagcctgtcgatcatgtcaagcaggcccgcgcggttccgcctcggctgtgggggggttattctc

SEQ ID NO: 22530 - DNA, 850 bp, Emericella nidulans
aagaagcgcaaagcaaaccagcttgattccgccagcggcactggcggcgatgaagatggcactgaaagcagcaagctaacacgcgaggcgcccgtcgctgcagcaagcggcttcctccacatcctctgcccaacccccgaactctggacggcgtctcttccccaccgcacgcaagttgtctatacccccgactacagctacgtcctgcaccggctcggcgtgcggccaggctccacgctcatcgaagccggcgctggaagtggttctttcacacacgccgctgtccgcgccgtcttcaacggatacccggacattacaccaccaccgacaaagcgccgccgccgtctaggcaaagtatgcagctttgagttccacgcgcaacgtgcgggaaagattcgcgacgagatccacgaccacggtcttgacggcctcgttgaagtaacccaccgcgacgtctaccaagacggattcctcctcaatgaccctgacggcaaaccatccacatcccctaaggcaaacgctattttcctcgacctgcccgccccctggctcgcgctcaaacatctcgtccgtaactcgccgtctggcgccgaatcaccccttgacccaaatacgcctgtccatatctgcacgttttctccatgcatggaacaagttcaacgaactatcagcgcgctgcgccagaacggctggctgcatatttcaatggttgagctgcagcaccgccggatagaggtgaagcgcgagaagacggggttggagttcgagggcgtccgtggtgcaaatgtgttcccgcaaaacatcgatgatgcggttcagaaaatgcgcgttgtcgaccgacgatcctaag

SEQ ID NO: 22531 - DNA, 850 bp, Emericella nidulans
ggacatgcagattgggtataccgtggctcagtcgcatactgttctcagacacaatggctgcagagccagagcatcaaagcgaatattgtgggcagatcccttcccgatgaaacctggtatcggacagtcatatcagcctgcggactcgaaaaggacctctcgaggctgccgcgcggcgatgccacagccgtggggaataatgggatgacactgagtggaggccagaagcagagaattgtatgcccgcctatacccagccttgacctgagagcagtctttcagagtgcgtatgctgattctggacaggccctttctagagctctctattcccgcgcccaaattatccttctagacgacgtcttcagtggtattgacgcagaagggactgagattattgcacggaatctctttgggaaaacagggctctcacgaaggattgggagctcggttgtgcttgctacgcattcgggcatgttcctcttcttctaattatccgcggtatttctagacctcagttggtaggtatggctaactgtacgtgaggacgatagggtacctccttcgctatgctgacgagatcgttgtcctggaaagtggccaactcgttgataaaggaagtctggaggaccttatggctaagagtacctatatccaaggactgcagacctcgctgccgaaaccgacatcatctattgatagtaggtctagtgaaacagtgatggctactcctttttcggtcgagcaagaccgaactgctgaagaacgcgcaaacgaggctgttaaaagtgagaacgacgacctcctaggccacgaggcccccagcgatgcgacccgccgtaaggcgatcctg

SEQ ID NO: 22532 - DNA, 850 bp, Emericella nidulans
agttggacgcaaccgcgttttatgcggcgagaatgacgggattaccttcgaaccgagccggagacagtctccaaagaacaagaaagcaacgtcagagcacgatgaacccagcgggaagaagttgactcggctgcgtgagagagtggtcttatacgattccacactccaaagcattgagttcatacttgagctacccggtgtggcggcagattcagactttgtccaagagctcgaagcaaagcgcacttacttccgtgctttgcggtaggataatctccagtgtcccttcacaacttgcttgcgctgacgaattgacctccagatctttaaccattggccgctcccacgccctgcttgggaaatctcagaacgctcttgccctgttctctcaagcgctctccctcgcatccaaagcagccgcatcaatccaatctacggccaacactggcatggacatcgacggcccctcgcgcttaagcatcttcccagcacaagccagctcccttgaacatgaacttcgcgccctcgtacaaagtataaggcctcgtgacacttgaaagcatatccgcgcaggaacaatcttcgaacaagtcaaccccccagcgcccgctcgtcgagcgcctccacgagtacgctggcgacagccttgacctgaataacctcgtcccgtacccacctgaaatccgccctatccctgtcaaaccgcttattcttagatgtggcgtggaattacatagattacccgcgtgagggtaaggctgctgtttcgtcggctcaagcgcaagcaaaggtggagtcagttgcccaggagaacaagggtgggaaacgtggttggtttgggttcggaagg

SEQ ID NO: 22533 - DNA, 850 bp, Emericella nidulans
tggtcaatggtgaccttattcagattctttccctttggtggagagaagggcagcagagcaaatatatgacaaggattgcgctggcatgcggtaaggttttgtgcctaattcactgctggcatctggtgtacctgacagtttgcagtggagttattagtgccgttgacttggccgctagagatacatggggagatgacagttaaccaccatcgccacataccttacctacaacaagctcaagtgggctacaaacgcggcattttaaatatggccagctgcggtattttacgggcggttatccgcatcggccttcccagcatggcaattccaccatcagaacggacggctcgtgacgaagggatactgaagatcatgctctatctgctgcggaatattgcaataataaccgcaaatgcgcgtctcgcagcggagggagaagaggaagaaacgtcaaggtcggcgacgatcaacgcgttccacgaccaggacgtctttgccctgctgctcaccttatgctcgaatgttagcgacgatttcaatatgttggatattcctcttctcgagatactgtttcatatggtaaggggtatcgatgtcgaaaagttgttcatgaacgatgctcagcgatctgccaagcgtaccgacgaattaaacgacctgctacgacaggagtcctccatgcgaagagaatacgcaaagaatgcgccgaccaggcacggccgcttcgggacgatgatttgggttaagcgtgatgatgcgaaaatgtcaacggtatttggtcaggacgtacttagagatgaacagacgaccctttacaagatggaccagagcaaaaggtggaataagcctt

SEQ ID NO: 22534 - DNA, 500 bp, Emericella nidulans
ctcgtgtcccggtgacatgacggaagggtgagaaagcgttgttccaagggatgagattaatgagattagacactgactggacgcgtcttagtgatgacgatgcatatgtattcatcccgcggtatacaaaaaacgctgttgcccgtctatcggcctaccttcccagcgacttcaacctgacagcatttgatatcctagctatgcagaatctgtgcgcttacgagtatactagcttcggcgcctcggcattctgcagtctcttcaccgaacaggaatggaaggactttgcctacaacgtagatatccagtactacggcgattacgcttacggctcccctactggccgtgctcagggcatcggctacgtcctcgagctagccgcgagactgcagaaccagcttattaccaccagcgacaccagcatcaacgccaccctcgatgacaataccgccacgttccccctagaccaaccgttctacatggacatgtcccacgacgac

SEQ ID NO: 22535 - DNA, 850 bp, Emericella nidulans
ttggacagtccgcaataccattaccaatgtcacgtccgaagacctgcccccttcgacgacatcttcgtcacgacgaagaacaccccagacatttcaccgtccgtaccagatataatttcatcagcagtggcaccaagggacactaccataatccttgcgcagaacggactgaacctcgaagggcctgttatctccgcgtttccctcgaaccctatccttagcagcgtcgtctacctccgtgcgacacagtatgccccgggcaagatcctgcatgatgacccagacatccaacggatcgatgcatttgcgaatcagaaatttgatgagggtgtcgtggaaaacgaagcgaagcggtggataactatttataattcgaacaataagttggagacgatattcgatccggatgtgaagcgggctcggtggcggaaactcgtctacaacgtctcgtataaccccgttgcagcaattctcgggctcgatactccccgggtgcgcatgagcaggcacataattgacgacttgatccgccgatcatgcgcgagatcatagcggctgcagaggcgtgcggtgtgtcttggttccctgaggatctgctagagattgtgattcgaaatgacccaatcgatacagaattcaagcccagtatggcacaagatgcggagaagggtggatttatggaaatcgagaatattgtgggcgagccgttgagagaggggatgaaaaggggggtggatatgccgacgctgagaacggtttatggactgctgaaaggactgcaattgaaagctaaggagtcgagggcgttgtgggttccagggtttgaaaatgggcatccgtacgcttagag

SEQ ID NO: 22536 - DNA, 500 bp, Emericella nidulans
gcaacaccgctggcaccgtgacactgcagtcctctaatcccctcgacgtcccaaagatcaccttcaactactttgacaccggtgttggcgattacgacgctgatctcactgcactctacgaagccgtcgagctcgcccgtgacgccttccatcgccagccaatcaacgtcaccgaggttcttcccggcgcggccgtgacttccaaggaagacattgagacctacgtcaaggacagcgcatggggtcaccacgcttcgtgtacctgccctatcggtgccgacgatgatcccatggccgtgctggactccaagttccgtgttcgtggcgtctctggtctccgtgttgttgatgcttccgtttacccgaagattcctggtactttcacagctgtgtcgacctacatggttgctgagaaggcagctgatgatatcctgactgagctcgctgctgctagctcttgattcatattgatgagattacggagttgtatgaggtgtaga

SEQ ID NO: 22537 - DNA, 574 bp, Emericella nidulans; identical to SEQ ID NO: 9663

SEQ ID NO: 22538 - DNA, 833 bp, Emericella nidulans
acagctcttcatattcttgcttatttcggaattgtgagcagatgcaggcgcctcatcgcacaaggtggaagaattgacgcaggtgacaattctttccgactcacgcctttgcattgcgcggctagcaggggacactcagacatggtagagtttcttcttgataacggtgcagatggaaacgccattgctcgcgacggcagtacggccttacacctagccacgcaatatggccaacgaaaagtcatgaaactcttacttcatcgaccggttaatgctcaaatagccaatcttgagggcgcgacaagcctccagctagctgtgaagaccgaagcagacgaagccacgtccctctccttataaaggacaaggtagatgtgaacactcgcaatatccgcacaggagatacggcactacatctagctatagaatggagacgaccgcgaattgtcctataccttctcgataaaggtgcttcgattgatatgactaacgaaacggcattcacccctctccagctagccgtgaaagtcgacaactgcgaagcgatctccgtcctccttcagcgccgcgccaacattgaagcacgctctttatcaggccttacagcgctccaaatagccgcgtacgaagagcactgggtcgcattcgacctcctcatcatcggcggtgcggatattaacgcctggaacaaagaaggcgaatctctcatccacgagcaagcgcgtaaagcaacaagccctgccatcgcagctaagctccttgaacataacgccaatatcgaagcctttaccgcaaaaggcctcactccactgcagggtgctgccaataagtct

SEQ ID NO: 22539 - DNA, 500 bp, Emericella nidulans
ttacatactccaggatctcgaaagcttggttcagcaggaacctgctatccccagagctgtccccgctatgtggaccaatcctaccgacctgacccttgccaagtgccttgagaaccgggagggaatcaccaacgtctacatccgaggcttccttccggagaccactgacgagatgttgcatgcttacgcctcccgcttcggtaagatagaccgttgtaaggcaattgtagacttggataccggtctttgtaaagggttcgatgctctttttctttctcttcaggacggcatgattgttactaacagtgacacaggtttggctttgtccagtacttcaacttcgagtcatgtgagaattgtatacgaggcttcttctaccttggctatcaggctagctttgctcaggtacgtaaagcatgtcatagcccgctaaaatttctcaagatcagcggctaacatggatagaaatctcgcaactcacgtctgaaggataataaaga

SEQ ID NO: 22540 - DNA, 500 bp, Emericella nidulans
gaaaaaggttcattattaggacgccagctcatataaaagatgtgtggaaggctatttagagggtctcctaacacacacatatcccggaacgtattttgtgtttgtgaaaaaaaccccttcttaggttaaataacagcctactccccaaaagctgttacagcccctataatagtcgtgtgtggtggtgccaagggacccgcgtacagagtcatccagcacaacggggacggtaccgtaagcatatcaacattcacggtatacgaattcgccaagcactaccgctcctgcggatactgtgtcgaccagtacgagcgtcacgttgtcattgagggagtcaccgccgttgtcggcaagtgccttgttggcatcaacagcaattacgccgccactaccactattgacagcgcaacttgcgccacgaatgtcaagaccatctgcgctgagtacaagggcactgacaacaacgacgaggaggtaagaccattatgccaaaaccctgc

SEQ ID NO: 22541 - DNA, 602 bp, Emericella nidulans
atctttactcagggtgcctccccccgtgaactcatcgtcgaagcctgccggcgagaccagcctcatctgatagaacaagttcttgattcattcgaagggagatcaaatgaagaggttgccgaaattttcaacaacgtcacagacgcaatgggcaaccacgctcttcatatctgtgcccaatacggaagctgtatgtctcttcgcttctcttgtcgttctttctgaatggataggtgatattaacagaatcctcgctatcttaagatgacacgatggacgcgcttttcgacatccaattcttcgaatgcgatcccctcacccgtctagacagcgacactcccctgcacgttgcagtgcggtacgcaatggagaaagacgccgagttaggtgcagagatgatcaagatgatgtgcgaggctgggtgtgacccacgagtaaggaataagcatggacagaagccggcggatttggtctataacaaccaggatatcaagacgacgctgcagcaggcggagtacgttcttgcggagggtttgagaaatgaggacctcgctgatggggatgagggaagtgctagcgatagcgactagtggatcgtggaa

SEQ ID NO: 22542 - DNA, 850 bp, Emericella nidulans
gccgaacggtgaagaagggcggtggtttccaggctatgggattaaatgcgaatctgcttaaggcaatcgcgcggaaggggttctctgttcccacgcctatccagcgcaagactatacccgtcatcatggaggaccaagacgttgttggtatggcgcggacaggatcaggcaagacggctgcgtttgtgattccgatgattgaaaagttgaagtcgcatagtacgaagttcggcgctcggggtttgattctgtcgccgtcgcgtgagttggcgctgcaaacactcaaggttgtcaaggagctgggaaagggaaccgatctcaagtccgtattgctggttggtggtgatagtttggaggagcagttcggcatgatggctgggaacccagatatcgttattgcgacgcctggtcgatttttgcatttgaaggtcgagatgaacctggacttgtcgagtattaaatatgttgtgtttgacgaggcggatcggctcttcgagatgggtttcgcggcccagttaacggagattctgcatgggttgccgtctacaaggcagacactgctgttttctgcgacactgccaaagtctctggtcgaatttgcgagggctggtttgcaggatcccacgctggttcggttggatacggagagcaagatttcaccagatctgcaaaatgcgttcttttcggtaaagtcggcggagaaggagggcgctctgctttatatacttaatgaggttatcaagatgccaactgggccgacagaggcgtccctgcgactaaaggaaaaaggccccgaagactcgaagaacaagaagcgcaagagggcagagatggaacgggacagtgaaca

SEQ ID NO: 22543 - DNA, 352 bp, Emericella nidulans
cttctccgaaaagacaactgcagacggagaaccataccgccagggtgaccgtcacaaacacgggaaagtcgccggcgccgaaacagtgcagctgtgggatgtgccgcctccgacagaggtgaacagacctgtccgcgaactaaagggttttgcgaaggtgcacctggaacctggagagtcaaaagatgtcgagattgtggttgaaaagaagctggcgacgagctggtgggatgagaaacgggaagcctgggcatcagagaaaggagtttattgggtgcaagttacggggacgggagagggggttctcactgcagagtttgaggttaagaagacgaggttctggaccggattg

SEQ ID NO: 22544 - DNA, 638 bp, Emericella nidulans
acctaaattcttatgctctggattcctcgtcacgctacgtgatcgtgcttcgatcagcggtggacaagcttatcttgtcattttcaagctcttctacttctcatcgtctttctacactatatttctgatgatgaaagtgttcccccgaactcgagaacgagaaagggcgtggaagatgacgttaggatccgttgggatctcgttagttctcgctcccattgtgcatcttatctttggggagagacattccacacggccattgttggaagacgtaagtcgagctacctgattcactcgctgttgctctttaaagaaaaaaaatactgactgcgattactcaccgtaggtcttatggacattctctatcattttggagtcagtttgcgtccttccgcaattgttactccttcgccagacaactgtgcctactgttatcaactcatactaccttttgatgctgggctcttaccgagcgttttacatcataaactggtttgtagggcagttggatctgagcatcaagtggactggatatccatcatctttggatcgttcaaacggctttctacgccgactttgcctgggtctactatacccgacagcgagttaagctgcggaatggaggggtggtcgactcg

SEQ ID NO: 22545 - DNA, 431 bp, Emericella nidulans
cgtctcctgtcacaatgggtctcatcgcttcactcctcaaaggcacagtcgtgcgcaggctcccgcctctcctcgttgttcgaatcggcgttgcgagcgcaacaatctccttctttctgctgtcacgggtcacatcaatagctggtctctatacagctgctactttccttgccgtgacaagtgcgtcagttgtgacaggattgaatgcgctcgggtcactggaagctagggaggaggagaggggcgttgttttgggacggctgaggagctggggacaggtcggacgcgcggcgggaccagtgctgttttgtactctgttttggtgggttggaagggaggttgcgtatttgactggcagtgtggttatggctggggtttgtatgggtgtgtttttagggttgagggcaccggctgttcctcctgctgctggt

SEQ ID NO: 22546 - DNA, 500 bp, Emericella nidulans
gtaagctcaaacctacataatagattgatattatatatcaatgaaagaaagagatacaattactccaaagtttaactaaaatatcatagtctaaactattcttcatgagtctcaactctttattatcatacatttgtactagtgtatacctatgtttagtttttgtaatcaatcctttcatgagaacttacatattttcacaaaatatatataggtggtctacaatcgcaagatatttaccaggacgaaccgataatgaaataaaaaactactggagaacacattacaagaaaaaccaaaaatcttcttcgaagcaagacaaagtaagaaaatctctatcccggaaacaacaacaagtggatcttaaaccacaaccacaagcacaatctgagaatcatcagtctcagctagtgtcccaagatcacatgaatatcgacaacgatcataacatagcttcatccttgtattaccgacaagtgtcttcgatgacaaattatata

SEQ ID NO: 22547 - DNA, 500 bp, Emericella nidulans
ccgacctctaacccgcaattaggcctaccactccatcttcctcgaagatcgggatgtccccgtaataggtacgatcgcaggatctatcattgctgtccttgaaagccgaacgcacaatctctatcggctagggagaatgcacttgactaacctcgtcgcgccctatctgcaggcaactttccagttctacccctccgcacccgcactcgcggccccgcatacaccctccccatgctacccccgggcgtcgccgacatcgacgtacagccagataatgagtcctacgactgcgtagacgaaattctgtctctgttccgggcgaatgtcttgttccgaaacttcgagattaatggccccgccgaccgcatgctcatctacggcacactgttcatcactgaatgcctggggaaggttaagcctacgatgtagactcgtgaggcggagaaggtatagagctttactctacagcggcgaagctgcggatttgttgagtattgacc

SEQ ID NO: 22548 - DNA, 850 bp, Emericella nidulans
tctcggtcatggtctacgcggccttcaccatcgctgggccagacttacccgcgctcgccgctggagagatccagcacccacgccgcaccatcccgcgcgtcgtgaaaatgaccttctggcgcatcgtcggcttctatgtcgtcggcgtgctcggtgtcggcattatctgcgactcccacgattcgcgactcatgtctgcgatcgactcgggcgcgtccgggtctgccgcttcgccgtgggtgatcggtatcgagaacctgggcatcaccggcttgcccgatcttatcaacgtgctgatcctgttctcgggctggtcctgcggaaacgcctacctgtacagctccagccgcacgctgtattcgctcgcgcgcgacggccaggcgcccaagttcctgaccaaatgcaccaaggacggcgtccccgtttactgtgtgatcgtcgtcacgctgctgtcgtgcgtcactttcctggtagccgacaatgcctccatcagcgtcttctactggtttgtcgccttgaccactatcgggctggtcctcacctacaccagcatggcctgtaccttccttggctggtaccgcgccctgcgtgcccagggtatcgatcgcaaaagctacttgccctggatctcgccgttccagccatacatggctatcttggcggtgattctcggtttcagcacggcgctgtttaacgggtatgccgtgttcaagccatttaatgctcagggtttcgtcacctcgtactttggactggcgttttttgtcgtcatgtttgtgttctggaaggtgttgaaacgcaccaagtgggttgatcctacaacgaaagatctctacacgggtaaggcaga

SEQ ID NO: 22549 - DNA, 850 bp, Emericella nidulans
ctcgccgcccgactggccaggtacacagggaaccagacgtatgctgactgggcaacaaaagtttggaactggactcatgccgtcggattcatgacggacgactactcgttctacgacggggctagcattgacgggaactgcactaacttcgaccatgtccagtggacgtataatgcgggcgtctatctcctcggcgctgcagctatgtacaactacgtagggccccttcaccttcaacatgttgccctcgtctctgcgggtattgacaggcaaatagacaaacggcgaccctctatggaagcaacgtacagaaggcataattaacgccgcgcatatcttcttcgccgactccccttcgtccaaagatataatgtacgaacgcgcctgcgagtccattaacacaagtaaagtcgaccagcgcgcattcaagggcttcctggcccgctggatggcacaaagcacccagttcgcaccttttacatacgacatggtgatgcccaaactgcgctcctcggcgctcgcggccgcaaaaacatgtactggtggcagtgacggcgcagaatgctcactcaagtggacagagcagaagtataccggtggacgtgcaggtgggtatgtggggatccccatcccggcgttgaaggttctccagtcgtcgctttccggaaggttgacccgcccgttcctaggacaataaggggggttgagcatggtatattccgcatgccagggtcagaaccgccggtgcctactcctgctttgttggtgagggggacttgagacgggggacagagtgggtccggcgctggtggcgattttcatggcggggtgcatagtttggagtgtcaaa

SEQ ID NO: 22550 - DNA, 850 bp, Emericella nidulans
caattggaccccctcaggtcgttggtaataagcctgctcaacgatttttcctcttgcacagcattttggagaacatcttgaagggtttcgacaaccaggttattatgaactctactctcaaggagctcatcgaggtccttcgcgaccccgagttgccttacagcgaatggaacgcccagtcttccgccctccactcccgcatgccccagaaattggatgctcagcttcaaaacattgttgaccgcgctcggtcacgcaaggccgagtttccggccaggcagctgcagaagactatggtccgattcattgaagagaatgtcaaccctgctgacgccgagatcctgaagactacacttcttcctttggttcaggttattaataactacatcgaaggcttgaaggcgcacgaatacaaggtgttcgttggacttctcgagcagtactacgctgtggagaagctgttctctggcagcaaagctcgatatgaggatggtatcctcgccctccgtgaggagcacaaggatgatgttgccactattgtgcagatcgccctgtctcacagccgcatcggcgccaagaacgacctcatcctcgcgatcctgtcgatctaccgtcccaaccagcctggaatggccaatgtgggccagtacttcaagtcgattctgaagaaactgactgaaattgagtcgcgtgctgcggccaaggtcaccctgaaggctcgtgaagtcctcattcagtgcgctctgccttcgctggaggagcgtctttctcagatggagctcattctgcgctcctctgttgcggagtctcagtacggcgagaccggctgggcccaccgtgagcccgatct

SEQ ID NO: 22551 - DNA, 850 bp, Emericella nidulans
acgagtgctcggacgtgcatttaaccagaaccctaataacgaggatatctggcttgctgctgtcaagctggaggcggatgctcagcagacggaccaagcccgagagcttcttgcaacagctcgacgcgaagcaggaacagatcgcgtatggataaagagcgtcgccttcgagcggcaactgggtaatgttgacgatgcgctcgaccttgtcaatcaaggtcttcagttgtatcccaaggccgataaactctggatgatgaagggccagatatacgagtcacagaataagctccctcaggcccgcgaagcatatggcactggtactcgagcatgtccgaaatctgtcgctctatggctattggcgtcacgactggaagaaaaggccggggcagtggtcagagcccgatctgttcttgatagggctcgtctagcagtaccaaacagccccgaactgtggacagagagtgtccgagttgaacggcgggcaaataacatccctcaggcgaaggttctgatggccagagcattacaggaggtcccatcatccggccttctgtggagcgaaagcatttggcacctcgaaccgcgctcgcagcggaaggctcgcagtctggaagctatcaagaaggttgacaatgatccaatcctcttcatcacagtagcgcgaatcttctggggcgaacgtcgacttgagaaggcgatgacatggtttgaaaaggcgatcatatcaaacagtgatttcggcgacccgtgggccctgtactacaagttcctgctgcagcatggtccaaatggaagttttcttcctttctgcatataatctctttttgccactcagtggaaagaaccc

SEQ ID NO: 22552 - DNA, 850 bp, Emericella nidulans
caggcctacgatgaagggtccgccgaaatcgtgccattgggcagtctacgatcctatattcaggagaaatcacaatccgagagaacgcctgtcctcttccgattcgccgcctacgatgcccctgctgcatcgcaggagtacccggccaatacctttgaaacgacggatctggtggtcaatgtggcgcccgcaagcacctctgatggagcgacggagttgggagcgtactacaaccagcgcttgttctccagtgctaggattagcactatcttgagccaggtggctcaattggttaagaatgccacaagcgacccggagacggcaattgggcgcattgattttatgacaccggagcagcgcgctcttctccccgacccaactgctgacctgcactggtctaaattccggggcgccatccacgatatatttgctgagaacgctgagaagcacccggaaaagctttgcgttgtcgagacgaagtccgccacttcttctcaccgcgagttcacttatagacaaatcaatgaggcgtcaaacatccttggtcatcacctggttgaggctggcgttgagaggggcgaggttgtcatggcgtacgcttaccgtggcgttgaccttgtcgtggccgcgatgggtattctcaaggccggtgcgatcgtctcttgtattgatcctgcgtacccttctgagagacaatgtatctaccttgatgtggacgacccgggctcttatatcattgcgaggctaccaggctgctggtgagctgtcgagatgtacgcacgtcatcgttaggacctgcaacttggactgaatccccgtcttggctgttgacatggtcgtttggccggtc

SEQ ID NO: 22553 - DNA, 850 bp, Emericella nidulans
tcggacacttcagaagctcgaggaggccattgaagccatcaaagtacgctcaccttgaacatttctatgtgcatttgatcaatgtttctactagggttccgctgccaatgtcaacaagcagaggtttcactacatcagtgctgacctcacgaaacccgaagaatgcgaacgcattatgaccgaagtcaccgagtggaatgacggcatgccccctgacattgtttggtgctgcgctggatattgcactcctggatatttcgtcgagacatccgtccagacactcaaggaccaaatggataccgtttactggactgcggcaaacacagcacacgcaatcctgaggaagtggcttgttcccattaaccctagtcaccagcggccattgcctcgacgacacctcatctttacttgttctaccctcgccttcgtgcccattgctgggtatgctccatactcccctgctaaggctgccatgcgtgccctttcagatacgctgtgccaggagattgaagtatataacggctctcgcgcttccaaagaacgagcccgtgccactccagccgatgtcaagattcatacggtgttccccatgggtattctcagccctggattcgataacgagcaacaaattaagcctgcccttacaaagcagctcgagtcggccgacaagcctcaaacacccaaggaggttgctcggattgccatcgaagccattgaacgaggcgaatacctcatcactacaatgttcgtcggcgacgtgatgaagggtgctgcgcttggacctagccctcgaaattcttggttccgggatacgtgcactggttggttgagcaacttactattcctgggg

SEQ ID NO: 22554 - DNA, 545 bp, Emericella nidulans
cctacgatcaggataaagacgaacatcctggatctgtccatcaacaccgagttggccgctcggggttgtctcaaaaaagatagcacacaaggccatccaaccgccaacccctaacaaccatgacgcaacgaagaaccctagcattgcagagatcatgaacagccctctaccagttgcaacgccaacgccgtccccattacctagctcgaatcaaaaagtagccgagatcatggaaatgttccgcaaagcgtacacctccactcaggcgttaacaccgcacccaacattcgaaactcttcaagatgccatcatccgcgaaatcaactcccacgaggcctttcaacgggttcccgtccccgagcaaggggccccattcactccgtcaccctctcaagactcgttcgagagcgccacgccaccgaagccaattgctctcaaggagggccaacggcgacgccgcaagggctcgttcataaaaccccgccgcaactcagaagcacggaagagtatcttcacgagcgacccgtccaatgctttccgtcggg

SEQ ID NO: 22555 - DNA, 850 bp, Emericella nidulans
actcgcattcaacatcatgtccctctacatctcaccctccgaaataccctctgaagatctcagggatatcattaagcgctcgtactcgaccttccgccaccccgagcgtacacccattgtcgagcttgacgcaaagcagaacctttaccttttagaactgttccacggccctacattcgctttcaaggatgttgcgctttaatttctcggaaacttgttcgagtactttctcgtacgcaagaataaggggaaggagggcaaagacaggcattatctcactgtataactacctttcgccgtccatatgttagtgctgaccttttactagattgtcggcgctacatcaggagataccggaagcgcagctatttactgtgttcgagggaagaaagacgtttctatcttcatgatgttccctaccggaaaggtgtcgcccatccagcaggcccagatgactactcgtcttgacgccaacgtacataaccttactgttgagggatcatttgatgaacgccaggatatcgtcaaggctttttttgccgatcctgatatcaactccacccacaacctttgccgcgttggtattcctttcctggacatatctatacctcgctaattgccccaaagcgtcaacagtattaattggcagcttgtcaaggcaccagtgaccttccaccttctacttctacttcttttttgtaaaaacacccgctttcgatgaattcaaagttcccttttgtctaccctttttggcacatatggggcattccaatcggtaggacccttaaacaaatgggcttcccaccgtaaactcttattgtttcacacgatatcgactacttgacgtttt

SEQ ID NO: 22556 - DNA, 850 bp, Emericella nidulans
ctgcgcaagctcgatgcagtgatcctcagcttctgctgtctctgttatttcgtgaactatcttgatcgcaccaacctgaataatgcctacgtctcagggatgcgggaggagctcgatttccaaggaaatcagctaaatcagatcaacaccatcttcaccgtcggttatatcgtaggccaggtcccgtcaaatctcgccctgaccttcatcagtcctcgactgttcttccctgccgttatggtcatctggggcggattgactatgatcacggcagcggtctccaatccgcaaggtataatggcgatccggtttttcctggggctggcagagtctagcacctttgtcggcacccattacatcctgggttcctggtatacggagaaagagctggggaagcgcagcggcatcttcaccgcgtcgggcctagcaggtatgagacaaacgactccgtctgtaccgcttgggaaagagtttgagtttgaccccgactctagggacaatgtttggagggttcattcagacggggatccattcatctatggacggaatgcaagggctgtccggatggcgatggttgttcattgtaagctccggcgcccggccaatgcatgcaagaagctaatatagatgtagattgacggcctgataaccatcccaattgccatatacggcttcattgttttccccgacacgcccaccacgacgaaagcacggtatctcactgcagaggagaaagctctcgccatagcacgaatccctgagtctggaacagtcaaggtacctctgaactgggctttcctgaagagcgtgtttctccagtggtactggtgggcctttgtagtactgtgga

SEQ ID NO: 22557 - DNA, 406 bp, Emericella nidulans
tggtccgcatccactaacagtcagacgcccacattgtcactggcacgcgttcgctctcctctacaggcattgaagtcggggtgtaatggtcggatctgttccgctagttcaagtggcgcactgcgaatctgattgcgcatgtaatgctcatgcctcgtgtcagtgattttacggacagctttcgattgtacagcaagagcgtgctggacaaggtaattttaagtgcgcagagtaagggcatcagttttcacatgtgagatgatggtcaggcccgaggccatggtgtacaaggttgcgtacgtgcccgatcacatatgctgcccgactgtatggagagagtaatctagtgaggcatgtgatgatatgtgacagctactttcataggagatgctcccttacatcgctc

SEQ ID NO: 22558 - DNA, 850 bp, Emericella nidulans
cgggtacacaggcgtcgtttcttcaaattttcaacggagatcacgacaaggtcgagcaattggatgaactcgttactaagaaggccggctttgattctgctttcatcatctcaagtcaaacttactctcgcaagatcgatgttgacgtagctaacgccttgggctcctttggttccacctgcgagcgcattggtattgatatccgccacttggccatgctcaaggaggttgaggaaccctttgagaaggatcagattggcagcagtgcgatggtaggtatccgtgcgtcacgtaaaaatgattcgatctgattagagcatgcaggcttacaagcgaaaccctatgcggtccgagcgcctgtgctcgctgggcaggcaccttcagaacctccccaaggacgccctggacacctactccgctcagtggtttgaacgttcattggtaagatattccgtttgatctagtttggcccgctccagctactaatggccgataaggatgacagcgccatccgccggatcagtatccccgagctttacctctgcgctgacgcgtgcctcatcctcttgagtaagcccaaacggtctagatctaatcatgatcctgtagactttccgccatttaggcaacgtcacttccggattcgtggtgtaccctctagaaatcaagcgccgtgtgtacgataagcttccatttatggcccgtccagtcgtcctttctatttaatatatgttacgctgtctcacaagtcccctacttttataatggttataatcggtattataagttgttaatagtatcagcatgttcgggtgtatataatgtcttttatacaatggtcaattagtgt

SEQ ID NO: 22559 - DNA, 850 bp, Emericella nidulans
cactgcagagtttcagcaggctgcgcaggttgcccataaccgacaggcgcgtccgccaggagtacatggacagccaagccgaactgagttttcaccaccagatcaacgcagaaagactccctgacctacaaggagggagaataaagaacgcaatcctgcgcgaaatggcttcttgggagactgctttcgaaaacgaacctggcgccgcatccacattgccattatgattcctttcttccagcagttttccgggatcaatgcgctgatttattactcgccgacttttgagacaatgggatttgacttaagcatccagctgatcatgtctggggtcctgaactctttacagcttgtcgggtgcacgagcacagtatggacgatggataccctgggccgacgtaaacttctgttcgccggctcggtcagcgaaaccatctcacacaatatcattgctgctttggtcggcaggtacagctccaactgggcgtcgcatcagaccgcgggctgggtcagcgcggctttcttgttggtgtatatggttgcctttggcgccgcctggggaccggtgggcttggcgataccctccggtatgctaacatgtgctatcctccaacttgtctattcacatctgatccgtagattcattagagatcttcccttcttctctccgcgccaagggcgtcgccatcgccacgtgctcaaactggctgaacaacttcatcatcgggcttatcacgctgccgctcatcgagaggacgggatacggcacctacgtcttcttcgccgtcttctgtggcataatggattcagcgttcttttggtgggagaccatcgggcccgcgcgcgccca

SEQ ID NO: 22560 - DNA, 794 bp, Emericella nidulans
  unsure (1)..(794): unsure at all n locations
gatcttttcccgtttttttctcaccgggcctttgctaccgtcattccaaaaggtccgcgttgactaccccgccgtacccggtggtaccagaccatcattgatcagccggctttcaaggccgttgttgagaaccctgttttcattgacgaggccatcaagtccactcctcccaagaaggaggagaagcccaagaaggaggctgctcctgctgccgccgctcctgctgctgaggaggacaagcctgctcntaagcctaagcacccccttgaggctcttggcaagcccactctcatccttgatgactggaagcgcacatactccaacgaggatacccgctctgttgctatgccctggttctggcagaactataagcccgaggagtactcactctggaaagtgaactacaagtatgacaacgagctcaagctcaccttcatggccaacaacctgatcggtaagtattatcctgctttggacgtgtcttcgtacagtttctaaatgaatatgtaggtggtttccacgctcgtcttgaggcttcccgcaagtacctctttggttgccagggtgtctacggagagaactacgcttgtgtcaaccgaggtgtcttcttggtccgtggccaagaggctcttcccgccttcgatgtcgctcctgactacgagagctacgagttcatcaagctcgaccacaccaacgaggctgatcgcaagtatgttgaggacatctgggcctgggacacccctgttgttgtcgacggcaaggagctccccaacgtcgatggccacgtcttcaaa

SEQ ID NO: 22561 - DNA, 850 bp, Emericella nidulans
cctcagtaacgcctcttgatcttgtaaaatgtcgtcgacaagtcgatccaaaaatctacacttcaaatatctccgcatggcgctcaatcatttccaaggaaggcgtgcgcgggatcttcttcggttggtcgcctacatttatcggatactcattccagggagccggtaaatatggcttttacgagtattttaagtacttgtatggcgagcgcatgttccccaacacaaaccgcacggttatgcatctggcggcaagtgcctcagccgagtttattgccgatattgcactctgcccgttcgaagcgatcaaagtgcgcatgcagacaacattgccgccgtacgcccatagtctgcgcgaggggtggagtaagatcattgcgcaagagggcgtctccggcttttataaggggttatacccgctctgggcgaggcagattccatatacaatgaccaaattcgcgacattcgaggagacggtcagcatgatctataagacgctgggaggccccaaggaaagctacaacagccttcagcagacggggattagctttgcaggaggatatattgcgggcatcttttgtgcgattgtcagccatcctgccgatgtattggtgtccaagttgaatgccgatcgaaaaggtatgtttcccatagctggcaacgtggtgcatatgtgctgaccagattagcgggtgaatcagcaatgaaggctgtctcccgcatctatgggaacattgggttctcgggcctgtggaatggccttccagtaagaattttaatgcttggaaccctaactggtttccaatggttgatgtgagttgccttttattatcgttagtggaatagtggt

SEQ ID NO: 22562 - DNA, 719 bp, Emericella nidulans; identical to SEQ ID NO: 14082

SEQ ID NO: 22563 - DNA, 850 bp, Emericella nidulans
aacgatgaccaaaacaacgacgatccttcgcgtgttggtgatgctacgaatccgctattgaatggtgatcaattggagacgcaaattgctagtggtggttctggccgggttcgtgatctgtaccgtgcccaaaataaacaatcgagcgacaaggcgaataagtccctccttgccgcatacaaagaaatcggtgctctctgtgacgggtttggaatcccgaagaacgtggcagacactgccaaatatttattcaagattgtcgacgacgcgaaagcattcaagggcaaatcgcaggatgtcatcatcgccggatgtattttcatcgcctgtcgcaagtgcaaagttcctcgtactttcactgagattttcgctgtcaccaaggtctcaaggaaggagattggacgtatatacaaagcccttgagaagttctttaccagccagaatctcgagcgggccaatgcagttgtgtccaacggaggtgttcccgaccccaacgacacgtacactgctacgacctctaccaagcccagcgacctctgcagccgtttctgcaaccttctagatctaccattccaagtcacaagcgtatcatcggccctgtcggatcgcgtgactacggagggcaaccttgccggacgctctccgctctccattgttgcggcgtgcatctacatggcttcgtatctcatgggccaccccaagtccgcaaaggaaatctcccaagtcgctcacgtcagcgacggcacaatccgcggcgcttacaagcaactctacaccgagcgcgagagctgggttgacaagatggttaaagatgtaaggagcctgaaaatcttcttcagctaaatcgtct

SEQ ID NO: 22564 - DNA, 850 bp, Emericella nidulans
aaaggcaaaggcaaagacaaaaaactcaacaaaggcggaactcaggagaaagatgatatatataaaattgtcaagatgattatgttgaagagtctgaatcctgttatcgtcttcagtttcagcaagcgcgagtgtgaattctacgctctgaagatgaagagcctggccttcaatgacgactcggaaaaggagatggtatcaaaggtcttcaacagtgcaattgaaatgctatctgaagaagatcgcaatctacctcagattcaaaacatcctgccccttctacggagaggtattggtgtccatcactccggactgcttcccatcctcaaggagaccatcgaaattctgttccaagaagggcttatcaaggtcctgttcgccactgaaacattctctatcggtcttaacatgccagcaaagaccgtcgtctttaccagcgttcgaaagttcgacggcttcagccagcgctgggtcactccatctgagtttgtgcagatgtctggccgtgccggacgtagaggtctcgacgaccgtggtattgttatcatgatgataggggaagaaatggatcctgccgtggccaaggaaattgtgcgtggagaacaggaccgtctaaattccgctttccatctgggctacaacatgattctgaatctcatgcgtgtagagggtatatcgcctgagttcatgcttgaaaggtgtttctatcaattccagaacactgcaggcctggccgggcctgaaaagggaatcaatactcttacccggtgtttgaatatactactgacaattggcagaactggttaacctgaagaaaaagagccacatgccatttcgatgaagaaccatc

SEQ ID NO: 22565 - DNA, 850 bp, Emericella nidulans
aagcgcaagctcggtttcaacccagaggagcactttgttattggtgagacggtgcgtgaattctttgctgacctgcctgcccgcggcgagggttatgtaaaagagtggaaagacctcatccagcgctatagcgaggcgcacccagaactggccgatgagtttcagcgtcgcgtgcgcggcgagctgccaaccgactggcagaagctgatccccagtgagctccccgacaagccgactgcgacgcgtgtctcatctggcctcgtcttcaatcccatcgcacaatatatcaaatcatttatggtcggcaccgccgatctgtcgccctctgtgaacatgatctggaagggcaaggttgacttccaacacgtaagtagactttccccctaatagcagccccggcttcccaactgaccatcaaagcccgatcttcgaacaacatgcggtataaacggcaactactctggccggtacatccactacggtgtccgtgagcacgccatggccgccatatccaacggactggccgcgttcaaccccaacacattcattccggtcacctcatccttcttcatgttctatctgtacgccgcgccagcagtgcgcatgggggcgttacagcacctccaggtaatccacgccgcaacccacgattccattggtatgggcgaggacggtcccacgcaccaacccattgaactcgcctcgctataccgcgccatgccgaaccttctcttcatcccgcctggagacagcgaaaaaacggctggtgcctggatcgccctcatcaacgcgagaagtcctcactatatttttacctccgtaacgcacttcccacttaagcgacccgtcg

SEQ ID NO: 22566 - DNA, 850 bp, Emericella nidulans
caatccccgactacagccatgaagccagatatttggccgaggcaacagcggaagaccttgaaacgagctcaatgtctagtgatcagaaaaacgccgctcagttcaagaaggtcattatgaagttatcgggtgacgtgaaatgggcagccggtctggttttcgaacgcaatgtcaacgagaatgagcgctcgacggagtttagaccccactatgatgttgtcctgcggaatccaaactatatcaacccctcagaacgagaggtaagtgtatacgcctaattgtaagtcgcaatgcactaattggtgtaggattacgatgcttatcgcggtttccggagcaatcacattcacctttccgtcgcaatcattgctcccaatagcaagaattggaatgcggactctgaacaaccaactacaagctacaatactgttcatctaactcctcggttctttacgcatttctacagctggtggtcccttttctctggtgttatgtcgctgcccgttcgccagggacgactgtggcctggaatcactaagacaaacaagaaattcaaccggcatttggctaccatcaagtataagttgcttctggctcctctctttgttgcccacatttataaacacaaggatcctgaagattatgtcgacgatatcgttactgctactgggatcaaggttcggttggacagcttgaagttggatgttcatcaaagacgagagcagatcaagactccatccaaaggtcggctcaagcaaccccaggcaagtgcgatacggatctacagagccgagttggacttgcaggctgcagactttagggctgtctcggcgagtatcgaagggacagg

SEQ ID NO: 22567 - DNA, 850 bp, Emericella nidulans
cccaaggcctttacaaagcaagttatcttcaacatcgttggatatgggatccttgcatagtaagtctgaccttcggatgcaacttgaggagtagcgccggggggtgcaccgaagtttgcgttcactgtatgctgactcggacaatagccatagtgtttccttcgaccaactcatgcccgtcttcctgagcacgcccaagtccaaggaagatgccgtcttacccttcaagtttacgggcggcttaggattgtcgaccaagactatcggcctgatgctggcagtgcagggcgtatactccatgatcgcgcagctctggctgttccccttcgtcgttcgccactttgggaccctgcgcacctttcgcttcgtcctcctcgtttggccgccgctttatttactagtcccatacctgatcctcctacccgagaagcttcaaatgaccgccgcatatgtcgccctgatctgcaagattaccttccatgtcatcgccttcccctccactgcaatcctgcttgccaacgcagcaccctcctcgaaagtcctcggctctatcaacggcgccgccgcttcgacagccagtctcagccgcgcctttggcccgagtgtaaccgggtttcttcactccaaaggtcttgacagcggttactctgtcatatcatggtgggcttgcggtattgtctgtctgatcggtgccatccaaagtttctggatggaggagtccgagccccagcggttcatggatgagaagaagcctgagcccgacacgtctcacaccaggaatgtcttgcggggttcattcgctgcagacagggaagacggtactgcggatgaagtccggcgactgctttcc

SEQ ID NO: 22568 - DNA, 500 bp, Emericella nidulans
gggccaacaaaaaatattttttaaaactcccccccccgggttttgtggtgtaaaattaatcaaagggggttctccccggaaataaaaaaattttccctttcaaaagggagcctttttatcaccaatattgggttaatttttgcggggccccagaccatttggcccttttatgcaatttggaagaacccgtttggggaaaggccgggttttttttccggtttccctccagtgtaaacaagtttgcctttcaagaatatacggcgttacgcaagtcagcaatcctaatcctcatttggtcaagtttgatggtagacgccaatatcgcagacatccgtgtagagcctgataaggccgtgctgaaagtgaaagagaggttccatcttgaaatgactgaagaggaagctatccgtcactttgagcagcttattggggacagcgcgaacgccatctttggtgtggttattgaccgccttcatgattttgtccagggatgaagagcg

SEQ ID NO: 22569 - DNA, 524 bp, Emericella nidulans
atgaatcccaactacatggagcataaatttcctcaaatcaagccacatcccttcaacaaggtatgatcacactaccccgcacttcctctccagtgattccggtttgacttgggagcctaggtcttccgaaaagcgccacatgaggctatcgatttgatttccgcgctgctagaatatacgccaacgcagcgtctttccgcaatcgaagcaatgtgccatccctttttcgatgaactccgggatccgaacaccaaactacccgactcgcgacaccccaacggtgcagctagggatctaccaaaccttttcgacttctctcgacatggtgcgtttgagctccggttttctctctaggacataaacgaactatttagactggatgctgacagcaggctacagaactctcaatcgcaccttcaatgaacagtcggcttgtcccaccgcattcacggcctgcgctcgaagctcgcggactatatatcgacgactttaagcctctgaagaaagaagaaatgatggcacac

SEQ ID NO: 22570 - DNA, 850 bp, Emericella nidulans
accgctgcgaaaggagcccaacctgtccatctcgatggccactctctgcgtctcagcgacgccgtcgcggtctcaaagtacatcctccactttgtccaacaagattcagctcaacgatactgatgtagtatagatatgacgctcgcgtcagagtaacggatgacccctcagtgctttcttgcatggaagccagtgtagcactgctcgacaaaagactagccgaagggcgggtcgtatatggtgtgaattcaggctttggaggtaacgcggacacgcgtacaaatgcccacgaggacctccagaaagcgctcatccagcaccataatacggccgttgttctgccttcagacaaggggcaaacatgctcttcgataatccgcagcctcccggcgcactcgatccctattccgatcgtcaaggcagcaatggtcgcgcgatgcaattctctcatccgtggccattctgctgttcgcattgatattgtgcgcaatcttgcgacgatgatcaatgaggattacacgccagttgtgccgctgcgcgggagtatctctgcttcgggcgacctgacaccgctggcgtatattgcgggggccttggagggtaaccctgatatctatgtccagtgcggagggacaaaggatgacaagattgtgactgcggacgcggcactcaaggagcttggattggagccgttgacctttagacctaaggaggcattgggactgcttaacggaacggcattcagcactggtgcagcgagccttgtcctcttcgaagcaaatcagctcatcctcctcacacaggtcctgactgcaatgacaactgaagctctgctcggcacgatgcgcaa

SEQ ID NO: 22571 - DNA, 850 bp, Emericella nidulans
agttggagcggcaatcttgtcactagtgcctcgtgggaacatttctggcttaatgaaggttggacagtgtatctcgagagacgggtaagcagcagaacacttccccttatgcaatacatgagcactgttgaccattgcatagattttagcttcgctgtaagtgttgtaggtcttatatttgtcagttggcacttttattgacccatgttttcccacagacacggcgagaaataccgtcacttttcggccattataggctggaaagctctaagggattctgtagagcactacagccatgaccatgagttcacaaaattagtaccaaacctcaaaggcgaggaccctgatgacgccttttctaccataccatacgagaaaggattcaacttcctgttccatctggaaaaccttgtcgggaaggaaaaattcgaccgcttcatcccccatgtgagttatcatcatgctcattattcgtaatgctgtatcttgacctctcatagtactttactacatttaaagggaagtcgttggactcttacgacttcaaagctactcttttagatttcttcaaatctgatgctgaagcctcccgactgttgcaggagctggattgggattcctggttctacaagcctggcctgcctcctaaaccagaatttgacacctcgctggctgatgttgtgtatgagctggcgggcaagtggagatcccttcccgaatctccatttcagcctcagccgagcgacattcagggtttgacggcaaatcaaatagtggtctttcaggaacagatcctgctttttgagcggccacataccgccgaactctctgactgatcttcaataacggg

SEQ ID NO: 22572 - DNA, 623 bp, Emericella nidulans
cagctgcgcaacatcatccctgacaaagacacgcacgcctctgtctatctaaatctcgaatatgtaagccccactggctcatacaaggactgcatggccctgtccatcatcgaggaagctgaagcccgcggagacttgaacccggcatgacagtggtcgaagcaacaggcgggagcacagggtcttcactagccttcatctgcgcgatgaaagggtacaagttttcatgttgtgagctcggatgcctttgcaattgagaagactaggacgatgtgtgcctagttggaaatctttcatgctccaggtgggaaggtcacgaaggatttgtttccagcaatgatgcgaaaggcgaaagagcgagtggcgtctatccagatgagttttactatgcggaccagtttcataacagtgatgcgctgcccggatatgcgtctcttggggaagagatactggcgcagtttcccggcgggattgatgcgttctgcggtgcggcggggagtgggggaatgctgatgggcgtctctagtgtcttgagaacgaaacggcctgaaaccaggattgttgtcctagagcctgcgtctttgcccgtgatttcagagggcggcgcgggtgtgcacggtttt

SEQ ID NO: 22573 - DNA, 850 bp, Emericella nidulans
acgacgcaaaaggcagcgttctgcgcaggtcgtcgcagctcttgaaacgctcgctgagaatccctctgcgcccttagctctcctgttcgttgttgatgaggaggtcggtggcgcaggaatgcgcgccttctcctttaacacaaccctcaacccatccccggactcgccctcatccctcgttgatggctacaagacgatcattttcggcgaaccaacagaccttgcccttgtctctgggcataaaggcatgctatcattccacgtgcacgtcactggcaagtcctcgcactcgggatacccgtggctgggggaaagcgctttgagcactatcctccctgcgctttcggtcatcgataaactcggcgatattcccgttgaaaagggcgggcttccttcaagcgagaaatacggccgcacaacggtgaacatcggccgggtcgaagccggtgtagcgggaaacgttgtccccgcggcagcggacgcggatgtcactgttcgtcttgctgcagggactccagaggaggcgatggatattgtgctcgcggctgttgctaacgcaacgggggacaacccccatgttgttgtgaaatttgcagaggggccgaatggtggtgttggtgggtatgcgcctcaggatctcgatacggacgtgcctgggttcgagattaccactgtgaattacggcactgatgtgcctaatctgaaggtctatgaggagaatgatgtgaagagatatctctacggaccagggagtattcatgttgcccatggagatcatgaatcgattacggttgcgcagttggaggaggctgttaagggatacaaaaagttgatcacagctgcattggag

SEQ ID NO: 22574 - DNA, 537 bp, Emericella nidulans; identical to SEQ ID NO: 13170

SEQ ID NO: 22575 - DNA, 850 bp, Emericella nidulans
acttccaggctatccgggacgactcgccactcatgagtggtgtgcacatgttgcccatcaccctaggtctggtcttgtttactgttgtttcaggggcgctgagtatggtcttttctcctgcgtgcttgaacaatggctaaccgtccagtctccgtactgggctactacctgcccttccttcttgcaggcggcgccatctccgccgtcggctacggcctcctctcgacgctgagcccgaccacctctgtcgcgaaatgggtgggataccagatcctctacggcgtacacgtggctgcaccaccgccgctgtatgtcttcagttttacatacccccggaaccctttgccttcacctttaccaggtagaatgccgctgacaaggccgaatgcagccctacgtcgcaatccagaacctcgttcccgcgccccaaatcccgcaagcaatggcaattatcatcttttggcagaacattggcgccgccatatctctcattgcggcaaacgccatcttctccaactccctccgcgaccagctagcccagcgcgcgagtcagatcaccgtctccccgggcgcgattgttgcggccggtgtccggtccatccgggacctcgtctccggctctgcgcttgcggctgttctggaggcgtatgcggaggccatcgacagggtcatgtacttgggcatcgcggttagcgtgatggttattgtgttctcgcctggtctagggtggaaagatattcggaagacaaaagatctgcaagctctaactagcgatggagcgcagggtgaagcgacggagaaggagactgttccggttgccctgggttaaggcatcgtctacaagcagatg

SEQ ID NO: 22576 - DNA, 500 bp, Emericella nidulans
cgtgattgatatcagaatgcccgcttcgagactggaagtagggaaaagcttctaccgcagcgttaatatattcgggtttgcacatttgatcatagtcacaatgagtgaaaagactcgtctgaagtgcacggtttacgtcggaggcctcgaccaagctgtgtccgtacagacccttgccgaggcgtttgtaccctttggagaggtcgtcgatattacacttccgaaacccgacttgcccaactctaatgacaatcaccgagggtttggatatgtggaatttgattcaccggaagatgcgaaagaagcgatcgacaacatggacgggagcgagctgtacggacgtacgataaaagttgccccagccaaaccgcaaaaggatgccaatgaaggccttggaagcaagacagcgatctgggaacaggtatgtctacgtgcacgtacaaattctacatattttgattgctaattcctaaacaggagggctatctgactaaatatgc

SEQ ID NO: 22577 - DNA, 500 bp, Emericella nidulans
agagtcgcacgagatatatttgggagggatgggtttgccgtaagtatactgatcaaacaattggttgttggcgtctgacttttcaacaggtctggtccgtgcgattttcgggagatggccgcgagattgtcgctggcactggtgaccactcggtgattgtttatgaccttgagacacgtcaatctgttcttcgcatacggaatcatgaggatgatgtgaatgcggtttgctttggggacaagtcttcacctcacattctctattctgggtccgacgatagcactgttcgtgtctgggataggagatctatggccgatggacgagaagctggggtatttgtagggcatactgaaggcttgacctacgtggacagcaagggtgacggtagatatgttctgtcgaacagcaaggatcagactatgaaactctgggacttgcgaaagatgatgtcacagccaaattcgacacacttgaacctaccagttacgggacgggatttg

SEQ ID NO: 22578 - DNA, 850 bp, Emericella nidulans
ttcaaggagaagttcaagattgatatccgcaccaaccccaaggcctgggcccgtacccttgtggctgccgagaagctcaagaagattctgtctgccaacacagtcgctcctatgagcatcgagtctctcatggaagacattgatgttcgcgctatggtcaagcgtgaggagctcgaggacatggttaggcctttgttggaccgtgttaccgttcctttggagcaggctctcgcggaagctaagctcaagcccgaggacatcgacttcgtcgagatggttggaggctgcactcgtgtccctgccatcaagcaagcggtcaacaagttctttggcaagaacctttccttcacactcaaccaggatgaagccattgcccgtggatgtgctttcagctgcgctattctttcccccgttttccgtgtccgtgacttctccgttcacgacatcgtctcctaccccatcgaattcacatgggagcagtctcccgacattcctgacgaggacaccagccttaccgtctttaacaagggcaacgttatgccatcaaccaagatcctcaccttctaccgcaagcagcctttcgacctcgaggctcgctatgccaatcccgaggcgcttcctggcaaggttaacccatgggttggtcgcttctctgtcaagggagtcaaggccgacgccaatgatgacttcatgatctgcaagctcaaggctagattgaacttgcacggtattctgaacctggagtccggatactacgttgaggacgtcgaggttgaaaaacactgtttctgaggagggcgagaagaaggacggtgatgtaagttcccagccaagttattaaactcagcgt

SEQ ID NO: 22579 - DNA, 850 bp, Emericella nidulans
aagaagaaatgcgtgcagtcactgttggccatcgcgaggcaaagaattggtctgactgggtagcgcttgggagtgtccgcctgctccgatggggtatggacctggtcactggctataaacaccctgcgccgggccaagaagacatcaagaagtttcagatgacggaaaaggaatggttaagaagatttgtcttcttggagagcgtcgcgggtgtacctggaatggttggtggtatgctaaggcatttgaggagtctcagacgtatgaagcgagataacggatgggtatgtcgagatttctttcatcttatacatttcgtggctcaactaataatcaatgcgcagatcgagacgctccttaggaggcatacaatgagcgtttgttcttgctcacattcctcaagatggccggacctgggtggttcatgcgcttaatggtccttggagcgcaaggagtgtttttcaacggcttcttcctctcttatctcatctcgccacgtacctgtcatcgtttcgtcggctatctcgaggaggaagccgtgctcacttacactcgggccatcaaagacctcgaaagcggcaggctgccgcactgggaaaagctggaggctccagagatcgctgtcaagtactggaaaatgcctgagggtaaccggaccatgaaggatctgttgctgtatgtccgagcggacgaggccaaacatcgcgaggtcaaccacacgctagggaacctgaagcaagcggtcgacgtcaaccctttcgccgttgaatggaaggatccgtctaaaccgcatcctggcaaagggatcaaacacttaaagaccaccggctgggaacgagaggaggttgtt

SEQ ID NO: 22580 - DNA, 532 bp, Emericella nidulans
cagtccataaccagcacccagtctgacacagcccacagatgtccccctgatcctgcaattcatccgcgaactcgccgattcgaaaaaagccttgcaagaagtcgaagccaccgagaaatcccttctcgcgaccttgtccttccccgacgacacccccaagcggggctccgtctataccgcactcatcacgccccccgcgacgcccgagaatccgtcacccaagcccgttggcatggctctcttcttctacaactattctacttggcgcgcagccccgggtatctacctcgaggacctatacgtgcagcccgcggcgcggggaaaaggatatgggtttaagctgctgaagtggctggctgccaaggtactcgagattagggggagacgcttggagtggagtgtccttacatggaatgagccgagtatcaaattttataaacaagtaggcgcgaaggctatggacgaatggttgaagatgatggttgagggggaggctctggagcggctggcggaaggggctctgtgatccaca

SEQ ID NO: 22581 - DNA, 806 bp, Emericella nidulans
cgcatccccaacagcaggtcgtcaaacctgtaaagaaggtgcattatcccttctggtttggcggctctgcgtcatgctttgcggctgcggttacgcatccactggatcttggtgagtgtttccctttctagctctattcgaccgtcgagctgtcccttcttggaaaattgctaatacttgggtttacagtcaaggtattccctcatctatagcttatatcgcataatgctccaggagctgacactcgggtgaacaggtccgactgcagacccgagggcctggcgctccctcgacgatgctgggtacatttggggcatattctgcgaaataatgggtttttgggtttgtatatggagtatgtcactatcttgacaatggtaatcaaaaattcgttctgcgctgacaaataaatctttcgtcatagctttcagccgctcttctgcgccaactcacgtattctacaactcggttcgggatttatgaggaactaaaatctcgattcacgtcaccgtcgcaatcaccaagcttcttcacgctcctcggaatggcctgcacctccggtatcctcggaggcattgcaggaaatccagccgacgtgctcaacgtccgcatgcaatccgatgccgcgcttccgcccgcccaacggcgtaactaccgccatgcctttcatggcctcgtccaaatgactcgcacagaaggtttttcgagtctcttccgtggcgtgtggccgaactctactcgagcaagtcctcatgacatcctcacagcttgtctcctatgacgtcttcaagcgcttgatcatactt

SEQ ID NO: 22582 - DNA, 850 bp, Emericella nidulans
ggttagagactcatgacccccgctgggggtttgcagagcacaccttaatatttgacagtgcctattgtcgacagaattacaatatacctgcccaaccagccaagatcaaggccctgcataacatgcctgcccgaagctgccagaagaacctgacttcccgtcccaaaggattggagaaacaagatattgccctagtctccctccgcgcctgctcagcttacgcccgtaggggccatgccctgtttacagccactattgggaatattgacaaggtattggctaagaggtcaggggatggtaaccctgaagacctactactactagaatacaaagactatgcagatgtcttctcccctaaggaagctgataagctgcccccacatcggccatataaccatttaataactctaatagatagaaagaccccaccatttggcccattatatggaatgtcccgggatgaactagttgcactacaggagtggattatggagaatctgaggaaaggctttattcgcccaagctcgtcgccaacagcctcacctgtcctatttgttaaaaaacccggcggaggtctatgcttctgcgtggactaccaagctctgaacgtgattttggttaaggaccaataccctctgccacttgtcaaggagaccctgaataatctaaaagggatgaggtactttactaagattgacattatttccgcatttaataacatacggatcaagaagggacaggaatatctgaccgcgttccgcacctgcctggggctgtatgaatccttagttatgccctttggccttaccggcgctccagcaacattccagcactatatgatgacaccgtg

SEQ ID NO: 22583 - DNA, 500 bp, Emericella nidulans
ttaagttcaccaagcctccaaagccagactggaaggaaggcgatggcggtaatgacggcggcgaaagcctgaacaagaaacatatcgaaatcgacccttatgcagagggacggcctgtctccaataactataagctcttaatctcagggatggtccctagaccgatcgctctgattagcaccaagtcaaaagacggaaagacagaaaatctggcaccgttcagctacgcccaagttatcaaccacgatcctccccttttcacggttgggtttgtcggttcgcttgagaaggccaaggatagtctcaggaacctcacggagacaggggagtgcgtgatcaatatcatctcagagcactttgttgaagccgccaatgcaaccgcagtcaatgcgccgtatggagtatcagagtgggagatatctgggttacaacaagcacctagctccattgttcaggcggctcgcgtcaaagaatcaatgctgtcaatcgaggggaagctc

SEQ ID NO: 22584 - DNA, 500 bp, Emericella nidulans
gtgaaatggcgccgcctccggtcaacaagagtgaggatgagtggcgcgctgttttgagcccaggtaagcaggcttgccccgcacattcgaagagcccgccttgggccatggccgctggttgctccattgaaatggaaagtgaaacaactgacggctggacagagcagttccgcatccttcgtgaaaagggcaccgagcggcccggcacaggcgaatatgattcccactacccctccaaaggcgtgtatacctgcgcgggctgccacgcaccgctatacaaagcgagtcacaagttcaagtccgggtgcggatggcccgcgtactttgattcaattcccggagcagttcagagacacgtggataactcgtttgggatggagaggacggagatcacttgtacgaactgcgggggtcatctggggcatgtcttcaaaggagaaggatacccgacgccaacggatgagagacattgtgtgaacagtattagtctgaagtttaca

SEQ ID NO: 22585 - DNA, 537 bp, Emericella nidulans
cgtggctggtccaagggcattggcggcttatccttcctggggatcatggtgggcattatctgcggtctcgtctacgcgatcttggactaccacgggcgatacgcgaggctgttcaaagcatctatagctgagtcgcgcctccctccggcggctgaagctcgtcttccaccagcaatcatcggcggggttgcgctcccaatcgggatgtttgcgttcgcgtggacgaactaccctagcatccactgctcggtcagcattatcctctccgcaccgttcgaatttggatgcatgcttgtcattccacttatgacctacctcatcgactcgtatacaatctacgcagcgtcagttctcgccgcggcggcgatctttcgtccatcatggcgcggtcttttcgttttcaccagcaggtgacagcatttacggaccccatacgaccgcgagtcacccatgcgcgaggcaactgccagtcgagtctgcagagaccacacatatcaggcatttccgatggactcaacaccgacgcgtcgctcgagg

SEQ ID NO: 22586 - DNA, 491 bp, Emericella nidulans
tatacctgcggcattttggctcaggccgcgccctgggcccccgttgctgcgtgctcaagacgggaaggcctatcagtcatggctcggctacatggcgtacgcttggaagtcgctcggccgaacgccgatgcggacgcgacatttgaaggatattctgttattccttgcatcctggttcctgttgagcgatggaatcgccaccgtcagtggtacagccgttctcttcgctaaaacccagttgaatatggagcccgcagcgttggggatgatcaatgtgattacaatgatctcaggagtttttggtgccttttcttggagctacgtttcacgagtgctgaaccttcgcgcttcgcagaccatcatcgcttgcattttcctttttgagcttgtgccgctttatggtctgttgggctttattccagccatcaaaaacctcggcttcttgggtcttcaacagccgtgggaaatgttcccattaggggttatatatg

SEQ ID NO: 22587 - DNA, 477 bp, Emericella nidulans
aatgttgctgaaggggtggaggaaatcatatgtgaattcctgcaatctgtggatctgccaggtcttcccccagcaagattatgattgaaggttggtatgctgatcatgttgctgcggaaataacgggctacagagggtctttgcaatagtacgcggatgcagattatggagttatgctgctatacaatccgcgcgtgtatcttgacaggtgacttcagaggctcagtgcatctcatcccccggattaccctgtattcaaagcctggcgatctgtattatatactgtcacaaacacagtttccagtccatccatgctttgcaatcaccataaataagtctcagggtcagtctttgcagcaggtaggtgtggatttgcgggtccctgctttctcccatggtcagttatatatagcaatatcgcgggttacagatatgcggcgacttagtgtcttgctgccgccaggtatttggaccact

SEQ ID NO: 22588 - DNA, 823 bp, Emericella nidulans
cgggggatgacaaagaagctatccagcgaaatgcgaggatagaaaagagcctgaagaacgataagaaagtgatggatcggacgatcaagattctgcttcttggtacgtacaaggttgaataaccactgcaaacatgcttatggctatcccaggtgctggtgaatcggggaaatcaaccatcattaagcaaatgcgcatcatccactcgggaggtttcccagaagatgagcgccgccaaacacgagcagtgatctattcaaacattgtggttgctttcaaagttcttctggacattatgcgaacggagaatatcgatttcgaacaagaaggcacaagagtcagtgatagtacctgcctcgtgatcatttgtatgctaaagctaatttgtaccacgcaatttagcctctagcagaattcgtggacaatctagagcccgatgtgggtgtcgaggaagcattttccgaccttcgagttcgcgatgcaatgaacgaaatgtggaaagacggcggagttcagaaggctgtctcgaagggccatgagttcgctcttcacgacaacctgaattagtaagctgggcgatgagcagttccttcgattccaaccttactgatgattatgtagcttcttccattcgctcgaccgattattcgagtccggctggcttccggacaatcaggatatgttacaggcgcgtttgcgaacaaccggtatcacagaaacactatttgaactaggccagatgaatttccggatgatggacgttggaggacagcggtcggagcgaaagaaatggattcattgcttcgagggtgtccagtgctta

SEQ ID NO: 22589 - DNA, 850 bp, Emericella nidulans
ttggtatcaatgccggtgttgctgctgttttctttggtatggcatgctgcatgggtcccatcctgagcatgtgctgcaagaagttcggtgctgtgttggcggctattgcccacgcgattgctgtgatcatcttgcttgtcatctttgaagtcatgttcttcctcgaacactggtcttggccccggtgcgtcatgggcatgatcgccatggctgccattcaacgtttcgtctacaaacttattatcgcgctcgctcttacccgagagttcaagcatgaccagtcgaacatcgcatggtggactggaaaatggtacaacatgggttggcactctctctctcaaccgggccgagagttcctctgcaagatcacggagttgggctatttctcagcagacttcgtcattggtcatctcctattgttcattatgctgcccgctctttgtgttccttacattgacaagtttcactcagtcattctcttttggctccgcccaaggtaagacccctcatttactcggttgtggattcctaatctctaacactcaaatctagtcggcaaattcgccctccaatctactcgcttaagcagtccaagcttcgtaagcgacgtgtggtccgtttcgctattctgtatttcgccatgcttatcctgttcctcgttctccttattgcacccctcattgccagaaatcaggatctgaacctgaaaatgagtggcatccttcttgagctcatgcagcctctcgacagcaacaacaacgacactatgaccagctataccggctcgggtgtccccaagggcatggagcctattgcgtgcccgtcatcgtaccttacgaacttaaacaac

SEQ ID NO: 22590 - DNA, 766 bp, Emericella nidulans
gtgtccgcgccgagactgcgacgagaaggagatgaggtgagcctttcataattccgttttgctgaagtgtcctgagatctgtccatggaggcagagctggccttgagtaatgagcaacacgacacgatattttgtttcgcccgttcctcttcatgtcataatcatatttcttgcgctcgaatctttactaaacacttttattctacagccctatgcttttcaatcccgcgaattcctccgcgaacttcttgtcggcaaggttgtccaatttcaggcgctgtattccgtcccgtcctcgcaacgcgaatacggaaagatcaaacttccaacatttgaggttacgttaccggagatcgtcgttcaggagggatggagccgtgttcgtgaggaagccggcaagcgaagtgatgactctgaggaaactcttgcaatgctagaacgcgttcgcgctctggaagaccacgctagaaccgaaggaaagggtgtctggggaagtggaaacggccgcatcgagacccgctatgatcttgaaaatgccaaatctctggtggacgagtggtcaggtaaacatctcgagggtattgtcgagaaagtcttgactggggatcgtctggttgtcagactgcttgttgtccagaggagcacctccaggtcattgttgtggttgccggcgttcgggcacctgcaactaagcgggtaggtgctgatggcaaagagcagcctgccgagccttacggtgaggaagcccagcagtttgtcgaatcta

SEQ ID NO: 22591 - DNA, 467 bp, Emericella nidulans
ttaagattacaaatccatgaggtctggcgatactggctctactacctgaaccctttcaactacctcatgggttccatgcttgtcttcacaacgttcgatgcgccagttcactgcgaaaggagcgaacttgctgtcttcaatacgccggacggccagacttgtggagagtacctcgccgattacatgcagggtcttggatcgagaaccaacctactcaatccaaacgatacgcaagactgcaaggtctgtcaataccggacaggaagcgactatctctacaccataaacctgaaggactacttttacggttggagggatgccgcaatcgtggcgctatttgccgtttcaagttatgcgtgcgtatatgcacttatgtgagtattattcccctactcccttcgtcaggacaagccgcttaggagccaaataggaaactcagaacaaaggcgagcaggaaaactgagccg

SEQ ID NO: 22592 - DNA, 850 bp, Emericella nidulans
cgcaccgacagcccgctgcgttcgaccgtcgcaccagatgcgtccgagacggtgcgactgacgctgcagttttctgaggcgatgggatgcgattctgtcacagactccatctcatttaactcttccacggaaaccggcaagattccatccatcgacgcctccaccgtccagtgtgggaacatcactgaagtcgccaacagcaacgctaccgggcacatccccggtaagtggcagtgggctgcagatctgagaggggtgtacaacggcatccaccgggtcactgtcaacaacgccagcaacgccgacggggacgactccacccacgcagtcgaccacttcctcttccggattgggcagattgacaaccccatggtctttacctctgccaactactccagcagtttgctgcatgagaaggaggacggcacgttctatatccaacaccacgctgccggtgctgacaagtaccgctattcgacgaattggggcaccacgttctctgactggaaaacgtacaagggaggtaacgacacgattaccatgcttccatggaatggcactaaggcgcaggaatgggagggacatcacatccgcgtcgagtactggtcccgctggactggcagcagtagccacgtccaggaaggcgattccggctggaagtacaagacgccacgtcgcttcccacatgcctttttcaatgggccctacaaccagtacgggtacgacggcggtctggacaaccagatcaagctggacgcgggcgccggcggcgacggatactggaagtaccatttcacctcggagtggcctgccgtcgggcaggtgaatgtctggggcatcaatccggatg

SEQ ID NO: 22593 - DNA, 850 bp, Emericella nidulans
atcctagttcacatctgacggcgagacttggtcacgctctcgagctctcctccgtccccagttcactcgggaccagatcagcgacctggatctagaagagagtcacgtacagcaagccatgcgcgcaatgaacgttgacccagccacaggctggacctcctccattgacatccaagccatcatgttccggctaaccatcgactcggcaacagagttccttttcggcgagagcgctggcagtcaggcagaggctcttcgcaacgggggcaccctgccccttaatcacttctctggcgactttgacctcggccagtggtacgttgcacaacgctctcggttcgaaaagttctactggctggtcgataatcgggagagtcgagcagttgtgaagcgagtgcatgaatatgtcgatcggtttgtgcatgctgtactaaccacagcggaagacagaattgagaagagtcagagttcaagctacgtcttcctcgaagctctcgctgcatcaaccaaggaccccattgagctccgctcccagctcctcaatatcctcctcgccggccgcgacaccactgcctccttgctaagctggtctatcctaatgctagcgcggtatccggaagtattcaccaaactgcgctctgtcattctcgctgatttcggctcctacacatcctcccgggacaagatcacattcgcctcccttaaatcctgtcgctacctgcaatacttcctcaacgaggtcctacgtctctaccccgcggtacccataaaccgccgcgtggcaacatcgccacgaccctacctaaaggcggcgggtcggctgggggacaaacaattctacttcgtgcgg

SEQ ID NO: 22594 - DNA, 524 bp, Emericella nidulans
tctatcagcagtgaacaagaagataagctacacaatgaagtttcgaaagtggcgaagcgattgtcgacatcttctgcttcggaaaatggcagccccaggtactgaacccgatgcctggcagtaaccttgacccttcgtctcccgcatttgacgctcgcacctgggtcaaggagttcaatagattgcttgaatcagaccccgagtctgcgccacctcgggccctcggcgtcgcgttcaaacaacttggtgtatttgcatatggcacagccgcagagtttcagaaaaccaccggaaatgtcctgattgaagcagcagtttatctagcaagatggtttcgtgggaaccgacatggcagacgcgtcgatattttacgcaactttgagggcgtcgtggaaaaaggggagatgctgctcgtcctcgggccccccggttcgggctgttctactcttctcaagtcgctagcaggggaaacagcggatctgaacatcgcgccggaatcatacatcaacttccgaggtttgctg

SEQ ID NO: 22595 - DNA, 850 bp, Emericella nidulans
gatcttttatctcggctacagcatttaggacgtgcgaaggacatcggcgagtttgtcaagcatgggtgcagagaggcaacaatcgagattgagcttgctaggggcccaaagcactctcgaaatccagtcgtgactcggatcatcaaacgagaaggcaacaagagctcttttatgttgaacggaaagcaagtgagtggacaccatgtgaagaaacttgcgcagtccttcgcgattcaagtcgacaacctatgtcaattcctgccgcaagataaagttagcgagttcgcggctctcacaccagttgaactgcttcactcgactcaaagagctgctgccggagccgagatggtggagctgcacgagaacttgaagaggctacgggcagagcagaagaaactccaatcgaataatcagtccgacaaggatctcctggcgaatcttgaaaatcgacaagaaatgcagcgcgccgactttgagagagtgcgccagagagctcaaattgcgagaaggatcgaactactgcagacggttcgtcccttggttttataccgacatttagtggagcaaggcaaggctctgaaagaggagagaaatgtttctcaacgcaaacttgaagttctcgaagcgcaattgaagcctgttatgagatccagtgagcagaagaaggagtactgcatgcagctggaagctgtagtcaaacacaaacagcgagccctagaaagagcagacagaatggcgacagacctcaacagaaaagtcgagcaatacgagcaaaacatgaaggagctagatgctgagatcgaggcagaaaaaaagagtgccgtaaagtcaagacaggaaggggccaaaa

SEQ ID NO: 22596 - DNA, 850 bp, Emericella nidulans
gcagatttactgtatcgctagtagactcgtcgaatggtacagcaacgacccgacattttgaagcggctatcggcaaccagcgtctatatgaaagcctttcctcttccgatcaagaccactattacctatgcaacactctctccagataccaggcaacaggcagatccaccgcgattctatctctgcgagagatatgccctactgagcctgactcaccaaccggaagtgaaacccacttcttcccagccatagtattcgcaatatctgatacaattaaacccgatgctgcaaacatgatttcgcagcttcagcaacgcaaaatcaacgtcttcatgtgcacaggtgacaatgaaaccaccgcgcacgctgtcgccgacatgataggcatccctcgaagcaacgtcctagccaacaccctcccagccggtaaagccgactttgtccggcaaattcaaatccaacccgcacaggcaggcggcggcggcacaacccgccaaattgtcgtcttcgtcggcgacggtgtcaacgattcccctgccctcgccgccgcagatgtgagcatcgccatggcgtccggctctgacgtcgccatcaactccgctagctttatcctgcttaattccgaactcaccacaatactcaaccttgtcctcctcagccgccgagtcattaatcgcatcaagataaactttggctgggcggtaatttacaacctctgtctggtccctgttgcagcgggcgtcttctatccgattgtctctgggcatagaatggccactggttatgggggagatggtcaccgtccaatcacattggcggctaagcccagtctgggcggcgctggcaatgg

SEQ ID NO: 22597 - DNA, 513 bp, Emericella nidulans
gcatcctcctccaagacgaaggctgtatccaaggcagaaggatccggtgatgggaagaagaaattcgaagtcaagaaggtataaccacgctgcatactcctggaatatgttggaaggatgtattgctgatcctacatttcattagtggaatgctgttgctctatgggcgtgggatatcgttgttgataactgtgctatttgccgtaaccacattatggatctctgtatgttgattccatgttgaatcgatgtatgcacttctagctgccgacagagctaatatcttccggacaggcatcgagtgtcaagcaaaccaaggctcatccaccaccgaggagtgcacagttgcttggggaatttgcaacgttggtctaccacgaattactgactatggttgtttactgacaactaacctagcatgcattccatttccactgtatttcccgctggctgaaaacccgtcaagtgtgccctctcgataacaaagactgggagtttcagaagtacggccgg

SEQ ID NO: 22598 - DNA, 500 bp, Emericella nidulans
agccccaaaacgcctaccgcggtgggcataacgccctcaaatctcagctggaatgagacgcttgcggactatgccaaagactgggcgaaggggtgtaagtggaagcactctgtacgtaccttattttttttcttgatatatagaatacgtagaatagattttgctgattagagtcccaactggttcttgcaagatagtccggcccgtatggcgaaaaccttgcatacggttacaaaaaggcctcctccgcagtgacggcatggggtgacgaagcagcactttatgatttttccaagccaacgggattcaacgaggacacgggacattttacacagccttgtttgggaacgtacaaagaggtcgggtgcgctgctgttgattgtggattgacggatctggacgatgacgagaaagaaagagcgcaggggtggtatgttgtttgcgagtatatgcctgcagggaatgtggttggagcagatgacgggctggagtatttccga

SEQ ID NO: 22599 - DNA, 850 bp, Emericella nidulans
tggcgtcctcgcagagttggaggaaaaacgtgacgagctcatccgtacaatcatgacacgattccagtctgtagcgaggggttttgttcagcgcaggatctcaaacaaaaggctgtatcgtgcagaagcaacccatatcatccagcacaacttccgagcctatttggagatgaaggccaacccgtggtggcgtttgttctcgagaatgaaaccgcttcttggggagacacgtactgctcaagaagtgaagagaagagatgaaaagatcaaacaactcgagacgaaaatgaagcaggaccaatccgaacgccagaaagttgaggaagaaagacggcgagcggagatagagatacaacgaatccagcagaccctggagagcgaacgggcattggcccttgacaaagaagaaatcttcaaaaggctgcaagatcgcgaggtagagctcagcgagaaactagcaggcgctattgccgaccaagaaaacctcgaagatcaactagacgaactaatccttgcgaaaaagaagacggacgaagagctcgacctgcgaaaaacacaactcgagcaggccggagagattatccagcgcctagaggctgagaggaaggagatgcagcagaagttggaggatctggagcagaagctgcttgaggcacagagcagtgcctcagagacggaaaaccatatgagggagcttggacaagaggtcaaaatgctgcaaagtcatctcagtctgaaggagcggaaactgcaggatttggaggcaaaactgctgaagaccgaccaagatctggatgtcaagctggcaaaaacatcaaaggaattggaccgatcgaagaaagaagtcaag

SEQ ID NO: 22600 - DNA, 850 bp, Emericella nidulans
tgttagtatagccagagacatgccatgtggtttttgtcaagtctgtcgagatccaaggtgtcgatccggacgcacaaggttcaaacccaccaggacagcaagcttccttacctacgacttccgtacagcgacccggtgtgtcttcgacgtcgccccagcccagcactctagctgcagcgccgctctcgacaaaacctcttgcccctcccacgccatcgttgatcgagctacccacatgccccgtttgcttggaacgaatggacgaaaccacaggtctcctcaccattatatgccaacatgtcttccactgcacctgtctccaaaagtggaagggcagtggctgccctgtatgtcgctacacacaagacgactttcgcaagacgagccaaggctttccgttcgacgacggaaacgttgaatgcagcgtctgccactccgacgtcaacctctgggtctgccttatctgcggcaatgtcggctgcggccggtatgacggcgcccatgcctttgcgcattacagccagacttctcacgccttcgccatggacctctcaacccagcgcgtctgggactacattggagatgcatacgtgcaccgtattatccagagtaaaacggacggcaagctcgtcgagctccccgcagcggacaacagcgcgctcgacccacccgattggaccgatgccgtgccacgcgagaagttagaaaacatgagcgttgagtacacccacctactcaccagccagctagaaagccaacgcgcctatttcgaaggcatactcgagcgcgccgtcgataaagcctcccaggccagtaccgccgcctacttctgctcaagaagccgccgata

SEQ ID NO: 22601 - DNA, 850 bp, Emericella nidulans
cgcatatttcagtacgtctgatggccctcttttaagcagcacattcatctaacaacattcagcgccctgctcacatatgatgctgtctcatttgtcgaatatcttgacactattgtgaccgcgaattcccctccgccgggctccacgaggcacaattactcaccctggctgtttctcgacgcggcccacgtcctctttcagacagcaaagtctagagtatacgaagggaagattggcaatgaattatctcgctcatccatgacatctttacctaccacgcttcggcctgtattggaagagcagcccaaatgggacgttctggctgagatcctcgaggaaatagaaatggacgcatatcataatccggccagtacaggtgaatcaaacaacacggtactgataatgtgcacagatcaacgaacgtgctgtcaacttcgggagtatctgggaacaatgaataccaaagtcgaagatgagcggcaggaggttgcagatggtagcgaggacaagcaagagaagaagcgctcaggagaagttatgttgcgcaggaaactaagggagtatgtcaactggaaacgctcactggtcaatgtcaacaaaaacttgacagcaaaaccagtgaatgaagagcctcgaacaggatcaggccgggattcaccacgaccgacgactcagcaaggtcgagctccaccgaacaaacgacgccgagtccgtggaggagctgcttctgttgcagctccccgtcaaccaaacagcagtgttcaagcagatactgagccttcagagcaaatgtctgttctcctggatgtgattcaacccacggaagtagaagaaagcctcaaggaagagc

SEQ ID NO: 22602 - DNA, 850 bp, Emericella nidulans
acgtccttgatgctttgaccgattggcagatctacgtcggtctattcagtacgtcccttcccatgtaatccgtttccccttccctctgccgctgctaaagggaactgcagtgtactggggtatcacttgccctctctacggaatctccttcttcctcccctccatcatccgcgacctggggtatacctcttccacagcgcagctgctcaccgtgcccatctatattaccgccgcagccgttgccgtcgccggtgcgtggttgtcggatcggtataagaagcgctcgccgtttatattgttcttcatgagtctgatcgccattgggttggtgatggcccatgccccctcggaccgtggcgtaccgggctggatgtattatggggtcttattgcggtgggtcggtaagagctcacctcacctttatcgcgcttattgtgagcttcaactaatgtttgcctggttttagggatctatccagcctttcctggaaatgtcacgtggatcagcgtcaacttggcaggcgactacaagcgcgctgccgggatggctatacatatcgggctgggaaatatggctggaggtacgctcctacaatccctttttggtttattatcgactaatgagtgcagcaatggcctctaacttctatcgtgaacaagatgcgccaaagtataccctcggacacgctctcgagcttggcttctgtgttgtgggattactcgccgtgcttattctgcgcttctcgtacaaacggatcaataagaagagagaggcgatggatcaatcgcaatgggatagctatgaaatggcgaagatgggagatcggtcgccgatgtttaggtatatgctg

SEQ ID NO: 22603 - DNA, 442 bp, Emericella nidulans
ccaacatgtgtgcgcggtagttcaccatggaggtgccgggacaacagcgtgcgggctccggaatggccgcccaacggcaataataccgttcttcggagagtatgagacccaagtcttcctcagattctgagtcacgttgctgattcactcatccagccagccgttctggggaaatctcgtagcagtttctggcgcaggacccaaaccgataccgtaccgagacgtcactaccactaaacttgcagaggtgattgaattctgtttacaacctcagattcaacatgctgctcaaactattgcgtcgagaatgcagtacgaagacggagtcaaaactgctgttgattcgttccatcgaaacctgcctcttgataagatgcggtgcgatctgctgccaaaccgcagcgcggcatggacgtgtaaaacgccttcactacgcttatcg

SEQ ID NO: 22604 - DNA, 714 bp, Emericella nidulans
ccaaggcgcgatgtccgcaaccatatgctcttcgagatcgcgactgaagttgccaatcgcgttggcggtatctactcggtgcttaagtccaaagcccccgtcactaccgccgagtatggcgagcgctacactctgatcgggcctttgaaccgcaattctgcagctgtggaggtcgaggagctcacaccgtctagtcctgcgatgaaagagacgatgcagtcgatgaaggagcgcggcattgaaatggtctacggtcgctggctcattgagggtgcgccgcgtgtgcttctcatagacaccggcaccggatacaaatacttggacgaatggaagggtgatctgtggaatactgccggtattccttcccctgcttcggatcatgagacgaatgaggcgattgtttttggatatttggtggcatggttcttgggcgaggtacatactctttgcaactaattggctccaactactaacctggagcagtatattgctcacgagcgccgtcgtgcagttgttgctcacttccacgagtggctcgcgggtgtcgctcttcctttgaccaagaaaaggcatatggacctaacaactatttttacaactcacgcgacactactcggtcgatatctctgtgcgggttcggttgacttttacaataatctgcagtactttgacgtggatgcggaggctggtaaacgaggcatctaccatcgatac

SEQ ID NO: 22605 - DNA, 837 bp, Emericella nidulans
atccgccagccaattgttggagttgggcacagcatgggcgggatgcaactagcccacctctcgcttatgcacccgtccctattcagcgcattagttttagttgacccgactataacgcgctcaaacgtgggattgaagttcgcacaggcatccatctatagacgggatctctggcggtctcgcgcggaagcagtgcaaaaattcaattctaacccgttctaccaagcatgggataagagagttcttgaaaaatggacgcagtatggacttcgcgagctccctacgctcctgtatcctataacggatcgggatggaccgggagcggtgacgttgacgacaaccaaagcacaagagctgttcttttattgccgtccctcgtatatagacgagcgctctggtcttcgttgtggagatccaaaagaagatatgcacccagacgatattgacgaagattaccctttctaccgcccagagccggtgctgatgttccgccggttacccgaactcaagccgcctgttctctatatcttcggtgggaagtctgaactgtcaactccagaggcgcggagggagaagatggagatcacgggaacaggtttgggtgggagcggcggtgtaaaggctggcgcagtggaagaggttgttttgccggccggtcatttagtgcccatggagcttgcgaaggagagtgcgcgggctactggagactttgttcattccagactgtcgcagtgggaggcgagagtgaagagatatcaagacgcttggcgggccgttccgcaggaagagagggtccaggttgacaagcaatgggagaaacacttgggggtttctaga

SEQ ID NO: 22606 - DNA, 850 bp, Emericella nidulans
attgccaacgagggtgctggcgctctccttaccggtttcggtcccaccgctgccggttacttcctccagggtgctttcaagttcggcggttacgagttcttcaagcagcagtggattaaccagctcggttacgagtctgcctccaagaaccgcactgccatctacctcgcctcttccgctaccgctgaattcttcgccgacattgccctctgccctctggaagctactcgtatccgtcttgtctctcagcctgagttcgccagcggtcttttgagcggtttctccaagatcctcaagaacgagggtgtcggtgctttctactctggtttcggtcccatcctcttcaagcagtaagtacccgagcagcgcagtagtaactttggcctctgctaactcaaattctccagggtcccctacaccatggccaagttcgtcgctttcgagaagttctctgaggctatctacggcgttgtcgacaagaacaccctctctgatggtggcaagactgttgtcaaccttggttctggtctccttgctggtttcgccgctgccatcgtctcccagcccgctgacaccatgctgagcaagatcaacaagacccagggtctccctggtgagggtaccaccacccgcctcatcaagatcgccaaggaacttggtctcaagggttccttctctggtatcggtgctcgtctcttcatggtaagaacgattccataaaatgcgcgtcttattctgctaacacgattcccagattggtaccatcactgccggtcagtttgccatctacggagacatcaagcgtttgctcggtgccaccggtggtgttgagattgctccctccaaatag

SEQ ID NO: 22607 - DNA, 500 bp, Emericella nidulans
tgcagggtgaacgtattgaaaggctggaaaagcaacgaggactagacaaggaacaactcactgggattatccaagagtcgaacgcgaagagtcaggatttcgaagggcatagctgcaaggacaacatggagcgcttcgaggaagtctctgagcggactcgtaccctggacgaggcgaatttcgaattgacgacaaaggtcaatgtggcgtcagataagcttgttgcacttcagactgagaatgcgacgttgagagatgaatttgctgaagctcgtcaaaagctccgtaagctagagacagacaacgcaacgctgaaggaacagattggcagggtcgttgagaaatttggcgttcttgagacagagagcaggccattgaagcaggatcttgtcagtgttctacaaacatttgagacaacgcaaagtgggaatgcggagctgaagcaacgagtctgcgtgcttgaaaaggagctctctgtgcaggagaagagggtaactagg

SEQ ID NO: 22608 - DNA, 850 bp, Emericella nidulans
agaggttgtcggaagaagagatcaattctgaggcttttgctgtcctgtacgaacccttgcgtagcctgccctaatccttgttccactctcgcagttgtcccgtacatcgggacctccagcgctttacccaactcataggtatacgttgaaagagcgggctaacatgcccacagcgtcgcgggctcccactccacagcaggaacactcacactcctcttttggcacctcatccagaacccgtccatcatgcgcaaagtccaagccgagatcgaaaacacccttggtccgcttaaggacagaacctcctatccgatcgccggcatcgaatccacactgaaatacacaatggcctgcgttcgcgagaacttccgcataaaccccgtgtttacgatgcccctttggcgccgcgtcggaaaatcgcatgttcttgagattgatgggcatcatattccagaaggcgtacgtactcctccgtgaatggacacctacttgtgtattttactgactgatgtggaacagacaaacatctgcatatcgaactacgtcctgcatcacaacccatccgtcttcggccccgatcataacaccttcgtccccgagaaatggctcgacgaatcctataatagggaaaaggggcgctatctgattcctttcagtgttgggcatcggatgtgcattggtcggaatctggctatgacgaatatcctcaagagtgtatgcactctggccactttgttcgagtttgagccggttgagaagaaaaaagatgttcgtgtaattagtccaggcattggcgagatgaagggtggctctgaggtgagggctagagtccgagaagtgaagtaggtgc

SEQ ID NO: 22609 - DNA, 850 bp, Emericella nidulans
gccgaggagaccgcgaatctgcagcaggtcatgagtatcttccagttcctcgtgcgccaagtcgacctgttttatgagtcccgagagcacttcgtgcctcttatcgtcccttctttgatcaaaattgcctctcctgcgagcagcccgtcgcacgatagcaagatgcttgcgcttaacctgatcagtttgatttggacctgggaagaaaagcgagtaaagaacagttctggtcttacccagaatggtctgactgagtcgccgaactcaaagaaacgcaagcttgatgacgctcaaggaacttcttccccctcgccggctattgcacctcccgggtctcgtgagcgctccgaatacatggttcctcctgacctacgtgcggctttgacaaagtaccttattaccttcatcaccacgtcgagcgataggttccaggtgccggccgcccggttccgcgaacttccgtcctcaaagcagcaaggccctgttcacacgagcgagatgcaaaagaaagctgtgggattactccgtaatctgatgtcgccggcttactggggtgatctgaacattgagctctaccagaaagtcatcgagccaattctcacacaagaccgtggagataggcccattgagaagtatgtgacgccgatagtgaacgctttgcaggttattcgcatcatacttgcttcaaagccggacgactgggtcgctgcccgcgttccggctatccagaagctctttgagaagcccctccgttcggacaaccccgaggttcaagactctcttcacggccttgagacagatatggatgtcgaacccaagcttcctcctcctgtccagcgggttctatgtg

SEQ ID NO: 22610 - DNA, 648 bp, Emericella nidulans
ctatgcgcttatagtacgaatttggcgatcatcgttgtgatgatgcaggtcgccaagaaggttcctttcgacgaccctgatgttctgctgcttgttcgtggcctttacgtcgtgtcgaacgtgattattttgagcttgtatctctacacacaggctcaaatcaataagaagaacggttcgtctttttcgtttatatcttgcatcgtcccaaagctattggcgggatattctgtttgcagttggctgacttgaagtaatctctgcagatctttcgacattaaaatacgtcgagcctgctccgctggaagcggcgaggagcctcgtcctgtcacaactaccaacatggagtacgataagggccagttccgccagctcattaagagccagttcatgggcgttggcatgatggccgtcatgcatctgtacttcaagtacaccaaccctcttctgatccagtcgatcatcccgctgaagggcgctttcgaatcgaatctggttaagatccacgtcttcgggaagccagcgactggtgacctccagcgtccctttaaggctgccaacagctttctcagccagggccagcccaagaccgacaaggcctccctccagaacgccgagaagaactggaggggtggtgtcaaggaggag

SEQ ID NO: 22611 - DNA, 850 bp, Emericella nidulans
cagaagcaatgttgggatttgatctgaaaatctgacatgcctgctggcgcacgcgccataccaggaagatgggtttataaaaagaagcttaatcctgacaactctatccgttacaaagcacaataggtaatcagggggaatcttcttgataaatcagaatttgaaggagcaacatacgccccagttgttgatcctattacttcacaaatcttgtttggtgtcagcgcccaaaaaggctggcatattattcaggcagatacagttctagcatttctaaatacaaagttaaaaggccaaccgatttatatgcatcaaccacttggattcgctgaaggggagccagggaccctagtttgcctgctccgccaatcactatatggcctaaccccgtccgcgcgcctatggtacaatgatctacgagcatatcttgaatctataggatttaaggtttccccgcatgacccaggcctattcgtacatgttacagaaaagctctatatcaccacccatgttgatgacttcatgattgttggtgaaaaggcccaaaacgccgtacaagcgctcgaaagcttgaaatcccgatttgaaattaaagaagcgccggaattcaagcgatatctaggcataaatatcaaaacaacgcctacaggcatccacctgtcacaggaggatcaaattaataatattatcaactcttttaggcttcataatgcccatcctaccaaatcaccccttgatcctggaacagttatcgatgatgctccagatccaaaaatcaatatcaaagaataccagcacggtactggcagcttgcagtatctagctacaaaaactaggccagatatcagcc

SEQ ID NO: 22612 - DNA, 850 bp, Emericella nidulans
cgctttgcggaccgctcgagaactcggaagtgcgattaaatatatcacaaggtgttcaagctgtcgggagcgtcctctcgcctttgctcgccaaaaaggtcctgtttcgcagcgtgaccgatgtctcctcgctggttgatgtgcagtggacgtatcttgcaattgccttgtttgacgtgctcctcgcactggccttttactacctacccatcccagaggcgtcagacgaagatttggaggaacttgctaatcgccgacgagacgataaccgcaccgccccccttcggaattccagttgtttggatgaccctcgctttgggcatttggtcccagtttttctacgtagctgggcaggaagtcttctctacaggttttggggctctaatcgcgacggcatatgcggatcctccgctcagcgaattcacctacctcacgattggccgcgccatcttcgccgtcggtcgcttcctcgccgccttcctgcaatggtttctcaaaccacgatggatcctccttctttcatacatcggcatggtcgtcttcgccgcattatgtatgcataccactggtgccgcagccatcgccagcgccatgatggttttccttttcgaaagcggcaccttcagcattatttttgctattgcgcttcgcggcaccggccgacacacaaagacagcagcttctttactcaccatcgctatcagcggcggcgcattcctaccttttgcgcgatatggcgcgcaactagcagcaaatagcacactcgattcatacagcgtcctcgttgcgctgtttgcagccggcgctctatttccggtttaccttaatcttgtcccagcggctaaaaagc

SEQ ID NO: 22613 - DNA, 850 bp, Emericella nidulans
ggtgccgtcgtgcgggatgccgcccagtacgccatcgatgccttgtatgccgccctcaaacccgaggccaaggtcaatgcgctactccctgccatctccagctatctgagccgcgggaccggcaaatggcagggtttcgttggtgcttactgtctcattgaaaagatggcccttgatgcgcagatgggctcagggaccaaggaacaggagctcgagaaggatgtcctccgtgaggctatgggcaagactctgaaggacctcatcccgttggtcgagtctggtatgcacgatctcaaaaacgatgttgtcaagtgcgcctgcaaggccatgaacgccctcaccaccctcctgtccaacgacgatgtggagccccgcatccccctgctcatcaaaaccatggagcagccctccgagcagaccctgcagaaggctatccatgccctatcgcagacgactttcgtcgccattgtcacttctcccgtgctggctctacttactcctctactagagcgctctctcaatgcgccaaccactcctcaggaaactctgcgtcagactgttgttgttgtggagaatttgaccaagctcgtccacgaccccgccgaggctcgtactttcttgcccaagctcaagcccggtgttcaggcagtcaaggaccgtgcttctcttcccgaggttcgtgagctggccactcgcgccatggatgttatggaaaaggccatggcggacaaggatattgctgccggttccgtggccaaggttactcccgatgaggttctttctgttctgaacgccaagattcaggagaacggtggccttgcgcgccctgatgctgcgaccctgtttgaac

SEQ ID NO: 22614 - DNA, 742 bp, Emericella nidulans
  unsure (1)..(742): unsure at all n locations
tctttatccttctgttatctcactcctccaccaaaaggggcattccagagtcncgaagtttccaaaatccccgcttccggccccaaaggccgacttcttaagggccgatgtcctcgcctacctcggcctcattccgtcagactatcccgcttcgcaagcagcgcggatggagaagctcgctcacctcgatctaagcaacatcaagatcgctcctcctccagcaccaccagcaccagagtcggcaccggcagccgaagagccagtcgttaaaacgcctcctacaatatcggtcgcggtttcgatctccttggctactgttctccgtgctcagaaaaagcttcagaagtctgttggtgtgacaattcctctatccaccttcgtcgcccgggccgctgacctggccaacgacgatcttcctcggtcaccgtacgctaagcaatccgccgacgaaattttcgacgagcttctgggtgcggagcccgtcaaagtctcgcgcggtgaatacatccctgagctcaacgccgttgacgttactcccgaggtgcgagctggtcatacggcgaaggaagatctcatcgatttccttagcggttccaaaacgacaaagcgcagtccacctgcagccgcgatcgattcatttgaacctgaacaagctttgaatgttttcagcttgactgtcccggtgggcgaggagaagcgagcccgaaccttcctggagcgcgtcaagactctcctgaccgtt

SEQ ID NO: 22615 - DNA, 850 bp, Emericella nidulans
taactgaagacatttattgcctgcttttaagccatgtctcgagtgttcttactccagcgatgatcccatcgaaatggttgtcgcttccctgcgtaccacagatgccatccggaaaggccgatcgcaaacaagttcgtggttggcttgaagatatggacaaaagaacttatactcgcattttccaccccaatggcactgataatctgatctcagatccatcagacagcatggtagcgatttggctcaaagtcctcaaattagagccgcagagtctccgccttgatcaatctttcatccgtaacggcggtgactcaataatggccatggaggcccggcaccaggcgcacgaagctggaatcaacatcgacgttcgggagctcctgggtagccgtgcacttcaagagattggcgaaatggcaaccaaaacttcagccgtagaagaggtctcaaagatagaggatgatagggacgaaccttttcccctgtcgcctgttcagcagatgtacttcgataaggtatctgatcccagtcttggtcttcagcaacgtgtttgcgtggaaattatgacgaagatacagcctgatatgctgcgcgaggcattgaaccacgttattcagaaacaccgaatgttggccgctcgatttacgaagcacatgggacaatggatgcagcaggttccgtttggaaagaatctcaaacacctgtctcgctgtcatatctacagtcaggctgtggggtcccttggcgacttctgcagtgagcccatggcccttgaggatgggacgctacttcacgcgcatttgcagtcgagtggtgagaggcagacactcgtggtctgtgttcacacttg

SEQ ID NO: 22616 - DNA, 850 bp, Emericella nidulans
tggatgggccccagtgctgctcataacccggatatcaatgatacgatcgtggatttggttcaggagaagctgaaccttccttcgagtgagagtttacactctcgttaccctgagcagaggcggcttggtctgcggatatgcggcgcagcccagtcacgtcgtgagctcgaggagttggtcaagacattgtccgccgaaagtcagcatacaaaggcggctgctctggccgtcttccaaggcgagccaaagcttgcgtatctcgcgctgcgaagtcatactcctacacaggctcataaactcctcgcaatggccattgccggtgctgcgaaagaaaagccagatcctgactgggaagagacttgcgccgagattgcgaaggagcttactgatccttacgctcgggcaattattgccttcgtcagcaagggcgactggcgctctgtcatccaagagactacactcccactaaaataccgcgtcgaagtcgctctgcgctggcttccagatgacgacctcacaacatacctaaccgaaaccacaaaacgtgccattcaacagggtaacatcgagggcatagtcctcaccggcctcggccattccgccatggaactcttccaatcatacatcaacaaattcaatgacgtccaaacaccggtccttggcatgagccacacagtaccacgcttggtcaacactcccgcaaacaaacaccggtttcgagacctggcgccaaacctacccgttggccaaatcaaccttcctggaaaacctttcaagcttcgaaacggcgcccccgcgtttcgaacagttcgggcttttttggcaaaatattcgccccccccacctttgg

SEQ ID NO: 22617 - DNA, 850 bp, Emericella nidulans
gatattcgaaatgttcgttgcccctccattatcggccatcccacttcgctcccaaacgacagggacgttcgagcttgccatgctaaccatgtttctttctagatatgtattctagcacatgtcgtacgttgatgtaagaccattatcctattatggctaattctaatatcctgcgcgaatacaggatcatgggaaaacatcgttgacagacagccttattgccacaaatggcatcatctcgcccaagctggcgggcaaaatccgctacctggactcgcgtccagacgagcagctacgcggaattaccatggagtcttctgcgatctctctcttcttctccatgatgcgccgctctgctccagatgcccaacctgaagcaaaggagtacctaatcaatctgattgactccccaggacacatcgacttcagcagtgaagtatcaacagcttcgcgactatgtgatggagcagtcgtcctagttgatgctgtggagggtgtctgtagtcaaacggtcaccgttctacgtcaaacctgggtcgaacagctgaaaccgatcctggtcatcaacaagatggacagactgattactgaattgcaaatgacctctgcggaagcctattctcacctaagcagactcttagaacaggtaaacgccgtcatcggtagcttctaccagggagaacgaatggaggaggatctccagtggcgagagcgtatggaggaacgcgtcaatgccgctgcccaacagaagcaagcacaagatggagaacctgctgaaggaggtgttgatggagcacaatatgtagagcgcgatgatgaagatctctactttgcacctgaaaagaacaac

SEQ ID NO: 22618 - DNA, 413 bp, Emericella nidulans
ttggcacaatgaaccttttcatcgcgctgaagaacaaggagaccggcaagaaggagcttgtgactgccaatcttgatggaaccatccttgagggcgttacaagagactctgtgctagcgcttgccagggaaagactggtcccgaagggctggcaagtttctgagcgtaagatcaggatggcggaagtcgccgaggcggccgatgagggaaggttgcttgaagtatttggagctggcacggcagcaattgtcagccccgtgcgaacgatcagctaccgtggcagattggtaaactgcgggctgaaggaaaccgaggaggctggagagattgcttctcaaatgaagaactggattgagggaatccaatacggtgacgaggagcacccatggaggtaagtaaacgcgtcattcgaa

SEQ ID NO: 22619 - DNA, 500 bp, Emericella nidulans
gacctaccatcatcccgggcaccggcgaagccgacgggacgcttccagtattcctggcaccatggcacttttaaagcctctctgcacgagtttctctcattgggtctcgaccacatcgtcgtctccctcccgctcacgccatcaacaacacacctgcttggtgcgcaagaatttgccatccttgcggcaaataagaaccctaagcaccgcaacccgtacctgaccaatatcttgcgcgggaagggtcaattgaccaggacgcttttgattgcgtctctgaagtcaggcgaactcagtggtgccgcgctggatggtaccgaacctggaactctgccggaagaacatgagttgtgggatacaccgaatgtgcagattagcccgcatgtcagctcccttgggcaagagtatttcgtgcgttcgtttgatattgtcaggggaatctcgaaagggtgaaagatgggctccctttgatcaatgaatataaacggggtagagggtat

SEQ ID NO: 22620 - DNA, 850 bp, Emericella nidulans
gtgagaagaatgtgaaccgaccagaattactccaattcttgcaggctcatgctgccgatgatctggccctgacccatcgagtgctcgcggcgtcattcttatcattgcgtgaggtcttcgagaatctcccagttgacgtaaatgtcaatatctctgttctctatccatcagctgctgaggagcaagcattgaagatgacgtctatgacagatgtcaatacgttcgctgacgccatattgacggttgtttttgaccatgcacgcgtcgcacgggataagaatccagaattcatgcgttctgtcgttttcacatcttataacgccaacatatgcgttgctctgaattggaaacagccaaactgtaagcagccagtccccgtaaacctctcaccaatcactaataatcagaccccgttctcctttgcaatgaccttggccagattcgtgacttggcccgcaatgccggcactcacccagacgttgacagcagcggtcgagcatcaatgtccataaaggaatcggcccgcgtagcacagagcaacaattttatgggcctgatatgccgttctagtcttttggtatgcttacacaaacttccgttaattcttgaccgccacagatactaatggaggctgctctagaatgttgtgccagctctggtagcaactatgaaggaacttggacttgtacttgtagccgacacctccgacgaagccgaacaaccggaaactcaagctttgtcagctgcaggctctatgggcgtggctgaactggcataccgcatgcccgaaggtgtaaatggcttgatgaaagccaatggcatactgaggttcaatgacatgattgacatg

SEQ ID NO: 22621 - DNA, 780 bp, Emericella nidulans
gaaaaagcagagagttccgatatcacgtgtgccagttccgagaaagatatcgaccgtgacagaaaagatatcgatcaagaaagcgagctgaagatcactgcactcgcgcggaatttatcccgtctctcacagaaaagcggcgctgttgacggcacaaacaccttcctcgactcctccagcgaccccgagcttgatcctaattctggccaatttaatgctcgcaaatggacaaagaacttcctctccgttgccaatcgcgacccagaccgttacccccgccgcactgcgggagtctcatttcgcaatctaagtgcctttggctatgggactgccgccgattaccagatggatgttgccaatatgtggctcaaggggtttggatggattcgtcggaagcttggtttcgtagatagggtccgcattgacatcttgcgcgactttgaaggctttgttcggagtggtgagatgctggtggtccttgggcgacccggaaggtaacacagtactcgctcctgctcaattttcccaatgttgcttacatctttttcgtcatttagtgggtgttctacgtttctcaaaacgatcgccggagaaactcacggcctctggctcgacgacgggacggatatacaatatcaaggaatttcgtgggacgagatgcacagtcgattccgcggggaggtgatctaccaggctgaaaccgagattcactttcccaatctcaccgctggcgagaccctgctctttgccgcacaggctcgtaccccgggctaaccgttt

SEQ ID NO: 22622 - DNA, 850 bp, Emericella nidulans
accacgaccccgattatacaagggacccgacaaggcaccccaggaggcagaaccaaccatgggcgcggaacaaaaggacgccaacgaccaaggcgaggaagaccgcaacatgcaggcccaagaggacaaccagacccagccagagaacgacccagcacaccacacagatcaccggaaggaacccggacgccacaagaacgagaaagccgccaacaccgggacagaagaggacacccgaacacaggccaacaaagcgccggaagcagaaccgcccagtaccgcaagctgaagaaccagggcaagcgaccaggagagcagcaagcccgaaccgcagacccagaacggcaccgagcacggaggagcaacccccaaaggccacaacaacacccccgcacgggacccgacaggcccccacgaaaagcaagcacaaagaacgcccccaagccaggggggagcacccacacaaaaaacgagggccaaaaagacaacaaagccaaacagacaaccgacgacccgaaccatgtccaaggaaggaaggcgagggccccccggaaccaaaagacccgaagaaggaaaaagcccaggagcgcaaacaccccaacgcgagcaacaaaagccagcacccccaagaaaaagaccaagcaacctacacccgaaggagggcacccacaagccaaggcaaagatcacaaacccgagaatacaaaccaggggagaggaccccaacaaggaaggcacaccaacaagaccgggccaaacaaaaaacggcccaagaaaaagaatagaccacgacacaaaaaaaaagggaggcaagaacaaccaacgacgaggaaccaaaaaagaaaaaaaac

SEQ ID NO: 22623 - DNA, 850 bp, Emericella nidulans
gcatctcggccattttcgtcatctttgtcgtatccacagccgtcaccttcttccccatgctcgcgaaacggaatccccgcctacatatccctcattacgtctacctgtttgctcgctactttggcgccggcgtcatcgtcgccaccgcgtttatccaccttctcgaccctgcctacgacgagatcggccccgccagctgtgtcggcatgaccggccactgggcagactactcctggtgccctgccatcgtgctcgcctcggtaatgggcatcttcctcctggactttggcgcggagcggtacgtcgagatcaagtacggagtctgcagggaggaccccgagcagttcatgaccagcaccgccaacaacgaggaagccgtgtccagacaggccaccagcacaggcaagaaagcaggcgacacgctcgaggcccagtcgatcgactctggctatatcgaacgctcgtttcgacagcagatcgccgctttcttgatcctcgaattcggcattatcttccactctgtcatcatcggcctgaacctgggcacaaccggcgaggaattcccgaccctctacccggtcctagtcttccatcagtcatttgagggtctcggtattggagccagaatgtcggccatccccttccgcaagggcagctggcttccttgggccttgtgtctgctctacggcctgacaaccccgatcgccatcgccatcggtcttggtgtccgcacgacctacaatgccgggtcctttactgcgaacgttgtgtcgggaatctttgatgccatttcggcaggggtcctcatctataccggtctggttgaacttcttgctcgtgacttcttgtt

SEQ ID NO: 22624 - DNA, 500 bp, Emericella nidulans
cgggccctttcaggaccagctaatgtatccctgtgtcgaacagttcatgtaatgggtattggatctgccaaggtccgccgggatgtccgcagacaccgcaggaaagcgacattgtccttctgtggttccatgggggcgcctattgtttcggtgaccccttggggcccgccgtcaatctccttcgtgtcgcagaaatcgcagctgctcgaggtgtttccatgagcatattctccgtcgagtatacgctggcacccgcagcaacatttccaagccagcagcgcgaggctgtggcggcttacctttatctcttgcagaatcagggcattcctgcaaagaaaattatcatggcaggggaatcggccggcgggcatttgctcctttcttgcttgatgggtccgcctgagacaggcttagcaagacctaaaggcgcattgctgctatacccctgggttaatctgactaaccattcgcctacgttcgagagcaatcagcacaaagac

SEQ ID NO: 22625 - DNA, 682 bp, Emericella nidulans
ctttaatccatgctaaccacgtccttcctagaggtctgccctgtctgcaaatcctcgcggtatctgaacccggacatgcgattccttataaacccagaatgctatcataaaatgtgcgagtcatgcgtggacaggattttctccggaggcccggcgaactgtcctgtggccgggtgccacaagacattgagaaagcaacggtttcgcaaacagacattcgaggatataaatgttgagagggaggttgatatacggcgcagggtaatgactgtgtgagttgttctcctgtctgcctcccccctgagtgctaaccatgcttagccttaaccgccgagaagaagagttcgattccaagctagactgggacaactttttagagcagagagaggagattatattcaaccttgtcaacaggattgacgtcgcgaaaactgaggccgatcttcagagctatgcatcggagaacatgaagtctatccgtgccaaccaagctctcgaagctaaagaagtctcctcgttccaagaacgccagaaccaagaacaagagctagcacgtctgcggcgccaggccgctaaagaggaatacgaaaatgagcggaaagagctattagccggtcgggaaaattatctcaacagccttgcgcaaggacgagcaggagaggcggccgcaatcgcgcgacag

SEQ ID NO: 22626 - DNA, 458 bp, Emericella nidulans
accacccattgatcttctctatactggctctcttctgcggcgtcttcgtcccatacacccagatgaacgtcttttttaagtactggctgtactacctcaaccctttcaactatgttgtttctggcatgctgaccttcggtatctggggcaacaatgtcatttgcaatgatgatgagtacgcgcgctttgatcctgtgaacgggacctgtgccgaatatctcaaggactacgtcactggttctggttgggcgattaacctcgcgaatccagaggcgacgtctgactgcagggtgtgccaatttcgcgatgggagtgacttcttgacgacgctgaacatcaagcactactactacggctggagagatgcgggtatctgtgtgatctttgctatcagtgggtacgcgttggtgtttgccttgatgaagttgagaaccaaggcgtcgaagaaggcagagtag

SEQ ID NO: 22627 - DNA, 532 bp, Emericella nidulans
ttccaagtcctgataatcaaagggacggaatcctcgactctgcagacgacacatatccagatgccttcgggggtgtgcagctcattatctgcccaccggcctggtgtccatctactccggttagaccatgcaagtgatcggccgacaataagacttacgatgagagttctttctttctttctttcttttttttttcttttctattaaaaaaaaatcaccatccaaactcgcatctgctagtcatgcacctttacatcgttcccctcgtcgccggagttttgggcctttggcttctcccatcgtcgaatccctatggccgtctcgtctgtctctgggtttccttctcctacacagctgccttgccgctctctatgtcggtattaaccggttaacagcggaccacactattatattatcacaaacactttgctgattatcggctactggttgggcaactttggtggcccattcttaaaccctgaccccagcagccccaaatgtatactggggggtggaagagatgctctttggc

SEQ ID NO: 22628 - DNA, 850 bp, Emericella nidulans
ttcacttcctgcgcttctgaattggacttttcatcgcctaagacagatgcttcaggaccaagcccagcttgctctgacgtttcaggcaaagatgcactagctgcttcaggcagaggttctgcttcagcagtgctcttgcgcttatttttcttcttcttcttactggctttacgagagagcgggatatcctctgtctgtggctgcgggagctcatctttctcttcttgtttcggctcgttggactcgtgggcagtctcagcttcagcttcaatgggacgaaccgcaccgtcagcggtagggtatctgttttgctcttctaggtctggggtgcgccgctgcaggacttcagctggctgttctgctacggacccggtttcgacaggctcagagaggtcagcaactccacgcccagaagaaacatcttccgttaacacagctggctcttcaactggcttatcttcagagacgaccacggctcctgtttcgagagcgcctggttctttgtccacgatagactcctgcgtgtccttcaaagtctgatctaaagcggtggctgactcgacagcagcgtcttgactccgttcaatggacttggccgccttcttctttttcttcttggctttcttggagagtccagtctctgtgagaacctcttgattcacctctgcctgagtcgaagcgggttcctgggcttcggttaattcaatcctcttaggaacgatttctggggtagcttccatggaactcggctctttctcctgtggagatatttgctcagtgattgggccgggcgtttcttcgaccaaaaaagaatcgtcccctccaacagcataagcctcaggatttgtat

SEQ ID NO: 22629 - DNA, 850 bp, Emericella nidulans
tgaagctgccatccggctggctgctgacaatagaccgctgaagggagtctcgttctctgatgtccactttgacaaggggcttgtcatcccgtcggacgaccatggcgtcgagacacgactctgcacacggcctcatgagagcctgttagactggtaccactacactttatactccatcaacgccactggagactggacaaaacactcttggggctcgttcagcctccactacgaggatgctgtcagcgtgcagcaagcgaaacgcagcaaaggcgaatacgacgatatcaacactcgtgcatgtcggaagctggatgttgagtcgttctacgagcagctcctgtcaatcggcacagaatatgggccgacattccgcaacttagtacatgctgctgcggctcctggttaccacagcggcgtgggtaccatcacaataccagacactaaatcagtcatgcctcacgagtttgaatatcctcacttgatccatcccgccacgctggatgccatctttcacttgatattcgtggccatgggcgagggcaacgcgctctccgagtctgccatcccaacacgggtagaccgcatttacatttccacggatctgcctcgaggtgtcggagccaagtatacaggttacggtcgcgcggagcctgtctccagccgcgataccttggggactatcgtcgtctcggatgaaaattggtcagcaggacccaagatcattgttgaagggatgactgtcacggaagtctctgctggtgcttctacctcattcaactccttgcttataccggggggccaaggtcgcattgccacgcttgaatggaaggaggatgtggactcactt

SEQ ID NO: 22630 - DNA, 850 bp, Emericella nidulans
gtcttcgggaacaggaatgtctggggcgcggccctgtttggttcgggtgttactgctggcttcttcttaatgctgtactatgtacgtgccgactctttttgcaagacgaaatccactgacaactctcctagatccccatctggttccaagccgtgaaaggcgcatctgcagttcgctctggcgtgatgaatctgcccatggtcctcgcctacgtgaccttctcgctctctggaggcttcctcacctcgctgctaggctactacgtccccttcgcctatctcacagttattttcatgtcagtcggttccggtctgctttccacatttaccgtctcctctggatcgccagaatggataggctaccaattcctctttggcgcgggcgttggtcttggtcttcagacggcgtttgcggcgccccagtgcactctcccgattgaagatatcgcaatcgggacggcgattgttatgtttcttgagaatttgagtgcggctatctttgtgtctgtcgggcagaatgttttctcgaatcagctcaagaccaatgtccagatttatgcaccgagcgttgacacagcgcggttgatcgatgggggtgcgacggaggtaagaaatttggtgactgatgagacggtctaccaggcagttttgagggcgtacaacaaggctctgacggggacgttctatgtcggcgtgggcttgtcctgcatcgggatctttggagtggtgtttatgcagtgggttaatgtgaaaaaaagtggaaaaaagaccgagcaggacaataaagatgtttaagtaatatagattctgcagctcggggcgattttgtgcaaggaatgactcgctgtatc

SEQ ID NO: 22631 - DNA, 555 bp, Emericella nidulans
actagtgaagatactgaaacgcatgctcgacgagaccgaattcctctcagatcacggaattcggtcaatgtcaaaataccatgagaagcatccttactcgatggatgtcaacgggcagacattccgggttagctatgtccctggcgactccgacagcggcctctttggtggcaacagcaactggcgtgggccggtgtggttgtgcgtcaactttctgctcatagaatccctcgtcgcttttacatgttttacggagactccttcaaggtggaatgccccacgggttctggggactatatgcatctagggcaggtagcagaagaaatacagcaccggcttcagcacctcttcgcgcgcaatgatgaaggccgccgcgcagtccacgccggctctgacttacttaactttgacgagcactggaaagactacatgtggttccacgagtttttcgatggcgatatcagccgtggcctgggagcatcccacctatgtggctggacagggttaatcgccaaaattatccacgataccgggtaagtctttcttcccttcttt

SEQ ID NO: 22632 - DNA, 850 bp, Emericella nidulans
ttaggacaatattgatgtcctagcctacaccgcgcgcgggatacgtatctcagtcctccaaagtggtcgctaccgcgaacgtggatgttgccatgtctatgatcctgaaacctttacgccacgccatgattctcatagaagtagtgcagaatcatgaatggaaggccgggatccttagtgatcgcaatcctgcaaataagatcctcgggcgaacgaggacggcaggatccgcgcaggtattctgtactttgaacatattcgggtgcagagctgactggtttcggggtacttgcatggtggaatagagaactttgtatgaagaccatctgtcataatgtccaagagtccaagagtccaagagtccgcaagaaagaagagggtgcgcttagccaatccggttgtctgattcttgcctgacctgttggaggcaatgccagatactgttttcaaatgagctcttgaagcacgccgatattatcagactgaatatgctattgaacgctgccacatcatatcttgtttgagaatcaccgattcagaagatgaaggacggtgcgattatcatcaacactatgcgtgaaccggctagccgaagacgcactgatgaaagagtttcgaggaattttcgaatgagcaagttgccttttgaactgatgtctatgagaattagaatgagccatcaatcatccgaagcttgtcaacaataaggtgatactgctccctcatctcggtaaaaccatcggagagacagagcgagagacggatttgttaacgctcaaggaatcagaaagcgcactggatcggggagaactactgactcctattgcttgattagactcatgatgttccc

SEQ ID NO: 22633 - DNA, 850 bp, Emericella nidulans
ctgagtatgtggctgtccatgaggctgcgtcttctgcgacgccgtcgaagcttcagcagcattatgtcgtgactccacttccgcaaaagctcgatacgctgtggagttttatccgcagtaacctgaaatcaaagacgatcgtattcatgtcatcagggaaacaggtccggtttgtttacgaatccttccggcacatgcagcccggtattcctctactacatcttcacggtcgtcaaaaacagggcggacggctcgatatcacaacacgattctcacaagcccagcacgcagtgctattttccactgatgttgccgctcgaggtttggatttccccgctgtggattgggtcattcaactcgattgccctgaagacgcagatacatatattcaccgtgtcggacgaacagcgcggtacgaacgcgatggccgtgcagtgttattcctggatcctagcgaagagaaaggtatgctccgacgtctcgagcagaagagagttacggtggagcgaatcaacgtgagagcgaacaagcagcagagtatcaaaaatcagttgcagaatatgtgtttcaaagatcctgagctcaagtatctcgggcagaaagctttcatttcctacgtcaagtccgtctacatccagaaagacaaggagacattcaacctgaaggaacttaagctggacgattttgcagcaagcctaggacttcctggagcacctcgaatcaaattcatcaaaggtgacgacacaaaggaacggaagaacgcgtctcgggctacagcttatctaaccagcggtgacgaggaatccgacgaggaaggtggaaagaaaaagcagcccaaggaaaaggaagt

SEQ ID NO: 22634 - DNA, 819 bp, Emericella nidulans; identical to SEQ ID NO: 8674

SEQ ID NO: 22635 - DNA, 850 bp, Emericella nidulans
agaaggcgatgaagaaccgaagcgtcttgaagaagggccgaagcatgtgttacctgatatcacgataccgagccccgtactaaatggatcgagggcaatcttcccagaggtttttctgtctgtctatggagatcaggatattgagacagttccatcaacgtcaaacattgcttcttctctgctgagagacgctcttgttgacaccattaacatcatggactttaaccgcattgcaacggcaaagttcctgattgatctcgactgttattttacacccagcatcttcgtgaagcgtgccactccattcgataagttgcgcgatctccctgatgaccggacaacgtggaaaccggaggacgtggctgtagatgctgttttctctcagctgtttcaattgccttcacccgagcacaaacttgtttattaccattctgtcctcacagagtgctgcaagattgcaccggcggccattgcgccgagcttgggtcgcgcgatccgatttctctatcgcagtctcgacgtaattgacctggaacttagtcaccggttcttggattggtttgcgcatcatttgagtaattttgggtttacttggaagtggagtgaatggttggtcttttatcataaccgacacgcgtgccacaacattgctaactaacctggaataggattgaggacctagagcttccccttgtacatccaaggatggcgttcatcaatggcgcgctagataaagagattcggctgagttttgcccagcgcattcggggaaccctcccagatccttatcaagacctcatctctgaaggaaaagagaaggacacccctgacttcaaatacgcatctgaca

SEQ ID NO: 22636 - DNA, 850 bp, Emericella nidulans
ccggaatccccacgttggttggtgagggttggtcgggagcaggaggctcggtatattctgggtaggctgcgtggcagcagcggtgaagatgccatccgggccgagggccgagttccaggatattctcagcgtcgcggaggcagagaggtccatgggccacagcacgtcttacctggctatgcttttcggatacaagaccgggaagttgcatcttggccgccgggttcaacttgtggtatggctacagatcatgcaggagtgggttggtattgccggtgttactgtttgtacgtcgcccttgagataatgtcgggcccaggctaatggttctgcagatgccccgactattttcagcattgcaggattcgattccatgaagagtcaatggatcagcggtttaaacaacgtcttttacatggtatgtcgtccttctctgggcttggtacaggcacatgctaacagaacagtttgctactatgatctgtgtctttactctcgaccgaatcggccgtcggtggactttgtactggggagctgcagcccaaggaatcgccatgttccttgctgggggtttctcacgtgtttcgatcgacgcacgagatgcgggcaacatggcgcgagctgaatcattcggtgctgctgcagcgtccatggtttttgtattcaccgcggtcttcggagccacctggctcacagtgccttggatctatcctgcggagatttatccattagccgtccgtgcaaagggtaatgcctggggtgttgtcggctggagtattggaaacggatggttggtgagtggtcgtgacccaaattacaaatttctaagcacgcactaaactatacttta

SEQ ID NO: 22637 - DNA, 850 bp, Emericella nidulans
tgagaagaactatctcgaatacgtctacaagaaacccaagttcttggccacggccatgtttgctgcctacgccgttttactcggatgggccgcaagtaacagcgtcgtcttcggccagtatatcctcaacgccgccgaggtagaagtcgaccgatggaaccagcgaggtattggccttgcttgcatcactgctgcgttcctgattcacggcttcgcgctgaactggggtctccgtcttcagaacctgcttggtattgtcaagctcatcattatcatcttcgttattgtcactggctgggtggctttggctggccacacgaagattgagacgcctcacaacttccaaaatgcctttgagggaactactggaagcggatatggtgttgtcatggcattgtataatgtcatttggtcgtttatcggctactcgaatgccaattacgtatggtcccatcctactctcgaccattgctcaagctaacgtcttcaggccctgagcgaaaccaagaaccccgagcgtacattgaagattgccgcccccgtcgcaattgggtctgtcggtgtcctttatatgctctgcaacatcgactacttcgccgcagtcccgaaggaccaattccttgcattaggcaacattgtcgaagcaccttcttcggaacatgttcggctcccgcgcaaggcggtcatgtctgctttgtggcttggcgggcttgggaaccttttctttggatcttttcgagggccgaatttccaggaccttgccgaaggctcctccctttttaatttgggccgaaacagcctttagcccctgcctgggccttagacccggtggtttgggtttaagtttccc

SEQ ID NO: 22638 - DNA, 850 bp, Emericella nidulans
caaaaccattcccaagaagggcagcgcgcattcgcttctcaacctgatttctcagctttctccgtcctttgatgctgccttcaaggaactccaggaatccaacaaccagaaagatcttctgactaccttccccttccaaaactccattcctagcagcccatggcttgtcgctccaccagcctccaacgtaaacgctcatcagcccgatatcacccggtctcaggaaaactacctcatctccggtgtggacaatgctgaaactctgcgcgactggaatgaagagttccaaaccaccaaggaactgccccgcgagactgttcaagaccgcgttttccgcgagcggcttacatccaagctgtttgctgattacaacgagtctgctgcccgcggtgctgttttggtcgctcggggtgaagttgctcctatcaactccagtaggctcagtacgctcatatcttcgtgtacaacaacatcttctactccttcggtgctgatggcgttgagtacctttgcttctgagggtggtgatgaagctgcgcgtgtagctgtcggcaaggatgttcttggtatcaaggccgtcaaccagctcgacatcaatggcttgtttacaccgggaaccattgtggtcgactacatgggcaagcgaattgttggacagagtatcgttcctggaattttcaagcagcgagaacctggcgagcaccagatcgactacggtggtgtggagggcaaggatgttgtcgctacccaccccgactttgttcctgtttttgagaagctttctaaggccctcaggatcaagaaacaccctgtgtggataaggataaccagcgccacgatccctttagta

SEQ ID NO: 22639 - DNA, 850 bp, Emericella nidulans
gtgcctttgtcaaggccgctgtgcgtgacatgaagcggtatatcaaggccaagaactaccgcccgatgggggttggatatgctaccaatgacgactcatctattcgtgtggatatggccgattacttcaactgcggtgaagaggaagacagcattgacttttggggttacaacgtttactcgtggtgtggcgactccaactacgagaagtctggctacaagtcccgcaccgaggagttcaaggactactccattcctgtcttcttcgccgaatatggttgcaatgcagtcactccgcgcaagttcactgaagtcgaggcactctatggcgacaagatggccgaggtctggtccggcggtattgtctacatgtacttccaggaggataacaactacggtatgtccctctggcacatctgcatctactttctaacagaaactaggtctggtctctatcaacaacggaaacgccaagacccttgaagacttcagctatctctccaagcaacttgcctctgcaacaccctccggtaccaagaaggccgactacaaccccacaaacaccgcgcttgagtcttgcccaaccaccggaaagaaatggctcgccgccgcctctcctctccctccttcgcccaactcggatctctgcagctgcatggaaaagagcctctcttgtgtcgccaagtctgacatctctggcaagaagctctcctccaccttcagcactgtctgcggctaccagggcggcaagttctgtgaaggcgtttcgggcaatgccaccacaggcaaatatggtgcttacagtgtctgcactcccaagcagcagctttcttttgccatgaaccaatact

SEQ ID NO: 22640 - DNA, 850 bp, Emericella nidulans
tccgcggccggctcgttgggatcttcgagatttgctcccagggggacggcatgctcggtttctggatcaactatgccatcaatcgcaccatctcctcgtcacgcatggcgcagtggcagattccccttggcctccagctgctccctggcggcctgctgttagcaggcatcttctggtgccccgaatcgccacgatggtacgcaaagaaagaccgctggggcgatgccgaaaagagtcttgtctgggcgcggagattacctgccaaccacccgttcatccagggcgaactgcaacagatccgtgagcagtttctgtacgacgttgttcctgaggggagaaaatacgacccgtggtattacgtgcagcggttgtggcagcgagggaccaggaacaggatcggaatcgggctgttgctgatggcctgtcagaacttgaccggggtcaacatcatcacttagtatgttatcttcttcttcttcatcgtttatgcttcttttccccccaccctgctgggaatttcaaggagatggctcattgaagagtacagctactccccccgcattttcgagaccctgggcatcaacagcaccgacacaaaactgtttgcaaccggattctacggtgtcgccaaaactctgggcatggtgatcttcagcgtatggcttgtagagagagtcggccgccgtagtggtctcatatacggggcgttcattggcagtttgcctatgtggtatatcggcgggtacgtcttcgagcgagaccctgccggcacctcagcgcgcggcgacaccgtgcaagatgcgtggggatacatcgccatggtctgtgtctacctgtacgggctgatatc

SEQ ID NO: 22641 - DNA, 500 bp, Emericella nidulans
tactgcgacggcgggacataaataagacctttcctgtatggtctgctcaagattattgccgcataactcgacagaccatccacgatgaagacatcagttctatcagcaggcctgagcctcattacctcggtagtagcgtttccgcactacttggacattgagcgacgctgggagcccagagaatggattgccccaggaccagacgactgtaagcttcattttcgtcatctacttttttcggcgacttgttgacagtcaggcataagcccgcggtccgtgtccgggtctaaacaccctcgccaatcatggctacctcccccgcaatggtaaagggataacgcttgatatcctcaaagagggcatgcttgaggggttcaatatcgagcatggcgatgcggtgcttttggtcttccaggctatcaggaccagtccaaattcttttctcggacagggttcgaccctccgccgacccttcggccgggcaccggcataccttggaa

SEQ ID NO: 22642 - DNA, 745 bp, Emericella nidulans; identical to SEQ ID NO: 8065

SEQ ID NO: 22643 - DNA, 795 bp, Emericella nidulans
acgcctcccagcaacgctcgaacaagagcgcctttcaagccgcgctcagcggcgaagggcacgaccagctaccagttgagacagtttgcggaggcgacgcttggaagtgggagtctacggaaggctgtgaagctccctgagggggaagatttaaatgagtggctagctgtgaacggtgtgtttgttgtatgacttacgttgctctggctaacatggttattactctgcagtggtcgacttctacaaccagatcaaccttctttacggagctattaccgagttttgctcgccacagacatgtccagaaatgaaagcgaccgacgagtacgaggcttgcctaagctgatccgtgacgattattctgactggtggataggttcgagtacctctggcaggattcagagaattataagcgcccaacgaagatgtctgcaccagaatacatcgagcatctcatgagttgggtgcagggtaacatcgacaacgagcagatgttccccagtcgattaggtgcgcttgatttccaaccctacgacggaaggtggtgctgatgtgaatgacgcaggcgtcccatttccaaaggccttctccagtcttgttcgccagatcttcaagcggatgtaccgcgtatatgctcacatctattgccaccattaccctgtgatcgtccatttgggccttgagccacacctcaacaccagcttcaagcactatgtcctcttcatcgatgaacatcggctcgcaagcgggaaggatttctggggaccgttgggagatctggtggatagcatgctt

SEQ ID NO: 22644 - DNA, 829 bp, Emericella nidulans
  unsure (1)..(829): unsure at all n locations
cttaatattctagtcgtcggcgccggcctctcaggcctcgcaacagccatctcttgcgcccagtccggtcacaccgtcaccgttctcgagcaggccgccgagcttgcagaagtcggcgctggcctgcaagtcacccccaatcgctcccggctcttcaatcactgggtctccgccaatccctctggcgcgaggcccccgagccgaagaccctcaccgtgcatcggtatacgggcgatgtcctagcgcatgacgccttttttgacaagcatatacggcacggctacggcgcaccgttcgtagatgtgcaccgggtggatcttcagcaggcgttgtacgcgcgggcgaaagaactcggtatcgtcgtcgtccttgcagagagggtgaagagcatactagatgcgcgtgatgcagagacctcaactgcgacagtcctcacggagtcaggaaaaacctacacagccgaccttgttgtcgcggcagatgggctctggtcgcgctgccgcgagtgtctcctcaaccgcaaagacgagcccctgccgacgggcgacttggcgtaccggattgtgctgcacattgaccagatttcggatcccaaattgcgcgcatttgtgcaaaacccgcaggtccatttctggattgggccgggggcgcatgttgtctcgtattctatgcgtgggggagacatgatcaatattgtgtgctagtaccagataccctgccccctggagtgtcgagagaggcangctctgtagaagagatgaggggactgtttaaagggtgggatcctgtgtatgtctctcctaccatgtgcaaacatacagacttacaa

SEQ ID NO: 22645 - DNA, 454 bp, Emericella nidulans
gtctattcctcattccttgcctccttttgccaaggcctcgaactgatcgcgcgtgcctccgaagacgaaggctgggacattgatctcggaaaatgccttcagatctggcgctcaggttgcattatccggtctgaagggatcgccgatattctgcagcctgccgtgtctggaaacaagggtatcaaaaacatgaagtatatcgacaccgtcgcgcaggagctgcaccggacctacccctcattgaaggagatcgtgatggcggccactgactcagaccactatatccctgctatttcggcgacattggagtatctgaagtatgaagggggaacaaacctcccgacgaagtttatggaggcccagatggatttcttcggcgcgcatggctataatctccctggcgtaccgggagaggacccaggacctgtcagtaaggggccgcatcactatgaat

SEQ ID NO: 22646 - DNA, 850 bp, Emericella nidulans
ttggcttcatcagcaataaacagccagttctggagaaacaccttcgggatgctatggcatcctcatgcttctgccaactaagagccaattccactgtccttgagatccagcaggacgacgattggacgtattgtcggtatcgcggattggatggtgaacttcgttctatacgatccaggtttttcgtcggcgccgacggcaagaccggattcaccagtaaaaattacctcgaaccattggggatactgatggaacaagctcatgggcaagtctttaaaagcaagccagatggcattcgaaggtggactactaacttgtcgttgtagtgctttctatgacgaaacatgggtagcgctaaactggaaggtaacattgcctacgatggcaacacaccctgatttcccgctctggaagctgaagtacacgccggagcaggtatacgacctttttttccactcgaattttcgatttctgtgcaatcctaagcgcccagctatctgtacgcgatttggtctcccatcagaccggctctggaggtttgaatttgttgtcttgaagggcgaggatggtgatgagatggcttcgcctaaaggacgcgagaagtcattcttcccctacctgacgcatgcaggaaacgatacgggtaagctgattgtggtgttactgatggtgagagaatgtagctgagctatggttacaggctcacgcaagatgtgcaatatcccgggaactgcatcagcgtccttaggtcgagaccgttccggttatctgcacgcagctgcaacaagtggtctcatggccgcgttgtcttgtgtggcgatgcggcgcacgtgttcctcaatgtatggcc

SEQ ID NO: 22647 - DNA, 635 bp, Emericella nidulans; identical to SEQ ID NO: 10690

SEQ ID NO: 22648 - DNA, 850 bp, Emericella nidulans
ccctttctcaatagagaaaacagagatacaatacttctctagaaagcagcagcagcatctccccacagttactctacctggtataggggagattacactatccctatatacacagtagttaggagttcttctggatacaaagcttacttttaaagcctatattaatttggtctttagccgcgggaaacgactcgcccagcacctaaagagacttagcaatacccagcacagctgcccagtggcctccatgcaggcagcagttatacagtatattcttccaacagctctgtacagggcagaagtcttctatacaggcaaatgacaaaaaggggtagttaactccctgctttctctcttctacacagcagccctggctattatcccagcctacaagaccacccctactgcagcactcctccgcgaagcagacctaccagacccagaagctctactcaacagcatcctccagagggcagcagtgagatatatgagccttgatactaaacacccaattgcctaaatagccgcagagactaccgcgggcaggcccaaaaccaggcttaaaaggatcctacagctcctcctcagccccctgccagagcgcgctataatagagctgcctctccctccattatgcatgctcccaacagacaacaaaggctacagccctgcccctttacagatttcagtgtacttagatggctcacggaccagccagggggcagggtatggctatgcaatctactttggccctatcctcgtgtccaagggacatggtcccgcgggccccaggacagaagtctatgatgcagaaatcatgggtgctgtggaaggcctacgcgcagccctg

SEQ ID NO: 22649 - DNA, 676 bp, Emericella nidulans
actatgagctgccttggtacgctgcattatggaagcaccagagcttcgaaagttgacaacctactttagggtcgaaaaataccgcccagtatttcttgacgacgttgtcggcaatacggaaacggtagagcgtctaaagatcatcgccaaagatggaaatatgcctcatgtgattatttcgggcatgcctggtattggaaagacaacttcaattctctgcctggcacggcagttgctgggtgactcttataaagaggctgttttggagttgaacgctagtgatgagagaggtatagccgcccctaagttggcaataatagtgttttaactcgtcggtttatgaaggtatcgacgtggtgcggaatcgtatcaaagggtttgctcagaagaaagtaacgctgcctcctggtcgtcacaaaattgttatacttgatgaagccgataggtacgtgtacgcacatgtgttctaaacttgccacttacggggtttctagtatgacatccggcgctcagcaggcgttgcggcggacgatggaaatctactcctctacaacacgattcgcatttgcgtgcaaccaatcaaacaagataattgaaccgttacaatcccgatgtgctatccttcggtacgccagattaactgatgcacagattgtgaacgattgaagcaggtttg

SEQ ID NO: 22650 - DNA, 601 bp, Emericella nidulans
taacaatcacttcctgaacacgccgaactcgacctgttccaggatggtcttttatcatggtacaaccgcctctttcagaattcttcaggtgtcagtacaatgcagtgaactgaccggctacagttttcttggcgacgactggtctttattgtcttgacaggtatcggtgtcctgcatctcgtctcgctcttcttcattcccgagtcgccccgctggctcaccgagaaaggacgagaagacgagacgaaggttgttctggaatacctgcaccacgaagaacgatacccgtgctacttttgcctatgcggacgcgcagcagatcaaagcgcaagatctgagcggaatacacctcgcgggtacatgcatattattcggacccccacgtaccgcaagcgtgccctctgctctattcggctgtgggtgatgagccagagaacgggaatcacggcagttgcgaactccatccccacgcttatgggcaccctgggatctggcacaaccatgcagcttggccttggtgtcgtctggaccgtctgcgcggttatcgggtgcggtataaacgtcctgctgctggatcgggtcgggcgtgtaaagttgcttg

SEQ ID NO: 22651 - DNA, 757 bp, Emericella nidulans; identical to SEQ ID NO: 5984

SEQ ID NO: 22652 - DNA, 701 bp, Emericella nidulans
gcggaacctggaagccgcaagatcctaatcatcggggccgggtttggaggtctactgtttgccgtgcgtttgatccagactgggcgatttaccgctgaggatattaccatgatcgacagtgccgcgggcttcggtggcacctggtattggaatcgataccccggactgatgtgcgatactgagagctatatctacatgccccttttggaggaaactgggtacatgccccggaacaagtatgcgtcgggcaacgagattagggagcacgcggagcggattgcacaaacgtacgggctggcaactcgagccatgttcaggaccgtagtcgaaaagctggattggaacgaggcggaaaaagtctggacagtagctggttctatgctgggcattgcaaataacgggcaaagggataatatgatgtcttttcagatggtttcacaatttacgatcatggcctcgggttcattcgccagtccgagagtcccggattatcctaacatattcgactacaaaggcaaattgttccacacagctcgatgggactacaactacacgggaggctccgtggaaaacccgaagatgctggggttagccgacaagacggttgccatcattggaacaggggccagtgcagtccagattgtgccgcagctggcaaaatatagctttagctggcggccgttactattactagaggatcc

SEQ ID NO: 22653 - DNA, 526 bp, Emericella nidulans; identical to SEQ ID NO: 8422

SEQ ID NO: 22654 - DNA, 628 bp, Emericella nidulans; identical to SEQ ID NO: 14547
  unsure (1)..(628): unsure at all n locations

SEQ ID NO: 22655 - DNA, 850 bp, Emericella nidulans
gggagatgtggaaaatatctttggctctctcgcgtcctccgaagtgggaatagctcaagaggaaagtaccggcttgatgcaatttcccgagttccaagccagccgatgtggaggacgacttcgcgagtgaactcgagccggtcggcgagatcgttgagggagggtagaacaaaggtacttgacctgcttacggttctaccaccgctgagactgaccaattgatagatctagtacttgagaaatggaaggcgaagcggaagcactacataatactttccgctgctggaaagccgatctggacaaggcatggcgacggcggtctcatctccacatatgtcggcattatccaaacaatcatttcatcctacgaagactccaatgaccggttgaacggcttcacagctggcgacaccaagtttacagtcgttgcgaaaggccctttatacttggttgccattagtcgaattcttgaaagtgatacccagctcaagcttcagctcgaggcgttgtatatgcaaatcctatccaccttgacgcttccagcgttgacccatctattctccgtgcggccatcgaccgatctgaagcgtcccctacaagggtccgagaccctactttcaacattagcagacagcttcactaagggctcgccatctacattgctttctgccctggagtgcctgaaaatccgcaaatcgcaccgtcaaaccatcaacaacactctcttaaaaacgaaggtcagcaaactgctatacggtctcgttgtcgcaggcggtcgtctcgtcagcgtcgtcaggccaaagaagcactcgctgcaccccggcgatctccagcttttattcaatatgat

SEQ ID NO: 22656 - DNA, 850 bp, Emericella nidulans
tcatatggcagcctcaaagctattctggccaagccgccttctgtcgaactgcctactctcaacgggtggaaatacagcgacagtcttcctgagcgattcccaacctacgatgactcgggcgctgcatgggttggtaagtgtttacatcagtaatggagtagattggaaacattaattagagatagatgcgaatcatatgacaaccccgaaccctaacaaaccagctacactgcccgtcctctatgccgacgaatatggtatgtattctctagtcaccccaaataacaagcagctaacaaaccgcaggattccacaacggcgtgcggctatggcgcggctacttcaacagtagcgcctcaggcgtttacctcaacatccaaggcggcgccgcattgtacgttgttattcccagcctagccctgacaaaacaagaaactaacgattactcttcctcaaagcggctggtccgcctggctaaacggccacttccttggctctcacctaggctcggcctctattcagcaagcaaatggcaccctcgacttcccagcaaacactttgaacacagagggcacgcccaacgtcctcctcgtcgtccacgacgacacaggccacgaccaagacaacaggcgttcttaacccacgaggcattctcgaagcgcggctactctctgaagcttcagacaacaacgacgatgactcaccaggattcacgcactggcgcgttgccggcaccgcagggggggaatcagacctcgaccccgtccgcggcgtctacaatgaagacggcctgtacgccgaacgcgtgggttggcatcttccgggattcgacgacagcaagtgggccaca

SEQ ID NO: 22657 - DNA, 838 bp, Emericella nidulans
accgagagaaaaagaacaccacaaagggaggtaaaaggaaaaaaccgggcaaaccccgcaaaaaagaaggaaaaacggagaaaagacaagaggaaacggggaaagggagacaaagaaccagagcggaagaagcaaggcagaacaaccgaaaacagaaagaggagcggacaggaaagcgaaacggcaggcgaaagagaaagcaaaacagcaacaaagaagaaaccacaccacagagaagaaccaaaaaaacaacgaaaagaaaaaaaccacaacacggatggggacagagaagcagggaaaaggacagagagagcaaacgacaacaaaaaaacgaagggaacaccaaccacaagaaagaaacaaaaaaccggaagaagtaagaacaaaaagacaaaaggaaaaaagaggaaaaacacggaaagaagagaacgaagaaacagcaaaagaacaccagaaaaatagagaaaaaagaaccaaaaaaaaagaaaggaaagaacgaaaggaaaaaaaagaccacgcaaaaagaaagacaggaaggaaaacaaaggaaaacaacaacaacagaaatgaaaaaaaaaagaccgaaaagaacaaaaaggaagaaacggacaaaaaaaaaagaaagaaacaaaaaacacaaaagggacaaggaaaagtagaaaaaacagaaagaaaaaaaaaagagaagaaaaccaccaaaacacaaaaaaacggagggcacgcagaagaaaaaacaagaacaggaaagaggagaaaaaaaaaagaaacaagaacaaaaagggagcaacaggaaaagaaaaaaaaaaccggacaccaacaaaaacaggaagagaaaaaa

SEQ ID NO: 22658 - DNA, 607 bp, Emericella nidulans
atcgttctttttagctacggcgtctcgtttgcagtaatatggcatacatatatctcaatgtcttttttatccagatgcttaaggtacgcatgtccagcctgccccttcgtctcacaggatataggacgaaataatgaagactgaactctaatggacggcatgaatcaggcctctggacctgtgataacgctcctcattagcgccctctacggcgtcacagaactgaccgcggccaagctcgtcaatgtggccgtcattacagccagcgtcgggctgactgtcgtcagcgagatccagttctcctgggttggtgtagcggtgcagcttgttagtttggtttgtgatgctctcaggctggtgcttatgcaggttctcacttccacctcttcctctttgtcctcgcctacattggagacgcataatgcagaaacgggcgaagagcccggtccactcggcaccgatacactgcatgaaacgagctccaaagacgaggaagaggcatcgacaagcgaaaacacagcccggggacagagccagagcctgagactcaccaatatggatcccctcctgagcctttactacacagcccccatttgcgccgtgatga

SEQ ID NO: 22659 - DNA, 500 bp, Emericella nidulans
cccgactccagccccagactttcacaaccccgttgagcatcagtcaacgagtccagtttcgcagctacagcgatggaaggcctacggtatcggctacacctccacctccaaagccccgacagcctattggcgacgacattaccatcccgtccgcaatctcctcagcaacccctggcgtctcgcagcccttgagcaccccggagggcgtccatattgatgtgaaccccacaaaagctaccaagccagtcgagcgtcccccaagctcctgccctgccggaacgcctctagcaggcctcaactacttcaagaacaaaccagaggttgtggctctggaggactccgagtaccccgattggttgtggtcattgctggatagcaccaacaaggaagccaagaagggcggcgtggatccaagcagtatgtatctcgattttcaaaggacgtggcctcgaaatgctgacttacactcctttagctcttaacaagaagcagcgcaagcg

SEQ ID NO: 22660 - DNA, 407 bp, Emericella nidulans
gcactacgtatcatggtccaatcctcccgcgcttgacatgaatgcggttgtagcctctctggaactgttcatccttacatccatggccgagattcgtcaagggggcctcaatgaaacaggctataagagagcatctcctccttgcgtctcttgatggagtttccgacaagcctttttctatcattaccccgccgaacccctcagaacgcggtgctcagctaagtttgcggctggctccaggtctcctggatagcgttttagaaacgttggaagaatatgcagttgtgatcgacgagaggaagccagatgtcattagggttgcacccgcgcccttgtacaacacgtacgaggaggtgtggcagttttgccagattttttcagaagcctgccgcaaagctcttgaaaag

SEQ ID NO: 22661 - DNA, 850 bp, Emericella nidulans
cgagaacgtacacatggccggcggttggtccaacaacttcgactctgagaccgactggaacctgattaccaagcctatggcgggggtcgataaccgccaggtcaagctcagtcgaggccggttcctcggcggcagtagtgggtgcaatggcaccctctgcatccgcggcagcaaacaggactatgatgactggggcttggagggctggagcggcgatgagttcttcgaggcgatgaagaaggtacccctccctttcttttggctttcgtcatccccgcactcgatagatgaaacgtgctaaagagtcagtccgaaacattccatggcaagccctggttcaaggccgacgagtcggcccacggctactctggccctctacacaccgaaccgcacgacctcgcccccatcgctgaccggctgatcgactccttcgttgatcagggccttcccctgcaccacgacatgttttctacgggcgacgtcccccacggctgcggccacgtcccccgcaccgtctacaagggtgtccgcaccacatcggccgacttcatcaccaaggagtacgaccgcaccaatatcactatccagaccgacgcgacggtcgatcgaatcattatcgagcggaaggacgacggcctccgggcagtgggtgcgttaacccgctccgcagacgggacaagcaaagcctactacgcccggcgcgaagtcatcgtctctggaggcgcatactgcagtccagcaatactcatgcgctcgggtatcggagcgcgcgacgagctcgcccaatttggtatcgactgtctcgttgatctcccaggcgtcggcaagaatctgatggaccacctcgtac

SEQ ID NO: 22662 - DNA, 649 bp, Emericella nidulans; identical to SEQ ID NO: 14079

SEQ ID NO: 22663 - DNA, 850 bp, Emericella nidulans
ataaagaagaggtcgagcctcttctcgaccagacactcgctatcgtcatcaagcattgggtgacctttactgaggataccaggaagtttgcttacgagctggttgagcatatcttggagtctcaccaggaacttctgcgagatatctttggtatcatgccgtccttggcttctatacctgtactctctcggttcgaggctagtattaatgagttgaaagggacactggatgttcggagtcatttcatggctttcgcccgtcgttgcctgagtgaaaatgccactgtcgttgagcaggccttgacggaacttgtctcgtaccttgagagacacgaggagttcgtccacagatctgttctcagcgagcagccagatccagctgtcgcacatttagttaggtctctacttgactgctgcgtgaagttcaacattacgtcggaatccatcaccttgctttgcgctcgctgtcttggccatatcggctgcctagatccaaatcgggttgacacaatcaaagagaagaaagggatccttgtattgtcgaattttgataagatggaggagacattcgacttcgtactttttttcttccaacacgtgttggttgacgcctttttatcagcgttcaataccagggcttaaggtttcctagcatatgccatgcagaatttactgatgttctgcaacctgaactccgccgttacccagcgttcacgcggtgtcccagcttgctagaaataccaacggtggttagagctttccgaaccttgcgaattacctgccccctttttgccttaagaataccgttctatcatgaccctagttcaatgcactttcatgttgtctcggat

SEQ ID NO: 22664 - DNA, 850 bp, Emericella nidulans
ctgctgaccatattgttgctacatactctgcacttcgaaacgatgagctgtcagcaaatcagcgacgaacatcgccaatcactgcccgtaccctagagacgctgattcgtctttcaacagcacacgccaaagcccgcctgtcaagccgggttgaggagagagatgccaaggtagcggaatctatcctgcgcttcgcgatgttcaaggaaatcgtggaagatgaacgccgcaagagaagaaaggtcaccaccttcgacgacgattctgagtccagcgacgacgactcagatgaggatggcgacgacgaccaaacccctacaaacgcctctgtcactcctcgctctacccggagaaacctacgtacccgagcgccagcagcagcccgttcttcgacaaacgaggacgtggaaatggacgccgacggcgacaatgtctacgtgggtgaagatgatctgcacaatgcctgataccggggggagctggaccagtccagccaatcccaaatgtccggtgtgatgccccggccggcctcacagctcatcggttcccagacagacacttcacaaacacaaaatgcatccgcgtccgcgcccgcatcctcccagacaataacgcccgcgcgtctgacactcttccgacaagcactagggcctttgatgggcaccgcgcttttctcttcatcagacactgccgatcttgaggagcttattggtgccgtgaacgcggctatccgttcttctcgctcactaggcggcgaatcggcggtcttccagcggccggaggcaatccaagctttgaaagctatgaatgagagaaacgaattgatgtaagtggttacctttaccgttct

SEQ ID NO: 22665 - DNA, 850 bp, Emericella nidulans
gtgtggaaccaaagccctgaacgcgagcaagtgcgcgcagaactagcacggatgaaggccgagctcttacaaaagccagagcctccgagaactcctgagtatggagagttcgcaatgccgctctggtcacagtttctcatttgcctaaagcgaatgtttcagcagtactggcgcagtccatcctatatttattcgaaggccaccatgtgtgtgattccggtatgttcccttctatgctttgaacgtgaaaggaaactaatgatgtagcctattttcattggatttacattttggagagagccgctaagtctccagggaatgcagaaccaaatgtttgccatcttcatgttacttgttatctttcccaacctcgttcaacagatgatgccgtactttgtcacacagcgtgcgttgtatgaggtgcgggagagaccatccaaggcgtattcgtggaaagctttcatgatggccagtatctgtgtagagcttccttggaacatcttgatggcagtaccagcatacttctgctggtactatcccattgggctctatcgcaacgccggtcctggcgaaacggtcgagagaggaggcacgatgtttctgctaattttaattttcatgatgttcacgtcaaccttcagctccatggtcattgctgggatcgagcatccggatacgggtagcaacatcgcccagttgctgttctcgttatgtctcattttcaacgggtaagagatctttcttgatgccatcgctcattgcaaacagctcagtgtacttgcaactccccaacaaatgcctagattctggatccctatagtgagtcgtattatgcggccgcgaattctca

SEQ ID NO: 22666 - DNA, 362 bp, Emericella nidulans
tcactcaatgcaaacacaccaagcgctcgtccagcacgagccgggtgaagtcacataagaagtcaccgtcgggaggagacgacgacgatgacgagtctatgctcagcagtgcagaactctccgagtctgagaacggcgatatgcatatagacgaggaggaagaggacgagggcaacgaggatacgaaggtgtactgtacatgtcggacggtcagccatggcgacatggtggcgtgcgataacgatgattgtaaatttgagtggttccattggaagtgcgtcgggttgacgagagagccggttgggaagtggtattgccctgattgcttggctgcgaaagggggtgaatagtttcctcttcag

SEQ ID NO: 22667 - DNA, 500 bp, Emericella nidulans
aaatctctatattaacacgaagagatgcaaggtttattcacccatccatgcattcatcctacttagcaaccataccaacactcctatcaaaaccatgaagcacctcgcagcctatcttcctcactcttgggggaaatattgagcctggtgccgacgatataagagaagttctggcgtctgttggaattaaggccgacgaagtccgcgttgctcagttattgaatgagttgcgggggaaagatattcacgaggttaacagttcacctgagtcttcttccgagtagggtgtacaatacaaaaggagagactaacataaaccagctcattgccgaagagcatccaaactcgctacgcttgggaccgttgaagctggaggtgatcctgggcctggaactccagataatgaggggggaaagagagacaaggaatcgggtaatttggatgttgacggtgaggatggagaagacgaagacgaggatttcggactggaactatttagt

SEQ ID NO: 22668 - DNA, 832 bp, Emericella nidulans
cctgagcctccgtttcggtggaagagggcgatgagatgtatatcagaactggaaaggactacattgctcgtacgtatccatggtgacaagctcgcacgttcagtagtgacttttccagctgcttctccctggttcttcacccatttcggccctgaagtcccgtacagcaagaactgggtcttccctggagatttgttgtggtatgaccgctggcagcaactgttgaccatgggcccacgattcatcgagatcgtcacctggaacgattacggcgagtcgcactatatcggcccattgagctcacctcacactgatgatggggcatccaagtgggtgaatgacatgtaagccagccgccccccctcaccggtccaggtggctatactgactgcccaggccccatgatggatggatggatatgtctaagccgttcatcgccgcgtacaaggacggcgccacctcggttgatgactatatcaccgaagaccttctcgtgtactggtatcgcccggctccccgtgatgtcaactgcgatgccacagatacttgcatggtccccgccaacaatgccagtggcaattacttctatggccgcccgaatggctgggaaacgatggaagacgctgtgttcgtggtcaccaccctgactgagcccgccactgtgacggtcaattctggaggcaatgtcgaggtctttgatgcgcccgctggagccagcgctttcaaggtcccgatgggcgtgggctcgcaggcgttttcgctcagtcgtaacggacaggtcatccagtcggatatcagtcttctgcccgatcattgatgactaagtttgcgg

SEQ ID NO: 22669 - DNA, 850 bp, Emericella nidulans
ccgttgcgggactatgtcaattttaagcggtatcaaatatggccgcactattttgcctaatggagccatgcccgtcgtagtcctgactgagatgatccatttttttatgcggggtatatacgcgagtgccctacataacccccatattggatatacacgatcactgaactctatcacgggactttttctgctctttctgtcagaggaaaaggcattttgggtgtagcatatcgttacatctgtctacctaccgagcacccccgaaatcagccttgagggtgcaaatgtcgatctttggatcataatggtccttctgaaagagtcgttaccgaacgtgtacaacaagatcgcagatacagggacaaaaaggagcgctccgctctctgtaaactcaaggctgcccgacattactctcggcataaccaattggctcatgtccgtctttatcggcactttaccactcgaaacaacgttgcgagtctgggacgtgttcttctacgaaggctccaaaaccttctttcgcgtctccatggcgatcttcaaagcctgcgagagggaaatcatggctgtttcggaccccatggaggttttccaggtcgtgcagaccgtgcccaagagacttttagacgccaatgcccttctggacgggagcttcacccgaaaaaaccgtgttggacagggtcgcatcgaagaactaagagcagcgcgacgcgcagccgtccgacaggataaattgcggcggtcgcaagctctgacaaagggcacgctccatgcagcgacggacgaatggccgacgcgatctcggaccccgatcccaggcattgaccgcacctttgctgattcctggcgc

SEQ ID NO: 22670 - DNA, 602 bp, Emericella nidulans
acacacacctcagcgggtgcttggagagctttacctcgccggagaagcttatggccgatgtatacaactgcagcggctgtggcaaccaccccccagaaggcaacaaagcagctccggatcaagaaactcccggcgattctgtgtatgcagcttaaggtaaacaccatatccgtgacggcaagacaacgagatatcatctaccagaagcagcgctttgaacacaccttttccgtctcagaaaaagttgaaggccgtattgacttccccttatcaatcaatatgcttccatacactacgaaccccgactctgccgttgacaaatcacggtacacgtatgacctgtcttcagctgttgtacataagggcaaactcgaggcggggcattactacgtctactgtcgccagggtgatgaggtttgtttctcttgcttgcatatttactctcaccatctaacatcgccataaaacagtggatgctcttcaacgacgatcaagttacccctgtcactgaggcggaagtcctcggtgttgacgcttatcttctattctataatcttcgctgcctggccaatgctgcgtcgtagcccagccagcgaccatta

SEQ ID NO: 22671 - DNA, 850 bp, Emericella nidulans
tatctctgagaccgcttccatctttgctggtgttgatgtgaccaagcagcccatccccgtcctgcccaccgtccactacaacatgggtggtatccccaccaagttcaccggtgaggtcctgacccaggatgagaacggcaacgacaaggttgttcccggtttgtacgcttgcggtgaagccgcctgtgtctctgtccacggtgccaaccgtctcggtgccaactccctcctggatctggtcgtcttcggtcgtgctgtttctcaccgtgtcaaggagatcgcctcccccggcaagccccacgccgagctggcctccgacgctggtgccgaatccatcaaggaccttgacactgtccgcactgctgagggccctaagtccaccttcgagatccgcaacgccatgcagaagaccatgcagaccgacgtctctgtcttccgtacccaggagagcttggatgagggtgttgagaagatcaccaaggtcgaccagttgttcgaccaggtcggtaccaaggaccgcagcatgatctggaactccgatcttgttgagactcttgagcttcgtaaccttttgacttgcgcgtaagtaccacaattcacagatacaacatggaaaccaactaatgacatcagcactcaaactgccgttgccgccgccaaccgcaaggagtcccgtggtgcccacgcccgtgaggactaccccgaccgtgacgacgagaactggatgaaacacactctcacatggcagaagaagcctcacggcaaggtcgagatcggctaccgcagcgtcgtgcacaacacccttgacgagaacgagtgcaagcctgttcctcccttcaagcgtgtctac

SEQ ID NO: 22672 - DNA, 850 bp, Emericella nidulans
agatgtggatcggcgagtggctgaagaagcgcggtaaccgtgatcagatggtgtatgtccaacaccattttctcccagtggtctccctgatgctctatctcactgattttcgttcagcattgcaacaaaatatacaaccgggttccgcacctctcactgtgcgaccgagcctcttcaatccaacttcgttggcaacagcttcaagtccatgcgcgtctccgtcgacaactccctccgcaagcttcagacagactacatcgacatcctctacctgcactggtgggactttacaacgagcgtggaagaagtcatgcacgggctcaatagcctggtaactgccggaaaagtgctctaccttggtgtgagtgatacacccgcatgggtcgtcgtcaaagcgaacgactatgcgcgcgcgcacggcctcaagcctttctcggtctaccaggggaagtggaacgccggctaccgcgatatggagagagagattgtccccatgtgccgcgatcaggggatggggggattgcgccgtgggcgccgcttggtggcggcaagtctaagagcgcagacgcccggaaggctgcgagcagcggggggagtaaccgcggagcgcagatgagcgagagcgatatcaggaactcagacgcgcccgaaaagattgcggagaggaagaagaccactttgcatgctatcgtgagccacccttgccagtaccccatattgtattcgatcactgaccagtgcccatgccaggcccttgcatatgtcatgcacaaaacgcccaactttttcccatggtggccagcacaagaccagcattgaaggccacattgagcgtgagaattcctttttg

SEQ ID NO: 22673 - DNA, 653 bp, Emericella nidulans
tcaaaacgaggccaccggtaactggtggtttcgcggcgagaacgagctttttctggtaacctccttcagcaagctgcaatctttttccatgggtctccctggtgctcccgacacagagggctgccatggaggtggttaagttttgggaaaccaagcaccacgccctcactttcactattgaagatggtctcaacgccctatcggatgttatctaccatctggagacatacgatgtgaccactatccgtgcgtccacccccatgtacctgcttagccggaagatcaagggacttggagtcaagatggttctgagtggtgagggtagcgacgagatcttcggcgggtacctctacttccatgctgcacccaacaaggaggagttccacaaggaaaccgttagacgtgtaaagaacctgcacttggcagactgcctcagagccaacaagtcaacatcagcctggggcttggaggcgcgagttcctttcctcgacaaggccttcattgagacgtcgatgtcggttgatccccaggagaagatgatcacaaaggaccgcattgagaaatacatcctgcgcaaggcgtacgacacttccgatgagcccgacgtcgagccgtacctgcccgacaagatccctatagtagtcgtatatgcg

SEQ ID NO: 22674 - DNA, 328 bp, Emericella nidulans
ctcaccggtggtttaaaaaacctcgcgaattaacttgggtacctggtgtggttctgggtgtattgaccgcatcttttggtgtaacaggttattctttaccttggatcaaattggttattgggcggtcaaaattgtaacaggtgtacctgacgctattccggtaataggatcacctcttgtagaattattacgcggaagtgctagtgttggacaatccactttgactcgtttttatagtttacacacttttgtattacctcttcttacggccgtctttatgttaatgcatttcctaatgatacgtaagcaaggtatttctggtccctga

SEQ ID NO: 22675 - DNA, 612 bp, Emericella nidulans
agccgggcgctagaaaaaaaaacccgtgaagcaggaaacacgggacgaggcgacgcccaagaagggctacgcgctgtcaggccacagccgagcacatgaccgggtgcgtccgttttcaaaggaagaagcggccaacacacaagacccgagagccacacgaccagaagacgcacgcaaggagcatcgcggaccgaaaaggggcgcgcaggcgaagcccgccgcgcctctataccagggcggagcaccgagcgcggtgaccagctaagcgactgaaaacagcccgacgcggcccaaccagactacctgacaaccgggcggtgcatgagcaggccaaacgcagaccagagggcggcaaacccagaaacgcaccagtcacgtgccccaggccccaaagcaccccaccactccaccccgggagctggctcccctcccagcccaggggccaaccgcctaccgtgccccggcccagcacaaccagacccaaccggtacccatcccccaagacggcccaaatcggaccagggcccccagggggcacccaggcacaaaccagcaccccgccgcacagaccaccccgcgcaaaatggccgccccccagcaacccccaccctg

SEQ ID NO: 22676 - DNA, 686 bp, Emericella nidulans; identical to SEQ ID NO: 6556
  unsure (1)..(686): unsure at all n locations

SEQ ID NO: 22677 - DNA, 626 bp, Emericella nidulans
atgtctggacttaaggccggtgacagcttccccgctgacgttgtcttctcgtatgttgctctaaattcttattagtacaattgattttttttaaggctaactattgtgtttaacagctacattccctggactgaggagaagggcgagatcacctcttgcggcatccccattaactactacgcttccatggagtgggccgacatgaaggtcatcctcttcgccctccccggtgccttcaccctcgtctgctctgctcgccacgtccctgagtacatcgagcgcctccccgagatccgcgccaagggtgtcgatgttgttgccgtacttgcctacaacgatgctttcgtcatgagtgcctggggtaaggccaacggtgttaagaacgacgacattggacgttcacctctcaagtgttagtgccatagcacatccactaatgatgcgcttatctttcacttcacgaccccgaggccaagggctccaagagcatccgctgggccgacgaggagggccgtaccaagcgttatgccatcagactcgaccacggcaaggtcacctacgctgctctggagcccgccaagaaccaccttgagttctacagcgccgagactgtcatcaagcacctg

SEQ ID NO: 22678 - DNA, 780 bp, Emericella nidulans
atggaatcgagtatggatattaagataggtgagtcaagaggccatggcgctaacagttcttcatctgactgaatttaatgaaaacctgtagaagagtcatttcaggaagagactgcgatcgagcagtcccgcatcgaaggggtgacgctgcgaactgagggcagccgacggatgactcctttgcaaacgatttctgccagttggattatctgcgacagctgggccggcgttgcagccactgtagctctagcgactgttcaaggagggccggtgactctcacctatgggctcattgctatgttcattctggttggagcctgtgtgctttcattgggagagttggcgagtgtatatcccacggccggtggacagtatcactggacttccattttagctcccagacgggcgagacgggtgatggtatagttctctatccagatttcctgacttttgcatactgacccggtacaagagctacgcctgtggaattgcgaatatgttcgcctggattgccatctgcactgggattgctatcatccctgcgcagcaaattatgggaattgttttgttctactatccagactttaatgctcagccgtggcattactttctgatataccaggctatcaatggactggtgatgctatacaatattggtctcctccaaaggtcactctggatccacgatgctgcctgtaagtgtcaactcaacaatagtatagtcccaagctgtcgctgacagccatcgtctagtcttgatgactcttgccacctacttcg

SEQ ID NO: 22679 - DNA, 622 bp, Emericella nidulans
tttcttggtaggagaactatgtgattcgcacatgggtccaaaggtcgtagcgagcgcggcgaatcagtgacaggtttttgcgtgcgcacccttattctcttatttatgaccaaatgcgaactgtgttccatgctaatttttttcttttctcatctattcagacacgaatcggcgcacacattcggcgcataccacgactgcgactccagtacatgctcactttccggtagcagtcgacagtgctgtcccctctcagaatcatcctgcaatgcaggcggcgactatctcatgaacccgatctcggcggcgtcgcagtctgagttttcgccatgtacaatcgggaatgtatgttcatcgatcgggtcgaggagggtgagcatgcggtgtttaacgacgaacaccaacacgccaaccatctcagcaggcgagtgcgggaacggaatcgtggaagctggcgaggaatgtgattgcggagatgagtgtgatgggaatgaatgctgtgatggctcaacttgtcaatttagaggggatgccgtttgcgattcttcctctggtgatggaggatgttgccgggattgccagttcctctcagccggaacggtctgccgtggtgctggtggcg

SEQ ID NO: 22680 - DNA, 850 bp, Emericella nidulans
tgtcttgcacgatggtgctccgaacgtcggtacggcgtgggttcaggatgctttctcccaagcggaactggtgctcgaatccctaaaactcgctacagagtttcttgttgagggtggtacatttgtcacgaaggtcttcagatccaaagactacaaccctttactttgggttttcaagcagcttttcatgtctgtcgaagcgaccaagcctccgtgcggttttaatgtgttcgccgaaatcttcgttgactgccgtggttacaaggcaccgaagcgcattgaccccaagttccttgattccaaacatgtttttgccgaactggcagatcctactcccaacaatgaggccaaggttttcaaccctgagaagaagaagcggaagagagagggttatgaagagggcgattggacacaatttaaggagatccctgtaacggagttcatcaacaccacagatccgattgcgattctcggttcgtgcaacaagcttagtttccagcaacaacccggaggagaccttgctttagccactttggatcgacttccagaaaccaccgacgagatcaggaattgctgtgaggacctgaaagttctgggtaagaaagaatttaggaaccttctcaggtggcgtctcaaggttcgcgagaagtttggactggtagtaaagaagggacaagccaaggatgatgaagccgaagaggttgccgagattgctcctatggatgatgagcttgcaatccaagaagaacttctccgtcttaaggaaaaggagagtgctagaagtaagaaggaaaggcgcaaggaaaatgagaggaaacgcaaagagatcgttcgaatgcagatgcacatg

SEQ ID NO: 22681 - DNA, 752 bp, Emericella nidulans
actgcgatcttgatcactgtgcctctgggcctcttgctttatctccttttcatcaggccgtctatcgcaaaaaagcaaaaggcaccactcccgccaggcccgccaccgaagccactcattgggaatctgcgtgatctgccgtctccagaccagaaaaactgggtgcactttctgcagcacagggatctctatggtaaggatgaccctcgggatcttgcatagagaaatactcttgttcatggatatacaggcccgatcagttctttgactgtctttggacagacaatcgtcattctcaacgatgcgcgcgtcgcattcgacctgctcgagaagcggtcgaacatctactcttcccggccaaggatggtcttcgcaggagaaatgtattactctgtaccttgtctaacctgagaacaataagctaaatggcatagggtcggatgggagcacatcctcgcaatgcaaccatactctgacatgtttcgcgcgtaccgcaaagccatgcacagagtcctcggcacgaagaacgtgatcgcacaattcaatgagctgcaagacgtcgaagcccgccggttccttctgcgagtcctcgagaaaccgggtgacttggtgcagcatatccggacgtgagttgcgctacccgtgtccatttgttggaaaagaaaaaaaaaaaaaaagaaatgaaatgaaagaaaaatagcataagattaagaaaaagaaaagaaaatgctaacgcttctagcgaaaccggc

SEQ ID NO: 22682 - DNA, 850 bp, Emericella nidulans
  unsure (1)..(850): unsure at all n locations
gagtactgcttagctggaacggagcaatactgcctgaaaggcacaaacccccttcaccacgaggacggcagttttcaggagtacatcgcgcttgatgcggactacttgactattctcccagatgacgtcgatcccaagactattgctccagtactgtgcgccggaattactgcatacaaggtagaatgggccagggcagggtatcgatccacatgctaatgatattccaggcagttctaggagcaaatatcagggctggacactggctggttgttgttggggcaggaggagggctcgggcatatggcaggtgagattccaatagagaggcatcttaaccctaactcacgacaccgagaacaacagtccaatacgccaaagtccttggagcccaggatgattggcatcgacgcccccgacaaaacgcgttttcgttctgagtgtggccgctactgaattcgtcgacttcgtcaatacagatcctgttcagcgcgttcatgaaatcaccgngcctaggcgcacattctgcggtcgtaacagccgggagcggaaaggcgtttgcccatgtgtgtgagatgctgcgaaccggaggtacactcagctgtgtcggagttccgtctggagatgcaaagttcgaaacaccaatctgcacgatcgtcatcaaggcattgaaggttgttggaagtgtagtgggctcactgagcgaatgcatggaggcagtggaattgacccggcgagggctggtgaaaccaaaaatacaggttcggccgctcagagacttgtcgctcgtttatgaagagatggagagggggagtatctctggaagaatcgtgctggaagtcaatagtagc

SEQ ID NO: 22683 - DNA, 472 bp, Emericella nidulans
ctacagatggtgaacatcacctgccgtgtgttgtcaagacacggcgtggatgctctccctcagatctgccgatcgttggtcaaatattcgatgagcgggtgctcccatctatcgtaagcgaagtcttgaagagcgtcgttgctcagtccaatgccagtcagctgattaccaagcgtgagaatgtcgcaagacttgtcggggataatttggcccgccgcgctgcccgcttcaacatcgctttggatgatgtatcactcacggtaagtgacgacacctcatatttttgcagctcaggtttctggtgctaacgtcgaatttccgtcccattagcacctgactttctcccccgaattctctgccgctgtcgaagcgaagcaagtcgcccaacaagaagcccagcgggcagccttccttgtcgacaaggctcgtcaagagaagcaggcattcattgtccgcgcccagggtgaagctc

SEQ ID NO: 22684 - DNA, 500 bp, Emericella nidulans
  unsure (1)..(500): unsure at all n locations
caaatactccctctgcatcttcgcagctctcttccccgaccctcaacgataccgcaaccatcccaattgctgctctccgttcagtcccaaacccgcaatgcacacatcttagcttccctctccgataacccgggggcctacaacaagcgcatccgacgaggtcgcggccctgcctcgggcaagggtaagacttctggaagaggtcataagggtcaagggcagcacggaaaggttccggcgggcttcaacggcgggcagacgcctgatattgtggtgcatggggagaggggattcaagaatatgtaggcgctttgctcttcatttgcctcatatttgatgcgttactgatgagttccagtttctccctcgatctcgcccccgccaacctcgaccgcatccaggaatggattgaccagggtcgcatcgaccccacaaaaccaatcaccgtccgcgaactcgcaaagtctcggtgcatccataaccccaaagacgggngtgaa

SEQ ID NO: 22685 - DNA, 850 bp, Emericella nidulans
  unsure (1)..(850): unsure at all n locations
gcagtctatgcaacaattcgcaagtcgttcacgcagctttccctaatagcgaggttaaactacacattctggaggcataaatgttacctcttattacatgccgacagtcctgacaatgtcagttggattaagccctaacctggcgcgacttctggccgcctgcaacagcgtacaataccttctttggtctttcctcggaatcagactagttgagcgatggggccggcgtaaaacgatgacttttggcgcaaccggacagtgcctctgctatattgtcatcgccgccttaatccggcgtaacgagatgcctggttatccgaacgcccagcaagtcgcgtcggcctctgtagcattcttttccctgtactacgttttcttcggcatcgccatgcaaggcatcccctggtgtggcaaccatttcactttccatgccctccgtctgagaccacgggctaacatcgacccttgcagtatatcctaccgagatcaanctccctcaatgcgaacgaatggcgctgcgattggcgccgcaaccaatcggaaattgaatttcatggttggggactcacgcccatcggaaatcagaatctcggctggcgcttttatattatatggattgttctcaacgcggcaatggtacccaccatttaccttttctatccagagaccgcaggacggacgcttgaagatatggacgagtactaccgtacaagcccgccacttttagttttccgtgatcaggaggccagaacggtacagaatcaaagaagaggaggtggtccaaacgaatgaattcagtcgaggttctgctgaagatgtgtctgctgagaaagaggatgggcttgttgaa

SEQ ID NO: 22686 - DNA, 784 bp, Emericella nidulans
cagtcgactgcttctcatggtgaagcggcgggcaaccagagcgagcagcagcggccccaggacgagtctaactggatccatatccgtgctgtaatatccagccaagaggctgccaccgtcattggtaagggcggggagaatgtatctcaaatccgccgtttgtcaggtgccaagtgtactgttagcgactactcccgcggtgctgtggagcgtatcttgactgtgagcggcccgcaagatgccgtcgctaaggtttgttttaatccgtggtaccttcttgagcaatctcactgaccatttgataggcctttggtctgatcatccgtacattgaacaacgagccccttgatgctgcttccacggctcaatcaaagacctaccccttgcgcttgttgattcctcacatcctcattggttccattattggcaaaggtggtactcgtatccgggagatccaggatgcctctggagcccgtctcaatgcttcggatgcttgccttcctctttccactgagcgatctttagtcatccttggtgtcgctgatgctgttcatatcgcaacatactatgttgctgtgactcttgtggagcagcttacagaacgttttggaggtccagcagcctctgcttatgccacccggagcggcggtcctgctggagccgtcccaggtggtatgcaggttgtaccttacgtgccccagccagctggtggtcagtatggtcatccggatacaatcaagaaacaccacccgggccaggccagagccggtgctggagcctgtgg

SEQ ID NO: 22687 - DNA, 850 bp, Emericella nidulans
catgtacttccgctaccctggtgtggacagggaccagctccaggacatcaccttccaagtctgcttgggatcccgtatcgccgacattggtcccaacggtgctggtaaatccacccttgtcgatgtcttgaccggggagaagattgccacccgcggtgaagtctaccaccacgagaacatccgtattgcctacattaagcagcacgctttcgctcacattgataaccacctcgacaagaccccgtccgagtacatacagtggcgtttccagactggtgaggatcgtgagaccatggatcgtgccaacaagcaggtcaccgaggaggatgagaaggctgagttgaagatctacaagatcgagggtactccctcgtcgtgttgtcggtgtccacgcccgtcgcaagttcaagaacacctacgagtacgagtgttccttcttgcttggtgagaacattggcatgaagagtgagaagtggacgcccatgagcaccactgacaacgcctggattccccgtaacgagatcatggagtcttactccaagaaggttgccgagattgatgcccaggaggcttttaagagcggtaacattcgccccttcatccgaaaggagattgaatatcactgcgcccagttggtttttacgccgatctttgttcccactctaaaatgcgtgttctttccttctgtcaactgttaagggtttttcggcttctgttttttgtttcccccctttctgaaatgttctctacatacccccctacttcctagagcttgcatctatggatcccttttcatggtcttaaagccttttatggttgtgtcctttttatcatctatcttttctattgt

SEQ ID NO: 22688 - DNA, 850 bp, Emericella nidulans
  unsure (1)..(850): unsure at all n locations
caagcagtgnacgtactttagaaggggccctactcttacnaaagttttatcgagtatgagacgctggcgctcgagctcggtaaggggttgcgaaaaattggtctgaacaagggcgataaggttcacctctatggcgcaacgaggtatgtgtaattgttgtggagcttggcgtgaaagctgacgttgggttttgcagcgcaaactggctggcgatgtctcacggttcgtattcgagattccccaacttcagtaaaggtaaaacgtaccgcgcaggtctgactggttgctaaataggttccgcatcccagtccctgactgtcgttaccgcgtacgatacccttggcgaggagggattggcgcattctattgtgcagaccgaaagcgatgctattttcctggatcccaccctcatcaaatctctcacgaatgttttggaccgagcgaaatctatcaaacatgttatttggaattccgacgaggaactcaaacaggaggatatggaccggttgaagaccgagttcagccatctcaacattttgagcttcgaggacttgcggaagctgggagaggaaaatcattacgaccccgtgcccccggctccggaagacctgtgctgcattatgtacacatctggctctactggcccgccaaagggcgttccactcactcacgcgaatgtcgttgctgcgagtacgtcacccaatcagatgatgagaatgcgcgagctaatatgaatagtggcgggcgttgacgctatcatcggaccgtacgtcggcccatcggaagcgttgctcacgtatctcccccagtcgcatattcttgaattcatgtttgagaacctgtgtctctt

SEQ ID NO: 22689 - DNA, 389 bp, Emericella nidulans
gggagttggtcacgtcaactacggcgccatccccagtttcatgtacacccaccctgaagtcgcctgggggggccagaacgagcaggaggtcaaggctgccggcatcaagtaccgtgtcggcaccttacccttcagcgccaactccccgcgctaagaccaacctcgagactgagggtcaggtcaaattcatcgccgatgccgagactgaccgcatcctcggtgtgcacatcattggccccaacgccggtgagatgattgctgaggccaccctcgccgttgagtacggcgcttcctgcgaagatatcgcccggacatgccacgcccaccctaccctcgccgaagccttcaaggaggctgccatggccacctactccaaggccatccacttc

SEQ ID NO: 22690 - DNA, 850 bp, Emericella nidulans
aggagagaaccaccgggagagcacgcacacaaaagaaccccagaagaccaaaaacagcacaaagagcccgcagcaacaacgaagagcaaaaaacccgaccgacaaccggcgcaggggagacgcaacgaacaagccagccaaggcacggaaagacggagaccgcagaccgaacccggcaaaacgagcggaagaacgagaagaaagagcgccagccacgaggcaaggacacagaacgcaacgacgccaagaccgacgaaaagacagcggcccgacccacgaacgaaggacaaccccggcggcaaaaacacagggagcaaaaaccaaacgcgggcgacagaaccaacacccggagcaagcggaccggaggcaacagggacacacggggcaggagaaggcgacaagacggaacaaccccaaaggacggcgggacggcggaacacccaaagacaagcccaaaagcccacagacgccaagcgaaaaaaggacgcgaagagacagaacaagggaaagaaagaacaaaacagccaccagaaaagagaaaggcgcccggcgggaagaacaaaacgcaagcgacacacccccaaaagaaccacgggaaccggccaaggggaagcgcaaggacgaaacaagcaagaagaaacaagagaaaagagagagagaacacagagccacagcgcaaaaagaggaagaaggaccaaacagaaacgaccaaaaacaaaccggaaaacaagaaggggcgcgcaacgacacggaaaaacaagaggaacagccacccaagaccgcgcccacccacgggaaaccaacagaaagcaccacacaaaaacaccaagacaaccaagacgcaaccgga

SEQ ID NO: 22691 - DNA, 500 bp, Emericella nidulans
ttaatgaaatgccatgggtggtactaaaagaaatatccaatctggaagaggcacggattaactgtataaaggacaggatcagagatgattgtctgatagccagcaaaggcgcaccggttcatgttctacgacgccattggcccaaccctcacttagatccttcggcaatggggttttgacgtggtctttcgcggggtccatcaagacgattcagcagccatgaaggagtcgattgtgcgggcgctagattatgggtacgacatgattgtcacttctggcgccgtctctgctggtcgctgcgacatcatccctggtctagtcaagcgtatagggggccggacagtcttccataaggtcgccgtcaagcctggccatccaatcctgttcgcgatgctcccgccccctcgcgagacaggcgagacggcattcttcgggctgcctgggaacacggtcgcggcagctgcctgcctccggatctttgctctgccatatcgcagctt

SEQ ID NO: 22692 - DNA, 850 bp, Emericella nidulans
acgcctacctatccaaaactggtctcaccggtctcgtcatactaggaacgaactcagaagccttcttgcttacccgcgaagaacgtgcacaactaatctccgcagcccgtgaggccgtcggcccagacttccctctgatggccggcgtaggagcccactcgacaaagcaggtgctcgaattagcggcggatgccgccagcgcaggcgcaaactatctccttgtcctcccacccgcatacttcggcaaggctacaacgatgaacgtcgtgaagcgcttcttcgccgatatagcccgtcgaagcccgctccccgtcgtgatctacaacttccccggcgtctgcaacggtgtcgacatcgattccgagaccattacagatatcgttcacgaatctgcaaagtcaagccccaacggtgtctcgaatgtggtcggcgtgaaattgacttgcgcttctgtgggaaagatcacccgtctcgcggcaacatttcctgcgtcggagtttgctgtgtacggcggccaagcagacttcctaatcggggggctcagcgttggctcagcaggatgtatcgcagctttcgcgaatgtcttcccgcgcacggcgtcgaaggtgtatgagctctatgtgtctgggaaggtgactgagaaaatgaacttgcatcagaaggccgcgctggcggagagcccatgtaagagtggcatcgcgatgtcaaaatatgccactgcgatttactcagccaagctggcggtaattcagtacgccgagtagaagttcaaacctcggacgccgtactagtagcctcgcagggggcaaataaaatggtccgggaggtaatgggcgcgatagcgaagctt

SEQ ID NO: 22693 - DNA, 850 bp, Emericella nidulans
gttgcagtctttgctcgtgtaaagcctcatgctcagacgacatagcatcttcccgtcctggtcttcaacccgagcaaagagtttgaggaagaggactcggcgatctcgtccatttatttcgataaccccgaaacctgggagctgtatcaaggacgcctcaagaaaacggaaggagcagaagctatccgacttagatggtacggcggcatgaacagtgatcaaatcttcgttgaacggaaaactcaccgtgaggactggactggcgaaaaatcggtaaaagcacgcttctccatgaaggagaagaacgtgaacgactttctagctggtaaactgacggtggaaaaaatattcgagaagatgcggaaggagaagaagaagagcgaggctgagatagctgattacgaacaattggctcgtgagatccagtatcgggtaattacgcgcaagttggtgccggtcaccaggacgttctatcatcgaaccgcgtttcagcttccgggagacgctagagtccgcatctcgcttgacacagagctgaccatgatacgagaggataatctagatggccgtcggagagccggcaacaactggcgtaggatggatgttggagttgactggccattttcccagttgcccgccgaggatgttgagcgatttccatacgccgttttggaggtgaagctccagacgcaagctggccaggagccaccaaagtggattcgtgatctaacagcgagccatttggtggaggcggtgccaaaatacagcaaattcattcatgggactgcaaccctgttccctgatcgtatccatctgctgccattctggatgccgcaaatggatgttgata

SEQ ID NO: 22694 - DNA, 462 bp, Emericella nidulans; identical to SEQ ID NO: 8906

SEQ ID NO: 22695 - DNA, 850 bp, Emericella nidulans
cgctcaaaaggcagatacgttggtgtcgatcggcggcttccaaagcaaccacacgcggcaagtcgcggccgtcgcgcggaagcttggcctcgaagttgcgcttgtacaggaaaaatgggttgattgggacgacaaaaatggcgtttacgacaaggcggggaatatccagctttcgcggctgatgggcgcagacacgagactcgatatgtccggcttcgggattgaacataaattgaccctcaagaacttggaggaggaaatcagagccaggggcggaaagccatattacatccctgcaggagcatcagatcacccattgggcggcttaggcttcgccaggtgggcgtttgaggttgagatgcaggagaaggagctcggtgtattctttgacactgtgattgtgtgcgcagtaacagggagtacaatggcgggcatgattgcgggcttcaagctcgcgcagaaagtaaacgggagccgcaagcggaagatcattgggattgatgcgtcagcgacggtggagcagacatttgagcaaatattgcgcattgcaaagttcacaggtgtcaagataggtttggacgaggaggatatcacggcggaggatgtgatattagatgatcggtatcacgctggtgtgtatgggattccagatgaggcgaccattgaggcgatcaagtttggggccaggactgaggctttcattacggatcctgtgtatgaagggaagagcctgaatgggatgatggatatggtaagaaagggggaaatacaggagggggcgaatgtgctgtatgcgcaccttggggggcagttggcgctaaatgcttataccgcaatgtgaatcagtgaa

SEQ ID NO: 22696 - DNA, 471 bp, Emericella nidulans
  unsure (1)..(471): unsure at all n locations
tgaatgtggtcgcagacccggtcaagggacaagaaggtgttggagtggcggaagcaaaataagcagaaagccgaccttctttgggccgctcttcaatcaaataatgaanaggcttgttctcgagctcaagcagctgtctcagaaccccgacaaaggctatgacaaggttcacagtttactccagcgctctcgcagccacatccgcagcatgactagcaaaaccaatgttcccattgaaccaaaggtgcaaacggagttacttgacgctatttccggtgttgacggggtggttggtggcgttgttccaggcgctgggggctatgatgctcttgcagtcttgcttcgtgacgaggcggaggttatagaacggttaaaacaactctttgagaattggcagagtaaggtggaggatgactttggcggtaagatcggcaaggttcgtcttctgggtgtgaatcatggctcccttgg

SEQ ID NO: 22697 - DNA, 822 bp, Emericella nidulans
ggacaagactgtcgccgtcgccttcctcagccgacacggtctgcaccaccagatcgcaccccatgtggttcccgcgcgggctaacatcgctgccctgcgctccatcggcgtccgcaccatcatcgccttctccgccgtcggcagtttgcaggaggagatcaagccgcgcgatttcgtcgtcccagaccaggtcatcgaccgcacaaagggcatccggccgttcacattcttcgagggaggcgttgtcggccatgttccattcggcgatcccttcgacgagagcgttgccaagatcgtccgcgcctgcggacacagccttgaggggagggggggtgaagctgcacgaccgcggcccgctgatttgcatgggtacgctgcatcctccatcatctgtattgaccaggaggtgattccactatagaagggcctcagttctcgacacgcgcatgaagcaagctctaccgctcctgggccggctctgtgattaacatgtcctgtcttcccgaagccaagctcgcccgcgaggctgagatcgcctaccagatgatctgcatgtcgaccgactacgactgctggcacgagtccaccgaggacgttaccgtcgagatggtcatgggcaatatgaaggccaacgcggtgaacgcaaagcactttgtcactgctgttcttgacgagctggcggatgaccgcaacgcggagcttgtccaggcgaagcaatacgcgggttcggtcaaattcgggctcagcacagcgcaagccaactggtcgcctgaggcgagggagcgcatgaactggcttttcccggggtacttgaatagatct

SEQ ID NO: 22698 - DNA, 497 bp, Emericella nidulans; identical to SEQ ID NO: 6122

SEQ ID NO: 22699 - DNA, 850 bp, Emericella nidulans
cgattattggagagttgctcggtcgtcgcgagggtattgcttacggcaagggtggttctatgcacatgttcgcccccaacttctatggcggtaacggtattgtcggtgcccaggttcctgttggtgccggtcttgcctttgctcagcagtacaacgaggagaagtccaccagtgtggttctgtacggtgatggtgcttccaaccagggtcaggtctttgaggctttcaacatggccaagctctggaaccttcccgttcttttcggttgcgagagtaagtttcgcatggcatattcattttaatttccactggctaatgatcgcagacaacaagtacggtatgggtacctccgccgctcgttcctctgccttgaccgactactacaagcgtggtcagtacatccctggtatcaaggttaacggtatggatgttctcgccaccaaggctgccgtcaagtacggtaaggactatgccatctctggcaacggtcctctggtctacgagtacgtcacctaccgctacggtggtcactccatgtccgaccccggtaccacctaccgtagccgtgaggagatccagcgcatgcgcagcacccaggatcctatccagggtctcaagcagaagatccttgactggggcgtcatgagcgaggaggaccttaagggtctcgacaagagcgcccgtgctcacgtcgacgaggaggttgccattgccgagaagatgcctctgcccgagaacaactctcgcatcctgttcgaagacatctacgtccgcggcagcgagcctcgatggatgaggggtcgcactgttgacgagactttctactactagttctttgcatagagtgctt

SEQ ID NO: 22700 - DNA, 632 bp, Emericella nidulans
cgtcgtccatctatcgagccatcaggagcagctaacccagaaaaggctcaaagatccctctaagaaatacaggccattcaagcctctgagcctgccggaccgccaatggcccaataaggttatcgacaaacctccgcggtggctggccactgatctgcgagatggtaaccaaagtctgcctgaccctatggtatgttcttcgcaggtatctgcacgttttgcgatactgacatattgacatccggcaggatggcgaacaaaaactccgcttcttcaagatgcttgtcgagattggctacaaggaaatcgaagtgtcgttcccgtctgcctcccagatcgactttgacttcacccgcagcctcgttgagacacccggtctgactcccgacgacgtttggctccaagtgctctctccttgccgtgaggacctgatccgccgcacagtagactccctcaagggggcgaagaaggcgattctgcacatgtacgtggcgacgagtccgtgcttccgatggatcgtgttcaacatggactagcagcagagtctggagatggctgtccgctggacaaagtatgctcgctgcatcacgaaagacgatccttccacagcagtcaccgaatggcagcttgag

SEQ ID NO: 22701 - DNA, 541 bp, Emericella nidulans
tctctgatgcggctgggctctggccgctccctggcgtcggccgcccggtcatcccgcaattgccgtgccttttcttcgacccctctgcagcaggtagccaaggcgacaacggctggcactgatacccccaacatgcgtcacgcagcgcggcctcgtacgtcaattgctgccttttcccccaaacccatactttggtgactgatttgctgatcgattccagcccccggtcctctccgcgctcccgtcgtcaacccggccgacaagtaccaggacaaggccgatagcctgcaccagtacggtcaatacataatggcctgtctgcccaagcacgttcagcaattctccgtttggaaggatgagctctgcatttacgtccctccctccggcattatcccaacgttcaccttcctcaaatatcacacctcggctgaattcacgactgtctccgatattaccgctgttgattacccaactaaggatcagcgctttgagaaatctcaatattaaagtgttgatacaactacgcattgtggaagacctc

SEQ ID NO: 22702 - DNA, 850 bp, Emericella nidulans
ggctggaacgaactcatggaagatttcgcaacgatggaaccaccgctatgtaccgccatcaccgatgggttcttcgggaacgactgcggaagcaagggctgggcccgagcattgtttatctcgtggaacatcatcagcatgtacattttcgtttccctatttgtctcgttgatcttcgagagtttctcctacgtctatcagcgaagcagtggtctttatgtcatcagccgggaagaacttcgccgtttcaagcaggcatgggctgaattcgacccagaaggcacaggctacattaccaaggagcagtttccacggctgttaagggtacgtaggccaagcagttctactaatacaaagctaacgagtggcaggaacttacgggtatattcgaagtgcgcatataccaaggtgatttcatggtcccgcgcatcctcgacgaatgtagagtcgacaagcgcgactcgcttctggcacacagaagagtcgttgagggagttgaccttgacaagctcgccaagatcattcgcaaaatcccctgtcaatactgttagggaacgacgaaagcgacttaacgagctctacgaagaagtcctcgtgtctgcggacccgaggtacggcattacgttccactcgtgtctcatgatcctcgcacattataatgtgattagcgacagcaagagtctcagactcgaagagttcctacgacgccgggcgaagttacagcgtgggaggaagcagtccgtcgcaacacagtaatcggcttcttcaaaacactcacagcatctcgagagttccgaagaaagatcgagcacaagagatctgctagagagactccctgtcagaggtatgc

SEQ ID NO: 22703 - DNA, 536 bp, Emericella nidulans; identical to SEQ ID NO: 14611

SEQ ID NO: 22704 - DNA, 850 bp, Emericella nidulans
cctgcagaaggaactgagcgaggagcaatacaaggaccttgctacacttgggtggctgaccgagctgctccaggccttcttcctcgtcagcgatgaccttatggatggttcaatcacccgtcgcggccagccctgctggtaccgccaccagggggtcggtctcattgccatcaacgacgctttcctccttgagtccggtatctacgttatcctgaagaagcaattccgttcacaccctgcctacgtcgactttattgagctgttccatgagaccacctggcagacggaattgggccagctgtgtgatctgatcacggcgcccgaggacaaggtcgatctcaacaacttctccatggagaagtacatgttcattgtcacctacaagaccgcctactatagcttctacctcccggttgccctggccctccactgccttcagcttgctacccccgaaaacctccgtcaggctcacgacatcctcattccgctcggccaatacttccaggtccaggatgactacctcgatgcgtacggcgacccctaggtcattggcaagatcggaacagatatccaggacaacaagtgctcttggttagtgaaccaggctctgcagcgctgcagtgccgagcagcgcaaggtgctcgacgctgcctatggtcgtaaggacgctgagcaagaggccaaggtcaaggctattttccgggaattggacctcgaatccgtctacaaggagtacgaggagaagatcgtgggtgagctgaagacgaagatcgcggctgtcaacgagtcggaggggttgaagaaggaggtttttgaggcattcctcgggaagatctacaagcgcagtaaa

SEQ ID NO: 22705 - DNA, 456 bp, Emericella nidulans
gttggatctccgggtgtcatcgcagagcctgacgacttacccccagattttggagcacttgacccaatcaaggagctcaaggtttccacttacccaggctaccacctgccacatatttggctctcgaagaacggccagagtgagcgagagtctaccctggacctcgcaggacatggtcgttttgcattgttcactggagttggaggagactgctggatatctgctgccaaagctttgactgcttctgcttggggtgtcgaggttgttggctacaaggttggatttggtggagattacatggattgctatcgagaatgggcccaggttcgtggtgtcgatgaggatggtgttgtgttagtgcgccctgatcatttcattgcctggcgatatcctcgtcgtagtgacgatgccgaggcccggcttcgttgtgttctggagaaaatactaggcttctaa

SEQ ID NO: 22706 - DNA, 850 bp, Emericella nidulans
tccgggtacattgattttttttggcgtttatgagttcacgaagcgcaagatgctggatgccgggatcaatgctaatgtggcatatttgtctggtggtaaggacgtcctcagttggtttatacagccaagatacttatgatgtcgttatgtaggtttctttgcagatctggccgcttcggtcgtttatgttccttcagaggttgcgaagacccgtttacagcttcaaggccgctataataacccctacttcaaatccggatacaattaccgctctactgcagatgctttccgcacaatcgttcgtcaagaagggttttctgcacttttctatgggtacaaggctacgattttccgcgatctcccattctccgccttacaattcgccttttatgagcaagaacagcgaatagcaaaagaatgggtgggatctcgtgacatcgggctggggttagagatcttcacggccgttacagcgggtggaatggcaggcgtgctcacctgtcctatggacgttgtgaagacgcggattcagacgcagcagaaccccgcacccaattcggcaccagcacccaacgcttcggtggtgcgagaagcgaagtcgggcgtgcagtcacaatcgcggtctatttcggcaacagcggctgcggcatctcccacgccgtctggggctttacgattggacaactcctcgttctttaccggtctgaagatgatttacaagactgagggaattggtggatggttccgaggtgtcggcccacgaggagtctggactagcatccagagtggaacgatgctggtcctgtaccaatacctgctcaagcagttcgaagctttcggcgaagcggag

SEQ ID NO: 22707 - DNA, 850 bp, Emericella nidulans
tggactggggctacggtgatcccggtcattcccaagaataacacctatcttacactcgaggatgttcaaaagaaagtggtaatcagcaaagatgtccacacgtgccccacaaagttgatcagcctcgaaaacacattagacggaatgatcatgccgttagaggaagctcgcaggattacagaatgggcgcacgaaaatgggatcaaggtacacctcgacggtgctaggttgtgggaagccgttgtttccggggcaggcagcttgcccgaatacagcagcctcttcgacagtatcagtctatgcttttcgaaaggcttaggcgctcccattggtagcatcatagtcggctcggaacttttcataaagaaggcgcgttggttccgcaagtcaattggaggaggcgcccgccaaaccggtgtgctagctgcagccgcaagggttgcccttgatgagacttttgggttagatccctccggcaaggatgggaagctgcgagagacccatatcaaggcgaagcgcgtcgcggacatgtggacgaagcgtggaggaaaactagcctatccggtccaaactaatatggtatggttggatactgaggcatccggccttggaccgaatgacctagcagaaaccggaaaagagaaaggattgaagctcctgggccacaggattgttatccattatcgtaaggccctagctctcaaggttcaattcaagcaagctctaactccttgtagaggtatcagaagatgcaatcgaccgccttgagcaggtgtttgacttggtattgacaggccagcaccaacaaagtactgacaccagcaagccttatggtagccgataattctgg

SEQ ID NO: 22708 - DNA, 850 bp, Emericella nidulans
gaaaaccagcgggcaaagcattgtcgacctcagttcaacgcccaatgcatccagcgccaacagtatcaacatctccagcgacgagaaaaaggctgtccatccagaagtcaccgattcagaggctcaagtccatgtgcgcgcgggacagattgagagttccgacgctgtgatcgaagcccccacgataaaacgctacctctccatcgcactagacccgtccgcccttgccgtcgcagttccttacgcctgatccttcggtgccgaacttgccatcaactctatcctaggcgcgtactatctcctcaacttccctctttgtgggcagacccaatcgggccgctgggggtccatgttcggcctcgtcaatgttgtcttcagacccatggggggtttcatcgcggatttgatctacgcgcgaacaaactccgtatgggccaaaaagatgtggcttgtcgtgttggggctcgctatgtccggcatggccattctaatcggcttcctagatccgcatcgggaaagcgtcatgtttggtcttgtcgtacttatggcgtttttcattgcagcgagtaatggggcgaatttcgcaattgtcccgcacgtgcatccgtccgctaatggtatgacattcgcccctgtgtcaactcacttcgtttgactaacagagcgcacaggaatcgtctccggtattgtcggtgggatgggcaacttcggcggcattatcttcgccattgtctttcggtacaatggaacgcagtatcaccgttcgctgtggattatcgggttcattatccttggctgcaccctgttctttagctgggttagacctgttcctaaacagaaccactagacg

SEQ ID NO: 22709 - DNA, 850 bp, Emericella nidulans
ttagggcgggggtcttcttcgccagtcttggctgtgtcgcaagccagttctcggtatgccgttctcattgggagtatgcagtgatggacgttactgatgaataaatatagattagcgtagtgctaaacagcgtcagcacggggatggacctcgccggtctgtggccgcgatacctaaacatcgtgaggggcagctatatcatggccattattggaatagctactcagtacgctgcttcaaattctcttcagccgctccaagactaacacatctatagaccctggcagctcatctcaaccgcgactaaattcttgtccgtactgagtggcttcggcgtctttatggctccggcaacgtgcgtgcttctcctaaatgaatcttccacaatttgagctcatctagctaaacaatgtaacctagtggcctaatgttagcggactaccatatcattcgacgacactgcctaaaactgtcagatctgtacattggctcaccatccagcatctactggttcagtcacggagtgaactggcgcgcgctggttgcgtttaccgctgggatgtggccgcttctacgtactcctgccctttaacctctctattccccctcttatacaggtggcgcagctaacgtgtgtgaatatgtgcaacagccggcctcgcagcaaacgtgaactcgtggactgaagacaaatggaccgggtggctgcggctgtataatctgacgtttatcgtgggtttaacgattagcctgctggtattttgggtattgaatttactattcccggtgctggggacggacttggatggaccttttgtgttgcagggagtggatgggggttgcgatggat

SEQ ID NO: 22710 - DNA, 850 bp, Emericella nidulans
ggtgaaatcgttgcagtgacaggagatggaacgaacgacggtcctgcgctcaaagctgccaacatcggattttccatgggtatcgcagggacggaggtggctaaggaggcttcagctattgtgcttatggacgacaacttctccagtattctcacggctttgatgtggggacgtgccgtaaatgatgccgtgcgcaagtttctccagtttcaaatcactgtcaacattacggccgtgcttttaaccttcatctcctctgtggcggacagtgagatgcggtcggttctgaccgcggtgcaactcctttggatcaaccttattatgtaagtctcttcggtattccttataacaagtattattaacccgatcagggactctctcgccgctcttgcgttggcgacggatccgcccacagaggagattctcaatcgtaagcccatcaaaggtggcgccccgctaatttcaatcacaatgtggaagatgatcattgggcaatccatcttccagctcattgtaacacttactctgcactttgggcctcgccaaaacttcctcgactattccgatgacgtccgccgctcaatcgtcttcaacacctttgtgtggatgcagatcttcaacgagtttaacaaccgtcgccttgacaacaggttcaatatttttaccggcctgcaccggaactggttttttatcgggatcaactgtatcatggttggttgtcagatagtgattgccttttatggtggtgcggcattcagcattgttcaaatccatgatgaacaatgggctatctgcattcttgtggctgccatttcgctgccgtgggctgtcgttgttaggctcttcccgg

SEQ ID NO: 22711 - DNA, 850 bp, Emericella nidulans
gaatcagttcgtcaagtttgtcaacgatatcattcggcagggaatggctatgtcagccaaaggttccttgaagggggcatttgccttacttcgcgatgcaaccgatcccgaaacccaggagcccctttccttcaaggagctttgcggcgagagcgcaacattagtggtcgcaggtattctaataggatctcgttctctatgggtaggaaactgacaaaccatcataggcaccgataccacgtcgaccgcactagctgcgtccatatactacctctgcaaccaccccaaagtctacgaacgcgccgttcaagaagttcgcagcacattccaatcccgtgccgagatcggtcttggtccaaaagtaaattcctgcacgtacctccgcgcagtcatcgaagagagtatgcgtctgtcgccctctgctccaggcccactctggcgccaggccgacgcaggcggtgccaccgttgatggacagtacataccccagggtcttgaagcgggcacgtgcgtatacgccatccaacaccacccagaaatctatccgcagcccttcaagttcgtcccagaacggtggctgggacccgaggcggtgcctgagcagtatcgcagcgattattccgccgttcgccggctttactcccttctcgattggcctcgtgcatgtatgggaaggccgctggcatatattgagttgactttgacactgtgccatattttgtatgcttttgatatgcggttgcctcagggtgtcaacgtaaatgaggatgctgagtaccagctggccttgcatatcacggccgctaaagagggtcctctggttgagttcaggcctcgtacggtggtttaa

SEQ ID NO: 22712 - DNA, 800 bp, Emericella nidulans
taaatacatcatcggtgcagatggaggtcagtcgctgattcgacgtctggccaacgttcccattgagggagagcgtaccaccaccggtgggtgcgaactgatggaaggttcaggacgaacatgccggatgctgatctaggctttgcttccattgagtccaagcaccacggcaacgtcctctgggtgcaactagatcatggcgttaagcgcatcgaattcaccatgacacagagatgctggctaaatacggtaaccggcttaccgaggaggacgcgaaacaggaagccgtcaagtcaatggaaccatcttaccctggacctcgagagtatccaatggtggacgttgtacaggtcagtcttgaaaaaagactagaccatcaaatgatctaacagtatacagtatcaaccaacatgttgccgatacctacatcagtaacaatggagtcgtcctgggcggcgacgcgtgccacactcactcctcgggagccgcccagggcatgaacaccggcgtgcacgacgcagtcaatctggcctggaagctcggtggtacgatcaatggctggtacaccaaaaggtgtcctagaaacctacgacagtgaatgccgcccagccgcgcaccgccttattgagctcgacaaagccttctccgctgtgatatctggccagatcccagattcgtataaaggacggtacacggccgcaaacgagctcttcacaaagcttttcaacgagacgatccagttctcaattgggctcggaattcactacaacgaaaacatgattaatcggccctcgactacc

SEQ ID NO: 22713 - DNA, 720 bp, Emericella nidulans
cgacagaaaagcaggatagatcacaaactcgtagaggagagttaggcccaacataatgggaactatccaggcgaacactggcacctccatagtgcagaagctgacagttcgattcaggaccagagttcttcttgagcagaccccctccgcctccctccctggcgcaaatggatcttgctcgtcctcgtttctgcatacagttgcacctccgtcgtgctctgctccggcatgggcccaatcttctctgtcatccaggcgcagtaccctggggaggaagaccgcgcaaatgacctgctcacatacccgacactgttcatgggaattgggaacttgatcagcatgccgtttgctctcagtgtcgggcgtcgacctgtgttcctggcgtccatggtcctgcttgtcgctacgggtgtatggtgtgcgtgctcgcagagtcttgggagccatattgccggccgtaacatcatgtctttggctgcaggtcagagcgaggccttatcgccggcgatcgtccaggagatccatttcttacacgagcgtggccggaagctcgcgtggtttatctttatccagaatgtcgtggccggggtgttcttcgttgtttcgacgtacatggtttcggcgtggggatggcgctggtggtatggctttttcactatcatgaacgccgctgtcttcgctttatcggtgatcttcgtgtctgagtcgcgctttgcacgg

SEQ ID NO: 22714 - DNA, 500 bp, Emericella nidulans
caggcaagcaccagcacgtatcccggtagctcaatgcgcgttacggctggtggaggcatcgaatgggatcaacgcgcagctgctgcgcgaggggaggaaattgtcgaacggggtcgaaccaacctacttggaaacctgaacagtgaatccggggtaggaccgactgaaatggaattcagtgttcaacttccgagctgccacgaaatgaagaatcgagatgagtcccagcgtttgcattttgacacaacgtatgacaacatccagatcaaccattggatcaaggtatgtctgcattctatatgaccatttatacggtactaactggattcagatcgtccttcgtctgtctaagcaagatgaacgtgatcccgggaaacgacgacactttgaaatctcgattgattcgcccttccatcttctctcatgtaaagccacgcaagcaaacatatacctaccggcgtatacaaaccctggatcggagcctgcaagtccagcaccac

SEQ ID NO: 22715 - DNA, 618 bp, Emericella nidulans
ccgacctattactacgcacctccacgacccctagtggcaaatcaacctccactacattatgtacatgcacccatcagtacgtaaaggtgccatcacatcagatcaaacttcgacactttcctccttcaactatcccgactccgttttcatccaagacgatcaatttcttcccgactacactcaggatcttcctttccaataccttagtcaagatctgggccgactgcagtcgcccttccagtaccaccagcacctgaacgtcgtctccccaccgtcgtccgtgccctcgtctcccacctcgtcgccagcgtcgtcggtgtcgcactttcccgccgcgacggcagcttctgccgattactctgccttgtttgacggctcatgcagcttcaaggctcgttcgatgacccccgtttgctgctacaatcctgagatccatatccagcactccaactctccgcagcagcaatcgtaccttcctcaatataaccagcagttcgtctttggcaactcaccaatgttggcgcaacagcagttcattcccaacaaccacggctgggagaacaacctgcaaatatccaactcgcacaacatcccgcgcatgtcgcaacaattcaacgg

SEQ ID NO: 22716 - DNA, 795 bp, Emericella nidulans
gggtcgtggtttccgatgatatcagacacatttaccacgctgccgcgcgaacggggagggttgttggcacgctggctgtttgtatcaacgagtaagttagccgactagaagaggtggaattactcactgacgcagtatcaatatagctatcgagtgactcttaagcaagagacgtgtacacccgaggaacgaaacgaggcgattcgcgcctgccacaagcgttgcgccgatcgaaccctacatgtgctggaaaggaatggctctatcttcattaagctgggacaacacttgagtagcatgggctacctgcttccgctagagtggacgacgactttcatacctcttcaagataaatgccccgtttcgtcggtcgagtcgattgagcaaatgttcgttaaggacactggaaaacggattgatgaactctttacgacatttgaaccgaccccaatcggcgcggcttcgctagcacaggtacacattgggacattgaaggaaactggcgagaaggttgcggtgaaggtgcaacatccagcattggcggaatgggcaccgcttgaccttgcgctgacaaggttcacattctcgatgttgaagcgcttctttccggaatatgacttggaatggctctcgaaggaaatggatctttcgttgccacaggagttggattttcgcatggaagcgcaaaatgccaaaagggctagcgagtacttcaagaagaactcaaatgctcctctcgtgattccaaaaggtattctgatcctttcatgatatatctgcacgtccctctgacgt

SEQ ID NO: 22717 - DNA, 850 bp, Emericella nidulans
  unsure (1)..(850): unsure at all n locations
atgtgggacggcggtcatgacgagcaacagaaggagacggaaaatgaagaagggaaaggtgcttcggaggccgaccaacaagcggcagcaccggagcagaaagaaggcgagaaaggggaagagggtgacaaagaaggtgaagaagcggaggaagaagatgaggaagaggaagaagaagctccggatgacgagggcgaggctgttggtcgcgaggatatggacgttacggaccctcaggctccggaacaggaaaccctcgatctcccagatgagatgcagcttgatggtgatgagaaaggtatggatgacgaggatttcggtagcgatgatgggcttgatgatcttcctgatgctcctaatgatgagcaaatggacgaaaagccggatgagaacattgaggaagagggtcctggtgacctgcctggggaagaggaagaaatcaatccggacgaagaagctccaccagaagaagaaaatgccaatgctgccgaaggcgaagacgaggcacaggcacctgctgaggagcccgaggaaacccagcaagatgaattcctcgctcaaagggatgacaatgagactgccggagaagaagttgctcccagcgaagccgttaatggtggtcttggtgccgagcaagaccagaatcaagaaaaaggagcttccggcaacgcacagcaacaggatggctctacagatccctctgtcgagcctaagcaacaaaccggtgctgccaaggagggtgaagaaaatgagaggcatagggatgcgggaggtggggatgataacatccggaagaccctcagttacaggcgtttaagaagctaggcggtgtccttacaaagacnccgca

SEQ ID NO: 22718 - DNA, 850 bp, Emericella nidulans
gttgaagaccgattttctcgccaacatcagccacgagattcgcactccaatgaatggaatgcagatcgccttgaccatgctaaccgatacgggtctctccgaggaacagcgcgagcacgccaatatcgtgcaggactccatgtcgctgctcctgcagatcgtcaacgacgttcttgactattcgaaactgtcatccggctccttctctctccacgctgacatgctcgatattcgagagattgttggtgctgtcgtccggaactgccggtcctcactccaggaaggggtcgagttggacacggagatcagtccaaaactgcccacgcgcatgcgtggggacccccttcgataccgacaggttttgcagaacttggttggcaatgcggtcaagttcactgagaaaggatccattcatgtaaagatcacctcgtcgaccgacgaggaggattcagattcctccgtagtcaggaccgaggtgacagacaccggaattggtgtcccagatagtgcaatcaacactctcttcacccccttctcgcgcttcgccaactccgccgcacggaaataccaaggcaccggcctgggtctctccatctgtaagagcctagccgagctcatggatgggtctgtcggctattcgccaaacccgaatgctagcggcagtgttttttggttcacagcgaagatgggcggccggtccgtcacacccccctccaagtcacccagcgtttcggggagccccgtacccaccgaagttgcttcggaaatgcgatccatagcgcctcgaaaacacgtcctgttagtcgaagacaacattgtcaaccataccgttatgttgaagctcctacat

SEQ ID NO: 22719 - DNA, 850 bp, Emericella nidulans
cagacatgatcacgtcggtctcttttactccggatggaaggcactcaatggcaggatgtctcaacgggatgttgaatatatacgaaacggacggcctgaaaccggcagggaatattcatgttcgctcggcacggggccgtaacgcaaagggtagtaagattaccggcatcgactccatggttttacctcagaatgacccggagggcacggtgaagctcctagtaactagcaacgattcacgcattcgcctatatgactttcgagaccggagtctggaagccaagtttcgcgggaatgaaaacgcatgcagccagatccgggctagtttcagtgacgacgggaagcatgtgatctgcggtagtgaggatcgtagagcctatatatggcctatggggccggttgaaaaagacgctgataaacgggcctttgaggtgcttgacacgcacgcagagatggcgacggatggcatcatggccccaaaagctaccaagcacattctaggactttcagaagagccgagttatgacctgtgcaacccggcaccggtaaccattgagagcaacaccaaaaaggaaaatagccgacagagccgactgtgcactggcagtaaactggcccaagagtcacccgggtttcaagcacgttcggctcacccggatgggaatatcatcatcgcagccgattactcaggaaagatcaaggtctttcgacaggactgcgcgtatcacaaacgccggtatgatagctgggacactcactcgacgatctcccggcggctcctccgccgtaccaactcggcacggcaaagcatcgcctcctctattggcaaggagtcctcccacaagacgcc

SEQ ID NO: 22720 - DNA, 500 bp, Emericella nidulans
aacatcacaatcatggcgatacccgtccagtcctcgaccacatctgtggagttgtcctcgacgactggcactggagaacgcctgcatcgagcagacccttccccgctctccgcccacgatacaagcatgatgcaagcatctgccgaagttgactcgcagctcccagacggcggctatggatgggtggcagtatccggctgcgcagtgttgacatggtggttcaccgggacatcctacagttggggcattctgcaagcagcactcgtgaacgacggagtctcgtctgcgtcaactctcgcatttgtcggctcgttcgctgtggcttgcatctcgttcctgggaatcttgaatgcgacgctgattcgcaagtttggaacgcgggtctgcggcgtgctcgggattgtgttccttggtgttggggagattctgagcgggttcgcgctcaggagtattggaggattgtttgttaccgcgggggcggttatgggagttgggatcag

SEQ ID NO: 22721 - DNA, 850 bp, Emericella nidulans
cttcattttcttcatctgggtgtttgcggccgcgactggagtgggaaccactattgtcccgctccttattgggcgcaggatcatgtccttttacgtcccaggccggccagtaaatgatgtatacgccctatcggatggcatggggtttgcttgttttgtcgcttacttcctactttcctgccgaactggcttccgcctggtgagaggccgcttaggcccttatttgcggtctccgggtgaggcgactcgtgtgatggcaaatgctctgacaagcggcttgagcatcctctacgtaatagccgcgtttttcatctttctgccgtcattatttgctcttgcgatagagctttacttgctggttccggtttacacatatcttggccacgaaaatgatcttgtggtccactttgtccaggattggacgttgggcgttctctatgtccaaatggcagtgaagctggctttgtggcatacaagatctcgcccagctgccgttctcagaggtattttccgcgacggctggctgaaaccgaatatcaaactcgcaactagagctttgctctttcccatgacccttcttgccctggtggcagtcacgctaccactgtgtctcggctttgcgtcgaatctgatattattctctttccgtcccgaattgcaatccaaggtctaccgctatgcctatcctgttactttggctatggggcttctggcatggttcgcttacctggtctaccgtcaagtcgaagtatggaaggtgagcatccgagatgagttcttcctgattggagagcgtctgcacaatttccgcgagaagcgagcacgggaggttggtgttcctcggcgagtg

SEQ ID NO: 22722 - DNA, 850 bp, Emericella nidulans
agccattctatattgacgacgatgatactgcgaacgattacctagaacaccagcgtctgcataaacagacgaccgatcaatcgaaatggtatgaacgaggaaagcgtgctggtccggcggccaccaagtatcgcaaaggcgcttgtgagaattgcggtgcgatgacacacaaggcaaaagagtgcctaagtcgtcccagaaaacatggcgcgaagtggactggcaaagatattcaagcagatgaagttatacagaatgtcgatctgggatgggatgctaaaagagaccgatggaacggctacgacgccgcagagtatcgacaggtggtcgaggaatatgaggaattagaaaggctgaaacgacaggcgaaactcacaaaaggggagacgcagactacaaatgatggtttagacgacgaggcccctgaacaggaggctcggtacgcggaggagtccgacatgggacgacaacagagtacagccacgcgcaacttacgaattcgagaagacaccgcgaaatatctattaaaccttgatctggactcagccaagtacgatccgaaaacgcgacgcatggtggacatgggcgcagcggaggatcaggctgccgcacttgtggctgaagagaattttgttcgctcgtccggagatgcagcagagtttgagagggcacaacggtatgcttgggaggcgcaagaacgtgggacacaaaaaatacatttgcaggcaaatccgacttcgggtgagattacgcgaaaaaaggagttggctgaaagtgaggccaaacgcgatgcgcatcggaaggcacttctcgagaagtatggcggcgagaagaatctgaaacgcgcttg

SEQ ID NO: 22723 - DNA, 840 bp, Emericella nidulans
agattttaccgcttcaaacagtgggctggggaaagaatgggcggcgaggtcaagaccaatgtctctgatgactttaaagccttggaaacggaaatgagcgtgcgccacgaaggtaagcgaatgctggaccgattttgcttgtttaccttatgctgaaattccgcgtggtttgaaggtatcgaccgtatccacaagtccatgaccgcctacgtcaaatctatttccaagcgcagtgaaggggacgacaaagagaaaacattgccaattgcacacctgggtggtagcatgattactcacggagaggactatgaagtgaactctgaatatggacgatgtcttaccagtaagttgaatgtttgtgcgagcccaaatcaatccggaagtctgactttgttccagtgttcggaagggcagaggagcgtcttgcttggattcaagagtcttacaatcgcccaagcgacctcgggctggctggagtcgttggagcgatctcttactcaattgaaagataccaagtatgacgaaccttctggtttgatttagggccttatcttgtctaaccggttctagacattcccgaagaggttggacacttgacgtcttgcgtatgatacttcttctatcaaagaagcagaaagcaaagagggaggattctcgcgtggaggaagagctgcggacacagaaggtcaaatatgaagaagctaacgatgatgtgtatcgccggatgcttgacataaaaaattccgagccagagaatgttatggatctgcaggccttcttgaatgcccaattgaattatcatgagcaatgccgggaagtgcttctccgactaaagaacga

SEQ ID NO: 22724 - DNA, 850 bp, Emericella nidulans
ccactctttccaggtcattcgtgaagaaagcaagcgaagcgccttttgcatctcaaaagattgaggcgtccgaggaggaggaggagtcttcccgcaaagttagcacgttgaagcgcatctatgacgcgacgtattggttctggattgccgtcatcattttcgaccttgttatgcaagcccagaggagctctagcatgggtgatggtcgggtccagctcattgacaattgcgagattgtcgtcacagttgctttactcggcgagattttactgcgattcatatcggattggcgcaaattccatcagagccgccgcaactgggtcgatttggcacttgcaataatcacctgcatcattcaagttcctgctattaggaactctaaacgaacttatgatatccttaccgtctttcaaatcctccgattctatcgagtcgttctagcatttgccgtcacaaggaatctcatcacgctcgtctttcgcaatgccgttggtctactgaacctgatcctctttgtgtttctcatcacattcctcgcctctatatttgcaacgcaactcttccgcagtcagattccgcgagaggatgacgacggaggtacgattgagatcactttctctgacctatacaactcattccttggaatgtatataatactatccagcgagaactggacagaaaccctttacaacgtcacctcatacacatacagcttcaatacggcctggatctcagcaacatttgtgattttgtggtttattgtggccaactttatcgttctgaatatgttcattgcagtcatccaggaaagtctcgacgtattaaaggattaaataacgtctttcccccg

SEQ ID NO: 22725 - DNA, 850 bp, Emericella nidulans
ctgctggcgaggcgttcctccccttctttgacgactctatgcacctactccaggaatttgccaccgttaaggacagcgaggagcagcttgaccttcgcgccagtgtgaccgatgccatgggtgagatgtccgctgctgccggccctgagcgttaccaggcttacgttgagcctttaatgcgcgccactgaggaggctcttcaccttggacactctcgtcttaaggagagtacctacattttctggggcgctatggccaaggtctacggcgagcacttcgctaccttccttgacggtgctgtcaagggtctcttcaactgtctggagcaggatgacgatgaccttgagctctctctcggtgaggccgccaaggacctcattggccaggaggtgaccgttgccggccgcaaggtcaaggttgccagcgctgaggacgacgatgacgagcccgtcggcgaggatggcgagattgaagacgtcgatcttgacgatgaggatgactgggacgacattaccgccaccactcctctagccctcgagaaggagattgcgattgagatcattggtgatctcgtcacgcacacccgtagcgcctaccttccctactttgagaagaccattgagatggttatgcctcttgttgagcacccttacgagggtgtccgcaaggctaccatcagcactatgcaccgctcctatgccatgctcttcaccattgctgaggagtccggccagatgcccaagtggaagcccggtcttcccctccaggttgagcccgccaaggaggttaagaagtttggtgagattctcatgactgcgaccatcaagatgtggactgaggaagatgatcg

SEQ ID NO: 22726 - DNA, 720 bp, Emericella nidulans
tatacaccaaatcgggtccatcgcagagatattcccgtctcctcagtggaaaaggatgtcgagatccccggctcgccattacagtcatcccagccgatagccaagtcgctaactcgaggaatgtctcaagatctcaatggtgaggggttgagtgcggcgcaaggccaccgtgcgggaagtgaagagctcggggattcccctctatctcctcgcgcgacaacgccaaggaagcggtctacccccagacgtgcctcagtacatagccaggcgtctgctgatcgatctgatgccggggattctgtcgccgttgattcacccgccctccaattaacccgtgaacatgcccactcggtgtcaccgcagaaaagacctgctctagaggcgaccaaacctgatgctgttactttagctgcagaaacagaaagtgaatctgattctgaatccgatagcgatgacggttcggagactagtgatagtgacagggcaagtcaggacaaagatggcgatactgcaatgcgcgaagctactccaaaacagaaaccagagtctcccataactgccaagaagcctgatgaggcaaccacacgtgcgcctgctgtaaccggaagtcaacctcgtaaacggaagaacagtgccgatcagttgtcccctaagaaagagccacgcttggataggactactactactcctccagagaatagtgaaaggcgaggcagcgaa

SEQ ID NO: 22727 - DNA, 850 bp, Emericella nidulans
gggcaatatgttgcccatggatatctcgacgttcaacgaaaccagcttcttgcgtcagcaggagaccaaccgttctatcagggtgattccagtgccgaggcagatgtgctgccggatgacgcgacaacccgggagaggctgtccctctatttcgatacgtgcgtggtcacgtaccgcatgcttcatcgccagaccgtagaacggtggttagccagcatgctgcaaaacagagagcagggccgctctatcgccaactcgctgggaaacgcccgtacagcgagcatcctggccatcctggcaattgcagaccttcggtgcttcaagctcaagcgcaagcacagcaatagcgccttgaatgaccctcagcttgagtcttgcggtcttcgcgaaagcgaccctcttttctacgcttcaatgatgcgtaccgagtcggaaacagggtttcctaccctggaatccgtccaggcgcggctgcttcaggttctatatctacttcagacggggcgcatgaacaaagcgtggtataccttcggcaatgcatgtcagatcatctcatcactgggtctacatcggaaacagtatcggcagcataatgctcttggcccacaggcggactacatcgagcagcagtgtgcgaagcgcgtcttctggactgcgtacacgattgacaaatatatcagcgttgttcttgggcggccatgcctcatacataatgagggaatcgatcaggaatttccagatctggttaacgatgagaacacggggccagacggacgcctgacctctgatgcgagggaggagtgtcatgtctcgtctttgatacaccatgcaaagtgcgttctcacccgat

SEQ ID NO: 22728 - DNA, 361 bp, Emericella nidulans
catcacctcccttctttcgtcaacgctttttgtcctcgatctatacgacgtgcactcagtcattacaacgcagattctctcgcaactctactactggttgggagcggagctcttcaaccggattctctctacaaaacgatatctagcccgaactaaggcgatgcaaattcgcatgaatgtgtcgacattggaggactgggctcgtaccaacaaccgacagccggaacactatgagaacggatcgaccacgtgtacgggcgacagcaccatggattccgcgcgtaaacatctggcaccggtgatccagctcctgcaatggctccagtgcttctcatcactaggcgaggacttcgagtctctc

SEQ ID NO: 22729 - DNA, 850 bp, Emericella nidulans
gcaaggttggcgatggcatggccaatgtgagggtcaagggtgaaaatttctacaggtaagcttcgttccacatatgattggcgcagcgactaatttgcgaagagatgcgaagaaggtgaagaggctgaatatgctcaaggatggcaagcctcaacgtgacgccgccggaaacatcactgttgctgcttcgtatcaatctcgagaggcaccggtcgctagaatagaaccaaaccggaaatggtttggcaatactcgggtcatctcacaagaggctttatcctcgtttcgtgaggccgtcgccgagcgtgcctctgacccgtatcaggttctcctcaagaccaacaagctcccaatgagcctgatcagagacaataagacggtcaatggactcaagcaacatgaggctaagatgacaattgaaacatcaccatttagcgacactttcgggcctaaggctcaaagaaagagagtcaagctgggtgtctcgtcgctcgaagacttggctggtgaaacgatgaagatgcacgatagttatgttgagaagtcggaacaaggtaggcatgaggacggtactccgatcgtcgctggcgatgatgtggcgacagatctctcagttggcaccttgccgacgtctcgagaggcagtcttcttgaaaggtcaaagcaaaagaatttggaacgagctgtataaggtcattgactcgtctgacgttgtcattcatgttatcgatgctcgcgaccccgagggcacacgctgcagaggtattgagaaatacattcgcgaggaggcaccacataagcacctgatatttgttctgaacaagtgtgatcttgtgcccactggcgttgcg

SEQ ID NO: 22730 - DNA, 850 bp, Emericella nidulans
cggaagcaagtccgcgcagttgatggagatgattcacgccggtgaagaggaggcaatgcttgaggttgccaagaaggcgaaggaaggaacgatcggtccggagccggctgggccagaaggcctgaatgacgacgggcggacgactggtctgctcatcgccaatgacagcgaccacaagcgcgcacacatgttgatccatcagatgaagcgtctcagctccccgaaccttatcgtcacgaatcacgatgccacgatgtacccgtccatcagactgccgtctaggccgagtgaggacggcaagccgaccccgaacaggtatcttaagtttgaccgcatcctcgcgaacgtgccgtgcactggtgacggaacggcgagaaagaattatggtgtctggagagactggacacctcagaatggtaacgggctgcacatgacacaggtccggatccttgtccgcgccctgcaaatgctgaaagttggcggtcgtgtggtgtactctacatgtagtatgaacccgatagaaaacgaggctgttgtcgctagtgcgattgagcgttgtggtggtttggaaaaagtcaagatcatcgattgcagcaatgaattgcctggattgaagcgagttaacggtttacgatcatggaaagtggctgatagagaaaaccgtttctggagcagctggcaggaggtagaggagcacagggcccagtcgggcattgctggcctcggtcggctctccgagagcatgttcccccctataactgacatgccacttgaacgatgcatgcgcatataccctcatctgcaggacactggtggtttcttcatcacggttctagagaagcagtctgag

SEQ ID NO: 22731 - DNA, 600 bp, Emericella nidulans
atgagcgatacacctacgcgcaagactgatcttcgtgtgataatagtcggagggtctgtcgctggcctgacgttggcacactgtttagcgaacgcaaatatcgatcatatagtactcgaaaagcgcgctgagatcagcccgcaagagggagcgttcctaggcatctggcccaatggaggccgaatctttgaccagctgggcgtctatgcagacctggaaaagtgcacggtgccaatacacaaaatgagggtgcgatttccagatggggtctcctttagcagtgagctgccgaggcaagtccaagaaaggtttgttgcttctaaacactgtttgaacttgataccgacgggaattgtaggtttggatatccgattatatctctcgatcgccagaaagtcctggagattctctacaaccgctacccggccaagtccaacattcacgtcaacaagaaggtgactgagattcgacaaaccgaacgagaagcccaggtgctcacagccgatggggccgtatacaaaggggatttggtcgttggtgcggatgggatacacagtgcagtgcgtgccgagatgtggcgccaggccaaggatcttgttg

SEQ ID NO: 22732 - DNA, 850 bp, Emericella nidulans
accgcgtctaccagtcccatcattggaggagaccggtcgtcggtacctaaagtctgtgcacgcagtcgtgtctgaggccgagtacgagaacaccaagaaggccgtggaggagttcattcgccctggcggcgcaggtcagactttgcaggaacggctgcttgctcgcgctgcagaccccaagcacaagaactggctcactgagtggtggaacaatgccgcctacctgggttaccgggaccccgtgatcccctatgtctcctacttctactcataccgtgatgaccgcgcccgccgggacccggttaagcgtgctgctgctatcactactgcggcgcttgagttcaagagtcaagtcgacaacggctccattgagcctgagtacctccgcaagatccctcaggccatgagctcgtaccagtacatgttcaactgctgccgaattcctgccgagcctgccgactaccctcagaagtaccctgctgaggagaaccagcatattgtggtggtgcgcatgaaccagttcttcaaggtacctgcggccattgatggtcgcccgctcaacgtgtcagagctggaacagcatttcgagcgcatatacatagatcgcgattatggggccccctgttgacggactcactgttgtacactgcgaccactggactggcggtcgcaagaagctcctggtagcttaccccatcatccccaatgctatgcgataacttgagaatagatggattcatcgaactgtttagcaaatgggcctttacccgtccataggcgagggtgctgagtaattctggtagggttgggtcccacaaccggtgattcgacaagctccttcctattattg

SEQ ID NO: 22733 - DNA, 850 bp, Emericella nidulans
ttagcctcccacgtgacaccgcccactttccccagaagttcggtttaggttctgcaggcgggagtagtaaaacaatgacaacgacgacggcaatcggcccttgtgatgattccctgctaagatatgaagtcgttctcaagctccgttattagtacgtgttgatcacaagtctgtcgtcatgttgctaacttttcgttagataagtcgggcaagaagtttgctccaaaggcacccgcccgacgcgctcctccagcccctcctcgagcaccttcaagacgaccgagtgttgcttctcagggatcggctttgcacgcgccagtgaccacaagtgtaacagcgacccctgaaccgcctctccctgctacctcgatcgaaccgtctgcccagtccgagacaactattgcaggatcaggtggtgtgccgactgttgcgccgactgttgagcatgcgcctaaggaacaaactgcaactgccataccgattcccgcacccaagcacaaagcttctgtccccgttcccattccagcccctcgatcaacgacaaatatatcgcctgctccttcagcgagcactacaacgaccgttgagcccgtagcgcaggcacccagtcgccccgatgagaacagggaagtgactagaccaggtcctgataacgtccaaaacgagcagagacatgcaccctctgatgtcgcggccgatagtgataatgaagtggtgcctgaaggccgaccctcaaagcgcttaaggacgtcgattgagtctgtcctaacaacgacatctcctcagccagaagaggaactcgctcaacttgcaacacccccatctacacagatacccgcccttgaggaac

SEQ ID NO: 22734 - DNA, 850 bp, Emericella nidulans
ctgtttctcggcaagtgggatagcgatgcgaatatcggcgaaactactttgattagcgaacaagtcaggtaggtaatttgatcagcaatgtgagtatatttgctaattgagtagtcaccatcctccagcgactgcttatgctatccggaatgagaagcatggtgttcaggtttgtcactttgtccacgtgtcacattgaattccaagaaaactaatcgaaacatagctgcaaggatacaatgcgcagaaggcctcattttccagcactatttacatcaagcagattggacatgctttgtataccctaacaccccccggcgccgacaaaaacgacccagctcagcaggagaaatatgtcatcaccctccccgccctccatgtcgaatcgctgatctacggaaaccccttcatggaacttgaaaagtcgacctacatcgtcagcagtaccggctacatctcgaagatcagctattctgggaaaggctgggtgagcggcaagaagaataccttcacggctagtctatacaaagaaagcgagggcgaaaagaagcccctatacaccgtagatgggcaatggtctaatacattcacgatcaaggatgctcgaatcaagaaagacgtggagactgtatcagttcaggatctgcaaaccaccccacttacgcttgcgcctatcgaagaacaggacctgtacgaaagccgccgcgcctggagcgacgtcgcagcaaacatcgaaacagggaacatggacgccgtctccgcagccaaaggcaagatagaaaatgcgcagcgggagctccgcaaggtcgaaaaggccgaaggccgcgaatgggagcgccgcttcttcgaa

SEQ ID NO: 22735 - DNA, 850 bp, Emericella nidulans
ctaccaaaggttcatccctaacttctcagggatcgtacgcccactaaacaacttgacaaagaaaggaacacccttcttgtagactaaggagtgccaggatagctttgatctacttaaggaaaagttcattactagacctgtcctagcaaccttcaacccttcctactgtacagtagtagagactgactcctcaggttataatataggaggagttctctctcaatataatgaaaaaggggaattgcacccatgtgcctacttctctaaaaggaattccccagctgaatgcaactacgagatctatgacaaggagctacttgcaattgtacaatgtcttgaagcctgggatgctgaactgcgctcatgtagagaattccaagttattaccaaccacaagaacctggagtacttcttctccccaaggaaactgacagagcggcacgtacgatggtccttatttctcagccggttcaacttcaagttagtatataggaaagggtcagccaatcagagagctgatgcactttcacggagagaccaagacatgcctgatgataaagatgacagggtcaagtctcgtacgatgcaactctttagtaaaaaatacttgggaaaaatggtagttgccaccctttaaccaaccggagagccaccacgcgagctgtgtgagaaaggtgacatgtggaaagaggcactcaagcaggataaagggtataatggggcaatacagtgcctgaaggatggagcaaggaaatttccccacatctatagttgaaagtaggacctcggaatgcaattagacgccaaggctatatctcttctgcagaaggaggtgggtactgggagtgac

SEQ ID NO: 22736 - DNA, 850 bp, Emericella nidulans
ccgcgctttgagtcgcagagaagtagccattccaagccatatttcgattctccatgttgaacaggaggtatgttgtttattcgtattattcatgatagtgctaacaatctagattactggtgatgacactcctgcccttcaagcggtgttggatgcggatgtgtggcgcaagcggctacttgcggaccaagaggtcagttttcacggatcctcaatgttacagctagttgactcttgtagaaaatctcaaaacaactcgcagccattgaagcggagcgatcttcaatggcagatacgtctacagacgcagctaggctcgatcatgagcgagagggactcgatatcacgctgaacgatatccattcgaagcttgcagaaatggagtcggacaaggccgaatcccgagcagccagcattctggctggtctgggtttctcccctgaacgccaacagtatgctaccaggacattctctggtggttggcgcatgcgtctggctctggctagagctctgttttgcgagcccgatttgctccttttagacggttggtcaaaacgatacctaacgacgacaacggctgattgtcgcagaaccttccaacatgttggatgtgccgtctatcacctttttatcaaattacctccaaggatatccaagcactgttctagttgtttctcacgacagagcgtttttgaatgaggttgccactgatatcgtccatcaacactctgaacgattagactattacagaggagccaacttcgtaagtaatggacgtcatattgttttcttatcacaagactaattaagcagactgcttctacgcaacccagggaggaaggaagaaaca

SEQ ID NO: 22737 - DNA, 786 bp, Emericella nidulans
cagtgagggcgagaatgtgaacccgctattatcccttgtctcccagaagaaagagaagaaatactcacttctgcgcctcggggacgctgaaatagaggcactgctcgcacagcgtcttgctactatcggtcttaccgatttgactcgggtcgaggacgtctatccttgctctcctctacaagaaggtctttctcgtcgcacaaaccaagggcgtaggaaggtacgacgtggtacacatctacgaagtgaccacctcaaagacgcatcagtctcggtcaaccctcatgtacttgccaaagcctggaaagaagttgttcgtcggcatcaaattctgcgaacaatctttatacagggtcttgaagaaagcactgcatttaaccaggtcgtcctacgcgaggtgcacaatgccccctttgtcatcgaggatgtcaagagcaatgatgccaaagccctattgcagaaccttgccactccagagtacccagccttcgagccttggcatagcgtgacgatctgctccgacgccaatgggactgtttgttgtggtatccggatgcaccacggcttatttgatgcgtcttccatggatatcattctgcgtgaggttgctcaggcttataatcagagactttccactccagcacccttgtaccgggattacatctcatacctgcagggactacagcaagggggcaatgatggcctcgcatactggcaggaatacctcaaagacctcgagccatgctacttccccagcatcaacgaggaggccctaggacaagaaca

SEQ ID NO: 22738 - DNA, 850 bp, Emericella nidulans
cctgttccgcatggcttctatccagccctgacccattttacggacgccataaccgcccttccgcgcgaatttcgacggcataattcgctactgaaagaggtcgatgctaaggcttgggctcttgaggataatctactgcagcttttgaaggctgcatcagagtcgcagccgactccatacccgcctaatcctgcgcctatcatcgaaggagttgtccgagaggatctcttacctgctgtaagttcatcaaagttaaccaaaagcatgcaatcactaattatatggttatcgataggactcttcccgtccccccgaatcctcggagagcaagaaccgccgcgcccttttcgatcgtgttcgacataccctctccgatcttatgatgacggctgatgagaaaaaccatgtgatatcaaatgcaaacgatgagcttgaccgccaacttatgcgcttggactctatattccctttcattgctggcgaaatcagtgaagaggctcgccttggtagtctcactcactgggcttactcgaatcggaatgctcccaagactgccacgaacgagcgaccccgacgagaagctgcgtcaaacaaggatcttgcgcatgctttgcacgaagcagaggccgcatcgcgaagtgaggcgagacgggaggccgtgttggcccgcaggcaacgtcgggcgcatgcggattcggatatggaagaagctcgggccgttgggtctcgaaagggacagaataacaaaaatcgtgctatcgggggtgatcatggacatgggcaagctggcacggctggttcgagccagacgaaacgccgcaaggtcgaacggcctggtactgcggaggct

SEQ ID NO: 22739 - DNA, 703 bp, Emericella nidulans
ccccgcgcccaaaccctaccgacggctcctgatccaactgacagcgatcttgcgaagcatcttacgttcctgagtgttgggattaatggcttagaaagtcgtgttgagaaattgcttgagcaaaagagcattctcacaacccagatccagcagcagcgggagcttaactccaagtcggatgcagaaagggacgccaagattgctgatttgatcgaacaactggcccaccttcgtaaagagctcgaacttgctgaacgtgaaggccaacagtcgaaagaagatcacgacctgacactgaaggagcttgaagatgtgagacgtgagctgttagagtctcgggagacgcatagcagcagagatcttggtaactccaagaatgaagctcaacaacatgcagaagccgagattgctcgccttcagagcgtaatccaagaaattcaacaggagaaggatgaacattgcgaagctcatagacgcgctgaggccgaaatagaccgcctccaagctgttattcatcagattcaacaagaaaaagatgagcatcgtgaagctcatgagcgtgcagaagccgaaaccacacgccttcagactatagtggaggaagttcagcaagagaaggatgaacagcatgaagctcatgggcgtgcggtagccgaagttacacgtctacaggatatcatcagaagattgacaagagaagatg

SEQ ID NO: 22740 - DNA, 611 bp, Emericella nidulans
gaagagtctgaacactttgtttacattgagaaccagttttttgtcagcacttgcgagatcgatggtcgaaaaattgagaacttgattggcgacgcattagtggagcggataaccagagcagcaaagaacaaggaggcatggcgtgctgtcattattattccgctaataccggggtttcagaacaccgtcgatagcgaaggtggaacgagtgttcgcctaatcatgatgtgccaataccgcagtatttgccgcggtgagacgtcaatatttgggcggttgcgggccctgggtattgatcccgaggattacattcaattcttcagtcttcggtcctggggtaagatcggtcctcagaaacagcttgttactgagcaactctacattcacgcaaaatgtatgatcgtggatgaccgggcagcaataattggatcagccaatatcaatgagagatctatgctagggtcgcgagactcagaggtcgcatcagtagtgcgcgatacggatatgatctggtctaccatgaatggccggccttacctcgtcggaagattcccacacacgcttcgcatgcgcctgatgagggagcaccttggaattgatgtcgacgaatt

SEQ ID NO: 22741 - DNA, 850 bp, Emericella nidulans
ggcgcttgaaatcatgaatcgagttctaatgagacggtcgaacagggtctctctcgcccacaactggcgccgacgaggcttgtttgaagaagtgaccttcatcttcccaaatgcgcccatgattccgattacagtggtacgtttgacgcaagcttttttcacggctcaaagacctaggcttgaggttgagacgctgctgacctgaaatttttcggatagaacttcggaatgtcaatgcctggttggtacgacatcaccaaactcggtcgtgatgtgagtccttcccttctcattcccctctatggcaaacagcagctgatagaatagcaatacagctcgatttccaagaagccgtcaagaaccaagatgaagccggcatccttaagtctcgcgattacttcaactccctgattaaagagcaaatggaccaaggcatcaagccgtcacgaatcgtcctcggagggttctcgcagggaggcgccatgtccctgttctcaggtataactggacaggagaagcttggtggtgtctttggcctttcatgctacatgctcctcagtgaccgtatcaagaactatatcccggaaaacttcccgaacaagaagacgccattcttccttgcgcacggcacagaagatgatattgtgccgcatgagtttggcaagcgctcggccgagatggctaaggaattgggactggaagatgtcacctttaactcatacaagtgagtcccggtcccctgggtatatactttgatgctaacgatgaaaggtatctctcacactccgccgacccggtggagattgaggacttggagaagttccttgacagagtgattccggccgagaac

SEQ ID NO: 22742 - DNA, 500 bp, Emericella nidulans
cactacttctcggagacacgaactgagcgattcgagtcagttcaaccacaacaccccagagtacgcagtgcattattggagttgattacgatgtcgtctccattccatcgccgtccttttcccgactatctcttcgcctcgcctctcgccgcgttcctctaccctctccaccacctgctatcacaacttcgcggccctcctcgattgcctcctccagacgcccgtccgattcgggttgtttgcatctccgatactcacacgttagaattggccgatgtgcctgacggagacctcctaatccacgcaggggacttgtgcaacgacggcagtgccaaggagattcaagccgctgtcgactggctgcgcaagcttcctcatccacagaaggttgtcatctgcggcaatcacgatagctattttgatatccggtcgagaaagcaacgaagaccgcgaccagtccctcgcgaccgtctcttcatccacaggcggcctccgctcag

SEQ ID NO: 22743 - DNA, 500 bp, Emericella nidulans
ctgcatcttcactgagacgttggcgccggaggccttgctggcattgcaaatgaaaggatagttgagcaaatgcggcgagcttatgctggtagactggccactctttgctaactgattgggtcgcacagcgagtgttctggaatcacaaagataagacggcttacaatttcgtatacatcggacatggtatggagggatggccgtttgttgtccatggcggcgcactagccaccgtactggacgaacatctagctcgagtggctatccaacacttccctgagcgcactgcggttacggcgaatctagatatcaactatctacgcgcggccacgtcgaacgggatttacgtcttcagcgcgaagctagatgaggaacggagtacagatcgcaaggcttacgtgataggatcggtacgtgataaggacggcaacgtgtgcaccgtagccaaggggctctttgtagtccctcgaggatataagctgcggaaattggaaggcgcc

SEQ ID NO: 22744 - DNA, 850 bp, Emericella nidulans
cctgcggaatcataatgttgtcagtttgctggaagtcatggtcgagaagaatgagtgcttcatggtttttgaatatctctcgcacgacctcacgggcctcatcaaccatccaacctttactctcacagctgcgcacaagaaggatcttgcgaaacaaatgttcgagggtctgagttatctccaccatcgaggagttctacatcgggacattaaagctgcaaatattctgatcagtaatcaaggtcgactcaagtatgctgactttggcttggctcgattcttttcaaagagtcgtcagcttgactatacaaatcgcgtcatcactatttggtaccggccgccggaacttcttcttggtgaaacacagtatgggccagcggttgatgtttggagtgcggcctgtgtttatgtcgaaatgttcccgaaaaaggcagtcttccctgtagaagaagggaagattagccaactcgacaagctttgcaataccctaggaacgccaactcgtgcagagtgtccgaatattgtcgaaatgccctggtttgagctcatgcggccaacagagcgaaggaacaggatattcgaagatatctatcgggacatcctctctccagccgcgttggatatggtctcccaagtgttccgttatgatccagccaagcgtccatcggctgaagatgttctcgcccacccttacttccattctgaggaaccgagccctcaacagccaatcgagtaagtgtttagcagtttccagccgagtaccaaagtacgaatactgacttcctctagactagagaatatccaaggcgactggcatgagttcgaatccaagacgcttcggaaggaaagg

SEQ ID NO: 22745 - DNA, 850 bp, Emericella nidulans
ccccgtcgtttggtatcgagtatatccaggaggatttccacaaggacaaggggttacaagcgattgggttcatgggcgggccctcggagatgtcgtggattaacgagctgtaccaggttctggagaaggacaccccttttttagactcggaggcgtcgaacaaatcgcagtctctcacatcggtctgctacttccttgacgacgaagagctctccttggagcccaatattgacccgtacggccggccgccgcgtcacatcgccgaccagctgctcgactgctatttcttcaccgtccatccatcctttccgatcatcgcaaaaatgccgtttatgcagcagtatgagatgtattatacgcggacagatatccagccgacgaaacggtggctgaccatcctgaatctggtctttgcgctggcgtccaagtttgcgcaactcgtctcgaagccgtggattgcagaagcggactcgccgatggcctgtttcacccgagcgcggaagctgaactattcggagagccagctgctggaacatcctaatctgcaacaggtccaagttgaagggttgaccgcgttctttttaatggccatcggacatatcaaccgctcctggagagcttgtggcgtttccgtccgctcagccattgcccttggggtcaatctgcgcagcgagagtaaagaaacgtccacgctctcaaaggagatcaggtaccgggtgtggtggtcgatttacacgcttgagaacacactatcgatcatgactgggcgaccgacgagtgcaccggacaagtacagcacgacgccgctgccgattccctttgatgaggagcagtttcgagaaccgctagc

SEQ ID NO: 22746 - DNA, 500 bp, Emericella nidulans
gatatccaacaactgatcaaggggtcaaagcctgacaagaaaaagaatgtctcgctccgtccgccgcctgatgaaagaagccgcagagctgtcctcatctccctccccgcacttccacgccgcacccgtctccgactctaatctctacgactggcacttcacacttgccggcccgccaccaccatctccctatgccggtggaatctaccatggccgaattgtcctcccaccaacctacccactccgtccgccctccttccgcttcctcaccccctccggccgcttcgaagtcaaccgcgagatctgtctgagtatatccggccaccacgaagaaacgtggcagccagcgtgggggattaggacggcgcttttggcgattagaagctttatggagggggatgcgaatggcaaggtagggggtttacaaggcgtcagtgacgaggtaaggaggcaatggacgggcacgagtcaaggttggcgttgtgatctttgtgcaaaga

SEQ ID NO: 22747 - DNA, 654 bp, Emericella nidulans
agggcgctcgtgcgcaagctcgacatggtcatcttgcctttcgtacgcgccccgaacccaggacaaacagaaacatactaacactgagaactctagatgtgcctcgtattccttctgcaatacctcgataagcaatcccttagctatgcgggtgtcttcggcctcatcacggatctgaacctcacgaacagtcagtactcctggtgcagctcgatcttctacatcggccagctagtggccgagtaccctttcatctacctgatgagccggttgccactaacaaagttcgtcggcgcgacggtcatcctctggggcataacagtgcgcgtcctcgcggcgccgcaaaactacccaggttcgccgccgtccgatttctgctagggttcaccgagggagccgtttcgccggcttttgtgaccattacctctatctggtacaggaagcatgagcacgcgttgcggacggggctgtgggtgtctatgaacggtatcgcgcaggtagtcgggtgtctgctcatgtacgggattgggaggaacggaagtcttgcgctgcgccatggcgcacgctcttcattatctgcggcgcgctgacaatcgccgcgggcatcgccttttttattcttatgccttctgggccaaaggacgcgtggttttt

SEQ ID NO: 22748 - DNA, 529 bp, Emericella nidulans
gccgcactcgcgccaatgcaaccggtatccaataatccatctcaatacccttggacgcccgtccacccgtcgccgctctccccgcgcagactatcaacgacagcagcgcctttcgctgctgctgctgccgcatccacaccaacaccacaaccgcaattccaacctccggtatttacctttacaccctcaccctcaccaaatcaaaggaatttgggggtaacctcaccctcacggaaccttaaagccaatgcggatgcaaacgccaataccaacggcaccacctcaccaacccctagctcgacctacgcaaaccgctacagaaacacaatttcaaaccctctcttcgcacactccacaaaacgtacatacacatcatcagcctccccgcgcgcgcgttccgtccggcgtaacgctttcctcaaccgcgtcaagcaagaccgcgacaatgggcgcgttgatgctcgcgccgagcaattggcatacatggatgacatcgcggaacagaaggagtgggctgagagcatgaaga

SEQ ID NO: 22749 - DNA, 850 bp, Emericella nidulans
ctcgaaagatggatgcaaatatgaggcaaatgcaggaaaccaggaaaatttgctcaaagattggtatcgtcaaacaaatgcaactgcagtctcaggtaggaacatggtattcctacatagcatcatgctaacttctcccccagatgtaccagaaccagttccagaagtatcagccagagccctttgttgaacaggatgtcgaggcccatgttatgaacgacaatggtcctgtgatcgccccatgggtatgcaaggccgctctgcagcgttcggtagcaaagatattctaccacaccggctttgaagaatatcagccatcggctatcgatgctgcgaccgatatggcttcggacttcttcgtcaagattggacagacattgaaatcgtacatggaagcgccgaaagttcctgtggcagattcagtggaagcaactagctcaccgcagtggaaacgggcgtacaccgagccagagatgatgcttcatactctgtcctccgtcggcatcgacattgagggactagagtcttatatcaaagacgacgttgaacgtctcggaacgaaactcgtgactgcacatgatcgcttacgctcgcttctttctgagctccttcgccccgtcctgcaagatggtggtgaagatggctctatggccttcgctgacggtagtgaacaatttgtcggtggtgattttgccgaagatatcgacgaagacttttttggcttcaaagagctgggcttggacaaagaatttgggctagccacgcttagcgtgccattgcatcttttgcaaaacaggatgtacaacgcggcccaggcgcaaaacacaaagtaagttatccagaccgctgc

SEQ ID NO: 22750 - DNA, 690 bp, Emericella nidulans
gttctgactttgagtcagtctcttcgtctacttctgagcttgtagccgagagcaagcctcaaggcctggacgagagagaaagtcagaccaatctcgagcctgaatcccagattgaagatccattggtggtcaaagaaaaacaagacgcacaatgccagatcgaatctgaaaatgctcttatgcttgcgaagggtctaagggttgagagtcaagatcaacacgaagagtatatctcgagcgagcatcagatcaacagccagcaaggtctcctcgttgaatcccaaaaccaagacagacagaacctggttaactctgaacccgggagcaataccgacatcaagagtgacgaccgttacggacatcaaatccacagcggagaccagaaagaaagtccactgttggtaaactacgaggatcaagtccacaaagaacacatctcagctggctctgaattggctcctgtatccgggtctgagtctgagcctgaggcgggttttgactctgattctgtatcttcacccgctcctacacctgagcttgtcgaggaagataaaactagtgttaccaaacaccaagggccccatttaggagcagcgaccggaccgttaatcctacaagcgaagcctggtgcacttattctcagacagaattcagacctactgggtctacgaatcactgcccctcgtgctc

SEQ ID NO: 22751 - DNA, 850 bp, Emericella nidulans
tctggtcctcgattttcttctacgccctcgataacaccgtcgtcgctgacattcagcccgtcattatcgaatccctcggagagctcgaaaaattgacctggctcagcgttgccttcctactcggggctaccgctacaaacctgatctggggaaagatctacggccatttcaatgtaaaatggacatacctcttcaacgtcgcagtctttgaaattggatccgccatttgcggagcagcgccgagcatgaatgtaatgatcgtgggccgtgccttgtgtggagtggctggtgccggcctctatgttggagtcatgaccttgcttgccatgacgacgaccctgtcggagcggccgctatatgtcggcggaactggcctaacctggggaattggtattgtcctgggtcccgttgtcggaggcggattcagccagtcatcagtcggctggcgctgggccttctacatcaacttgctaattggggctgtctgcgccccggtctacctgttcctgctcccgactaaggatcctcggccgggcgtttcacttaaagagcgctctcgggaactggattatgttggggctatcttgcagatgggagccttgactacctttgtcctcgccatctcgtggggcggagtcacctacccatggaactcggggcaagtcattggctgctttgtggcatctggtgtcctgttcatcatcctcggcctgcagcaggtctttcttgtcctcacctccattgatcgtcgcattattcctgtcgaattctttggctcacgcacggtcctgatcctgtgttcctgcacagccgccgccgtgccgctgcgtttgttcctatctacatgctt

SEQ ID NO: 22752 - DNA, 850 bp, Emericella nidulans
ctcgggatatcgaccggactgtcgtgccctcgtccaaggtcaccgtttcgaccgcgggttacacactgaccggcataccgcgatgcgcggtccttccggttcctcggcatcccgttcgccgacccccctgttggtgagctgcgtcttgcgcctccgcgggagtactctggccctaaacgcatcgacgccaccagactcggcgcctcatgtatccagtcggtctctggctttgcgcgtcgcgcgacatctccgaggactgcctgtacttgaacgtcttcacgccaatcgtgcccgagcggcccggcatagtgcgcaagcccgtcgcggtctacttctacggtggcgccttcaccagcggtaccgcgtcgatcatcgactacgacggcggcaatttcgccagtcgcaacgatctcgtcgtcgtcaccgtcaattaccgtctcggcgcgctcggctggctagccacgggtaacctgaccaccggcagctacggcacccgagaccagatcctcgccctccgctgggtgcaggcgaatatcgcagcttttggcggcgaccccagccacgtcaccatctttggccagtcggctggcggccagagcgtcgtcgccctgctctcctcgaccgccgcccgcggtctcttctccggcgccctcatccagtccgctcctgtcgaccttccctggtacacccggcaagtctacagtgaattggtcgtcccccacgtcgcgcaagctgtgggctgcggtaacgcgacgactgagtccgagtctgcgctgctccgctgcttgcgcagtctgccggcgacatccttcctcgacaactcgacggcctttgaagccgccacatcggc

SEQ ID NO: 22753 - DNA, 564 bp, Emericella nidulans
agcaacaatgcgagtagctcggctctggagtcaccatcagattccagactgcccaaggttacaagcagctcttcttctatcatcggcgaagaaagaactccgccgggtaagggcaaggcagtggaaagagtcactccgtcccagagtaacgtcgacctgaccgaaactgctagctctggtgatgtaccgagcagtttcttagagcctcaacaacctcagtcatcctcgtccctcggcccgccggtacccaaggagccttccaagccttcacacctgcgtcatgtgtccagcgcttcctcatcattctcgtctctcgtcgagtccatgtccgaggagcctgggctctcggcccagccacacgaaggtaccagctcatcagcggaaccattgttcaacttccgcagtctagccgccgttattggcgacgaggacaaatcagatgaagcggcggaacatgttgaagacactgcccctcacacgacatcagaagggtcaacttcgagcgcagcgaacctgacaaccgctccggctggtgagtcagctgtgtcaacttctagtacggcc

SEQ ID NO: 22754 - DNA, 850 bp, Emericella nidulans
ggagatctttcttgggcatgtgtccaataataacaggataatgggcttgcggagtgttggcgaatggcactctaatgaactcagcaaagccgagtatggtcgaatgccttggcatgatgttgctatgggcgtgataggcgattgtgtctacgacattgctgagcactttgtcctccgatggaattttataaagcgcgacaagtataagcgggatccaaccgttgactggctattgctcgagggtcgcacgggcaaggatgaggacctcgttggcgtccagcgcccaaagtttccagttggtgattatgtgcagcacccctacaagccattgaacaccaagcctatgggagcgcaaggatcttgtacagcacagattgtacgcagcagtgctgattggagcagcggcatcctcgttgaacacagcattcagaacgcttacaaggacattatcaataaggccgaacattttgtttacattgagaatcagtttttcagtaagctttggtgaatgtcctatgcgggattgaattgtgctaacacaccctagtcaccgctactggcgatcaacaaagccctattcttaatacaatagggcggtccatagtcgatgcttgcgttcgggcgggcaaagaaggaagaaagttccgagtgattattgtcataccggcgattcctggattcgccggagaccttcgacagaacgaggcgacgggaacaagggctatcatggactaccagtacaagtcaattaaccggggagaacactccatctttggtcagatagcggctcagggagttgatcctacaagtgagtcaagcttcatcgcaaagcagtacttcgctaataaca

SEQ ID NO: 22755 - DNA, 507 bp, Emericella nidulans
cgctattacctccccgctcagggccatcccaggcccattctatactagtctgacccggttgcctctgaagctctccataattgctggacaacggatatacttcatccacagcctgcatcagagatatggccccatcgtacgtgtcagcccgaccgaagtctccattgcgtctctccctgagttcagagagatccaccgtgttggctcgccctttctgaagagcaattggtacgaaaagtttgtaatgggccagcactcgccgggggtgtttgctatcagtgatcccaagcaacacggggctagacggagactattcgcgagggcgatgtcgaataccgagttgagacgggtatgggaggacgtagtgaggagcaaggttcgccaggaagttgatcggattaagggggaattagaggcagatggggccagatgcgatgtactgaagtggtggacgttccttgcgacagatgttgtagggcatctgatgttcggggaggatttcgacat

SEQ ID NO: 22756 - DNA, 850 bp, Emericella nidulans
gagcctcacaaggttgctgcggacctattgcgcgcactggcctatctctttaagcattcatctttgaaggtgaagattgctcgagcgctcaccacggaaaccgatgactctgagcggatccgcgctcttttctccaacatccttgagcaagtcctagccatcggagagtccatgcagagcgtcaagccggtccaccaggccgctggtgatgttctcagtggtctattcagtaccctcactacaatcgacttcctcgatactatcgaggcactcttgaaacgtcccgatgacgcgctccgccggaaggttctcagcttgcttgccactcgcctgcaacagagccctgagcgcgacggtgcttcgcaaacgcgcatgctcgacttcctgacagtccttgttgacatcgtgcaatcgtcccctgacattctgctcaaacatgccgcggttacttgcatcgaccgcatcacggagaagtacggcaagaaggagccgtccatggtcacttctgccgcgcaggttgtcgccagcgcctcttgcatcggccaagaggacgatcgcatccgcatcaacggcgtgctgtgccttgcttcgatggttaaggttcttggccaagcaatgatccctgcccttccagaggttctcaaccggtctctcgctttgctcgagttgagtttggaaaccaacaaggtcaatgccagactccatgatgcagtcttcactctcttttctgccctcttcgtccatctcccctacatggtctcagcctcccacctcgaccgcctgcttgtgctatatttcaaatcagccgcctccgatgaggatctcgacaatgagaaccggcaagaagcgc

SEQ ID NO: 22757 - DNA, 708 bp, Emericella nidulans
tccatccgttgttgccgtcgtccgcgggtcagggggcggaaagaccctcatgttcaatggccatactgatacggtcacccttcaggctacgacgcgaccccttaagcgggcgtatcgccgacggaagactctacggtcgcggatcagcagatatgaagagcggccttgcagcagcaatgacagcaatagcgggggcgaagaaacttcatcttcgaggtgacgtgattcttgcggctgtcgcggatgaggaatgcgatagcatcggtacagagcaagtccttgcggctgggtggcgggcagatgcagcagtcatcgcagagccgacggagtttgccatcatcaatgcgcacaagggctatgtgttgtttgaggtggatattcacggcattgccgctcatgggtcacggccagatcttggagtcgatgccatttgcaaggccggatacttcctcgtcgagctagatggctacgctcagagcctgcagcagcgaggtcccagcagggtcaacacagatgcgcccaatgttcatgcaggcatcattcgcggcggtgcagagattaactcgtatactggcaagtgcaccatctttattgagcgccgcaccattgcttgcgagacacccgactctgtgcgcaaggagcttgtgggcatcctggagacacttggattcacttgtcccatttcagttttgatctccgcatgacttc

SEQ ID NO: 22758 - DNA, 500 bp, Emericella nidulans
ttttcggatggcaaaacatatgacatcgaaaatgcgacagaaaaggcagccaactctccgctacatcgtagcctaagaggtcgccatctgcagatgattgctatcggaggctccatcggtatggacatgttcgaaagtctttatgtggcactgctacgtttcagggctggagacttcattatagatgctgatattgtatacttctgttaggtaccggcctgttcgtcagctcggggagggtccttgctacgggaggcccggcttcgctcctcatcgcatatgcattgattggatgcatgctctactgtgctgtacatgcccttggggagatggccgtgatattccccgtggctggttcgttcgcccactactcgactcgctttattgatccggcctggggtttcgctatgggttggaactatgctctccaatggctagcaattttacccttagagatcgtggcggctgcaattaccgttgattactggcaatcgaccact

SEQ ID NO: 22759 - DNA, 850 bp, Emericella nidulans
ttgcgaatgggcacaaagtcagagcaacgaatatctggtgggagggcacatatcggggacatattcccatcggcgatattggcacagggcttacgccgtacccgttcatccatatcttttcgcaggatcaacacgagaggctgctcgagaaccgcctagcgtcgtttggcgtccatgtcgagcgaggtctggaattcataggattcacagaaaacgactcctccataacagctcggttgaaatccactgaccacgaaaatgatatagaaacatgcgaagcggccttcattgtcggctgtgacggaccgcattcaaccgttcgtcatgccgccggaattgattatgacggtgcaacgtactcccatacattttttgttgccgatattgagggagccgggccaactttcaacggcgaagcgcacgttagcttcaatgagtccgagtttatgttgctgttcccatatgatgatgaccatcgggcccgcatttcgggggctattgatgacgaaacagcagagagaaaaggtactgatatcagcttcgaggacatcgctccacagataaagcggtcattcaagatgcagatcgacaagatgaactggttctccacttatcggagccatcatcgcgtagcggcgtcgttcgccaaaggcagagtattcctggttggggacgctgcgcatatccatagcccagtcggaggacagggcatgaacactggaataggagatgcaatcaatcttgcctggaagttatcagcggttgttaagaaacaagctggtttatcgttgcttcaaagctatgagacagagcgccgcgcttttgcgcttcaattggtcagcacgacaga

SEQ ID NO: 22760 - DNA, 670 bp, Emericella nidulans
cacgatgctgccattctccccaagccgggcggtcccttggccgtcggcaagcgggccacccctgagcctggtcccaacgacgtcctcatcgaagtgaaggccgtggccttgaacccctgtgattattaccagcgggactatggcatgccaccggtgccaatctaccctgcggtcatcggaggtgatgcagctggtgtggtcgccaaactcggcccgagtgtcacggcaggctctgtgcctggtcccggaagccgagtcattgcctttgcctcgtccttctaccagaacggctcccccgaccacggagccttccaaaaatacgccctggcccagtccgaagcggtcatcccccttccagacaatctctcgtttgaagaaggcaccatcttccccctggctgtcttgacggctctaacggcttggactacgatcggtattccgctcgatactcggtatactcctgcggacaagcaagcggtcctaatctggggcgcgtctagcagtgtcggctcattcgccgtccaatcagccaagacccttggttttactgtctacgctacggccagtcctaagcaccatgacctagttaagaagctcggagctgatgcggtctttgattataaagacagcgacgttgtctccaagattgtcgacgccgtgaagaaggatg

SEQ ID NO: 22761 - DNA, 850 bp, Emericella nidulans
atatcaggcatcaccatagctccataaaccgaattccctaagtttaagtacgtgataaacttgcccgacagtcacagaagcgaaacacctcaatcagcaccggatggagaacatggactctcacagaagcgctgaaaaaacggatatcgagaacgatctcagaatggggcaagagaaaatcgtgtcttgtcccagcaattgaggaccgcagcaatatgctgcggcacgcaagtggttcttgatggccatagtggcagggggaggcctagtcgtgcctctgagcagtggtgtcttgttccgtaggtcttctctaggtgctgctgctgacggactcgctgtcaatctgaatgatagcctgccttattatgatcgcccaggatcttcatacaaccgtctctgtggtgaacctgtctattgcctttggctccctcgccgtcgccatcacgcctctccggtggtcacacctggcagaactccacggtcgtcggctagtttacctgctctccttctgatttcttggccttttcagcatcctggctgcaatcagccccaacattggcatgttcgtcgcaatgcgccttctcagcggtgctgctagcgcatccatacaggccgtcagtgctggaccatctctgatatgtttgaggcgcacgaaggaggcaaagccatgggcgccttcatgctcggaccaaagcttggccccatgttcgctcccatcactggcgctgccctggtcacccggtggagctggcgcagcacgcaatggttcatggtaatatatggttggactgtattcttgatcatggtgttcttcatgccggagacggcaacgaaccttgaagagaaccag

SEQ ID NO: 22762 - DNA, 310 bp, Emericella nidulans
ctcactttccagctcgatctcagctccaatcgtctcgaaacagtatcaacaccctccccgctaaccaagctgcgggctctgagagtttcggacaatcgcctgcggagtctcaatgttggtctattcccagcgctcactcttctttacgcagaccagaactgtctatccaccattttaggtcttgaccagagtcgtgtcttagaagtattgtcagtacgggaacaggaaattccggatggcgaatcccttgatttggacctgggattgctgaaggatatccggaaggtattcttatcatcaaacaaacttt

SEQ ID NO: 22763 - DNA, 850 bp, Emericella nidulans
ctgtcactagcctatccccgtacaaggagcgtcatctttcatccgatacgtccagtacgctgggagtccaagaagatgagacaacagttgagatgaaacttgccctcccatttcttgatactctcatggtggagagtgcaagctttggatgggatcccaaagcagacccaaatctgcaggatataacattgacgttccccggtcgaagtttctccatgattgtcggtccctccgggtctggtaagtcaacactattgaaggccctgcttggtgaggtcccgcggcttcagggtaaggtgcaggtttcgtccgatagcattgcatactgcgaccaaacgccttggcatatgaatggtacgattcgggagagcattattgctatgtcagagttcgacctgctatggtataccactatcataaaagcatgtgctttagagcaagacctagcccagtggccccaaggtgaccaggctattattggcagtcgtggtgttgcccttagtggcggacaaagccagagaattgtacgtttccactcctcgaatagccaccaaggacagatatgctgataatatatcccctataggcactggcaagggctatatacgcccggaaacgaattttgctcctcgatgatgttttcagcggtctcgatgcagccacggagaaccacattttctgcagcttgcttggagtgactggactcctgcgggaagctggcactactgttgtcctcgcttcatcttctgtcaagagagtcccatacgccgaccacatcgttgtgctagatgaagaaggaagactgacagagtctggctcgttcggtgacctcgctgagcaatcaggatac

SEQ ID NO: 22764 - DNA, 500 bp, Emericella nidulans
cagacgagccaatcgataacgttgctgataaaaaaaaaaggatctccgacgctgcccctccatacagttcttacactacctatagcttcattccgcatcgtataatactatcttaatgagtttttccccctaattgtcagcagaaaatactacccagaatgattgccatcggtcttgaaggttccgccaacaaactcggcgtgggtatcatgttacaccctaaggacggtagcaccccgcaagacctcgccaacatccgccacacatatgtctccccttccggggaggggatttcttcccaaaggatacagcagggcaccaccggtcccgggtcggcaaggctgggaaagaaggccctaaaggagcgcgtatcttccttgcaatggggaccgtttatgcctccaccagggcccaggatgggagcttcccctttaaatggggcaatggcttgcccgcccttaactttcttttggggaaggcaacatttggaaaaaccactg

SEQ ID NO: 22765 - DNA, 850 bp, Emericella nidulans
tcttgctgtcggtaaaaataaaatgggccaggatgctctagatttggtgcagctgcttggaaacatccagcagagcattgtcgacgcggatgaccctcaatcgcaatacctcctccactgctggggtcggatgtgccgggttctaggacaagactttgttccttacctccccggcgtgatgccgccacttttagccgttgctgcagccaaggctgacatccagctgctcgacgacgaggaccagatcgatcaggtggaacaggacgagggctgggagctcgtaccgctcaagggtaaaatcatcggcattaagaccagcgccttggaagataagaataccgctatcgaactcatcacgatttacgcgcagatcttggaggccgctttcgagccctatgtgctagagacgatggacaagatcgccgttcctgggcttgcgttcttcttccatgacccggtgcgagtttcttcggcgaaattgattccgcagctcctcaactcgtacaagaaggcacatggaatacagtcagctggctttgcaggcatgtgggttaaggttgcagagaagattatcgaggtactgagtgctgagcccactgttgacacgcttgccgagatgtatcagtgcttctatgagtccgtcgaggtggttggcaggaattctctaggcccacagcacctgcaggcgttcattcaatctgccaagtctacgctggaggacttcccatcgcgggtgaaagcgccggccgaaataagggcggtagcagatgatgggtgaaaagagaacccatacctccagtccgccatataagatgacccgaaccttcctaaggatttgaacaaggttttc

SEQ ID NO: 22766 - DNA, 850 bp, Emericella nidulans
tacttcaacctcgagtacacacgcagggagctcgatgagagccacgaagactataaccctcgcatgagcaacacccgccttgcacacgttgaccggctgggatcgcctacgaggcggtttgttgacgactatttctgcagggagcgtgcgcgtctagatgaactaggcgcatttgacacgcttaacaggaatactagggataaactcctctgtactttttttgagatgataaatccggtggtccccattattgaccgtaaggacttcctcagcaaactagaaacaggccatgtttcacagctcctgctgcaagccatgtatatggtctcattcttacacagcgatccgtcaattatagcggacgccgggttcggtaacaggtatatggctgcatttacatgctaccaccgggcaaaggcgctttacgatgcaggatatgagacagatgccgttgcggtgatccaggcgcttctatgtctgtccttttggtgggagactccaacgcaacaaaaggacatgtggtattggaccgggataagtgtgaaccttgcgcagtctttaggaatgcatcaagagtaataaagctgcccttcgccgcctgtacttgctaacaaatctaggtatacatacttgtccttggaccagaggaagagcaaactatggaggcggctgtggtggactatatatgtgagctcttcctcaacggattggttattaactaacagaacaccagggtcatgacatctccactgcagtgcagctaggacgtatcccacatgtgaacgacgcgtattgcacgacaagattagtgacagaacaggattttgatgatgatgatgataatgatgac

SEQ ID NO: 22767 - DNA, 850 bp, Emericella nidulans
atctagggtatgtcagtttcaacaaccctgggttcgcggctgggatggtggcgtcatgcacgatcttcgtctcctctgcgggaaccagtgcgtttttgcctgttatctcggagatgcgcaatccgaaggagtacaagaagccactctatctttgtatgacattggtgacggcgtcgtacttggctttcagtctggtagtttatcgatggtgtgggatgtgggtggccagtccctcattaggggtatgtcttttccccttgacccccttactacagaggactcatgaaagatcatttagagcgcaggccaaaccatgaaaatggtctcgtacggcgtcgcacttcttggtctgatcgtcagcggcacgctttacctacacgtatgctcagccacccctcttcctgctatcctttttcagtacctactctaactgctgttcatatatgaaggtcggcgcaaaatacgtctttgtccgcatcctcagcgaaacgcggcacctgcagtctaatactcttgtccactggaccgtctggttgagctgcacaaccatcctcggcgccctagcattcgtgcttgcgtccgcaatcccaatcttcaactacctactcgcccttgtgggttctatttgctttgcccccttggcgatgagtctcccaggctggctatggctgtatgaccacggagaatacagaacgggaaatctggtgaagaaggctgcatatggactgcatgtgggacttgtgctcctgggcgtgttcttttgcgttggggcgacatatggcgttgtagttcagattgtggatgcgtacgacagcgggcttatcggtaagtaacctgtgctcctgggaac

SEQ ID NO: 22768 - DNA, 500 bp, Emericella nidulans
ttctttgttccatttacttctctaactaatcacgcatctagcatctgcctcttctgttctgctcaggcagaaaatcgtgaaacgatgtcgtgaggatatatatcagttcctgaatgaggagaacggccagattgctatttacgatgctgtgaacccatcagcagctggacggcggtccctagcaaatgaatttgcgaaacatgatatcgaggtccgtcgagtatctcagatctaagacacaatgcttaccagtatattagacgttgttcattgagtcatggtgcgatgactaccggatcattgaggaaaacgtccgcagggttaagatttcatcgccggatgttagtgtatcctgtggatttgcattcgcttcaatcgacactaactgccgtcagtatgtgggttggtcatccgaggatgccgtcaaacattatctagctcggatatccgcccgaatccctcagtttcatacaatggaagagaaagacctcaattacttt

SEQ ID NO: 22769 - DNA, 500 bp, Emericella nidulans
tgactcactatccaaaacatctgtgactaacaagtatggtgactcatcacaggacaaagaccgatgcccttatctcctgggctcgcaatggctccttctggcccttgtcttttgctctcgcctgctgcggtgtcgaaatgatgcacacctccatgcctcggtacgaccaggaccgactgggaatcatctttcgtgcctctcctcgacaagcggacgttatgatcgttgccggaaccttaacaaataagatggcacctgccttgcgacagctgtacgaccagatgccagagcctcgatgggttataagtatgggcagctgtgcaaatggcggagggtactatcactatagctatagtgttgtgaggggagtcgaccggatcgtgccggtggatgtctatgttcccgggtgccctccgatgccggaggcgttgctgcaaggtattttcacgctgcagaggaagattagaaggacaccagtgacgaggatgtggtatcggaaa

SEQ ID NO: 22770 - DNA, 500 bp, Emericella nidulans
agatcactggtctcactgctggatacgagtaggtgtggttacattactcatatggaaattaggctaagccatgataacagtcagccaaccgtccccatacttaggaacctaaatatgagcatcaaaccgggagagaagatcgccctctgcggtccgtccgggagtgggaaaacctccttggttatggcgatactacaaatgctaagcgtccaggccggacgcatactgatggacggatgcaacatcgcagcatttcgaaaagcacactccgctcacgcatcaatgtggtactccaggatccattctttatggacggcaccaccctccgcgtcaacttggatccccatcagagtgtcgctggggatgcagatataatcaaagctcttggaaaagtacacctttgggatcagatccgcgcaaaagggggtctagaggcggaatttgcctctacggactggtcggtcggtcagaagcagttgctctgcttggcgcgtgctatg

SEQ ID NO: 22771 - DNA, 573 bp, Emericella nidulans
cgcacaatggccatctaccaaccaagatcccactccgctcttcatctcgccagtcactgctggtccagatgtgtcatggggcgccggccatcctgggccttcttggttgcgccttgaagcacacggagctggttctagagcactgggaaccgaactggaaccgcgccgtatgtcttgccacggatcgcgtgtgggagcagggtcttctctcgaaaggcggaggtttgtgtcatggcattgcgggaaatgcatggcctctgctccttctacatgacgtctttgaggatagcagcgccgtcctagacagagccagactaaactacaccacgcgaaaatcagatctggctgcaactgagggtcttctctccggagacttttttctctctcgggcaattgcaatgatgctctatgcacgagagaccccaccgtacaacgcgtctctggagactgcatccaataattatcgaatgcctgacaatccattttctctcttcgagggcctgtcgggcactgtatgcgcctgggctgaagcccagcatcgtagtcaaagcacggcttcgcaaactcgaagtt

SEQ ID NO: 22772 - DNA, 554 bp, Emericella nidulans
cggaggggaggaacaatgccaaaaattctctgcctacacgggcacggcacgagtgcccacatattcaagtctcagactggtacctccctttcgcctcttccatctactgcaacccctttagtcgagcacagttcataataattctcctatacagcactaatcctcctcatcgcacagcatccttccggagaaccctcccccactcgtacgttttcgacttcatctccggccccttcccctcctctccggcgccagggattaaagccatttaccccgactcgccaacctacacctggttccgggaaccaacgcctgctggtttacgcgctgcacacagatatgtggctgaatatatccagaagcatgggccgtacgatgcagtcatggggttctcgcagggatgttcattgatcgcatcaatggcattgtatcactcttatgacagattgagcgagcaggggcaaaatggtatacgcggagacctgccatttaaagcagcgattttcatttgcggcggtatccccctttacgcgcttcaagatatgggcatacct

SEQ ID NO: 22773 - DNA, 840 bp, Emericella nidulans
tactacgcaggcgactctggctactctaccagcatatacatcgcgcccaccgacggcagcaccgcaagagcgcgagcccactcttcccaacgtggctacattccctgagaaaccagatctgagtcggacagtaacacaatcgtcagcctattccgatcctgccacgttctccgcaacctctgcggtttcggcatacagtccactggatcgtcaaccgtccccggctcctccagtccctcctcttccgggtgacgcctctatgatcactgggcgcacccaaactcctgtttctcgctcgaattttacccccgcgccttattataaccgcgggcctcccagtcgtatgggtactccagggaggcaggatctatacagtcctgacggccacaatggtccgtcatccgccagttctttccgtccctatgacattcccgccgatccttactcacgcacaaaaacgccgagctctgctgtgaccaatgttgacggtcctatgcgagcatacactccttccgatgcccacaaatctcgcccatccccgcagtctgttcgcccgccgcgatcgtttactccaggaacccaagccacgaatcgtggttcaccggcatactcaaatgacgaacaacctgttagaacactcactcctatgagcacccgagtgcctcccagggcacaagatgaatatatacccttcagtgcgtccgctagtaatgttgctgcaacacaccctgaagcagcttctgaatacgggagtgagcatcgtcctggacaagcatatacttcgccaacatacaaccctcaaccaccccgtcatccagatcactactactagcttttcac

SEQ ID NO: 22774 - DNA, 553 bp, Emericella nidulans
actactgataactcagtcagttatggtataccagagtcattattttcttcactgaaggacatgttcgagtccatcgtggggagtcagtcacgaattgggataatccggccgcagcatttctggaggtgctccgtcgcgaaaatgagatgttccggacagccatgcatcaagatgctcatgaatttcttaaccttttgcttaacgaggtaattgtggatgtggagaaagccgccgcataactattagagagccctcagcccgcgagtgacgtttcagattccgtcattccttcgtctagttcaggttctagaacgccaaacaccacacggtgggttcacgaactgtttgagggtctacttacttctgagacacaatgtctcacttgcgaaaaagcgtctcaacgagatgaagtctttttagatctatcggtggatctggagcagcattcgtcggttacctcatgtttgaggaagttctcgacagaggaaatgctttgtgagaggaacaaaatacactgtgacaaatgcgacggactacaggtagcacacaagag

SEQ ID NO: 22775 - DNA, 850 bp, Emericella nidulans
ttggatctggttcccagcgccgtacggtcgttcttatgatgacggttgttgttgagccccctcgtacttctcgcgattcttcgaagatcaattgagccagaaccctgatgggaacaatatccgcactctatatatcgaccgcgaccctgtcactttccgggaaatcgcccgacatctgcaaggtattcagcccaagctatcgcaaccaaggcttcgataagataggctaacattacctctaggataccattgcctccccaaagatggagctgagttcgttaaactcttcgccgacgcgcaattctacagccgtacgctctcctaataccagttttacaattaaaaagcaccaactaattaaccgcagttccccggttgatgtcccaactcttcgaatcccagattataatccagatcggcgaccgtcatttccagatttcgcgcgacatcttctctgggcccggcgatagccctaattttttcaccctcggcttcggcgccttctttgcttccccggcggaagtcttccctggcctagatcgacgcggcctcctacggccgccagccattgtgccgcccagcgttcccaaccgctccggcgacgtcttcgcgcagctcgtccacctcctccaaggctatccgctgcatgtcgagagcgaggcgcaacgcgcggagctgctccgtgactgccgctatttccatctccgcggactcgagcagaagctcattccgcaccatatcaccttcaatcctcttcggcgccgctcagagatcgttatccgcttggaggatgttcggcgctctggcatttcgatggagcaccatcaccgtcgccagcaatcgcgagggt

SEQ ID NO: 22776 - DNA, 766 bp, Emericella nidulans
tggtttccctttctgtgctagcgacctatctgctgcgtatacccaaggaaatccggttcaggaccacacggcccatgctcatgtcgcgcgctcggaagatgtaggccatatgcatggcgggcttgcgaaagcgatggagatgtggtttgtcgagacctgggcctactacatcatccttggcgtggtttatggcgccaccctgggctatgccagtatgcgcctactgcggtataccctccgaaagtaaagcgggcctatacctgataccattatttgaggatgctaacccgtttcagaaagtggatagacggcgagagctacgtgctgttcccggctgcgttaggagtaagtccttttcatgcaacccgtgttcatacctaaaccattaccagctattcctccttggaacgtgtggttgtgtcggaacgaacgatctcctcgcctgttattttgctggtggtgcgctgaattgggacggtggctatctggcagaaaccgaagcccgccatgacgaagtcaattcatgtatcgacgttctcctcaactttggtggattcatgtatattggagccgtcattccatgggatgacttccaccagccagacaccacaggaatcacatatccccggctgattcttcttggcttcatcgtcctcctctttcgacgcattcccagcacgctcgctttgtacaggtttatgcccaaggtctgcaagaactggaaggaggctttgtttatgggctactttggaccgataggtaagtc

SEQ ID NO: 22777 - DNA, 850 bp, Emericella nidulans
tggttgtggaactcaaccgccgtctcgtcaagggttactcacatttcaaggacgatccgcggatcgtggatttgaagaagtcgattgcagactacaacaagcaactgcgactcctgggaattcgtgaccatcaggttgaatatgctaaattttctttcgtcaaagtgattgcgaccttgatatatcgccttggcaaattagcacttctcacaatcgggaccttacctggcctccttctattcactccggtgtttataacaacaaagttgatttcgaacaagaaatcaaaggaagcgcttgctgcttcaacggtcaagcttcaaggccgcgatgtgatggcaacttggaagctcctcgttgctcttgcattcgcccccgctctttacgcgttctataccgcagcctttacctattgggcatatcgtaatcgcataaatggatacgttcctgatttcgtgccgctgtggtcatttataccgattggcatggtcttgtttccgactatcacttttgctgcactgcgtattggtgagatcggcatggacattatcaagtccctgcgtccgctactattatcactcaacccttcgtcggctaacaccttggttaaactccgattgcgacgtgctgcgctcgccaagcaggtcaccgacaccattaacacgcttggacccgaactgttcccagactttgatgctgcaagaattgtgacagatcctttccgcgagctcaaccggcaatctgcgaaccccgaaggtgaacagcgaccaccgagcgtggagatcaggagagcaagcacggagaacttcgatgagggttcgccttctcaagagccacttcctcgaaacga

SEQ ID NO: 22778 - DNA, 850 bp, Emericella nidulans
actatgcgatgagccgaacctttcccagcgtttctgatggggagaaacctgagtaccacgttgtatttgatatgggcgctggctccactactgccactgtcctccgcttccaaagccgcaaagtcaaggacattggaaagttcaacaaaaccatccaggaggtccaggtcctgggagcagggtcggacaggactcttggcggcgactctctgaacgacctaatcgttggtgatatgctttctcaactccttgatgacaaaaaactcaagggccgtgttagtctcgcagatttgcgctctcacgggaagactatggcaagattgtggaaagatgcggaaaaagtccgccaggtcctcagcgccaacaccgaaactggcgcttcttttgaaggtctcttcgacgaagatgttaatttcaagtaccgcgtgacccgttctaagttcgagtcactggcagagcagcatatcgctcgtgttgggaagccacttgaggaggccttggcagctgctgggttacaattgaacgacattgattcagtcattctacatggtggttcaattcgtaccccatttgttcagaaggaactagaaagattttgcggagggtcggagaaaatacgaacaaacgtcaacgccgatgaggctgccgtttttggcgctactttcaaaggagctggtctcagcccaagcttccgtgttaaagaaattcgcgctatcgaatcgtccggctaccctgtcgtcctcaaatggtcctccgaatccagggaaaggcagcaaaagctgtttactccctcttcccaagttgggtcagagaagcagctcacaatgaagaacctggaagatttcgagtt

SEQ ID NO: 22779 - DNA, 579 bp, Emericella nidulans
agtctgtggggatggacggcagatcacgaccttgacggcagcaacggactgaccatctccacagggcgaggtgccctcgtggaagcgacagctgctacctggcttgtcggaacgggatttgaacatcatacgctgtaccagtacaactttgagtatgcgcgcaacgtgttttccacaatgcagcagagcgaatcggcatactggcaaggcccgggtaacatgctagcccctgccccatggcaagataacatgattccaagcgacccgaattttgcgcaatgtgctgcagacgatgctctgtgtcggatggggctgtttgagcggatccatgcttcttcaagtttgttcctctatggtgggtgcaattgggtgttcttcaacaataatagtgactgcaacgcgcccagcgggaaatgccagaagaatgctattcagatcacggactcatcggcggtttatctctatgggacaaataccaagagtacaatcaacatggtgctcagtggaaaccaggcgatcgcgacggaggatgaaaatgccggtggctggggaggagtcattgccgcttatctgtactcc

SEQ ID NO: 22780 - DNA, 500 bp, Emericella nidulans
ggtaatcctgatcaatatacgttcgcgggtagacactgagcaacagtatagatatgcaaagaccacacacggcctctcctcaacactcccacaaaagaaatggcccgtagaacagaagcgtccgtcgctgagctcctgatttttcatcggcttgaaaataccgggaaaccacctacattagactacctagccgaagaggctttcgcgtttatcgatgccggcgtggacaccacgggtgggacgctagttacggctctatatcatgttctcaagagtcctgagattttgcggaaattaagaaaggagcttgatgaagcaatgagacgacaggcaaaaagtacggatatcgatccgaggaaactgggtgagcttccgtatctggtacgttttctccacctgcgatagtcatgcgccacactgaatatatgtcgctaacagtgctcggtgacctagaatgccataatcaaggaaagccaccgaatatggcctgccattccagg

SEQ ID NO: 22781 - DNA, 820 bp, Emericella nidulans
gacggaacttgaattctgggccgcgctcgttgcagactatccgcaaacagtgcagcgacttccgacgttgacgtcgaataagattagaggcggagttccccctcctttgcgtggtgtcgtctggccgagcttgtcgggcgcaagggatccttcgctattaaccgagtaccagaagctatgcggcgagactagcccgtatgagggattgattgggaaggatattggccgtagcttccccaatgttgagatgtttcgcgatccaaacggcgaaggacaacgaatgcttggccgtgtgctcaaatgcttcagtctttatgacacgaagataggttactgccaaggcttgggctttgtggttgggccattgttgatgcacatgacggatgcagaagcattctgcgtgcttgtgcggtaagttgacctgcatcgtcgaacgaatcacgctaatagttgcaggcttatggaccattatgatttgcggacctgctatctccctgacctgtcaggtctgcacctccgcgtgtaccaattccagaatctcctctcccgccttcgacccgccctcttcgaacacctagagacactgggtgttgagcctgtctatgtctcgcagtggttcctgtcgttctttgctgtctcctgccctatgccgatgctccttcggatctacgatgtcatcttcttggaaggcgcctgcgagactttgatgcgcgtcgcgctttcgctaatgaagcgcaacgaaaaaaagatcatgggctgttcagagtttgaagatgtcatgcaactgctgctttctagaagtctctgggatacgtaagta

SEQ ID NO: 22782 - DNA, 664 bp, Emericella nidulans
tatgttattcctgttggcgccacgatactcgtgaccggcgctaacggctacattgcctcgcatgtctgcaatattctgctctccatggggtatcgagttcgaggcacccttcgctctccaaagccctggttaaccgccttcttcgacgccaagtatgggactggccgttttgagtcttttatccttccagacctgacacagcggggggcatggcaggtcgccgtcgagggggtccagggaatcgcgcatgtggcttccgacatgtcaatgaaacccaaccccgaacaggtcgtgccccagatggtgcaaggagtgcagaatgcgctgaaggctgcaatgcaacagccgcaggtcaagagggtagtgtatacctcttcgtcgaccgcggcgtacatctcggtgccgaataaagaaggggtgcgaatcacacgaggtaggacgacccctttaacttgaaagcagctaacgcaccactagaaacatggcatgatgcttgtattgatgccgcttgggacaaggacaccccggagaacgagagggggtacctggtgtacagtgcctccaagacttcggctgaaaaggaggcttggaactgggtgcagcaaaaccagccccattttgggttcaactccatcgtgcctaataccaactacgggcgcattct

SEQ ID NO: 22783 - DNA, 850 bp, Emericella nidulans
ggggcaattctggaaataggctgctgaccacttactgctaggccgtctggctgggcgttcttcgttggattgcagcaagctgcttatacgctcactgggtatggaatggtagcggctatgtgcgaagaggtacagaacccgcatcgtgaggtcccgaaggcaatcgttctgtctgtcgttgcagctgggataactggtctggtatacttgattccgatcttgttcgtgctgccggatatcaagacgctgctaaatgtcgcgagtgggcagccaattgggttggtcttcaagaccgctacgggctcagcaggaggagggttcggcttgctatttctgatcctgggaatcctgatgttcgcaggtatcggttccttgacagccgccagtcgatgcacctacgcctttgcgcgcgacggcgccatccccggctttcggctctggagaagagtcaacaagagactcgacgttcccgtgtgggcaatcatcctgtccacgacagtcatatgcctgctcggccttatatattttggctcaagcgcggcattcaatgctttcacgggcgtcaccacgatctgcctatccagttcatatgccctgcccattctcatctccgtcctccgtggtcgtcaagccgttaagcattccagcttttcgcttggtcggttcggctatgccatcaacgttgctactgttgtgtggatttgtctggctgtggtaatctgctgtatgccggtttcgctgcctgtggatgcgagctcgatgaactatgccagcgtggtgttcgcgggattcgcggcgattagtgtgacctggtactttgcctatgcacggaagcatttcacgggcccac

SEQ ID NO: 22784 - DNA, 850 bp, Emericella nidulans
ttctcgccgagtgagcccgctatgcgaaagtctggcgcaaattgtttactatgaagagaagatattcaacttgctggtggaatacatcgataagcgcgacagtaactcaatagagcctctactgagtctgctctcccagttcgctcgagaccttggcgtgcgattcgagaggtattttgcggcctctgtgactctggtcgcttctgtcgcggccactcatcccgatgtcgaagtggtcgaatggtgcttcacctgtctggcgtggactttcaagttcctgtcccgacttctggttcccgatctgcgacaacttttaggtatcatgacgccgtacctcggaaaggaacgacagaaaccgtttgttgctcgatttgccgcagagtccttgtcattcttgattcgcaaagccggacttgtctactataagaacccggaacctcttcaactggcagtaacattcttgttcgacgatttccggcaggccgtaacggaatcgaagaatgtggagctatataagtccggtcttatggcgatgttttccgacccgattaagggtgtgaagaacgggttgcactcaattggaacggatatctttcagtgcctattgaagtcggtgtgcactgatgacgatcttcggagcaccctcgcacttgatgttgcgagcggtgtcttgatcaacatcattcatagtacgacgcctgagtcgttcgaacccattatcgatatcctaacgtcctatgtccaatccgatgtcacgactgggaataggaactgcgctgtcgcctacacccggttactctttctctgtgttactacccgcaaaggatcgcgtgtcaagaggtggaaacct

SEQ ID NO: 22785 - DNA, 850 bp, Emericella nidulans
gatgcggacagcgcgtccaatgcgagccatgcttctgaaagcgccgaagtagcaacgcaacagaaccaggagactacaatgactccggttcccgacaatgcgacgaccgacctaacctccgttttccatccgagcgtgcgtcccgaatgcctgacagcttccagctacgatatagtccccacgaccgctgcgccgcacagtacctcgattaacgccataacagcgaccgcagatatgcggtgggtgtttagtggtggctccgatggatatgtgcggaaattcaactgggtggactctatcaacagtaagcttatgttgactgttgcgcaaaggcatccgttcgtcgacagcgtgataaaggcgggcgttctgatgacatactgggagaacatggatggaaatgctttatcgccagtctattcgctggcctgtcaaagcgaagggctctggctgttatctggcttggaatccgggagcattcgactacagtctatacggcacgacgaaggcaaagagattgccctgttacagcagcatacctcagcagtctcggtgctttctctaacgtctgatgagaaatcattactttccggtagctgggataagcgaatatatgattgggacctcaatacaggacaaaccagacgcgttttcggatccagcgccggtcagatctcggcaattgagctacgccctgagtccagcttgccagtccccagagacacaactgagattcagcaacctaatggaactttctcatccaacaatcaggcgagcggaggtaatagcttcagctatatggacacaacgaatgatcagggcgacaacgacgcggtgaacccgcaggccg

SEQ ID NO: 22786 - DNA, 500 bp, Emericella nidulans
cggagtttcctaatcccgataggatgacggtcgaagtggaccgcagcgagattgcaaaggtgttccagggtttcagtccgcagattgctgacatctggaagctttatcccgagaaggttgtcaagtgggggatctttgatctggaagacaaccccccttcgacatatgcccgcggtcgagcctgtgtcgtcggcgacgctgcacacgccagtaccccgtatatgggagtgggggcttgcaccggcgttgaggacgcccttgttatctgtacactcctggagtcggtgcagcagaaggcccttgccggtgaaaagttgaaggaggccttggtagaggccctccagacatacactggagcaaggttggagcgaggccggtggatccaccaccactcgcgtcagatgggccagatgtaccactggaggtacggaccgacaggtcgtgatccgcagcggatgaagcagaagctcgaggagaactggggtaacgtggtgacttat

SEQ ID NO: 22787 - DNA, 500 bp, Emericella nidulans
ataacatacccccattggcccaatttctgccaggatcattactccagccaggtgccgacccagaatctatagtccctgagccacgcatatggtatgacgggggtttaaacttaatataggcatatatggcgtccacgaggtaggtgtctagcaatctattacccacccactaaatataaaagatctttactgttgacgctgcttacaatgggaaaagtgtcgggctccgccagcccaatgcgctgaaaatataaggaaagctgtagccagtgtgcctttgtcaaggtgaaatgtggcaaagaaaagccaacctgtgcccgttgccagaatcgcggccttcgctgcaactacgagctctcccaccgtgccggcgacgcccagcgtccttccaggtgctcttctcagatacaggagttggtacgccgatgcagctcagcgctgtcgctactcccgctacctcctctactgtctctgcccctgaggaccgaggcgaggggaaa

SEQ ID NO: 22788 - DNA, 850 bp, Emericella nidulans
attccaacgaattgaacacgccgagtctccggatgtcagctataacgttcgcgtctcctattttgaagtctacaacgagcatgtacgcgacttgctggttcctcgaactgacccgcctcattatcttcgaattcgagaatcacctactgaggggccgtatgtgaaagatcttaccgaagtcacagtccggaactatgcagagatcatgaagtacatgcgcaaaggcgatatatcacgcaccgttgctagcactaagatgaatgatacgtcctcgcggtcacatgccgttttcacgatcacactgaagcagatccaccatgatctctctacagacgagacaacagaacgcacagcgcgcattcgccttgtcgatctcgctggttctgaaagagccaaatccaccgaagctacgggtcagcgactgcgcgagggatctaatatcaacaaatctcttaccactttgggtagagttattgcggctttggccgaccccaaagcaggacggacgggtaaacggaagggaaaggaagttgttccttaccgtgactcaatcctcacatggttattgaaagacagtcttgggggtaactcaaaaacggctatgattgcctgtatctcgcccacagattatgaagaaacactctccacgctacgctacgctgaccaggcgaagcatatccgcacgcgcgcgagagttaatcaagatcatctgtccgctgctgagcgtgaccgacagatcgaagaaatggcggagactatccgcacgctccagctcagcgtcagccaagctgcgcagaatcgccgagagaccgaggtccagaatgaacggcttgaagagtatcagcagcag

SEQ ID NO: 22789 - DNA, 850 bp, Emericella nidulans
ttcaacgtagtcggcacatggagtcccatgtcatccaatcgcatctcacactttttcgactttcggggcgccagcatgactctagaaaccggctgttcgacgacattggtggctctccaccaagcggtccagaccttgcgtaaccgtgaggccgacatgtccgtggtgactggcgccaacgtgatgctgaatccggacaccttcaaggccatcgggtcactgggaatgctgtcgcctgacgggcggtcatactcgtttgattcccgtgccaatgggtatggccgtggagagggtgtggctaccatcatcattaagcgactgtcggatgcgctggctgccaatgaccccattcgtgcagtgatccgtgaaacagcagtgaaccaggatggcaagacggacaccattacaacgccatccggtgcagcgcaggtagatctcatgcgggaatgctacagccgtgctggccttgaccctcgcggcactcaatatttcgaggcccacggcacagggacgcccactggtgacccaattgaagctcaagccatggccactatcttcagcgaaggccgggatgacaagaaccattatctgcgtattggctccgtaaaaaccaacgtgggccataccgaggccgtttccggtcttgctgccgtgatcaaaggtgtcttgtgcctcgagaaggggttgattccgcctactgtcaactatgaaatgcccaaccccaagctcaagctgaatgagtggcgactcaaggtggtgaggacgatagagcattggcctgacagtctaattgatggaccttgccgcatgtcaatcaacaactttggctacggcggcaccaatgctcatg

SEQ ID NO: 22790 - DNA, 610 bp, Emericella nidulans
acccgaaaaagcggtagtcccaccttgttagctttgacggttcttgcggggctatcttggtggctgttcccaatttcgtattgggacatcgaaggccaaggccagcgcatctccggcatcagaaaatcaattctcttggacgcaggtttgtgattgcgaatttgcgtcttctcaagctaacgtgggcagcttacaccatcagaatcgcttgagtaccatgactgcttcagcggattccagtgcgcccggctcgacgtaccgatggactaccaccggtcagatggccaaggcgctcgtatggcgatcgctgtcgctcgactgccggcaaaggttcccgtaactgaccctcgatacggcggcgcaatactaatcaatcccggtatgtttgtttcagttgtctgacggttacctactaaaccttcaggtggccctggtggctccggcgtagctcaggccctaatatccggccgcaatctgcaggccattgcggacgcaactgtcgtccctacagatacgaatcactccaatctctattttgatatcatcggtttcgatccacggggtgtcaacaacacgaccccgggctttagctgctttccgaaccttttct

SEQ ID NO: 22791 - DNA, 850 bp, Emericella nidulans
cgagcctgattgtacacttggccaatacgttgaagacatctgtctcaacgcaaatgctatatgtaccgccaatggttgtgaaaaacggatgtatgaacatcatcgccaatatgtgcatggtgaagctcagattagtatctttacccagcattatccttcaaagcttcggggtttccaggacacaatcttgatgtggagctgctgcaaaatatgcggcaacgagacacaggtgtttcctatgtccgacaacacctggaaatattccttcggaaagtacctcgagctctcgttctggagcaagaacctccgtgctcgtgcgggggtttgccctcacgacctgcaacgagatcatatgcgctacttcggcttcaaagatattgcgattcggattcaatatgatcccatcaatctgcttgaaatcatcgttcccagaacaagagtgacctggaaagttgataatgacttgacgctcaagaaagacgtctacttgaaatgtgaacaacgtataaccaaatttatgcagtccgtcaaggcacggcttaaggcaataaatgttgaaagtgttcttcccgacctcatggaagattgcaaggcggaaattgaaaatatgaccaagaaggccaacgaagatcacaatttgatgatcaagcagttgcaggaaagatatatgaattctcggtattgggaggtcatcccgttgaacaaagcaatgagatctgtccaagaaaaggtcgtcgaatgggataccgcgtttgctgaatttgaaaagaatttcttcccatcagagaaggatatcagacgattggccactctgcaattgaagaagattttcttggacagagatgcctcg

SEQ ID NO: 22792 - DNA, 462 bp, Emericella nidulans
aggtatgctggacaagttcatcaacgatgaggacctcgaggtacacgaggttagtagtgccaggatctcgaagcgcgatagttctaccagctccaatgtgcccctatctgtggaggttccgacagcgcctgtggaggttaaacgccagtcgccaactttcacccgtgctcgcctcgtaactattcctaaaagacagcctccgtctcttccaccacggaaccctcaacgagcgtcgactgcgtcgacagctaccccggtttctcccaacccatatgcatcatccgacgacaaccgttccgtgacctctgtttctacccatgcctctacgagcggacccgccacttccactgacaacacgaagaaaggctcgagtgcggacgcgtcgcctatcgacgcgacctcggagtcaaacaaagcatcgtcgctcagagacgacgatttccactctgtatccagtgtcaa

SEQ ID NO: 22793 - DNA, 564 bp, Emericella nidulans
caaatacgccggctacgacaagttccggggggggtctattcgggacggccgcgacgcaatcaaagccagctggtagcttattcggcaacactgggatgggtactacacaacaaactcagtcttcagggtcaagcttgttttcagggctgggtggccagcaaaatagcacgtctggtagcggattgttcggcaacaccacagctaccaccacacaacagcagccaggcggtcttttctccggcactactggcaccaacaatcaagcgaacagttctggagggctttttgggaacacggcatcgggtgccacgagtcaagcccagtcgaaacccacgttcggtcttggggctacgtctacgaccaataatatcttgtaagaactctcttgaacgagcagtctgtgtgatgagatggctaatattaattagtggtacaaatccgggtgccggtcagcaacagcaacaacagcagcaacagcaggctcaaaaaccgacactatcgctcttcggaactcaaaacaccacttcgcagcagcccacacagcaaacaccggcagcgggatct

SEQ ID NO: 22794 - DNA, 796 bp, Emericella nidulans
gatgatcgaaccgaaaacgagtacaggaagcgaagacaagcacaggacactatcgcacagctccagcggcttctcaaggatgtcgaagaggaatctgcgcgtcatagtgcggctgctgaatctgctgaagcacgactgctgcaattccaacaagaaaagataccgtactacgagagcttccagcaaaaagctgctatgcttgaagaggaacgcgaaagcactaggttgaccctcgaagagctctcttccaagaacatctccttccagggcacgctcgatgagtaccgcttcatggctgatagcgcaaagcgcgaaaccgaggaaaccaatgctcgcttggaggagatcaaggctgaaaacaatcaactgcgcaacactgttgctaacatgagggtgcgtattgaggacggcttgcacattcgccagaacctcagcggaagaatggaacagcttcaggatcaattagcagctctcactggggagatcgcccgtgaccaggcctcttggcgacgcaaagaggaagaattgaacgctaagtatagtgaactacgggcatcccacaaccgggaaacaaaattgcgtgaacagcttgagagtgaggtcacgaagctggaagagcaggagcgcgaggcggcaaaactgaagttcatattcgggcagtcgcagcaggagaacgaacgactcgaggagctcgtcagcgaattgaggcaaaagaaccaggaattggacatgaaggcaagccgcttcgagcgagaattcaatgaagctcgcgagagtagcagagttgagattcagc

SEQ ID NO: 22795 - DNA, 850 bp, Emericella nidulans
tagcatgattcttaactacgtaactacgctgatttgtctcgctcgacgctttgctctgtttatgatgtcttcattgctggtgtcaatatcgtgactaatgttgaagctctaatggtatattgaagcttatcaacaactccaagcaccgcgtggtggttctggacgaggatagtacaacagtgtgcgaacagattggaggaagacaggaaatggtaatagagtcagtgcgtctacggcagccagggatgccctatctctatcaactgcgcgcagaaatcatctctgaagatggcgagtcagttctgaatatctacgagatgccactcggcgtgcgctcaactaagttcaaaggaaacatgttcttgattaacacaaaactgttctgattcacgagtttggaaaaacacaaacgatgcccaattcacggcagggtttttgatccggcattcatccacgaacttagcttatggcctgggcaggcgccaattccttccacacctcgcactatccgtatgcaaaaggggttccggaatatgcagaccggcatggtaccatcgcgataaacgaagcagcggcagtgggtcttagtttggacatattgccagggtctttggctttaaatctccgccaaggttttcgcccaagacatgcaacgaggcaatgcgacgggcgcttggggaggcccttaaggagctaattgcacgagatgagagccaaacctctgttgttctgtaggcgcttgccgatgagcccgcttctagtgaagctggtacatagaatcacttgtactctagcctgacaactcgatccagcacgtccgctctgtttcacgaacatgggccacgcaacc

SEQ ID NO: 22796 - DNA, 850 bp, Emericella nidulans
acacactccagacaactacaataagccctatgcgaaggggtttaacgggtctgagtttctattggatccatttacatatcgctactataatgcaaaaatgacgcgcaatggagcggagccggtcgattactccggccaatatgtgacagatgtgctcacagagaaagcaattggcttcctgaatgagactctgaagaacccagatcgtccttggatgctgaccgtggccccgaacgccccccattctaatggttcggccacggcggatggtacgcattggtttggggagccagaatacgcgccccgccatgcaaacctcttcaaggactacaaagtccctagagacaagagttttaacacagtcattgaaggtgcagtcggctgggtcaaggatatatcacaactaagccagaaggaagtggactatattgatgagttccagcgttgtcgtcttcgggcacttcaggctgtggatgagatggtcgaccgacttatctccagacttgatgaggctggtgtccttgacaatacgtatatcttcttctctaccgacaacggataccacctcggccaacacgcttttcggccaggaaaaaactgtggatacggtgagtgttgtctttcacctttcggcattccttactaactgccagcagagacggatattaatgttccactcattgtgcgaggtcccggagttcccaagggaacagtcgattctgccaccagccacacagaccttgcgcctacgttccttgcaatagccggcgcccctaaccgagacagtatggacggtaaaaccgttctcaacatggacgtagggaatgcaacccgaaagtccgagcaagta

SEQ ID NO: 22797 - DNA, 500 bp, Emericella nidulans
gtgaacgaagacctatctcagtttagacatatactgggcaggatcatactggccggagcagatgttaatttccggtctgagaacggcgataccgcgcttactgtcgcagccagagcagcaggcccagttgatgttttgaaagacctagtagacatgggcgcagatgtgttctccgcctcaggcactagctttgatccaattatcactgctgctgtacatggtgatactaagtgtttggattacattcttcatgttgctgcagcccgtcctagagagggtcattggaccggaattctcggcaaactgggagagatttctgaccccatcacgcgtgtatgcgtatgccttgagaaagtaggagccttggacagagttaatgacaaggggcgcacgatattgcatctggccgcggaaagagggaatgtgccgctcattaccagtttattggcccacggcgcacgtcctgatatcgtagatgcagacggtcgatatgctgtcca

SEQ ID NO: 22798 - DNA, 582 bp, Emericella nidulans
attcgggccgcaattaaccctactaaagggatctctctttcagaccgcctgtagaggagccattccgtgggacacaataccgtgaccggcctggccgcccccgtcctgcagattctcgtgagaacctctctggccaacgatctggtccgcaaacacaccccgaccgtgcagacctcatacacgatgtttcagatagaccaggcgatggctatcgtcgtggcgaaccattacgccaggaaagagaagatcggaggtctctgccgacccgacctctgacccctccaaaattggacctcccgaatcgccccgaacgctttccatctgatattcgcaaacccgcaagtaatacgcagccgcctccccgcggtgaagaaatgccacgaggacctcgcagcgaccggccaccacgaacccctatggaaggtcctgacccccgggattcagttcctggatctgatcttcctgtcggacgatctcgacaggctgatctaatgtctgatataccctctggaccaagaagcaggactgcgcctggccgaggtgggcgaaaccctcccgcgccacatccttcggcagggcctc

SEQ ID NO: 22799 - DNA, 506 bp, Emericella nidulans
atcgaggatgtgcgagagatcagtagctcttctttgccagcaggtatgcaatgtcttgtcaattggccctcgaccaatccgtcagcccgcagctaaaatgaaataggctataaagaagaccgctccaaaggcccgatgctctgatttgaagactcgctacaaaagctccttgttccaactcttgaagaaatggctgctcgatacctcaagttccgtccacccgctccttttcagcattgaattagcctcgacaacaaaggtcgtccaggagtttatcaagccggatgggatcggtgccaagctccaagaaaagttgattgctcgccgtgaagaccggaaacataagagctagctctacgagtggtggaagaatgtggcctacttgatgtaccgggaccctgtagtgccgtatgtcagctacttctattctccccgcgatgatcgaagtcggcgagaccctaccaagcgcgcgaccgcgatatctatggcagcactggagtttaaat

SEQ ID NO: 22800 - DNA, 423 bp, Emericella nidulans
gaccgtgatgcagatgctgagagaaacggggacgatctggaggtcttttttgaaaattcactcacccggaagggcaatcaggctacatacgggaagcgttccaaaaccgagtcttgggatgaggacatgacagagctattctatcgcggcctgcggatgttcggaactgatttcatggtgatcagcaaaatgtttcctggacgctcgaggcgtcagattaaactgaaattcaacaacgaagagcgacgtgatcctcaaagaatcagggagacgcttcttgggccccgggagtccattgacattaacacgtattctgagatgaccaatacagtatacgacgaccctcgattaattcagcaagagctagatgaggagaagaagcgtatcgaggagcagtatgagaaggataagaaagctcaggaa

SEQ ID NO: 22801 - DNA, 347 bp, Emericella nidulans
tttacacccctcgccgtcgctatcaaaaatggtcatcccagcgtcgtaaaactactccttcaaaacggtgcttctgccgacaagaccgttcgtgacgggcgcacacccctctacttagctgcgaacgcaaagcagaacagggctcggattgtgcagctattactctcgcatgatccaaggcccgatatcgacgcctccagccctgagtggaacaatgagacgcctctcatggtagcgatcacccaggggagagatccagaagtcgtcagacttctggtagaggctggagcttcgttgacgaggacaaatgaccgcggtgaaacggcagttgcattggcggatcagag

SEQ ID NO: 22802 - DNA, 520 bp, Emericella nidulans
ttcacaaaaatgtccttcaataactttgacatcacagccaacgaattcgagcacgcctgcgaaaccggtgatgccgcctttatagctgacatccttgactcccgcaccagtccacgaatcgaccagcgcaagccgctcatggctgctatactcaacaaccacgtcgagatcgtcaggctcctgctgagccgcggtgaaccagacgagtgtcttgctgtcacagcggatgaacgagcattatcgctggaagcgtctgatatcactggcagcctgcagtttgcggcgatgcatggaaagatagacgttgttgaagcgttgctaaggatgggaatcgccgtcaattgtgttgacagggctggacggaccgcgctagggttcgcggcgagggccggcaaaatcgacgttgtcagattgcttgttgaggctggggctagtttgaccaaagtcgataaggaggggatgacggcattagaccatgctgcggctgcagtggagatcgaaactatcgactttataaggg

SEQ ID NO: 22803 - DNA, 850 bp, Emericella nidulans
aatttctagtctgcacacgatctgcgttggcggcgagcctctgcccaaagaactcatcaataaatactcctcctccagcacccgtcttatcaatcaattcggcatgggcgaagtcgccatctgttgcgcgtacaacgatagcatccatccagatcgtgggaatactataggccgtccagcgagtggccctatttatattgttgactcggcgtcgccggagcgtctgcttccactgggagcggtgggcgagctgctcattgaagggccgcatctttcccgtcggtacttagacaatacagctgtctcgcgcacagcagcaggatttctatccaagacgcctcgctggatggccgagctgcaccccgcgcgcagcgtaagcacggatgtaccgaaccggcgacctcggccggctcaatgcagacggaacattagattacatcggtcgtaaagacaccatcctcaagctagacgggtgccgtgttgacgctattgaggtggagcatcaggcgcgcaagtgtctctcacctgctgacgccattgtggttgaccttctaggtgccattgacggcacggaagatccccagatcgcggcactgctgtacttggacggacatactgacagtaaaataccggcagttaatggagaaccggttatcacgaatgcagagaaagatggcatggctagggagaaggtcgatactattcgcgaagctatcaagcaagcgctgccggcgtacatggtgccctctgtcttcctgctcatgtcatggatgccacgcacggcttctaagaagacagatcgaaagaagattcgtatgctggcgcaaaagtattacatggcagagaggaa

SEQ ID NO: 22804 - DNA, 502 bp, Emericella nidulans
tgcgacaacatcgggccaaatggcgataacagagttgcttcttgaacatggtgcgaatatcgaatacagatgccgcgagggttgtactccgcttctgctggcagcacaaaataaccagatacctgttgcttgccttttgatttcttgaggtgcagatattctggccgagaatatatggggcaaaagttcaatctacgtgtctttatgtgaaggattttacgaagtgctttacaagaaatgctccttggatcccctaaagagtcccattctcgcaagagtacataaagaagggtatgcaagatgtcttactggcggcaaccaactattggcagtcatctcagtgggttcagtatgcgatctccaggggtgctgataaattatcaaaaaaagcaaatatgacccaactgcattgcttgttgcagcacgcggtgcagacccagccatagtccaactacttctagagaatggagcagaccccaacatcaagaagcccagatccaca

SEQ ID NO: 22805 - DNA, 828 bp, Emericella nidulans
cggatcactgttggctacacacaacaggacaactttgtcgttccttggcgagtcattggtaaagactctgaagtatttggtcttcgctgggagacgaaacctcttttagatcttgggcatgcgatagatcgtctggtcaccagtgccgcctggtcagccggccgtcacgttctgaccaaaacaatctttgcaggccttatcagtgcgctaaccttgcccgttgggcttatgaaagttgccggcatcgctgacaacccgttcagtgtggccaaatctcgtgcagacaaggccggcgaagtccttgccgatgcgctgataagcaaagtacaaggcgaaagacctgtcacgctcatcggttactcgttaggatctcgagttatcttctcgtgtcttcaaactttatccaaaagacacgcgtatgggttgatcgagtccgcaattttcatgggagcgccaacgccttccgatacaccagactggcgccgcatgcggcgcgttgtcagcggccggcttgtcaatgtctattcagggaatgactctgttttggcgttcctttataggacaagttgtctccagctcggcgttgcagggctacaagctattgagaacgtccctggggtcgagaatcttgacgtgagcgacatcatcaacgggcacctccgctaccagtatctccttgggcgaatactccgtacagttgggttggaatgtatcagtgctcgggaggtggcacgagaagaggcagccttgaaggcaaaggactacaagcaggaacaacaacggatccaaaatgagcgccgcgctggaattgagggggacactgaagag

SEQ ID NO: 22806 - DNA, 617 bp, Emericella nidulans
aatatggagtctagcagggaattcgatattgtggtcctcggccctactggatatactggaaagtactgcgcagagcatatcgtcactcatctgcccacaaacctgaaatgggcgctggcagggcgttccaccaagaaaattgagggcgtcgctcaggagttgaagaagctcaaccctgatcgcttggatcccggtaagactatgtactggtgcttgtggagcggctctgctgatgcgtccatagagatcatctctgtccagctcaataaggaggaactgcgctctctcgcagagagaacgaagcttattatcaactgcgttggtccttatcacatatactccactcctgttgtcgaggcttgcgcgaatgccggcacccactatgtcgatgcgtaagtttcaatctggcaagattattgcaacggctaattgctgcaggactggcgagacaccatgggtcaagcagacagtcgacaagtatcacggaacagcgaagtcgaacggtgccattgtaagtaacctccaaacactcatgtatagcgattgtctaatcgaagtagataatccactgtgtcggcattgaaagcgcgcctgcagacatgttagcttatgccctg

SEQ ID NO: 22807 - DNA, 850 bp, Emericella nidulans
aaatctaacatggatatgcaggcgttgatcactggcacgaacctcatcttgcaccctaacttcatggcgcagtactcagcaatgggcatgattggccccgacggcatcagtcgctcgtttgatgcatcggcgaatggatacggccgaggcgaagggattgcctgtgtagtgataaaacgtttggcagatgccatgagagacagagattgcattcgagccgtaatccgcggcactgccgccaaccatgatggcagaacgcccagcattacaaaaccaagccaagatgctcatgcattcctgattcgcgagacataccagaaggctgggttgccgttgtccgagaccgcttattttgaggcgcatggaacagggacaccacaaggagtacgtccatgatgcccctgtcccttttccgaaaactttagtctaacccacacatcttcaggacccaatcgagatgcgagcaatcgcgcagaccgtagcctctgcccgcagagatagcgatgtcggaccactttatgtaggtagtgttaagcctaatgtcggccacacagagggcgctgccgggctggcaggggttatcaaggtagtcctatgtcttgaagcggggactatccccgccgtcactggtctgacgacggtcaatcccgagcttcgattgacggaatggaatattgcactcccgcaagagaatatggcatggccgcaggacagagtccgccgcgccagtgtgaattcgtttggctttggtggtgccaacgctcatgctatactcgaggatgctaagagcttcttgcaaatgcaccacatgcctggcctcgatattacagatcctcgtcagtctctggcg

SEQ ID NO: 22808 - DNA, 316 bp, Emericella nidulans
ttctctactacacagacgaaacatgggctgaggaggttccgccgaactcagattccaccagcttacattccccaacgcaaaggagagttctggttctttaaacgctagagccgaaggtgaagccgctattctccctccgccacctcagtcgcaggacaaaccggacaaagaaatagctacctcatttggaatatgcatggacataaacccttaccgttttgaagctccttacacagcctacgaattcgcgcaccgtgtcctcgagtctaaatcccaactcgtcattctgtccatggcctgctaacgctgctaagtc

SEQ ID NO: 22809 - DNA, 500 bp, Emericella nidulans
tggattccgcggccgatcagtctcacagccaaaggttacgcccgcctcgcccatgcagataacttcctcactcgacccatcttcactttcgtcctgtgggccgttggcggccccatcaccatcccggccgaagtcgacgcgccgctgctttccagcgataagggtcttgaagccttccctgttaccgtcttttctcacggcgatgccagctctcgtaccgactatacccactttcttggcgagcttgctagccgcggccatgtcctcgtcgccattgaacaccgcgacgggagcgggcctggcaccatagtcaagacctccgcggctcccccggccgccaagtcctcccattccgcttctccgacctcgcaaccgatcttgacgctgactctttcaaacgcgcgcagctcgcattccgcgacgccgagattcacgctgccattgaactgctccatatcattggcaagggagcgctagttcacaacacgcgcgacccggtt

SEQ ID NO: 22810 - DNA, 685 bp, Emericella nidulans
agggaggaccgtgcagcagcaactgattcgagtcaactcggagaacaacatgtacgtaggataccggaaccaaaaatcatttcgtttcttagggatcccatacgcggatgctccaactcggttttcttatgcgacgcatactctgaaaagttccgcacaatcaaggctacggagtatgggtccagttgtgcccaggttgccggtggcagcgaggactgcctgtacctcaacatccaaacgccatatatcccgaagaagaactctacagctggcctacggccagttcttttctggatccacggtggtaatttcgttgctggcgctggttctgaccctgcgacggacggtggcaatttagcctcacgagaagacgtggttgtcgtgacattcaattatcgactctcgacgttgggctttttagcggtgccagggacagacatccaaggaaaccaagggatcgctgatcagatccttgctcttgaggtagttctatacaggaactggaacgtggattcaggcagtgctgatgtgtgcagtggacaataaaaaatattgctcaatttggtggcgaccctcgacgcatcaccatagctggtgaaggagcaggtgctaggtctgtaaaggctcttctaggctcacctcttgcatatggaaagtttcaaggcgccattgcgatgtcggacgt

SEQ ID NO: 22811 - DNA, 715 bp, Emericella nidulans
tattcgggccgggttttgaaagacaatgatactttagcgacgtacaagatcaaagacgggcacaccattcatttggtaaagagcgccgccagcaatcaacgtcccgcagccgccgccgctgccaccccgagcaggagcaccccaaacccaacaaacaccggagtcccaacgaatctcgccgccggctcagggaacaaccctcttgctggcctaactggcgcgcgatatgccgggtttgctcagcttccaggcgctggtatgtttggcccggacggcgggtaagtgaccattgattggaactcagttggtccttcaattagacgggctagtccgctaacacagtggcattcatagatgggacctcctccggatgccgaatcgatgttaaatatgcttgagaaccctcaagtgcagtctttgatgaatgaagcattacaaaacccggccatgatcgacatgatgattcaacagaaccccctgctacgcgataatcccatggcccgtcaaatgctgcaaagtgaggggtttcgccgtatgatgactgaccctaacacgatgcgtcatatgatgcagatgcaacgagcaatgggaggatttggtggcggtagtgctttccctgccccgggagtcaccaatacaacgcccgaggaaaatagaactgcgcaaaccaacaccaacaacaataatagtaatgctgccaatgccctcccaggag

SEQ ID NO: 22812 - DNA, 850 bp, Emericella nidulans
gagcggtaccaggcattacctcgcaccagtcacctcacggccggactctagaatcgccggctcgtccatctcatcggttgattaccatgaaaggccactatcccttccagacggtcgcaacactattcacagcccacgtgcacctctagaaggatactttgcgcatgaatcgccagaaaccttctccgtcgcaagccttcaccagcccctccgtggcactgctagctcagaccatataaggttgagcgaccctacacccaccgatcccggccgactctcgccccgtttcccgccgtatcccccgcctgtctctccgcatcgccaaccccacgtttcatccccgcgatacagtccgtccctgccttctccgacccctcgtacgccgccatctcgcggccgttctgaggagcgtacctacgctcaagaactgcatctccgctcccgaagtcccaaagcctttgcgccgcggcccgaagagcgccaccttccgaagcatgaccccaccgatcccgctttcaacctaggtgccttccgatcatcaaatccccgcacaagtcgcattggtgaccaagaattaccctggaaaatcaccatcccaggcgacgacgacgacgaggcagcgacgagtacatcggtttcctggagccatgaaactgagggcgtcctcaatggcaccggcactggcacagataccagcacccgattgcccacctaccaagaagacgaagaagaacacggtccttccaaattccaaccgcaggacgagaaacagggtcagcccatccctcacccttcatcagcgtccgaacccactccgccacaagcacagcccaataccaccactcccgat

SEQ ID NO: 22813 - DNA, 563 bp, Emericella nidulans
tttggtttagtacaagagcaactcgcccacgatccattccgcttactcctcgcaacgatcttcctcaaccgaacacgtggcggcgttgcgcttcccatcctattccaggtcttcgacaggtaccccacgatcgaagcaatggccgtggccaacccacacgagctggtatccatgatccaccgcctcggctttcagaatcagcgtgcaaggaaatgtatcgcactagcgcagacatggctgagttgtccgcctttccgtggcagacggtaccggaaactcaactatccacgcaagactgacggccgggacgtcaaagccggtgagtgtatcgacgacgaagatcagcggatagcttgggagattgcgcacctccctggggtgggagcttatgccttggatagctggagaatcttctgtcgggatgagttacggggtctggctaaggactggagagggaatggtgctgcgtcgggctgggttcgtccccgagtggaagtcagtgctgccgcaggataagggacttcccgcttatttgacctggatggggttgaaggaagggcttt

SEQ ID NO: 22814 - DNA, 729 bp, Emericella nidulans
gctgcatattcggcagtggccaagcgcaaggatgccttgatggacggtgatatggacgaagaccgccacgtccttagtttgtcgaagatgcaaacctacattgggtcttactggtatcacttccatgcccagttgccaatcctgcatcggccgacctttgtagctgataaagcgccgaatctgctgctgctcgccgtcatagcgattggggcagcaacgctggacagtattcacggacaggaagtcaccgaggcagcatcggagctagccgactttatcatgtggcatttgcggtgggagatttttatggaaggagatttccggccgccagccaaactctgggtctttcaagcgctgctgctcttggaggtctatgagaagatgtactctactcgtgcactccacgagcgagcgcacatccaccacgacaccacgttaacgttgatgcggcgcggtacgtccttgattggccgccattcgttcgactctcctgcaagcctgagagatgaccggcagcacgctcgaccacagggtcaacgatgactccggactttgcggcagacgactcatgggcgcattggatcaaaactgaggccactaggcgagttgcctttgcggcatttgtcttagattccacccacgctacgatgtttggacactctgcgaagatggtcgcgcatgaacttcgtctaccactgccgtgcgacgaggccttgtggtctgctacta

SEQ ID NO: 22815 - DNA, 500 bp, Emericella nidulans
catcaagggggccgtcatcgcacaggacgaagtcgacacctggaccgttcatcgtttcatgcggcccgacgtggatcatactcagctctcgtcggaggaaatcgtttatgaccttctaggtgggatgggtggccagccttttcccatcaggattgacgaggtgcttgttcgctcgacgtggacgccgagcgttgcacttgcgcgctcttacgcagggcctaagcaccgtatattcatcgcgggagatgcatgccaccagaccgtgccaacgggaggctacggaatgaatactggtatcgctgacggatacgacataggctggaagttggcggctgtgatacaaggctgggctggacctgcgacgcttctttcctatgagaaagagcgccggcccgtcggagaattggctctgcagtggtcaaaggaaaacatgggcaacttgatgaagatgtcggccgaactgggcctcgacgccgacatgatcgagctatgaaacgaga

SEQ ID NO: 22816 - DNA, 719 bp, Emericella nidulans
gatatcatcacacggattcatgaggatattgctcataacctttacgaatgccctatctgtactagcgagattggacggaagacacgcgtttggtcttgcggactctgttggaccgtgttccatttgagctgtgttaagaaatggtcgaagaatgaaggcgccgctgtgcaggatccttcccgaaccgtgcccggtggtgaaaacggagaggctagcgggcctcgtgcttggaggtgtcctggttgtaatcttgcccaggaggtgtttccatcaagctacacttgctggtgtgagaaagagactgatccgcggccgcttcctgggcttccccctcactcgtgtgggcagacatgctcacgcaagcgtaaggattgtccacacccctgtgatttgacttgccatgctgggccatgcaaaccatgtacggcaatgggcccgactcaggattgtttctgcggcaggaattcgtctacgaagcggtgtcaagacaccgactacgagaacggatggagttgcggcgagatttgtggcgatttgttgccgtgcggtgaacacacctgcagtcggccttgtcatgaaggtctttgcggagcgtgtgaggtcaagattgatgcgcgctgttattgtggaaaggtagagcccgaaatgctctgcagctccaaggacgaagtactggatagccaacttttgaaggattgtgcatgtccaggagtggaccg

SEQ ID NO: 22817 - DNA, 612 bp, Emericella nidulans
aggatgggccgcgaggaccagatcgaagagcgcgaggtgctcgattccatattcccggaagaaattacaggtacaacatcatagatgactgatcagctagaaggttgacggctgctgacccaatgcagatgtgtccgacacttcataccggatatcaatcacgctcgacgctccagacaacgacgaacaaagccaagaagccgaacctcctatccttatcctccaagtcacctatcctgaagagtaccctgatgttgcgccagaactagacctcacagccccaaccaatgcccccaaacacccccgtctagatattagcgaggatcgcgaccgactactcgaagctcttcagccgactatcgaagagaacatgggaatggcgatggtattcacgcttgtcagtgcgcttaaggaaagtgccgagttactcatggtggaacgtgtgaacgctgtgcatgcggtgcaggaaatggaggctgcgaaggcggaggaggaggagaataggaagttccaggggactgccgtgaacagggaaacattcttggaatggctagataaatttaagaaggagatggaagaggaggtgaggaagaagagggaggagaaggaggc

SEQ ID NO: 22818 - DNA, 840 bp, Emericella nidulans
gcgtcaagcgagtcaattatgcctcctccgccccataatggcccgttcggcggtcccgagtcggcccatgattcggtaccgcagcctcgtcggcttgttctttgcttcgatggcacggggaatcagtacatgggaaccgaggaggacacaaatatcgtcaaaatctatgagtcgcttgagcggcataaacccggccaatatgcctattatcagcgtaagctgactaccaataccacttcaaaacgaaaaaactaactagtgcgcatacagccgggattgggaccttgacctatgttagaggttcctcgcgccagaccagcgggtttagctggtggacgagattcagagcgcgcgtcagcgccctgctagatcaaggaataggcgtatcgtttgccagccaccttatcgcgggctacaggttcatcatgcgctattactccactggcgaccatatctatatcttcggtttctcgcgcggcgcatacacagcccgattcctagccgagatgatccataacattggcctcctctcacgcggtaatgaagaaatggtcccattcgcctgggacacgttcagtcgctatcagagctctcgggggaacgtgccacagactgaagaagaccgcgagttagcgcggtatatgcataagttcaagacgacattttgccgtccagacgtcggcgtgcatttcctcggtctttttgactgcgtaaacagcgttggtcagttcgagataccgttcttccgcaagtcataccggtacatcgccagcccttcggcacggcatattcgtcacgctgtttcgatacacgagcgccggctaaagttcaaacctgcgt

SEQ ID NO: 22819 - DNA, 500 bp, Emericella nidulans
gcctccaggctgaggggaaaggagctctgtgtagataattagctcgatcgatgccatagcagcaaccacccatcctattcctaaacagcagtaatcgttgagtatccagtttattagatttactttcgtaaccacgtctattacatttccccgcatctgaaagagaagacgtacctaatggctccaaccgctcccccgattctcgacttctcccccttctacggcacggacggcgccgccaaagccaagcttgtacagcaagtacgcgaatcctgcgagtacaatggcttctttcagattacgggtcatcgtatcccgcgcgacgtgcaggtacgggtcatggacgctgcgaagaggttcttcgccctgccgctggaggagaaaatggcgattgataagagttgctctacccgaccaaagcaagatgcatggaaactgacaatgcagacctcaactcgttcaaccgcggctacgaactgcttcgatcgcagatgctcgag

SEQ ID NO: 22820 - DNA, 500 bp, Emericella nidulans
gcatcgggttcgtctgtggtccaggcaagccgacgtacactcctcctgctgagactccctccgagacgccgtccgcgacgcctactccagaggccccgacgtctagcagcactcctgtgatcggtgtcccgactcctactggctccagccctgtcacctcgtccactcctgtcatcccgcctactactacgtccttctcgagcatccccggcagcagctccgtgccattcaccatctcaaccgtctacaccaccagcgagattactatcacgcagtgtgcgtctaccgtgaccaattgccctgcggattccacctcggtgacaacttcgacggtattcgtgtccactacctggtgcccggtaactcctacagagacgccgtccactccaactgatactgaagacgtccctcctgcggagacctcctcgtcggagaccactaccactgtctcaatccccgctgagacgtcgacgcctgctgcccctgaaaccactaccccg

SEQ ID NO: 22821 - DNA, 850 bp, Emericella nidulans
ccgagcacatcatcgccctatgcgctgattaaagataatgtgattccgcgaaatcgcgtgcaggatacatactcccgcctgaagaataagtacgcagcgaacttgaacgagcgttggatcgagagcacggaaccaagcaaacatgtctttgaggatttgagcattgcggcgttcttaatagagttgtggcgggatctgtatggggctgtacctggtgatgaacgagagcaacagaagcagcaatcctcaacgtcaaaggtgggctcagggcagttcccaggcttcgttgacatcgcgtgtggaaacggtgtacttgtctatatcctcattagcgagggatattctggttggggctttgatgcgcgccgcaggaagacatggagtatttttcctactgatgtacaggaacggttgaaggaggaaatttatatcccgaagccctttatggatgtccttgctgcgcaaaaccaaggtccaatccagaacaagaaccaggatgcttcgatgcaatcaccactctcagaacctcagtccgggcagagcaatggccctaattctggcaccagcgccagtacctccctttccaacctccctaaagataccttcgtgatctcaagcaaagcaggcggacttactctatggacacccatcctatcaaccctcctcaaccccgcaaaccctcccccctttctggctattccctgctgctcacattccctttctggggcgcgacaccggttccggccccagtcagctaggccctcagctactcaaaaccctcaaaaacaacaaggcgaaaacgggactcattcacaggatgaagagggtagctcagaggacatgaaagaac

SEQ ID NO: 22822 - DNA, 850 bp, Emericella nidulans
caagctgaaggccgtacgttttcttctgttccagacataccttttcacagaatgaagagctaacatcgtgcagaaaggtctaggtcgtctgcgatggtactgccaagcttgcgagcgacaaatgcgcgatgaaaacggtttcaaatggtgagttagtcgcatcctatagatgaaagtaattttataacagatgtactaatggttttcctagtcacgtccaaagcgaaagtcacgtccgacaagttctgcttatcggcgaggatccgaaacgatacattgaggatttcagcaggcagtttatcaagaatttcctggatctgctgcggactacccacggagagaagaaggtgcacatcaatcagttttatcagcaggttatcgctgataaagaggttagttttaacccatgctttatacttgtaaaaagagttgttgctgacctgttttgctgtagcacattcatatgaacgcgacgaaatggaagagtcttacccagtttgcagcgcaccaaggacgtgaggggctgtgccatgttgaggagacggagaagggcctgtttgtttcgtatattgatcggagtccagaagcgatgcgacggagagaggcgatcatgaagaaggaacggcaggatcgagtagacgaggagcgggagcagcggttaatacaggagcaagtggagcgggcgagagcaaaggaaaagcaggaggagattggtccggaggcgaggaatctgcagcgtaaggaaggtgagaaggtcaagttaaatattggattcggtgcgaaagccacgccgccagcatcgaccgagcagtcgagaacacagtctcccgatgagaaagagaaggacaag

SEQ ID NO: 22823 - DNA, 499 bp, Emericella nidulans
ccaaggtggtaaacatggaaatgctcttcaggctgctgtgattgggcaaaaacaccagactgcaaaactacttcttaacaggggagcagatgtccaatattcagtggcaggggcgtttgatgtaccattactgcatgctccagttgaatctcgcaatcaaaccttgcttgagttgcttcttgtgccagccgctgcagctcttgtaaatgcacctgacttccttggccgaacccctattcatttggccgctactaacggggacattggtatgcttcaaactctctggaatttcagtccggacttgattgacctcaactgtcaagacattgatggattcacgccactccattgtgctgtcaagaaccacacttccgaagctgtgaagtggcttatcaagcaaggggctatggtagaggccaaagattttaccatgacaacgccgcttcaactggcatctcaactaaggaattttgggatcttttgccgccttctttccgag

SEQ ID NO: 22824 - DNA, 500 bp, Emericella nidulans
cttggatggtctctctggattatccgaattgcgcccacaagaagcaccgctaacgagtcatacagacgtagcccgctatggccgatgcacaaaatatgcgaggtgtaggaacgatgaagagggccacgaggaagagcatgcccaaggtccgcaccggctgtttcacctgcaagtacggtagtttacccttcttccgctgtatcctgaggctaaatcttctcttcatgtgacaggcagcgccgggtaaagtgcgacgagggcaagccagcctgccagaactgcgaacgcacggggcgacgctgtgaggggtacccccctgggcctgcgtcaaccccagcgggagacggttcacttgatgcgcaggtccagcgatgcgcgcagcagattgtcgtctataatctgccctttaaagtccccgggagtgcagccgatcgtcagctgctgcatttctatacgtgcgaggcagctggtggactctccagcttttcagactcgacact

SEQ ID NO: 22825 - DNA, 850 bp, Emericella nidulans
cacaatccctggatcggttacgactttgccaggttcgacaattacgctgcctggatctacagtcgtttacaccagcaccgttagtggtccaacctcaatcgaaaccgtggttgttacgcaagttatcagcacaacaattgtgaatgaaactccaggtaaaaatcatgtgcctatctttttttcaatggctaatccgtgtaggtccggctacaaccctcaccattacctcgactgcagttcagactcttcctccggtaactgtgacaggtatatcccaagcccatcatgcctgatcctatactaattcttctagcaaccgcaacagaaacaactgcaacaactgcaacagaaactgaaaccgaaactgtctctatctctgtctgtcccagcctgacgataaacccgacatatacacccgccacgcctctcccaacggactacacttggggctgcccaccaggttacctttgccgcccaagacgccagggcacagtcggtggttgcaactttgaagccggactacccgcagaaacatactactgcagccccgaagaatgtattgaagcaccacccctgtacgacgaggaccaatactggggcgaacccgtagtatccgacgaagtcggcacatacaacgtttcaaagtactacttcaacctcaacccggagccattcggtcttaactactcgatcttccgcttcccagaaaaggattatggcgtggactacttcaaacgctccttcctgggcgtgggtcttggcaaaatgctcaacaagctacttccccggcaggaactattgcaggacgtcattcggttcagcgacgtctgctacgacgaatgcaacggcg

SEQ ID NO: 22826 - DNA, 850 bp, Emericella nidulans
tgcttcgacttttcctcaagcccaaggcacgcatgggctctaggaaactaaacgggccgcggagcttcacccagcgacgccaggaacagacgtcagggaatggggagatggatgaggcattctgggccaatcacaagactgaggatcagactggcgatgatgaggcagctcctggggcgtatgatgctaacttctttgcggacgatgatggccttgctttccccaatggcattgatcttgacgacgacgacaatcttccattcgctgacgctagggaaatgttgtctcctccacccggcggcgttccaggtacagctgcgggagatgctggtggggccacagggctcgcagcattactgaatatggtgggtgcaacaccgggtggctcacaagtccaaagtgcctctggaggctttgggtcacagttggtaacgcaaggtggtcggagagcacgacctgactatgttgcatacgccagagtggccaagaaagttgacgtcggtcggctcaaaacagatatgtggaaaggaatgggtgagcggcttatatccgctatggattccggcccccaactcagcgctgcgaccagcccgtccaaagaacagcacgaaactgatgatgatggcccgtcaacacccaccccaattcataagcgcccaaggctctcttcggacctggaacctgctaaagaagggcacttgcgcttcactgaaataatgaactcgctaaaatcagtctaccctccagagatgctccgtgatatcagtacatcatacggcttcatttgcctactccatctggcgaatgaacaagggctcatcctccaaaacgacgatgatagcagcggcct

SEQ ID NO: 22827 - DNA, 850 bp, Emericella nidulans
cttcatccgtccgtgatcacctacactcttgtattcccgagtatatggttcccaactcctggatatcacttgcagcaatgccgcacaacagttccgacaagattgatcgtcgccgactcacgcaatggctggagaccatggaggtggaacattttaaaatcctcacgcaaagctacacggagggtacgacaactccaagcacatccgaagagaaaaacatccaagctgtctgggccgatgtactccacgcttcgattggaaaggtccctatgagtcgcccgttcttggctgtggatggtgactcagttactgctatgcaagtcgtgtcaaagtgtcgcagccaatattccatctatgttactgttcgcgatgtgctgcaatgcgaatcaatctctcaactggcgaagaaggctgtgattaagaccacgagtcccaacactgacactcagctctctacctcttcaatcgatcaagctccagccgctacaagcgcaccaacggcctttgatatcaacgccagcgacttgtctaagcttgagaccgacgtgcttccgcggaccggcgtcgagaacctttctgcaattgagagcatttactattgctcccctatccaacaaggcatcttgatgagccagatcaaggaccacacaacatatcaagtgcgccaggccggagagattcgtgccgctgattcttcaccggtcgacatgaaccgactcctacgcgcgtggcagttggttgtgcagcgacatgctattctacgtacattctttgtccctagtccatcgggacgggaactcttttatcaagttgtactcaaaagatacactccaacaataccagtgctgca

SEQ ID NO: 22828 - DNA, 787 bp, Emericella nidulans
ttctccgcacaacccctactccagctaaggctaaatcgcgtcgcaggacccgtcaacgcggtgactttctcaagtggtcctggaacctacatcctaacaggatctaccgatcgcgccgtgcatctctcccgcgcgatcccaaatagcaacaatggctcgaccatcgaaaccacgtctccgattcagaagtacgaggctcatggttactcagtgctagacatcgccgttgctgcggataattcgaaattcgcgagtgtaggcggagatcggcaggtttttctgtgggacgttgaacaggggatcactataaggcggtggggtgcacacaacgcgagggtcgaagcggtacaatttgcgggcgaagatgatgcggttgttgtgtctggtagtgtcttcctagccatgatttagccttgttgcttaaggagcctgctctgacgagaaattgtgttcaggcagcgcagacaccacgatcaatatctgggacacgcgttcgaatgctcacaaacccatccagactctcaccgaggccagcgacactgtctcatcactacacgtacatatgccgacttactctatcgcgagtgggagctatgacggccgcgtgcgggtctatgacatccgcatgggccggacgacggtggatgtcctcgggaacccggttacgagcgtgcggtgttctgcggacggaaatgcgcttctaacgtctacactcgacagtcgaatccggatgcttgatcgcgacgatgggaagttattgagagctttcgggtcaggagacaccgcg

SEQ ID NO: 22829 - DNA, 500 bp, Emericella nidulans
cggcaacggtaacaacaatatatcgcccactcatcagccgtacaacccggccgcttaccaagcggccagtcttggaaatcttgggtctcccacaatccagcgccagtcgagcatgcttttcgctcaaacgccgctctctcccaacccgtatggatcgccgcactcttccttacctccgccgcctccaccccgtggccctgaccatccctacggcgggcgaccctcagtggcatatcccagcacatcacctggagctcagtatggattttcacaacactcatccaccgcttcgacctatagtcttgcctctcccaccacgccgggcacagcctacgcgtccggcagcggatctctgtccagcatgacatcgttcaactcgcggccgtaccgcggagttccgattccatcgcacatcttccatccgtctcgcctttccgatcctagccggacgccgtccgtagacgaggagccgcctgagcctccagcgcacctttcttcgg

SEQ ID NO: 22830 - DNA, 850 bp, Emericella nidulans
gagtcatcccattgcgcctcgtgctgaccctcctatcagatccaagaccgatgcagataagttaaaatacaagcagcaacaggagatgctgctgcggcagggagccctgaagcttgattcacctatggatgctggggccgctgcaattcccctcgatctacctgtaatccccgccggtcgccgcaagaagttccatccgtcgaaactgtcatccgaggatttccgacgttgcgctgaaccatgggcgctcagcgctgttctaacctggatccgggatctatctgaagaggagaatgacctgaaaacccacgccgtagtcgatgctatcgtcgccttgtttactcacaaagttccgacgatgaatattgccgatgctgagacccttgcggcgcgagtcgtggagaacatgtttgaccaaggagctctcattaaggacgaggaatgggtcaagttcggcaatggacagatttctggtgtactgtttcagattacgggcaccggctgctactcgcctgtgttacatgagcaagagacggatgccgaagttgttggacgctgctactcgcatcactgcatgcggacgctaaggaaggtgaatcttagggcgcaggacatggagccgcagaagaaggcggaggattgggtgacattctacaaagtttcaaaagaagtattggaaaagcaccctaagaaagagatcgaccggcagaacaatctgcacgagattgtcactaccgaagattctttcatcagccagcttgatgttttgcgagactgctatcgcgatcgactggcaaattctgaaccctccatcatcccgccgaaacgcgcaacgaagttcctcaatgac

SEQ ID NO: 22831 - DNA, 789 bp, Emericella nidulans
aacgtacatttcacctctcgaaaccacttaattatcggcgactgttagataagaatgtttcttgtgattggaaatacatagtcgacaagattgtttgcaacaatgaccaacaagcctctatattcttgcagcaaaagctcaaagtcggcacaacagagcaaaaattcgacatcatcgaagccatcatccaacaggcttactcgctcatggtgaatcgattcggaaacttccttgtccagcgttgtttcgaacacggaacttctgagcagatcgtcgcaattgcgaatgctattaagggtaacactttgagcctcagcatggatcctttcggctgccatgtagtccagaaggcctttgactgcgtgcctgaggaacacaaagcagtcatggtgcatgaacttctgcgcaggatccctgaaacagtcattcaccggtatgcgtgccatgtatggcagaagcttttcgaattacgctggagtggtgagcctccgcaaattatggcaaaggtcaacgaagctttgcgcgggatgtggcatgaggttgcattgggagagactgggagcttagtggttcagaatatctttgagaattgcgtcgaagacgaaaaggtatgacttcgctgcatttttgcctctcctttacgaaggctttctaaccacaccatctagcgccctgccattgaagaagtcctagcgaagatcgatgtgcttgctcatggtcagtttggaaactggtgcattcaacacatctgcgagcatggtgccccccgcgataagagtcgtgctattg

SEQ ID NO: 22832 - DNA, 850 bp, Emericella nidulans
cattccacgtggccactaacgctgggcttgcacctagattgaatttccctcggtcctcctcccacaaaatatcacctcagggagtatcgtggatatcaccgtgtcgcgtaacaatgccgcagaagctgccaacgcggccgcttttcaggctctccaaaagcgcatccttaacacctatggaatcaagacaccttcaccaccagtactccgcctccgcaacgctacgcaaacctcgctagtcctcgaatgggaccctatcgacctagcaaccgcatccctgaagaccctttcactttaccgcaatggctccaaagccggctctataccccggccccttgagacgcgcagcaccaagatcagcggtctcgcaattcactctgaatacaccttccatctcgttctacgtacgaccgcaggcacataccaatccgaaaagttgacctgccggacgcacaaaatgacggatctgtccggtattacagtcacaactggcgtgcttcatcctcagcgaaaggaagccctcgccgaggcccttgatcgcattggtggtaagcttattgacactgttcgaatcgataccacgcacttcgtctgcactgaaggcaggggcccgttatgggagaaagctgtcgaaatgaatatccccgttgtggtgcccgagtgggttgatgcatgcgaagcggagggtaccatcgtcagcgtgagaggctactacctgaatgccgaccccaaggcccggcaactcggaccaattcatggctcgacgcagcaccagcgtactacgtcctccatagcgtccccctcgcgacaatctcagtcgcagtctctgtccctccctgcaaaccagtca

SEQ ID NO: 22833 - DNA, 500 bp, Emericella nidulans
attgatttctccatctccttcaccacaggaatggaaggagctgacataaactgaaacaaaaggggaacccagttcgaaaaaggataaaaacactatagttccgagtcttccctttcgaactctggatgctcctctcctgcgtgacgacttctactgttcgacgttggcatactccagcatcgctgggactcttgcagttggattagggcaccgcgtttacctatggtctgaggctttcggcgtgcagcatccgccactcggggaacatgacccctcgaattatgtgacatctctgtcattctcgtccgagaatggcggtagaagcattttggctgtgggtaggaagtccggcatgctgagcttgtggagcacattcgactcggatgtgcgcttcgaaatcagccattcaagcactattacgtgcgttgcgtttaaacagacaaagtcaagaagggtttcagaaaggtttgaagacactgaagtggatgcagaagatcttg

SEQ ID NO: 22834 - DNA, 850 bp, Emericella nidulans
ccctcagcttccaatctgtacatggagaatacctggctttgggttttctgaccagtgagtccctatacacgctttccgcgcgtttcgttcggtcaactcagcatctaacaactttgactgcgatattcacgtccagaacgaggccgccagagccagatcacgctctacagcggacgtggtttgaatatcgagagcacaacgggaaacatctggctgtaggctgccttcgcggcttcggcccttcctctgggtccatgagctgatacgtgagaatgagcaggtccggcacctctgtcgaacacagcgtgctctataagtaccagttcgtttccaccaagaacgtgcatatgggacagatccaaacagagacagcgttagtgtccccttaaccctttgggcgtttctctaatactcacacgaggaccctcaggtactatcaaagcctccctaatgctctgattcctttcgcgcctaatccctcaatccacgaccccgacatcacctcaagctgcgatggccgcacagggaactgtgctattggctggggtctccgaatcgttgactcgcgagatctcgccgtgtacggcgccggcttgtattccttctttgataactatgacacaggtttgtctctcatgcttctttatttttacgaccttccgtgcattggctttttgtgcatgcggactaataattcgaaccccttatagaatgctccgcgtacggcggttatcaggattgtcagaactccattttcagcatcgagggagaagtgacaatattggtgtcttcaccaacaacatcgcgtattttaagggctagtgagtaggtaccaccggaacgggacgag

SEQ ID NO: 22835 - DNA, 850 bp, Emericella nidulans
cactccgtgaaggttcgtgaagaggcaaggaatactgacacgcattgcgcgcaggtgtgggtcatatcagagacgaatgaggtcttcaccaactatgaatcgtatcttcagcgcatggatttttataagcagcggaaattcatttgcgaaatcacgggccattcggggttgaatttcttcgaggcgttccgaagcgaggtaaagggccagttttaataaacgtcgacttgcaagcctgacgaatgatttcacagatggaggaatcaagagaggtgaacaactcgtttcccgaagcgctaaagggtcccatattgcgccgggtccaattctcgacggtatcgcgggtcgataacctcggtgcgtatctccgatttctctcaacctaacgttctcggctaacttttacggatctagtggacgaaatatacgaagtgggtgactcgcagttgcttctccgttgatgagacttttattgactcattgaacgtaggaattcaaatcggaattctaccctggcgaacctgttctcatcctgttggacgacaacacgcgcctccacggagtgattagagacaaagccaagttccccgaacagctgtacccggacggaaccgttagaactccagcccatgcgacttatttggtcaaagtgttggatcgtccggatgaggaagccctgttggataaccaccacatcacccgtgataggaagacgttcaccaagcagatgcttcgcgcattcattaaaaataacgtgactcgagagtcctggaacggcgcaccctggctggttaagccgtcggttgccgaagaatacaggattcctacggaagtgccaaaacatctgcaa

SEQ ID NO: 22836 - DNA, 850 bp, Emericella nidulans
cggctctggcacaggcagtaggcatcccttactacacgaatggcacgaaggactactacgatgtgatcggtcttgatccccgtgggatcgggttgagtacaagagtcaagtgcgatccagacctctataacaagcgggtttcgctgtttccgacgactgaagaggagtttcatgcactggttgagaagaaccgggcgctcggggagagctgccgaaatctaactggagagttgttctatcacgttgacaccacgagcgctgcaagggatctcgaggccgttcgcattgccttgggtgacgagaagctaaactggatcggactgtcctacgggactcagctgggcggcgcctatgcagagctgtatcccgagagcgtgggacgcatggtcctcgacgggaacctggatcattcgcagtcagaaacgggagctttacagacggaagtgtcgacttacgaggacgttctgaaccagttcttcaagtggtgcaacacaaccgcaacggacgacgaatgcccgctcaagggccaggatctcccccaaatatttgacgacctggtcgctgccgctaacgagtcgccaatcgaggctcccggctgcgccggcgaccaaagcgcctgccgctccacggtcaccggccaagacatcctcatcaacgcccaaccctacctcgtctatgaaagagcccagtccaagcgctcgagcgccaactggcctaccctagcccagtatcttaacaacacaattgccggtgacgcaacaggcttctcgtcaagccttgcgacatcagaaagagacttgtcctatcccgatatcgcgatcggctgccttgactggcgtcacgatttcac

SEQ ID NO: 22837 - DNA, 500 bp, Emericella nidulans
tggatatctgcttggtttgtaagttcccgttgtgttcttccatcaacagctataggtgctgtgtattacctgttcaagatgaatggaataacctcaacctcgttaccctcacctcgttaccacttcgagcccattgcggtgattgggtttgcctgccggcttccaggaaacaacaactcccccacagcactatgggacttcctcgaacgtggcggagtggcgagtcgggctgttccagcttcgcgcttcaacttggcaggccacgagaacggcagcaagcggccgggtacaatgcgcacgccggggggtatgttccttgagagtatcaatccggcggatatcgatgcccagttcttcggcctctcccgtgcggaggccacggcgatggatccgcagcagcgccagttgttggaggtcgtgtatgagggactggagaatgccgggatcacgctggagcagctgagaggacaggatgttggatgtttcgtggggagttatgc

SEQ ID NO: 22838 - DNA, 850 bp, Emericella nidulans
agcagcagacgggcataagatacatgggaggagtgttgtgactggagtatgatattgcaatccctgattctctgatctttgcacatggacagatttactaactgcatcattgcacagagtatctgggccgacatcaccctcactgtgggtgagtacctgtacaagcaaatggtgcccggcggcaaaatgccacacatgaacgtgaaagggatggaagtcctggaagcccaggtgctgcacccagatatgtcccaattcatccaaattgagggagtcttggacctacccagacagcaaacggcagtccggctgtacgcagcaagcgcaaacggcactcggaataccgacaagccgtttgcctcagcaactgtttgctacgaagaggctcaggactggcaagatcagtggcagatgacctcgcatcttgttgctgcgcgagccaattcgttctgggaaatggcagcaggcggatcagacgacaatgcccggccagcaggcaagggaggacctcgagtgaacaactttttccgcagcatcgcgtaccaactttttgccaatgtggtagactacggcgcgaggtaccgcgggatgcagcgcgttgccctctccgaagacacgctcgaagcaacggccgacatcgtcctagacaaggaccgccacggcacctggcatacgccgccgcactggatcgacagcgcgttccagctcgctggctttgtcatgaactcatttggcgtacaaggcgatggcaaaatttccgggtcgtctcgtgatttcttctatatcccgccgggctggcggcactttaggctgctggaacgtcttgagccggggcctgaagccacgtatc

SEQ ID NO: 22839 - DNA, 312 bp, Emericella nidulans
cccattgtcgcgatgcctttccaaccgtacatggaatcattttctgtgatcggcatgatcactttgcagctcgactactacttctcggttgacaatctgtgcaaggatatctatctccgcaagcatatggactctcaggggttcgttgcgttgaatgtcatcgccaacttcaagcgagtcaagcaactgtctgaagactttgagttacttcgtcatcgctcgcggcaattgaaggccgctgaatatcacgctggtgaggatggcatagacaggctacgaccaagggagaggtgggaacagtgggttctccct

SEQ ID NO: 22840 - DNA, 351 bp, Emericella nidulans
gcgccctaatacgcaaaccgaacgtgcttcttctcgacgaggcgacgagcgcgctggacacggagtccgagaagctggtgcagggtgcgctaactgaggcagcagcggagcagaataggattacggttgcggtggcgcattggctttcgacggtccgtgatgcggactgtatctttgtctttcatgcgggtagaattgtggagtttgggtcgcatagcgagctgcttagccggggtggaatgtatgctgcgatgtgcgaggccagaagctggatgtgaatggcactgtgtcagcatgattcagcgagagcgggagtcgaggttgctgatgaagttgttgggtgcgctcaat

SEQ ID NO: 22841 - DNA, 500 bp, Emericella nidulans
tgtccgccccgaaaagttaccacactcaagccaccggcgcagcggctgagacggtagcgaatcactccaaagaatcggatttgaagttgtacgggagttgcttctggtgagtcaatcccggttatccatagcttctcagagtacacaatatcagtatcctaactcagtctagccctttcgtgcagcgtgtctggattgccctggagctcaaaggccttccttaccagtatattgaggttgacccatataaaaagcctcaatcattgctcgatgtgaacccaaggggcctggttccagcattgcggcatggtgaatgggggtcgtatgagagctctgtgttgctcgaatatgtgagacctcccagccctcccttgttctgggtcaagactaacatgagcggcagcttgaggatttagaggttggccctcctctccttcctccgggtgatgcgaagctgagagcgcactgtcggctgtggactgactttgtgagtgacacaa

SEQ ID NO: 22842 - DNA, 530 bp, Emericella nidulans
  unsure (1)..(530): unsure at all n locations
cttccgagagctcagcgaggcgaagttacgggagatgatcgaggaggacaaacacaaggaccattgggaggaagacgatgagggtgacaaggaatcgacggacttggagacgtcggagcagttggaccaactttacaaacgtcgagcggaaatcatccaatatgcactgtaggtgcattggcctggaattgcggtgccgaggtgctatactgatgctttatagacaggctcacatggaggcctctttcgcgctagattttgtttccctgttgctatcaaagcaccaaccccgccaggctgaaacgtctatgtcccctttcttaaagtcggccgcaccccttggctccctcaactcggaagtcgttaatccgccgccgagacccgaattgaccttgnaagacataaaatcggtggccagaggatggcggctgcagaatttcaactcgaccgctgacaaacttctccatgccggctcgagactcgagactgaggttaactcggagacgaagtactggaatgaggtcttagcg

SEQ ID NO: 22843 - DNA, 461 bp, Emericella nidulans
ccgggcgtcgatcaagaaccacgctggattccccgcggtttcgcggcatcgtaccccgcagaagacactattccaccgccggtccgtaccggggaaaaaagatgtctgcttcccgcagaagaacgcctcgaaagtagcagagcaatgtgcgcccgctttgtctcgcgtaaatggacgacgcacacccggaaccaaggaatggcggtatttgtctatcctggaggattggagccgtgaggaaaaggaagaacggataggcgttttccgtgcaaagaagattagcgaacccatgctggtcgagggccgtcttcgtccacaataccgagcctggcgacgcgaggaggacgaagttccttaccgtttcacatacttcaacgaagagtttcagagcaccattcatgcgcaaacgataccggaattggttcagccaggaggtagcttccgtgaactcttcatccccg

SEQ ID NO: 22844 - DNA, 580 bp, Emericella nidulans
tacagattgagaaatccaatgtccttcttttgggtccctccggagtaggcaagactctcatgtgccgctcattagcccgagtcttatcggttcctttcagcatctcagactgtactccgttcacacaggccggttatatcggggacgatgcagaagtatgcgtacaccggcttctagcggccgcgaactacgacgtcgagcaagcagagcgcggaataatcgtcctggatgaaatagacaaaatcgcagccgccaaggtcagccatggccgtgacgtgggaggatctggtgttcaggaaagccttttgaagctcctcgagggtacgaccgtacaggtgcaggcgaagcaggaacgcagtgcgccacgtctcagcgggacaaccagttcttcatatcctccgaatggcctattaggaaacaccccctttactcccccgggtggaggtaatgtacctcataaaggtgaggtttataatgtccgtaccgataatatccagctcatatgttccggcgcgtttgccggacttcaccaagtttttattgccccataattccgtgccttattggggttcggacagcc

SEQ ID NO: 22845 - DNA, 670 bp, Emericella nidulans
tcaccaccatacgggagcaacatagaaatattgagtatatcgtggtgtggcatgcgcttttcggttactggggcggcatttcaccagaaggatccctggcagcaatctacaaaacaagagaagtggcactcaatagcacgacaaggccgtccatgctaacaatcgatccttccgatatccaacgtttttacaatgacttctacgctttcctctccagatccggaatatcaggcgtcaaaacggacgcgcagtcattcctcgatctgctcgccgaccccgaggacagaagatcctacgcaaacgcctaccaagacgcctggacgatttcatcgctgcgccacttcggtccaaaagccatatcctgcatgtcccagatcccccaaacaattttccattcgcaggttcccacgaacaagccaacaatcgtgttcgaaactcaaacgacttctttcctgatatcgacgactcccacacgtggcatgtgttttgtaacgcccacaacgccctcctaacgcgctatttgaacggtcttccggactgggatatgttccagacgcttcccgaaaatgggctggactatgcatccttccacgctgcagcacgctgtatctccggcgggccaatctacatcaccgacaagccaggccagcatgatataccactcatcaaa

SEQ ID NO: 22846 - DNA, 850 bp, Emericella nidulans
gatggctccgagtcaggcgcgatgccgctggccaccatcgcctacagcgaggaatatctcgaagcaacttcatatcttcgtgcggttatggccgccaatgaaatgtctgacagagccctgaaactcacagaagacattatctccatgaatccagcccactatacagtctggtaagtgatccttgaagatatctggacgcagctaaacccgacaggatatatcgtgccaagatcgtctttgctttgaacaaagatctcctcgaggagctggagtggctgaacggcgtctccttgaggtatttgaagaattatcaaatctggtaggcagctctccagccgggtgaggtactgtgaccactaaccccgccaggcatcatcgccaggttatcatgtcctcacgagagcacttccctagtctcccaccaaaagagatggactttctcatggaaatgttcgctcaagactcaaaaaactatcatgtatggacctaccgccactggctggtgcggcattttgaattatgggattcccctcgcgagctcgcggacgtgaactccctactcaactcggatgtcaggaacaattccgcctggaatcaccgttatatgctacgcttcggccctcgtagtaatgagcccgatgctggcatggtcaacaccggcgggtcgcctgccgaaaagggccgacttgccgtcgtggacgaagatctggtcgacgaggagctgaggtacgctcaggaccagatccttcgagcgccagagaaccgaagcccatggtcgtacgctcggggtatcctacgagctgctagtcggccactctccgaatggaccgagtttgcgcagaaattcgtc

SEQ ID NO: 22847 - DNA, 850 bp, Emericella nidulans
atgttggtgcctattataccggtatgttgttagaatttggtccccgatcagtcttaacatgcagcctttctttcgcaggtcctgtcagctgtgttcgaacaaccgcttcggaccgttctttgggtggacacgtcgtacctcgccgccagggcagcaagtcagccaatcttcgccatgttgtctgaagtttttggtcaaggaccaatcttgatcgtcgccgtcgtcatagccatagccggaacaggagtgtgcagcgggtcgttgagtgtgacttgccttgttgtaggccgactggttcagggaacgggcaatgggggtgccattgcggtctcgtcgctcctggtgaccgaccttattccatatccccaacgtgttcgattttccgactacaagtgtcgtgcgtgggtgcttggagcaatccttggaccggtatctggaggggtccttgctcgatacgggaattggaattggacattctatttcagctatattttctgtggcctgagtctgtttgtggctccgtttgcaatcgacttgaaggagtgcaagagcatctccaggcgtgcggcgcgtgagatggattgggtaggagctatgttgactgtgttggggattgggtcactcttggttgcatgcagttgggtagggcagccacaaaacggaggggaggactggcgcattctagccaccagttgcattggtgggctggcgatggtggtgctagtgctttatgagagcgtctgggtgtcgcggccgatgttcaatctcgggatatttagttccatatccaagatcatgctgtatgttggcagcacatttcacggacttctggtcagtgtaatcacctttt

SEQ ID NO: 22848 - DNA, 850 bp, Emericella nidulans
agttatactgcggattgctgaattcctagggaaccgtggagcttggtgtgctacgcagctttgaatttgtttctcagcttcgccgcgcaagtgttatcgtaagacagtttggcgacagcggggctaccatttttgtcaagggcgcaccggaaagcgtgaaagatatatgttcgccagaaagctgtcggttttccccgtgaccagcttgtactgtactaaccagtctgcacagtaccgtcggatttcgaggagatcctaagccagtatacgcacagtggctatcgtgttattgcttgcgcggctcgatatgagcgaaggttaagttggatgagaatccagaaaatgacacgtacagatgcggagtctaacctcgagttcatcggcttcataatttttgagaataaactgaagcccaagtctgcggacacaatctcggagctgaaacaggcaaacattcgaaacatcatgtgtactggcgataatatcctaacagcaataagtgtggccagagaatgtgggatcttgggcgccgatgaaccatgttttataccgcgatttatagagggtagtatctcttgcccttttgctcttatctgtattaattcgagcaggtccccaacagttgcagctcctatcctgggagtgtgttgacaatccagacctacagttagacccacggacgttgatggtttgcttgtttcgcctgattagcgaaataaaaggagctgacagtaaatagccctcgtttgaccgcggcgaagcggacctgtctgtacctggaattgcttgtaatgctcttaattactcgcttgcaatcagcggtgacgtctttaggtgggttttaacttac

SEQ ID NO: 22849 - DNA, 461 bp, Emericella nidulans
ggaacgccgatagagtcagggtccagaacgaatggattgcgcctaaaagcagcctcaacaacgaggacctggtgcaaagcccgtaaccttttacataatcgtcgcaacaactgcatttggcatgggcatcgacaatcccgaggttcgctttgtcgttcactggagcccgccacgtacattcgaaggtttcgtccaggaatccggccgtgcaggtcgcgatggccgcgccgcagcatcaatagtctactatagtctccaggagcgagaacgcgttcttaaccatctccgccgggacattgaaaatgtcaacaacagcacaggtggccggaatgcgggccttaaccaagacaaagtctcgcttttgagaaatctctacgctcgtaagcagagcttcgagaaggtagtccgatattgtgaaacaactacacgatgtagacacgaactcatcaaggagttttttg

SEQ ID NO: 22850 - DNA, 850 bp, Emericella nidulans
acaaccccgcagaatcccttcaagaccaatggagttaagccagctggcataaattcgccagtgtcgtctactactagtagttcggctttgagctttgataagcttcaacctgcgaacatgccatccggcctggataagggtaccaaagaagaagtggaaactgttcatcgtgttcgcttgctaaacgcctgtttccagcgcgaagttgcaaagctggatgctaccaccaacagcttcgatcaactgatgcagttttacctgcgcgttcgtgagacaattggtgctccggttgaatgggcgggtaccaagcgcaaagcttctgatagtgataacacggttgagccttctaggaaggctgcgacattcggcaacggaaacttggcctccagcgctgcttcaccggacaccacgacgtcgtcgaagcttttcagtggcagtcaaaacgcaccttcgaccagtaacaagagaaaggcgactggggatgatgatagcgatgcatcctcgcctgcgaagcgtgtagatggtgactccgcaactgccaacattttcgcaaactctttctcaaggtccaaaaccattgagtccaataaaccagcaggcactccatctcccaagaaacttgatgctcctgtcctcaaaccatctaccccagagtccatcaaacctagccttttctccacaacaccaaaatcatcgcctcctaagctggcattttccgcatcctcggctcccaaagagtcttcagcatcaagtgcaacttcctctcaatatatgcctgctttcaaacccgcttttactgcgtcagcaagcggtaccccttccccaagtcctttcgtcgtcaaagcttcag

SEQ ID NO: 22851 - DNA, 500 bp, Emericella nidulans
ccaatcccaaaaaagcgagaccccgcccaaaaaagagacccccgcgccgcggggggggacacccccacgcggagaaaacaccgaggcgccccaaataggggggaaaccacaccgggggcgaaaaaaggcaaaaaccccagggaaaaccccaaacgcggaaaaaagaaaaagcccacccccaggggggggaccacccaaggaaagcaaggggagaccccccctaaacccaaacaaagggggggaaaaacccgagggcccaaacccaggaaaaatgaccaaaaaagggccgcccccaaccccgagggccaaacccaaaacccccgccggggccaccccccgaacacgaaccgcacaacggccaaaaaaaccacgtgagaaaaagcacaaaacccccccgaaaaaaacagccacaccaacgaacgccgggaaacaaggcccccccccaaaacaccgggaaccacggacggcgaaccccaggcccacacggcgaaaacaccccc

SEQ ID NO: 22852 - DNA, 500 bp, Emericella nidulans
aaaagcacctgtttgctcttcttgctcagctccgaggtcagaatcgtgatgcaattttccgagttcgagaaacaaagcagcgtactgcggaggcccggcaggagatcgatcggctacatctgcaacttcaaaacctgtattacgagcagcgacacctgacaggggaaattgccgcttgccagtcttatgagtatgccacagccgttttaagtctcagatattttcgttgctaactggagatttttagtcataagtaccggtcgcttcctctaataccggtggaggaattcctggagctgcaccccgagcaccgagagtcagatgagcacgaattgatggttgcgcggataaaccacgagcatgcggagcgagagaagcttgagcaggcccgacaggaacttcttaagcgcaaacaagctctaattacagagaataacaaacggaaggaggacctagccagtctcgatcaggatctcgagaagttcatcgatgtgcgttgt

SEQ ID NO: 22853 - DNA, 500 bp, Emericella nidulans
accccagccctaaacggctccagaaacaagccgccgatgagactggtaagctagttggatcctatgcaagagcatctctgattaccatcagatccgatctacgaggaggcacattcagatgtcgattactctcccgatgattccagcgtcactagcagcgttcatgacacgccagcgacgccgttctcaacggcttcaacttccgtgagatatccatcggaattgaaaactcaccgctgcccgttcgaagggtgcaccaaagcgttcaatcgacccgcccggcttcaggaacatctgcggtcacacaacaatgaaaggctcttcagctgcacctacaaaggatgccagaagacctttttgcgcgcctcgcacttgaaccatcatgtcaaaagtgcccacactggagtacgagactacatctgtgatcgcccagggttgtgggaagagtttcgtgaccggctcccgattgcgtcgacatctagcagctcatgatggtcgcg

SEQ ID NO: 22854 - DNA, 500 bp, Emericella nidulans
cggtgtcaccagtaccgtcactgaggaacaatggaaacatatgatggatgttgtccttgcgatctatgaggttcgagaagcagagtaagtggttgtcagactgatcgcgcgacagcccaaagggcgatgctcctgggtcgtgccgtcgcaaaaataaacctgtgctgacaccttttcatctctcagtggccatgacccgtcgagacttttccatcgcagcgtcaacaagcgtaatgttcccgattattacgatatcatcaaggagccgatggcgcttagtatcctgaagcagaagatcaacaagcgggagtacaaaagcgtctctgagttcgtgcgggattgcgccctggtaagctagcagtctagaacattatcatgctcgtcgctgtcacgatgtgcgtctgacatcaccttcgatacagatccctcacaatgcgcaaacctacaaccggccgaattcccaggcatacgaggattcgctcgtgatcaaggatgccttt

SEQ ID NO: 22855 - DNA, 850 bp, Emericella nidulans
ttcggagatgatccccgccatcaggaaatggagtttgtcttcaattatgcaggtagcattgtgcagcgcgcacccggtcaaacgttgtttgcggagaatgtgcgtatcgctgagatcggccatccaaactgcgaacgcttttcgctgttcgatattggtgctgctattgagatgccgagctctgagcttgttgtctctttcacttttcccaagggtattgcgcaccgtgagcgtgttgcggaactggtgaaaacttaccaggagttgctcgaaacagctgttgagcgggacttagatctcagcgcgaagttatcgtcgccgcttgtctgtcccgcagacgttgttcgttcgctcgaggtaaatggtgtttgcattgagcgcgatgtcgagatcgtttacaccccttcatcgattcagcagcatatgctctggcgtcagtcccaggaaccatggttctaccgcgtgcagggagattggaccatcgagaagaccactactcagtcagaacctgtcgatatagaccgtctgtcccacgcatggaaccaggttgttcaccgccacactactctacgaactgtgttcaggtacagcagtgaggaggaacggtttgtcgccattgtcttgcatgaggttaagccagccatttctatcatccgcaaaggcattcagaccagcggctccctctgccgtgacgatgatctttcccctccccatcgcatggttctccgtgaaaaagacaatgggtcagtcgtatgcgaattggaatttagtcataccattatagacgctgcgtctcgctcaatcgtcgtgcaagaccttctcgatgcgtacgatggaaagctggcccatc

SEQ ID NO: 22856 - DNA, 680 bp, Emericella nidulans
tgccggtcatgttcatcgccttcgaagctaccaaggacgccaacgcctcaaaagacctcgaatcaggccctcgtaaccccaagagcgtgacgggtcgaaccagtactggtagacgcggcgtcgtacctcgagcttgctcttcctgtcggcgtcgcaaagtcaagtgtaatggcgagaagccgtgtgaggcgtgccgatggtacaagcggcctgaggagtgtacctatccagagtacgaacggctacgaaagtaagcacaggcagactcacaaaaaagaatcatcactaaaccggtcatgaaatctagtatgaaatcgagcccgtcgcctgattaccgcagcaccctgacaaggctcttccccggcacggcgccagagcagcttgtcaatctaccacgcgagaaactgctggaactgatgaccggcagcgcttctcagatgcaagactcgccctccacgacagcctctgtaacgactggggtttccgtgatgccaatcgagagacccagcctggaatcgctgcattccatccccagagacgagctgggcgaaatccctaatgttccgtcagcctcgtccagcggtcagatctctgacgacgtcaacgctctgtcgctcctggctcgaccacctacgtcctatctaggcatctcatcggtgcaggccgccttgaaagccatt

SEQ ID NO: 22857 - DNA, 500 bp, Emericella nidulans
gatatatgctacacagttctctaaggaagatattgagaacgagcaacggcgtccgaagaagaaggttgctgtgttaatcgggtactctggaactggctacaagggaatgcaactgtgcgatatcctgctttcttgatgagcgtttggatactaatgactgtaggagcacaactgaaaagacaatcgagggagaactgttcactgcgtttgtcgcggccggcgcaatctccaaggccaacgcggccgatccgaagaagtcatccctggtccgttgtgcgcgcacggataaaggtgtccatgcggctggaaatatcgtctcgttgaaactgattgtcgaggatccggacattgtccagaagatcaacgaccatctcagtcctcagatccgtgtctggggtattttagtcgccaacaagtcgtttagcagttaccagatgtgtgattcacgtatttacgagtaccttatcccgtcacattgcttccttcccccgcatcccaat

SEQ ID NO: 22858 - DNA, 500 bp, Emericella nidulans
atactgacctggatagattttggaagaaggcaaagctttcgagcttggtaggtgttacgccgatgtagatcgccatagtttacttgctgactgcgctctctctagccggaaatcgatggcatatcgactgtttccgctgcagctcgtgcagcacactcctagattcggatgcgcatcttctactcctcggagacggctcattgatctgcagcaattgtacctacagttgcagctcatgtgggaacaagatcgaggatttggccatcctgactggcgaacaagctttctgtgcccaatgctttcgatgccggaactgcaaaaggaaaatcgagaatttgcgctatgcgcggacgtcgcagggaatcttttgcatggattgccacgagtctttgatgcaacgacgaagaaagaagaatcgtgcggcaacgtctaagaagcatactggtcccggtgtaaagttagacaaatcgctcccttcgctgcctcctgaagaggtcgag

SEQ ID NO: 22859 - DNA, 500 bp, Emericella nidulans
agattacgccatccgagccacagacaacaagggcgaaaagctacctaagtcaagtctcatctgggccctggttgttgctaccggcgctggattcacaacaaccagctcccttctctcttggctgatctacggcctcgtcacctaccccggcatgcaggaccggctcctgcaagagctagtcgaccacggcataacagaagacactgagctcacagccgacctaacagagaacctcccctttcttgacaagtatatcaaggaaatgcagcggcgccataacccttcctaccagccaggtcgaactgcgaaagtcgacctagtcctaccaggggggtacaagatcccaaaggacagcgttgtcattgctgcgctgcaccatatccacaataatccgagtatctgggataaccctcccggtttgacctgatcggtgggatacggatgaggtgaagcagcggcataaggcgtcgtatattccgtttgcgattgggctgagaatg

SEQ ID NO: 22860 - DNA, 372 bp, Emericella nidulans
ggaagatattgcaacgtgatctgggactagcaccatttttttaccgtcgaagaggtggacgagggacatccggggagaatgagcctaaaacagattcggctgccgcttcagagaccagcaagaaggaaatctcgaccaggtcaccaaagggcagtccggctcaggacaccagctcgaagacaaagcggagcaacacccctcagcctagcgaaacaccacagtctcagcgttcggacactagcacacctgcccaagctacgtctacgccacgagggcccagatcaggaagaggcaagcagtcctcggccgctactcctacgacacccacatctaccgccacccaagcatttctcaagcatgccaacccttctc

SEQ ID NO: 22861 - DNA, 850 bp, Emericella nidulans
agccgcggacggtacctcgcaacagctcccgaccatacaactcactccctgcgaaactacgttgaaggatcttcttctcgacgtcgcccagtatattcaagactgcgatacagcgaacagacatggcgatgggactaagactgtccttcggttcacaggaggctgggtgcgggataagttgttgggtgtggaaagccatgacattgacgttgcgataaataacatgactggttatcagtttggtactatgcttaaagaatatctggatatccccgagaacttggataagtataaagggcagaatggagagaaggaactcagcctccataaaatagaggcgaacccagagaagtcaaagcatctggaaactgtgacaaccaagatatttggcttcgacgtggacttggtcaacctccgaaaggaagcgtacgatgagaatagtcggacgcctcaaatggagttcggaacagcggaggaagatgccttgcgccgagacgcgacgataaatgctctgttctacaatttaaatgaatcaaaggtggaggatctcaccgggagaggtttggacgacatgcgtgatgagattattcggacgccgatggagccatatcagactttcaaagacgacccccttcgagtgctgcgactcattcgctttgctagccgactagggttccgcattgacaaagatacagagaatgcaatgcaacatggcgatattggcgccgcgctcaagctcaagatcagtagggaacgtgtgggcatagaggtgcaaaagatgcttcaaggccctgatccacgtggtgcgcttcacatcattgatcgccttaacttatatcccattattttc

SEQ ID NO: 22862 - DNA, 850 bp, Emericella nidulans
cttttattccagagtttgtgtatgaagttatccgccaactaccccgtttccgagacatgcgacgcggccaccagcaagatgcgcaggagttcctgggttttcttcttgaagaaatgcatgaagaatgcgctcgcgctactagtgccaattcctcaaccgagcctgcatctactgatagtgagaacggtgacggctggttggaagttggccacaaacaaaagccagccgtcacacggtcttccggacacattgcctctgaatctccaatcacaaaaatctttgggggcaagattcgatccgagttccgcgtacctggtaataaggcctctgtcactcttgaaccgtatcagccgctgcaacttgacatcggcgccccagagatccataacattgtggacgcactaaagggcttgaccaagccagaaagtattcagggagatttcaattcttcgcgtggtccatatgtgactgcgaccaagcaagtcttcattgagagcctgcccccggtactcatccttcaccttaagcggttccagtatgacagcgtcacccatggcacgcagaagatctggaagaagattgggtatcctttggacttggaaatccctcgagaagtgttcccgcctcacagacgtaatgtcatgatggctcaaggtggacttcccaaatatcgtctcactggagtcatctatcaccacggcaagaatgccagcggtggtcattacaccgtcgatgttcgtcgccaggatggccgcgagtggatccgccttgacgacaccgtcatccgtcggatcaagagcgaagacgttgcagaggccggtggagaagaagatccaaaggtgcttgcggc

SEQ ID NO: 22863 - DNA, 703 bp, Emericella nidulans
tcctaactcgtgtagaacttgtatggcggtttatcaacggtgttcgagaaggataaagtcattttcgctgtcgccatccgtgatgcaacttacctggtggactttgcgcaagaggaactgcccttcagcgagagcgatgacttggatttaaagattggggaccacatgatgagacacttatataagtggtgcgatacacatcttgaaaagatgataggattggctattccgaaacaactggcgcacacatgtcccacgatctgctcccgcctatggttagagctcgatatcatccccttggtgctgtcagacaacagcaagctcgatttccgcggtgaggatctgcaatatggctttcagcagtccgcagactgggaactcaggactctggacgaacaagcagagtccatggctaggaaatgcgttcggtttgtccgacctaccaaatgtgatcattaaatactgaccaagtatagattattcggcccagagggaactcctttgctacaagtcgggctttccggcctcgtccaggttgacacggcttttcatgtgcagttgacaacaaagataactacaaaaattctgtgactgccaatacgtggaaagccattgaacactatgccaaccactttaggaaccgaatggttaagcgggcttttttaacgccactccccagggggagggggttgccctttttaga

SEQ ID NO: 22864 - DNA, 500 bp, Emericella nidulans
cctaggctattgcagagggctacctcaagctcctcattgaaggacaccaagtcgtccgggacattctctttttgattcgcgacaaccctgacgatgtatttcttgttcattgtgcgatgggtaaagaccgaacaggagtcgtattcgcggtccttctctccttagccggggtctcagatgatgccatagcagacgagtatagtcgaagcgagctagcactggaagcagcgttgcctaagattgcagccgcgatcaagaaggctatcccgacggttactgacgtggaggcgctgaagagagcgagggttgttattcagacaaggtacatagcttctgtgctcccagagttgtactaatgatgttctaggaaggaggcgatgctgcttatgctgcagttgatggtggaacggtttggtgggatggtgcagtacctgaagaactgctgtggtgttagtgaagaggatattgagctcatccaggctttattgacttttacagcc

SEQ ID NO: 22865 - DNA, 850 bp, Emericella nidulans
ctctatggccgcgataaccggccaccgggcgaaccgctcatcgccagtctgccagacgacctctggatgttgattgccgagcacctctctccggcagatggcgcccgactcgccatctctagcaggaccctctacgcccgcctctacccgtacccttgggcctcgctcaaccagcctgaacaaaccgacaatcgcgccgactttctcgtctcacaggataaatactacccgcaccatctcctttgcttcccctgcggtcgcttccacctccgaactcaagaaggccacgaatccctgcagcccgccaaagtcctcaacccgctcttcgactgccccaatgcccgcaataaccttcgtcctcagccgcgccaccgtatcacgcacggtcgcacaatcccttttacgtttgtccagcttgcccttcgcccatggcggttcaaatcgcccatctacggcctcgcagaccccactacagccctcagtcgccggtggcgccgcgacaactggtcccatcaatcccgcttcttgatacacaatggccgactcctcatgcgggtgacgtcctctacatttgccgacccaggcctcccgccgtcctcgcagcggcttcttttatactcgcgcgaggattactggccctatttctccgcctgcgcgcactggcgcgacggcgatctgatgtccgccgccaaatgcgcgctcacgcacatccctgtctcccgacgtacagagggcctgcagggcctcgagcatcgggtcaaagacatggcccaccgtcgggtgcatgatcccaatgccttgacgactctgtgcagccactgccgccccatgcgccgctgtcccgactgcc

SEQ ID NO: 22866 - DNA, 850 bp, Emericella nidulans
cgatatacacgatgacgacgcccggtatggtagagttagagcagcgaaatcgcttgccaacactcttcgaagtccttagccgtcgcactctcgcccccgtcgatctcttctccttctatatttacatgcgcgatcagcaacgatccgtcgattatctggacttctggtatgctatacataattattttcgctatgactaaagtcattgcctgtacgcatactaatggcactctgaactaggcttgatgtatcccaacacatgtcgctatgccgtcactatgtccgagaattacgacgctccgttctggttgcaacacccgatcttgaaaaggccgagagcaagggatcttcaacacctttagagaacttcgagagtgtaaacgatatcccactcgtggaagctggcccgtcagggctgcgacatggactccgtgacctggataataaggaggctgatcagagactgtcagctttcctccgctctgatggccactcgtccaagcactctccgcagaacagtttgggttcacagaatgatccggcccggacaatgtcgaatgagcagccacggccgagcctaactcaacatgagtcgagttctccaggtcatacggtggcacgcggggatatccgcgccagcgcagagaaaatactctacacatatttgcttcctggagcagaaagagagatcgtcttgcctgaagaaatggtatccagtatcatcaatctagtggaggacgacggcagagatgacccggaagtattcgatccggcgaaggactacgtttttcaagcaatggaacgcgatgccttcccagggtttttgcaggcgaaagctctgggcaacctt

SEQ ID NO: 22867 - DNA, 850 bp, Emericella nidulans
ccttgttcctataatatgccgttgtacgtccactttatatcttattcttgcgcaatttaacaggtttctagatacgcgcccggcgtgccggcgtcccttctgcgtctcgagttgagcttttcacccagagtgcacacttctgctttcaggtcgttcaggtattcctcgtaacgactttgacatctgcagcatccgcagcaacggcgcaaatcatccaagaccctctctcagcgaaggatctcctagctgagaacttgccaaaggcgacgaatttctacatttcctactttctcctccagggactgaccatcagctccatggccgtagtacagatcatgagcgtgctcgtcttcaaattcataaccactttcttcgatggctccccccgccgcctgtacgagcggtgggccgccctcagcgggataagctggggcaacgtctttcctgtcttcacaaacatgggtgtaatcggtatgtcctccactccgccatcatcatcaacaacaacgaagttaactccaactcaccttaataagcattaacatactcctgcatcgcgcccttgatcctcggcttctgtttcgtgggcgtctacctcgtctaccaagcctaccgctacaatttccttttcgtctacgacatccgcatcgatacaaaaggtctcgtttacccccgcgccctccaacatctccttacaggcgtctacctcgccaacatctgcctgattggcctattcgccatcaagtccgccattggcccgctgctcatcatggtctttttcacaatacttttcatctgcgcgcatctttcgctgaatgaagctttgggccccctatactccttccttcca

SEQ ID NO: 22868 - DNA, 850 bp, Emericella nidulans
cgcgcgtatgcctgcgcaattccgagagctagtggaagcagtgttggaatgttgtgcgcgggattgggagcgcgacgtcgtctcgataactttcgtcttctggtatgagctgaaacagtacgttacgctggagcgatatgccgaatcgcgggccgtctatagcgatgtattctccagactggtggatatcatgattaaacatctcgagtacccgcgccccgaagacggggaatctgacctcttcggaggtgacagggagcaggaagaaaagttcagacagtttcgacactcgatgggtgatgtcctcaaggactgctgtgtcgtcataggagttgccgaatgtttgtccaaggcgtaccaggttattcagcaatggatttcccaatatgcttctcagtctacagacgagcatgttccaaactggcaagagctcgaggcaccgctcttcagtcttcgagctatgggccgcatggttgatccggaagaaagcgcggtgttgccacaagtcattcctctaatcgtccaaattccgaaccaagaaaaagttcgtttccaggccattatggcgcttgctcgctacacagaatggacagcacaacacccagagacgctcgaagcacagctcaactatgttatatccggcttccagcacagttccatagaagtggttcaggcttctgccttagctttcaagttcctagggacggattgccagaaactccttggaggacacattgctcagcttcactccttctatgaatctgtcatcgacaaattgaagccgagcagccaggaggaagtgacagaaggagtagcggctgtcgttgccgtgcagccactggaaaagata

SEQ ID NO: 22869 - DNA, 850 bp, Emericella nidulans
gccgtcgcatcttttgggtggttcgaaaaatggatgtatatgttagcacgctgcttggcctgcctcagatgctgagcgatgacgacattgaccaggagtacccgctgtccattgacggggagtttatcacagaaaatggaatcctgccgagtccagaagggaggatacatgccatggtcggcgccaatgcgacacccgactctcagtgatcgttctcaaaatcgtgaaatatatttaccctctcaagacagcacaacaccggtctgagtcagatcaacgctatgttgtcagccattcgaaaatcagggagatcgagcgggatcttcagaactggatggaagagcttcctgcggcgctgcggcctgggacagaagtctctccacaaattgagcggtatggcctctcgctgtcgcggtaatggattagactgactttcataggatacgacaactcctgcgtattagctacgctcatgcgcagatggtcatgtatcgaccattcctccactatgtttccagcggctcacaagctcggggtgttgatagacggtcgtacgcctgtgccgccgcttgtgtcagtgtttcccggaatatcgtccatattaccaccggaatgcataagaagggccttttgaatggatccttctggtttaccatgtacaccacgtactttgccattctatccttgctgttctttgtcttggagaaccctgactcgccgacggcaaaagatggcgttcttaaagacgctatggaaggcaaaaacacactagctgggctagcgaagaagagtcttgcagccgaccgctgctcgcaaagcctcaactgtctcttcaagaatctccccgaga

SEQ ID NO: 22870 - DNA, 850 bp, Emericella nidulans
acggagaacggattcgggcgaggtaaagagggttctccatccgcgacatataatccaggcaactggacattcaggcgagaagaacctgcctgaattcaaaggtatcgagagcttcaaaggcagccgcatctgccatagttccgagttcgagggcgcgacagacgcagacccacgcaagggtcagcagaaggcggttgtcgtaggatcctgcaattcagcccacgatatcacgcaagactactacgagaaaggctacgacgtcaccatggtgcagcgctcgtccacctgcgtcatctcatcagacgcgattgtgaatatcggattgaagggtctctatgaggagaacgggcccccggtgcacgactctgacgtttttctctacagtatccccagcgagcaattcaaagcacagcaggtcagaattacggcggtgcagaacgagcatgacaaagtgcttcttgaaggtcttgagaaggctggattcaaagtcgacaagggccctgatgacctcggtctgcttatcaagtcctggcagaggtccggtggatgcccaatcgaagatggcgctgtaagtctcatagtggtcgggaagatcatagtcgagcatggtctagagatcgcagagatccttccgcatgtagttaggttggctgacggctttcagttgcaagcagatgagattgtttatgcaacatggtacaagtatatgcgctagcagaccagggtgatcttaggtgatatggttgccgacagcgtacacagtgtctgggggctcgatagcaatccttagttatgccccttggcgtgcccggcggtccagcaacattccagcatctatatgcatgacacc

SEQ ID NO: 22871 - DNA, 500 bp, Emericella nidulans
aacgagcctccgcccaatgctgccttgcttccgcctattgaggcgggctcgattacgcagctactcaccaaaccatcgcgagaccatatcgacgtagagccagagccagaccaagtggtaacagctgcgagcttaactcccgatgttcagaatggtgaaaggattgagggaaggattgcggatatcttggattctcctattgctgagaagcctgatcttcgtgatgctgtcgtcaacaatgacgaggttgataagacacagccggaaaaggagccaagtcatgcgaaagaatcacaacccactcaggagacggacttgccgccttcgcccaagacaagagggcgttcacggaaaaacctccggaaatggactgatgaagaaaccgttgccttactgcgtggcgttatgaagtgcggtatcgggaattggaaagaagtcctcgcgcaggatgagtcgagcttcaacaggcgcaccgcgtcgaacttgaaagataggtatga

SEQ ID NO: 22872 - DNA, 438 bp, Emericella nidulans
gcatgctaccagtatcagtgtgcatactaatcagataagctgcagataatcagatatctcttattcaaaggcaggcaggtctaataggcgcctgcttactgcaagacctttgccctggattattactttagttgcaaatattattaacagaacacctacaagagtgataggatagaaaacaccataggagatgcttacaggaaagaagccaaatctagctaatttctacctgattagttgcatatcttatatatattagcagcaagaaaaaggtgtaaaaatagctccaagagcttaccaaggtgttctagtaggctatgtagcctctaatatatggtttatatggaacctaaagaagcagcgagttgagacagcaagagatgtcaagtttgataaaacaaggctatacaatccatcagatccttttatagaggatga

SEQ ID NO: 22873 - DNA, 850 bp, Emericella nidulans
catcagcaatttcactgtagacacccaagtccagctttacgcaactttctcgcctacgacacctgttcctgagtacgacgagacacaaggagtttggactcttaaggaagaaaaccttagcgcctttatcaacgctgctgaatggccgttaaaccccagcatcggaagtggcccaacaataaacttcatcctctacgtgcccgccccctcgcagtctccattgctcgtccaagagagcaaagctactagctggatcatccctcaatggggcggcgtctttatcctcaatccccctctctcaacaactgacggctcagcccagtccaacccaccgcacctcccccgtgacgccctccgcgcccccttcctcaccttctcccaccagctcctcagccttctcggcaccccctcaacaccgccctccctccccttccgccttcagaccctcatccgcattcgcgccgcaacagtcctcctctccgcctcctcaacaatgggctccctcgcccgtctaacagagtcactcccgtctattcccatccccgcaacagtcgcgtcctctgtcgcaacaacgctttcccatctctcgtcttcatgcgaaagcctacagaatggacagtttcaggctgcgttggctagtgcccgtgttgcggaggcggaggccgaaaggagcttctttgagaagagtatggttggtcagatgtactttccggatgagcataaggtggcagtttatttgccgctattggggcccattggggtcccactggtactggggctgttgaaggaggttaagagggtagttacggggtggaaggctaggaggcaaggggttgtttcgtgatagata

SEQ ID NO: 22874 - DNA, 500 bp, Emericella nidulans
cgtcggtgactcggtgtctaatcttagcggcatccagtgctctgctccaaaacttcatccccccgtaactctcatctcgatatcccagatcctaacagatattcaacccagcccgaataagatgccattcgtctcaatcaataaccatcaactacattacgccgactcccatccaaacggagctcccgccaacggccttaccttcttttttatccatggcctaggctcatcgcaaaactattactttccgctcctcccgcacttgacccctcagcatcgctgcatcactgccgatacctatggctccggtcgctctacatacacaggccagtctgtctctatcgcatccatagccgatgatgtgatcggggtactagatgcgctgaacattccacaagctgttgtggtcggtcactctatgggtgggctagttgtcacgcttctgggatctgaacatgcagatcgcgtgaagggtattgtagcgattgggccaactcacc

SEQ ID NO: 22875 - DNA, 559 bp, Emericella nidulans
agaaatattagatatttcttgttgattactgatgatgcaacccaatatcaataggtttatacccttcgaactagagatgaggctattcccaccttccagggatggcttgagcatatcaaaaaccaaggatacagcccaccagctttcgtacgaagtgatcgcgaatttctaaccgaacacgtcaagaagctctgccaaacctatggcctaatttgggagccaaccgctgcagactccccatggcaagatggcgtcagtgagcgcggaatacagacggttttacaatatacaagggcaatgttatatgactccggattaccacgatggctatggccacaggctttacaaacagctgtctattacatgaaccggttacctacaagagttcccttgtacaatgatcgacggcctatggaccgaccagcgatccggaaatccagccatgtgcccattttacgccctattccgcctggaccaatggtgacgccgatattaagcatcttgtcaaatttgggtcacctgcttggatgcacctacatggagcttccaaatatgctgg

SEQ ID NO: 22876 - DNA, 500 bp, Emericella nidulans
aaaaagttcccctcggtcaaagacgaccccgtcgccagtgccgagggcactatagtccctcacaacacaaccaagcgcggtctgtcctcgcgtcatctgcagctcatggccatcgggggctcaattggaacgggtcttttcgtaggcattggccagtatctgcgtgaatctggcccgctctctgttgtcctcggatacctcctttacggactcttgttcatctggccgtgctacttgtgtgtgggcgagatgtgtgcatacctgcccatccccggatcgatattcgaactggccgctcgatacgtcgaccctgccttttcctttgctatgtgagacctctctcctgcacaccctatcggtgtacgtcaacgctaacggctcaggggctgggtgtacttttatgcctgcgtgatgctggtctgtgtcgagtactcatccgtcgctactgtgatccctttagtgagggttaattgcggccacggatcttaggaattaaaagg

SEQ ID NO: 22877 - DNA, 500 bp, Emericella nidulans
gaaggtatattcacattcaccgttaacatttgctccgatgccatgccgcactagactgatgaattgctaatatatgaaatgagaataaatagaacatgaacataatcctcgacatcctccgctcctctccacctccccaaatcaaccctcgccgccccctcctccctggcccagcccccgcccaactcccactcaaccccatcgcatacctgacattgattgtcgactccgtggcgcccctgatcaaactgcaccacgccaagggtatcgcgggtggtggtaacacaatgcagatcccgctcgcattggcagagaagcagcgccgccgcgcagctattgggtggattatcgacgcgagcaataaacggcgtgatgcgaaattggcacatcgcgtggcgaatgagcttatcgctgttgcggaggggcgaagtggcgtttgggagaagagggatggagtgcataaactgggtattgcggctagggtaaatattggtgcgaag

SEQ ID NO: 22878 - DNA, 500 bp, Emericella nidulans
tgccattgatgcagtcgcaagtcgcttacgaatacgcttgaagggactcagtgttcaaacagtgcatgccgtgtttatattgatcttcaagtgcccagagtttttgatggggctcggattcgaggaatactctatcgaaagcgtatcgtcaattttaagttatagtaggcatggctggttctcggcagcaagcagctgaaaaggctctgcacgatcaaacgaacattctccctcggggtaggcttctcgttgtctttgctgggcttgcaatctcgctgttcatctcgtttgtcgaccaaaatggcatcaccgtgacgctgcccactgtcgcagaggatctgaacgggaagaacaccatcttatgggcgggaacatcctcgctgattgccaatccaatgttaagtgtcctttacgggcggctggctgacattttcggacgaaagatcgggtatctggggcccctgggttctgcttttgcgtggagacttgctctggcggtt

SEQ ID NO: 22879 - DNA, 371 bp, Emericella nidulans
accactgttcttcattttcgaaggcccaagtggcatgtgcatcactcgtcttttgaacacatgattttgatacgcagttgctggccaccattggttaagggagaaggatacacgaattgttggggggtggggaggcatatcatggggagtcagatttttgattactggttagtacacctttccccgcttgccgtagcaaggaattttaggagttagaggtatgaggtgactgactgacgttcttgtgccaggtttgatccgtctcggtttattctggagcattatgtggatggggatctggtggatgagacgtaccctacccatcgctcacttgcttcgccggataacctgcatgtttggggtgggtcctt

SEQ ID NO: 22880 - DNA, 500 bp, Emericella nidulans
agagttttcttgtagacgacaaaagcgccctcgtagccggacgatggtactactggcgtggacagaccttgcttacctacgaactcgaaagcccttctttatccacgctacaatgccacctgctctgtgcagtatatctctgcggcagatctttccataatatgttggacattgctgtgagtaacgctgtgcgcacagcttacaccctcggtcttcacgtggaccctccgtccagcatgccagggccagaacaggagttgcggcggcgcctgtggtgggctgtatacgtgatggatagcaaaacagggatgaagctcggccgtccattcaacctcaataatacccatgccatgcccgcccttgcaagcgataccttcgaggctgcgacaatgggtgggagtggctcaccctttaaccccattgacaaggatactacatcgattagctttaatctccaacagacaaagctctacatgaccattcgagctgcccacaacgct

SEQ ID NO: 22881 - DNA, 500 bp, Emericella nidulans
gctccgcgcctcgaaaatcctggccggagacgagggacccctcgcggcctttggcgggtatcagggtcatcgattcttcgcgcgtcattgccgctcctgtgatctccaagatgctcgctgtgctcggtgcagaggtcctcaaggtgacgtgggagaacctccctgacgtcgccgcaacctgggtcgagcttagtacgggaaagcgggacacgaacctcgacttgaaaagcgaggccggtaaaaagaagctctctgagcttgtcgaatctgccgacattttgatcgacgggtaccgacccggcgtgctggcgaaactgggctttgacgctgagtcgctgaggaagatcaacccgagcttgatctacgtcagggagaactgctacggctggaaaggaccgctttcgtatcgatccggatggcagcaggtcagcgattgtctcgttgggatttcgtggttgcagggaaagttcctggggctgagtgagcctgttgtgccttta

SEQ ID NO: 22882 - DNA, 500 bp, Emericella nidulans
ccgatctcgcccctcggttctacgaatccatctataaagtggcaattggagacatgactctattacaaacgcaattccgccgcatttttctttagaggaggttttattgagacggggagcatacagcattcacaaaatgaacaccgctgcctccaaactccgccaggccctccaggaccctaacgccttcatcaccgccccaggtgtctacgatggtctctcggcccggatagccctcaatgttggatttgacgctctctatatggtatgcggtttcttcgccattgatgcttttttcgactacctggctgatactcccattgagtagaccggcgccggtaccgccgcctccgtgcacggccaagcagatttgggaatttgcacactcaacgatatgcgagctaatgccgagatgatcagcaacctttccccatcaactcctgttatctcagatgccgataccggctatggcggtccgattatggtcgctcgtactacag

SEQ ID NO: 22883 - DNA, 359 bp, Emericella nidulans
ccgactggccgattgtctgattgcgccagcctatgccacccgtgggtatatgctagatgccggacgcaaatggtacactaaagagttccttaaagagatgtgcagttacgcatcgtttttcaaaatgagcgagttccactaccaccttagcgacaattacccgctcaaccgtggccgcaatgaaacctggcaggacgtctattcgcatttcagtttgctgcccgaggatgagtccctgctgggcatcgtgcatggccgcgagaatgagacgctctcgcgcaaagactacgtcgacttacagaaacactgtgcgaggcgcggtattgctgtgattcccgagatcgaagctcccggtcact

SEQ ID NO: 22884 - DNA, 680 bp, Emericella nidulans
ccttgaatatccttgcctggttcgcagagaaccaagcattagcgacggacttccattcttggatgacggtgaaacagcaggcagcaccggattgggtggattggtttgatgtgaagggtgttattcttgacggcttccgagggcacatcgcgcaacccggtgatagcaaaggtgacggtaatgctgagatcttaatcgtcgacatcggcggcggagaaggtgcctacctgcatgcattcaaccataagttccccgatatacctggccgtcggatcctccaggatctaccgcatgtacttgacactgttaccgatataccggagaagacagaactcatggcgcatgatttcttcacagcccagcctgtcaaaggtacggcttgactatcgtgtttccccttaactttactgcaataacgtggctgataacccgaaaaggagcgagaacatactacctccactggatcctgcacgactggtccgactcacaggcctgccaaatcttgtccaacatcgctgcagccatggagcctggctactcggtacttatcataaacgagacgattattcccgacgagggttgtgattccctggctgctgccattagcgcaatgatgatgcttcaggttggggcggcggagagaacagagaggcagtggagggaactactggcaacggtcg

SEQ ID NO: 22885 - DNA, 850 bp, Emericella nidulans
ggtcaaatgccgcatacgttcttgacgaggtgaaggaccctcgcaaggttctaaagatagctggcgtcgtgggcgtgggattggtagggatactctataccctcaccaatatttcctactttattgtcgctactccagacgagatcagcaagactggagtcacagttgtcgcactcctgatcggtaaagtatttggagatactatgctctggttgacagctaccctggcggccttatcgtcattcgggaacctgatgacagcatcttttacaatgtcgagagtagttcgggaattcgctagggaggggatagtcccctattctcggttctttgccgctacgacgtcctccggctcgccttcagcagcgattcttcttgtattcttgtcatcagcagttatgattctatttattccatttggtcagtttttatctctccttggcctcagcgtactgaaactgaaattcttttgataggggaagtatataatttcctcctagatgtcagccagtacgccatcgccctagtcaacgtccttgtcgtcatcgcacttttcatcattcgtcggaaacaaccccacaggcgcactttccgagcttggactcccgtcatctatttatttcttgcgtcccaagtgtttttgctcgtcacgccgttcattcctgcagcgctagacacgggcagagctctgccgccttggctgtactccgtggttgcgcttctagtctttttcggctctggagtctactggtttatgtcatgggaagttcttcccaggcgcggccagtttgtttggactgcgcgggagtcagtcctcgcagatggatcttcagttgtcttgtgggacaag

SEQ ID NO: 22886 - DNA, 512 bp, Emericella nidulans
tttatccataacaatatccactggtgggctggtggtgagggaggacatatgtcgcagatcccggttgcgacatttgacccgattttttggttgcatcattggtatttctttccagtcgtctggtaacctggagcactgctgaactgtttaacagcaatatcgatcggctgttcgccatctggcaggatctcaacccggacaagttctttacggagggctcccggggagacttcttccaggaggtgattgggttgccagacaccatttcgccggagacgcccttaaggccttttcacaaagatgaagaagggaactactggacttccagagaagtgcgcgacttcagggcgctaggttatacctatcccgacctgcatcccgtgacacctgggtctggagggattccgttcgatcgtgccgcatataaaactaagctcttccagactgttaccttgaaatatggaatatcgcgtcttgaagctttaacgcagctggagctgtccaagaacggt

SEQ ID NO: 22887 - DNA, 616 bp, Emericella nidulans
caacttgcgcgccgagcagtagagaacgggatccaggaaacgaaacggtctttggcaggaagcgaagttcccggtgatgtggtcaagccgaagctgaccattgatttgggccactcaaatatcagtcgtataccggagccggttgtggatattatcaaggatgaagttgaacggtgtgtaataacaaagctcctgggattcatcgtgcacgaagcgaatgaaagttggtccacatgatgctgactatgtcgtaggctctcgttatggaacaatcaactggtccatattccttaccgattcgcagagtgctctcatcttcgatatctcaacgtcagatctaacaactttcgtgaatttcctagaggagtacgtttcgtctgattgatttcttgtcgtagctttctgactggtatgctaggtgattaaactgccattactggagattttggatttgagccgcaacaaaattagccagcttccggaggaaataaagaaattaacatctctccgagttctgtcggtgatgcaaaaccgccttgacgatttaccacttggtgtgtcggatatgaacaagcttcagatcctcaaagtagctggaaatccactgcggtacccg

SEQ ID NO: 22888 - DNA, 500 bp, Emericella nidulans
ctttcatctctgttgttttggcctggtgattatgtcttcatcgccctctctgcgtaagaggggcggcaagagagaggacaccccggtgccctctgaccgttctttcgctccttcagcttcacaattgggcgcagcatcgcgctcgtcagaatgggattatcggctggccattaccattctgaccgtgctagcttttatcactcgattctataagatttcctaccctgatcaagttgtttttgacgaggtgcattttggaaaggtatgtacatgtgttgacaaacggcaagttgggactgacgccggtactcttagtttgcgtcttactatctacgacgaacgtacttctttgatgttcatcctccgtttgccaaactcctgctcgccttcaccggctggctagtgggctatcccggccacttcaagtttgcccacatcggcgactcatacattgacaacgaggaaccctatgtcgccctccgtgctatgcccgccgtcct

SEQ ID NO: 22889 - DNA, 685 bp, Emericella nidulans
acatcccccggccctgctctgagcagtcgggtgctcgatgtcgtcagaaaaacgtgggatcttggcttcacggccttcggcggaccgccggttcacttccagattctacatgcacggttcgtggagcgggagaagtgggttgatgaggagacggtgccgcacccattcatgccactacccctagtcttatccttcacagatgtagactgaccgagtcgaccagtatcaagaactctttgcagtctgccagggcctgcccgggcccgcaagcacaaagatgctcttctgtctgacgctgctaagggcagggtttatccctgccgttgtagtctttctgctctggtggtgcgtcatggctcatccggccaacactccttgtatatgctgattaccgcgccatgtatagccttccgggcgcaataggcatgtacgctctctctctcggcgtgcagcgcatagacgatacccttccagccgccgtctacgcactgctttcggggctgaacgcatcaacagtagggattatcgcgcttgcagcggtacagctcgcggagaaagcggtccgtgataagctatcgcggctgcttgttatatttggagcttgtgcagggctgtgttatagcgcgctctggtactttcccctcctcatggtggttgggggttttgtcacggctgcttgggatgg

SEQ ID NO: 22890 - DNA, 850 bp, Emericella nidulans
atttgagcagaccaagaccgattatgtacggagcggccagggccgcatgaagcggtcttacagtcgacaagggcctactacgagagacagaaattgtacagaagcagatcaaggagctcctgcgatgcgatgtaagcaccatagaactgactctcgatgtatgtggctaactagtatcagctcttaaccgatgaagtcgagaacgaaatcagcctgacggcattccgtcttcttactctggaccttttgactttatactccgtcatgaacgagggcacaataaacgttctaggtaagttggatataccacacattacaaagccattaccaaccgcgactagaacactattttgaaatgtcgcgccctgatagtgagcgcgcgctggagatttacaagaccttcaccgcgcaaactgatgaagttgtcaagtttttgggagttgctcgacatttcgagtcggccacaaggctagagattcccaagttaaagcacgcttccaccgatctcacacgtctcctcgaggacgacctgaacgatccggatttcaaccagcgccgcagagagtatcttgctcggaaaggaaaaagtgtaagtagcagtgctttcgcagcagcctcgaccacgggtgataagcccgcttccaactcaaatcctacgcctcctcgacccaagacggagcctagccctcagacaaaggcagccccatcaaaccttatagacttctttgactcgattgagccggcccagccagctcagttccagcagcagccgcagcaacagggcatgcaattccagcagaccggcggcttccctggacaagagcctgctttctacccacaacagacagga

SEQ ID NO: 22891 - DNA, 549 bp, Emericella nidulans
tcagcagatgccaacagcgagattgacaacgacgaggaaatgacaatggaatttacgtcggtcgtgggaggagttttgaatagagccggatctcagaaggtcgacgaggataatgatacaccggatcacggagataattccacgtacgacaacccagatgatatggacgatggtgccgatatggagattacgggagcggtgggtgaaatacttccacgtgtccaggaggaagcggagttcggggatggagaccagaccacagggatggatttcactgccgctatgggcaagatattgacgcctgaacgcgcgagcccagataaggtacactcgcagcctgccagctctcctttccaagagtctgtcagagcatccccagctaagtccccggcagccttccatgttgctgctgtcgcctctgaaagtggtagccctagcttggccagtgtcaggtcaaggcctacaaggcagagtctgagccgcgcaacccccacgacaccaacatcgataacaccccaagaaccacctgcccagaattcttcgaagacc

SEQ ID NO: 22892 - DNA, 722 bp, Emericella nidulans
tcaaaaatcgaccttggcatgctcctggtggccatcctgagtgcgatagcgtccggcgtaccctttccattgatcggtatcctgttcggtcagctcctcgacgatttcaacgcggcgacatgtaaatcaggcgactcctctggcgacggcgagcaagggagcatcaacgacaagatcctgattatcgtatatttggcaatcgctcagttcgtccttatctacatccatctttcgttttggactctaaatggcgctcggctggcgcagcgactgcgagaatcctacctgcaaaacctccttcgacaggaaccctcgttttttgacaaccttcctccgggagaggtagcctctcgactcaatggcgacatccagacgattcgttccggcacgtccgagaaagtgggaatttgtctcgcgagtttctcgttcttcgttacggcctatatcgttgcatttattaaggacaccaaacttgcaggaatgcttgtttcgttgattccggcctatttcctgatgtcgtttgtcggaagccactatatcgagaaatactcaggtctgatgtcggaatatgccgctaccgccgcttcgatagcttcagaagcgctttcaaacttcaccgttgtccaggcctttggcgcaaacgaccgcttggaggagaaattctccaaggcgctcaagtcctcggaaaaggaagggctgaaaaggcacgcagttggcataca

SEQ ID NO: 22893 - DNA, 850 bp, Emericella nidulans
cttccgcctccgccgagcaaggaagaaaccgttggtcgtgctcggtccccagctcgtaagtcgatggcattatctccttcaaaggtcagcacaacaccgacacaggagccgagggtccttgctctggaaaactccgctcaagatgcatcgaaagctgcttcaccagacgttgaggttccaactgaaggtggtgctgacgacaatcatgaacctgaatttgaaccaatccatttgcaagacttcttgaatatgaccaacatccacttcatggaacttacgaccactaagagacgacatacgacggcaccggatagcatcagcaaaagggcagctagattgtccttggagggtgatggcaagtccagtgcttctaactttgacgactgcgtggccgccgggttctgtaccgtgccaatgttagagttgtatcagcacgtaagtggccacaataaagaatattttctttcctgacgctctgtagtcctgccgagagttgaaatcatatatctccgaaggtcgccaaatcattcgatccatcgagaccgaaacctacgccgacaacccacccctgttccgggaatatatggcagcagcgcctgacatccgtttgttaatggacaaccagttccggaacgtcaaaactcacaccagactgctgagcaaagctacatggtacgagtggcgtatgaagcttcttgagggtcttaaggagggcctagatcgtcatgtagaggagatgaaaggggacgacaatctcttgtcgaaacacgaggcaattcttgaaggatgctatgcctgcgctctccgctaagcattcgtcgctaaaggaagaagccgcccagttcagccg

SEQ ID NO: 22894 - DNA, 850 bp, Emericella nidulans
gctttgtgctgaaccacatcttcatccaggttgcgttacgaatccccatggtgtaaaaggccttgagcactgccatttcctgaaatctattgatgatgcccgccgtataaaaaaccaagtactggataacatggaactcgcatgcttaccaaccactactgacgaggagcggaaacgcctgctgtcctttgttgtctgcggtggtgggccaactggtgtcgaatttgcttctgaactctttgaccttctgaacgaggatctgctctattcgtttccgaagatattaagaaacgagatttctgtgcatattattcagagccgcagtcacattttaaacacatacgatgaagctctctcaaaattcgcagaggtaagccttggtctcaatcaatggttatttaactatgggcaggagcttacggaagtagtctcgcttcgcgcgtgatgacgttgatgttttgacaaacgctagggttaaggaagtccgtgaagataaagtcgtttttacccaactagaagacggaaagacggtaacaaaagagattcctatggggttctgtctatggtctaccggcgtgggtatgcagactgtgctggcgcttcgtataccataatctgctaaccagcataccaggacgcagtgatttctgttcaagactgtcagacaagctcgaggcccaaaacaacaagcacgccctagaaacagactcacacctccgcctcatcggagctcctctgggcgatgtatacgccataggtgattgtgccacagttcaaaacaaggtcgccgaccacatcgtctccttccttcgcaccattgcctgggaaaaaggcaaagaccacagaaagt

SEQ ID NO: 22895 - DNA, 500 bp, Emericella nidulans
gtccaacaacctatggtggggcaatcaggcgttattcataagctttacaagtatgtctagcttcaggtttcgcacggagatactgactgtgtccgggcattagctaagttgtatgttagcatgttggaagatcaaagcatccagcatttaatatcatggtccagcaccaacgacagctttgtcatgtctactacatctgaatcagccaaagaactcgtgtgcgtgtccggcttcataggatcgtcaaccactaattgaccatatagtcaatattttaaacacaccaacatttcatcctttgtgagacaactgaatatgtatggtttccataaaggtagaccgtttcctggccgcataatcgctcttaataacgtcggtgacagtaagcgatgtctttcataccggatctcctgactctgcgctctgggaattcaaacacggcaacggaaatttcaaacgcggcgaccttgttggattgcgagagatcaagcgacgagctt

SEQ ID NO: 22896 - DNA, 668 bp, Emericella nidulans
gataaatgcttgtgacaaacccgatagttttaataatttgaagcaagaatttgaagcctatgtacgtcttcgactcgcagctcatgctgtctgtccctaaactcattgtatgtatagagtggcgtaacaatatatccgaatggacatcttgtctccaggattagcgatttcatactttacagtgtagaggccggcgtcatcgataaagtggtcgcagagtatgggccctgtatgtcctgtccatagccagtcaaggctgcagctaaccgtcggaagcaacaaaggtcggcgctattgtcggtgggcaaacatcctgtaaagcccctgagctcgcagctttcgataaacatcttccgcaggatgtagaaatcatctcatgtcactcactacatggtcctcaagtgaacccgaaggccagcctttggtatgcatacgtcgttcacctttcacgaagcaagccggagtaacacagccataggttcttatacaacaccgtgcaaaagactcaagtctccggttcgttgaggaagttttgtcttgctttaactcgaagtatgtctacctcagcggcgaaatgcacgaccgcatcacagcagatacccaggccgtcacacatgcagccttcctcagcatgggaacagcatggcaggcgaacaaacaattcccgt

SEQ ID NO: 22897 - DNA, 555 bp, Emericella nidulans
agcgaaacatgtttctactgcgagcagggctttgcatcaaggtgtgatgagaacacactcctaggatgcgatgaccttgatggcgcgcaggctgaatacgtaagaatatcttcgtcgactagctctcaggggccttgaacatatgtcacttcctatactgacaatacgcaggtgcgaattcctcacgcagacggcacagtcgtcaaggccccaagcggcgtctctccccagtacctcgtcctaatgggcgacatcttcccgacgggctacttcgccgcgcagaatgccttcaagaacgcgcacacgtgcgcagatcgcggagcaaactgtagtcatcatcggctgcggtcccgtcggtctctgcgctctgatcaacgcactcgagtataaacctaagcatctcctcgccgttgactgtgtcccgtcgcggctggatctagcaaagtcgctgggtgcagagccctgggatttcaagaatgaccgcgaagcattggataggagagtttctgagctgacaaatggtcgaggcgcagatgccgtcattgaggtagtggg

SEQ ID NO: 22898 - DNA, 814 bp, Emericella nidulans
gcaccacaacttgatctcctcgcagaggtagatcgcatgatgaactccctcattaccgaggcgtcccccgacgtgcagactctcagccagccaacgccccgggcggagcgaatcctcctcaccggtgccactgggttcctcggcactgagatccttcgacagcttctgtccaacccagcgagcactcgcaccgtggtcgcaattgtccgcgcacgggaccaggaccatgcaatggagaggatcgtctcttccgccaaagcagcacagtggtggcaagaggagtaccggtcccggattacaccctgggtaggcgatctcgcggcaccgcgtcttggactcagcgagagccaatggtccacagtcgagggccgtgaccatcctggatctgagtctgggtccactgcaggtcctgcagaaccacggatagacgcaatcatccacaacggagccctagtccactggggggccgactaccaccggctgcgcgatgtcaacgtgtccagcgtcgtctcgctgctcgcagctaacacgctctcaagcacccccaaccttgaccttcgtatccggtggccacgtacaactagacgacaacgaaactaccgatgaggaaatggctgccgtgctcgcccactcaacgggctacgggcaatccaagttcgtcgccgacctcgtggttaagcgcttcgcggcgcggtactcaacgtctgccgtctcgatcgtgaaacctggactgattctgggaaccgcgcaatctggggtgtccaacacagacgatttcttctggcgcgttgtagcgactgctgtggagatcggc

SEQ ID NO: 22899 - DNA, 645 bp, Emericella nidulans
ctacacgcatattcactgggcatttgctgaagtagacgcgtcgaactggtgtgttaagatcgttgacccgtacaagcagtgggaagacttcaagagcctggaaaatattaagagtagtaaatcctttagaggctggggctattcaaccgagccagagacatacaatatacttcgtgaggccatgagtccaccaaatcgcaaaagctttgcgacaaacgtagctgctttcgttgcggaacacgagcttgacggtgtggactttgattgggaatatccaggggtaggtctacttccagttacagggaagatatgaggattattggctgagctctgtactaattgccctcgaactttaggccatagacataccagggaccccaccgggccttgaaaccgacggcccgaattactacaagtttcttatcgtcatgcgtgggcagctagccaaagaaaagtccttactcattgctgcaccggcttcatactggtatctcaaggcctttcctattgcccagatggctaagcagctcgattacattgtgttcatggcttatgatctccacggtgaggtgggctccacacggtttagtccagtggctaatataagaaaggcaaatgggatgccggtaaccagtatgcaacaga

SEQ ID NO: 22900 - DNA, 514 bp, Emericella nidulans
tcgggtgggtgtgaccgcaacgattacgatgacaacaactacctccggtaatggaatcttcacaccaactccaaccttaccggggatggtgaagaactgcgacaccttttacctcgtgaaatccggcgacgggtgcgcagctatcgcctcaagcaaagggatcagcctttcacaactctacgcctggaacccgaatcttgggtctgattgctctggattatggtctgagtactatatctgcgtttcaatcgtcggggtgaacccgacctcgacaacaaaaacgaccacgaagaccacgacgtcgacaaagggaaatggagtttccacccctacctctattcaggcggggatgacgagctcctgtaacaagttccataaggttgtgtcgggagatcagtgtgggacgattgcgtccaacgctgggattacacttgcgaatttcttgaagtggaatccgggggttggcgggttcgcatgccggtcgttgtggttggggtactatgtgtgcatcggc

SEQ ID NO: 22901 - DNA, 500 bp, Emericella nidulans
taccggagactgcggagtccccaattcttggcagtccatgaagcggagtataaaaggcgtccggcaagaagatagagtatcctgtagaccagctcttcctcactttgtggagtcaagatgcgctttcagcagctgcttccatgggctgcggccctgactggctgcgtcgtcgcccagagccaggccggcgtcgatccgctcgaccgtcccggcaatgacctctacgtaaaggacctttcgaactgcactgggtacaaggtcaccaagcattggaagacccgatccggtttctatacggacctggcgctcgccgggccagcatgcaatgtgtacggaatcgatttgcccaagctgaagctcgaagtcgagtatcagaccgatgagcgactgcacgtcaagattctggataccagcaacacagtttaccaggtgccagacagcgtcttcccgcgcccgggcttcggccagtggtgctcgcccaagaactctaagctcgaatg

SEQ ID NO: 22902 - DNA, 500 bp, Emericella nidulans
cccatcatctgtattctgtatcatcattagttctggattcatgcgctggtcttctcaaccgatagactaatagacttttgtcggatcacagttttcaagtcgaccacttatccgtgcttccctatgtcctcagcaaaacgaacttcaagggccgtgtcttcatgacgcatgctacaaaagctatatacaagtggctgattcaggataatgtgcgagtcaacaacacggcctcctcctctgaccaacggactaccctatacactgaacatgatcacctctcaacgctgccgctgattgagaccattgatttcaacacaacacatacgataaatagcattcgcatcactccttatcctgccgggcacgttcttggagctgccatgttcctaatatcaattgcgggtttaaatatcctttttaccggcgactactcccgcgaagaggaccgccaccttattccagctacggttccccggggagtgaagattgatgttcttatt

SEQ ID NO: 22903 - DNA, 499 bp, Emericella nidulans
atcttttcttcaggagcgcgacaaggatgagactacgcacaaccaagagatccagtatcgcaagcaggttgagagactggtcaaagacagtgaaattttccgcatcacctacgtgagtttacccccttcattaatacgaaccaatctaacctgtatagtacccggacaaccagaagacaactgtccagctcctgactccagaggatgccacattagaaaacgaagaattgagccaggaggcccgctggtcatactacgtttcggcatacacaatgcgcgacccaacggaaggggtgccgttctcccagatgcggatgcctttcctcaagcgaaaccttccaggtaaactggagcaggaagaagagtacaaccgcttctatcgcccacttgttcaccaggatgggcttatcatccgcatctgcgccaacagttaccacatcctctacgaacctggcagctacgattggtggtaccggccggctcttcccccagacgagac

SEQ ID NO: 22904 - DNA, 805 bp, Emericella nidulans
ctccacttccgtcatcttttgatactgacccgctgcttctcgatccaggtgccgtggttctcgcccactcattgcgcgacaatggcaccaaggccaagctggtcgctctgtatacgcccgacacgttgcaggccgcgacgctgaatgagcttcaggtgcgtacttcgcttgctaatataggtaaaataaggccacatcgcaaaacttgctaactcgaggtgtctagactgtttacgatgagctcatacccgtctatcggatgacgaaccatacgccggcgaacctctggctcatggagcgtcctgacttgatagcaaccttcacaaagatcgagctgtggcgacaaacaaagttcaagcgcatcgtatacattgactcggacgtggtggccattagagcccccgacgagctcctggacatggacgtagatttcgccgctgcccccgatgtcggctggcccgattgctttaacagcggtgttatggtactgcggcccaatatgcaagactactttgcgctgaaagctcttgcagaacgcggtaccagctttgacggcgccgaccagggcttgctgaacatgcactttcgagactggcaccgactcagtttcacgtacaactgcacacctagcgcgagttatcaatatatcccggcctacaagcatttccagagtacaattagcttgatacattttataggatcccaaaaaccttggaatatgtcgagacaagtgtctccttttgattcgccgtataatcagctactgggaaggtggtggacagtctacgaccggcattaccactct

SEQ ID NO: 22905 - DNA, 556 bp, Emericella nidulans
gcaccttcaacatgcaattcctcttgcccctcctcctcaccacaagtaccgtcctctccctgccagtcaacgaccccgctctaagccgcagacaattcaacccgagctcaaatctcgacacatccacaaacactggcacaaacaccgctattagcatccccgacggaccagtctacaatgatcacgacttttttacagacacatataccgagaacaccgaccccagttcaaattcaggagaagcgatcggctatacagaagccggctcagatatcaatatcgctatacctgatggcccgtcgctaaatctgggcgattattacgagaatacgtatcaggaaagttatcaagaggactaccacgaaccggagacaacaccagttcctacttctcaggtaattgaggaacctggagagattccgacgccgtcgctccctctgccgccgcctccaacttcggtgcccccgagtgtggacctctatacgcctgttcccttgccccctgctgaaacaggggagagtgaaaatgatactcctattccggagaccgaagacaa

SEQ ID NO: 22906 - DNA, 850 bp, Emericella nidulans
ctatagggacagacaccccgaggcactcgacattctcgtaaaatttcacgcggaaggcgatgagaacgatgagtttgtccagctggagtacgccgaaatcaaggccgcgattgcattggacaagcagattggccataccggctgggtggacttttttaggtcccgaggcaatcgcaagaggatttaccttatcactgctcttggtctcttcagtcagtggagtggcaatggactgatctcgtactacctcaaatatgtcatggacggcgtcgggatcacaaatccccagacacagcttggtatcaatgcaggaatgaagactgagggcttagttaccaactttgtctttgctttcttcattgagaagctaggaagacggccgatgtacctggtctccacgatcggcacctgtgtcgtgttcaatatctggacaattgtttccgcgcggtacgaaattgcaccaaataaggggctgggatatgcctttgtcttcttcaccttcctctacggccttttctacgatatcaagtaagttccgctacatttccctgttgatctgcgccgtcagaatgctaatctgggaacggataggtcgggtctcatggcaacgtacactactgagattctcccgtatggtctccgtgcaaagggctttacgtggctgaacttttgcgtcactggagcactttttttcaaccagtatataaatgccattgcgctggaggcgttggcctggaagtattatatcgtgtactgcgtgttcctgggatttgaagtctttgtgatctactccttccttattgagactcgctacacaccgatggaggaaatcgctaagtattttgacgga

SEQ ID NO: 22907 - DNA, 850 bp, Emericella nidulans
ttgagtcgatcgaaaaagaggccgaatataacctgcggagattgcgccaccacccttccatcgttatctgggttggaaacaacgaggactatcaggtacaggagcagcaagggctcacttacaattatgcagacaaggatccggagagttggctcaagacggatttcccggcccgctatatctacgagcatcttctaccaaaggccgtccaaaaaataattccatcggcatattaccatcctggcagcccgtggggcgatggcaaaatcacttctgacccgaccgtaggggatatgcatcagtggaatggtaggtaccgacctgtaccaattcgatgctgccaactaacagaatctaccagtatggcacggtacacaggagaaataccaaatcttcgatactcttggcggccgctttaacagcgagttcggaatggaagcgttccctcacatgtccaccatcgaccacttcgtcacaaatgaagccgacaaatacccccagtcacacgtcctggatttccacaataaggcagacggtcacgagcggaggattgccacgtacctcgttgagaatctacgaacggcaacagacttagaagtcagtatttatgcccgctattggcgactcagaatgctaaccgaagaagacctatatttaccttacacaagtcgtccaagcagaaacgatgatgtttggttaccgcggatggcgccgccagtggggagatgagagacattgtggaggtgcactgctctggcaattgaacgactgctggccaaccatctcctgggccattgtagactactttctgcgccccaaacctgcgttctatgccgtcagccgtgttttg

SEQ ID NO: 22908 - DNA, 810 bp, Emericella nidulans
gaaatgtccccgccagcgcacttcaagctcaaccccggcgctctcattcccgccgtcgggctcggtgaatgatccgttctatatgcttactagtgactcatgcatacacaggaacctggaaatccgagccaggagaggtggcaagggctctcgcccatgctctcaagactgggtaccgtcacatcgatgctgccctgtgagccctggccctaggccttccattgtgctgtaaccttctaacaccgtggaggatttatggtgagcacgcgcataagaccacccaataaacaagccgccaagcacctggggctaatcccgctcaatctcaggaaacgaaaataaggttgtcagggaatacgggatagcggcgtgccgcgagaagagatcttcatcaccagcaagctctggaacacccaccaacccaacatcaaagagggattgcagaagacccttgatgctctaggcgtcgactgccttgatctctacgtaagccccttttgtttacatcggttacagaaggcgacgctgatgcatcacctagctcatccattggcccgtgcgccttgtcccggtaaggtgccctacaatggaagataaaacagtaatgcatatcgatccactctgacctatactctcagaatgaaaccagcgacctcctcccagtaaacccagatgggacgcgcgccgtcgaccgatcctgggaccagagcgagacctggcggcagatggaagatttctacaagtccggcaaagccaaggctatcggtgtcgccaactggtcaattccctatctcgaagagcttcttgccg

SEQ ID NO: 22909 - DNA, 667 bp, Emericella nidulans
gcttgaccgtagccagttgacatcaaactagccctcttcatgggctcccgatacttgtcaaagacctcataggaacatttgaccaaatggacacaactggtatgtgctcgactcgactcacaatgacggaggtgatggagtctcccactgacacatcgctgtcccagccggctcctatgcccttgttggggcaaaggtccgagccgacgccacggttatcgtaaatctcagaaaaagtggtgcgatagtactcggcaagacaagtctgtcggagtgggcaaatactcgctctactaactcctcgaatgggtggaatgctataggcggccagacctatgctgcttattatgaggagcaggatccaagcgggagctcgagtggcagcgcagtagctgctgatttgggtctcgcgtttgcaacactgggaaccgaggtgagtgatatgctctttctgttactagtttctgctaattcacctcaagacgtctggtagtataatacttccagccgagaagagtaatattgttggtataaagccgacagtcggtctgacgtcgcgatacatggtggtgcctgtcagcgagcacttggatacaattggaccgatggctaggactgtccgtgatgcggccctcgtcctacaagccattgcaggacaagatgcgaa

SEQ ID NO: 22910 - DNA, 850 bp, Emericella nidulans
tctaccctctaacacaagcggatgagccagcgtggctcgtggaagtcgacaaagatcaggtccccaaactcctgaagcatctgaaaaagcataagctgcgcgcgaagttgaagctccgcgcactagatgacggcgagcgaacggtctgggcgagctggaagaatcactctgagccgcgctgggcggcatataatctggagtcgactagctcttcaccgttccctgcgcatgcatcgattgtcggatgtgtcgatacgagggcacccggcttcggttcccgtcttgttgttcccggtgatggagatttacggacatattttcagggcgaggacgagacgcatattgcggccacgggagaggaagttgacttggatacttataccgttcgtcgtatgcttcacggtgtcgccgaacgcagtccgaaattatctccgagtcagcgctgcctttagaatgcaatatggatatgatgcggggtgttgacttccggaagggatgctatgttggccaggaactcaccatccggacacatcaccgcggtgtcgtacggaagcgcatcctccctgtccagctgtataatgatggtttgggcgctatctcatcttcttccgatagccccgtgtacgatcccaccgtagacatccggctccccccggccggctcaaatatttccaaggtcagcgcgcgcaaggggcgcagcgcaggcaaatttctaggtggtatcgggaacatcggactggcgctatgtcggctagagatgatgactgatattgcacttactgcagaggcaagtcagtacagtgctgagcaggagtttaaggtttcctgggaggctgatgctgaggtatcc

SEQ ID NO: 22911 - DNA, 500 bp, Emericella nidulans
  unsure (1)..(500): unsure at all n locations
cgccccgtgctatacgcattcctcggccacggcagtcgatttatactgagccgacaaacgcgtggctgtatttcgacggtcctatgagcgcgttgctngaacaaacctgcattgtccttgacattcccgggggcgggtttgtttctatgacacctcggcactctgaagatcgactactggcgtgggccggaaagaccaagctcccgatattgagtcttaactataaaaaggcgccagagtacccgtacccgtacgcattgaacgaatgctatgatgtctatcactcaatttttaccactcgtggtcgttgcttagggttggccggggatgtgccgcctcgcataatcctcacgggtgacagcgccggcgccaatcttgccgtaggcacagctctgatggttcttcaatctagtgatcgtagaccatctcttgcgcaaggccaaagctcgcttccagcgccagatggtttagtcctctcgtacccagcgctgaacatgaag

SEQ ID NO: 22912 - DNA, 850 bp, Emericella nidulans
cctcagccgccatcacgccaatatccgccgtgaaagtttgttcgatgacgcgttcgaccaattctatgagctcggagagggtctgaaggagccaattcagatcactttcatcgacaagttcaacgctccagaagcaggcattgacggcggcggtgttacgaaggaattcctgaccagtgtaactaacgaagcgtttaaatccacagttggtctacgcttgttcgaggagaacgatcaacacttgctgtatcccagcccggtcgctgtcgaacaacggaaggagaatctgcggcagcttggattgaaggagaacactccggagtggaatgatcaggttcgtgacttactcaggcgctatgagttcttagggcgtgtaattggaaagtgtctctacgaaggcattctggtggatgttagtttcgcgccgttcttcctgctaaagtgggcattgacgggcggaacgggttccgctcaacgcgagacggcatatcgagccaacctcaacgacttgaaggacctggactcaggtctctatcaaggtttggtgcgtaatgatattcttgcaatacgatctgtgctaacttcccgttcagttacaattgaagaattatcccggggacgttgaagacttctctttgaatttcaccgttacggacactataccgttgcccgacggaggcagtcgcacaatcactcgggacctgaagagcaacggctccgatacagctgtcacaaaccagaaccgtctggtgtatatctcgtatatcgctcgctaccggcttcaagaccagcctgctttgcaaacaaatgcatcaaagcaaggcttggggcagatcatccaaccatctgg

SEQ ID NO: 22913 - DNA, 523 bp, Emericella nidulans
taccacaccagggatatactactaactaacaagacccttgtaacccacgacccggtcgagttcacccacatggcttacctcccctttccgaagaactggccagaattcacgcccaaagacaagcttggggactggttcgaagcctatgcgagtatcatggagctaaacgtatggacgaaaaccagtgtcacgggagcaacgtatgacgaagcaaagaaggaatgggctgtcacgataactcgtggtgatggctcagaacgagtcctgcgtcctcgccacctcgtctggtgcacagggcattcgggcgaacccttggtccctactttcccggatcaggagaaattcaagggaacaatataccatgccaccaaacaccaggatgcgtctcagcatgatgtcaaagggaaaaaggtcacagtcgtgggcactggcaatagcgggcacgacatcgcgcagaatttctacgagaacggcgccgatgtcaccatgcttcaacgcaggggcacatatgttatcacacagg

SEQ ID NO: 22914 - DNA, 850 bp, Emericella nidulans
tgcttggttcaaaaagaaaggagatactagcatcaatcgtgacttggtcgaatcgatcaaaacggccatcaggttaggatatcatcacttggatagtgccgaggtttacggcactgagcgggaattgggcgttgcgattaaagagtgtggtgtcccgcgagagcaattattcgtgacaaccaaggtgaaccagaacattgcgaatgttcccaaggctctagaagacagcctagagaagctccagttaagctatgttgatctgtacgtgttactcctctcatcgctgttccataaattgaccatgaaccgtcgttgtttccagatacttgatccaccagcctttcttcgccgaatctccaactgagcttcaggatgcatgggcggctatggagaaagtgaaggaagcaggcaaagcccgagcgattggagtgtcaactttctagagagcccttagaaacgattttggattcagcgaggattctggcagcaatcaatcagatcgaatctctcctttatgcgcagcatggctctctcgtcccagtaccacgagaggaagggtatcgcggtagccagttatgggccactcacgccggttactcgagccaaagggggtccgttggatccgttgctgtcggaactggctggcaagtatggcgttggcgaaggagagattcttctgagatggtccctttaccgtggcgccgtagccatcactaccagtggaaaggaatctcgcctaagcacatacctaaatgttttcaaattccaattaacacatgaagaagtgctcaaaatctcccggattggcgatcaaaagcattataggggcttttggtctgacaaattcgcg

SEQ ID NO: 22915 - DNA, 850 bp, Emericella nidulans
cgagcttcggaaaatctaccgtcgacaaaaactggcagttgaaagccacctatgttgaggtatgtgtatctcaatttttagccggcgagtctaaccctggcagatttacaatgaacaattgagggatttgctcctccccgactccgtgtccgccgcagaccgcagtaccgttactatccgcgaagataccaaaggccgcataattctgaccggtctgcatcaagtcaacattaactcgttcgaggaccttattggcgcgcttaacttcgggtcatctattcggcaaactgattccactgccatcaatgccaaatcgtcgcgatctcacgctgtattcagcttaaaccttgttcaacgaaagtccgccaatggtgtaacaacaccgagagagaagcgcatgtcgatgcccaccgacctctccggaggcgaccagtccatcaccgtcgacagcaagcttcactttgtcgatttggcgggaagtgaacggttgaaaaataccggcgcctctggtgagcgcgcccgcgaaggtatttcgattaatgctggtctcgccgcgcttggaaaggtcatctcgcagttgtcctcccgtcaggccggatctcacgtttcctaccgtgactccaagcttacccggctacttcaggactcactgggtggaaacgcttatacgtacatgattgcctgcgtcaccccagcagagttccacctcagtgaaactctgaacacagttcagtatgcgcagagagcgagagcaattcaaagtaagcctcgtatccagcaggttgccgacgaaagcgacaagcatgctgtgattgaaaggcttaaagccgaggtcgctttcctgcggcaa

SEQ ID NO: 22916 - DNA, 578 bp, Emericella nidulans
tagtcccttgttccaggtaccgtgcaaaccttggacgaaggtcacaagtgacgaccaccttatctctggcttgatatctttatacttcacatgggatcatccccttatgcaggttgttgaccaggagttgttcctgcgtgatatgagtgcgggtgacacgagttcagagttctgcagccctgttctggtgaatagtattctagcggtggctagcgtaagtttcctcaagagcttcaatccaaggttgagccttctaacttaccacaagacatattcgccctaccctgaagtatacgccgtgcctggcgatgtggcttctcgaggccagcacttctttgaggaagcggagatgcgctggaaagctgaggaaggtcggccttcactggcaagcattcaagccctggcaataatgagccataagtgagttgtctgcgaaggtcttgcaatgctataaatgagtgtgtgtgcgcgcaaaaggctgatggctaacaaattgtagtctgaaactccaagggaaagacgatgctagctggctttatatcagacaagccgtgcagcttgggcaggatattggctta

SEQ ID NO: 22917 - DNA, 850 bp, Emericella nidulans
tcactgcttgctcggtgacttcactcttgccctcaagactcttgacgacatcgagatgaacaagaaggccatgttcgcccgtgtcatggccgcccacttcaccacctactactatgtcggtttctcctacatgatgacccgccgctacggcgacgccatccgcatgttcagccacattctcgtctatgtctcccggaccaagaacttccagaagggcggaaatagctacgatgctatcgccaaaaagaatgaccagatgtacgctctgattgctatctgtgtcgccctccaccccactcgcctcgacgacaccatccactccgctctccgcgagaagtacggcgagcaacttcaccgcctccagcagggcggccccgaagccctccctctcttcgaggaactattccgctccgcttgccccaagttcattagccccacccctcctgacttcgacaaccccgcccttaatgtcgaccctgtcgaccaccacaccgccatctttatggacgaggtcaagaacaccctctacaatcctacaattcggtcatacctcaagctctacacaacaatggacctgcagaagctcgctggcttcctcgacgtcgagcccgagaagctccgctcctggctcctcgtcaataagcagcgtagccgccaggtccgctgggttgagggaggactactagaaggtgaaaccgtcagcgccaacgaccttgactatgctctcgagaaggatcttatccatgtcagcgagaccaaggctggccgtcgccttgtcgactggtatctcaggaaccttgcccgcgtttactaaactagccagcccacctggattgtggaagtgtgtcct

SEQ ID NO: 22918 - DNA, 500 bp, Emericella nidulans
aatcagagagttgttatcatactatcagcaactagtagatgaagagcacaacaacagttagaaagaatgtacccctacactacaaaggcgggcacaggatgattgtgcaactgaccggctccctcaggtaaaggtatatcctacatgagtcgaagtgaccgaaaccttatggagcgtatgttttctgaagggcttattaaggttctctgctgtacagccacgcttgcctggggtgttaacctgccagccgcgacggtggtcatcaagggaactcaattatacaacccacaagagggtaaattcgtcgatcttggcattattgatgtcttgcagatcttctgtcgtgctggtcgtcctcaattccaggatacaggtatcggcttcatttgtacaacacatgacaaattgaaccactacctgtctgcggtaacttcgcagcagccaattgaatcccgcctttcaggtcgattggtccataatttgaacgccaagctcctatt

SEQ ID NO: 22919 - DNA, 500 bp, Emericella nidulans
ccacatgcgaatcccaactgttgtatgttttttttgctaatcgtcaacctgcacctttgcaatgtgccttttttcattactttcttgatcaaaagcagttacgagcgtgtttgctaatccatgcccttcagcgcctccgtcaaataacagacccatcttcgtcgccctccgccacaaaggatgaaaacccctaccatcaccttcgcatcaccgtcaccagcggcggttgtcacggcttccagtacctgatgtcactcgagccggcatccaaaatcgatcctgaagaggacacgatatttgaagcagagccgccggagcagggttcggatgtggcgggcaatggcactgcgaagatcgtcatggatgagccctcgttggaacttttgtctgggagtacagttgactatacgactgagctgatcgggagccagttcaagatagtggataacccacgcgcgacgagcagttgtgggtgtgggaccagctttgatgttgttgat

SEQ ID NO: 22920 - DNA, 692 bp, Emericella nidulans
ttcgcaatgccccgttgcgccctcgtcaccggctgcagtgccggaggcatcggctcggccctggtagaagaactccacgcgcgaggactgaaagtctacgcaacagcccgctccccagccaagatgagccaccttgccgaacttgccaatgtcactctcgttactctcgacgtcgtcgacccggccagcattgccgctgcagtcgataccgtccgccaggatttgtcttcgaatggtgacttcctcgacattctcatcaacaacgccggccaatccctcgtgtatcccgccctagacacgtcgatcgacgaggccaagcgtctctttgatgtgaatttgtggggtgccatcgccgtcgcccaggcttttatgccgttgcttcaggctgccaagaatggcagtacgctcgtgaacgtctgctccatctcgggcttcttgtacgccccgtggatgagtgaggatcctataccccgtcggtcgcgattcagcgatgacgtccgcgctgacaatttgcatcaggtgtctacaatgcctcaaaggcggctctgatgtcttggagcgagactctccggttggaactgcagcccttcaacatccgggttatctccctggttaccggctccgtcgccacaaatgtcatgtcgcattctgacctgaccctgcccgaaaactcactctaccagaaagcgctg

SEQ ID NO: 22921 - DNA, 523 bp, Emericella nidulans
cccccctccatcttcgacgacggagccatgcgaaactgactctgagacgccagagccaactagtaccccgtgcgatactgaaacagagacccctcctacttcggagccctgtgagactgagactgagactccacccccatcaagcaccacgccatgcgagaccgaaagcgacacccctcctccatctacttcagaaccttgcgagaccgaaacggagaccccgcccccctcaaccactgagactgacgagcctgagccaacaaagacagagtcatcgactgaaccacccactggcccaggacacaccgaacccccagccccagagccaaccgattctagttcgacaaccctagtccccacaacctcgcaaacaggcgtctccccagcacccacaggcggaagctcggatgaaaacgaaactagtcccgaacctgagaccccatccgatactgacactagccccgagggccccgagtctagtggcggtgtctcggaggagactgagcctgtaacccagcctgag

SEQ ID NO: 22922 - DNA, 766 bp, Emericella nidulans
ttgagggtcacgatgtttttctccaggcttcaacttccttcgggaagagcttatgctatcagttacctgccatgaccacccacggaggttggtgttatctcctgctaatggtccatgctcaaccaacgctaagtcccgttccatagtgactgtcgttgtatgccctcttctgtctctgatggtgagtttgaccaggatggctccactggttccttcttgccgtacgatctctgacatatcgggctgatactctactagacggaccaggtaaacgcacttcaagcgctgggcgtgccggtagctaccatcaactcaacagtctcacttgcagaaaggcgagttatacttgaggatcttctctctggtcacccgaggattcgactcctctatgttaccccagagctttgccaaaataatacattccggcgaaatctacaaactatgcacaagcaacgagagcttgtgcgcatcgccatcgatgaggcccattgtatcagtgaatggggccatgattttcgtccggcatacaaggcactctcttggttcaggcattccctaacaaacccacccgtgccaatcagcgccttgacagcgactgccacctcacaggtccgtacagatatcatcaacatcctgggcctgaacccacgtcggctcaaaatcttcagcacaccgtcagcacgaccaaacattcattacgaaatccggttcatgcaagagctcgccccggacccctcagaacccgaggcattccaggtccacgacc

SEQ ID NO: 22923 - DNA, 500 bp, Emericella nidulans
gccgtactcgtgagactacggagggcatcctcgagtctctcacggctgataccccctctccgtcgccctttccaaggcacacaattaaggtttatgaggagccgcggctgcgggaacaagatttcggcaatttccaaccatgctcagcggagatggagcggatgtggctcgaaagagcggactatgggcatttcttttatcgaatcccgaatggcgaatctgcggcggacgcttacgaccgggtgagtgggttcaacgagtcgatgtggcgactgttcggtgagaaggactttgcgagtgtttgcgtgcttgttacacatggactcatgactagggtctttctgatgaaatggtatcattggagtgtggagtattttgaggatctccgcaacatcaaccattgcgagtttgtgatcatgaaactcaatgaggacagcgggaagtatgtgctccagaatcaactccggacatggtccgagttgaggatggagaaagagcgg

SEQ ID NO: 22924 - DNA, 850 bp, Emericella nidulans
cttttaccacatccgatcaccatggccggagtcgttgatgcaatcggggttatctccggtctcttgacaatcgtgtcgttcagcatggacaattttggccaggatcaagatcctggttcgaccatcaaggttgccgttggtcttgacggtcccggcggcactgagaatgctggtggtgacctgcccgatgtgtaagtgcatggatcacacaacgcttgcaatttcctgctaagcataaacagccgcatctggaacgattttggagagtacaaggccatgactgccgaccctggctctgttagcaacgggaacattggcaccatcacggtcgaccacgaccagcagggtgtctactccctcttctcggccaacaacgacgccatctgcattgcctgggtgaccacaacctgggccgagactgcaggcggcaacaagtatgcggtatctggagactacggcgaagcctgtggcggaacctggtacgagagcaacctgtggaccaatggagagaactcctaccagcccaagtgcttctggattgacggcaacggcgaccagcccaacaccgggtttcaagtacgctggccccggtactcgtctgaccagttcgacgagggcaacaccgacccggccaacatctgtaacgatatcgactttggcctccgcaccgaggaggaccccagcagcatcaactactgggtcaagggtaagaagcgtgatctgaacagccgccgcatgcgtgctcgccgcgatgtccgcgctccttggaccgagaccgagctcgtcgttagtgaatccaagttccactctgccgtcaagctctgcgaatccgagacctccatggggcccg

SEQ ID NO: 22925 - DNA, 584 bp, Emericella nidulans
ttgaaactcgatgggggccggttcggcctcgtgttcccatacaagaagcatgatcttgaaactctcttccggcgggacgtgttgaccgccgcgcagacaaaatctgtcctacgcgacatgttcagcgcaatagcgtctatccacagtctaggaatcatacatcgtgatatcaagccgtcaaatattttactcgactctccaatcggccagcgtatctcgcggatttcggaatagcctggagagaagggagtattgaagctgaaccggccgataagaagatcactgacgtcgggaccacatgctatcggccaccggaagtcttatttggccataagggttacaacacggctctcgatctttgggcggcagggtgtgtcgacgcagaggctattactgttggacacaaacagcttttcgatgccgggcctgtcggaagtgacctctcacttatccagtctattttcactactctgggcactgcagatgagcaaacctggccggtaagtcagtttcaataatagcaggagcgtgctaacgggttctaggagtctaagaagctttcggactggggtaaaatcgaattc

SEQ ID NO: 22926 - DNA, 850 bp, Emericella nidulans
gaaatactggagaccaaatttcaataacgtcgagacgatagacgacgcacatcatgacgccgtgcgcgatctagcgtggtcacctagcgatacaaaattcctttcggcttccgatgacacgactctcaagatttacgatttcacagcaaggacatgcgataccgtcctgaccggccataactgggatgtcaaatcgtgcgactggcatccgacaaagggtctcctggtttcgggatcgaaggaccaccaggtcaaattctgggacccccgtaccgcccgttgcttgacaacactccatagccacaagaacaccgtgaccgctaccaaattctcgcgggtaaacaacaaccttctcgcaacgtcatcgcgtgaccagacggcgcgggtgtttgatctccgaatgatgcgggacatttgcattctccgcggccatgaaaaacctatatctacgcttacatggcatccagtccattgctctttgatttcgaccggtagcgaagatggatccttataccattacctgctggatgaacctaatctgccagcgggccagatacctactgtcgctccatatgacagccctgacccagcaaacacgcccgctcaagtcatctacccagcccaccggatacagtatgcgcacgccgcaactatctggactttggactggcaccctcttggtcatattcttgcttctgggtcgaaagacaactttacccgtttctggtctcgggcacgtcctggagagacgagctacctgaaagataggtttcacattggggaggaggccgcgcaagcccagggaacatggagtcgcaacttcggaagaagacaaatgcccgaagagtga

SEQ ID NO: 22927 - DNA, 850 bp, Emericella nidulans
cttccgtccgtacgtaaatcggaaggcgttgaaggctgcatttgatagagctcaggatagtggtattactgtccgtgccctcttgatttcaaagttagtacttactgttcatcttgcgctcgccgtcaacctcagcgaagcaactgacaattcgcaatatccagccctcataacccgctgggaagatgctatgtccgttctgtgaccttggtcccattaccgcagtgcagtccagacaaagctgatcaatttttatagccgccggaaaccattgaggaattcatattgttttgcgccgcgcaccgcctccatttgatatccgacgagatctacgcacattcggtcttcaaaaacccagctttaccaaatgcaacaccgttcgtttcaattctatcactcaatcttgtcaattcccataccatagatcctgccatgattcatgtgctctacggtgcaagcaaggacttttgcgctaacggcttgcgcctcggcattgtttgcacacgcaaccagggtatcatccgtgcgatgtctagtattaggtgtgaatatacctccaattggacagaacaaaatctcactaacattatggcgctcgcctcgctctagtatgttctcttggtcgccgcatctcctccatgacgtctgggccaggatgctggaggacgagcaatggttgaagagcttcatggcgagaaagcgcgagctcatggctgatcactacgaaattgccgcacgcttcttccgcgaatgcgggatacctttttatgagatgtaggtgagcccggcctaaaaagtttcgtcagtcccagtttcagcttaccaaccactaatctaccgagggagccgg

SEQ ID NO: 22928 - DNA, 500 bp, Emericella nidulans
cagctccagcccaggaacaagatcagcatcaccatcacccagcacagtccgaaaacctccaaatactcacacctcaggcttccttctcccaaaatggcacaaactcataattctcttcgtcgtctcctggatgacgctcgccgtcacattctccagcacctacctgctaccggcaacgcccgaaatcgcgctcgaattcaacacaacgactgaaatactcaacataacaaatgcaggtgtgctcctcgcaatggggctctcgacgcttttctggggcccactcaccatcttaatcggtcgccggctaagctacaatattgcagtggctgtcctggtcctctgtagtgggctcacggcagggagtcggagtatgggcatgttcacggcttgcaggattactggcgggttcacggggaccagctttatggtttcggggcagacagtgctggcggatatcttcgagcccgtatgttgatcgcttttctttctctattgtcttg

SEQ ID NO: 22929 - DNA, 537 bp, Emericella nidulans
acttcaaccccgctgtgcccaccccagcggtatcatgggcgaggacccgcagggtgtgccgtacaacctcgtgccgctgttgcgcaggttccacgggcaagcgcgagaagcttcttgttttcggagacggtaggtttcttcgcgaatgaataaactgagctatgaatcaactaatcacacgcagactacgcctctcacgacggtaccgccattcgcgactacatccacattcttgatctcgccgatggtcacctcaaggcgctgaactacctccgcgccaataaccccggcgtgcgcgcctggaaccttggcactggccgaggcagcactgtctacgagatgatccgcgccttctcaaaggctgttggccgcgacttgccctacgaggtcgcgccccgccgtgccggtgacgtccttaacctaacttctaacccgacccgcgccaacaccgagctgggctggaaggcacagcgcaccctcgagcaggcatgtgaggatctgtggctgtggaccaagaacaacccccagggatacagg

SEQ ID NO: 22930 - DNA, 600 bp, Emericella nidulans
aatgaacgggctcgagttggttgtcctcatatttacaacactgggggtgttgctggctcctctggtgccgagtagtctatgtctattgtggcctcttgattttttggcggttcttcatgggcgtgggactcgggggtgactattccttgtctgctgtgatatgctccgagtatgtacactgcaatgtacttataatacctactaacatcacaggttcgcgcccacccgaattcgaggctggatgccggcggccgtcttctgctgccagtccctcggctccctagcggccaacatggtcgccctcatagccgttgccggcttccatcatcggcttctggaggacgactctggtgctggctgcacggggcgctgtgtgcaagatgtcgaccgcatctggcgcctgatcgttggtctcggtgcggtgccagaattcatcgccttgtggttccgactgacaaccattgggtctccacgatacacggccgaagtcactcaaaacagcttgcaagcggctgcagacgtctcctacttcttccggccagatgaggccatccctgcgccggagatgggccagatcaccgccacaatagttatctcacc

SEQ ID NO: 22931 - DNA, 730 bp, Emericella nidulans
caaaagaaaacgacatcgatgcctattttgtctctttcacttctttgtccgaccgaatcgacccgaagaactggccaaggggcaagaaatgggccgtgaccgatgtcctctccgcgacgggcttcaatcggatcatggtctccacgatcatggcgccggcgctgtctttaatctcccaggaacttaataaatcctccactgaatcagcaatggcgctatcaatctacctcctagcaaccgcaatcgggcacctgatgatcggagcattgtccgaagtctacggccgaaaaccgatgcttcacgccagcaatatctggttcctcgtgtagaacctagtatgcgggttcgcgaatagtaagaagttgctcattgcggcggggttcggggcgagtacgatcttgcgcttgccagcggggtgttacgggatatctggcatgatcaagaacggggccggagtttaggagcgtacctgctaattcgtttattgggggctgctgttggtaccgttcaccatttatcactcactatctggccttgtgagttgctgacgcaggtgcaggacctagcatcggtggcttcatggccggccgcacaacctggcgatggatgttttggtcgacgtcagttttccaggctatcatgatcctcgtctcgttcgtgtcttcgacgcgacccacgcaccgactatcctgacgaagcagtcagagatgctgcgccgtgacacggggaa

SEQ ID NO: 22932 - DNA, 678 bp, Emericella nidulans
ctccggactagtcattcactcgaatctcagcgaaggggtaaagctccggtcgaagttttctggccacgacgaagaaacgaatcttcgttttgatgtggtgcttccctcttgaatgcgcaatgcgttgtgctttcacacatattcgacgccgcacctaaggtcatggagatcgaaaagtaccagctcaagctcttcgccatgctcttttcttccttcgaggaatttttatttctggacgccgacgcatttccgctcctcaagccggaatccctgttcacaaacgagccattcaagtcaaggggtatggtgacatggcctgatttctgggcctccactgtctcgtcatattactacgaaatcgcatcccagccagccccaaaaccaggaactagtccccgtcaatccaccgagtctggtgagatcctcatctccaagaaaacccataccaaaaccctcctcctcagcgcctactacaacctctggggccccaaatactactacccgcttctttcccaaggcgcagctggcgaaggtgacaaagaaacctttgtcgcagccgctatagccgttggcgagccctactatcatgtcactgagggcattgtagcaatgggccacagtagcgcagggggtcttgcaggctccgcgatggttcagttcgatccagctgaagactac

SEQ ID NO: 22933 - DNA, 698 bp, Emericella nidulans
attcctccccgtacgagtcctcctctgacagctcctcggactcttccgacgagagcgacgaggatgaggattatccgatcctgagtcccgaggaacaagcgcggattctgatgcaggctgagctaggctctgatgacgaaggggagggtaagggtaaatccggtgctcctttaaagacagcgaacgagatccctgaggaagttctgcctattccggacatttcaattaccccggaaatgaagatcgtgctcctagggcacgtggaggcggcgattgacaacactgtactaatcgcggcgaacaccaccggagaataccaagtcctcgaggctggctcacttctctgcttggaagatcgccgcgtcgccggtgtggtctctgagaccttagggcgtgtcgagaacccgctgtatgctgtcagatttgccacaaccgccgatgttgagaagcatggtctctctagaggcactgtcgtatactatgtcgtggatcactcaacgtttgtcttcacacaacctttgaaaggcttgaagggaagtgatgcgtccaacttccacgatgaggaagtcggcgaagatgaagtggagttctccgacgacgaacaagaagctgaatataggcggaagttgaagcagaagcgccaggagagaaagggagcgaagaaccaggacggcgggccttcgaagcctgcaaagggg

SEQ ID NO: 22934 - DNA, 627 bp, Emericella nidulans
tcacattaacgcccgacctgcctgagaagacccccgatgaatcttcaaagctgaagacatttctgtccatccttcggaagtatgtgttcttgagcctgctggcaaaactcttaatgatcctgcctttgcgctaaccgagccgcattatctattcagattcgtcggcgtgagcgatattgcatccgtgagattttcgctacctgcacagcttctggagccaactcctaacctgggtaggttacttgatccttgatattggtagatgatggtgggtgttgcagagtgttgaccgggctttggttcattagaatactggaattacttggatagaccggagaccttcgtaaggtcagcaatatcgccttgtcatcaacctcccagattcagtttctgactggaaatctacagcatcggtacatcagaagaaccattgggacggatgctggaggttttgcgattctggtttaccaaagacctggtttgctgttcttcctcgtttttagggaatgtgctctttcctgctaactgccaacagaaatacattaaaggtaaaccctgcaaaccgtataattcgacccttggagaattttttagggtaagctcacggcattgcccttcaatacccca

SEQ ID NO: 22935 - DNA, 500 bp, Emericella nidulans
tccttgcagtcataagctcccgctgcctctgtccagattctcactcctgcaaatctcattatatcttcattttctccgcttctactcgatttatatcgcgcaagctgggatattgagtgtggcgaccacttgagcagattcactttcggcaaaaatgtggaagccgtcggagcgcctgatggacaccatcaggcattacgccagctttccagcaactggtgtttcgctccgacagatggttcagtttggagacagaccttcaactggtgagcacacttgattcctgagaataattttatcagtttccttgtactgctcacagtggctaaccttacgctttccccgatataggaactctgtttcgcgcctcccaatttctgtcagaagaactcccaatccgcctagcgcaccgtgtccaggatcttggagagcttcccgatggactcagtgaaatgccctccatcaagaaggtccaggattggtatgcacagtcgttcgag

SEQ ID NO: 22936 - DNA, 796 bp, Emericella nidulans
aacaccatgcagcccctccacactcttcttgccttgcttcctctttgccggtcaacaaccgctcttctcgctttccccggcgcagaagggtttggtgccaacgccgtcggcggccgcggcggcgatgtctatgttgttacgaacctggaggactctggcgagggatcgcttcgcgatgccgtttcggaaaccgatcgcattgtcgtctttgcagttggcggcgtgatcaacattgaagaccggcttgttgtctccaagcgcgttacgatccttggccaaacggcgcctggagacgggatcacagtttatggcaacggatggtcattttccaatgcggatgacgcgatagtaagatacattcgagtgtacgtctctcttacaagccccttccaagcagaatgatcaagttgctgactgataccggcgacagtcgaatgggccgcggcggcgacagcggcaaagatggcatcaccatagccgaaggctccaacatgatttttgaccatgtctccgtctcatggggccgcgatgagacattctcgatcagcgggacggccgagaatatcactgtgcaggacagcattatcgcacagggcctggagacgcactcatgcggtggactcatgcaaacagatggtggtgtctcactattccgcaacctgtacatcgacaataagacacgaaaccccaaggtcaagggtgtcaacgagtttacaaacaatgttgtttataactggggtggtggcggtggatatattgccggggactcgagtggacaatcttgtaagtctcctct

SEQ ID NO: 22937 - DNA, 850 bp, Emericella nidulans
tggggaaggccagcttgacgtcaaacgcctccgagaaagttgtgcccgggttgtggatgcgttcgatatcctgcgaaccgtctttgtatgctctggggaccacttctatcaggtcattctcaagaaggtccggccatccatcgtcatatatgagacccataccgatctagacacgttcactaccagccttcagcaacgggatcgcgatcagggtcttcgccaaggcgagcagttcgttcaattcattctagcgaaacgcaaagggacgacccagcaccgcctccttattcgactctcccatgcccagtacgatggaatgtgcatctccaagatcctcgatgccatcaagcaaggatatgaaggcggcactctacctcctacgatgtcttacgctaattatatgcgcctgcttccaagttcaatcaccccggaacactatggatattggacaaagctcctgcagggctctagaatgacggacgttgtctgtagagaccatccaaacacatatcagacgatgggcacttatgcagaagttcggacgacgatcaatatctctcagaactccaccatccgcaacattaccgttggcaccctagttcaggccgcttgggctctggcgctggccaagctttctgctgatgctgacgttgtcttcggcttgactgttaatggacgcaatgcatccattcctggggttcaagatactgtcgggccctgtttgaatatgatccccgtgcgagttgtctttggcaataaatggactggtcttgatctcatccgctacctccaggataaacaagttgcgtccatgccgtacgagtctcttggcttccgtcagatgagccat

SEQ ID NO: 22938 - DNA, 500 bp, Emericella nidulans
cagcctcgaatcttcgcaatgtctcgaccttctaggcctgccgagggcttcagccctagaaacctaccgatttgctgtcgagcaagctacagcgcgcgccgatcttctaaatacccaaaacctgatcctgctgcaagcaaccgttttgttcctgacggcgctccgaaatgaggacgattcccgcacggtgtggtctcttacttcgcttgtataccatatcgcgcaggccatgggcctccatcgcgatggccaggagttcggcctgagacctctagaaactgaactgcggagacgcctctggtggcatatatgcttgcttgataaccgctcaacagattaccacggtactgagccgattgtacaggaagccgccttcgatactcggatgccactgaatatcaacgatactgatcttacagcagaaatgactcagccaccagtcgaacgcgaaggcgttacagagatgacattctgccttatgcgctgccacgccattcgtg

SEQ ID NO: 22939 - DNA, 500 bp, Emericella nidulans
aacacgtcagacacgcctaagcagaggacgcctaacatcattgtccacatacctctcaaggggcaacctaaccagatagtgaactttgcccgcctagcagaggagcagtatggatttgctgcacttcatccgcggctagccgctcacaaagaacgaatggctcgcgtagcggcggcaggcgctgctttagagcgcaatgaccgttccggccgaggtatttccgctggggaaagcgcggacgaagaccttagcctcgacgctgaacgcgatagtgaagttgatggcgacggcgcaatgagtgctgcagctgcgaaaaccagtgaacctgcggacggaacgaagaagcgccgcaggaggaaaatagaggagtatgatcgagatgacccttttgttgacgatagtgaaatggtctggcaggaacaggccgctgcaagtaaggatgggttctttgtgtacagtggtcccctagttcctgaaggggacaaagtccaggttgagcg

SEQ ID NO: 22940 - DNA, 850 bp, Emericella nidulans
tacgaacgccagctttcatccgagccagggccacggtaccgcgactatattgaatacatgcgcacaagtcccttgaaagaaggaaataatttctgggcgcaatatctatgtggcacccggccttgtcatctcccaacatccagcaatggaccccgggagctcaggtctgtgaagatggacttccaccgtttcgccgaattacgtcaagtaagtcgacgtgaatccgtcaccgttgccaatttggtgctcgcagcatgggcactcgtgctacgagagttcactcgcaccgaagacgtatgctttggctacctctccgcgggacgcgatgccccggtccctggaatgcaggacgcggtgggtatttatattaacatgctgtgttgtcgtgttcaattcacacccagccaatcctttgccgacatctacaggaaggtccaagcagattttttccgcagcatcccctatcagacctgctctctagcaacagtccagaacgagctcggcctagggggtcagatgctgtttaacacagccctttcgattcaaaaccaaatgccatcggccagttcaaggaactctgggttgtcttttgacactcttaaagcgtacgacccgagcgaggtatgtatgacccaaaataacctgttaggctttagtcctcaccatctccagtttcccgtaacggtgaacgtggtaacagctcaaggaggcgaagggatcctcgtccggtattggtccgatgccatttcgaccgaccaagcaaatcgattggtagcgggcattgccagagtcttcgtgtcctttattgagagtccatctgggtcaatctccagcctgcaggaacccaatg

SEQ ID NO: 22941 - DNA, 500 bp, Emericella nidulans
actagcaccccaggattacgtaccccccagtttacgactcgtcgccttacgcaactccacctcggaaataccatcatcttctccaacctcaagcacactatgggcagccaatcgtcgggagatcttacgctgtcgcagcccagaagacatatcatcaaggcatgcgagggctgtcgacagcagaagatcaaatgcaacgggaagtccccgtgcgagcgatgcgcccgcttatcgctcccgtgcacagtacggaccgtggcgcgacagcgacggcagaagatactccagaaacgagcgcagcaagatgatgttgagatcatccagacggcgctgcggcccgttcgtatcactgaccgcgcgacaggacggtcggccgtatacgggccaacatcgacgatcgcgctcctgcacctcctagctgcaaacaaagtaaattatgcgatttcagttgaggtcagtagcaccagctcgtgcatacagacctgtgcatgaatggtttg

SEQ ID NO: 22942 - DNA, 850 bp, Emericella nidulans
gtccctcctgaccgccgcaacccctgcgcgacgactacttatggcgttggccagctgattgccgcggcgcttgatgacggggcccaacggatcatcgtcgggtgcggtgactctgggcaccagtgcggtgggtgccggaatgctccaagccctcggggctcgactactcgactacgatgggcgagagcttccgcaggcaggtggcggccagtcactcgtttccctcgccggagttgatttttcaaagatgcatccccggttgaaatatgttaatattgaggccgtctgtaactggaagaacgtcctctgcgggccacagggagtagcgcgagtctacggcccgcaaaagggcgcatctgccgaacaaacacagcttctagaagcagcactgcaaatctatgccgtcgtcattcatcgcacgcttgggatcgacatctccaatgcacctgggagcggtgcatccgggggtctaggggcaggcttgctcctcgttggagcggagttacgcccacggtatgaggccttgatggagtatttccaccttagagacatttttagtgactgcgacctggtcatcacggcagagggggcgatcgatgaccagaccccaaggggcaagatcccggcagaggtcgcactgcgtgctagagagcgcaacattccggtcatcgtccttgcaggtacggtcggccgaaacgcccaggtgaactatgagattgggattagtgcgctcatatcgatcttacagcggccctcgaccctggacgaagcgatgggggacactgaacggctcctgaccgaggcggctgagggggcgatgaggataatagccattggacggagcttggaa

SEQ ID NO: 22943 - DNA, 500 bp, Emericella nidulans
ggactgggtgacagacgggtgcatccttgagcgctcaatccacgagcagatcgacggctggctcgatgcgctccccggttgaaacccgatccagcccgggcccgaagatgcgaagcctgtcacaggttgccgtgcacccactgctattggcgagcctctgcattactacactgacctcacgagcagccacggatgggagtgggttggatgcacacaggacaacgttggcggggagcgcattctgaccggttcgtccgccgggacctcagatatgacgccggcgacctgcgttgagaaatgccttgccgatggctacagcttcgccggcgtagagaattccaatgagtgcttctgtggggatagcgttggggaggataaaatgccgaaagttacaccgatggggaaatgtttacagccttgcgctggcgacggtctgcagaattgcggcgggtatgggttcattggattgtataggaaatgcgagggcgagtgcggcaatc

SEQ ID NO: 22944 - DNA, 850 bp, Emericella nidulans
agcgtacgccgggtccaacaagcaggaaattcttgacgctttactgcctatcgtggaagatgtatctctcgatatgcaactctccgcaatggcggctgtctcacttggtcttgtctttgttgggtcatcgaatcaccaagtcagtgaggcaatcgctaccaccctcatggacgaggagcgccagaagcagcttaaggataaatggactcgcttcatggctcttggtctagcgcttttgtacttcggtcgccaggaagaagttgatgtgatcctcgacatcctcaaggctgtcgatcatcctatggcgaagcctacgtccgtcctcgcctccgtctgtgcttgggcaggtaccggcaccgttctgaagctgcaggagcttctccacatctgcaacgatgtcattgaggaaagtgatgagaagcagggtgaagagcttgtgcaatcttacgccgtgctaggtctgtcgttgattgcgatgggagaagatgttggtcaggatatgattcttcgacagttcggccatctcatgcactacggcgctagcatcattcgaaaggcggttcctcttgctatgggtcttatcagcccaagtaaccctcagatgaaggtgtacgacactttatcgaggtgcagtcacgacaatgataatgatgttgccattaatgccattttcgccatgggtctctgtggtgccggtgcgaagaactcgcgttaggcgcatctatagaggcacctgaccagttactaccatctacaccagaactctttattagtggtgcgtatcgctcatggactactgcacatgggcatgggcactatggcactaacaccaatctagaccgacccacag

SEQ ID NO: 22945 - DNA, 420 bp, Emericella nidulans
cctggtgagagtttgtcacatagaatgacagaagaacaacgtctccatagacgttatcgcctttggtgacctcgaatcataccagactaagaaactcgaagctttcgtcgaaaacgtcaaaggcggcgacggatccaaccttgccatcatcccacccggtccgaatctgctctccgaggaactccaggcttcacctatccttggcggcgatggatctggtggtgctggcggtctgggaggcggtgatggtggtgatggtggcgcgtttgacctggacgctgcagccgagaacgaccccgagctcgcctttgcgctgcgtctgtcgctagaggaagagaagaaccggcaggagaaggagaggcgggagcgggaggcgcaacagggtaaggagaatctggagggaattccagaggagggatc

SEQ ID NO: 22946 - DNA, 850 bp, Emericella nidulans
accggatcatgtccagaggctggcgaatgcgacggcgctgtacaacagcagcgcgtttgaccctgccggtgggccacttcaagtctcctttgcggactttgtgcagccgttctctacgtgggtcgcccgcggcatgaaggccattggcctgcatcagacatcggcctttaacagcggcgaattgaatggctaccattattgcacgtcgacgatccggccgcaagaccagtctcgcagtacctccgaatcctctttcctgccagggctttcgactttgaaccctaacatctatcagaagacgatggcgaaacggatactgttcgacgaaaacaagaatgcaatcggcgtagaagtcaacagctttggtatatcaaagactctgatggcttccagagaggttattgttagcgccggggtcttccagtcccttcactgctgatggtctgggcattgggccaagagagcatcttgaacacataacataccgttggtcggacggcttgcgtggccaggatgttgaccaccttttggccagcttgggcgggtgaacttgccggttaaaacatcaaatcaggtaggatttacctgctacaatccgagatttgcagccgtgctgttcggttggccgttcaaagctgggggttttaaacccgggatttctttcaacttgcgagtggatgttcttggaggttgactctacaaatgggggtttgatttatcagtccgcgggatatcttgggttaaaattgttttgttcatttcccttaatacctactagagtcatattttgctagtcacccggtgttatttcttcgggtggtcattggtattttcttttaagaagtttaca

SEQ ID NO: 22947 - DNA, 500 bp, Emericella nidulans
atcacctcaatcaagcgctgcgtcatcgacatgtctattcccacagcaaacggcaaaccatacgcgagtctgacggtgaaagacgcatctgacagtctccttctttgtggtgcaattaatggacccgcacacgtcacgggtgttcggaatagcattatcgtcgtaaattgtcgccagttccgcatgcacgattgcagagatgtagacgtttatctgagttcgtccagcaacccgatcattgaggattgtgaaggcatacggtttggccgtatcccgcgggcatatgtaagtctctccatatatccccgtattttgtcttcaaaccacaagcaattcttctgataatcaaacagcatacgcttgaacacgaccgcctggacagtgatgacagatggagcctcgtcgaggacttcaaatggattaagccagagccgagccctaactggagtttactcggtcaggatgccggggttccagaggaggtttggactgaaattgtt

SEQ ID NO: 22948 - DNA, 620 bp, Emericella nidulans
gcctccgtcttgagtcagatcaccccggcgctagctccctgaagtcacgcatagttcgcctctggtatctccttttgttccgacatatgcccagacgtcgcattacccgtcgcatgcaagttcctctcgacctcaacttcccgatttcggacgtcattcgcccctagtatctccctcattccccatgtacagtcatgttcaagatacacattcctggtctcgttcggcatctcctcgaccacagcttccagagatcacgcatcactcgcctttgtctccctcagtccccatgcacaaccacagtcaactgtcgcatcagtcgtcccgagagatctctcctctgcagcttacggaacgcgaagactctccaccgcctcctccgccgccgcctcacagagtcgcagtccaacgtcagccttccccaggcccggccgttccacgccaattggatatgaacgatcgctatgtggtcttcacaaggactccgtctccagccggccattcagacgcgaacgggcaaacgccctcaccattgcgagacgcaatggaagatgtgatgacttcgctcgaagatatggggatgccacgagactcacgttcgccgtctccgcagcctgaat

SEQ ID NO: 22949 - DNA, 850 bp, Emericella nidulans
cagctcttaaaattaactagtcttatagaatttattaaatattatcctaagatatatatataatatataaaatatattttatattagcatgcaaagtaggaagatctaaaggttatataattatagtttaagactgtataagcaactatttaagagtatagtatatataaagataatatctggaattttattaagacaggctttataataggactctgctctactttaaaagtaattattataattaagtatagtaaaagattatatagagttattcaggataattataaataagttacagttatcaagataattaggttaaaaggtatatatttactactagttattatattaaaagcaagcttttaacaagctgcctagttccaagaatctaagcttccttgtaactagtagatttctactagtcagaatagctagataactgataaaataggccttctttagctaaaaaaaatctttgaactactttctaagtaccatataactagtataaagtatttacttattcttaatagctatagcgattatttaactgctaagtttaatactttctataagaaaaatgtaataatctatctctatatacctgcctatgctttgaattatctttaactacttaatataggtatctttagcctgcttaaaggggtatataaaaaacttcttaaatattatataaaagtaggtaataattatattaataaagaagactttttattgctataccctgacatatatattaaaatatttactttaaaaaagatctgcagcagttttaaaggggtaggacttaagctatttaatctagaatatattcttttaagactta

SEQ ID NO: 22950 - DNA, 500 bp, Emericella nidulans
ccactgccagaagccaaggacttcgggcagccgccatcgcaactcccagcgcaacctcatttaacctccagtcagcaactacctcacgaaagaagagggttaaagtccgcacctgcatccaggcgcgtaagcttaaaacgtacattcacggacgtcagttctgctatacctcagcgtcaactgatagaacctctagcacaaccatatccgacagcagaccccttttccccgctaggtaccccgatcattggctctgtttttccaactccagccttgcacacccatagcagcaaatggaaccctgtctcaaggccgttttccgaactgaatccaaggcaccctggaccatcttagcggcgaatgacttatcatgtctcgtatttggcggtacacaggctgaagttcgcaagctgagtatcttagaggtcgtacaagaggatcgacggcaatgggtcgagtcaaaactgcgaaatccaccaccgatgctgcagccaaagctg

SEQ ID NO: 22951 - DNA, 500 bp, Emericella nidulans
cgagctatgcgagacccctcagagtcgggtcgagcagtagagccgaaatggatagcaggcctatcttgaatacatcatctcagacgcagacggatactcctttatcgggttcgacctacgaagcagcaattgacttatcgtcgtcgcctccagaagcgcctcctcagaggccccgcgagggtcgcgaccgccggcagagctcatggtctcggggtgataatcagtatgtggagtacaatcgaccgcggtggcagccagacacggaggtgacagaatgtcctatttgtcagacgacctttagcttctggtatagaaagcaccattgccggaaatgcggtcgggtcgtttgcgcttcatgttcaccgcatcggattacaatccctaggcaatatattgtccatcccccgagttctgatcggtcaagcgcttctgctcttgcgcaacgcgctacgcagattgctaatctagaaagagacgattcttcattgtcaccagcggcc

SEQ ID NO: 22952 - DNA, 579 bp, Emericella nidulans
ctttgtacgggagctcgcctcaagcggtacataaccttctctctgttagatgcgaatgctgacttacaaactgcagacaaaaaaatccgcgacaaagccaccgactctctcatcctcttccttcaatctaagaccaacctctccctcctcgagcttctcaaactttggaaaggcttgtttttctgtacgtcctcgctatacaatccttctaggaatcgttgttgattgatgtttatctgaaacaggcttctaccactccgaccgcccccttacgcaacaagccctcgcccgcaacctctcctatacgctcgttccctctctgcctcgaacaacagtgcatcagttcctccgcgcattctggataaccattgggcgcgagttccactctatcgatcgcctccgtttagacaaatacctacttttgattcgctcgtatgttggcgttgcgttccagatcttcttgaagaaccccagctcggcctccactaccacaaacggtactggtaccggtaccgacaccgttaacaagaagcgcaagagagaggactctacgaagtccaagaaacgctcaaagtccaa

SEQ ID NO: 22953 - DNA, 500 bp, Emericella nidulans
taaagtcatggccgccatcgtgaacgcctgtctctcttgcttatcaacagccgaccgctggtgccatatcaccgcctgccttggccctctcagcggtcgctccagagaaggaatctatgacacaacgttggccgataatgaacgggaagctgtttccgaccttctcggctatcttgagaatgtgagtcgacgctccgctcgaaaaacgtctcgtcttgatctcttgtcccgcattgcactatatacacgtactaactcttaatgatggatagcgagctgagaccgatttcttttccggcgaacctttacgagccctgagtactctggtttattccgacaatgttgacctccaaaggagcgctagtctgacattcgctgagattacagaacgaggtatgcgtggtggtccggcaaagtgactggagcatggctaatgtcgagcctgattagatgtgcgcgaagtcgaccgggacactctcgagcccatcctgttcgtccca

SEQ ID NO: 22954 - DNA, 500 bp, Emericella nidulans
tcttcgttatcttttgttggagaagatcccattatcttatctgtgttatgcggggtacatataagagtaaggctgtctttcccattcgaattcagaaaatcgcaaaagctctagtcctcaattgaatttttgttcgctaaaatgatctatcatcgctccaactggatagacggtcaagagactcctcccaccgcaaccaccatctccgttgtcaaccccgcaacagaggaagccctcgcaacgatcaacgcaacaccctccgaagccgtcgacgagatcataaccgcctcctggaagaccttccactcgggcgtctggtcccgaaaagatcccagcgacagatttgccgttttgtctagagcttctactctcctccgcggccgcatcaatgacttcgttgccctcgaaaccgtccaaaccggccgtcccattcgcgaaatgcgtacataattggaccgcgatgctgcaatagaggatttctctcggattaaggccgagac

SEQ ID NO: 22955 - DNA, 850 bp, Emericella nidulans
cgcggactgtctacgcgtacagcaacatcgcagcggccatccgttacatgcggggcggtgcccatatcggtaaaatcatcatctctcgagacgcgccccagaactgcacagatgtgccagtgatgcccgtgcagaaaagtctcaagctgcggggtgatgtctcgtacctgatagtcggcggcttgaagggtctctgtgggagcctagcaacatacctggcctgccacggagcaaagcatatatctgtaatgtcccgcagcgattacacagacgataagtcaaaagctgttctgagagacctcactttgctaggcgtcaactgcagtctagttcgcggggacgtgtccgtcaaagatgatgttcagaaagcgttctgcaaaggctcacgcccgccagtcgcgggagtcatccacggggccatggttctgaaagacacaatttacacctccatgacagctgcccagttccacgatgccctgcgctgcaaggtccagggaacctataacctgcatgatgttgcgctccaactcggactcgacctcgactttttcaccctcttgtccagcctctccggccttgtaggccataagggccaagccaactacgctgcagccagtgcatttttagactcatttgccctctaccgccggagcaaaggcctcgccgcttgctcagtcgacctcggaatcatcgatgatatcggttacatggccgaacacgagtccatcactgaccgattggataccgagacctgtatcccactcaacgaggtccagctacaccggatcctgtacacatccattcttcaagaacgggatcagcgcagcactggcaccagccagctaataac

SEQ ID NO: 22956 - DNA, 850 bp, Emericella nidulans
tggtctaggcgaccgcgtcgccatcgaaccaggcgtcccctgcgaaaactgcttcctttgcgacgagggacggtacaatctctgtgaggacgtcgcattcgccggggtctacccttatgcaggcacaatccaacgctacaaagtccacccggccaaatggctacataagtacgcgggcgccccgtccctgtcccagtcccctgcaaagctcaaagctgaccctgtccttcgtaaaatagactcccccctagcctgtcctacctcgacggcgccctcctcgaacccctcagtgtcgtcatgcgcggtattcaagttgcgcaactcgaactcggccgcggcgtcgtcatctgcggcgccgggcctatcggcctgatcgcggccgcagcagcgcgcgcatcaggcgcccacccggtcgtaatcacagacatcgatcccagccgtctgtccttcgcaaggcggtttctccctaccatccagacataccagaacaatccgacactcgacgcacaagggaacgccaaagcaatccgcgcgttatttggagacaacgagtacaatgccccagaccgggtcctcgaatgcaccggcgtcgaaagcagcatctgcacagcggcgtacacggctcggagaggcggtcttgttgttgtcgttggtgtcggcaaggaaatcatcaacaatgtcccgtttatgcatctgtccctcgcagagatcgatctcaagttcatcaaccgctatcgcgatacatggccgcgcgcaatttcgtgcatggctgccggaatcataacggatctgaagccgttaatcagccatacgtttccgctggaacgagcggacgaggcgctcgagctgt

SEQ ID NO: 22957 - DNA, 850 bp, Emericella nidulans
gcaaccctagaagcaaatctccttttccgaggaaactcgcttctcaccaaagctcttgatttccacatgcgtcggctgggcaaggaatacctagaagaaacgattggtgaacgtctttacgaaatcgatgaaaccgatcctgaatgcgaagttgatccgtctcggatacatcgggcagacgatctcgagcgcaactggaaaaatctggtcagccttactacgagtgtttggaagtccatagctagttcagcctcacgatgcccggcggagttaagacttatttttcgacacattcgagcttgtgctgatgaccgttatggcgatttcctccgctcagtcacgtacagcagtgtatctggattcctcttcttgcggttcttttgtccggcaatcctgaatccgaaactgttcggactgttgaaaggtaaatctacattaatttctctacggctgtaacaccttactgatgcgcgtctagatcatccccgaccgcgcgcccaacgcaccctaacactgattgccaaagccctacagggcctagccaacatgacaacattcggaagcaaagagccgtggatggagccgatgaacaaattccttaacagcaaccggaatgagttcaagacatttgtcgactccatttgtgcaatcccggccgatcgcccgactcccatcgttacgccatcctatgccactcccatccagattctcggtcgtcttccgccaccgtcgcgcgagggattccccagccttcctttcctgatcgaccatgcacgaagcttcgccaatctgatcagaatatggctagaagttgcgccaggcagactttcacaactggaagaattagacc

SEQ ID NO: 22958 - DNA, 793 bp, Emericella nidulans
atctcacggttcatcgtttcagaccgcgacgatggcgatccagccctgacctttcgctctatcgtcctgggcactgtctttacagccctctcgagcgttatcaccatcctctacgtcttcaagccgtaccaagttcaggtctcagctgtgttcttgcaacgtaggcttctacgcttttagtctctgaccatggcctaaccctagcagtgcttgttttcatcttcggcaaggcatgggccatctttacgccccgacccgagcgagtcaaatggcgctggctacaaagcgttctgcgattcatgagctttggacaggattttgggatcaaagagcacgtcgttgcagccctgatcgcatcgtctggcaacaacggtctctctggtgtcgaagtccgcgccgtcgagagactgttctatggtctacacatctcggcgtccacggctgtcctgagcacattctccatcgctctctgtggctttgtcctcgcaggagtcctccgtcctctcattgtctatccggctgagatggtctactggtcgactctgccgcaggtggtcctttaccagaatctgcacttcaatccacgcaacaacaagcgccggctgatcaagtttggttgggctctagggattgcggccgtctgggagcttttcccggcgtacatgatgacatggcttggtgggttttcagtagtctgtcttgcatccctgcgagcgccgatgcatacaagaaaaatcataacgacgatctttggaggtgcctcttcgaacgagggtatgggactgctgaactt

SEQ ID NO: 22959 - DNA, 547 bp, Emericella nidulans
gaaccgccagcaccagcaccagcaccatcacatccagccaaagaaggcggactccgtggctggctacaggttctcagcaccctcttcattctattcaacatttggtcagtctcctagattttatctggcgcggtgactcccttctgacccatctgctagggggctagccttcgccttcggctccttccagagcttctatgtgctcgacttcctcccctcaacatcaacatccgcgatatcatggacgggaaccatccagtcctggcttctcataatgggcggtcttgtctcaggcccgcttttcgatcttgggtactacgtccacctcataagcatcggctccttcctgtctgtctttgggattatgatgctctcgctagctacgaaatattaccagatcctgctgtcgcagggaatctgcgctggactcgggtttggactactctatatccctagtctgacgattgttagccggacctttgtgcggaaacgcgcattggcattgggaatcgcgacggcgggtgcgcccgcggggggcgtgatttat

SEQ ID NO: 22960 - DNA, 850 bp, Emericella nidulans
gcggagatggtacgaggtacggaatcacaacccgctctggagaacaaacgtgtactggtggttggtggagatggagatggctgtcgtgcggtggcagagaagtacggatttaagaacgtcgtaacgcctggcgacatcttcatggccaatccatccatttggccattctcaaaagggttcagcgactactacaagaccttcaccagacccctacctcataagggagagcccggcgacccaacaatggggcttaaaattgacgctatcttcgtctttaatgatccgagggattgggcgttggacgcacatatcatcattgatcttctgctgtcatcgcaaggagtcctaggaactatatcagacaagaatggacgcgccaatcttcccaatcgcggataccagcaggatgggcaaccgcctctttacttctctaatccggatctttggtgggcggcggcttacagccttccacgtctcggacagggcggtttccgcgaagcgttggaaggcatgtggagtgcaatcaccggtggctccaataaaggcgttgagcttcagaagacagtcattggtaaaccgtcgcaagggacgtacgaatttgcggagaagcaactcctgcgtaaccgatccagagcgtttgcgtttgaaacgacaagacccttacggaacgtttatatggttggagacaacccggaatcggatatttgcggagccaactcgtaccgaagcgcgcacaatagcgagtggcattctatactcgtgcggactggcgtttatatgggcggcgagccagcatggaccccgaagactattgccgacaacgtccagaaagctgtcgaatggggcctac

SEQ ID NO: 22961 - DNA, 612 bp, Emericella nidulans
aaggtcaacaggcggtttctctggctgatcggcgttatttatgttatcaagacggtacgtcgtctattctcaggttgggacgaagactgactggtcagatcgactataccaatgccgcagccgtcaaggtactgcaggtcggtgaagagcgcaatgtgctgtcggagctgaaaatgaccacgaacgaatacaactgggtccagtcgatctactttgtatgcagcccgttatatcgtggagtgcattctgctgatgccgaaatagataagctacatcgtgttcgaagttcccagcaacctgctgcagaacgtcacgccgcgtctctggcagtcgcggatcatgcttacctggggcatcgtcctcgcttgccatgcagctgtgcagaacaagcacgcgctctacgccctgcgttttcttctagggttgtgcgaagctggcatgtttcctggtattgcggcgcagctctgcgggtggtatcgcagcgacgagatggcgacgcccatcatgtggatgtttgggttccagaatacatcagggattattgggtcgctcattacttatggcatctcctacatgaatgggttacaggacttgagtgcctggcgatggtgc

SEQ ID NO: 22962 - DNA, 494 bp, Emericella nidulans
ttgtgcgtgtatgactatgattatacatcacttggcgacgtcatttctcgaacaagctcggccgcgactgggttccgctccctctctgctattctgctgagattagtctactcgctcctccaaccgagacaactaaggacattggatgatggagaatgcgagcctcgaccaaaatctgattgatcagcctcagcagctcgcgactccgctcgactccgaccccggttcgcctttgcccgcgaacagtaacactgccggcgcccggtctcccagtaggccgagtaccagtcccaccgcagcagaagccagagtgcccatccccagactcggcgcttctgagagggttcccagccacacgcgcattccccgcgcctgcgccaactgccagaagaagaagacaaagtgcgatagccggaaaccaacatgtggcttttgccttcggtctggcacggcctgcacgtacacaaagtcaaaacgcgaaagccaacaattgc

SEQ ID NO: 22963 - DNA, 850 bp, Emericella nidulans
agacggagggcgtctgcgtcgcgacttttgcagacggtcgtcagggccccgttgatattccggcgttcttcagccgggacagcggcatcaaaagccccaaaatcattgagaatgaggcagaggcggccgctattatctgtaagtgagcattcctacgtgaagatatcatggctaacgacttgcagatgcgcagtcgaagttgcctgtctcgtcaggaatgttgttcgctaacccagttccggtggagcattcaatccctcaggcggagatagacgccgccatcaacaaagcggttcatctagcggaagttgagggctatcatggcagtgacaacacaccgttcatcttggcaaagattaaggagctcagcggtgggaagacagtggctgcaaaccgggcccttgttgaagcaaacgtcaaacgtgcagcgcgggtcgcagtggaactttcaaaattggaacagtccatgatccctagcgaacagtgagttgtctgtaaccttcgaaggggtgggatgtcctaatatcgattgtccctgcgtaggcatatgccagccattctcccgatcggtagggctgaccaggctacttcagaaattaaatcggaaccgcctattagagctgaaccagtagaaaagacggaaattctagttgcgggatcactcgcgatagatctcgcttgcgattacgttcctgcagccggtcaaacaactcccgtctcacggacatctaatcctgccgtcatcaagcagagccttggtggagtgggccacaatgtcgcccttgcttcatcgtctttaggcagttccgtgatgttctgcagcgaggttggcgataacttgagcggccac

SEQ ID NO: 22964 - DNA, 647 bp, Emericella nidulans
ggccgagaaattcgaggacgaaaagcggaggattgttcaaagttgcttttcaaagaaggatagcgatggtgcctgtatgtttaagccaactttgagctgaacgcttcatacacctgctcgacgactgtttcgcaaatcaggcctcctgaaacgtcatggagctgacagccctaccacttctggtcaagaatatggctgacatttcgttgatttaccagtggtcgagtcctacattacacacgtacggatcatggaagatggcgcttatccttcgtccccgcccccgcctaattcttcccctgaaaacaagaaggcgagagtcataatcgtcgctgtgagacggtccggaagggtacgcatgcacaaagctagggagaacaatgacggctctttctcaattggcaaaacatggatgctggatgacctctccgccattaaatcatataatgcgatcgtgccgtctagccctcaggaggaactgcaaaaacaatgggcatcgaacgttggctttctggtaactgtgggaaagccttactactggcacgccaaatccccgaaagagaaggatttctttattggcagtttggtgaaaatctataaaaaatataccggcggcaaaatgccggatcttataggctttgatgagc

SEQ ID NO: 22965 - DNA, 850 bp, Emericella nidulans
cacaatccagttcggactcagactcaggacacctgccctcctcgtcagtctggctcttcgacactggaacctcctatcccggcggcgccccagcatggggaaacaatgagctgcaatcgtacaccacctcaccgcgaaatattcgcataacgccacagaacacgcttcaaattatcccgcgtttctccggaaacaatggtaccggcgaggaagggcagtggactagcgcccgcatcgaaacaaggaccacatccttcgccgccgcttcaggcggaaagctctacatcgagtctcgcctgcgcacgggatgcgctccaagctctcagcaaaaggggatctggcctgccttctgggcattgggggaatccttcaggggaaatccaacaaactggccgatggcgtcagagtgggatatcatggaggtcatcaacggtgagcccacagtctataacacactgcattgtggagtcgattcaaacgagggcggtccctgcaatgagtataatggtttgggtaatagcggcgtcagttggagcgggtgtgactggcacgttgttgggctcgaggttgaccgatcaggcgcgtccctgcttggagctgggtctgggcaaggtgaagggtggcagaagaagacattgacctggttctagacggcgaacaggtccatcgtgtttctggtgctgatgttggtcatgagactgtttggagaactatagcgcacaagggtcattttctgctgctgaatgttgccgttggtggaaactggcctgggtatccagacgagaatacggtcgatggggaggaggtggcaatggaggtggactatgtgcgggtgtggaatgcggacggc

SEQ ID NO: 22966 - DNA, 500 bp, Emericella nidulans
gcacttggtcgacatccccactccgatcctcttaaagcagatgaaggtaccgatataagccgtacggctcaattgaccgtgatctaacagatgagctgaacaggccttctggttaagcatccctttttacaacgccgcgctcctctgcgcgaaggcatcgattctgatgcaatactttcgcgtctttccgtccagatgcatgcgccgcatttgctggaccatgatagggatcctcgtcacatacggcacatgggctgtgcttagcgggttcttgaactgcataccagtagcacgtttctgggacccaacaatcccgggatcatgtctcagttcgaaggctctgtggttctccaatgcttcaatgcatattgcgacggaccttgctatcctagttatccctatacctgccttgtatagtcttgatttgccaaggaagcagagagttgctcttattgcaatttttgcggtggggggtttgtacgttttctgttccatggtcg

SEQ ID NO: 22967 - DNA, 500 bp, Emericella nidulans
tcagcatacgacatttccgagcctggagagaccttggcatggtggtcaacatacgccgtcgacgaatgtcccgaccctaagtccctggacatggacgccgtggcaaaacaactacgcgagagacatgcgcagtggaaagacccggtcattcagaagattctgccttcgttacaggttaggagcatgtacccaacatggacgacccctcaacttcccacgtgggagaaaaacggcgttgtcctaattggcgacgcagcgcatgccctcccatctacatcaggccaaggctcctcgcaggccctggaagatgctgaggcgtttgccgtactgcttagccatactctccgtggtgtatataagaaggactctgcagacgctatcacaaaaaaggaggccatcacgacggctgcgaagcagtatgaggcgattcgctacccccgagtgcaggagattttagaaaatgcacagcggatgcagaatagcaagcgggatatgggccc

SEQ ID NO: 22968 - DNA, 618 bp, Emericella nidulans
ctcagaatgctccactcatccgccgtcacgatcaccagcacgatcacgatcacgatcatgaagagttgcagcatacgcatagccatatcgagcctcgatcaacgtcgtcttcatcaggatcgaccttccccacagcctttgataccagtctctccaacaacttcaccacaacctcttgtccatccttcttcacaagcttcctttccgactcctccttcacagactgccatgccatctcaatgcttctgcgcgactccacagcttttttccatatcctcacctccgccgcctcaacgtctcgtgttttagacatcgcctgcgcagcagacgtctcttcctgcgcctccaccctttcgagccttgcgtccgacctgatcgacgactcaaactgcggcaaggactatgccgacggcaaccccctcgtgacaaatgcctacgtcgacctcatcacctacgagcccatctaccgcgccacctgtctccagaacccagacacctcgaactactgctttgttgacgctgtgacgaatacctccaatgcagcagactacgacgtctattctctcccgtacggcagtacaatcaacaacagcacctccctgcccacatgcagctctt

SEQ ID NO: 22969 - DNA, 850 bp, Emericella nidulans
tgtcgtatgttctgccctccctttgacggagtatcactaacaaaaccagtgcggtctttggatgcctctgcaccgctggcatctcgatcagattttcatccgccgtctgacgaatgaccggtggaacttcatcatggagtctcgccaggaagccaacattcgggccaaggaaaggacttcgctggggcaagacgcaaagaaggatttcttctactacctgctcaacgcccgcgatcccgagaccggaaaaggtctcgctactcaggaactctggggtgaagcgaacgttctgatgattgccggcagtgataccacctccactagtctctctgctgccatcttctacctggtccggaacccgcacgctctagagaaactgaaaaacgaagtccgctctcactttagcgacgtagaggagatcgtgaccggatctaagctcaatcagctgacatacttgaaagcctgcattgacgaggctatgcgtctcgcacccgcagtcccaggatccattccacgcgaagcatcggacccggttgtcaccgtggatggcctcgtcctcccagaagggaccggctgtggtactcctccgtactgcatccacagacgtccggactattaccgagaaccgctgagctacttgcctgaccgctggatcgaaggctctacctgcaagaccgccgacgcagcctggaccgtgacccgagaggaggtggacttggctaggaaagcgttctgcccattcagcattggccctcgcgggtgtattgggaagagtatggcactgatggagatgcgagtcaccctagccaggcttatgtacctgttcgacttcgaactggcagacgctacg

SEQ ID NO: 22970 - DNA, 850 bp, Emericella nidulans
gacagtctaatccgcaagctatttggaaaggaggagcccaactggatagaaactaaaccagatgtggcaaatcactggagtccttgtttacaggctctagagggtcacgaggctgcggtcttatcggtttcatactctcacgactcgcgccttctagcctcagcatcggatgaccgtacagtcaaaatttgggatacagaaacaggttccttgcagcatacacttgagggtcacagtgatttggtcagatcagttatattctcccacgattcccggcttcttgcctcagcatccgatagtacagtcaaaatttgggatacaggaacaggttccttgcagcatacactcgagggtcaccgtgactgggtcagatcagttatattctcccacgattcccagcttcttgcttcagcatccgatgatagtacagtcaagatttgggatacaggaacaggttccttgcagcatacactcgagggtcaccgtgactgggtcagatcagttatattctcccacgattcccagcttcttgcttcagcatccgatgatagtacagtcaagatttgggatacaggaacaggttccttgcagcatacactcgagggtcaccgtgactgggtcagatcagttatattctcccacgattcccggcttcttgcttcagcatcagatgaccggacagtcaggatctgggatacagaaaaaggttcccataaacacacactagagggtcacagtagtttggtcacctcagtttcattctcgcatgactcccgccttctagcctcagcatcaaatgaccagacagtcaggatctgggatatcgaggcacgctcccttcaacatacat

SEQ ID NO: 22971 - DNA, 561 bp, Emericella nidulans
ctcatcggtctagatgtgtctgctgacggccgatgggttcttgctacttgccgcacatatctactcctcatcgatgctctgcaaaaggatggcaagaacgaaggcaagcttgggttcgagcgttcttttgccaaagactctaagccgcaacctcggcgtcttggtctaacacccgctcatgtggcgcaattccaacacgagacgaagaaacctatctcatttacgccagcccgcttcaacactggcgttgacactgaagagacttctattgtcaccgccacagggcctttcatcgttacttggagcctgaagaaggttgttgcaggtcgcaaagacccctacaccatcaagcgctactccgaggatgtgatggcggacaacttccgctttggctcagataagaatgtcattgttgcgcttccaaatgaggtcaacatggttgccaggaaggctctacagaggcctacccgcgagagtattgctggcccggttacgcccagccgtcgcgccactcgctggggcagccggctcgggagggatgatatcgtcaactcaccttat

SEQ ID NO: 22972 - DNA, 500 bp, Emericella nidulans
atctccatgaccggctttcgggtgtcgccaacgacgaagagctgctttcactaatctgcaaagaagaatcgaactcatttggcctgtatcatggcgccacgggaccgccggacagcctgcagggccagcagcgtggccctcagtatggacttgcctgctatccgcgggcgacgctctgtaatcattcttgcgtgccgaatgtgagttttccgttacctttcagagacgaacttcaagcttttcacagaaaaagaaagaacttatgacagattggttgctaacagagactttgtacagcttaaacacggccctgacgagcagagccgaatggtcctaacagctacacgagatatcgcggcaggtgaagaatgctgtatttcgtacttcgacctcacggttcacgttgatcttaatgccagacgaaagagaacgaggaaactaatcaccttttcctgcacctgcgagcggtgcttgcgtgaagaggccaaggcctgagtaag

SEQ ID NO: 22973 - DNA, 780 bp, Emericella nidulans
tggtggtgctgacaccagtggaaacaccgtgtccttcaactctgtccaaggatgccctccaattgccattgtaggcatggcgctccggcttcccggaggtgtcaagtcccccgatgaactctggcaattcctaatcgaaaaacgaaatggtgtttgtgaggttcccggaacccgctatactgttgattctttttacagtgagaccatggcccgttgtgtaaaaacgcgccatgggtactacctgcaagacgacccagcctgtttcgacgcgggcttcttctctatcaactcacacgaagcagggagaatggacccacagcaacgccagctccttgaggtagtttgggagtgcttggagagcgctggagagacgaattggcgcgggaaaaacatcggctgctatgttggtgtttacggcgaagactggctggacctggcaagcaaggacccgcagcatacagaccgatatcatatccttggaacggggcagtttgccttgtcgaaccggctttcttatgaatatgactttcaggggcctaggttagcaccgcgcccccccttttaattcgaactacactgacgaatcagcatgaccctccaaaccggctgctcagcgtccttggtaggtctccacgaggcgtgccaagcgctctactcacgagactgctgctctgccatcgtggcggggacaaatttgatgtttgcaccgacaatgacggctaccatgtctgataacactgtcatgtctccaactggaacttgccgcacgttcgacgaggc

SEQ ID NO: 22974 - DNA, 539 bp, Emericella nidulans
gcgcagtctttcttccaccacagatgcggtcacattttctgtcgctcgccgcgtcaaatactcgtaagaatttggaaacgagcggtattctctgtggtacaatgatatctaacgccctctttatctctcgacttcttatccccgagcagatatctacatcagacacctgcgagacagtcaacgagtccgccatttttgattactgcgactcggaagatctaatggtgcttggctggatccatacgcaccctacccagacctgcttcatgagctcaagggacttgcacacacattgcgggtatcaagtcatgctaccggagagcattgccatcgtttgcgcgccgagtcagaccccaaactggggtgtattccgtttgacggaccctccagggctcaagtcggtcctgagctgtactcagaccggactgttccatcctcatgctgagaccaatctatacacggatgcgttgcgcccagggcatgtttttgaggctaatgggttagaattcgagactgttgaccagcgggtgaacaagtca

SEQ ID NO: 22975 - DNA, 500 bp, Emericella nidulans
ttggtggaaggaagcatataactacgtctacctctgggcagacggagactgtgtcgaggatcccgccatcacagaggcagaatgtcgggtcttactccagattccccgcgtgcggaatctgcttgtctaccctcgccttgccacctcgtcaccattgcgcgtgctagacctatgttgcggacagggccggcacacaatcaatctagcaaagcgactctcatccgtccaatttacgggggtcgatcacagcgagtatctgataagccttgcgcagaagcgggcacaagaaatccaagacgcagaggatcgcagctgcaacatccaattccaggtaggagatgcacgccaaattccggctggagatggagagtatgacctggtggtcctgttgggcaattcattcggccatgggtcctatgaggacgatttgcagatgctgcgtgagacgtaccgagtcctgaagccgggaggcgtcttcgtgcttgactgtgttgacggag

SEQ ID NO: 22976 - DNA, 850 bp, Emericella nidulans
agaaggccacgatcgcgcggtcggctcagtttcattctctcacgattcgcgccttctagcttctgcttcaggtgacggaactgttaagatctgggatacagcaacaagttttctccaaaacacgctcgaaggtcacaatgaatgggtcaaatcggttgtattctcccatgactcacgtcttctagcctcagcatcagatgacggaactgttaagatctgggatacagcaacgggtactctccagcgcatgctcaaaggtcacaatgattcggtcagatcagttgtattctcccatgactcgcgccttatagcttctgggtcaaatgacaggacagtcaggatctgggaaacaaccacgggtcttcttcgacacacctttgaggatcatgaagatagtgttatggcagtttcattcgctcatgattcgcgccgtctagcttctgcatcagatggcggaaatgtcaagatctgggatacaagaacaggttctctccaaaacgtcctcgaaggtcacgatgattgtgtcaactcagtttcattctcccccgactcgcgccttcttgcctcagcatcagatgacagaactgtcaagatctggcatgcagcaacgggttccctccagcgcacgctcgaaggtcacaatgattgggtccgatcagttgtattctcccacgactcccgccttattgcttcacatcagatgacatgacagtcaagatttgggatacagcaatagttcctctccaaaacaaccttgaaagtcatgataattgggtcagatcagttgtattccccatgactcgcgcctgctagcttcagcatcagatgacatgacagtcaaaatttggga

SEQ ID NO: 22977 - DNA, 850 bp, Emericella nidulans
tcgcccgtcaggtcggccttcaacactcgcatgtgctgattcattgttctgacggatgggaccgcacaagccagctcagtgcattaagccagctttgcctagacccatattaccgcactttagagggattcatggtcttagtagaaaaggattggctttccttcgggcacatgtttcgccatagggccgggcacctaaacagcgagaaatggttccaaatcgagaacgaaaggattggaggtgactctggacggagtttcggtgaaagtggtagcgccggaaaggccattgaaaatgcattcctcagcgcaaaaggcttctttaaccgggaaaacactagccgtgattccctcggcgagtcagatggagaattccgagagtacgattccgacaatcctggttctaggaaaacaagttccgcaccaaggagcgttgtcactgagaaggaagttaccaaacccaaagagacaaggcctgggtgccttttgtttctagacgcatcatatcaattgctgtatcagtttacatctcggtgggagtgcaacaagcggggtctgcggcgtttacctctaccatttgtactcgtgccaatatggcacattcctcttcaatagcgagaaggagcgggtagaaatccaaggctaaggatcgcacacgcagtgtctggactattttcttgcccgccgagaacagttcttgaatcccaagtacgatgctaacattgacgacaatatgcgaggcagggaacgttgatcttcccacgaatcgacgaggttagatggtggagtgagcctttggccggacagacgcggaaatgaacgggggacgcatgtctagcagttttcagccc

SEQ ID NO: 22978 - DNA, 850 bp, Emericella nidulans
cttttcagcaggagaaaagcactgtctttgcgcacgtcaaccgggtcatccgatgcataattgactgtcaggctcacctcaaagactcagtaactctctgcaacgcgttagggctcgctaggagcctagcggcaagagtctgggatcactcgcctttccaaatgaaacaaattgagaaactaaatgccaccgccgtgaggaaactcgtggcccatgggatcgatagtatagtggcacttgagaaatcgaagccgcacctaatcgatatcgccttgagcaagaatcaggcgtttgggacgagactgcaaaaacatctggcgaattttccgaagcttcgcgtctccgtcaagatgacgggaaaggtatgagaacgtcacgattgtatatgcaacctattgacgtatcataggatatccaccctggcccctttgttagagtgaatttcaaggcggaaattgcgttcatgaacgagaagtgcccggttttcttccaggggcggcctgtctatgtctgctttgttgcggagacttccgatggccacttgattgactttcgacgaacaaagtatatgattcttggtctcttcaaacactttgacactaacggccctagcgcaactggactgcagaggagttatgagataccgctgagtgtggagctgaagcaccaggatgacagtattacttgccatgtaatgtgcgatgaaattggtatgttttcaaccatataaccgtattgtccttgagttattgatatttctaagctgggacctcacgaagcgcgacgttgaagccggcccttccacgatcttgttttcataagtccttagcgaacaaagacgcaggccagg

SEQ ID NO: 22979 - DNA, 850 bp, Emericella nidulans
ttggggtgtctcctttttctaactcatggctacgacctctcactattcaattttactgagaacctgccagaacaatctgctaatcagagccctatctagattggagagaacattgctcgtatgattaaagaagccatggactgtacacaagcatctctagcttatgcacaacaggaagctgaaagtcaggcaaacaaaaaaagagcccgagcaccaacctacaagcttggtgacaaagtatggctgaatctccggaatattcgtacggagagaccctgcaacaaactggactggaaaaatgcaaaatatagagtcacaaagctgataggcatccagttgaataccccaccaggaatacacccagtattccacgttgatctcgtacgacttgcaaataacgaccatctcccctcgcaaatacaggacgactctcaactaccgccgatcttagtggatgatgaggaagagtactatgtccactccgtactagacaaacggtggaagaagataggaagaggagaccgctgggagtacctgcttaaatagactggatgggctaaccctacatgggagccagcccatgcgctggaagaaactaaggccgtacaagactatgaattacaacaagaacaatagaaagaagaccagcccgacacagagcccacgaagagaagaacaaacactggcagaaccagatcgtacgcacaagatcagtcctctagctcctcaattggagcacgtgggagctccgcaacactgagcggcacgtacttgggctcacgatctgcataaaagtcacaacgagccccgccatccttccatttgcaaccagcacaagcaccattccaat

SEQ ID NO: 22980 - DNA, 850 bp, Emericella nidulans
gaggatccaagttgacgcagccagaacaagcgagcattcacgcactagactccgccatatcaaacaaggtttgacgcaattgcccatcgatggcttgtgcgctggggttatttcttgggaagatagtcgttatgtctggctatcatttggccaggcttcttacgttgtgtacgatttaacacatgcgcccaatcctatctttagttcttccccgtccattatccaagcaatgggctacactgacgaactcgcccagctcctttccgttgggccatacgtaagaacccaaccccagctcagagtatagcaagctaaattcaataaacaggtcgcagcctgcctgctctccatcctgaccggctacatctccgacaagtaccgcacccgcggacacctaatcctcctaacggcacccctcggcgtacccggtatggccatgcttctctcactcccagcctctatgtcctccgcaaaatacggtgcgctctaccttgccgcaccgggaatttacgcattcctcccgctctatataacatgggccgtcaataatgccgccacacccaccgtgaaagccgtcgcatcaggactggtctttacagttggttcattaggagggatccttgcgccgtgggtgtatctgtctcaagacgcgccggagtataggcaaggccatttgattatgcttgcgtttctgattttctcgtgggcgattgcgggaagcctgattacttggattaagtgggagaacaggacgagagaaagtgggaagagagactggattctcgagggattgggggaggtgcagaggggagagcttagtagtcggcacccggggtttcggtatgttatt

SEQ ID NO: 22981 - DNA, 539 bp, Emericella nidulans
gacgaccggaaccacctcccaagactttccactgcggaacatgcgggaaaggatttgctcgacgaagtgatttggcaagacatggtaagatacgcccacgtccgtctagcgtcgtgatgatctctaacctttttctagagcgtattcactcagggatccgtcctcatgcttgcgactggcccggctgcggcaagcagttcatccaacgttccgctctgactgtgcattctcgagtgcacactggagagaagcctcacatgtgtgaaagatgtggcaaggtatggcagtccgagtgtcagtggtgattctctatactaactacaacgttggtatacagccatttagcgattcgtcctccctagcaagacaccgcaggattcactctgggaaacggccgtacaaatgcccttatgccaattgccaaaagacattcacccgccgcacaacattgacacgccatcaaaatcatcatactgggaccattgaagaagctgctgcggaaactgaggccaacctcagacaaaacaaggaaagggcga

SEQ ID NO: 22982 - DNA, 850 bp, Emericella nidulans
tcagcaacaagaaggacatcaatgctcttctccgtgcctctcaggcggttctcgccatcgcttctcaccctactatcgcccctggtgttgagccccacctccttactttgctcggacccctcctcactgtttccggtctgaaggtctccccgaagacccccaaccctgccaaggctgtggcccacgatgctgctgttgccatcgtcaggaacatcaacggcaacgctgtcaaggccgttctccctactttgatcaactctatcgacgattcacttgcgaccgccgatgagaagcttaccgctcttgactgtatcgaagagcttgtcaagtcctcacccgttcagatggccttccgtgttcccgatttgatccctgccctctcagcgaacatctgggatactcgtgaccctgtcaaggaccgcattcagggaactccttacaagccgtatcagcctgcgaagggcaagaagcccgagcagaaggaacagcccgaaaggactggtaccttggagattgtttgcggtctgatcagcaacaaagatatcgaaaaattcattcccgctctcgtcaagtgtatcgctttccccgaccgagttcctgagaccattcacttgctcggagctaccactttcgtctccgaagtcaccggaccaacccttgctatcatgactcccttgctcgagcgtggtcttaaggccgagcaggcaacgcccatcaagcgtaaggctgccgtcatcgtcgacaacatgtgcaaacttgtggaggaccctcagattgtcgctcccttcttgcccctgctgttgccccagatcctgaagctctctggagactttcagatgctaagcgtgct

SEQ ID NO: 22983 - DNA, 850 bp, Emericella nidulans
gctcaaagaaagacgcactgaatgccctgattgcctgtatcaattcatataatcccgataccgtgtctacgtattcaatcacgatatgggagacgcttaagtttgaggtcctcaatgcccaagaagaacttctctccgacctctctctcaaggcgttacacgatatagcaaggcgtctatctgagggcgtaatgcagatacacgaccagttgcctctcgctcagtacctacgtcccataaccaaagagtgtaacgagcaattaagagaacctcagcagaagcaagccaagcccgcgcagaagattttaaaggccgtttcggaggcctctgcaccttccttcactctggtcgcgcaagttgtcattgcacccctcttaaccctctaccagggagccgatgggatcacaaaacagcgggctcttttggaaacattgacattgctttttgagtctgcgatatctgtttttggagaatggacaacgcggaacccggaaacatctgccgaaaatcctctgctagaattcaaagatcagttttccgagatatttggtcaggctttgatgagtacggtcaaagaagaggtctctttccgcgtttctgctttgaaaggattcctacgtctgtcagtcctgcgcgattactttcacgagtctgagattggcctgtttgtgcaataccttgacgagattcttctgacggaagagccagtaggccgcgatgacttgaaaagggaagcaatagctgctcttgctgaggtttcaaagcatcaaccgcggctgataatggatatcaccttcccggccttcgtcgctacgcttcccgattccgacgaaggaacggataccagcta

SEQ ID NO: 22984 - DNA, 850 bp, Emericella nidulans
ggggtggaagaggatgtaccgaactggtgatcgtggctgtctcctggccgacaggtcactcgtgttcttaggaagaggagacggggattcaatggtgaagcttcgtggcctgcgcatcgagcttaatgaggttgctcatgttgttcttgccgcttcgcagggcaatttggctgatgcaaccgtcgctgtccgtggagatttcgagtttctcgttgctcacgttatactttctcagcatcatgagcttgccattcagaacctaagaatcattctatcttgactcagcctaccgcgatacatgataccatttatgattccctttggatgtactaccaatgacgccaaacggcaagctcgatcgcaaggctctccgcacattgccattacccgcggcacaacccattcgggaaaacaggatgaagactaagcatccccccttgaatgtcgcagaaggtgaacttagccgattgtggcgccagattcttggtgacgttgtcggtggagcttcgatccaagcagaaacggatttcttcgctattggcggaagctcattgcagctggttcgcctacaaaacgctctgcgcgagcgcatgggagtcgaggcatctcttcatgacatttatcgcttgagtagcctcggaaaaatggctgcacttatgtgcgatgagaggggccgcttggagtctgatgccattgactggtcggcggagacagacatacctcatgtgcagacggttattgagacagctgcggtcagcaacgtttcagaccatcaatttgaaattactggtactttgcgtcaaaagaaggaagtcgttttgactggcgccaccgggttcttgggatccga

SEQ ID NO: 22985 - DNA, 850 bp, Emericella nidulans
cggaggaaattacccgtgtatccagttcgaaagataatctccgtctgctacatgtcagtaaggcattcaagaagtttatagctgtggaagacgtcacattcggtgtcggggcaggagaggtcttcgcccttctcggacccaatggagcagggaaaacgaccaccatctccctcatccgtggcgatatacagccaacacgtaacgagggggaaatattcgtcgaaaatatctctgtcctgaagcagcgcgctgttgcccggtctcgcctcggcgtttgcccacaatttgacgcgatggaccaaatgactgttcttgaacacctcgtcttctacgcccgtattaggggcgtgccagatataaaccacaatgtcaatgaagtaatcaatgctgtcgggctcaagcaattaaggcatcgcatggcggcaaagctttccggcggaaacaaacgcaagctatccctaggcatcgcgctgatgggaaatccttctgttctgcttctagatgagccatcctccggcatggacgccgcctcaaagcgtgtgatgtggaagacactaacggccgttgcacctgggcgctccatagtcctcacaacacattcaatggaggaagcagatgctctggcccaccgcgccggtatcatggctagacgtatgctggccctgggaacaacggatgcccttcgtttgaaatatggaaatatgtaccatgtgcatatagtccatacacaagcaccacatactagcgatgaagacatggagaagatccgcggctgggtgaccgataactttccaggcgccgttatcgagcagaaaacataccacggacagctgcgtttcagtgtccccgc

SEQ ID NO: 22986 - DNA, 500 bp, Emericella nidulans
catctggaaacacaaccgccttaacttgtgaaagtatactgagggttggcgacgtggtgaacttgaatggctttggtggtgattttgagacaaatgatggcagaaagactacccttaagatccttgttgacgaaagcaaagctggcgttgtgctgtttacataccccaaggcctcgacccccggctgtaagtctactctgtgcgctcgatggtcagttatcgatgactgcaatttggtttaatcaaacgctccctgcatcctgtttgacaagccagacgctgacatacccaaggtacaaaacaagcttgcctatttcgtgatgggtttgataagttaacctcaaccgggctggccatctacggcctatcggcagattcgccaaaagccaacactaacttcaaatcaaggcaaaatctgccatactccctactctgcgacacagcgtcaactttgattagcgccattgggttcaagaagtcgcctcgtggaaccatcaggg

SEQ ID NO: 22987 - DNA, 850 bp, Emericella nidulans
gacgcagaagattctccatcgatacaactttccaaacgtgatcaacctcgcatggcatccgacaaagaacggtgtctcactcaccacgtcagacggagagatattcatcttcgacggatttgtgcccaaggactaccaagctctacttcagaagccgctacaagcagcacctatatttcccggcgcattgactgagatatccgataatgtgcagcgacccttggcgagtcggcctaaggaggcactgcgcaggggcagcattgactcgctagatgatatcctgggttacgaccaagacatggaagactttgtcgaagacgacgatggagctggttatgttgaggatgtcaatgggttcgggaagcgcacgaacaagcatctgggtgatattgagggtcatatggataaacggacattgacatcgtttccgaagccaaagatccacccgccacttcaacctggtagcacgccttggagggggaatcgccggtatttatgtaagagcaccgtctcctaacatgtcacgtactgacaggataggcttgaacttgacgggtgctgtgtggactgtggaccaggaaacccataatactgtgacggtggaattttatgaccgggaactgcaccgtgactttcactttactgacccgtttttgtatgatcgggcatgcctaagtaagtcaactattccggatgtaatcgcctactaacagcatcagatgaaaatggggctcttttctcaaacaatccagttgatgatagccctgccacgatcttgtatcgtccgatgagacgtggacaacgcgagcagactggaaaactactctgccaaaaggagaacacatcgagg

SEQ ID NO: 22988 - DNA, 660 bp, Emericella nidulans
aaacaagatcgataaagttaatgcggaattggtgacgctgacttacgggacaattgttgcacaactatgtcaggactacgtcggaaactaccccgaagtgaacaagcagttggagaaaatgggttataatattggaatgcgcctcattgaagactttctggcaaagtccaatgctcaacgatgtgccaacttccgtgagacggcggacatgatctcaaaggtacgatagccgttggtaaactacgacgatcagctggatctacccagtgaagctaatacggatcaggtgggatttaagatatttctgaatatcaccccgacggtgacgaattgggccagcgacaacaaccaattttccttgatctttgatgagaacccgctagcggattttgtcgagttgccagacgatggacgagcgcaggatgaattgtggttctcaaatatattgtgcggcattcttcggggcgcgttagaaatggtaagtctaaaagactcctctccaattgaccgcatcgctagcgctaactaagaattaatataaggggcaaatgcaggattgaagctcgttttgttagcggcattctgcggggggatgtcgcaactgaaatgcgggattcgcttgtgaggtatgttggggggggagggcctccgtagtcaaat

SEQ ID NO: 22989 - DNA, 850 bp, Emericella nidulans
agggcccgccgagaacccaggcacctcgcccgccaacaccaacggctgcatctcgagctgcggtgtcgacattcacaataccgacggcgacattgtcgttccctacgggcgcgtcggctactacgagagctggaacttcaaccgcaagtgtctgtggctgcgcgcggcgaacgcaaacaccaatctggcctacacacatattcactgggcgtttgtagaggtcgacccgtcggactggaccgtgaagattgctgatccgtacaatcaatgggaagacttcaaggcactggacgatgtgcggaggattgtctcctttggaggctggggctattcgaccgagccggagacgtacgatatacttcgtcaggcgatgagtccgccgaatcgcaaggcctttgcgacaaacgttgctgcgttcgtcacagagcatgaactagacggtgtagactttgactgggaatatccaggggtatgtctcttcccatcaaatgagctctgttgctgactacgcgcgttcaggccgtggatatacctggaaccccaccgggccttgaaacggatggtccgaactactacaaatttttaatcgtgatgcgcgggcagctggccgagggaatctctttatcaattgctgcgccggcttcgtactggtatctcaaggccttccctattgacctgatggctaaggagctggattatattgtgttcatgacctatgatcttcatggtgagtcaccctctaccggagattccctctggcaactgacgtcagacaggccaatgggatgccggcaaccagtatgcaacagaaggttgcccgacagggaattgtctgcgaagtcacggtggg

SEQ ID NO: 22990 - DNA, 850 bp, Emericella nidulans
ggttatcgcccaccgatgaccttgcctctcaaatcaataagatgtcgctggaaacaacaccggtcaatgatgagaaccaaaaacccacggagtctacggagactgaaacaggaccggtctcagcatcagccccaatgtcctcgaatcccgacgctgtacctgcccctctgtttgctgccaaggagcaaaaccaagcagcggctgttgctacagctgacgccccccaccaggttaagccttcagaggctgtaggcgacatatctgagaaattgcccgcagaggagacccaaggtgattctcaacaatccttgcaccccgacgttcaaatagacacaaatggacagcctgtagtcggcgactatctgaaaatcatgttcgcagaaaacaaagttgttcccaccatactggtgagtgttcaaacattatcgcatctaccaatgctaactatttccttcaggacttctttttccgcttcccctggaacaacttccttcataacgtcgtctatgatgtcatccagcaggtattcaacggacctatggatcgtggatacaaccgtattctagccatcgatgtcttcgaaacgggcagaataacgcaggcaattattgaaggccaaaagcggagcgatgagactcaacggagcaagagaatccgtctcggatatatgggccatctgacactaattgcggaggaagttgtcaaattcagcgagcgccatcctccagagctgctttccacgactgtaatggacaacgtgctcaacccagagtggatcgaatatgttgagcagacactttctgagacgagagagcgtgacaatgctattcttggtggagttcgacctgat

SEQ ID NO: 22991 - DNA, 500 bp, Emericella nidulans
tttccttccgagtgtcaccggcaaattcaccctcgtttcttttctttggagcttaagatttagacagtcttccctccactcgttcttcatgggagctttcaagatgaggttcaagccagcctcaatcctagccggcttcctagccctaacaacaacactcgctactcctacaagagtcgcgcgccagccgacactggtccaacgtgattctgcagcaatcgtgagcaaagtagccgaaatcaacactcaggtcctcgctctgggctctgacatcgctgcctacaccggtggtgacacttccgccattgaggaatcgtcgaatcagctcatcgctgtcatcgattcgggcacggaaatcgtcctggccggcgactctttgaccagcattgaagccctggatcttgtcactcccattctggacttgactagcgacgtggatgcaaccattgtgtcgctgattgagaagaaagatatggtggttgcggcgggttcgggaccaa

SEQ ID NO: 22992 - DNA, 850 bp, Emericella nidulans
agaaacggcccctagtgataacgcgcagcacctttgccggtgcaggctcctacgtcggtcactggtaggaggcattccaatccaactgtcctgaaccagactattgactgcgcgcaggctcggcgacaacgctagcacctggaccaaataccgcatctccatcgcccaaatgctcgccttcgcatccatattccagatccccatggtcggttctgacgcatgtggttttacaggcaatacgactgaggagctgtgctcgcgctgggcaaccctggccgcttttaaccccttctttcgcaatcacaatgagtacgggatggtctcacaagagttttacaggtggaactctgttgccgaggcagcaaggaaggcaataagcatccgatacagtttgcttgactatctttacacggagttccatgaacagacggtcacgggcgagccgtttttgctcccacttttctttgtctatccaaatgaccccaatgtggtgggtattgactcacagttcttctatggggatgcgattcttgtcagtcctgttattgaagaaggtaagacggaggttcatgcttatttcccgggtgatttgttctatgattggtacacaggtcttcctcttcgtggaaatggtgaggtgataacattgacggacattgggtacactgacatcccgttacatgtacgtggtgggaaaattgtgcctgtacggaccgggtctgcggggatgaatacgacgactgaggtgaggaagagcgggtttcggttggtcattgccccaggactcgatggtagggctgcaggccgcctgtacattgatgatggggaatcgttggagcagactgccatg

SEQ ID NO: 22993 - DNA, 364 bp, Emericella nidulans
ccgtccgctataccgcgaccagacatctcaccttcactggtagctgggctccgcaaacgattcaaggatcacacctggatgcgcttcgaggttgttgactgcgagaagaccccttcaagccatctatttgaaagccagcatgtcgttctggcaacgaactgcgtacacgcgacgcatagtctggcggtgacaaccaagaacatccaccgcatgctccgtcccgacggcttcctcatcatgctggagatgactgaggcggtgccgtgggtggattccgtcttcggtctggtggaggggtggtggctcttcaatgacggtcgttcgcatgccctcgcccagccagatgtctgggacaagaccttgc

SEQ ID NO: 22994 - DNA, 518 bp, Emericella nidulans
gctttttacattttaagcacagttcctgtgatgtcttaagtatgaatatagtaaggttggcatccattgtgcatggacaagtcagcgtaatgttgtatattacatggtttggctgttgctgccctgaggcatcccttgcaagctatactagtagttaacacagcctaatatgcagggatttatccagcagcacatccagcaggctggtgatggccaggtgattatatatgctaatatcaagagccaggttgatgctattagctataagctgggctgtgaggtatactatagtactattctggactagataggcatgatacaacagttctagagcagccagacctgtattattgctgcgacaagcaccttagacataggcatcaacatccctaatatctggtgtatgatctatctaggtcagccatggatactgcttaactatagccaggagagtgggcatgcagggcatgatggcttggcaagtaaggctgttattatgcacccccagggctgggatg

SEQ ID NO: 22995 - DNA, 850 bp, Emericella nidulans
agaagtctttgatattcgcatcttccgcgaggacccgggtattttttattcgattgcgaaggatatccttccgactgagaagaagttttcaccaactcatgggtttatccggttgcttcaggataaaggaaaactgcttaccaactacacccaaaatatcgacaatatcgaggccaacgcaggcgtgttccctgaaaacattgtacagtgccacggctcttttgccacagccacttgtgtcaaatgtcagtataaggttgctggggacgaaatttacgatgatataaaaaaaggtttgattcctgaatgcgcacagtgtcgcaagcgcattgccgaagattcgcagaaaccacaaggacagaagcggaagcgcaacagcactagtgctcacaaggatagaagcaaaagtggagaagacagctctgatggggaggactacgagataccaacgccaggggtaatgaaggttagtagacgaaaccggttttacttctggtccggtcactaaatgactcgctcagccggacatcactttctttggagaagatctccccgacgagtttgggcgccgtctcctgcaccatgaccgagacaaggtggacttggtcattgtcattgggacgtctctgaaagttgcaccggtttcggaggttccaggcgtgctgccacctcacatacctcaaatatacatatcccgtaccgtacgtctcagactacagtgctatggattgtgctgctaacttcccacacagcctgtagcacatacgaactttgatatcgatttgttaggcgactgcgatgtagtggtgtccgagctctgccgtagggccggatgggaattgaagcatga

SEQ ID NO: 22996 - DNA, 500 bp, Emericella nidulans
cagccgttccgctgagaaatgatgaacgcattatacttcactttgtaaggtctttcccgccttcgaatcgggggtactgattcctccaggactacgactgtttctacgcctccgtctttgaggccgagcaaccaatactgaaaacgctccctctagccgtccagcaaaagcagatcgtagtcacatgtaactatgaagctcgaagacgaggactgcgcaagcttcagttgatcaaagaagcaaaacagatctgtccagacgtcgtcatcatccttggggaagatcttaccaaatttcgagatgcatctaaagacctctacctcttctttcggaggtctatctggggtgagagagttgaaagactggggtttgatgagatattcatggatgttaccgacatgattacctataatgcaggtttattgaacccgaatgaccagacgcactcatttttccatctggactcgcgagatcctacggttggcttcgcctttatgcca

SEQ ID NO: 22997 - DNA, 850 bp, Emericella nidulans
  unsure (1)..(850): unsure at all n locations
cggtcctagcgttcccagcagcaccngncgcctccccgcttctgagacccccctcctccctgtcattcccactggtgctcagcccactgagactccttccatccctgctggaactcccgctgcccctactgacgtctcccctaccgacaccgagaactccgcctctccttctgagaccccctgtgacaccatcacctccgagagcgtgacctcctacactgtttctgagtctgcctccgttcccgctggcactgagactcctgctgttcccaccgatgttcaccccactgagaaccccgccgagtccactgaaactccctgcgagaccctcacctctgacagcgtgacctcctacactgtctccgagactgcctctgttcccgctggcaccgagactcccgctgctcccaccacgatccagcccactgagacccctgctgctcccagcgagaccccttgcgagactatcacctccgacagcgtgacttcctacactgtctctgagactgcctccgtccccgctggcactgagactcctgctgctcccagcgagaccccctgcgagactatcacctccgagagcgtgacctcctacactgtctccgagactgcctccgttcccgctggcactgagacccccgctgttcccaccaacgtccagcccactgagacccctgctgctcccagcgagaccccctgtgagactatcacctccgacagcgtgacttcctacactgtctcccagaccacctccgtgcctgctatccctaccgaagtctccccctccagcagctcttgcgctggctgcggcggtatcaagaccgtcactgtcaccaagaccgttggcatc

SEQ ID NO: 22998 - DNA, 500 bp, Emericella nidulans
caaaagtttcccagcatactagacgttgcgttatatctcaaacttgagagactcgttcttcatctgctagagaggtctgatctccgaaaccaggataacatatgggaaacaatggctcatgaggcagcagttaatggctatgagttactgcttgacaagctagtcaaacagcccaattgggatctagttgtaaacaagaggagtaaaggaaagccgacgccactttatgaagcagcaaaaaatggtcacaggagaatcgtctcgacgttacttgagaaaggcgctaaagtcaacgagaaagataaatcagagagagtaccacttcacgaagcagccgccaatgggcatgacgatgttgtgcattttttactcgagaatggtgccaaagtcgacgaaggggacaaggcagggagagtccctctccatgaagcagcagcccatggacgcaacgcggtcattaaattcgccggtaaagcagcttaaagggcccagagagatag

SEQ ID NO: 22999 - DNA, 500 bp, Emericella nidulans
  unsure (1)..(500): unsure at all n locations
gtcccctgcggccggtgcagcagacatttcgcaaaatcatccggacaatacactgaacagcgctgcatcctacgatcagagcgaagatatatccctgctagcggaccgattgaagaatctgcaacacgacaatgatgctgtagagaagcagactctcgaggaggaggaagaacatatcgcattattgaaggatctggagaagcagcgagatgacttgaggaaacgggttaaggagaaagacgaggctagcggcgacctcaagaagcatgtcaacaagctggaaagtgttaatcggacggtacaaagcgaaaaggcaaaacgtgagagggttctccagcaaaaggaggctgatcgcaagaaacggaggaacgatcttttacgctggcaagaacaaatgccgcagatttctgcggatacggcgcaggctaggcaacaccaagagcgtctcgaagaggagggaaagaaacaagcggacggaattagagaaaagattgngaagg

SEQ ID NO: 23000 - DNA, 500 bp, Emericella nidulans
aacacgagctgctggtacttttctagcttagtcggaataaaatcgaatttgaactgacgtccctgtagataaaggtgaaagcgcggcgtctgcgggactgacttgcatatccacgagggggagttcggtgcgcaggtaacagccaaagtactactttccacttcccgagtaacttctgatgttccaggacacgaaactgtgggtgtggctgcagcaatcggttcgaaagtggaagggttctccgtaggagatcgagtggtggcagacaactcggagctatgcgagagtgcttctactgtcgccgaggagctgagcttttctgcgagaactttatcgcgcacggggttatgggcgaaggggggttcgccgaatatgccgcctacccagcaaggagagtgtttcccataaaggtcatctcggacgtggacgcaaccttgatcgaacctgcagtctgcgccccgaagccatccagcaattgcgctaatagtcatctctaaaga

SEQ ID NO: 23001 - DNA, 655 bp, Emericella nidulans
gcgagttgttcctcctttcagttcttgtccctgtccttatacttactctcctgaacagctggtgataagaccatcaactactccgtctccgaccacatgctatcacactcggcctatcctctctatcccccaatctcatatggacctgatgaggttggccatgcacctggcgccatgacgccctcagatgtgtcctcgtccatctcaccgcccaacggccagatcggcaacaacaagtacagcacccagatctcgggtgaccacatcgcatccgccctcaaccaggaagagcactctcgccgggccgcagaggaggaccgcagacgccgcaatactgcagcaagcgctcgattccgcatgaagaagaaacagcgcgagcagaccctggagcgcaccgttcgagaaacaaccgagaagaacgccagcctcgaagctcgagttgcccagctcgagatggagaaccgatggctcaagaacctcttgaccgagaagcacgaagcggcctccagccggatgcctccacccccagcaacagacgtatcgctgaatcatccaagtaccaccgtcaccgggagcgggcaaaaacatattcagccaaaaaagaagggcgtcggcaccgacaactagacgctaaatgaagttctgcttatcttct

SEQ ID NO: 23002 - DNA, 850 bp, Emericella nidulans
gaggattcggatttttgactttcaaagaccccaagactgtgaatactgttatggtcaaagagcactaccttgacggaaagattgtaaggcttgctttagcgctttttatgttataatgatcgtatgctcacataactcgcagattgacccgaagcgcgctattccacgtgatgagcaggagaagacaagtaagatcttcgttggtggcgtcagtcaagaggctaccgagcaggatttcaaacaattctttatgcaatttggtcgtgtgattgatgcgactttgatgattgacaaggataccgggcgccctcgtgggtttggctttgtgacatttgatagtgaagccgccgtcgaagcagctctttcgcgccctctcgagattcttggtaaaactatcgaggtaaagaaagctcagccaaggggtaacctacgcgacgacggagatcgtgggcgtcgcggtagagactttagggatggcagtcaaggtggctcagatggttcccagcagcaagcaggggcccaggggcaaggtgtcatgcccggcgggctcactcctcaaatgatggcgcagtattggcaacgcatgcagcagtactttgctttgatgcaacagcaaatggcagtagccgccacacagggccaaggaatgggcgctatgggaatggctggaatgaatcctgctcttatgcagcaaatgcagatgaagcaactacaacagatgcaaatgggaaataatcagcagtcgccgagcatgagtcctcctgctcagagcccgaccccgcagtcaatgcagaatatgatgaaccctgccatgatgcagcagatgcaacagcaaatgccaaatcaagga

SEQ ID NO: 23003 - DNA, 850 bp, Emericella nidulans
cagatgataaaaccgaaagcatctatggagcgaaaagtcctagataagaatgcagctgcggcccagaaagcttcatcagcaaagaaccatgcgccgcccccaccagcgctagtcgtggagcccggagacgacggggagcaatactcaaccggtgctttcctcggcaagggggggtttgctatttgctatgaagggactctgttgcgcaacggtcgtgtctttgcaatgaaagtcgtaaagtctgacatgggccagaaaaagatgcaagagaaggtacggtgtagatgaacatcgacttatagatagaaggctaatggttgtgcatagtttcgaacagagctgcagatacactcaaaaatgcgtcaccctcacatagtcggctttcaccgggcattcgtttacgaccagtgcatatacgtgatattagagttatgtcccaatggatcagtgatggacatggtgcgaaaaaggaaatgcttgagtttgccggaagttcgacgattcatggtccaactctgcggtgccgtaaaatacctccacaagcggaatgttgcgcatcgtgacttgaagatgggcaacttgttcttggaccgcaacatggacatcaaggtcggagattttggattggcagccatgattatgtcggaaaaggacgagaagcggaggaagacgttatgcggaacacccaactacattgcgccagaagttctcgacagaagcaagggaggccatactcagaaagtggatatttggtccctgggagtgatctggtaagactatctgaccccagatgcttgtattaaggaggcggactaaatgtgtgactttccttaggtttgcagtgcaaacg

SEQ ID NO: 23004 - DNA, 697 bp, Emericella nidulans
aattttacatggcaaggcaaatgtagcttgggaccgtctccagtatacacgatcaatgctaccgagctggaggaactggttgctggtatctcttttgcccgagtgaacaatgtccgtctggttattcgaaacactggccacgatctgctgggaaagtatgtttccacagcctcgctctcctgcctccctaacaaagctttaggtctacgggatacggatctctccagatctgggttcggtatcttcgcaaagggattctgttccaacctaccttcaacctctctataccctgcgcagcatgcaactggaccggcgcggcgtttacggtttccgggggctacatttgggacgaggtttatgaggaagcatttgtccgtgacctgatcgtggttggaggaggcgatccggtgagatctcattccatcctattttcgcggatatgcattgatttatttgtaagactatcagtgtcattggcggctatattcagggtggtggccattcgccggctactcacgactttggccttgccagtgaccaggtgctggaagcccaagtcatcctcgccaatgggtcaatagtcgtagccaatccgtgcatcaaccccgatctattcacagccctccggggcggaggtggaggtacatatggcgtagtcatatccgttaccatcaaggcgcatccttccagaccggtt

SEQ ID NO: 23005 - DNA, 850 bp, Emericella nidulans
cattgtctcgtcttctataactggggctatgcggactgactccccgtcatcggatcggagtctggagcgtaagcgcagaagcctggtgcttccgggcctgtccagctcgccacggcgacaacattcgccagctagagtgtctggacctcattcgccgctgcgtatgcctaagccgcgtctttccactggggctgagagtttatcatccccaatcgtatcgccctcatccaatctaggcgagttggctcttcatcattatcgacatcaccgccgtcaatcgtcaacgacatcctctgatttgcccaggccgcctgtttcacctcatttaacgactgcaagccaaccccaaccacgcccgtcacctccatccatcaaagactttgaaatcatcaagcccataagtaagggtgcatttggcagtgtttatctgtccaagaagaagacgactggggagtactatgcgattaaagtgctcaaaaaggctgatatggttgccaagaaccaggtcaccaatgttaaagccgagcgagcgatcatgatgtggcaaggggaaagtgacttcgttgcgaagctttactggacgttctccagtaaagactacctttacctggtcatggagtatctcaatggaggcgactgtgcttcacttgttaagatcctcggtggcttgcctgaggattggacaaaaaagtatattgccgaagttgtcttaggcgttgagcatctccacagtcgaggcattgtgcatcgcgacctcaaacctgacaacctactcattgaccaaaagggtcatctgaagttgacagattttggtctgtctcgtatggggttagttggtcgtcaaaagcgc

SEQ ID NO: 23006 - DNA, 500 bp, Emericella nidulans
  unsure (1)..(500): unsure at all n locations
caatcagattgaccagccgtcacagcttgacgttagttatgtcgctcagcgcacacatccaacatctttgcgtcaaatccacgggacctttgctctggcaacagaagacttggtcaggaatattacggaggctgagccgtatgagcctttctgggagcatctccgtcgcttgattctgcgccgcaaagggctcattactctgcataaacttgccgatttctgtcctcgccttgaagaattggacgtctcagagaatgatattggtcagttgggcggcgttccatcaacactgaggaacttgaaaatccagaataactgcctctctaatcttacaccatggggacacttaggaaacctgcagtatctggatatttctgggaacgaactggagaacttggatgccgntggtggtctcattcacctcaagaattgatagcggacaacaataatatccggaacggtgcaggagtcttcgggctaaaccgacttttgactctgag

SEQ ID NO: 23007 - DNA, 500 bp, Emericella nidulans
cacggcaatggagagtctgaacgatatcgtcggggcggtatacagttttctatccatcttacttgtctgaataatgcttacaaggccagatccctccaacaaatggctggattctagagcttggctacggccatagcgcggacggatttaaagtgggctaccgggtctacatctcgggcgataccttgatgtttgatgagctcaacgagatcccgaagctatacggagagcataatattgacctcatgataatccatctaggtgctgccatggtaccgtcaccatcgctagcaccattcaccctgatggtcacgatgaacgcaaaacagggggtagagctgatgcagttggttaagccggacatcactattccagttcacttcgatgactatgatatcatgtcggagtcgctggaggacttcaaggcggctgttgcaaacgcaggcttgggctgtggtgtcgtgtacctggatcggggggaggagtaccgcttttccgta

SEQ ID NO: 23008 - DNA, 850 bp, Emericella nidulans
aggctggggtatgtgagtatgcccttcaatattgtattcgtgcttccatctaatacgaatgtctttgtaggcctgcctcaatacctacctaagatactcgaacccgcccgttttctgttcccgcacctgtcgtatagcctctatccttgagaaccgacatccgctttccgatccttcacagccgccgcatgccaccaagaaccggccggaccggtcacagcctgctgacatcgcacgaggccaggcccatgtgcaagctctgggattggcgaatgctcgaaatctaatgaaactgatacgctggaatgatcggtacggaatcaagtttatgcgtatcagcagtgagatgtttccatttgccagccataaagaatatggatacaagttggctccttttgcctccgagacgcttggcgaagtcgggcgtcttgtcgctgagcttggccatagggtgactgtgcaccccggccagttcacccagctgggctccccccgaaaagaagtgcttgagaactcatttcgcgatttggagtaccattcggagatgctgcagcttctcaagctgcctgcgcaacaagaccgcgatgcggtaatgatcctgcacatgggtggtgtcttcggcgacaaggaggcgactttggatcggtttcggcagaactaccagaagctctcgcaggacatcaagaaccgtttggttctggagaacgacgacgtgagctggtcggtacatgatttgcttccaatctgtgaggagctgaatattccgctcgtcctggactatcaccaccacaatatcatcttcgactcttcccagctccgagagggcactctcgacatcatgaacctttac

SEQ ID NO: 23009 - DNA, 850 bp, Emericella nidulans
cgttattatggatgaagccgatcgtatgatcgaccttggttttgaggagccggttaataagattcttgacgcgcttccggtcaccaatgagaagcccgacacagaggaagcagaggattcatcggccataacccgacatctgggctcaaaggaccgctcccgccagacccatgatgtacacagctaccatgcccactgcggtagagcgcattgctcgaaagtacctccggcgaccagcgattgtcaccattgaaagcgccggtgaagctgtgtacactgtcgaacagcgcgtcgagatgttcgccggcgaagataagcgcaagaaacgcctcgaccagatcttatcgtctggcgccttcaaacaaccgatcatcgtctttgtcaatatcaagcgcacctgcgactcaattgcgcgcgacattaaacaatggggcttttcttctgttacactgcacggaagcaaaacacaggaacagcgtgagaccgccctggcttctgttcgcaacggctcgacggacgtcctggtcgctacggatctggctggacgtggtatcgatgtgccagacgtcagtctcgttatcaacttcaacatggctacctcgattgagagctacactcaccgtatcggtcgtactggtcgtgctgggaagagtggtgtggctatcacattcttgggtaacgaggatgccgacgtcatgtacgtttcttccctccttgcttactatacgactatgctaactgtcacaggtacgatctcaagcaaatgcttatcaagtcgcccatttcccgggtgccggaggaattgcgcaagcacgaggccgctcaatcgaagcccacacgcggagcggga

SEQ ID NO: 23010 - DNA, 608 bp, Emericella nidulans
gcccttagaaatggtatttatcgacgaacgctctacaattaagccaacatttagctttaggagctgaacgtcaaatatggctgaagagcagagctctgacccagttcgacttgacgggcgaaagctggaaggtggcggccaactggtccgcatagcagtcgcattgtccgctctaacaggcagggctgttgttatcgaccacgttagaggcaatcggtccggaaagcgaggcctcaaagcctctcacctggccgcgatcaaggctctcggggagctgagcggcagtacactcgtcaaagcccaggtgggctcatgctcagtgggattctaccctcctccacaagagcaaggacgacctcctcagaccagttccgacatcaatatccgcctgccgactccggggtctgtcttcctagtgttccaggctctgtatccatatctcctgtattccgactcggcagagcaaattcgtctgagcattgtcggcggtaccaatgtatcgtcgtccccgtcatacgactatgtttcccaggtgctgatccctaatttcgcaaggcttggactgccgccgatttccgtgcgattggaaaagcgtggttgggcatcga

SEQ ID NO: 23011 - DNA, 498 bp, Emericella nidulans
cgactaccagactgacttccagatcattatggatctgctgctctctgaggacggtcgtctcctcacgcgcgctaagacctcacccagggtcgcatccccatctacttctcccagggtgacttgatcatgcctacagaccacaaaggccccacccgtcttacgcagggtctctaccgtatctccattgaagcgcagtacaaggccctgaccggcctcgatcttgagcgtgtcgtctacggcaagcccgaagaagccacctacaagtacgcagatgaggttctgcgatcgtggatggagcaaatccacaacgagaacacactccctgagaacatctacatggtcggcgacaacccagcctccgacatttgcggtggaaacatgcatggctggaacacctgccttgtccgcaccggtgttttccagggcggcgacaacgacgagacgaaccccgccaacttcggcgtcttccctaacgtccttgaggccgttaaggccgct

SEQ ID NO: 23012 - DNA, 626 bp, Emericella nidulans
aagaacctcttaggtaccacacgagctcggccagcggctacaggggcagatgcgcccgacggtacatacaagggcgcggcgaactaccaatcgtttattcagaaaaatcccaacgctcctgctaagacgttcggtccgattaaagcgcccaccaatgtgcgaacagtaacattcatggattatgcgcccgatgtttgcaaggactataaactcaccggatactgcggttttggagattcttgcaagttcagtcatatgcgtgaagattacaaacaaggctgggagttggatcgggactgggaagtcagcacaaagggcaagaatctgggcggtaaagtggtatcccagagagggggtcaagctggcgaggatgaagacgatgaagaggaacaactcgagaacattccttttgcctgcatcatctgcaagaaaccgtaccagaatcccattgtcaccaaatgcggacactatttctgcgagtcctgtgctctgcagcggtatcgcaagaacccgtcgtgtgccgcctgcggagccgggaccggtggagttttcaacgttgcgaagaagcttaacggccttcttgagaagaaaagggagcgtgcacgacaacgccgggagcaggccat

SEQ ID NO: 23013 - DNA, 850 bp, Emericella nidulans
gtgggtggtaccatgaagcgggctgctctgcatcagcttcaacgggagggttgccatatccttgtcgcgacacccggcagactcaaggatctcctcacggatcccactagcggcgttagagcgccgaagttgaacacctttgttcttgatgaggctgatcgcttgctcgatgaaggctttgctcccgagcttatggagattcaacatcggcttccggatcccgcagaggttgatcgccagaccctcatgttctcagctaccgtggcccctgaggtcatgggaatggtccgcagcaccatgaagcgcgacttccgattcgtcaagtgcgtccgggacgatgaggtccccacgcatatgtcggttccgcaaaaggcagtgattctgcaaggtctcgagaatgctatgccaacattgctagagctggtcaagaaaagctatgatccacggagcacattcaaagctattgtgtacttcggttctaccagagagacaaatactgcctttgaagcgtttgatcagctactcgtggacccggccgacccgggaagtggacatcctctcggtaaactgtttctcggtgagatccattcacgcctgacacaggctcagaggactcgagtcgccaactggttccgaaagtgtcaatctggtatccttttctcaaccgacgtcaccgcccgtggtatggatttcccaaatgtcacacacgttattcaaattggtgtacccaagacccgcgaggactacatccatcgtcttggccgaacagcccgtgcaggtaaaactggtcaaggctggatcttcatacacgagcagcaaatgggcactcttaggaaactgctcagagata

SEQ ID NO: 23014 - DNA, 850 bp, Emericella nidulans
cgacccccataaagctggctacacgggcccgcagtcgggcgtggccgctctgaagttcctacagtccctccctctctatatccctcttggcagtttcatcccggcttcgtctttggacgacgaagatatctgtgactccggtcctccgcggaagcagtcagaggttgcacgctatctcgatgcttatttcacattctatcaccctgcgtatcccatcttacatgaagggacattccgtgcacgggtatcaggtgggtaggctcatgtaatggaccagcccgtactgacagcgttaggtgcactagctaaacctcacgatggttcatggccgttgctatataatatcgtcctcgccataggcgcctttgccggcgactcgaacggtacgaagatggatattgtcttcttcaaagaagcacggaaacacctgtcgatggatgtactggagaaaggatcgctgagctacgtccaggcaatcgtcttgatggcaaactacttacaaaagcggaacaagcctaatgctgcctttatactggtcggcatcggcttcagtatggctctcgcgattggcctgcacagggagtttgggatgccaagcacatcccctttcacgatggaggtccggcgacgggtgtggtggacgctcttcatctttgtctcgggcgtccagttgatcctgggccgtccggcagtctcactcgtcggggtaaatgttcggcttccagccaatgtagacgaccacgatctggcagtagacatggaagagctccctgagagctcgacggggccaactatcacgtcctgtctgattgcacaggtcaaacttgcgaagatcgcgaatgctatccag

SEQ ID NO: 23015 - DNA, 546 bp, Emericella nidulans
cctgcgttaaccgcccagtttcaacagacgccaaacgtccatcatagcgcactcgtttgaggtgttcatcttcatctgctatttcttctacgacggtgtcctgaacgcctcagcccatcgctagctcggccgaaatcttccagtataccctgagaggtcggggaatgacaaccaactttgtcgggacctatctcggcctagtcaacggacagttcctcaatcccagtgccatggaagacatgggctggcgatattatatcgttttctgcgctatcttgttcgtcatggtggtcgcaatttacctctgggttccgccaaccaagggtcgcactctgaaacagatcgcagagatcttcgatggccctaaaaaacatctgactgcaggcgccgctgatgagaacaggacacgactctcgacaaagacagctgaagtggagcttagggaggatatagcaactcgaggttaaggatgaaaggtgtcccgagtccgacccgcttcttacgatggcgctgccatgacttccttcccccaccgcctggcctgct

SEQ ID NO: 23016 - DNA, 850 bp, Emericella nidulans
ccaagtcactcggtatatatctgtccttcccccatctggtaatctgtactaagatgcgcgtctcgcaggtaacgatgacatggttatcaaggctcaggtccttgccggtggtcgtggcaagggtcactttgataacggcctcaagggaggtgtgcgcgtgatctactcgtgagtctgagctcctaactccagcttttctgcttgactaacttggtttgtgtctattcagtcccaccgaggccaagatgtttgctggtcaaatgattggacacaagctcatcaccaagcagactggcgccggcggtcgtctttgcaacgccgttttcattgtcgagcgcaagttcgctcgtcgcgaattctaccttgctgtcctcatggaccgcaagactcaaggtcctgtcatcgttgcttcgtcgcagggtggtatggacatcgaggctgtcgccaaggaaaaccccgatgccattatcacgactcctattgatatcaatgtcggcgtgacggatgccatcgccaccaagattgccaatgagctcggtttctccgagcaatgcgttgatgacgccaagaagaccattcagaacctttacaaggcctttatggagaccgatgctactcagattgaaatcaaccctctgtctgagacttcagaccaccaggttttggccatggacgccaagttgggcttcgacgacaacgccgaattccgtcagaaggaaattttctcatggagggacaccacgcaggaggacgctgacgaggtcaaggccgctgagtatgttcattcaatctgttcaagaaactctctaaccagtatagcacggcctgaactttattaaacttgatggtg

SEQ ID NO: 23017 - DNA, 850 bp, Emericella nidulans
ctggctttgctatggggcttatagcaactgctaaagtacttgctaggagtaagatgccaggcaatccttatctaattcagccaggaaaccgtgaatgggtaactacaattgaatgtatcaacgccatgggatggtcggttccctccaccattatcttcaaaggaagggtctttatagaaggatggtatgcagaacatggcttgccaggtgattggaggatctagttaagcaatggatggacaacagacgagataggccttcgctggcttcaaaattgctttattcctgccagtactcctcgtacgattggccgatatcgattgctcatcttggacggccatggaagccatctaacacctcaatttgacaagctctgtgaggataatggcataatatctctttgcatgcctgctggttcatctcatctactacaaccactagatattggctgttttggtccgctaaagcgtgcatatggaggtcttattgaatcaagatcacgccttggcaaacaccatatcgacaagtttgactttgtaggggcctatccccgtgcatatcagagtatttttaatgagaagaacattcagagcagctttgctgccgcagggatagagccatatgacccagatagggttctcagcaaacttcatgtatcgctttctacaccatctcccccctggcatcaagcaggggttctagtacatttgctacaccccatacagttcgacaactgcaccgaaagactctattgcttcagaattctatagagagggcctctaaggcgcttgttgaggatactaataaccatatagagcagttgcgaaaaggctttgaagttgctttatat

SEQ ID NO: 23018 - DNA, 500 bp, Emericella nidulans
catcgaccactacctacttcccacatcccacgatcaataccttcgcagcacgcgtcctccctcacatccgtcataaccgcctgccacaccctcatcagcctatttctcagcgagagtcacgaacctaattccctcctcgcgcgcgtgcagcatcaaacccgcatctcactacaaataatctccgacgccctaacgcaatacgctctcgacgagattgcgctctcctataatggtgggaaagactgtctcgtgctcctaatcctctttctcgcagcactgcacacaaaactcccgatcgacgaggccaaaaggcccttgatccccgctatgtacgttgctgaagcagatccattcaccgaaatggaagagttcgtgaactggtcaaagcagatttaccaccttgatttggcgcgatatacaaagaatgcgaacacgacgctcaagtccgggtttgaagattatctaaacagaaatccgtccgtccaagcgatctttgtggg

SEQ ID NO: 23019 - DNA, 557 bp, Emericella nidulans
gcgctccattacatcctttgcccaaccctccagccgaaagacagcatagccctccttcatccaccatgaaagagtccgcaagtgtgaaacaaacaacctccacaagacaatcgcccgctgaaccgcaatccagcacatccgggtatgtgtctgactcagctgccgctcgctctagtcatgtttctccggctttgagccgcagctcaaaccgtgaaagcgacacgccttcttctccgggaccaagcgttgccgagagactggaagaaaagctaaagcttcgtcgggagcaacgcgacgttcctcagaattctctggctcagttcaacgttaagcagccgataaactcgaactcttcaacctcccagagcccagaacggaaggctccgccaggcgcctggccctcagacctgcgttctgagtcgtcttccagcagcctcaccgagtttcctgctctcgagcagtcgtctgtagaaacgagacagcatactaagacagcacctctgaagtcggcgatgagatctcagtctttggaccgaaaccaaccagcatctaccaag

SEQ ID NO: 23020 - DNA, 850 bp, Emericella nidulans
ctcacttcgtctttcgacgagatcctgccttctgcaaagcgtcggcgcactcagcgcgctatcaactctgaagacaagacccttcctgcaggtggaacagagactcccactcatagagccttttctgagccgtttcaggcaccaaattcgcacagttctgcgagagcaacccgtgctggcaacctgatacagcccaatactcagggctcacagttacataccgcttctctcccagaaactgacccagagactccgtcgaggtccaagtcaaaaacccccgcttcagaaaaacctcgatctgaacgaaccatcacccccaagcctcaaacccggcaacagacgacgactgtcaaacttgaatcagataaagatactgtcaaagactcgccgatgggcgctgccatgtctcattctcgcaaggccagaaaaccgttgcccactcgaaacgatgggtctgcggaccaggagaacgccgctactcccaccgagtcttccacatcccgtgcggcgagccctcagtcttctcgccgggatcgaaaatcgaagctcgctactaatacggctgcaaagatcaagtcgtcgccagctgcaaagactcaatccactcctacatccgccgccaaggataaaccggtactcaacggaacagccagggcagcgacacccgcaaaaaggccagaagctgcgactccgggcacgtccacgaggccccgccgccgcgatcgcaaatcaaccaaagccaacggccaaactccagactcgaagcgggagaccgcaacttcagcctccacagagactcgggacgaagacgttcaatgtactcagtctcaatcacctaacaagcggagca

SEQ ID NO: 23021 - DNA, 625 bp, Emericella nidulans
aggcattcatccccaaactgtggaacaaattatcacaaatactacagagtatatccgtacacacccctctagggtctccgattatagctatacgctcgcttgtcgcagagagagattccttaccgtgcatttgctgttgggtctatggagcagtgggatatctcgcaggtccagtgagcaacatcgcctcctgacctcatctggtattcactggccaaggcgccaaatatcctggtatgggacaggagttattagaaaacaatgcgattgcgagagataccgtcaatcgcctcgaccgtgcactggacgagatcgaaccaacacgaacatggactttatatggtaatccgccttcctgatgttactccctgttctactagacccaagctgatgctttgattgatgctatttcctctcgcagagaaactcttacgagcagaaaactattcaaacctaggcaaggccgagtatcctcagccttgttgcaccgctcctcagatcgtactcgttggcgttctgaagtcgttgaacatccatccctttgccgtaaacgcacactgttatggggaatcgctgctgcacatgctgttggcgctctctccgccgcagattctatctccgtggc

SEQ ID NO: 23022 - DNA, 827 bp, Emericella nidulans
ggagacgctctcaagtttggcattctcggagcggccaatattgcgtacgtatgaggattcacagactctcatgtgtgaagtcggacctaacgtgactgactttccgctcagaccactggctctgatcactccggcgaaatctcatcctgaagtcatcgtccaagcagtgtcggctcgtgatcggaagaaggctgaggagttcgcaaaggcccattccatcccggaagtcagagattcatatgagggtagagaacccccaaacactaaccccagtgatttgtccgctgacgagccaagacattctcagcgatcccaacatcgactgtgttttcattccgctgcctaacggcctacattttgaatgggctgtccgagccattcgggccggtaagcatgtgctggttgagaagccatcagtgtccaacgcgaccgaggcggagatcctcttcaacctcccagagttgtcgcagccaaatggtcctgtcattctcgaggcatttcacagtcgcttcttcccggcttggtcctacttccgctctttaatcgatccggccaacattgagcatgtcaacgcagtctcgatgatcccgtggtgggggaccagtaaggatgacatccacttcaactacaacctctcgggtggaagcatgatggcgatgggcacttacaacatgcgtgcgctgcggatggcctttgacgctgagcctgaggagtgtctcagttgcgaggtgcatgcatacacggacggggtccatgataagtgtgattatgactttcatgcaacgttccgatttcccaacggtgctatcggagaggcttcaagtacg

SEQ ID NO: 23023 - DNA, 661 bp, Emericella nidulans
cgacacgaaaccgccgggaaagcattcggttgcgttcttggaatgcgcagttgagaaagtgcgcgctgccgcggaggcgtccacgcagagatacaaggatggaaagcctctaggacctctggacggtatcccagttacggtgaaggatgaggtgcatatggacgggtaccgacggactctgggaacgaagttggacttcacgggcgagtttgcggggtctacatcctggtgcgtcaaaaagtgggaggaggcaggcgccatagtcattgggaaatccaccatgcatgagctcggcttgggtaaatctgcggttggcccttggactacagaacaactaagctgaccgcgagcagatacaacaaacaacaaccctaactttggtacaccaaagaatccacataacccgaactactactgcggtggttcctccggcggatcaggttacgccgtcggcgcaggtctagtccccatcgctctcggcgcagacggtggcggttcaatccgtatcccctcgtccttctgcggcgtctggggtctcaaaccctcccacagccgcgtcagtggttttccaaccgtcggtctcgcctcgacggtcggcgtgctgggtcccattgccgccagtattgacgacttagccctagcctatagaattatggcggcg

SEQ ID NO: 23024 - DNA, 850 bp, Emericella nidulans
atcagctagaggtcatgagaagatagtgcaaattctacttgatcatggggctgacgtcaatgctcaaggcggaaagtacaggaacgctctactagctgcatcagttgaaggccatgggaagatagtccatatcctgcttaaccagggggctgatatcaacgctcaaaatggatattatggcagcgctttccaggctgcattggtccaaggccacgagaagatagtgcaggtcctacttcagcaggtggctaatgttaatactcaagacggaatttatgccaatgcactgcgggctgcatcagctagaggatatgagaagattgtgcagatcctgcttgacaagagagctgacgtcaacgctcaaggcggagagtacgggaacgccctactagctgcatcagttgaaggccatgagaagatagtgcagtttttgcttgagcagggggccgatgctaatactcaagttgaatggtatggcaacgctctgcaggttgcgtcgtccaaaggccatgagatggtggtgcagatactacttgactatggggctgatatcaatgctcagagtggacgatatggcaacgctctgcaggctgcatcggctgaaggctatgagaggacagttcatatactgcttgactatggggctaatgtaaatgctcaaggaggattgtatggcaacgctctgcaggctgcatcgtcccaagggcatgaggaattagtgcagatattgctgcaccagggtgctgacattaatgctcaaggtggaagatatagcagtgcactccaggctgcatcagctgaaggttttgagatggtggtgcagatacttcttgatcaaggtgctgatgtc

SEQ ID NO: 23025 - DNA, 423 bp, Emericella nidulans
gagcttggggggcatcgactgcagttggagggcaactacttccagcctacgatcatctctgggatgtcggcctatatgttgacaacccaggaggaaatattcgggcccctccttggtctgtaccggtttgaaactgaagaggaggctgtccgcatggcaaacgatacgagcatggggcttgcctcgtactttttcaccagggatgttagtcggacgtggcgactgctagagaatctggaagcgggcatgatcggaatgaacactggtaagtgatacacaaattcatgtctattatctcttgaacgcgcaacttatgagattccaggcaattcgtcagcggcggagtcaccgtttggtggcatcaaagcgtcaggatacggcaaagaagccggcaaagatgtggctattgaagagtatctcatt

SEQ ID NO: 23026 - DNA, 711 bp, Emericella nidulans
atggcattcggaacgatctacagctaccccaacaaccctcgggtctccaaggtacccctcgccgatcccaccagactctaggatgaagagtacaatgctaatggtaatgtatagatccaagccgttgcgaacctgaacggcctcactatcgagagcggttctttcaaattaggcgtcgacaacaaatcagaggagttcctgtccaagttccccctcggcaaggcgccagccttcacgtccgctgacggggtcaacattttcgagtcgaacgcaattgcacagtacctcgccgagaatgggcccgcaaaggagcagcttcttggctcgacacccgccgagcgcgcaacaattcagcaatgggtcacaatggcggagacggaggtcgctggccacgtcgttacgtgcttcctcccgcgggtcgggctagtcccttataatgcagagacggataaccaggcgctggagaagctagagcggactttgggggcattggaaagacaccttgctggacggacgtggctggccacgcccaagcagttgagtcttgcggatatcgcagttgcagcgtcgttggtctggggatttacatttgttatcgaccaggagatgcgggccaagtaccctggtgttgtggactggttccgggacgtgacgagcagcgagggtgtcaaggaggcatttggtgagacaaagttcattgaaaagagggag

SEQ ID NO: 23027 - DNA, 643 bp, Emericella nidulans
tgtgactctatcgagcgtattgaccagaggtacgaccctcccccgaaccagaatgtcatacgctcacgttacagacccctggaatcgccaaacgaccttcatagcggcgatctgacctatcgaatgttcgacgttggtggtcagcgttctgagcgaaaaaagtggattcactgcttcaagaacgtcaccaccattcttttcctggtcgccatttccgaatacgaccagctgcttttcgaagatgagactgtaaaccgtatgcaggaagctctcactctgttcgactccatttgcaactcccgctggttcgtcaagacctcgattattctcttccttaacaagatcgaccgctttaaggagaagctccctgtcagccccatgaagaactacttccccgactacgagggtggtgctgactacgccgctgcctgcgactacatactcaaccgcttcgtctctctgaaccaagcagagcagaagcagatctacacacatttcacatgcgccacagacacgacacagatccgatttgtcatggcagctgtaaatggtaagctattatccttcacagttggttcttccttcgctaatgctctcggtagatattattatccaagagaacctgagactctgtggtctgatt

SEQ ID NO: 23028 - DNA, 765 bp, Emericella nidulans
ttatgaagagccgaccgaggaggagctcaagacgctccgccgcatccccggcgccctcccgaccgtcgcctaccttatctgtatagtagaattctgcgagcgcgcctcgtatctgggagtctccggtctcatctccaacttcgtgaaccggcctctccctgcgggaggcaatggttacggcgcgcctgcgcgcgggacccaggacacggctggtgccctgggcatgggcaccgtcaaggcgaatgccgtcagccagtcattcagtatgctcgcgtacctgctgcccatgttctttggctacctctccgatgcgcacactggacgtttcaagatgatcctctacggtgttgcggtctttggtgttgcgcacgttctcatggtcggtgctacggcgcccaaactgctggccaatgggggtgcaaaggcgccgtactttatctcactgtatatgctctctgtcggtgcttgtatgttcaggtttctcttttcccattcaccctttcatcccagaaccctgcccatatctggtactaatctgtgcagccatgttcaagcccaacgtatcccccctcctcctcgaccagatgcctcgcgataaagccaagatcattgtttttcccagcggcgaacgggtcattgtcgacccggaggctacttctgagcgaaccatgctatggttctacctgctcatcaatatcggcggcttcatgcaaaccgccacctcgtacggctgagaagcccgttcagctggcggttggctcccat

SEQ ID NO: 23029 - DNA, 850 bp, Emericella nidulans
tctttaccgttccccgatcgtttcgcacataaggttcgctcgcatcatagctatttagactctgtgacgccgtccagctcaaggactaataaactggctgcagaactggaaagtacgaaaaggaggatacgaagatgccaaacagcaattcgagaagacgggcgacgaatccgacccaatttttgcacaatttcaagacgccagtttatggaaaggcgcagttacagactctaacgtcgctgcgcaacaagatgggttagcggcatactgtgcgttcctgcagtatggcggcccggcaggctgcgcaaggtacttatttccagtcttcagtatccgtaactgtcagtgttgcgggcgtgaacatgactgacatcattgaaggacgcgcggagccacagttcctggtatcgttgagaaaggcctaccacaaaccagacccgcggcgaaagcaagcgcgctcgaggcgctactcctctgcgtcgagttggataaaccggaagccgttattgaagaaatcttgcccgttctatcacacaaagtgccaaaggttatcgccgctacactggctggtttgactgccatttatcataattttgggtgcaaagtcgtcgatcccaagccagtgttgaaagctttgcctaaggtgttcgggcacgccgataaaaacgtccgtgcggaagcacaaaacctcacagtggagctgtatcgatggctcaaagaagctatgaagcccgtattttgggctgaactgaaacccgtccaacaacaagatttagagaaattatttgaatcagtgaaacaagagccacctcccaagcaggagagacttacccgagctcagcaagctgaa

SEQ ID NO: 23030 - DNA, 636 bp, Emericella nidulans
ctctgagttgattgatgaaatagggatcgtcaagatcttccgatgtttttctccagacattgaaaccgcgcggatttgtatcaaggtaccgagtacaagggagggcttgatagcgtgtcggacccttgagatggcgggcgttcgtacactggccacgactctattcacgtttgtgcaagccgctctcgccgcagaggttggctgcacatacattgcaccatacgtcaaccagctcaaagtccatttcgagtcggggtaggtcttcgttggcatccaccacggttaagcttgattaatattgcgtttgttagattcgtggacccgcagaaattgctgcccctctgtgtctcggcccagaactactacgaggccattggcgttagaacacaagtcctgcccgcaagtttgacgtctaccgacgaaatctttgccctagctggcgctcatcatatcacgatagctcttagtctgttgcagcagctttcgttacccctttacccgcgtctttgttcgactctgaaccgccgagtccaagtcccaaaataatctcttatgtcaatgacgaagctggatatcggatagcgttcagccgttcggagaatgggacgggcaaaaaaaaaaagctcatacaggtat

SEQ ID NO: 23031 - DNA, 500 bp, Emericella nidulans
aaagatcatgtctcactcgctcaggtagccaacggccgctctgcggacgagatattcaccaggtctggcgcaactttggatcggtctcattggccttccctgtctctcaattcagtaacagatcccagtactgaatttggcggcaagcatccgacttggaaagttctcaagacccaagatgccgttggtaaagacgagattgttggcgaaatcacaggcaagattggtctgctacgagactattgcctcgatcccggtaatcgttggcaagagttgcgacaccccgagccgtttgtctttttccatccccagcttccgatttacatcgacagtcgacaagaaggcagtatcctgcgttacgccaggcggtcatgtcgtcctaatgtgactatgaagacctacattacgaatgatgtggaatatcacttttgctttgttgccaaagaggatatcgcaccggattcagagattacagcgacatggtatctagatccccagtt

SEQ ID NO: 23032 - DNA, 693 bp, Emericella nidulans
gtgaaagaaagcagggcttcactgaagatgaaactatgggaaatctctttatctacctgctggctggtccgtctgctcaaaacctggaacaagctctgttttgaactctatgtgctaactttgacacggcgcacaggatatgaaaccaccgccaatgccattatatacggactagctgttctcgcccttcatcaagacatccaggatcaagtaatcgaggagattgatcgtgcacacgcccgagcccaatccgcgaatcgatcggagctcacctatgaggacgatttcgagttcctcgagtacacttacggcttcatgtatgaaaccttcaggttgttcccgggtgtcactctcattaccaagatgatccaccagcccgaacgcatcatcactgatggacctgacggatccccaaagtcctacgacctgcctgccggaacccgagtctatctcaatgctccggtggttcactaccacccgaaatactggccagaaccgtacaagttagatcccaaccgctggcgcagctctcaaggcgaaaagcacgtcgttgcctcggataggacccggcaaatgaaaggcacgcttctaacattttccgacggctcacgagcctgtctcggacgcaaatttgcccaggctgagtacgttgcctttttcgcgaccttgctgcgccagtcaagcgtgagactc

SEQ ID NO: 23033 - DNA, 533 bp, Emericella nidulans
aacaagaggagcctcgattatgtcttaaggagtggactcgctggagggctggctggttgtgcggtaagtttgacatctcaccgtcagacggagcagagatagctgacaagcgaacttgaaggccaagacagtggttgcgcctcttgatcgagtgaagatccttttccaagcgtcgaatcctcagttcgccaaatatacaggaagttggactggacttgtcttcgctattcgggatatcaagcggcacgaaggtgcccgaggcctgtaccgaggccactcagcaacattacttaggatttttccttacgcatccatcaagttcctcgcttatgagcagtttcgagcaatagttataccgtcacgggacaaagagactccatttcgtcgccttgtctcagggagcttggcaggcattacctccgttttcttcacgtacccgttagagttgataagggtgcggctagcgttcgagaccaagaagtcttcgcgttcatcccttgtggataccatccgacaaatctatggagagcaag

SEQ ID NO: 23034 - DNA, 850 bp, Emericella nidulans
ctgtatcgctaatggagctcgcgagcaatcctatcatccaattgttgcgtgcggccagaatggggccactcttcactatgggaagaacgacgaggacttaatcgatccggtgaccaaccggagaaaggacaacgtcctgatcgatgccggtgcagagtaccgcacttactgtgcagatattacccgtgcatttcctctcaatggcaaattcctaccagaaacccgccagatctatgaaatagttctgcggatgcaactggagtgcattgatatgctcaaggagggtgttcagtgggaggatgtccatgcgcacgcacaccgcgtggccattaggggcctgctcgaactgggcattctgcgcggctccgaggacgagttattcgacaagcgaatcagcgtggcttttttcccgcacggcctgggccattaccttggaatggacacacatgataccggcggcaacccgaactacgaagacacagatactatgttcaggtatcttcgggtacggggacggctgccggctgggtcagtcatcactgtcgagcctggtgtaagattccatacccgtcgtttttttatctctgttgctgattatctcccgtgcagatctacttctgccgtttcattattgaaccattcctcaagaaccctgatctgcagaagtatattgacgtgggtactctgaatcggtactggcgtgtcggtggagttcgtatcgaggacaatgttcatatcaccaaggatggccatgataatttaaccacagcacccaagactattgaggaggtagagagcctagctgcctagaattgtgatccctgatagagccgcgtacctcaggaaaatg

SEQ ID NO: 23035 - DNA, 494 bp, Emericella nidulans
agtcttccacagcggagcctgagttcaagaatgtgtttggaaagctcaggaaggcagaaacgtcaaattatgtcgcaccggacgagctcaagaataacatactcaaaggcaaggctgctctgaacatgactagtggcccaaagaaaacccagagagtggatgaacttaaagagagcattctgaagcagaaagaagctatgaaagcgaacgggggctccgttcgacggaatacacttgagcaagcggaagctcccaccgaagcggtcccggaggccattatgaagcgccggcacctggccaagtcaagtattgacaggactaattctccagtaggtagtctgtcaccgactgcaggagagggtgaagcgccggtgtctcaattactccggcaaccctcgcccatgctctctagcgacgaagaatctgccacgacggcccagcatgcgcaaagcgccgttgatgaactcaggtctccttcaagcgaactaccagaa

SEQ ID NO: 23036 - DNA, 612 bp, Emericella nidulans
ggcgcgagtgggtcgagctccctgactggtcctctaaacgacctgacgagcctgtcggatgcattgagcgcagacataaacgaggctgtatccggtacgacaaatccagccataacccctctgccctcttcaacatcattcgggacatctaccgggaccgagccatcttcctgcgaagccacacagcttacaaactgcgctgtcctctgcgcaacggacacaaaccccgtcacaacgacgtgcttctcaacgacatgcacagtggagacggcctgtggtgggagcccggctacctctacagctatactgcgccatgtctgcccgctcgacagaccgaatgacattgggaaggtgtcgaaatttggcggtggtgctcggccgactacgaccagtccccaagacgccgggagtattacatctacgaccaatattataactgatactacgagcactagtacagatacaagcagcgagaccgcagaacctacgacgccctcatccacagcaccacctacgtctaccagtgagccgacatccacagaaccaccggcgcctccccctccagagcccacggtaccttcaagcacggagccgtcaagaacctccaccagt

SEQ ID NO: 23037 - DNA, 701 bp, Emericella nidulans
tcatttatgacctggttgatcactggcgcctcatcgggcttgggtaaatcgcttgcactagcagccctcaaagcaggccataaagttgtcgcaactacccgtgacgttggcagagctgaaaagtcctgccctgatttctcgacacagggtggcatctgggttgagctagaccctgctcaggaagatgcctattatctattcaccaaatttgcgcaagagcattatgttgacgtcctggtcaacaacgctggatatgcatttattggcggtgtcgaggatactaggttagtgcggttgctcggcgtccatactccagtctctcggacgatgctcacatgtgcgcagtgagaccgacgtcagaaatcagatggaagtcaacttttatggccctctgcgagctatccgagcctgcctgccggttttgcgggccagaggctctggccacgtcatccttgttagcagtggcgcagggtatgtccattcttgtagactctgtctttccaatatttcgacctgtttctgacaagatcggacaaaatagcttcatggcccgcccaggaagagggacttactccgccagtaaatttgccatagaggctatgcacgaatcgctttcctacgaggtcaaagaacttggtatcaaagtcctcatagtcgagcctggagcatttcgtacaccctttgcgagccgagtgctcact

SEQ ID NO: 23038 - DNA, 850 bp, Emericella nidulans
tctggtaatcagcgactggggggccacaaacaccgtaggcccctcgctcaaggcaggtatggaccttgagatgccgggtcctcctctgaaacggaccgaagaggctgtcaaagaggccataaaaaatggtgaggtttcagttgaacaggctgagggatcagcacggcgcctcttacatcttctacagagagcagagcgattcgaggacgcatccgatgtggctgaggtctgtttgaacaagccagagcatgcaagaagctccgacatgctgctagatccggccttgtgcttctcaaaaatgagaaccaggcattaccgctccgaccactaaacccaccaaaaaagctggctatcgttggtccgaacgcaaagcggacagtagctgacggcggagggagcgcttacatcaaggcgccatactgggcttctgttcttgagtctctcaaggctgagtttggtcctcgaggaacagattgtccatcatgtggggtccaaggtaaattgtacctcccgacggcatcttcggatatatgcccgcgatccggacactggtgttggaggaggtgtagtcgattggtttgacgggcatgataccactcaaccgcctgttgcttcacgccatatgtaaggcaccttattaaaagttcatttgcatgagctaacaagctgcagcgacgatctctactacatctcgtacggtgacatcccgcccgaaagcgggtgacgaactacagcttccgagtccgcaccactcttacgccacagacatctggcagacacacgctgtctcttgcaggtatagggccttcaaaactgtttgttgatgggaaagaattggcctcggagtccg

SEQ ID NO: 23039 - DNA, 389 bp, Emericella nidulans
ttagcgttcctgagtcaactcctacagggtcatccgacgctgtggctagttcgacgcccactctgcttcccccggacctgacaagtatccttattccctcttccagtagcggcgcaacttccgttccagtcattcctcaggttcccacctcaagtgttgcggccacccccactccgtcggtaggcatctctgttccttcaagctcctccgtttccgtgcagccggcccctaccacaactagcacggctagctcggaagactccaccactacggtcgggacaacaactaccaccaccgttgaggctgagcctaccgattgggtgccgaccagcattatcatcgagcctagccccactgaaactgagacgtccagcgaagagaccacaacc

SEQ ID NO: 23040 - DNA, 502 bp, Emericella nidulans
acacacgccaaaatcatcgcccgccgctccgcagaccgcggctacgccgaacatggcggctggctgaaaaccctaccacacattctctttcgcgtcgtactatgaccaccgcttcacaaactttggcagtctgcgagtgctgaatgaagaccgcgttgccgcgaggaatggctttccgacacacccgcaccgcgatgctgagatcttcagctacatcctctccggcgagctgacgcaccgcgacagtatggtccggaagggcgccgagggagcgcagggaaaggatttctaccgtatgaagaggggagacgtgcagttcaccactggcggaacggggattgctcattctgagcagaatgagagttcgaagcccgtgcactttttgcagatttgggcgctgccgtggaagtatgggctcaagccgaactatcacacgaagacgttcgatgagggtgctaaaaggaaggagtttgtcccaattctctcgccgctcaaggcgggt

SEQ ID NO: 23041 - DNA, 850 bp, Emericella nidulans
agaaaacggcgcaggagctcgtagctgccatccccaacctgaagaaccacacctttcgccctgtaacagacgaccacttcattcaccagggaatggccgagtacctagaaagcagagagttcgcatcggcgtttaaggcaagcaaggctcggctgccgattgccgaagtcctgaacgaggagacgctgtactcgacatacaacagccccagtgagcccacagttgaggcattgcggatgtaaattgggaactactacgcgccagatgtaacggagaggatcttaaaatgctatagcctaccggactcgaaggacctggatgaatgaaagaggttgtttggtaaggcgcctgccgctaaatcaacggtatgagtacgggatgcttatcgatgcctgcaaggccaagttatctccgacggccaggtccgcgctccttctagggctcttgtatcgaatcttgttgccaacggcgtcgacctcgccgatatatgaaggtaccagattgcctaccggctatcgttcattgatgtaagggtggcacccatctcgttcggtgttgcgcatgccatggataagcccttttggaagtatgtcacctttctatactttatccgacattcatgttaatgttgcagcttctctatctgctacggcccaactccacctgaaagaaatttgatggaagactggataaaaaaacctcgttgcgtttgtgaatgatgacgcgagatttgcttttgggacaaagactgttcaacagatgaaggttatttcgccagagggcgtgattgaaataaagaacgatgcgcggtgggaggagttattcggattggaagatttttgctcagtac

SEQ ID NO: 23042 - DNA, 504 bp, Emericella nidulans
atcttgatctgagctgaaatatatggacaggttctggtccatgagccagttctcgtagagcttcttcaaagcccggagctgcagcggctgaaaggcatctgtcagcatggagttactagactcatgggcctgacaccgcgggttacacagcttgaatatttgtcggtgcatttatacttgtgcgaatagttggtgctataattgaaggacaagtcactactcttctccatgatgtttctcataacacccttaataatgtcattgatcacgccctctctaagcccagaaaaggaagttatcacaaggtgtacaagatacagtatcttaagacaacacagctaccagacatccttaccaggtatagaatttattagatatttcaaagaaaaactgttcatattagtagagatgctatcacgttaattatgtactgattacctagactatgcttcatgcgacgccatcggctttggcaagctttctatagaagatgccagaagggtt

SEQ ID NO: 23043 - DNA, 850 bp, Emericella nidulans
tgccattgtctccgtcctcggttgcgctctccaggctggtgctgtgaatatgacaatgctgatcatcggccgcttcattgctggcgttgcggttgggatgcttacgtccaccattccaatgtatgcggcagagctgtcggagccgaagtggcgagccacactctctgggttgctgcaatggatgcttagttggggatttctggtggcgcaatggctgggatatggatgttcgttttctaccaacgagttttcatgtataaacccccctctgtgcggccaacagattcactgactgagcctagggcggttcccgcttgccttccagaatgtgcccggcctgatcctcattgccggtatatggtttctggacgagtcgccccgttggttgatggaaaaggacaggcatgaggaagcaaaggcagttctcactcggattcggaagggcgcgtctgcagacactgtcgagctggaattccgcgagattcgcgatgtcatcgccgctgatcgtgctgtgggaaatacctcctggagaactattctcacgaagccctcctggcgccgcagactgatcctcggctgtggtgttcaagcattcgggcctctttctggaatcaacgtcatcaactagtaagctggctctatgaaatctgaaagcagaactaacaaacgcagctacggacctaggatctacagtatccttggaattgacaatcagacatccctgatgatcatcggtattagcggtgcactttcaattgtttactgctccattggtctctacctcgtcgacagagtcggtcgtgtcaagccactcttcgtttctgctctcttcctcggcgcggcccttctc

SEQ ID NO: 23044 - DNA, 611 bp, Emericella nidulans
ccaaagaaaatcaaggtcaagtcagctcctgaaactgactcagcgaagacgtccagcagtcgcaacgcagaggtcaaggaaacagaatccacagagtccacagaatccacagaatcggaagattggacttcttctagtggctcctcatcagaatcagacatcacggactcggaaagcgatgatactgcctcttccagtttacctgaatccggggaatctggaaattttgagctatcttcatcgagaaatgagcagcagcaagctgcgactcatgtcagctctgaggaagagcccgaggggagtgcaaaatccggggtattgcccaaaggaaattcgactgaagcaacttcgcagcagggatcaacagaagttcaccctctagaagctctctttaagaaacctgccgaccagcagaaactagatacggagcctccagttcagtttagtttctttgggcaaggagatgcagattcagacgcaggtttcgaggaagagctgtcatcaaatgtagcaccccttactccatttaccaaaagggatctgctggaccgtggactacgaagtgcggctcctacacctgacacatctcaagtctccaaaatcatcaactg

SEQ ID NO: 23045 - DNA, 578 bp, Emericella nidulans
gccagtcttgtcggactgtccgccgatcttctgcccacgatgagaagtggccagccagattggcagcaataaataatacctagtagcaactacgtataatatttattattttaactcatcggacgtacactcgagtccaagggaactttaccatttcatactcttccctcctttcgagctctggtgcctgggcgctaaatcgagactgggcacgagctggcggctgtctgaccatagcacagcgcgcctccataaaacgactcaacgcaccagtggtcagtttgatatatctgcacttaatgcagcctactccacctttgggccaggggtcgcccgcctccgataaaatcactgtagtcttcatgggcggggggtgattattacaatgctctccaggctactgcatacgaaggccatcaagaggttgtacaactgctcctggacaagggagcagatatcaacgcgcggggcggcaaatatcgcaaggctcttcaggctgcctcgttgcgaagtcgtcagaagattgtgcagctgcgcctggataatggagcagactctcacggtcaatgtgacttgtg

SEQ ID NO: 23046 - DNA, 850 bp, Emericella nidulans
aagaggctcgagaaaaggctgcaaagcatgggggtaagcaatgatagcccgagccgtcatgctgttagcttcaaagagccaatcgtctacctacatcctcacattggccaacgcgtcaaacttcaccaattgagcggcattcagttcatgtggcgagaactggtcgaggacaagagccaagaaggctgcctgttggcccacacgatgggactggggaaaacaatgcaggtgtaagttcctacctgtggatcacgaagatccagagctgtctgtctttcaattgctgatccgctaaagcatatcactactcgtgacgataactgcagctgccaattctccagacccaaggattcaacaacaggttcctgaaggatttcgccctagaaatgatcttcctgaagcccgaacgctggtcatctgcccattatccttaattgagaattggcgtgatgagatcgttatgtggacgccccaggatgtcctactcacagtgagacaggtggcatcagaagacaatttggatgtgcgcctggccgaggtatttatgtggtatgaggagggcggagcttcttctataatcttcgatatttttcggaatgggagcctaaccaggcaacagttagaaaagacggccctgttagattcaatgcattagacctccagccttggcttttaaagggcccaacttatcacttgtttcaaagttattaaatgaaaattccgactcccggacttttaggtggaatgtcatttcgttccaaaaaccgattgcggtgacttgatctcctccgcaacaatcttgggacaccttatatgggcaactgattttttaatacccggaagttcctcc

SEQ ID NO: 23047 - DNA, 810 bp, Emericella nidulans
tttaccgggagctcaactgccctcatcaatctggtgggaatcttagccattgcattaatgtccatgggcggaccattcgcaatgcactggtcaaagatctactcgccacaggctgtcatcattgccggaggctgggttttcggcattgcatatatcctgtcgagctttgggcaggcactatggcattttgcgttgacgcagggagtcctccttggtattggtacatgtctggcatatgtgcctaccatgagcgttgccccgacgtggttcgaccagcggcgtggtctcgccatgggcgtgattatctcgggatctgcagttgggggcatggtttggcctcctgctctccgagccatgataacacatctggggtttagaaatgcgctccgcatctcgggttgtatctccttaacactcgtctctgtcgccgggtatgctctccgctgggagcccaagttccacgagcaagttcgtatccagacgcagggcctacgtcgacgcagtggctggataaaagcgcccatggtgaactaccgcgttgcccgctctaaacgatttctggcccaggctctgggctgttttctgcagtcggctggatactcaaccccgttgttcttctatgccgcgtacgctagcacgctaggctacagtcccacgacagcggctaacttcattactctgaacaacgcgtctaatttcgtgtcgcgcatcgccatcggctacggtgccgaccgatacggacgcatcaacgccctggttgtcacgacgctgctgagcgctgtggccgtcttcgccttttggattccatcc

SEQ ID NO: 23048 - DNA, 527 bp, Emericella nidulans
ctcttgtgcattacgactatgagaaagcagaggataacgaggtagacctgagggagggtgaattcgtcaccgaaatcgaaatggtcgacaaagattggtggttgggatcgaacgcccaaggggaaagaggactttttcctagtaactatgttgagctccttgaagatggtcgtcagagccgcgccgagtccgatacccggcctgctgatgcccatgaatctgaggcactagccgatcctactccaacctcaggctctcacgttaagcccactgccaaggctctttatgattatgaggcggccgaggataatgaactcagctttcctgagggggctgaaatcataaacattgtaagtcaacaactcccacccagtcttttatccacagttctcaccaaatactctgttcctcgggttaaaataattaattatcttgttctacaataggaattccccgatgatgactggtggctaggtgaattccgtggcaaaacagggctttttccggcgaactatgtccagcttgat

SEQ ID NO: 23049 - DNA, 500 bp, Emericella nidulans
gctgaacaatttcgactggtatatgagcctccttgtccgtaattgcttggccctaactatcgcaggcgagcagttgaagagcatgccaacatcttcccgcagtacacaactgagatcgagggtttgactattcatttcgcagccctgttctcggaaaaagcagatgcggttcctattgtactgcttcatggatggcctggtaagacattttgagtatcacccagaggcataatctcactcccaagacagggagctatttcgagtttcttccgctgcttcaacttttcaaggacgagtactctcccagtactctgccgtatcatctgatcgtgccttcactacctggatacaccttttcatccggcccgccacttgatagagactttaagaatgccgattcagcccgcattgtcgataaactgatgagaggtctcggtttttccggcggatatgtatctcaaggaggcgacattggaagcaccgttgctcggatattagct

SEQ ID NO: 23050 - DNA, 440 bp, Emericella nidulans
tgagatcccttatcccggtgttgccccaaaaaggaatctcggcataaaaacgattcgagcccagaaagtcgccgctgatcaagatatcgtggtggcgggtatgcttggatgaggctcagatgatcgagagtggcatcagtaatgcagccaaagttgctcgacttatccctcgccatatagcatgggctgtgacaggaacgccgcttcggaaagatgtcaccgatttgctcggactactgctcttccttcggtatgaacctttctgcgggcccatatggaaaaggttatgtgatgccacgttcaagccagttctggctcgcatcgttaatactatcactctaagacacagcaaaaattttatccgagaagagctacatctgccacctcagaaaaggattgttatcacagtaccctttaccgcagtagaagagcaaagctac

SEQ ID NO: 23051 - DNA, 571 bp, Emericella nidulans
accgtcgacgatacagccactattctcgtcaccatcaccacgtctatcccacagggatcgagatcgtgataggaaacgagatggagacggtggaagggataggtcaagagatcgagactgggaccgggatcgaggcagggaaagggaccgttctagagatagggacaggtccagagatagggataggtcaagggacagggagagacacagagaccgggacagagaccgggacagggagcgggatagggagcgggaccatgaaagagaccgcgacaaagaccgcgaccgaaatcgagataaggataggtattcagacctagacagggaaagggaccggaacagcgatcggggtcgtgaccgtgaacgatctgttgaaagagacaggggaagagacagagccagcgatcgcgaccgggatagggagagacttacagaaaaggacaaagattgcgaccatgaccgcgagagagaccgagaacgagatcgcggcagagaaaaggaaagggacagagatcgctctcgctcccgacggcgttccccaagcttgctggacatcgaccgctacgtccca

SEQ ID NO: 23052 - DNA, 500 bp, Emericella nidulans
ccagctgtggcgataccttctcgagtccttgtgctcttcaagagcacctcgtttcgcagcacatgggtcctgtcaatggcgccaagggaactggatactactgctgctgggaaggctgcggccggcctggggaaccgttttcgcaaaagtcaaaactacagggccacttccttacgcacagcaattgtatgtctctctggtcgactatgtgttatgcgaactaacgttctagacaaaaattttcgatgctcggtatgcggaaaactcttcgctcggcaagaaactctcgagcgccacgaacgaagccatcgcggcgagaagccatacaaatgtacagtatgtggcaagtcatttacagacagcagtgaattaagtatgtcacccgcctcggtcgtactactattgctgactgggtagaaacccattcacgaactcatactggcgagaagcccttcaagtgcacctttcctggatgcaccttccgagaccggcgatgtcta

SEQ ID NO: 23053 - DNA, 850 bp, Emericella nidulans
ctactaccataccagggagataggattaatcacaaaattaagcttatacaggaagagagtgggaaggatcctgaagtcccctggggccccctttataacataacccaggaagaactaatagtcctccagaaaatactctctaaactattatagaaaggctttatctgcataagctattccccagctatagccccagtactctttatataaaaaccaggaggaggactacagttctgtattaactactatactctaaatactattaccaagaaggactgctatccattgcccctgatctatgagacactgaaccaaattagacaagccagatggtttactaagctggatgtgtctgctgccttctataagatctgcatagctaaaggccaggaatagatgactgccttctatacaagatacaggctctttaaatagctagttaccccttttgggttggctaatgcaccaagcaccttctaaaaatatattaactagaccctccaggaatatctagatgaattctgctcagcctatattaataatatacttgtctatactaatagggacctccgccagcactggaagtatatataaatagtcttgaagaaactggaagaagcaggcctatatttagatattaagaagtgcaaatttgagtataaggagataaagtacttgggctttataatacaggcagggaagggaatcaaaatagacctagagaagatgaaagcaataaaggaataggaaacccctactactataaagggcgtccaaggaaacatgggctttgctaacttctaccaggttcatccctaacttcttagggagcatacgccaacagaacaac

SEQ ID NO: 23054 - DNA, 714 bp, Emericella nidulans
atgccacgaaaagcgcgtaaaacgcgccaggaattaatagagcaagaaggtaggatcaaatgcgccataaacgatttaaaaaatggaaaaattcgcaatgctcaggaagctagccgcatttataatgtgcctcctacaaccctacgtgatcggatgaagggccacctatctcaaccagaactccgcaaccagaaccacaggctatctctgcttcaggaggaagctttaatagcttggatagtatccctggatatacgtggcgccgcccctaggccctcccaggtacgagaaatggcgcaaataatcttggatgctgcaacatcaactctatctctacctattggcaaaaactgggttacagagttcaccaagaggcgcccggaggttaaaactaggtttgggcgaaagattaatcgccaaaaagcactatgtgaggatcctagaattatcggtcaatggtttgatgagctgcagaaaaccagagatcagtgggggattcaggataaggatatctacaactttgatgaacttgggtttgcaaagggtcatatagcaacaataaaggtggtttcaaaaacaaaaatgcctggtaaaccatggctaaaacagccaggaaattgggtatgggtttccaacaattaaaagcatcaattctaggagggggccaattccctcaacaatgatctcaaaagaaaaagtcaatatggaggcatg

SEQ ID NO: 23055 - DNA, 710 bp, Emericella nidulans
acgtcaccggctccttgacatcccagttcgctatcctagcaatctacgacatcttcggcaactccccccaaaccacccagggcgccgacatgctcgcaaaacgcctcaacgcccttgtgctgatccctgatttcttccgcggcgatggagcgaagcatgagtgggttccgcccgacactgatgagaagaccgctgcgcttatggagttcgtgaccactaaggcgtctttcgtcgaggttgcaaagagcctccccagcttggtcgacacttacaagggcaatttcccgtccgtgcagaaatggggcgcttatggactttgttgggggggtacagtgctggcgctatcgtccggggacgggacaccctttacggagacggtgcaagttcatcctgggtgagtccattctcaatttacttgttcccttgtttataagctaaccgtttattcgctcggtagtcggatggataaggctgatgcacagacgctgacgatcccgcatgctattctggcgtcgaaggatgagcctgcggatgaggtcgcggcgtataagcggattatcgaggataagggtcttggaggctttgttgagacgtatggcgagatgtggcatggatggatgggagctagagcggactttgaaaaggaagagagtctgaagaactatgttcgtgggtatgcttggctctggtatgatgtgggttagttgatg

SEQ ID NO: 23056 - DNA, 850 bp, Emericella nidulans
ttcgggtacgtcttgttttcgttttcacgctatccagttggcaagcctgacactcattttaggcatctgggaacaacaatcttgggctgctagaccagcgggttgccatgcgctggatcaagaagaacattgaggccttcgggggtgacccgaccaagatcacgatctggggcgagtcagcgtgcgtatgccatgttaccagttactgataattgatgctgaccgacagcagaggagcatatagtgtcggtgcacatcttgtcgccaacgatggtaataatgaggggttatttagagcaggtacatgcttcccgttcagtgcaggcgaaggaacaaataatgaccaagaacagcaatcatggagtccggaaacgcagtcggcccaccctggaacggcacagactggcatcagccgatgtatgataggatagtggatgcagcagggtacgctcgatacatgaattgctaggagtatctgctaaccaacctagatgctcaacctcttcagataccctccaatgtctccgtgaagtaccctttgacacactttacggtgtctcctaccaaggcttagaatggttcgccgctgatgacggtaaattcatcaaggaatatccccagattagcactacggaaggacgtctcgccaaagttcctatccttctcggatcaaaaacagacgagggagtcagctttgggactaccggtgttgatactgatgaagattgcgttgcgcagcttgtttgtatgcttctttgcctcccctactaccggtattgaggataacactggtgagctaactgcatccaacgatggtcctaccacgggcaggagtaaactatgtttttac

SEQ ID NO: 23057 - DNA, 642 bp, Emericella nidulans
aagggccgcacgcgcttcagtgacggctgcatggcggaacgatttccacatcctgcaggttctcattgcgcggggtgcggccgtcaatgcaacggataacagggggcgcaatgtgctgcataaccttgcggcggacaagatgtgcgattggggtgaggatgtggtgagcttactgctgggtacggtttgcgcggttgatgccgttgatgagcttgggcggacgcgctgcattgggcttgtgcgacgggaaaggagagacttgccgagatgctgctcgtgaggccgttacatgtgagtggtagtgggagggccacgggcgggcgggtgagtggaccggtgatgacgggcgcggatgtgaacgctgttgaagggcggaataaaacggcgctgcatttggctgttgcgcatgggcatgaacgtattgtggcgttgttattgaggcatggcgcggatattaatgcgaggagtgatggtgggtggacacgttgcataatgcatgcgatagaggcagtgaaagtatcgcgaggagactgttagctgccggagcaaagatcaatgcacagctgctgaatgggatttcgcccctgcatctggcggcgcagggtgggcatcgtgaggtggttgagtgtttgctcgagcgga

SEQ ID NO: 23058 - DNA, 325 bp, Emericella nidulans
ctacggtcactgacgaacagccggactcgcattggcaattgggcgttcactacgctcgagcccaatattgggaccgtggtcattgacaacgacaaagggcggccactcgttgaactcaaaaacaagccccctcggaaacggttcacgatcgctgatatcccgggtttgatcaaaggcgcccatttggatcgtggcttgggcttgggatttctgcggcacattgagcgggcagggatcctggccttcgtagtcgatcttagcgctggagatcccgtccaagagctacaggaactgtggaatgagctcgggaaatacgaagagctgc

SEQ ID NO: 23059 - DNA, 850 bp, Emericella nidulans
cagtcgacatttgtataactacaacctgcaaggagctagagcatgtgtgtttattagcggatgtgcttgcaaagagtaagatctcatttccatgaccttcctggcaagcgaagctgacatattatctctgatcagatgggatggagcgagttgtctgcatctctcatgcaaaagttcccattgtgaaaatctgggatccagaactacgcctagcatgcgacatgaacgtcaacaatacgatggcgctggaaaatacacgaatggtacggacatatgtggagatcgatgaacgagtacggccgttggcaatgatcatcaagcattggacaaaacgcaggatacttaacgacgctggtatgtttctacgcgcacggggttaatgtgctttctcgttaattattttcaaggtctcggtggcacgttaggttcctatactggatttgcttgatcatcaattcttacagactcgagagcctccaattttacccagcttccaagctcgaccccataagaaagaggctgaccgccgatggtttggtgtgctcgttcgacgacgatctggactcattggtgggatacggaaagcagaacaagcagtcattaggagagctgttcttccaattctttcgctactacggccacgaactggattttgagaagtacgtcatctcggtgcgcgagggaagattaatatccaaagagggaaagggctggcacctactgcaaaataaccgtctttgcgtggaagagcctttcaacacaatacgaaatctgggtaatacggccgatgatacttcattcaggggggtccatatggagctgcgcagagcatttaaggccctctcagacg

SEQ ID NO: 23060 - DNA, 717 bp, Emericella nidulans
actgcagcgcctccactcccttctacagaagttcattctcgacagtcttcaactccagggacaaaagatgcttcgagcggcgggttatcagcgcaggccaccagtagcagcaagactgccgggcaaccgcaacgcaccgacaccctcgacagccaggactctaccaacatcacccctagtttgaaacagcttatcgaaaccgagttactaactgaagaacctgatttgcgatttgactcgcaaagttcccaacggctgacctcggcccaggaggcatcagctgccacaagcccgacgcctttagccagcccgagttctgcattgggcgccagcaaaagccagaaattcccaaatccggcccgaaagcctcctcctgcaccgttgaatttagggcacccggaccgcacgacgacactgcgcgaagcgtctgattccgagtccgaatatgaagatattcttacggtcgaagagtccccgatagaacgtgggaggagaaagacaagggccgatgatgacaagcagcgcgaagtagccctatctcgcgaggtagtgaatattgaaacatcagagcagagccaacctctttccccaaagacgggaaacccaatgactgcgggccacttgtcatcagacgtacgccgcgtagtccccttgggagcaatgacggcctctatgggcgctagtgtggctctgccttattaggggtttttatatcag

SEQ ID NO: 23061 - DNA, 850 bp, Emericella nidulans
atctgacatcgcgagaaggcattgacgcgaacccgcagcctgagtggttttacggcgcagatttcaatgagaacggtcaagccagcgatgtttcgtcaattatcgtcgtaaatgatcgtggcgatggagaggtcgatgcgttttacttctatttttactcgtaagttcttcgtccggaaaaggggactctatccgctgagagtgccgttctgatcgcggatagctataatctaggaaacacggtcttgggaatggagtttggcaaccacgttggagactggtgagtagtgtcgcttgtggcaggactttgaactgacagtggctgatgcagggagcataacatgatccgattccaggacggggcgccgcaggccatctggtacagccagcactctggaggacaggcattcacatatgatgcgacagagaagcagggaaagcggcccgtagcatactctgggaacgggacccatgccgtatactcaactccagggtgagatcccaacgcggccgtccctgataaaccggcattaaccagttcccagtggccatgatcacacaatccctggccttaaccttccagctggctttctcgttgatcagacgaaccagggcgttttgtgggaccccgccttgggcgcctatgcgtatgcttatgtgccagccacgcagaccttcgagccctatgactccagctttccagtgaactggctggacttcaacgggagatggggcgatgatgcgctccagggaggccctgaattgttcggacaagccaagtacgtaggagggcccaatggcccgaagtttaagaacattcagcgggagaaggtgtgtccgagcagcccat

SEQ ID NO: 23062 - DNA, 850 bp, Emericella nidulans
cctccaccacgttcgaatacactggtcaatccagccgcaactgtcgaacgtttgctacattttggacagcaacagatgccgcttgggctgaccagggcgctcctcctacgcgcagcctgggccatcctcctctcacactataccggcacacaggatatcattttcggtgctatcaacagtggccgaacgacggatgtgcctggggcaagtcggatgactggccctactatcaacttagtccccatcgtcctccgcgtggaagcacagcagcccggcgggtctttctcactcacgttcgggcgcaatctgtggggatgatccccgtttgagcaaacagggctttcaaatatacgacggatattggcgaacagaggttcaagtcttactgacttcgagtcgctgttggttgttcagtctatggagtttgcggatgcaatcggtccggccacacaatatctgggcctggagtatgtggacgccctgggcaagaaggagcatcacccatatcctctgatcgcaacgtgcaccatcttgactgactcaacagtcaggcttacccttcagtacgatgaacagttgttatcagctcgccaggcagggaatctaagtcatcagtttgaggcagtcgtcaaacagctgacagatgccgcaagccaggccttgcttgactccatctccccgttgagtgaacacgatcttgcgcaaatacacgagtggaacaagttaactccaagtccagaagagacttgtcttcatcatcttttcgcctggcaggtctccgtacagcccaatgcccccgccgtgtgttcgagtgagcgatctcttacctaaagccagagtagtcgcaaaa

SEQ ID NO: 23063 - DNA, 500 bp, Emericella nidulans
gcgggttatcactacgttctctttggactatgttcggcaagtcgtcaggtcggacgggcgtcacccggtcgcggtgaacgacggggtctgtgaaagcgcgccggcgattgcgaaagaggtgaacgacccggccgagggtgggttccagctgtataccgtcctgcgagtgcatatgctcacgccggtgcccgctgggatcagcgatgcgcaggcatctgtgctcggactcgggctgggtacggccgcatttggtctcttccacaaggactatctggccctcgatatgccgcagcttgcggaaaagggcaggggagaggtgcagcggggcaggtcggggtccccgcgcgcggtgatcatcacgggcggcgccagcagcgttggcagcaatgcgatccagctcgctgtcgcagcaggctacgaggtcctttcgacctcgtcgcccaagaacttcgactatgtcaaggggctcggggcgagccacgtctttgactaccggagca

SEQ ID NO: 23064 - DNA, 542 bp, Emericella nidulans
cggctgatgtagttgttctcggcagcgggaacaactggggctctgcatacacggccgtccacagtatcaaccgggcacttgtaggaggcgaagacgcaaccgttggactgggcggtcttgtacagaacggcggccatggattgttatcaagtacgcacggacttgcatcagataatctataccaagtcaccgttatcacccctgatgggcgccgtctcgtcgccaacgatgtgcagaacaaagatttattctgggctgttcgtggtgctggaggcggccagtttggggttgccactgagtttgtgcttgcgacgcatcctgttccggagaatgtggtttctggaggtcttacattttatgcagtacaaggagccgggttgaatgcaagcgatgcgtccttggatgccctcgttgagacggcgaggtcgatcccggacctcatggactcaggtctgacgggaacagtgatggctctgacgggcacacgcgcaacttcccttctcggcctcagcatcaatgagtatctacctggaattgcagga

SEQ ID NO: 23065 - DNA, 500 bp, Emericella nidulans
tcgtcctccaaaccgcaacctttgcccaccagtatctcaactccttcctctactcccagcccaggaagtccgccgacgccctcaaactaggcgtcttgtcgtctgctcagatcaatgcggcagccagtaatcgtccctccctccgctttcactctgctgtgatgaactaacaaatgctagtaattcaccccgtcgaaacgcacccgcacataacactgtacggcatcgcctctcgcaaccaaagcacttcacagtcccaggcgaagaaataccactttaagcaggcttatgggtcgtaccaagctcttttggacgatcccgagatcgacgtggtttacatctctacgccaaacgggcagcacttcgagtggaccacgaaagcaatcaacgcaggcaagcatgtcctctgtgagaagccgtttatgagtaatggcgaggaggcgaggaaagttgtcgaactggcaaaggagaagggggtagttgttgaggaggcggtacta

SEQ ID NO: 23066 - DNA, 574 bp, Emericella nidulans
cccgcgggtgatatcagcatatttcccaagtccaccagcctttaatcccgtatactacctcgctcttccttaaagcctttagctacaatgccgcactccgttccagtgcccccgacggggttccaagcgctcattctttgcgggccgggagtttctcttaacacctttacttcgaatccggaggagtttccgaaagcccttattcctatcgcaaaccgtcctatggtatggtacccgttggactggtgctatcgcatgggtatcactagtatgttgagacctgcctatagcaccatataccaaatactcacgaaaatttgcagatattactctcatcacccctcctcccagtcaagcccctctcgaggctgcgttatcacaaaaccctcaccttacgtctcttccatcgccgtctccctccattctcgcacctgccgacttgactttgacaacgggtaccgctgaactgctacgtcttcccgaagttcaagcatgtatcaaatcggactttcttctcctaccgtgcgatctgatatgtgacattccaggcgaatcccttctcgaagcatggatg

SEQ ID NO: 23067 - DNA, 850 bp, Emericella nidulans
cgacggcctgtgcgaatgcctccgaccttgcaaactggctgggagtgaaagaaggcttgtacaatttccgtcactccgttcggccggtgcctttagagatctatatcgatgggttccccgagcagcgtggtttctgccctcttatgcagtcaatgaaccgacctactttcttggccatcaagaaccactctcccgagaagcctgtgattgtgtttgttgcttctcgtaggcagactcgactgactgccaaagacttgataaacttttgtggaatggaggataaccctcgtcgttttgtccgtatgtcggaggatgatctgcagttaaaccttgaacgggttaaggatgatgctttgagggaggctctttcctttggcattggtctccatcatgctggtttggtggaatccgataggcagctagcggaagagctctttgccaacagcaagattcaaattcttgtagccaccagcactctcgcttggggcgtcaaccatcctgcacatctcgtcgtcgttaagggaacacagttcttcgacgcgaagacggagggttataaggacatggatttgacagacgtcttgcagatgctgggtcgtgcgggtcggcctcaattcgattcgtacggtattgcgcggattttcacacaggactcaaagaaggcgttttacaagcacttcttgcacaccggatttcctgtggagtctacacttcacaaagatcttgacatccacttgggtgccgaagtctctggtggaaaccttggcaccccagcagacgcttttcgactacctgagctggacattttttttccgccgctgcacaggaatcatatctcctacggctttga

SEQ ID NO: 23068 - DNA, 800 bp, Emericella nidulans
agcatgcaacagccgtccttgtccggggatcgtatgtcacagccgacgacatcgctcgtgcccccaacctgatcgccattgggaagcacggagtcggcattgacaagattgaccaggcagcctgtgccaaacggggtatcaagatcctgaacacgccgggcgccaactccagggatgtcgctgagcttgtcgtcactctcgcattgaccgtcgcgcgcagcatccggtcgattactacacgacagatgacagcaccagtaccgaaggagacatgcaagggattgacactccgcaggaggacagtaggtattattgggatgggcaatattggtcgcacggcggctgagatcttcatggaggattcgacacgaagctggtcgcctatgatgcctatacgcccgatgacgcctggcctcaccttccgcatcaccgagcacaaagtgtgcaggaggttcttgaaacggcggatgtattgacgctgcatgttccattgacagatgagacgcacaacctcatctcctacgaacagttgcgacagatgaaacctgatgccatcctcatcaatgcagcccgaggaggcattgtcaatgaacgggacctggttcgggtgctttctgaaggtcatctctggggcgctggccttgactgccatgagcaggagcctccatctgtagaaaggtatggcaagctgtgggagaacttgaacgtggtgagcacgccgcatattggggcggccaccaacacggcgcagagggccagttccatggcagcggtggagaacttgtataattacctatgca

SEQ ID NO: 23069 - DNA, 500 bp, Emericella nidulans
gcggataaggaccttgtgaaattgctccatgatggatgcgagaaagtcgccggtgcgttcttatcctcaggtcgtcaatagacacgagccgactgaagtactggaacaggagcgttcggcgcccgcaacgtacccaaggccatgaaagccatcgaaatgcgcgggatcgagaaaggcagggagtggggtttggcaactttgaatgagctgagggcgttcttcaagctgaagccacattcaacgttcagttggtcttcccctttgttttacctctcagactacagcgactaacaaatgctaaagcggacgtgaactcagacccgaaagtcgctgaagcatgtacgttcttaccgatatcccttccctgacctgatagagccagacgatacgctaacaaccaccagtggaagcactctatggccatcccgacaatatcgagctctacgtcggcgtgcaagccgaggaagcgaagaagcccttcctccccggcgcaggtcttt

SEQ ID NO: 23070 - DNA, 500 bp, Emericella nidulans
ttgtgacttctataccaatcttgacgacttctctcccgatcctgagtgtgaacatcacattttgttttgaattatcaacggatgacacgcagtcgatttggttgacctgcatatacataatgactgattctcctgttgcaccaaatccggctgtcgagacagaccccaaaagcaagcgcaaggcctcgtcagcaggactctcggctaattctcgtccggttaaacgacgcgcctcaaaggcttgctgctgctgccgcgcgcgtaaggtacgctgtgatgtggtagaaaatggttcaccgtgcacaaattgccggctggaccaagtagagtgtgtggttacagaaagcaaacgaagaaagtgcgtctggtccatcttcattcagatagctccctgtgactaattcgtcgctcaggaaatctcgagttgacacagagatctcgaatcctcagctttcccagtcgccagccgagatactcgatgatggcgcactttttggtgg

SEQ ID NO: 23071 - DNA, 837 bp, Emericella nidulans
aggccggctcaacaatccacttcagcaaagcagtatacgatgcgatttaccctctccgtcagcaggtggacaaatgccatgctcttatccggcagatgggtctgtccggcctattccctgagatcttcagccaaggtcccatcgatgacgtggtgatgcttcactgctgcctgttttccatacagtatgcctgcgcagcagcttggcttgacgtagggctttcagtttacaaggtgatcggtcatagctttggacaactgactgcgatgtgtatctcgggtattattactcttcgagatgcactgagacttgttgtggggagagcaaagctgataagggattgctggggagatgagaagggttgtatgctctccgtcaacattgacagagaaggtgcacaaaccctggtgcagtcagagccaggaatcgaaatagcatgctacaatggaccaaccaatcatgttcttgtgggcagcgagagggccatcgtgaacgtggaaagaagggcattatcatcttcactgcgtacccgaagactcaaaaccactcacagtttccattctcatctcatcgatcctcttatgtctaagtacttggacctggtcaggactgtttctatcaaagcccccgtgatcgccattgagacctgttctgagaccacaacctggaggacgttcacaacacagctggtagccgagcattcccgcagcccagtctacttttgcgacgcggtccagcggatagaaggagaacttggaccatgtgtctggttagaggctggctcaggctcgggcgcagttgtgctggcgaagcagtcgtacgcagcaagtcaaactt

SEQ ID NO: 23072 - DNA, 721 bp, Emericella nidulans
gcggtagagctgaccaggcaactccagctccatcctcaccattcttttcccgatctttgcttcctacaaggcccttcgctcgtcggatccatatcagttggcaccatggttgatgtattgggtggtgctttctgccatcctcatggctgaatcctggacatacttcattataggatggatccccttctatagctggatccggctcggcttcttcgcatacctcgttcttccgcagacccagggtgcccgcatcctataccaagactatgtcgagccgttccttgcacaccatgaacgagagattgaggaattcatcggccgtgcccacgaacgtgcgaaggcactgggtctccagtatctttaccaggccatcgacttcgtaagggagcgcgttctaggccttcccccgcagcgacccccgactcctccacccgccagcgcagcgtcttatgcacagtccctcctgtcccgcttcaacctcccttctgctgtcggtggtaccaatccgcacctgccaacgattggtattccgcaatcagctccgcggtggcagcggtgacatctccagggaagagccacgaaagccgtgcagacgaactttctgccagcgggtctcttctccccagagagtttgagtccaaaacccgcgcagagaaggcgagcttctactccaaacagcgcgatatgcttgatgtactccgtaatgccctgataaacgagg

SEQ ID NO: 23073 - DNA, 850 bp, Emericella nidulans
cgtcttctggattcccatggggcgcgtgacccttatcctctttgatcatcttcgcaggcatcccctagctctatcgtaccattctgatacgacgtttacccgaataagcccggggtcttcggcttcagtcctcctctgcacctatcgtgcggcaggcttgaggtattggaagtacacggttggtggcactaacgtttttcttatcaatctcctcgcggttgttatattcgtcgttttcgactacttttttttgagagaggccctgggtcttcagatttgggtcacccatcctggactaatatttacactcgcattgctctccgttaatccctttggcctatttcatcggccaagctgttgcgtctatatctgcgcagtcatcaatgggcatgggtgcagccgtcaatgcgttcttctccaccgttgtcgaggtctatctttactgcgttgctttgactgagggcaaaggtcgacttgttgaaggaagtatcattggcagcatcttcgctggaattttgtttctaccgggtttatcgatgtgctttggcgctatcaaacgcaaaactcaacgcttcaacgtcaagtctgcgggagtcacatcgacaatgctacttttcgctgtaattgccgccttcggtcccactctattctaccaagtatacggcagtgtaagtgatcgcatgctcctactagtgcttgaactaatatctccggcagcacgaactcaattgtcacgcttgtgagagtgatatggaaccaggcagcagcgattgtcgtcgttgctacttttctcaagtaccagctataaacgatggattcttccagaaagctgttcagccgtattcatgga

SEQ ID NO: 23074 - DNA, 850 bp, Emericella nidulans
ctccaacacggctgcgtcgcagccccccttcttcaccttctccgacatatcgttctttgtgattcctcgccaggagctttgcggaaacctcattcaagtgtgcacgaatggataccgtattctgggctatccgatatgcatgaagtctcctcggtatgaccggaatgagttcatcttcaacttttgccttgtactggcggaggaggaagatttcagcagctacaagagcgttgtccagaaactggcggatttgatgcacgggttggaggaacaaagcgggtttttgtcgcgagatcattcaaagagtggtgagggaaaggtgtacagcttgtgtgagactttaatggaagacttgaacaactactgcgaatgcatgatcccaatcggtatgttttctcataacttttctcggactggaactaaccaggacacagatgagctgaatacactgaatataaagctcttccccgtataccctaatccgcctcccgttcgcgcctggcaggtgcccttattcactgtccgctatcaagccttcctcgacgagaactgggatctgaccctgcaacgcgtatgtatatgatcaggaagatatgtataaacagatgatgtcctgactattatgtgccagattgtcccgcacatcaacggagtaaacagtattcgcatcatctcactcctcgccgacacggacttttccctcacctgccgcgcaatccggcatcttctttactacggctgcatcttccttctcgacatcttttccttttcggctatctacgcgcccactgctctattcagctccacaattgccgcagatgaaaacatgcaacgcgaatgcgcccgctac

SEQ ID NO: 23075 - DNA, 500 bp, Emericella nidulans
caacgtccctcttgaaatccttactcttaaagtccaggaggagtacgcgtcttcagagggcgaagacgaagagcccggcaagacttcagaagctgaagatgccgccggcgaaaccgaaggcggccacactaaagaggagaccgagccaaaagcgccagaatcccctacacagcgcagtgaaggctctcagcaggacgtcggttcccaggctgttcctctacttcctttctcgattctgtcccccgacaaatactcgctccagggcgatggtcccattggtcgcaaattcccttggggttttgctgacccgtacaatccagagcactgcgacttcctgaaactcaaagactccgtgttcagcgaatggcgttctgaactgcgtgaggctagccgtgttatctggtatgaacgctggagaaccagccgcctgaaccgtcacgatgctattcgttcgccaaagccaagatcattcggcggcagaaccggccctgactttgcac

SEQ ID NO: 23076 - DNA, 850 bp, Emericella nidulans
tcgatcgttttcaacattatactttacttcatgacgaatcttcgacgcacagcaggccatttcttcgtcttctacctattttcattcaccacgacactgacaatgtccaacatttttcgctggattggtgcaatttctcggtctatggcacaagcaatggttccctcatcgatattcatgttgatcctcgttatttataccgggttcacaatacctgtgcgcaatatgcatccctggttcagatggctcaactacctcaaccccattggtgtaggtattcttcacaacgcgctacgtatgttgctaacttttctcagtatgcttttgagtcccttatggtcaatgagtttagcggccggagatttgattgtgcaatgtatgttccggacgggccgggatatgctgacgttcctctgtcatcgaagatttgttctgggcgtggagctgtagctggacaagactacatcgacggtgacacatacttgaatacttcattccagtattacaggtcccatttgtggagaaactatggagttctcctggccttcatgttcttcttcttggcagcctatatcatctgcagtgagttggtccgggccaagccttcgaagggagagattcttgtcttcccaaggggcaagattccggctttcgccaaggtagttcgacgtgacgaagaggatgcaaaaacagtggagaagcctcagttggttggtgagaagagtgacgatcatgttcgagcaatctcgaaacaaactgcgatctttcactggcaggatgtgtgctacgacatctaaataaaggtgaaaatcggcgtctctttgacctatggatgcgtggttgaaccctg

SEQ ID NO: 23077 - DNA, 850 bp, Emericella nidulans
ggaacttagattcccatcagctcgtgaagcgaatcgctgcccatactggtgatctgtgggcggtagatattatccacggaatggccgtatgcggagattcgaacgggattgtaaaggtacgctcagattcatatgtgagaaactcaccgctaaaccagagtatagaaattcaactcacgatttgaagaagttggcagttgggccgctcatgaaggcactatgctggcctctgctgccggtaaatttaaggatcggcatatctacgctaccggaggaaatgacaatactgttggaatatgggatttgacagacgtgtcattgtctgcgagcgagaagcccccaatcgacaatggtgagtatcttggcctatctgacctagactaattgctgacatgggtacagatgagatggtaagctgccttgccaagctggtagctttcaagacgatctcagccagtccaaaattcgccggtgaatgcaaccagggtgcagctttccttcgccgacattgtatctacttgggagctaagacgaagcttttaaccaccggcgaggataccaatcccattgtcttcgcccggtttagtgcgatatcgcctgaaacaacaaataagacgatattgttttacggacattatgatgtggtcggagcggacgctaaccggcaaaggtggaagacagatccatatcaactaacttctatggacggattcttgtacggccgtggtgtatccgacaataaaggccctatcctcgccgctttgtacgcagcggcaggtctggcgcggcagaagacccttcgatgcaacgttgtatttctccttgagggagaggaagagtccgggtccca

SEQ ID NO: 23078 - DNA, 850 bp, Emericella nidulans
ctccccggctgaaagcagccatcgctgatattctgtcccggtatctccacccctcgaaactactcagaccgtcgcatatccttgccacgaacggggtggcatcagccatcgagcactgctcctgggccctctgcgacccgggcgacggtatcctggtgggacgcccctatttccgtgggttcagccgagacatctgtcttcggccagcggcaaggcttgtccaagtaagcttcgaaggggtggaccctctcggcatatctgcggtatcgatatacgaagaggccctgataaactccagcaagcagggctgtgcgatccgagccatcatgatctgcaacccacacaacccgctaggccgatgctactctcagtcattccttatcgagatcatgaagctctgtcaacgattcggcgtccacctgattagcgacgagatatacgcgttgtcagtttggcgggagggccaggatggggcggtctcaatgaacaaattcacatccgtcctctctatagaccatgacggcctgatcgatccgagtctggtacatgtcttatggggtgtcagcaaggacttcggagcaaacggcatgcgattaggagctgttatctcgcagggaaacagcgacatgctcgagtctatccggggtgtcgcccagtacagctcggtttccggcctggcggactgttttacaacgaacattctggaggatgaaaggttcgtaaatcagttcattgcggaaaacaacaaagcgctcgctgctacctatgagtatgttgttgcttttatggataggcacgggataccctatgccaggggatcgaacgccggcttctttgtatggtgtgacct

SEQ ID NO: 23079 - DNA, 850 bp, Emericella nidulans
  unsure (1)..(850): unsure at all n locations
ccttgtcaagcttgcagacttcggtgtggccagtcgtaccaccggactaagcgaatcgagcgttgtcgggactccatactggatggcccctgaagtgattgaattatcaggtgcaactacagcgtctgatatatggagtctgggatgtactgtcattgagctgcttgaaggaaaaccgccgtactataaccttcagccgatgccggctcttttccggattgtcaatgacgatcaccctcccctccctcaaggcgcctcaccagtgagtttgcctcatggccctgcttctgtacgggatggctaatgaatgatcaggcagtcaaagatttcttgatgcagtgttttcagaaagatcccaaccttcgtgtgtccgctcgcaaacttctgaaacacccatggatcgtcaacgctcgaagatctgactccgtagtccctaaaaaatcaaccgaatatgaagaggcggtgaaaagtgtccaggagtggaatgaggctttgcgttcgccggaatcgaatgccctaagaagaggaaccagaaatgaaaatcaaaacccaccgtctttacggcttgacacgcggcatacgccaactaaagttacacttccaagcccagtctccagaattgtcgcggacaaatttagttctcctagctccggagaagaggataactgggacgatgattttgctacggccatctcgccaagtgcactgcagctacctcaccttcgtccgcacgacaattttggtggaatgctttcttggaagaaactgaangcatttgcctctatagatggtacagtcctaaagtctgatgaaagctttgaggagtccgatgaccctttcaaaggatctc

SEQ ID NO: 23080 - DNA, 674 bp, Emericella nidulans
tacattgttcttgtgtcaatgtatgaggtgtacaatgaccggatatttgatcttctatcaccagcaatcgtgcccggccaaggaagtgctatgtctcgccaagggacatcatctcagaaagacaggagaaagcctttgtacttcaagtcaaccgagggatcccctgaccgaaaggttgtggcaggccttcgaaaaatcgcctgtagcacttatgaagaagcgttggcagtccttgagatcggccttactgagcgaaaggtcactggaactggcgctaatagtgtcagttcccgtagccatggcttcttctgcctcgaagtcaaacgaagaatgcgaaacaagcggacgggtgaggagacttggataggaaacactctcacaattgcggatcttgccggttagtgtacagctgcttaacttttagcctaagctaactccagcaggatcggagcgagcaaggactgcaaagaccgcaggctccactctggtagaggcgggcaagattaacgagagtctgatgtacttgggacaatgtctgcaaatgcagagtggtatccaggacggaaataaggtacgtttttccgggccttattctgggacataactaacacggataagactgctatggttccttacagacaatgcaagcttactgaactcctattaacgaactc

SEQ ID NO: 23081 - DNA, 549 bp, Emericella nidulans
tctggttcgtgcagttcctacttgtccttgcgtttgcgaacgcgtttctgtttcccggacacaagaacccgaacaatgcgaatgatccgccggggtcaaagttctttatccgggcgatgagcctcatgcccgatcataccagcctctcccgtggagggtttgtcgcgatcgaggtattggcactgaccgggttgtatctttactcgatcgaccaccggagttcggcccatgtttatgtatgtctccatggggttcttgatcttttactctatattattctattatattctattttgtatcagctgacccgttctcgtaggtcggacacgccatccgcatcgcgcaaatggacgggatgcacacgcagctgcccgaggacgaactcgggcttgaaacggtagcccggtgcaggaatctctggtggacgctttacgttcttgataggcatatttcctcgtctgttggagcgtcgatgacgcccgaggatagcgatatcaccacgttgctggagccgcttactgctactgcctgctcccagagtgataccac

SEQ ID NO: 23082 - DNA, 500 bp, Emericella nidulans
attggttctcaaatacagaggtaggcgcacctggattgggtgaaaagagagcagcaagtccatcagatgctggaacgaatgcaaagagggcaaaaccaggcactccagctgcgtctggtttcaacagatatgcttgtatgtaatccctatccttccatccattcccacttactgcgtttggaaaaagctgacggccatctcctacagcaacttccttagtggagaacagcgtcccttccaggaagtgctcagtatatgtgctcggagaaaacggaaacggccagctcggtatgggcaatggtactccggttcagtacaagcagcctaccaagaacacacagctaccggatgtggtacaggtagcggctggtggcgagcactgcattgctctcactcacgacaacaaaatctacacctggggagataatagccatggccagctgggaaggcttacgaactccatgacagctcagatgccaggggaggtggattttagtgaa

SEQ ID NO: 23083 - DNA, 619 bp, Emericella nidulans
cagaaccgactaagagaactggagcaacagctctcagctagcttgaaagctcacgatgagttgaaagcttcattcgagacaagagagcaagaaaccgaccgcgcctacaaggagaagctggaacagctcgaaaatgactaccaatccgccgttcactacgtcaagggaaccgagaagatgctgaagcggatgaaggatgagcttactcggtacaaaatgcaaaacgcgaagatccagtctgaacttgaagcggcccagagtcgagagggttcagtggcgccatctggatgggaagctgaacgctcccagcttcagcaatcactcaccgatcttcaacaagacacatcgcgttccattaccaacctggaggagcagatcacgagtctgaaggaaagcctagcttctgccgaggcagagaaggagaagtctgtcgctgaatacgagacaatgcggcaggaactcctcgctgtttctgagaagactagctctgaactggagcaacttaagcatgagaactcgctgcttgaagctcgtgcgatggatgccgagcagaaggtttctatgctcctggaccaggttgaggcttcagttgggcactaccggcgacagtcgcagcacg

SEQ ID NO: 23084 - DNA, 658 bp, Emericella nidulans
acttcaaaaatggcgtcgaaacctatcaaacaggctcaggccgtgactgtcagcctgcaagagctgattgacggtccgtctacctccacacaccacaattttatacatctatgaatactgcggaggacaacgctaaaataagagccttccaggcaccgtttctttcgacactctcacggaagccttcggcccctcctcgctagggatcatcgttgtcaaagatctcgacccgaaattccagcatcttcgtgcgcaagttctctccaacgcgtcgtacgttgctgcgctcaaaaacgatgagctcggtactcaacactccactcaacctccttcatcaaccccgctaaattcttaatacgcagaatccctcacctccccctcggctaaatacctgatcggctggtcctgcggcaaagaaaccctgagatcagggcacttcgacacactcaagggttcctactacgtgaattgcgcgttctacaaggacccgtctttgcagggcgcgccgtctgacgaacaccccgatctccccgagtacacggcgccgaacatctggccggacgttcagaagttgccgaatttccgcagcggacttgaggaactgtgcaggttgatcattgatacggcggtgctggtggctagggcttgtgatcggtat

SEQ ID NO: 23085 - DNA, 500 bp, Emericella nidulans
ggtcaacaggcgttaactcacttgttgcaaccactgttggttttgacgggtcaccgggtcttgatcctagccgaacgctggctgatgaagaagcttgttcacggggccactggttcaagctggtgtggagggcgttgtcatcagtggctactaagacagatatattcgcttctttgacgccaatagcggtacgtctacctttttatttttcttgaagtgattaggctaataactaattatgtgcaggacaatgtacctacaccatgctagcacatccttctgccattgcttccctttctctttctccagatggccgcgagctagtgtctgcagggcacgacgccagcctgcggttttggaaccttgaaaagcgaagctgcacgcaagaaattacaagtcatcgactgatgcgtggtgaaggggtctgctctgtcgtctggagtcgcgatggccggtgggtcgttggcggcggcggcgatggagtagtcaaggtgttctcg

SEQ ID NO: 23086 - DNA, 578 bp, Emericella nidulans
gtcatgatggtctaggggacaatggtcgtcctgctcctctactacatccccgaccttttcatcaagatcttcttctgcaagcctatctccacgtactggtttggcgccgaggtcacgggtggaacgtgcctcgaccaacgcaaggtcattatcgccgactccaccatcagcatgataagcgacttctggatccttgttcttcctatcccaatgctatggtcgctgaaaatgagcctgagtaagaagttgcgagtcattgggatcttgggggctggtgggctggctacagggttcagtgtttggagactggccatgatgatcgatgagtcgcaaacgccggatacgacatggttctggattcactgtgttttgacagcgtatgttgcgtcaacttcaactcttactcaacaatccaagccgaccttacgagatggctgtgctaaccatcctatttctatagcaatgccgaagccggcattggactgatctgcgcctgtctccacaagtaaagctcctacatcgcgagacaaaagctcaagtcgcagagcggatccggaagctaccgaaacaactacgag

SEQ ID NO: 23087 - DNA, 550 bp, Emericella nidulans
tctgacttcagttggcaagagtagcccatcttaatgtctagtctcggccttcatttcggtatcatcaagccgtctgatataattctagtcgacgagacgggcatcgccgttggaggaaacaggacacggcctgccaacgcagctggatttctgattcattctgcgctccataaatctcgaccggacgttaatgctgcaagtcactttcattccacctacggcaaggcgtggtctacctttgtgcagccccttgaaatgctgaatcaagatgttgcaatattctacgtcaaggctcagagtgtgtataaagaatttggtggtgtcgtgctagaagaggacgaatcagcagctttagcaagtgctcttggtaaagaagggataggcatgattcttaagaaccatggactgcttactgtggggagcaccgtcgacgaggccgcgtatctgtttttgttgatgtggaaaagctgtcaaattcaactcgcggcagacgctgccgctgctgcaggccgtgagaaggtctacatctgcgacgaattcgctaggttca

SEQ ID NO: 23088 - DNA, 650 bp, Emericella nidulans
cccctcgtttggcttataactggaacatcctccggcttcggccacgaatttgtaacccagctgctatcccgcggcgataaggttatcgccacagcgcggattctgtctagaatctctgacctgaagcagctgggacctgatgtggtgaccttagagctggacgttacagcgtcgcagcgagagttgaatgacaaggctgcggaggcgattcaggtctttggcaaagtcgatgtgctcgtcaataacgcgggatttgttaagtttgggttcttagaggatctgaggttcgtctatgcgtcctatccttccttatatatgagagatgctaagcccagacagtgaagatgattatataaagcaattcaaaccaaacgtcttcggccccatcaacgtagcccgggcatttctgcctcactttcggtcccagaggagcggaactatcgtgaatatcggatcgatgtccgcgtgggagacgtatcccggagtggggccttactctgcctctaaggcagctttgcgttgtatgttttcatctctccagttcgtcattttttgtaatcattattaaggttagatacagatgccaccgaggccttgtcgcaagaacttggtccaaccgggataaaaaccctccttgtcgaaccaggcca

SEQ ID NO: 23089 - DNA, 850 bp, Emericella nidulans
aaagtgtcgcttgagcaattccgcgctaagctgaacgatgacacggcagtttggttgtacggtattattcgtggcgaagataaaagcgaagtcaaccccaggacgcaaataaagtccatgctttcagcaaaatcctttcggccgagtataaataccctcgatcaggcagataaatggctccatatttttgcggcagatatatatggtcgccttgtggaagaaggcgtccttgagcacaagcggcggccgaaaaccattgcgctgcaccaccggcaaggtgcgcaggttaaatcccggcaattgccaatccccgggtcagctactattgatgaagacttactctttgagcttgggaagacattgctccggcagattgctgcagatggggctgcatggccgtgtgcgaatatctcaatgagtgttggcggatttgaagacgggacgtctaagaatcaggcaattgatggctttttgctacgcggcgaccaggcgaggaacatggcgtcttcgtcgtcgagccgggttcatgtggcggatgaggtacccgcagaacaccaaccgattgaaaagcgaagaaaagtcgaagatagcgggttaagacgctttttcaacaagccatcagaaacggacgggccgggccactcttttgacaagggtcatatggcagacactcccgacatcaacgttgacaatgcacaacttgatgatcatgttgcgtctgacggcgagattgagcaggtacattcaaaatctttcagatgccctcgttgtggtaggtacataaattgtggtgaggaagacgaacacaatgattggcactttgcaaaggatctcgaaactcaggaaagac

SEQ ID NO: 23090 - DNA, 786 bp, Emericella nidulans
attcccggaaatgtctccagaccctccgactccggtagagtatcctgagagtccggtagttctggattttagaggtcaaactccagaggtttctcctgatcctccaactccgagagaggatctcgaaataccgatttcccgagaattaacagtatctcctgatccaccgactccggtagagtttcctgaaactccaattcttctagcattcgggaatcatactcctgaagtgtctcctgaccctccaacccctaaagaggatcctgaactaccggttcctggaaattcaacgatctctcctgatccttcaaccccgttagactctgctgagagtcgccctacagctgtagcttcgacatctcgttggtcaattgcccctccaccccctccaactccgtctcggccggcggttacccgacctaggagtcgtatagcttatggtaaatttgggaacctgacagttcccgatgcgtctttatctaactctggacccagagcatctaagcgtcggaggaaaagaggtcaagtggaggacggggagtatgtgaatgaggcaggagaggaagatgacttcagcgacgatgacaggaataattacggcggcggttatgatgcccaaaaaaggccctcaagaggctcaggcggcaggaaacgcaagtctccttcttcgtccaatgctctaactgcacaaaaaagggtgcttaggaaccgcactattggttctcaaatacagaggtaggcgcacctggattgggtgaaaagagagcagcaagtccatcagatgct

SEQ ID NO: 23091 - DNA, 850 bp, Emericella nidulans
aacagagagaatgaacagcacagtggaaacctacctccgcatgtatacctgctatgaccagaaggactagaacaggctacttccacttgcagagctggcaattaatggccgtacatcaacagcaacaggggtcagccccttctatctaagccatgggtacaacctcagcccatttacccctaccaaggaggtagagcatctagctgaagaaccaaccaagagtcctatccagaaaggggaagccatcgtacagaaagttaaggaagccctagactgggctcaagcctccatggcctattcccaacagaatacagagaatcaggctaataaacacaggagcccggccacaaactaccaagtaggaaataaggtctggctaagtctgaagaacatctgtatggaccgacccagtaagaaacttgactggaagaacgccaagtatgaggttataggcctggtgggcagtcatgctgtacggctgaatacgcccccagggatccatccagtcttccatgtggacctgcttcggctggcttcatcagatccacttccttcccagaagaatgatgatagccagccccctagcatcatggtgaacggtgaggaagaatacatggtagagaaaatcctggacgaacgtcgcaggagatacgggagaggtcaccggctggaatacctagtgaaatggtcaggctatgctcagccaacctgggaagctgccacagctttggaggaagtacaagctctagatgagtggctggattgtacaaaacaatatagacttcaggacggctcactaaacagagatgcatatataaaggctaaagcaacatgacctaccctgtgacct
